United States Patent Application Publication US 2021/0199660 A1 - sequence listing, part 20

SEQ ID NO: 276450 - DNA, 120 bp, Artificial Sequence
  ENSG00000128609_1 (sequence is synthesized)
atgttcttgaggaaatccctaaaaatgcagcatatagaaagtatacagaacagattacaaatgagaagctggctatggttaaagcggaaccagatgttaaaaaattagaagaccaacttc

SEQ ID NO: 276451 - DNA, 120 bp, Artificial Sequence
  ENSG00000128609_2 (sequence is synthesized)
aaggcggtcaattagaagaggtgattcttcaggctgaacatgaactaaatctggcaagaaaaatgagggaatggaaactatgggagccattagtggaagagcctcctgccgatcagtgga

SEQ ID NO: 276452 - DNA, 120 bp, Artificial Sequence
  ENSG00000128609_3 (sequence is synthesized)
aatggccaatataattattaagtgactttggtgtgttcatgggaaactgatgtaattaaatattctgttatattaagagcgtgttcttattactgacattttgtaatcaagaaaagtgat

SEQ ID NO: 276453 - DNA, 120 bp, Artificial Sequence
  ENSG00000128609_4 (sequence is synthesized)
atagaaaatatgtaggagactgttaaaattggtgattatggtaatatggtcatgtgaatcaatttttgatttataaagtactcacacaagttgtttcaaagatgatatttctgtgaacag

SEQ ID NO: 276454 - DNA, 120 bp, Artificial Sequence
  ENSG00000128609_5 (sequence is synthesized)
agaggccatgggaagatttgaaaattattaaagaaaaattcctacagattttcaatgcagagaccataatcaaaaagtaaactttctttagtagtatgttcaatacatcatttaattttt

SEQ ID NO: 276455 - DNA, 120 bp, Artificial Sequence
  ENSG00000128609_6 (sequence is synthesized)
taagttatcctgaagaaggaaaggtccttaattattatagtctaaacaaatttatagattactgtttgaagtaaataatacgagtgaatattttcaaatgtgataaaatagcacaagtgg

SEQ ID NO: 276456 - DNA, 120 bp, Artificial Sequence
  ENSG00000128609_7 (sequence is synthesized)
ctggtgataaaatttgaaattatggttaacctcagctgtgatcttatgtatgtaaagtgaaatttaaatagataattataggttgattacaaaatccatagtgtcattttattttagtca

SEQ ID NO: 276457 - DNA, 120 bp, Artificial Sequence
  ENSG00000128609_8 (sequence is synthesized)
accatttactctgttttcttatagtcttaattttattatattttgttgttactgtattatatttgaaaaccttcaaattagaatacattgtacagttaaagaaattgacttggtacttaa

SEQ ID NO: 276458 - DNA, 120 bp, Artificial Sequence
  ENSG00000128609_9 (sequence is synthesized)
cttggtacttaaaagaaagatttcccattgcatacaggttattggagaaattttccttttgttgcatttgtggaagttagttttctggcccgtggcctttaattttcttaatcaacctaa

SEQ ID NO: 276459 - DNA, 120 bp, Artificial Sequence
  ENSG00000128609_10 (sequence is synthesized)
ttacatcaggatagaggtagagtttctgtaaaagaagagacattaagagttcctgaaatttatatctggcatacggataggcttatattcaaaacatcttagtcatacgaccataaatta

SEQ ID NO: 276460 - DNA, 120 bp, Artificial Sequence
  ENSG00000128609_11 (sequence is synthesized)
aaagtggagtcactaaatagtttgcagtacgtttctaatataagtgtaggtgggtatcaaaacaagacaaatgctgttcagggaaagaagttggcaagcttaaggttaaacaaaaataaa

SEQ ID NO: 276461 - DNA, 120 bp, Artificial Sequence
  ENSG00000128609_12 (sequence is synthesized)
attacatgtgttttcgccttcctagctccctgtcattcctaaatacttggttaaatttaacgtggtatctctttccttcatagatagtactatactcttgtggggttttgtgtatacgtg

SEQ ID NO: 276462 - DNA, 120 bp, Artificial Sequence
  ENSG00000128609_13 (sequence is synthesized)
tgtgtgtgtgtgtgtgtgcacgcgcatgcgcacatttgctcagaatgagaaaaaaatggtatttttccttctttccagtatatttctcccctcatagagctgtaacatgaatactaaata

SEQ ID NO: 276463 - DNA, 120 bp, Artificial Sequence
  ENSG00000128609_14 (sequence is synthesized)
gagctgtaacatgaatactaaataaatattaaataaggtggattcttagaggttagagtgcaagaaggctccttctggtggggaagtgttagagggggagttagaagcccagggtttctc

SEQ ID NO: 276464 - DNA, 120 bp, Artificial Sequence
  ENSG00000128609_15 (sequence is synthesized)
attctcatggttctagtgttgttaactcaatgactacattgaggcaagtttggcctgtttctcagaatggcctatttctaatgctgcaaaagaaatagaatatgatttataacaacattt

SEQ ID NO: 276465 - DNA, 120 bp, Artificial Sequence
  ENSG00000128609_16 (sequence is synthesized)
tcagttctaaacatttcttgaatatataatatatttattaaaacatgatgctgaagtgtgtttgcatgggtactttcaaggtaattttctagccaaccattatttttcaggtcctttgga

SEQ ID NO: 276466 - DNA, 120 bp, Artificial Sequence
  ENSG00000128609_17 (sequence is synthesized)
caacacagaaacaaagatggcttgctgtgtttttgtcatattttcagtcccgtatctgccatgattcttgggcatcttttatgtttcaccaacagtgttactgaacttttttgctaaaag

SEQ ID NO: 276467 - DNA, 120 bp, Artificial Sequence
  ENSG00000128609_18 (sequence is synthesized)
gggaccttactggtgtttgcattagaaatgctagttgcagaataatagtcattgtaaaaataatattataacaataatagctaatgtttgttgagactttaatatgaatgtcaggcacta

SEQ ID NO: 276468 - DNA, 120 bp, Artificial Sequence
  ENSG00000128609_19 (sequence is synthesized)
tcataagtacctgactaatttcactcattaaacctgcactacaaccctaagagtgatactacaaattatcttcattttccagataagaaaccagaaccctacgtgagtagttttcccctg

SEQ ID NO: 276469 - DNA, 120 bp, Artificial Sequence
  ENSG00000128609_20 (sequence is synthesized)
caattatgcaacttggggccttggggacactgaaaccaagagatgatttaataacaaatccaaggtcacatagctagtaagatgtgaagctgaagtttgaacccaggcagtctggttcta

SEQ ID NO: 276470 - DNA, 120 bp, Artificial Sequence
  ENSG00000128609_21 (sequence is synthesized)
gaactgatgctcctgttatattattatttatgaatatgcttgggatgttgtgacttcttcctgtgctgtatgggctgtaccaaatgaaactagatcctgctctctttaccttttctgtca

SEQ ID NO: 276471 - DNA, 120 bp, Artificial Sequence
  ENSG00000128609_22 (sequence is synthesized)
gataggtatctaaaaggtattgcaatttggtcattggttctttctcctgtctcaattgctcacagaactttacacctgatcgtttttactccttcagtcttttcccagttgcttcctata

SEQ ID NO: 276472 - DNA, 120 bp, Artificial Sequence
  ENSG00000128609_23 (sequence is synthesized)
aacatccaggttaagtctcctgatcactttgcaaatgattcttttattcagagatcttcagtgttttgagtggctactaaactaattttaataattttcagaatggcctatttcagttct

SEQ ID NO: 276473 - DNA, 120 bp, Artificial Sequence
  ENSG00000128609_24 (sequence is synthesized)
cccatgggtttcattctagttaatcatcatactgcagatacttcaaaagaaagagaagctaatcaatttgagctttgctaagaaagaagaaatggcaacaaagttgatgccccctttctc

SEQ ID NO: 276474 - DNA, 120 bp, Artificial Sequence
  ENSG00000128609_25 (sequence is synthesized)
ccacactgggacttagtgcagacgattccaatttcttggcattctttcctttgggatgaaaatggcttatatttaggataactataggataatttatcattccacttggaatgattttga

SEQ ID NO: 276475 - DNA, 120 bp, Artificial Sequence
  ENSG00000128609_26 (sequence is synthesized)
gtgaaaataattacataaggataacagatgtacaccatgactgtcctgggcaaacaagatataggggggcaccctactggagtaaggctcaggtctcaaggttgccatctttcccacacc

SEQ ID NO: 276476 - DNA, 120 bp, Artificial Sequence
  ENSG00000128609_27 (sequence is synthesized)
agtaggatcaactagtctgtcattggaatagaatgaattgatgccagcagtagtagtcatcatgtgcaatcaggcctcaagttttattgtatcctttcactctccctcattctcccctcc

SEQ ID NO: 276477 - DNA, 120 bp, Artificial Sequence
  ENSG00000128609_28 (sequence is synthesized)
ccctccttttccctcagaattgggggatggaagaaaagagagcttatattttattgtcaattttctaatcacattcagaggagcgaagctaattaagccaataacaatgtttatgaatgt

SEQ ID NO: 276478 - DNA, 120 bp, Artificial Sequence
  ENSG00000128609_29 (sequence is synthesized)
atcttttttaaaagggagatgacaatatataggaaaattcccacatgtaggctaatagcagctttttctttttcctcccatcctctatgattatgtaaacatacagaagtctaacaccct

SEQ ID NO: 276479 - DNA, 120 bp, Artificial Sequence
  ENSG00000128609_30 (sequence is synthesized)
acacaagtgtattgtggggtatgggattaagtaccaaattgctgaacatatcactagtattttggatttgctgagtgcagtcttcccattaaaactaagtgttcagtagggaggcgtggt

SEQ ID NO: 276480 - DNA, 79 bp, Artificial Sequence
  ENSG00000128609_31 (sequence is synthesized)
tcttcccattaaaactaagtgttcagtagggaggcgtggtggctcacacctataatcccaaagttcgaggccagcctgg

SEQ ID NO: 276481 - DNA, 120 bp, Artificial Sequence
  ENSG00000128609_32 (sequence is synthesized)
aaaactaagtgttcagtgagattgtagcctatgctacaacaatagtaatgccaattgttttagagaaaagtaaatgagaggctaccagttgtgtttagaggaggtcgacgttttatttta

SEQ ID NO: 276482 - DNA, 120 bp, Artificial Sequence
  ENSG00000128609_33 (sequence is synthesized)
gacaaaattcacaggaaatcacagtgggaatgtgataaggggtttgaatgattgatggggacaggaagaattcatttgagagactagagatgagtcagtattctagatcgtgaagtaaaa

SEQ ID NO: 276483 - DNA, 120 bp, Artificial Sequence
  ENSG00000128609_34 (sequence is synthesized)
tagtgagtcatgtagtgacttagcatgggttatccttaaatcccagtgtcttaagtgtattttttattcatactgcatgtctaaggagggttggcaaggagtgctcatagacccacaagg

SEQ ID NO: 276484 - DNA, 120 bp, Artificial Sequence
  ENSG00000128609_35 (sequence is synthesized)
aatccaggctgagtgtggcaccatcaacatatatttccatgaccatagtggtggtggggaattggaacatggtaaattacacataggaataaaaaaaaagaaacaaccaaggttaaattt

SEQ ID NO: 276485 - DNA, 120 bp, Artificial Sequence
  ENSG00000128609_36 (sequence is synthesized)
ttttttgactgtgccacaaaatttatgaattgaacttgccatgcatcactaataattttcaaattggtctttaggtttacattagcagctaattttttgtggtacacttaaatgtaattt

SEQ ID NO: 276486 - DNA, 120 bp, Artificial Sequence
  ENSG00000128609_37 (sequence is synthesized)
atgattggcatctgtatataattaaatgaaaagcattgcaaagatttctattttggtatttctcatgatcttcaatttttttttaggtgaatctattaggttttctaaagataactattt

SEQ ID NO: 276487 - DNA, 120 bp, Artificial Sequence
  ENSG00000128609_38 (sequence is synthesized)
ttttttttttacaaaatattggcattttaatctctctataactggagggtgaattatttttcaccagagtaaaacaggtccaaagtcccttatctaaattcctaatttcaaaaatctctg

SEQ ID NO: 276488 - DNA, 120 bp, Artificial Sequence
  ENSG00000128609_39 (sequence is synthesized)
aaaacaaagttttttcataactcatttggcaacaaaccccacctgaattacatgaggctatttgtggtatttatcgcacttcaatgtgaatatgaatatattttgccacagatgtatcaa

SEQ ID NO: 276489 - DNA, 120 bp, Artificial Sequence
  ENSG00000128609_40 (sequence is synthesized)
tatatttgattctaaactgcttcctcagaccctcttaatgtgttacataatgtaaagtatatgcccatatttcctttcaaaaatctgaaaaattgtgaatatcaaacacatctgtcttaa

SEQ ID NO: 276490 - DNA, 120 bp, Artificial Sequence
  ENSG00000128609_41 (sequence is synthesized)
aaggtttcagaaaagggacaatagacctatatttccattctcttaacaagttcacaaagtggtattatgatccaaatttaatctaaataatttccaaaacaaaaattttcaggtccttag

SEQ ID NO: 276491 - DNA, 120 bp, Artificial Sequence
  ENSG00000128609_42 (sequence is synthesized)
ttttctaaattattttaatattaaaaatattcattattcattttaacctgtagtaacaacaggagatactttgaaatgcttgattttatcaagccactaggtggcatctttgtaaaaata

SEQ ID NO: 276492 - DNA, 120 bp, Artificial Sequence
  ENSG00000128609_43 (sequence is synthesized)
aaagcacatcaaaagaaatgtttattacataaataaatgctgagatgaataaaggtagatgtttcatgagaaatacgaagtcgtttggtggaataaatcctgagaaaatgcatagattta

SEQ ID NO: 276493 - DNA, 120 bp, Artificial Sequence
  ENSG00000128609_44 (sequence is synthesized)
tcatgaaaaggaaaatggaaaatggtattgtaaaattactctttcacttttggaattgagaagctttttcctattggttgttttcattaagtttgaatataaatttattatgtaaccaaa

SEQ ID NO: 276494 - DNA, 120 bp, Artificial Sequence
  ENSG00000128609_45 (sequence is synthesized)
tggagctaagctgtttccagggtgacagagtggcgacctcggtggtcgattgagcaggtctgagaattgttcccaaagggttgtgcgtcaccgagtcgttggcgctgtcatggcgggtgt

SEQ ID NO: 276495 - DNA, 120 bp, Artificial Sequence
  ENSG00000128609_46 (sequence is synthesized)
agcaaagatttgaaaagtggtgaagaaacaagtgatgcagataccctgggccatccagcaagataccctgaggcagtaacatatcacgtcttgtgttgaaaagcaaaatgaaccagatgt

SEQ ID NO: 276496 - DNA, 120 bp, Artificial Sequence
  ENSG00000128609_47 (sequence is synthesized)
ggcgctgtcatggcgggtgtgctgaagaagaccactggccttgtgggattggctgtgtgcaatactcctcacgagaaattcaaataagaaaaattaaaaaaaaaaatttgcagtgcttcg

SEQ ID NO: 276497 - DNA, 74 bp, Artificial Sequence
  ENSG00000128609_48 (sequence is synthesized)
caaataagaaaaattaaaaaaaaaaatttgcagtgcttcggacctcactttgaaaaatactgattcaggctggg

SEQ ID NO: 276498 - DNA, 120 bp, Artificial Sequence
  ENSG00000128609_49 (sequence is synthesized)
gttgtcttgtgtaacatttaaccaaaaaagtttagttccttattttttatatattcgacacacttttcttctattctccttccttgaatgctcttttcccatcattcctcccttttattc

SEQ ID NO: 276499 - DNA, 120 bp, Artificial Sequence
  ENSG00000128609_50 (sequence is synthesized)
agcaaactcttgtttattgagtgttttctatatgcaggcctctgttacatactggagtttgagactaggatcagatccttccttgaagtaacattgtagctgttccttttacctctcttc

SEQ ID NO: 276500 - DNA, 120 bp, Artificial Sequence
  ENSG00000128609_51 (sequence is synthesized)
agtaaaaagagtatgatgaaagaaaagttgtatttttaagtgtttttatataggaattttaaaatatataggatattgaaacattcagttagtatgcttctttaattttttttctccctg

SEQ ID NO: 276501 - DNA, 120 bp, Artificial Sequence
  ENSG00000128609_52 (sequence is synthesized)
gggctcggcggtgcttttcggggactcgttctgcatgccttaccgggtagggcaggttagtggttccgctccgagagtcaggaaaaaagctccaaacaagcgagactgagagaccagtag

SEQ ID NO: 276502 - DNA, 120 bp, Artificial Sequence
  ENSG00000128609_53 (sequence is synthesized)
gtgcgtcaccgagtcgttggcgctgtcatggcgggtgtgctgaagaagaccactggccttgtgggattggctgtgtgcaatactcctcacgaggtatgtacctttgttctttcttcgttc

SEQ ID NO: 276503 - DNA, 120 bp, Artificial Sequence
  ENSG00000128609_54 (sequence is synthesized)
ttgaattcccaaggaagactaaattcctgtcactttgcttattgcagggttaacgggatacagatgtttcaagcccttaattacaagccgcgtgagctcttgagacacgggcgctgtcca

SEQ ID NO: 276504 - DNA, 120 bp, Artificial Sequence
  ENSG00000128609_55 (sequence is synthesized)
cctacttcgttgatccgatgtcacatttttatttatttttgccatgacctctttattaagccagttttcttgttgactttttccttgacattttcatggcttcacttgtgcttgcttctg

SEQ ID NO: 276505 - DNA, 120 bp, Artificial Sequence
  ENSG00000128609_56 (sequence is synthesized)
tcagcgccatctcaaatttatatctccgttttccatcttttctccttgccttaccgtttctgcttaggtgcgttggattacatatatttaggcttactaaaggtactgcccccttttcct

SEQ ID NO: 276506 - DNA, 120 bp, Artificial Sequence
  ENSG00000128609_57 (sequence is synthesized)
tctgttaggtcttttccatctgtattcacgaatgttttcatcaaaaaaacccacaaaatttttttattcttcttgtcccttctataatcacaccatttctttgcttcactttacagataa

SEQ ID NO: 276507 - DNA, 120 bp, Artificial Sequence
  ENSG00000128609_58 (sequence is synthesized)
ctcaaaagagttatctctattttctccaatttctttcttattcacccttgaatgcactcagtcacccttggcgtttttcaagttcaccaattatctccatgctgccaaatccaatggtca

SEQ ID NO: 276508 - DNA, 120 bp, Artificial Sequence
  ENSG00000128609_59 (sequence is synthesized)
gctcatatttctcaccttcattgacctaatagcagcgttttttgacacatttgacactttttccatcacgctcttttcaagttcaccagttatctccatgttgccaaatccaatggtcag

SEQ ID NO: 276509 - DNA, 120 bp, Artificial Sequence
  ENSG00000128609_60 (sequence is synthesized)
cttatgtttctcaccttcattgacctaatagcagcgtttttttttttttgacacatttgacactttttccatcatgcgctttctttactgggcttcaggactcccccagtctcctgattt

SEQ ID NO: 276510 - DNA, 120 bp, Artificial Sequence
  ENSG00000128609_61 (sequence is synthesized)
tttccccctactctttggctttctctttttctggttatttctcttatgcccacttttaaaatttgagttagtcaggatttagttcttggaccttttcttttggacctgtactctgtcacc

SEQ ID NO: 276511 - DNA, 120 bp, Artificial Sequence
  ENSG00000128609_62 (sequence is synthesized)
aagagagagcaaatccaaatagagaacggttttaaataccacctatacactgacaacagatttccatgtaaagcactgacctcttcctttataaaagtcctgaatatttaattgcttagt

SEQ ID NO: 276512 - DNA, 120 bp, Artificial Sequence
  ENSG00000128609_63 (sequence is synthesized)
gggcatctctatttgtatgtgtcagacaggcaacccaaacttaacatgtccaaaatggggttcctgatcttctgcctaaaacctgctcttctctcagtcttgctcatctcaattaatggc

SEQ ID NO: 276513 - DNA, 120 bp, Artificial Sequence
  ENSG00000128609_64 (sequence is synthesized)
ttgattccttcctttctcttacactccacatttgttatttcagtaaaccctctaggttccaccttcaaaatatatcttgattttgacaacatctcactacctcctctgctactaccctct

SEQ ID NO: 276514 - DNA, 120 bp, Artificial Sequence
  ENSG00000128609_65 (sequence is synthesized)
tcctcagtcaccatcatcactgatgtggataattgcattcacttcttaactgcctctcaatgcttgtcacagcctccatttggtctttttttccagccaggctactagagttagtctgtt

SEQ ID NO: 276515 - DNA, 120 bp, Artificial Sequence
  ENSG00000128609_66 (sequence is synthesized)
aaaatatgaggtaggtcagatctctcctttccttaaaactaatggctttccatttcactctaaataaagacaagtttcttactgtgaccctctggttcactattctactgatttattttg

SEQ ID NO: 276516 - DNA, 120 bp, Artificial Sequence
  ENSG00000128609_67 (sequence is synthesized)
ttatgtctctactagaatgtaggtttcatgaaggcagggatttgtaattgtttcactgctagaactctgtcacatagtatgtgctcagtaaatagtgttagttgaatgagtgtcttgcac

SEQ ID NO: 276517 - DNA, 120 bp, Artificial Sequence
  ENSG00000128609_68 (sequence is synthesized)
ttcctatgatttcataataactttattgtcattgatgtaaagaactgaactcatggtttttcccttctaaatatatttcttcctctgtgggctgtatttttcttgatagtttcagatctt

SEQ ID NO: 276518 - DNA, 120 bp, Artificial Sequence
  ENSG00000128609_69 (sequence is synthesized)
tctactccctaggctgggaatttggacatcatagttggtatttctcttatacttgtactctcatattcattccaatgatgatttttatttttattttttttgctgatccttttctataac

SEQ ID NO: 276519 - DNA, 120 bp, Artificial Sequence
  ENSG00000128609_70 (sequence is synthesized)
agctctccagtctgacttctgtttactatttctattgttactaccatagttcaggtccttgttcttgtttagagaattgcaacaacctccttactggcctttctgccttgtttctccttc

SEQ ID NO: 276520 - DNA, 120 bp, Artificial Sequence
  ENSG00000128609_71 (sequence is synthesized)
agtccttttaactcactacaatgaagctaattttcctaatctaatcatatgattttcctaaatcttttaattgtccacagaataaagcccgaatgctttaacttggaatgcagaaccact

SEQ ID NO: 276521 - DNA, 120 bp, Artificial Sequence
  ENSG00000128609_72 (sequence is synthesized)
tataatgtgacattttctctaactttatctcctatgcatttccttatgtgtcctgtacagcagtatattccaaaatccccagtggatgtctgaaaaccacatatagtaccaaactgtata

SEQ ID NO: 276522 - DNA, 120 bp, Artificial Sequence
  ENSG00000128609_73 (sequence is synthesized)
ccaaactgtatatatgctatgttttgtttcatacatacctataataaagtttaatttatgaattaggcacaataagagataagcaggctggacgtgctggctcacgcctgtaatcccagc

SEQ ID NO: 276523 - DNA, 64 bp, Artificial Sequence
  ENSG00000128609_74 (sequence is synthesized)
agcgtggaaattaatcaggtgtggtggtgtgcacctagtcccagctactcgggaggcagaggca

SEQ ID NO: 276524 - DNA, 81 bp, Artificial Sequence
  ENSG00000128609_75 (sequence is synthesized)
ctactcgggaggcagaggcagctgtgatgatgccattacactctagcctgggtgatggagtgagaccctgtctcaaaaaag

SEQ ID NO: 276525 - DNA, 120 bp, Artificial Sequence
  ENSG00000128609_76 (sequence is synthesized)
aagaaggtgagacgaatggaggtcactgttggaatttagactgtgggggtagactcagtccgatagccctacttcccgcgggtgttgacccctactgtcgcgggctcggcggtgcttttc

SEQ ID NO: 276526 - DNA, 120 bp, Artificial Sequence
  ENSG00000128610_0 (sequence is synthesized)
agtttaccttctcctcttggaagttaacgattggcgagatcttggctgcgttattgacacaacactttctattgatagaaataagtagtgattgtccccgagtcattggtgcgccaagaa

SEQ ID NO: 276527 - DNA, 120 bp, Artificial Sequence
  ENSG00000128610_1 (sequence is synthesized)
ctctgcgatgggctggcaggagtccattgggctgggcaggcaggttcggctggtgatgctggggaggaggaggaggaggaggctactggtggtgatggtgcccgtccccctctccgcagg

SEQ ID NO: 276528 - DNA, 120 bp, Artificial Sequence
  ENSG00000128610_2 (sequence is synthesized)
tctgtgacaagcagggaacaaggcaacggacggcgcaacccagccccggctgacggacgctggcgactcagacatggacagtagctgccacaacgcgactaccaaaatgttagcgactgc

SEQ ID NO: 276529 - DNA, 120 bp, Artificial Sequence
  ENSG00000128610_3 (sequence is synthesized)
tccagctcggggcaacatgatgagcacgtccaaacccttggctttctccattgaacgaatcatggcgcgcaccccagagcccaaggccctgccagtcccccacttcctgcagggagcctt

SEQ ID NO: 276530 - DNA, 120 bp, Artificial Sequence
  ENSG00000128610_4 (sequence is synthesized)
acccaagggggaacccaagcactctctgcatctcaactcgtcgatcccctgcatgatccccttcgtgcctgtggcctacgacacgagccccaaggcaggagtgacgggctccgagccgcg

SEQ ID NO: 276531 - DNA, 120 bp, Artificial Sequence
  ENSG00000128610_5 (sequence is synthesized)
gaaggccagtctggaggccccggcggcgcccgcggcggtgccctcggctcccgcattcagctgcagcgacctgctcaactgcgcactgagtctcaagggcgacctggcccgcgacgcgct

SEQ ID NO: 276532 - DNA, 120 bp, Artificial Sequence
  ENSG00000128610_6 (sequence is synthesized)
gccgctgcagcagtacaagctggtaaggccgcgtgtggtcaaccactcttcattccacgccatgggcgccttgtgctacctgaaccgaggtgacggcccatgccacccggcagccggcgt

SEQ ID NO: 276533 - DNA, 120 bp, Artificial Sequence
  ENSG00000128610_7 (sequence is synthesized)
gaacatccacccggtggcctcctacttcctcagttcccctttgcacccgcagccaaaaacgtatttagccgaaaggaataaactggtggtcccggcggtggagaaatacccttctggagt

SEQ ID NO: 276534 - DNA, 120 bp, Artificial Sequence
  ENSG00000128610_8 (sequence is synthesized)
agctttcaaagacctgtcccaggctcagctgcagcattacatgaaagaaagcgcccagcttctgtcggaaaaaatcgcgttcaaaacctcggatttcagccgaggctctcctaatgccaa

SEQ ID NO: 276535 - DNA, 120 bp, Artificial Sequence
  ENSG00000128610_9 (sequence is synthesized)
gcccaaagttttcacttgcgaagtgtgtggaaaggtctttaatgcgcactataacttaacccgtcacatgccagtgcacacaggagccagacccttcgtttgcaaagtgtgcggaaaagg

SEQ ID NO: 276536 - DNA, 120 bp, Artificial Sequence
  ENSG00000128610_10 (sequence is synthesized)
tcattcacacgcaggaaaaacctcacaaatgtaaccagtgtggcaaagcatttaatagaagttccactttaaacactcatacccgaatacacgcgggctacaaaccgtttgtgtgtgaat

SEQ ID NO: 276537 - DNA, 120 bp, Artificial Sequence
  ENSG00000128610_11 (sequence is synthesized)
tctgtggcaaagggtttcatcaaaaagggaattacaaaaaccacaagttgacccacagcggggagaagcagttcaagtgcaatatctgcaacaaggctttccaccaggtttacaacctca

SEQ ID NO: 276538 - DNA, 120 bp, Artificial Sequence
  ENSG00000128610_12 (sequence is synthesized)
ccttccacatgcacacccacaacgacaagaagcctttcacctgccccacgtgcggcaagggtttctgcaggaactttgacctcaagaagcatgtccgcaagctgcacgacagcagcctgg

SEQ ID NO: 276539 - DNA, 120 bp, Artificial Sequence
  ENSG00000128610_13 (sequence is synthesized)
ggctggcccgcacgccagctggcgaaccaggcactgaaccgccgcccccgctaccgcagcagccgccgatgacgctgcctcctctgcagccgccgctgccaaccccggggcccctgcagc

SEQ ID NO: 276540 - DNA, 120 bp, Artificial Sequence
  ENSG00000128610_14 (sequence is synthesized)
ccgggctccaccagggccaccagtgatcgaggctaagggtcctcccagcctcagccgtgcccccacgctgaggcagcggcagactagagctcctggtccgagttcgtctgcagaccccag

SEQ ID NO: 276541 - DNA, 120 bp, Artificial Sequence
  ENSG00000128610_15 (sequence is synthesized)
ggcatgttgggccccacacttcagggccgaccagaagcctctgcatcccctggcctttcgcctcttgcatgcacctgctaaatggttttgtgtattatattctatataggcactaacaat

SEQ ID NO: 276542 - DNA, 120 bp, Artificial Sequence
  ENSG00000128610_16 (sequence is synthesized)
tttctgtttttctttttctttttttttaatttggaaagacttttcatcttgggtggagagatggtgtttattttgttttgttttgtttaaacaaatttctgctatatttattgagatctg

SEQ ID NO: 276543 - DNA, 120 bp, Artificial Sequence
  ENSG00000128610_17 (sequence is synthesized)
aaatttctgctatatttattgagatctgtattattctacccgggaatgctgcatcattttaattttattattgtatatatttccattgtgttgattctccggtctcaagatgtctgctgg

SEQ ID NO: 276544 - DNA, 120 bp, Artificial Sequence
  ENSG00000128610_18 (sequence is synthesized)
atgttgatcatttcctctttccctgaagtaacaaaacactgtgtgtatgtcatatatacacgcatagatgtgtgcgcccataggggtacattccacattcgtgagcacacacccatacac

SEQ ID NO: 276545 - DNA, 120 bp, Artificial Sequence
  ENSG00000128610_19 (sequence is synthesized)
attagataagggtggttcattatggatgattttgaattttggttttgattattgcacgtgaaaattgattcattgactgttggaaataaatacttggaacatgcttatttaatcaacaaa

SEQ ID NO: 276546 - DNA, 120 bp, Artificial Sequence
  ENSG00000128610_20 (sequence is synthesized)
gcccgaggtcggcgggacctgatcgaaggcagcgccgcgtcgaccaccccgggagccggacgcttgggagccccagcccggcagcggcgcccggtcactgaagttgcgccccaactccca

SEQ ID NO: 276547 - DNA, 120 bp, Artificial Sequence
  ENSG00000128610_21 (sequence is synthesized)
gccgcctccaagcttctcgagctaagtttcctgacccctccaagggagtctcacagagctcggtggccctcggccttgccaacgtcactttaactgtttggaactcgtgagcaagaaccg

SEQ ID NO: 276548 - DNA, 120 bp, Artificial Sequence
  ENSG00000128610_22 (sequence is synthesized)
atcctgaatgaggcggggctcctctgccccaactccagcagcgggaacttggttcccctgggcagccgggggcagggggcgccaaggccgtggcgataatgaaggctgagacggccaagg

SEQ ID NO: 276549 - DNA, 120 bp, Artificial Sequence
  ENSG00000128617_0 (sequence is synthesized)
atgagaaaaatgtcggaggaagagttttatctgttcaaaaatatctcttcagtggggccgtgggatgggcctcagtaccacattgcccctgtctgggccttctacctccaggcagctttc

SEQ ID NO: 276550 - DNA, 120 bp, Artificial Sequence
  ENSG00000128617_1 (sequence is synthesized)
atgggcactgtcttccttatagggttcccactcaatgccatggtgctggtggccacactgcgctacaaaaagttgcggcagcccctcaactacattctggtcaacgtgtccttcggaggc

SEQ ID NO: 276551 - DNA, 120 bp, Artificial Sequence
  ENSG00000128617_2 (sequence is synthesized)
ttcctcctctgcatcttctctgtcttccctgtcttcgtcgccagctgtaacggatacttcgtcttcggtcgccatgtttgtgctttggagggcttcctgggcactgtagcaggtctggtt

SEQ ID NO: 276552 - DNA, 120 bp, Artificial Sequence
  ENSG00000128617_3 (sequence is synthesized)
acaggatggtcactggccttcctggcctttgagcgctacattgtcatctgtaagcccttcggcaacttccgcttcagctccaagcatgcactgacggtggtcctggctacctggaccatt

SEQ ID NO: 276553 - DNA, 120 bp, Artificial Sequence
  ENSG00000128617_4 (sequence is synthesized)
tcccacccttctttggctggagccggttcatccctgagggcctgcagtgttcctgtggccctgactggtacaccgtgggcaccaaataccgcagcgagtcctatacgtggttcctcttca

SEQ ID NO: 276554 - DNA, 120 bp, Artificial Sequence
  ENSG00000128617_5 (sequence is synthesized)
tcttctgcttcattgtgcctctctccctcatctgcttctcctacactcagctgctgagggccctgaaagctgttgcagctcagcagcaggagtcagctacgacccagaaggctgaacggg

SEQ ID NO: 276555 - DNA, 120 bp, Artificial Sequence
  ENSG00000128617_6 (sequence is synthesized)
aggtgagccgcatggtggttgtgatggtaggatccttctgtgtctgctacgtgccctacgcggccttcgccatgtacatggtcaacaaccgtaaccatgggctggacttacggcttgtca

SEQ ID NO: 276556 - DNA, 120 bp, Artificial Sequence
  ENSG00000128617_7 (sequence is synthesized)
ccattccttcattcttctccaagagtgcttgcatctacaatcccatcatctactgcttcatgaataagcagttccaagcttgcatcatgaagatggtgtgtgggaaggccatgacagatg

SEQ ID NO: 276557 - DNA, 120 bp, Artificial Sequence
  ENSG00000128617_8 (sequence is synthesized)
aatccgacacatgcagctcccagaaaacagaagtttctactgtctcgtctacccaagttggccccaactgaggacccaatattggcctgtttgcaacagctagaattaaattttactttt

SEQ ID NO: 276558 - DNA, 120 bp, Artificial Sequence
  ENSG00000128626_0 (sequence is synthesized)
gaaccgctctatgtccagctgagggagtgcgctgtagccctcgcgcgcatactcgtacaggaggttccggtttcgtttctctgtagtgaaacttctccttggactatcgttggagatgca

SEQ ID NO: 276559 - DNA, 120 bp, Artificial Sequence
  ENSG00000128626_1 (sequence is synthesized)
gcctccccggggccggaacccccgacgagtcagcaaaggccacaagcgccgcgccatggacgcagccatcttggaccgggaacaaggcggcacttcgtcccgcccactccgcgtttagac

SEQ ID NO: 276560 - DNA, 120 bp, Artificial Sequence
  ENSG00000128626_2 (sequence is synthesized)
caattgcaaggcagcgaacctgaccgtgacgagccaatcagatcctgaggaaagttgaccgcgatagagtccttcgtcgcccaatcgtcgtctgtgtcccgcctcttcagtgacgcgagg

SEQ ID NO: 276561 - DNA, 120 bp, Artificial Sequence
  ENSG00000128626_3 (sequence is synthesized)
cagaaccagccaatccctgcacggatagcgcccggaagaggctagaagctggattcagcgtgtccgcgacctcacctttaggtcctgtgagggacggcccaggtggcaggatgtcctggt

SEQ ID NO: 276562 - DNA, 120 bp, Artificial Sequence
  ENSG00000128626_4 (sequence is synthesized)
ctggccttctccatggcctcaacacgtccctaacttgtggcccagctctggttccccggctctgggctacctgctccatggctaccctgaaccagatgcaccgcctggggccccccaagc

SEQ ID NO: 276563 - DNA, 120 bp, Artificial Sequence
  ENSG00000128626_5 (sequence is synthesized)
tcggaagctgggccccacggaaggccggccgcagctgaagggtgtggtcctgtgcacgtttacccgcaagccgaagaagcccaactcagccaatcgcaagtgctgtcgagtgcggctcag

SEQ ID NO: 276564 - DNA, 120 bp, Artificial Sequence
  ENSG00000128626_6 (sequence is synthesized)
cactggccgcgaggccgtctgcttcatccctggggagggccacaccctgcaggagcaccagattgtccttgtggagggcggccgcacccaggacctgccaggcgtcaagctcaccgttgt

SEQ ID NO: 276565 - DNA, 120 bp, Artificial Sequence
  ENSG00000128626_7 (sequence is synthesized)
gcgtggcaagtacgactgtggccacgtgcagaagaagtgacggctgggggcacagtgggctgggcgcccctgcagaacatgaaccttccgctcctggctgccacagggtcctccgatgct

SEQ ID NO: 276566 - DNA, 120 bp, Artificial Sequence
  ENSG00000128626_8 (sequence is synthesized)
ggcctttgcgcctctagaggcagccactcatggattcaagtcctggctccgcctcttccatcaggaccactattaagccataggagtcctgggggtgcaaagggtgcccctctgtcaaca

SEQ ID NO: 276567 - DNA, 120 bp, Artificial Sequence
  ENSG00000128626_9 (sequence is synthesized)
cccttggctcctgtgtttagaggggtggcctgaaggaccttttctgctgggacaagacactgtactgccctctgctgggaaggggttttaataaacagaccctggcgcttgtgatgtaaa

SEQ ID NO: 276568 - DNA, 120 bp, Artificial Sequence
  ENSG00000128626_10 (sequence is synthesized)
gtcggtggaatcctggggtcctccaaatctaccaggccatctccccagtttcccagttcttcctgcgtgcgggcgagagtggttgggccctcgggaacccactcagagcgaggctaaatt

SEQ ID NO: 276569 - DNA, 120 bp, Artificial Sequence
  ENSG00000128626_11 (sequence is synthesized)
tctgtgtggctgtggcagtggacatctctgagcttcagtttcctccagaaaatagctccattggtggtatctcctttgtttggtttggtgaagattaaattcgatgctctatgtgcataa

SEQ ID NO: 276570 - DNA, 120 bp, Artificial Sequence
  ENSG00000128626_12 (sequence is synthesized)
gtggtaagtgggggacttgggcttcagggacgaggctagagggggagggttattcgctcttggacttgtgtgcctccgtcggagccccgagggaaacgggggtggaaaaacacggtgggg

SEQ ID NO: 276571 - DNA, 120 bp, Artificial Sequence
  ENSG00000128626_13 (sequence is synthesized)
agctgcatggagggctactgcgtgtcaagcggcgtttgggtcagttttattatttatttatttaagatctccctctgtcgcccaggctgaagtgcagcggtgtgatcacagctcactgca

SEQ ID NO: 276572 - DNA, 120 bp, Artificial Sequence
  ENSG00000128626_14 (sequence is synthesized)
cagcctcccaagtagctgggaccacaggcctgcagaaccacaaccagctaactttttgattctttgtagagagggaggtctccctgtgtcgcccagtctggccttaactcctgagctcaa

SEQ ID NO: 276573 - DNA, 120 bp, Artificial Sequence
  ENSG00000128626_15 (sequence is synthesized)
tgtgtcgcccagtctggccttaactcctgagctcaagtgaccctccacagcctccaaaagtgctaggattacatgcatgagccactgagcctactattattttaaacagcattaaaaata

SEQ ID NO: 276574 - DNA, 80 bp, Artificial Sequence
  ENSG00000128641_0 (sequence is synthesized)
cccctcggccggcccctccgccagcgggcgagaggggagtggccgggctcctcccgccgccgctgagcactccgcagctg

SEQ ID NO: 276575 - DNA, 120 bp, Artificial Sequence
  ENSG00000128641_1 (sequence is synthesized)
ccgccgctgagcactccgcagctgggtgcgcacgggagcctcaaccgcggcgcgtggaggcagtaccagagcgcgcggcgcgcagtcggccggcagccgcgggacagccttggcagaaca

SEQ ID NO: 276576 - DNA, 120 bp, Artificial Sequence
  ENSG00000128641_2 (sequence is synthesized)
gggagccccgcagccccgggctgggcccgcgtcccggagcgccaccggagagcgaggacgacgtggaggcggagtggcgcccggcgaggtagcgccaggcgagctggagaccatggccaa

SEQ ID NO: 276577 - DNA, 120 bp, Artificial Sequence
  ENSG00000128641_3 (sequence is synthesized)
atggccaaaatggaggtgaaaacctcacttctggacaatatgattggagttggggatatggttcttttagaacctctcaatgaggagaccttcatcaacaacctcaagaagcgctttgac

SEQ ID NO: 276578 - DNA, 120 bp, Artificial Sequence
  ENSG00000128641_4 (sequence is synthesized)
cacagtgaaatatacacatacattggaagtgtggttatatctgttaacccataccggtctttacccatttattcaccagagaaagtggaagaatacaggaacagaaatttttatgaactg

SEQ ID NO: 276579 - DNA, 120 bp, Artificial Sequence
  ENSG00000128641_5 (sequence is synthesized)
agccctcacatctttgccctttcggatgaagcatacagatccctacgagatcaagataaggaccaatgtattctcattactggggaaagtggagcaggaaaaacagaggccagtaagctt

SEQ ID NO: 276580 - DNA, 120 bp, Artificial Sequence
  ENSG00000128641_6 (sequence is synthesized)
gtcatgtcctatgtggcagctgtttgtggaaaaggagcagaagttaatcaagttaaagaacagcttttacagtccaacccggtcctggaagcttttggaaatgccaaaactgtaaggaat

SEQ ID NO: 276581 - DNA, 120 bp, Artificial Sequence
  ENSG00000128641_7 (sequence is synthesized)
gacaactcctctagatttggcaaatatatggatattgaatttgactttaaaggcgatccactaggaggagtaataagtaactatcttttagagaaatctcgggttgttaaacagccaaga

SEQ ID NO: 276582 - DNA, 120 bp, Artificial Sequence
  ENSG00000128641_8 (sequence is synthesized)
ggtgaaagaaacttccatgtgttctatcagctgctctctggtgcctctgaagagctcctcaataaacttaagcttgagagggatttcagcaggtataactacctgagtctggattcggcc

SEQ ID NO: 276583 - DNA, 120 bp, Artificial Sequence
  ENSG00000128641_9 (sequence is synthesized)
aaagtgaatggagtggatgatgcagcaaattttagaaccgtgcggaatgccatgcagattgtgggctttatggatcatgaagctgagtctgtcttggcggtggtggcagcagtgttgaaa

SEQ ID NO: 276584 - DNA, 120 bp, Artificial Sequence
  ENSG00000128641_10 (sequence is synthesized)
ctggggaacattgagttcaagcccgaatctcgagtgaatggtctagatgaaagcaaaatcaaagataaaaatgagttaaaagaaatttgtgaattgaccggcattgatcaatcagttcta

SEQ ID NO: 276585 - DNA, 120 bp, Artificial Sequence
  ENSG00000128641_11 (sequence is synthesized)
gaacgagcattcagtttccgaacagttgaggccaaacaggagaaagtttcaactacactgaatgtggctcaggcttattatgcccgtgatgctctggctaaaaacctctacagcaggttg

SEQ ID NO: 276586 - DNA, 120 bp, Artificial Sequence
  ENSG00000128641_12 (sequence is synthesized)
ttttcatggttggtaaatcgaatcaatgaaagcattaaggcacaaacaaaagtgagaaagaaggtcatgggtgttctggacatttatggctttgagattttcgaggacaacagctttgag

SEQ ID NO: 276587 - DNA, 120 bp, Artificial Sequence
  ENSG00000128641_13 (sequence is synthesized)
cagttcattattaattattgtaacgaaaagctgcaacaaatcttcattgaacttactcttaaagaagagcaggaggagtatatacgggaggatatagaatggactcacattgactacttc

SEQ ID NO: 276588 - DNA, 120 bp, Artificial Sequence
  ENSG00000128641_14 (sequence is synthesized)
aataatgctatcatttgtgacctaatagaaaataacacaaatggaatcctggccatgctggatgaagagtgcctcagacctggcacagtcactgatgagaccttcttagaaaagctgaac

SEQ ID NO: 276589 - DNA, 120 bp, Artificial Sequence
  ENSG00000128641_15 (sequence is synthesized)
caagtatgtgccacccaccagcattttgagagcaggatgagcaagtgctctcggttcctcaatgacacgtctctgcctcacagctgcttcaggatccagcattatgctggaaaggtgctg

SEQ ID NO: 276590 - DNA, 120 bp, Artificial Sequence
  ENSG00000128641_16 (sequence is synthesized)
taccaggtggaaggattcgttgacaaaaacaatgaccttctctatcgagacctgtcccaagccatgtggaaggccagccatgccctcatcaagtctttgttccccgaagggaatcccgcc

SEQ ID NO: 276591 - DNA, 120 bp, Artificial Sequence
  ENSG00000128641_17 (sequence is synthesized)
aagatcaacctgaaaaggcctcctacagcaggctcacagttcaaggcatccgtggccactctgatgaaaaacctacagaccaagaacccaaactatattaggtgtatcaaaccgaatgat

SEQ ID NO: 276592 - DNA, 120 bp, Artificial Sequence
  ENSG00000128641_18 (sequence is synthesized)
aaaaaagcagcacacatcttcaacgaggctctagtgtgtcatcagatcaggtacctggggcttttggagaacgtccgagtgcggagggcaggctacgccttcaggcaggcctatgaacct

SEQ ID NO: 276593 - DNA, 120 bp, Artificial Sequence
  ENSG00000128641_19 (sequence is synthesized)
tgcctagaaagatacaaaatgctttgtaaacaaacatggcctcattggaaaggaccagccaggtctggtgtggaggtcctatttaatgaattagaaattcccgtggaagaatactccttt

SEQ ID NO: 276594 - DNA, 120 bp, Artificial Sequence
  ENSG00000128641_20 (sequence is synthesized)
gggggtggaaatgccgcacacacttcctgctaatgaaaaaaagccaaattgtgattgccgcctggtacaggagatatgcgcaacaaaagaggtaccagcagacaaagagttccgccttag

SEQ ID NO: 276595 - DNA, 120 bp, Artificial Sequence
  ENSG00000128641_21 (sequence is synthesized)
taattcagtcttatatccggggttggaaggctcgaaaaattctgcgggaactgaagcatcaaaagcgctgtaaggaagcagtcacgaccattgctgcatattggcatgggacccaggtac

SEQ ID NO: 276596 - DNA, 120 bp, Artificial Sequence
  ENSG00000128641_22 (sequence is synthesized)
gtagagaatacaggaaattcttcagagccaatgctggaaagaaaatctatgagtttacgcttcagagaattgtgcaaaaatacttcttggaaatgaaaaataagatgccttccttatctc

SEQ ID NO: 276597 - DNA, 120 bp, Artificial Sequence
  ENSG00000128641_23 (sequence is synthesized)
caatagacaagaattggccctcaagaccttacttattcttggattctactcacaaggagctaaaaaggattttccacttgtggaggtgtaaaaaatacagggaccaattcacagaccagc

SEQ ID NO: 276598 - DNA, 120 bp, Artificial Sequence
  ENSG00000128641_24 (sequence is synthesized)
agaaacttatttatgaagagaaactagaagccagtgaactcttcaaagacaagaaggctttatacccatctagtgttgggcaaccattccaaggggcttacctggaaatcaacaagaacc

SEQ ID NO: 276599 - DNA, 120 bp, Artificial Sequence
  ENSG00000128641_25 (sequence is synthesized)
ccaagtataagaaactcaaagatgccattgaagaaaagatcatcattgctgaagtcgtgaacaaaattaaccgtgctaatgggaagagtacatctcggattttcctcttaacaaacaata

SEQ ID NO: 276600 - DNA, 120 bp, Artificial Sequence
  ENSG00000128641_26 (sequence is synthesized)
atctccttcttgctgaccaaaagtctggacaaatcaagtcagaggttccattggtggatgtgaccaaggtatcaatgagctcacaaaatgatggcttcttcgccgtccacctcaaagagg

SEQ ID NO: 276601 - DNA, 120 bp, Artificial Sequence
  ENSG00000128641_27 (sequence is synthesized)
gctcagaagcagctagtaaaggagactttctcttcagcagtgatcacctgattgaaatggccaccaagctctatcgcacaactctcagccaaaccaaacagaagctcaatattgagattt

SEQ ID NO: 276602 - DNA, 120 bp, Artificial Sequence
  ENSG00000128641_28 (sequence is synthesized)
ccgatgagttcctggtacagttcagacaggacaaagtatgtgtgaagtttattcagggaaaccagaaaaatgggagtgtcccaacatgtaaacgaaaaaacaaccgtctccttgaagttg

SEQ ID NO: 276603 - DNA, 120 bp, Artificial Sequence
  ENSG00000128641_29 (sequence is synthesized)
ctgtcccttaactggcgcctcctctctactttcatggacttgttcctttgtaatagtgcaatttggttttgttttatttggggttcattgtatgtttgggaatcaccaaaggcttttaga

SEQ ID NO: 276604 - DNA, 120 bp, Artificial Sequence
  ENSG00000128641_30 (sequence is synthesized)
gttctttggcaaaataaaaatatttgactaatcaatttttattattggaatagttttaacctttcaaatacatgttctgtcctggagcaggattgtagaaactaacagtgtctattttca

SEQ ID NO: 276605 - DNA, 120 bp, Artificial Sequence
  ENSG00000128641_31 (sequence is synthesized)
tgtctgatgtgttcttcctttagtcatcatgttaggtctgtgtaccctaaatcagcatattactcataaatcattaattaatataagcataggaaatggtcttaaaagatactgcattca

SEQ ID NO: 276606 - DNA, 120 bp, Artificial Sequence
  ENSG00000128641_32 (sequence is synthesized)
ttcatcagatatttattccatgcctactctatgctaggcactgtgctagatggtatgaaaacttattaggaacctttttgtttttgagaccattgcattctggctggtttgtgctggttt

SEQ ID NO: 276607 - DNA, 120 bp, Artificial Sequence
  ENSG00000128641_33 (sequence is synthesized)
aacgacatctaagaaggtttagaaatggtgagaccaaaacaataactgttaatgatggacagcattattaggaaccctgtagtatgatatttaacaatataggcttcaagaagggctggt

SEQ ID NO: 276608 - DNA, 120 bp, Artificial Sequence
  ENSG00000128641_34 (sequence is synthesized)
cctaagagggggcagaaatgaatgaccaggttaaatccctctacatgtggtttctgtttgaaaaaaagaaaactgacatttgaacaggacttttaatttgtttaaaactctggtaattac

SEQ ID NO: 276609 - DNA, 120 bp, Artificial Sequence
  ENSG00000128641_35 (sequence is synthesized)
ttgtaacagtagaaaatagaagtcattcttattttagaaaaagtgacagaagcagtccagtaagattatatgtttctgtttctggtaaataccatatatgatcctcgaaatgataatatc

SEQ ID NO: 276610 - DNA, 120 bp, Artificial Sequence
  ENSG00000128641_36 (sequence is synthesized)
tccagaatattgttttcacccaaatttgagtagatattttaaacacctaacaaagtaaagggctaaaagccattcagatagcagtaaaacattctgtatgatgtgcaataaaacatccaa

SEQ ID NO: 276611 - DNA, 120 bp, Artificial Sequence
  ENSG00000128641_37 (sequence is synthesized)
gatcttttttgaaagttttatttataatatacatttttgtatgagaaaggtgattggtacagggtgcctattttagtcatggatcaaaatttgtgtaacttgcagggctttctttctttt

SEQ ID NO: 276612 - DNA, 120 bp, Artificial Sequence
  ENSG00000128641_38 (sequence is synthesized)
tcttcaaatttacaagggttcattttggaaactacattttaaactttggaatcaaattgtttcttatttgggaggataatgtatatacattggtattatgttaaataataaaattgttct

SEQ ID NO: 276613 - DNA, 120 bp, Artificial Sequence
  ENSG00000128641_39 (sequence is synthesized)
aatttggtgccatttcctgaatcacaactgtatttttgtatctcaagctattttcatatgttgtgtgtcaatgtatcatctctcagaaaggttttacaatccaaacattatatgttctct

SEQ ID NO: 276614 - DNA, 120 bp, Artificial Sequence
  ENSG00000128641_40 (sequence is synthesized)
gtgtaactgaatttcacttatcttttataaaccagaaacattaattgaaaatattttctggggattttctcttgacttgtatttttaaaaattgctcacataaagaagttctcagaagtc

SEQ ID NO: 276615 - DNA, 120 bp, Artificial Sequence
  ENSG00000128641_41 (sequence is synthesized)
ttatttgggcttactggcttggatctaaggctcgaagggaattgaaacgcttgaaggaggaggctaggcgtaagcatgcagttgctgtcatttgggcttactggcttggactgaaggtac

SEQ ID NO: 276616 - DNA, 120 bp, Artificial Sequence
  ENSG00000128641_42 (sequence is synthesized)
aaaccaaaaaagtctccacatataaagttgctttggggccttcctattcatctggtggtttctagtctcagtttagctattttatgaaggagagggggcccaagttgaaaaccaggtatt

SEQ ID NO: 276617 - DNA, 120 bp, Artificial Sequence
  ENSG00000128641_43 (sequence is synthesized)
aatttaatatttgtattaatggaaaaatgtgttagacctatacaagttagagttctgtgaactgctgccaggctattccttaattttctgcagattattgattattccttaaatttttga

SEQ ID NO: 276618 - DNA, 120 bp, Artificial Sequence
  ENSG00000128641_44 (sequence is synthesized)
ggaagttaacttttcttaatcgggtttctacaaggtagttcactattgtatgttttatttcttaccaaaacttttcttgggaaaatttgttttattgctccatacgtggtcaagctggag

SEQ ID NO: 276619 - DNA, 120 bp, Artificial Sequence
  ENSG00000128641_45 (sequence is synthesized)
aaacatatatttatagtagaatagtttagatacttgtgtctttgaggcataagaatatgtttccttgctttatatttagactttaagctttgcatttcagattgttttataatagaatgt

SEQ ID NO: 276620 - DNA, 120 bp, Artificial Sequence
  ENSG00000128641_46 (sequence is synthesized)
tttttagatgtttttgttacttagaaaatcaaagtcatctttgctaaaaatgtgtattccagttagaaacacaaacatcaacagagtcctgtgttttgaagtccaccttgtcaatgttgt

SEQ ID NO: 276621 - DNA, 120 bp, Artificial Sequence
  ENSG00000128641_47 (sequence is synthesized)
aagcctatcttatgagaaaatgagaaaagtcaacatctgcctgcataaagagctaatttgccaaaaactaaccagagttgttcatctgtgcttttcctgaaaatctgtgaagaacaaact

SEQ ID NO: 276622 - DNA, 120 bp, Artificial Sequence
  ENSG00000128641_48 (sequence is synthesized)
tgttcctctagtcaactgagggaaatgtcatagcagaagcaaaaggactcttaggtgggtcttgctaagatttctccatccagtgagttcatttcccagtctcagtactataatatcttg

SEQ ID NO: 276623 - DNA, 120 bp, Artificial Sequence
  ENSG00000128641_49 (sequence is synthesized)
aacaatcagtgcctatttgtatcctttagaatagcttgcctaagattattttttccctaagagtaatttttaaacctataagtttaacctataattgcttcagtcttcctgtatatttta

SEQ ID NO: 276624 - DNA, 120 bp, Artificial Sequence
  ENSG00000128641_50 (sequence is synthesized)
cttttgcgaccttagctaaaattgaatttttacacgtgccagttttcattttttgactggaaggaatttttgagttttgttagttttggtttttgtttgcacttcagagaaataaacttt

SEQ ID NO: 276625 - DNA, 120 bp, Artificial Sequence
  ENSG00000128641_51 (sequence is synthesized)
tttcctcccagttttctaagtgattgttcacaagagttgtctttttatccatccaaagggatgaactcaggagtgcatagcttcttcagcccaatgtgctgtcagcaaaggggagtctaa

SEQ ID NO: 276626 - DNA, 120 bp, Artificial Sequence
  ENSG00000128641_52 (sequence is synthesized)
tgacatcattagggctgttactcagagtttgaaggctttgatatgggagtgaaagagtgtggagaaggcagcgaacagagagagagaacaggagaaaaaaggaaaggaatggaagtgagg

SEQ ID NO: 276627 - DNA, 120 bp, Artificial Sequence
  ENSG00000128641_53 (sequence is synthesized)
ggtgggaaatgattaccttgggaaccacacagattgtccttctctggaacagaatctcagtgcactgaaaatataagcgctgcaccagcctgacaccaattctttgggtttaaattgtta

SEQ ID NO: 276628 - DNA, 120 bp, Artificial Sequence
  ENSG00000128641_54 (sequence is synthesized)
attcttagccatattcagttctcagtgtgtaggccttatcttctatgcaaggcttttggaaactgatacagttcttcagactttttttttctttttgccttttacaaaacaatctgaaga

SEQ ID NO: 276629 - DNA, 120 bp, Artificial Sequence
  ENSG00000128641_55 (sequence is synthesized)
gaacattattttatataatttttaatgtattttaattggggatgagtttgcagctgtgcctgtaaaatgtttcttgtcaaatcatcagattcttcaaaaactactaagaggatttaaaac

SEQ ID NO: 276630 - DNA, 120 bp, Artificial Sequence
  ENSG00000128641_56 (sequence is synthesized)
attattttactaaatctagaaaggacacttataaactgacttgtttgacattttttcatttttaatagaggtgtatcattatggacctgtaccagccacacattaaccactgtaacctac

SEQ ID NO: 276631 - DNA, 120 bp, Artificial Sequence
  ENSG00000128641_57 (sequence is synthesized)
atcttctttttaaaggtacgtagagaatacaggaaattcttcagagccaatgctggaaagaaaatctatgagtttacgcttcagagaattgtgcaaaaatacttcttggaaatgaaaaat

SEQ ID NO: 276632 - DNA, 120 bp, Artificial Sequence
  ENSG00000128641_58 (sequence is synthesized)
tttcctcagttagattgcacatgcatgagaagcagtagatgtgtctctcattctttcttctttcattgcctgctaagtactgtttgtataccagtagcatgggtcagagtgggaggttgt

SEQ ID NO: 276633 - DNA, 120 bp, Artificial Sequence
  ENSG00000128641_59 (sequence is synthesized)
caacagaagagtccagcatgtatccatgatggactctcgatcaactttatatgattaactcatataaaacagccctgtatggaagctgaggctgcctcttcctagccacaggatattgac

SEQ ID NO: 276634 - DNA, 120 bp, Artificial Sequence
  ENSG00000128641_60 (sequence is synthesized)
ctactttccccttcttatctgcttgcaaaatatttgttgtacttagtgtgttctccctgtcacaacgaatgtttgtctctctctttcatatgaactgaaggctaaagtgctagttaaatc

SEQ ID NO: 276635 - DNA, 120 bp, Artificial Sequence
  ENSG00000128641_61 (sequence is synthesized)
tttctctttcagcttttttgttttagttcagctctcgatctcattcattaatacaactacttattaagtaccaggtatgtgtctagtagttgttccacatgataaatgggcagtgaatga

SEQ ID NO: 276636 - DNA, 120 bp, Artificial Sequence
  ENSG00000128641_62 (sequence is synthesized)
cactgaccaagtctccaacctcatgtacctgacatcctagtggaagagaccagtatgtacaaataaaatgatgaaatagttgataagattttggctaacaagtgtttatggaggaaaaaa

SEQ ID NO: 276637 - DNA, 120 bp, Artificial Sequence
  ENSG00000128641_63 (sequence is synthesized)
aggatgcaagagtcagagtgagggatctgtccctggatggggacaataaggggtcagttcagggggacttccttgagctctgaagtttcacctgagaatgggagattcagaacttggtga

SEQ ID NO: 276638 - DNA, 120 bp, Artificial Sequence
  ENSG00000128641_64 (sequence is synthesized)
cagagattgtggagctcactgtgtctttgctgatccttcagcaaaggaagtgagattgtttctagcttttctgtttggggtgcttctctgtcaactaaaagtcttcatccttcaaatatt

SEQ ID NO: 276639 - DNA, 120 bp, Artificial Sequence
  ENSG00000128641_65 (sequence is synthesized)
gcatcatttgtgtatacttcattcattcacttactcatgacccactcctcgagtgcctgcaatgggcaagcgtctgtcctaggagccgtgtgctgggccacagttaaatctgagagatca

SEQ ID NO: 276640 - DNA, 120 bp, Artificial Sequence
  ENSG00000128641_66 (sequence is synthesized)
ccaaactatattaggtatttttggcacatgaaactttcacagttcaaatgtgagagcaccccgaaggaatatcatttttccctttgcttcaatctgagtgtagcccaagcagagggtaac

SEQ ID NO: 276641 - DNA, 120 bp, Artificial Sequence
  ENSG00000128641_67 (sequence is synthesized)
taaaatacttacagattaaataataccttatctgggattggcttaaaaaatgctccactatcctttcccctaaaataagaaagtaaaaaagtaaagtgtggtggagaagatagtagatat

SEQ ID NO: 276642 - DNA, 120 bp, Artificial Sequence
  ENSG00000128641_68 (sequence is synthesized)
ttaatgaaactcagtggttgagacctaggggttttcaactttctgtatgtttattattatttttttaatggcaagttaaaaaacaaaatgcaagtgttttttctggtcagtgttttgcag

SEQ ID NO: 276643 - DNA, 120 bp, Artificial Sequence
  ENSG00000128641_69 (sequence is synthesized)
aaaactcttgttggcttcatttgggattcttgttctattagcttagagcacagcattgaagcaagtgctttagttaactgctctggcacttcttaggagacatgcacttttttcttccct

SEQ ID NO: 276644 - DNA, 120 bp, Artificial Sequence
  ENSG00000128641_70 (sequence is synthesized)
tcttccctgtgagaggtgtaggcctggagaaagtaatgattcctaaagcaatctgaatttttttcaaggcagtagaaagaccttcttaaaaagggctgggcgtggtggctcacacctata

SEQ ID NO: 276645 - DNA, 120 bp, Artificial Sequence
  ENSG00000128645_0 (sequence is synthesized)
gccatgggttggagagggcagctcgggtagagagggctggcggagcggcgcagacggcggcagtcctgctcagcctctgcccggctccgtactccggccccggcctgcgccctcagaaag

SEQ ID NO: 276646 - DNA, 120 bp, Artificial Sequence
  ENSG00000128645_1 (sequence is synthesized)
gtggggcccgaaccatgagctcctacctggagtacgtgtcatgcagcagcagcggcggggtcggcggcgacgtgctcagcttggcacccaagttctgccgctccgacgcccggcccgtgg

SEQ ID NO: 276647 - DNA, 120 bp, Artificial Sequence
  ENSG00000128645_2 (sequence is synthesized)
ttctgccgctccgacgcccggcccgtggctctgcagcccgccttccctctgggcaacggcgacggcgccttcgtcagctgtctgcccctggccgccgcccgaccctcgccttcgcccccg

SEQ ID NO: 276648 - DNA, 120 bp, Artificial Sequence
  ENSG00000128645_3 (sequence is synthesized)
ctccggccgcgccccagtacgcgcagtgcaccctggagggggcctacgaacctggtgccgcacctgccgcggcagctgggggcgcggactacggcttcctggggtccgggccggcgtacg

SEQ ID NO: 276649 - DNA, 120 bp, Artificial Sequence
  ENSG00000128645_4 (sequence is synthesized)
acttcccgggcgtgctggggcgggcggccgacgacggcgggtctcacgtccactacgccacctcggccgtcttctcgggcggcggctctttcctcctcagcggccaggtggattacgcgg

SEQ ID NO: 276650 - DNA, 120 bp, Artificial Sequence
  ENSG00000128645_5 (sequence is synthesized)
ccttcggcgaacccggcccttttccggcttgtctcaaagcgtcagccgacggccaccctggtgctttccagaccgcatccccggccccaggcacctaccccaagtccgtctctcccgcct

SEQ ID NO: 276651 - DNA, 120 bp, Artificial Sequence
  ENSG00000128645_6 (sequence is synthesized)
ccggcctccctgccgccttcagcacgttcgagtggatgaaagtgaagaggaatgcctctaagaaaggcaaactcgccgagtatggggccgctagcccctccagcgcgatccgcacgaatt

SEQ ID NO: 276652 - DNA, 120 bp, Artificial Sequence
  ENSG00000128645_7 (sequence is synthesized)
tgcttgcacctgaatgacacgcaagtcaaaatctggttccagaaccgcaggatgaaacagaagaaaagggaacgagaagggcttctggccacggccattcctgtggctcccctccaactt

SEQ ID NO: 276653 - DNA, 120 bp, Artificial Sequence
  ENSG00000128645_8 (sequence is synthesized)
cccctctctggaacaacccccactaagtttatcaagaaccccggcagcccttctcagtcccaagagccttcgtgaggccggtacttggggccgaaaaactgtggcctgcagaagtcccag

SEQ ID NO: 276654 - DNA, 120 bp, Artificial Sequence
  ENSG00000128645_9 (sequence is synthesized)
gcgacccccatccctatctagacttaggagctcagtttgggatggaggtgggagaacaaaaatgaatagggatttcacttgggaaatgaagtactttagttggcttccgagttccagact

SEQ ID NO: 276655 - DNA, 120 bp, Artificial Sequence
  ENSG00000128645_10 (sequence is synthesized)
atatgtccagatattaattgactgtcttgtaagccacttgtttggttatgatttgtgtcttatcagggaaaaggtgcccagctgccagcccagctccgctgctatctttgcctcacttag

SEQ ID NO: 276656 - DNA, 120 bp, Artificial Sequence
  ENSG00000128645_11 (sequence is synthesized)
tcatgtgcaattcgcgttgcagagtggcagaccattagttgctgagttctgtcagcactctgatgtgctcagaagagcacctgcccaaagtttttctggttttaatttaaaggacaaggc

SEQ ID NO: 276657 - DNA, 120 bp, Artificial Sequence
  ENSG00000128645_12 (sequence is synthesized)
tacatatattcagctttttgagatgaccaaagctagttagggtctccttgatgtagctaagctgcttcagtgatcttcacatttgcactccagtttttttttctttaaaaaagcggtttc

SEQ ID NO: 276658 - DNA, 120 bp, Artificial Sequence
  ENSG00000128645_13 (sequence is synthesized)
tacctctctatgtgcctgagtgatgatacaatcgctgtttagttactagatgaacaaatccacagaatgggtaaagagtagaatctgaactatatcttgacaaatattattcaaacttga

SEQ ID NO: 276659 - DNA, 120 bp, Artificial Sequence
  ENSG00000128645_14 (sequence is synthesized)
atgtaaatatatacagtatgtatattttttaaaaagatttgcttgcaatgaccttataagtgacatttaatgtcatagcatgtaaagggttttttttgtaataaaaattatagaatctgc

SEQ ID NO: 276660 - DNA, 120 bp, Artificial Sequence
  ENSG00000128652_0 (sequence is synthesized)
gcctccacagatatcaaaagaaacctgaagagcctacaaaaaaaaaagagataaagacaaaattcaagaaaacacacacatacataattgtggtcacctggagcctgggggccggcccag

SEQ ID NO: 276661 - DNA, 120 bp, Artificial Sequence
  ENSG00000128652_1 (sequence is synthesized)
ctctctcaggattcagcagacattggaggtggcagtgaaggatacagtggtagtcaatgttatttgagcagggtcagcaggccctggagcttcctgagtgcacaatgcagaaggctgctt

SEQ ID NO: 276662 - DNA, 120 bp, Artificial Sequence
  ENSG00000128652_2 (sequence is synthesized)
actatgaaaacccaggactgtttggaggctatggctacagcaaaactacggacacttacggctacagcaccccccaccagccctacccaccccctgctgctgccagctccctggacactg

SEQ ID NO: 276663 - DNA, 120 bp, Artificial Sequence
  ENSG00000128652_3 (sequence is synthesized)
actatccaggttctgcctgctccatccagagctctgcccctctgagagccccagcccacaaaggagctgaactcaatggcagctgcatgcggccgggcactgggaacagccagggtgggg

SEQ ID NO: 276664 - DNA, 120 bp, Artificial Sequence
  ENSG00000128652_4 (sequence is synthesized)
gtggtggcagccagcctcctggtctgaactcagagcagcagccaccacaaccccctcctccaccaccgaccctgcccccatcttcacccaccaatcctggaggtggagtgcctgccaaga

SEQ ID NO: 276665 - DNA, 120 bp, Artificial Sequence
  ENSG00000128652_5 (sequence is synthesized)
agcccaaaggtgggcccaatgcttctagctcctcagccaccatcagcaagcagatcttcccctggatgaaagagtctcgacagaactccaagcagaagaacagctgtgccactgcaggag

SEQ ID NO: 276666 - DNA, 120 bp, Artificial Sequence
  ENSG00000128652_6 (sequence is synthesized)
agagctgcgaggacaagagcccgccaggcccagcatccaagcgggtacgcacggcatacacgagcgcgcagctggtggaattggaaaaggaattccacttcaaccgctacttgtgccggc

SEQ ID NO: 276667 - DNA, 120 bp, Artificial Sequence
  ENSG00000128652_7 (sequence is synthesized)
cgcgccgcgtggagatggccaacctgctgaatctcacggaacgccagatcaagatctggttccagaaccggcgcatgaagtacaagaaggaccagaaggccaagggcatcctgcactcgc

SEQ ID NO: 276668 - DNA, 120 bp, Artificial Sequence
  ENSG00000128652_8 (sequence is synthesized)
tagccagtcccctgagcgcagcccaccgctcggcggcgccgctggccacgtggcctactccggccagctgccgccagtgcccggcctggcctacgacgcgccctcgccgcctgctttcgc

SEQ ID NO: 276669 - DNA, 120 bp, Artificial Sequence
  ENSG00000128652_9 (sequence is synthesized)
tacggcctggccgcctacacggcgccactcagcagctgcctgccacaacagaagcgctacgcagcgccggagttcgagccccatcccatggcgagcaacggcggcggcttcgccagcgcc

SEQ ID NO: 276670 - DNA, 120 bp, Artificial Sequence
  ENSG00000128652_10 (sequence is synthesized)
aacttgcagggcagcccggtgtacgtgggcggcaacttcgtcgagtccatggcgcccgcgtccgggcctgtcttcaacctgggccacctctcgcacccgtcgtcggccagcgtggactac

SEQ ID NO: 276671 - DNA, 120 bp, Artificial Sequence
  ENSG00000128652_11 (sequence is synthesized)
agttgcgccgcgcagattccaggcaaccaccaccatggaccttgcgaccctcatcccacctacacagatctctcggcccaccactcgtctcagggacgactgccggaggctcccaaactg

SEQ ID NO: 276672 - DNA, 120 bp, Artificial Sequence
  ENSG00000128652_12 (sequence is synthesized)
acgcatctgtagcggccgccgccagcccgaactcgcggcaaaattacctctcttgctgtagtggtggggtagagggtggggcccgcggggcagttcgggaacccccttccccgctcttgc

SEQ ID NO: 276673 - DNA, 120 bp, Artificial Sequence
  ENSG00000128652_13 (sequence is synthesized)
cctgccgccgcctcccgggtctcaggcctccagcggcggaggcgcaggcgaccgggcctcccctccatgggcgtcctttgggtgactcgccataaatcagccgcaaggatccttccctgt

SEQ ID NO: 276674 - DNA, 120 bp, Artificial Sequence
  ENSG00000128652_14 (sequence is synthesized)
aaatttgacagtgccacatactgcggaccaagggactccaatctggtaatggtgtcccaaaggtaagtctgagacccatcagcggcgcgccctgcagagggaccagagcttggagagtct

SEQ ID NO: 276675 - DNA, 120 bp, Artificial Sequence
  ENSG00000128652_15 (sequence is synthesized)
tgggcctggcccgcgtctagcttagtttcagagaccttaatttatattctccttcctgtgccgtaaggattgcatcggactaaactatctgtatttattatttgaagcgagtcatttcgt

SEQ ID NO: 276676 - DNA, 120 bp, Artificial Sequence
  ENSG00000128652_16 (sequence is synthesized)
tccctgattatttatccttgtctgaatgtatttatgtgtatatttgtagatttatccagccgagcttaggaattcgcttccaggccgtgggggccacatttcacctccttagtccccctg

SEQ ID NO: 276677 - DNA, 120 bp, Artificial Sequence
  ENSG00000128652_17 (sequence is synthesized)
gtctgaactagttgagagagtagttttgaacagtcgtaaccgtggctggtgtttgtagttgacataaaggattaagaccgcaaattgtccttcatgggtagagtcaggaagcccggtggc

SEQ ID NO: 276678 - DNA, 120 bp, Artificial Sequence
  ENSG00000128652_18 (sequence is synthesized)
gtggcacaacacactttggtcatttctcaaaaaccacagtcctcaccacagtttattgatttcaaattgtctggtactattggaacaaatatttagaataaaaaaatttcccagtcggaa

SEQ ID NO: 276679 - DNA, 120 bp, Artificial Sequence
  ENSG00000128652_19 (sequence is synthesized)
agttgaacctcagcctggttccgttctaccgggaattccgtgtgctcgagtatatggccgtgtctgcgagcgcgcaagaccagggttgggacagtgttgtctgcagacaaagggggaagg

SEQ ID NO: 276680 - DNA, 120 bp, Artificial Sequence
  ENSG00000128652_20 (sequence is synthesized)
ttttctaacctttgtctctgcagaggtgggctccagtcaccggctgcgggattgcggagtccgccgcggcctcggctcccgcccggcgcccggcctggccccaccgccgctcactcggtc

SEQ ID NO: 276681 - DNA, 120 bp, Artificial Sequence
  ENSG00000128652_21 (sequence is synthesized)
agggagggcctggaaggggccctgggcgccgagtcccccgccggcgccgacaccgcctgccaggagcagccggcctgctcgaggtgactgcagccgcgcggttctggcgcggcttcttca

SEQ ID NO: 276682 - DNA, 120 bp, Artificial Sequence
  ENSG00000128652_22 (sequence is synthesized)
gaggtgactgcagccgcgcggttctggcgcggcttcttcaccaacatgagcgggtctctgcgtccgagagtgagcgcagccgggcagcgcctagtggattacagcagacgcccggaccga

SEQ ID NO: 276683 - DNA, 120 bp, Artificial Sequence
  ENSG00000128652_23 (sequence is synthesized)
ccgccgcctgtagctcggcagccttcggatcagggagccgatagcatgtccgggccttggtgacgacgggtcaggccatgaactgggcttgagatctctggcgaggaccaggagaaagac

SEQ ID NO: 276684 - DNA, 120 bp, Artificial Sequence
  ENSG00000128652_24 (sequence is synthesized)
tgttttctgaatcagagaggcaagggaaatcgaacaaagacagtatttcaccctgggctggcaggcagctgttagaggtatttacggccttgccgcagtgcggcggccaggcagccgggt

SEQ ID NO: 276685 - DNA, 120 bp, Artificial Sequence
  ENSG00000128652_25 (sequence is synthesized)
agggtatgcgggggcaccggaagctggggagaagccatgaagaactcagaatttcaacttaaattcaatttagggtcacgttttcggaaatggcgtgaacagatgccctctttctaggga

SEQ ID NO: 276686 - DNA, 120 bp, Artificial Sequence
  ENSG00000128652_26 (sequence is synthesized)
ctggtcctttagacttgatagttttgcagaatgagggagaagttgtgctctctggatgtaggatggttttccccgccttgaagaacgactcaaagggaagcggtgcccaagatgtgacat

SEQ ID NO: 276687 - DNA, 120 bp, Artificial Sequence
  ENSG00000128652_27 (sequence is synthesized)
ttctgatccacataacaaccttcagagtgttcattggcaacgaggagatgctgcttgttcggcggaatagggtttgcaaatcagaaaggacagttgaagcttttaatacatgttttcctg

SEQ ID NO: 276688 - DNA, 120 bp, Artificial Sequence
  ENSG00000128654_0 (sequence is synthesized)
gtccctagccaggcctggcggtaaccttgggggcctcactgcagccgccgctgctgttggagtgggctttgcgagtctgaacgttggcggggctaggctcgttaactgccgagagcctcc

SEQ ID NO: 276689 - DNA, 120 bp, Artificial Sequence
  ENSG00000128654_1 (sequence is synthesized)
gggtttgcggtggaggacgctgaggcccgtggggggcaggcacccgggcgccgggcctcccagccgacatgtctctagtggcggaagccttcgtctcccagattgcagctgcagaacctt

SEQ ID NO: 276690 - DNA, 120 bp, Artificial Sequence
  ENSG00000128654_2 (sequence is synthesized)
ggcctgaaaatgctacattatatcagcaattgaaaggggagcaaattttactttctgacaatgcagcttctcttgcagtgcaggcctttttgcaaatgtgtaacttgcctatcaaagtag

SEQ ID NO: 276691 - DNA, 120 bp, Artificial Sequence
  ENSG00000128654_3 (sequence is synthesized)
tttgtagggcaaatgcagaatatatgtctccatctggtaaagtaccttttattcatgtgggaaatcaagtagtatcagaacttggtccaatagtccaatttgttaaagccaagggccatt

SEQ ID NO: 276692 - DNA, 120 bp, Artificial Sequence
  ENSG00000128654_4 (sequence is synthesized)
ctcttagtgatgggctggaggaagtccaaaaagcagaaatgaaagcttacatggaattagtcaacaatatgctgttgactgcagagctgtatcttcagtggtgtgatgaagctacagtag

SEQ ID NO: 276693 - DNA, 120 bp, Artificial Sequence
  ENSG00000128654_5 (sequence is synthesized)
atggatctccttacccttggcctctgaatcatattttggcctatcaaaaacagtgggaagtcaaacgtaagatgaaagctattggatggggaaagaagactctggaccaggtcttagagg

SEQ ID NO: 276694 - DNA, 120 bp, Artificial Sequence
  ENSG00000128654_6 (sequence is synthesized)
atgtagaccagtgctgtcaagctctctctcaaagactgggaacacaaccgtatttcttcaataagcagcctactgaacttgacgcactggtatttggccatctatacaccattcttacca

SEQ ID NO: 276695 - DNA, 120 bp, Artificial Sequence
  ENSG00000128654_7 (sequence is synthesized)
cacaattgacaaatgatgaactttctgagaaggtgaaaaactatagcaacctccttgctttctgtaggagaattgaacagcactattttgaagatcgtggtaaaggcaggctgtcataga

SEQ ID NO: 276696 - DNA, 120 bp, Artificial Sequence
  ENSG00000128654_8 (sequence is synthesized)
gttatgtgttagtctcaggagtcttaacttttgaaatatgttttacttgaatgttacattagatattggtgtcagaattttaaaaccaaattactgctttttgaaacctcaaattatata

SEQ ID NO: 276697 - DNA, 120 bp, Artificial Sequence
  ENSG00000128654_9 (sequence is synthesized)
atgtatcttatgtatgtgctttatattgttatttgtgtatacattaaaataattctgaattatttaatctgatatgttgtattctgtatcttgaaatttttgtttccttgaaacatgcat

SEQ ID NO: 276698 - DNA, 120 bp, Artificial Sequence
  ENSG00000128654_10 (sequence is synthesized)
gcatttaaaaataaagcttaaacaactgtatggatgttacatttactttcttttgatttttctgaaagtcattcactgaattttacacatgtggaataaacagtgtcttttctaaggcaa

SEQ ID NO: 276699 - DNA, 120 bp, Artificial Sequence
  ENSG00000128654_11 (sequence is synthesized)
ggattacaggcgcccgccaccacgcccgcgcggattcatggaaaatttttaaatctgcatgtactttaaagaaatacttttgagtcggtggactgaacatgactgatgtatatagctgca

SEQ ID NO: 276700 - DNA, 120 bp, Artificial Sequence
  ENSG00000128655_0 (sequence is synthesized)
ggttacagcagcagttccagcagcagcggcggcagccagaacaggagcagcgatagctcgggtttccggaacaggagccggggcagcggcggcagctcagtgctgggcacctgtgcggag

SEQ ID NO: 276701 - DNA, 120 bp, Artificial Sequence
  ENSG00000128655_1 (sequence is synthesized)
caggagtagcaggaccacggggtggggtcggcgccagccactctgagccagagaaggaaggggcatctcccagattccactgctgggaataatctccaggggaggtggcgctgaactggg

SEQ ID NO: 276702 - DNA, 120 bp, Artificial Sequence
  ENSG00000128655_2 (sequence is synthesized)
aatactggtgggggtgaacatgtgcaggaacagctagaggcctcggggcaggaaaacatttggttcacgtgtaaacaggcaaggaaagctgtctgggaccatggcagcctcccgcctgga

SEQ ID NO: 276703 - DNA, 120 bp, Artificial Sequence
  ENSG00000128655_3 (sequence is synthesized)
ctttggggaggtggaaactttcctggacaggcacccagagttgtttgaagattacttgatgcggaaggggaagcaggagatggttgaaaagtggctgcagaggcacagtcagggtcaggg

SEQ ID NO: 276704 - DNA, 120 bp, Artificial Sequence
  ENSG00000128655_4 (sequence is synthesized)
ggctttaggtccaaggccctctttggctggtaccagcagcttggctcacagcacctgcagaggtggcagcagcgttggtggtggcactggaccaaatggctctgcccacagccagcccct

SEQ ID NO: 276705 - DNA, 120 bp, Artificial Sequence
  ENSG00000128655_5 (sequence is synthesized)
tcccggtggcggggactgtggtggggttcccttgagtcccagctgggccggtggcagcaggggcgatgggaacctgcagcggagagcttctcagaaagagctaaggaagagttttgcccg

SEQ ID NO: 276706 - DNA, 120 bp, Artificial Sequence
  ENSG00000128655_6 (sequence is synthesized)
ctccaaggccatccacgtgaacaggacctacgatgaacaggtgacctcccgggctcaggaacccctgagtagtgtacgacggagggcacttctccggaaggcaagctccctgccccccac

SEQ ID NO: 276707 - DNA, 120 bp, Artificial Sequence
  ENSG00000128655_7 (sequence is synthesized)
cacagcccatattctcagtgcgctgctggaatcgagagtgaatctgcctcggtatccccctacagccatcgactacaagtgccatctgaaaaagcataatgagcgtcagttctttctgga

SEQ ID NO: 276708 - DNA, 120 bp, Artificial Sequence
  ENSG00000128655_8 (sequence is synthesized)
attggtcaaagatatctccaatgaccttgacctcaccagcctgagctacaagattctcatctttgtctgccttatggtggatgctgaccgctgctctcttttcctggtggaaggggcagc

SEQ ID NO: 276709 - DNA, 120 bp, Artificial Sequence
  ENSG00000128655_9 (sequence is synthesized)
tgctggcaagaagaccttggtctccaaattctttgatgtgcatgcaggaacacctctgctgccttgcagcagcacagagaactcaaatgaggtgcaggtcccctggggcaaaggtatcat

SEQ ID NO: 276710 - DNA, 120 bp, Artificial Sequence
  ENSG00000128655_10 (sequence is synthesized)
tggctatgtcggggagcatggagaaacggtcaacattcctgatgcctaccaggatcgacgattcaatgatgaaatcgacaagctaactggatacaagacaaaatcattattgtgcatgcc

SEQ ID NO: 276711 - DNA, 120 bp, Artificial Sequence
  ENSG00000128655_11 (sequence is synthesized)
tatccgaagcagtgatggtgagattattggtgtggcccaagcgataaataagattcctgaaggagctccatttactgaagatgatgaaaaagttatgcagatgtatcttccattttgtgg

SEQ ID NO: 276712 - DNA, 120 bp, Artificial Sequence
  ENSG00000128655_12 (sequence is synthesized)
aatcgccatatctaacgctcagctctttgctgcctcaaggaaagaatatgaaagaagcagagctttgctagaggtggttaatgacctctttgaagaacagactgacctggagaaaattgt

SEQ ID NO: 276713 - DNA, 120 bp, Artificial Sequence
  ENSG00000128655_13 (sequence is synthesized)
caagaaaataatgcatcgggcccaaactctgctgaaatgtgaacgctgttctgttttactcctagaggacatcgaatcaccagtggtgaaatttaccaaatcctttgaattgatgtcccc

SEQ ID NO: 276714 - DNA, 120 bp, Artificial Sequence
  ENSG00000128655_14 (sequence is synthesized)
aaagtgcagtgctgatgctgagaacagtttcaaagaaagcatggagaaatcatcatactccgactggctaataaataacagcattgctgagctggttgcttcaacaggccttccagtgaa

SEQ ID NO: 276715 - DNA, 120 bp, Artificial Sequence
  ENSG00000128655_15 (sequence is synthesized)
catcagtgatgcctaccaggatccgcgctttgatgcagaggcagaccagatatctggttttcacataagatctgttctttgtgtccctatttggaatagcaaccaccaaataattggagt

SEQ ID NO: 276716 - DNA, 120 bp, Artificial Sequence
  ENSG00000128655_16 (sequence is synthesized)
ggctcaagtgttaaacagacttgatgggaaaccttttgatgatgcagatcaacgactttttgaggcttttgtcatcttttgtggacttggcatcaacaacacaattatgtatgatcaagt

SEQ ID NO: 276717 - DNA, 120 bp, Artificial Sequence
  ENSG00000128655_17 (sequence is synthesized)
gaagaagtcctgggccaagcagtctgtggctcttgatgtgctatcataccatgcaacatgttcaaaagctgaagttgacaagtttaaggcagccaacatccctctggtgtcagaacttgc

SEQ ID NO: 276718 - DNA, 120 bp, Artificial Sequence
  ENSG00000128655_18 (sequence is synthesized)
catcgatgacattcattttgatgacttttctctcgacgttgatgccatgatcacagctgctctccggatgttcatggagctggggatggtacagaaatttaaaattgactatgagacact

SEQ ID NO: 276719 - DNA, 120 bp, Artificial Sequence
  ENSG00000128655_19 (sequence is synthesized)
gtgtaggtggcttttgacagtgaggaaaaactatcggatggttctataccacaactggagacatgccttcaacgtgtgtcagctgatgttcgcgatgttaaccactgctgggtttcaaga

SEQ ID NO: 276720 - DNA, 120 bp, Artificial Sequence
  ENSG00000128655_20 (sequence is synthesized)
cattctgaccgaggtggaaattttagcggtgattgtgggatgcctgtgtcatgacctcgaccacaggggaaccaacaatgccttccaagctaagagtggctctgccctggcccaactcta

SEQ ID NO: 276721 - DNA, 120 bp, Artificial Sequence
  ENSG00000128655_21 (sequence is synthesized)
tggaacctctgctaccttggagcatcaccatttcaaccacgccgtgatgatccttcaaagtgagggtcacaatatctttgctaacctgtcctccaaggaatatagtgaccttatgcagct

SEQ ID NO: 276722 - DNA, 120 bp, Artificial Sequence
  ENSG00000128655_22 (sequence is synthesized)
tttgaagcagtcaatattggcaacagacctcacgctgtactttgagaggagaactgaattctttgaacttgtcagtaaaggagaatacgattggaacatcaaaaaccatcgtgatatatt

SEQ ID NO: 276723 - DNA, 120 bp, Artificial Sequence
  ENSG00000128655_23 (sequence is synthesized)
tcgatcaatgttaatgacagcctgtgaccttggagccgtgaccaaaccgtgggagatctccagacaggtggcagaacttgtaaccagtgagttcttcgaacaaggagatcgggagagatt

SEQ ID NO: 276724 - DNA, 120 bp, Artificial Sequence
  ENSG00000128655_24 (sequence is synthesized)
agagctcaaactcactccttcagcaatttttgatcggaaccggaaggatgaactgcctcggttgcaactggagtggattgatagcatctgcatgcctttgtatcaggcactggtgaaggt

SEQ ID NO: 276725 - DNA, 120 bp, Artificial Sequence
  ENSG00000128655_25 (sequence is synthesized)
caacgtgaaactgaagccgatgctagattcagtagctacaaacagaagtaagtgggaagagctacaccaaaaacgactgctggcctcaactgcctcatcctcccctgccagtgttatggt

SEQ ID NO: 276726 - DNA, 120 bp, Artificial Sequence
  ENSG00000128655_26 (sequence is synthesized)
agccaaggaagacaggaactaaacctccaggtcagctgcagctgcaaaatgactacagcctgaagggccattttcagtccagcaatgtcatccttttgttcttttagctcagaaagacct

SEQ ID NO: 276727 - DNA, 120 bp, Artificial Sequence
  ENSG00000128655_27 (sequence is synthesized)
aacatctcaaggatgcactgggaagcatgcctgggctttcaccttgaagcatggtcagcagcagagagagcaacgggaaggacaaagaaagaggtggggcagggagcacaccccaggacc

SEQ ID NO: 276728 - DNA, 120 bp, Artificial Sequence
  ENSG00000128655_28 (sequence is synthesized)
ctcacttttccctaatgaacacgcatgggctgaaatgaaggctctgggtaggggactgttttggatccaaggacctgtggacagtcggcctacttactctgagctgagggaacactgaac

SEQ ID NO: 276729 - DNA, 120 bp, Artificial Sequence
  ENSG00000128655_29 (sequence is synthesized)
agtaaaagcgtcattagcgctgcttcgttttgtatagggcttttctgtttgttacaagccaaacactgcctgtctttgcttcctgtccctgaatgcctttttgtgccagactgtcccaag

SEQ ID NO: 276730 - DNA, 120 bp, Artificial Sequence
  ENSG00000128655_30 (sequence is synthesized)
aatcctaatttgtattccatagaggtattttatttttaatcctagagcttcttattgatggatcctttagaattgcctacctaaaaggtaaactatactatccttataaatactgatcaa

SEQ ID NO: 276731 - DNA, 120 bp, Artificial Sequence
  ENSG00000128655_31 (sequence is synthesized)
tcccagttctccccctaaaaatgaatacatagtaggactatagcaaatgtgtttgatgggtaattctagactgggactatggtacccttttccagagttttaaaattcaaccttcattac

SEQ ID NO: 276732 - DNA, 120 bp, Artificial Sequence
  ENSG00000128655_32 (sequence is synthesized)
agacaaagttttctcccagaaggaatggattgatagattttgattaaagtaagggtggaaggaaatctgtagctggatttaccacaagtgacatctagaaactatagttcacaggacaga

SEQ ID NO: 276733 - DNA, 120 bp, Artificial Sequence
  ENSG00000128655_33 (sequence is synthesized)
gcagagccatggagactaagcattgactaccttgagttctcctagtgaggagttctggtataaaatttaagattactaccagtaaccaacttaaagcaaactataggggtccctaatttt

SEQ ID NO: 276734 - DNA, 120 bp, Artificial Sequence
  ENSG00000128655_34 (sequence is synthesized)
ggatttttccttaagtgtaagaaacaatgcttcaaatgttaagaaataacagtctgggcaaagaacgcatattctataggaagccaggtttacaataggtaagaataaactgtattaagt

SEQ ID NO: 276735 - DNA, 120 bp, Artificial Sequence
  ENSG00000128655_35 (sequence is synthesized)
agatgtaatgactagaaagctgctttgctccctatattgagaaattgtggacatggtatgtgttatccaaagaacattgggctagaagatagatttctatccttagctttggcattattg

SEQ ID NO: 276736 - DNA, 120 bp, Artificial Sequence
  ENSG00000128655_36 (sequence is synthesized)
actggattgacttgaacaagtcacttaacttctacaagcttgtttccttatttgtcaaattagattacactaggaaacgattctcgaacatgttttaaccttacaactctttgttcaaat

SEQ ID NO: 276737 - DNA, 120 bp, Artificial Sequence
  ENSG00000128655_37 (sequence is synthesized)
aaatctttcaatgaatccccaacatataaaacgtcaaaaagctgaattcctatgtgaattataagcagggtttggacatccagagcacctacaaaccttcatctctttgattacgtacat

SEQ ID NO: 276738 - DNA, 120 bp, Artificial Sequence
  ENSG00000128655_38 (sequence is synthesized)
tgagagccattctagctcttaaaaaaatctgaaatttacaaaccatttttcttgttattgtttttgtttctttgtttgtttgttttttgagactgagttttcactcttgttgcccaggct

SEQ ID NO: 276739 - DNA, 120 bp, Artificial Sequence
  ENSG00000128655_39 (sequence is synthesized)
cttgttattgttattaatcattatcaatcattaactttacagatattaaagaaataggggccatgttctacatgcgacattgttttcctggcacacagtagacaattcaggaaatgtctg

SEQ ID NO: 276740 - DNA, 120 bp, Artificial Sequence
  ENSG00000128655_40 (sequence is synthesized)
aagaaggaatgggtaaaattaagataccaaaatggaattgaggggagagcaggtaattgtagagaaaaagactctttatggcaagaaacaaagtaaaagaaatgtatagaccgggcgcgg

SEQ ID NO: 276741 - DNA, 74 bp, Artificial Sequence
  ENSG00000128655_41 (sequence is synthesized)
tgaaaccctgtctctactaaaaaacacaaaacaaattagccaggcgcggtggcaggggaacccgcgaggcggag

SEQ ID NO: 276742 - DNA, 84 bp, Artificial Sequence
  ENSG00000128655_42 (sequence is synthesized)
gactaagaggggaataaaagcaagaagaaaaagaaacgtaagaacaccagtaaaggaaagacagggaccgagacaggtggttaa

SEQ ID NO: 276743 - DNA, 120 bp, Artificial Sequence
  ENSG00000128655_43 (sequence is synthesized)
caccagtaaaggaaagacagggaccgagacaggtggttaagggaaatgaaaaaaaaaaaaaaaaggtgaaagtcaatccaaacaaagaaaaatggcacttccaaccaaaaaaaatgaagg

SEQ ID NO: 276744 - DNA, 120 bp, Artificial Sequence
  ENSG00000128655_44 (sequence is synthesized)
tgtagaaccctgtcatcaattgctcagaaaagagagacacttgagcagggaggggtttgagaaaggggagaaggaaggagtgagagccctaaaaaataatgttcctagctaccctttaca

SEQ ID NO: 276745 - DNA, 120 bp, Artificial Sequence
  ENSG00000128655_45 (sequence is synthesized)
gctgtctctgcagggaagactggagaaagtagagggggaaatgaatgcaggaagaaactgcctctgcagagcaggtaagaggaggttgttcagatttatggattttattaagccagtttt

SEQ ID NO: 276746 - DNA, 120 bp, Artificial Sequence
  ENSG00000128655_46 (sequence is synthesized)
ctgtatcactctgctataaaggaaaatagcttctgcagggctgtctctcctccttcaggtggggaacaaagggtgggtggagtcagggacagagtctggtctgcgagatcgtgacgtgtc

SEQ ID NO: 276747 - DNA, 120 bp, Artificial Sequence
  ENSG00000128655_47 (sequence is synthesized)
tgcagctccgaagcactgcaggtgtttctgggtaatgtgccacatcatgtttatatcacgaacgggaattgaaaatcagtctgtgtgaggcagagatgagcccacatctgttatcctccc

SEQ ID NO: 276748 - DNA, 120 bp, Artificial Sequence
  ENSG00000128655_48 (sequence is synthesized)
caacaataaataaataaatagcccagacaaatggatgccagtccatctacagcaacattttaaagcatgtgctttatgacaaaactggacccagggtctgacagagactgcaggctgccg

SEQ ID NO: 276749 - DNA, 120 bp, Artificial Sequence
  ENSG00000128655_49 (sequence is synthesized)
tgagcactgtagctatcctgaacattgatgctacatattgctaaggggaacataatttatagcataaaccctacaagcttccactaaggttgagttttcctctcattttcttgccgtttt

SEQ ID NO: 276750 - DNA, 120 bp, Artificial Sequence
  ENSG00000128655_50 (sequence is synthesized)
attggcttcactgcatggttgccaatagcaacatccactggtagcaaggggagttcaacaccattgcaatctgccatacagtggagccctgacaatgtcaaccatcaatctagtagctgt

SEQ ID NO: 276751 - DNA, 120 bp, Artificial Sequence
  ENSG00000128655_51 (sequence is synthesized)
ttgtaattgcctccatctatttctcctgtcttgaggtatctttcctattgtgggtcaagatttagaaactgctgactaatgccatgggtctgtgtctccatgactatgaagcagtggaca

SEQ ID NO: 276752 - DNA, 120 bp, Artificial Sequence
  ENSG00000128655_52 (sequence is synthesized)
ggaaggtagcagcttcctggtgccaacaaccccagaggttagaggttgaactcttgcgggtttcaggcgtttttaatcccttttctaaacaatttataattttgcaagaatgtgaggcat

SEQ ID NO: 276753 - DNA, 120 bp, Artificial Sequence
  ENSG00000128655_53 (sequence is synthesized)
atgcagttatccatataatctgcttttccaaaaaagagaaaggaagtttcccagtccttattattaatgtttatttcctattggagaaagacatttgaaatatgagccttcttgtaaaaa

SEQ ID NO: 276754 - DNA, 120 bp, Artificial Sequence
  ENSG00000128655_54 (sequence is synthesized)
ctcaaactgaccagattatgtttgcttcctcaggtctcttggcattaattgttgaaataacttcatcctactttttcgatgagatgtatttttttcagacatatttattcttactagtca

SEQ ID NO: 276755 - DNA, 120 bp, Artificial Sequence
  ENSG00000128655_55 (sequence is synthesized)
ctatgtagctattatgtgcacaatctacaatgtagtggcaatcctggtgggtagggacagcttcacatactgcaaagggtgccattcagtgcatagcagactggaactccctcctagctt

SEQ ID NO: 276756 - DNA, 120 bp, Artificial Sequence
  ENSG00000128655_56 (sequence is synthesized)
ggccaccagctgaacctgtaatcttaggactctccaagtcttagaatctccatctattacataaaagcactgacttttattcagtccccacaccaaaggaccaagacgtgtttagcttta

SEQ ID NO: 276757 - DNA, 120 bp, Artificial Sequence
  ENSG00000128655_57 (sequence is synthesized)
aagaaattttccagataattttcttttttattcttctcaaataaaatagcaacaaacctaaagcagtcatcttcttaataaagacataataaaacttacatatatggggtagatgtaagc

SEQ ID NO: 276758 - DNA, 120 bp, Artificial Sequence
  ENSG00000128655_58 (sequence is synthesized)
atgtaagcacaatcatactacagatgtatcttgagcctgtctctaattatgatgaaagatgtagtcatcaatacaatttaaaaaaagatatgtcctttttttgagacagggtcttgctct

SEQ ID NO: 276759 - DNA, 69 bp, Artificial Sequence
  ENSG00000128655_59 (sequence is synthesized)
acagccactgcagccttgacctctccaacttaagtgatctttcctgcctcagcctcatgagtagctggg

SEQ ID NO: 276760 - DNA, 63 bp, Artificial Sequence
  ENSG00000128655_60 (sequence is synthesized)
caccaccacacccagctaaattttgtattgtttgtaaagacgaggcctcactatgctgaccac

SEQ ID NO: 276761 - DNA, 120 bp, Artificial Sequence
  ENSG00000128655_61 (sequence is synthesized)
accaccacacccaccttatatgtccttttatttcataaaaaacaattttagattatctgatatcacacatatcccataaatggtagtcattaatttagaagtgaatttataaagttaaga

SEQ ID NO: 276762 - DNA, 120 bp, Artificial Sequence
  ENSG00000128655_62 (sequence is synthesized)
gaagttaaaattgcacatgcattttgtttctaaaatctgagatgtctatgcatttccaggtattgtatatttgcaaatacattgggttagaaatcatctttaacattttgtgttagtgta

SEQ ID NO: 276763 - DNA, 120 bp, Artificial Sequence
  ENSG00000128655_63 (sequence is synthesized)
ataacaatattatctaatattaatgctgccagaatccagttgctttttctgtgtatcaaaatttatcataactttttccacttaacactaggtaattaaacagaatctgcccaatttatt

SEQ ID NO: 276764 - DNA, 120 bp, Artificial Sequence
  ENSG00000128655_64 (sequence is synthesized)
ctgcagtaaaattattttaaaatctatttttcctgctgactcttagaaattgcagaaagacaaaaaccagtttcatctccagtaatagtgtgaaacaatttccttccagtgggacagaaa

SEQ ID NO: 276765 - DNA, 120 bp, Artificial Sequence
  ENSG00000128655_65 (sequence is synthesized)
cctagacatactagggaaagatttaaatataaagaaaaatgccttggctgaaaaaaaaaaaaaccaccaaaacacaaaaaggattcattaaagcaacagaacaaaacctaatttgggacc

SEQ ID NO: 276766 - DNA, 120 bp, Artificial Sequence
  ENSG00000128655_66 (sequence is synthesized)
ctaaaaactctggcaatgccactgtaatgaagtttcattatctgcttcagagtaacagtctctgaaattgttattctgctacatgctgtaaagaactcccaaaactcaaatgtatcagga

SEQ ID NO: 276767 - DNA, 120 bp, Artificial Sequence
  ENSG00000128655_67 (sequence is synthesized)
aatgtaaaggttaagtctgactacaagaaggccaaaattgcaccagcttcctaagtgaagaataatagaataaaacatatagagggcagaaataaaatgaggtgtatctggagaatttca

SEQ ID NO: 276768 - DNA, 120 bp, Artificial Sequence
  ENSG00000128655_68 (sequence is synthesized)
tgatgagcatttagatttagcaatgcccaatgtcatgctgacactgtttgtcatgaccttgtcttcagctagtaatttggggttgtacttttttaaatttaattttgaatgttcttgcat

SEQ ID NO: 276769 - DNA, 120 bp, Artificial Sequence
  ENSG00000128655_69 (sequence is synthesized)
gtttggtacctctctcctcactgctaaagataaattgtttatctgtataacataactacaccaatgtcatttttgtatacgctagtacacaaatgtgtttttttattaagtaatgaagta

SEQ ID NO: 276770 - DNA, 120 bp, Artificial Sequence
  ENSG00000128655_70 (sequence is synthesized)
tttgctgtgaaaaatgtattatttgtgccaccgtttatatctgtgttcattttctgtgtgtatatgcgtgtgtattcgaatctcaatttttcttttactctagtttagattaagacatat

SEQ ID NO: 276771 - DNA, 120 bp, Artificial Sequence
  ENSG00000128655_71 (sequence is synthesized)
ttagatgaaattttaaaaataacattggaaataggaggctaagttttgttgagtctcattcccttggggggaaattgcttttgccattttattttcatgtacaataacctaaaaaggatc

SEQ ID NO: 276772 - DNA, 120 bp, Artificial Sequence
  ENSG00000128655_72 (sequence is synthesized)
tcctactgacttccttcctaattattattgttttacacgaaagaaaggaaatacgttttcaattgagttgtttgaaatcattcactttgtgtagatttcccagactgatgtttcattgta

SEQ ID NO: 276773 - DNA, 120 bp, Artificial Sequence
  ENSG00000128655_73 (sequence is synthesized)
agaatattacattatagacaggttggccatttcacaagcaactaatccatagttttggaagcccgctttaagagacctgaatatctttgtttttaataaaatacttagagtttaactaaa

SEQ ID NO: 276774 - DNA, 120 bp, Artificial Sequence
  ENSG00000128655_74 (sequence is synthesized)
ataatgcttataaaccattgttggagccaggtagtaaactggagtgaaatgatacagctcttgcccataaatcttagctctgtagagcagatgaaaatgaaggagccccttatgtggcat

SEQ ID NO: 276775 - DNA, 120 bp, Artificial Sequence
  ENSG00000128655_75 (sequence is synthesized)
tggaaagatgttacttcatctcccaggtttgctcactgcaaatacaatcctgagaactgaactagggccttaaagtcctgacatgcatggcttggttttgtggattgcctctctcaacag

SEQ ID NO: 276776 - DNA, 120 bp, Artificial Sequence
  ENSG00000128655_76 (sequence is synthesized)
agagactacatgatcagatctggggagtaaatggtggcagagagaagaggagatctcagcagggagacactggaggcagaaagaccagtgaagagatttttctcatggtgcaggttatgc

SEQ ID NO: 276777 - DNA, 120 bp, Artificial Sequence
  ENSG00000128655_77 (sequence is synthesized)
gcaatctgcagctcttctttggagcacccccttattgatgatggaaagaaccctgtctgtgtctgccttgatacttggtattgccttggtacagcagcctgtgatgctgttacatagcat

SEQ ID NO: 276778 - DNA, 120 bp, Artificial Sequence
  ENSG00000128655_78 (sequence is synthesized)
gagggctgctggccccactgtccatacacttacaacatgaaaagctatctggcccaaaggtttatgctacacatagtttacaaagattatctcagagggcagaaccgggaggctggggac

SEQ ID NO: 276779 - DNA, 120 bp, Artificial Sequence
  ENSG00000128655_79 (sequence is synthesized)
ttataatctacccagaaggaaaagttcttccttatagaagatttcaattaacacacatggaaaggtggaaatggaaaaatcatcagctggcaaataccacggtagtaatttttattggca

SEQ ID NO: 276780 - DNA, 120 bp, Artificial Sequence
  ENSG00000128655_80 (sequence is synthesized)
acaataaatctttctgtaactgccctgggaccttgaacaagtcacttcaccttccttcaccttgagtttcctcacctataaaatgagagaattaataggagatttttctcaaaagttcca

SEQ ID NO: 276781 - DNA, 120 bp, Artificial Sequence
  ENSG00000128655_81 (sequence is synthesized)
tacagccctaccagtctataactataatgaaaattcaaacatagaaaagaagtcattctatgacccagcaattttacatatacatgtacatattcatatacacagagagagagaactcac

SEQ ID NO: 276782 - DNA, 120 bp, Artificial Sequence
  ENSG00000128655_82 (sequence is synthesized)
acaaattcacaaggaaacatgtacaaggtggttcatagctgcattgtatgtaatagcaagaaatattagaaaaatataaattttcatcttccaggaaatgggtaaatagacagtggtata

SEQ ID NO: 276783 - DNA, 120 bp, Artificial Sequence
  ENSG00000128655_83 (sequence is synthesized)
ataatagatggaaatagcatacatcagtatgaaggaatggcctagaattatatataacaacatgggtaactctcgcaagcattgaatggaaaaagcaagttgccagagaatacatacact

SEQ ID NO: 276784 - DNA, 120 bp, Artificial Sequence
  ENSG00000128655_84 (sequence is synthesized)
atgatgaccgtatttgtataaacttttaaaacacatagagcaatattatacaaaatttgcctagtaaaattataaggatatatgtgatgatgctttatacacaatttagaaaatggtcat

SEQ ID NO: 276785 - DNA, 120 bp, Artificial Sequence
  ENSG00000128655_85 (sequence is synthesized)
tgtatggtgagtgggaagaagacagaagcaacagttgggaggtgcacagggcctcaacaggactggcagagacttacttctaggcagggaggtagatggaaactctatgtatgtccactg

SEQ ID NO: 276786 - DNA, 120 bp, Artificial Sequence
  ENSG00000128655_86 (sequence is synthesized)
tgtaatttttataccttttacgtttattaaatatgcacaataaatttattacatgatcttgccatatcatcacttcaaaatcctttttgtagccttgtgaaaatgattaactctatctcc

SEQ ID NO: 276787 - DNA, 88 bp, Artificial Sequence
  ENSG00000128655_87 (sequence is synthesized)
tcctttttgtagccttgtgaaaatgattaactctatctcctgagctttcaagaaggatttttttcaggaactttaaaaaaatttaaat

SEQ ID NO: 276788 - DNA, 74 bp, Artificial Sequence
  ENSG00000128655_88 (sequence is synthesized)
cactctgggaggccgaggtgagcaaaacaccatctctactaaaaattaaaaaaattagctgagcatggtggcag

SEQ ID NO: 276789 - DNA, 120 bp, Artificial Sequence
  ENSG00000128655_89 (sequence is synthesized)
caagaaatgtagagggagaagagtgctggaagatgagtcaagaaaagtccactgtgtgttgggaatagattatgaagggctttgagtgtaggccctgtaagcaataggaagccatggaac

SEQ ID NO: 276790 - DNA, 120 bp, Artificial Sequence
  ENSG00000128655_90 (sequence is synthesized)
agccagaaagcttcctgtctgtcagatttccccattcatcaggccacagacattcttgggatgtagctagggaagaagtccagctgtagatacttttgagtttagtaggataatttttat

SEQ ID NO: 276791 - DNA, 120 bp, Artificial Sequence
  ENSG00000128655_91 (sequence is synthesized)
ggaaagttgttgctagctttatgctgtaggaacggcttttctgaatattcttttgctcaccatcccagttcactcaacatcttgatgcagatatacaaggttatgcagatgtatcttcca

SEQ ID NO: 276792 - DNA, 120 bp, Artificial Sequence
  ENSG00000128655_92 (sequence is synthesized)
ttttgtggaatcgccatatctaacgctcagctctttgctgcctcaaggaaagaatatgaaagaagcagaagttatgtaagggatgtgtattagtgaaaatgtctcaagtttgaccaagaa

SEQ ID NO: 276793 - DNA, 120 bp, Artificial Sequence
  ENSG00000128655_93 (sequence is synthesized)
cctgtttcttcctgatagtgaggaaaagctgctttgctttgctagaggtggttaatgacctctttgaagaacagactgacctggagaaaattgtcaagaaaataatgcatcgggcccaaa

SEQ ID NO: 276794 - DNA, 120 bp, Artificial Sequence
  ENSG00000128655_94 (sequence is synthesized)
tggctatctcagtaatatgaaaaaggcacgaccattggtcatgaagaagggaatgggtcaagtgaagaagataagaaagttatatgaagaaaagaactgtatacacctgcccacccaaag

SEQ ID NO: 276795 - DNA, 120 bp, Artificial Sequence
  ENSG00000128655_95 (sequence is synthesized)
aactgaattctttgaacttgtcagtaaaggagaatacgattggaacatcaaaaaccatcgtgatatatttcgaacaaatcaagaagataatgattgtcacaagattattattgaaataat

SEQ ID NO: 276796 - DNA, 120 bp, Artificial Sequence
  ENSG00000128655_96 (sequence is synthesized)
tttggcatatagaggagagatcaatgttaatgacagcctgtgaccttggagccgtgaccaaaccgtgggagatctccagacaggtggcagaacttgtaaccagtgagttcttcgaacaag

SEQ ID NO: 276797 - DNA, 120 bp, Artificial Sequence
  ENSG00000128655_97 (sequence is synthesized)
gccctgatggaagtgggaggagagccaaggtaaagggcctgttttctacaccgggggcatgcttctggtttatgagactgtgatgacagtaattaagggtaaataatgaagacttgccca

SEQ ID NO: 276798 - DNA, 120 bp, Artificial Sequence
  ENSG00000128655_98 (sequence is synthesized)
tattcaggctgttttgtttggttctgtttttcagatcaatgttaatgacagcctgtgaccttggagccgtgaccaaaccgtgggagatctccagacaggcaatttttgatcggaaccgga

SEQ ID NO: 276799 - DNA, 120 bp, Artificial Sequence
  ENSG00000128656_0 (sequence is synthesized)
gtgggagacgctatcgcaagatggcgtctgcgaggccgcgggatgcggagtgagcgcgccccgccgggggctgtgcgaggctgctgctgctctccccgtcgccgccgccgccgccgccag

SEQ ID NO: 276800 - DNA, 120 bp, Artificial Sequence
  ENSG00000128656_1 (sequence is synthesized)
tgcggcgccgcctctccgccagccactgcgccgcggccaagcctcctgcctcgcaggtacctcctcccgcgcgcacgctccgcgcctgatggcagcgacaagtgccggctcgcggagagc

SEQ ID NO: 276801 - DNA, 120 bp, Artificial Sequence
  ENSG00000128656_2 (sequence is synthesized)
tagcggggctccctgggcccggtgcgcccgacaataacgcgtgaataactttttcttgcagcggtcccccgcgtcccggcctgcagcctccccgggcgccggcgcccccagcacgcccca

SEQ ID NO: 276802 - DNA, 120 bp, Artificial Sequence
  ENSG00000128656_3 (sequence is synthesized)
tcgggcaccccactctctccgaggtgtgggtgcggcgggctgatgaggtgatccctagcccgcctgggaggagcgcctggactcgcgggcggcggcgagcgcctttacaatggccctgac

SEQ ID NO: 276803 - DNA, 120 bp, Artificial Sequence
  ENSG00000128656_4 (sequence is synthesized)
cctgtttgatacagatgaatatagacctcctgtttggaaatcttacttatatcagctacaacaggaagcccctcatcctcgaagaattacctgtacttgcgaggtggaaaacagaccaaa

SEQ ID NO: 276804 - DNA, 120 bp, Artificial Sequence
  ENSG00000128656_5 (sequence is synthesized)
gtattatggaagagagtttcatggcatgatctccagagaagcagccgaccagctcttgattgtggctgaggggagctacctcatccgggagagccagcggcagccagggacctacacttt

SEQ ID NO: 276805 - DNA, 120 bp, Artificial Sequence
  ENSG00000128656_6 (sequence is synthesized)
ggctttaagatttggaagtcaaaccagaaacttcaggctctactacgatggcaagcactttgttggggagaaacgctttgagtccatccacgatctggtgactgatggcttgattactct

SEQ ID NO: 276806 - DNA, 120 bp, Artificial Sequence
  ENSG00000128656_7 (sequence is synthesized)
ctatattgaaaccaaggcagcagaatacattgccaagatgacgataaacccaatttatgagcacgtaggatacacaaccttaaacagagagccagcatacaaaaaacatatgccagtcct

SEQ ID NO: 276807 - DNA, 120 bp, Artificial Sequence
  ENSG00000128656_8 (sequence is synthesized)
gaaagagacacatgatgagagagattctacaggccaggatggggtgtcagagaaaaggttgacatcacttgttagaagagcaactctgaaagaaaacgagcaaattccaaaatatgaaaa

SEQ ID NO: 276808 - DNA, 120 bp, Artificial Sequence
  ENSG00000128656_9 (sequence is synthesized)
gattcacaatttcaaggtgcatacattcagagggccacactggtgtgaatactgtgccaactttatgtggggtctcattgctcagggagtgaaatgtgcagattgtggtttgaatgttca

SEQ ID NO: 276809 - DNA, 120 bp, Artificial Sequence
  ENSG00000128656_10 (sequence is synthesized)
taagcagtgttccaagatggtcccaaatgactgtaagccagacttgaagcatgtcaaaaaggtgtacagctgtgaccttacgacgctcgtgaaagcacataccactaagcggccaatggt

SEQ ID NO: 276810 - DNA, 120 bp, Artificial Sequence
  ENSG00000128656_11 (sequence is synthesized)
catcagggagattgagtctagaggtcttaattctgaaggactataccgagtatcaggatttagtgacctaattgaagatgtcaagatggctttcgacagagatggtgagaaggcagatat

SEQ ID NO: 276811 - DNA, 120 bp, Artificial Sequence
  ENSG00000128656_12 (sequence is synthesized)
ttctgtgaacatgtatgaagatatcaacattatcactggtgcacttaaactgtacttcagggatttgccaattccactcattacatatgatgcctaccctaagtttatagaatctgccaa

SEQ ID NO: 276812 - DNA, 120 bp, Artificial Sequence
  ENSG00000128656_13 (sequence is synthesized)
aattatggatccggatgagcaattggaaacccttcatgaagcactgaaactactgccacctgctcactgcgaaaccctccggtacctcatggcacatctaaagagagtgaccctccacga

SEQ ID NO: 276813 - DNA, 120 bp, Artificial Sequence
  ENSG00000128656_14 (sequence is synthesized)
aaaggagaatcttatgaatgcagagaaccttggaatcgtctttggacccacccttatgagatctccagaactagacgccatggctgcattgaatgatatacggtatcagagactggtggt

SEQ ID NO: 276814 - DNA, 120 bp, Artificial Sequence
  ENSG00000128656_15 (sequence is synthesized)
ggagctgcttatcaaaaacgaagacattttattttaaatttttaatttgaggggaaaagaaatgttttacagatgaaggaatgttttatagtaatttaatttgctcctgtagctgcatta

SEQ ID NO: 276815 - DNA, 120 bp, Artificial Sequence
  ENSG00000128656_16 (sequence is synthesized)
tttcttgattagaggtttgggcatataaccagattaaagtgaaggaactttctgttgtttttgtagcaccgctcagctgtcttgtaaaacagtgaacacacgctttctggttctagtaat

SEQ ID NO: 276816 - DNA, 120 bp, Artificial Sequence
  ENSG00000128656_17 (sequence is synthesized)
cctgggtgtttatcacgttcagagaaactcaagctattgcatgattagccccctatctggcaaggaaaccccatacagaagaaacaacaaacctgcgcctgcaccgcctctgcgtcctgg

SEQ ID NO: 276817 - DNA, 120 bp, Artificial Sequence
  ENSG00000128656_18 (sequence is synthesized)
gtagtctgtgcttgtaatccagcatgtttcacagagtaagcctgttgtgactttgcttttggggtctatgtcattggtttctgatgcttgtacaaacacgcacacacaaatggataaaac

SEQ ID NO: 276818 - DNA, 120 bp, Artificial Sequence
  ENSG00000128656_19 (sequence is synthesized)
agcacctctggctgttacattaccataaaccatatcacatgcctacattttacaaatgatttctggtttctcttagttcttctctaacatagtactttctttccagcaaaagcaaaatgt

SEQ ID NO: 276819 - DNA, 120 bp, Artificial Sequence
  ENSG00000128656_20 (sequence is synthesized)
gttttcagatttgttactttaataaaggttatccataccaataaaaagtgtacaacacagcattttctgttaaattattattggttttcagttgtaatttggtattttttctggcatgcg

SEQ ID NO: 276820 - DNA, 120 bp, Artificial Sequence
  ENSG00000128656_21 (sequence is synthesized)
tttattaatttattaaattggcttttagaaataaaaaatattgatagcttacttttttctcataagaatattcgggaaaatgtgtttggccatttattaaatactgagtacttcttctga

SEQ ID NO: 276821 - DNA, 120 bp, Artificial Sequence
  ENSG00000128656_22 (sequence is synthesized)
gttaatgaattgaccatgatgaaaggaggatggctaccatgggactgttgatgctgctgacactagcagcttctcctcactttttgagtatttgctttcaccatgtatgcgtgcatacat

SEQ ID NO: 276822 - DNA, 120 bp, Artificial Sequence
  ENSG00000128656_23 (sequence is synthesized)
gctagaaactgattgcaggcagtatgtaggcatctttcattcagaatggacattaatatcttgaatagagaagaaagcttttagaaatgtatcatttgtcaaaattgcatgccttttaaa

SEQ ID NO: 276823 - DNA, 120 bp, Artificial Sequence
  ENSG00000128656_24 (sequence is synthesized)
aaatgataaagagagatgctgagtgttttgtatgttagcatcgactctttctttttatttctgttcagactcaagtttttagaagctagaatatagatccctttaagaaaaaaaaaggaa

SEQ ID NO: 276824 - DNA, 120 bp, Artificial Sequence
  ENSG00000128656_25 (sequence is synthesized)
gaaagaagaatttgctggttagtcgacctctgtttaagaagtgcttcatcctcctcctccacctctccgtggtgtttctctgcagctctctgtaggttagggttctgtgctgcctggcag

SEQ ID NO: 276825 - DNA, 120 bp, Artificial Sequence
  ENSG00000128656_26 (sequence is synthesized)
aatgctcatgtgttagctgaatagatatcatcgacagacatagaccactataggttttctttccttgtgaattccaaaatgccatccaaagagtcttggtcagggaggaaaactaatagg

SEQ ID NO: 276826 - DNA, 120 bp, Artificial Sequence
  ENSG00000128656_27 (sequence is synthesized)
gctgcagttcacaaatcaaaacaagagggccgtcagcaagatttattgatagcagccttgggaatgaaactgggttctccaaagtcgtctgtgacaatctggcaacctctgaaactcttt

SEQ ID NO: 276827 - DNA, 120 bp, Artificial Sequence
  ENSG00000128656_28 (sequence is synthesized)
atgctggaagaaattatggatccggatgagcaattggaaacccttcatgaagcactgaaactactgccacctgctcactgcgaaaccctccggtacctcatggcacatctaaagagagtg

SEQ ID NO: 276828 - DNA, 120 bp, Artificial Sequence
  ENSG00000128656_29 (sequence is synthesized)
ctgttctttaatggctgtgaagttactctggtaaagatgattttaggttttgaagtagttggtgctaggtttgacaggcagcaggtgagtggtgtggatgtccatttgaggaaaatggaa

SEQ ID NO: 276829 - DNA, 120 bp, Artificial Sequence
  ENSG00000128656_30 (sequence is synthesized)
gattatggagaacagagccaaatatccagcactgacttgttataagtatatcagctacaacaggaagcccctcatcctcgaagaattacctgtacttgcgaggcaaggatcatcagtcat

SEQ ID NO: 276830 - DNA, 120 bp, Artificial Sequence
  ENSG00000128656_31 (sequence is synthesized)
agagttggggcgcccggggcgccggcttgctccctcgcgcctctcccattgtttcctctcccggcagggccgatgggcgtgtgctcccctggccaattctcggctgggaggctcagaggt

SEQ ID NO: 276831 - DNA, 120 bp, Artificial Sequence
  ENSG00000128656_32 (sequence is synthesized)
cagcttgaaacgttgattccctgtcacaatggatgacatttagatgaggtttctccatgttgcccaagctggtctcaaactcttgagctcaagtgatctacccacctccgcctcctgaag

SEQ ID NO: 276832 - DNA, 120 bp, Artificial Sequence
  ENSG00000128656_33 (sequence is synthesized)
tgctgggattacagacttgacatcacttgttagaagagcaactctgaaagaaaacgagcaaattccaaaatatgaaaagattcacaatttcaaggtgcatacattcagagggccacactg

SEQ ID NO: 276833 - DNA, 120 bp, Artificial Sequence
  ENSG00000128656_34 (sequence is synthesized)
gaggtatgtttttcacaatgttccataacttaggacaataatactcttttctaaaaaggcacaatttcttgtgaggtattttttgcattatttttctaaatcattgatgattattatacc

SEQ ID NO: 276834 - DNA, 120 bp, Artificial Sequence
  ENSG00000128656_35 (sequence is synthesized)
aaattaaaaaacttagcttataatttcttcttttttctgagttgtaagtattaaacagtcaaatttcagaatatgaaagaagtataaaattaaactatgttaccaatatttgagtatcca

SEQ ID NO: 276835 - DNA, 120 bp, Artificial Sequence
  ENSG00000128656_36 (sequence is synthesized)
tcaccaaaatacatacagagcaattacattcaccaaaaatgatagagaaaagagtaggatctataccattacagatttcaggcttctcaggcttgagttaacccaccttaccctgcctgt

SEQ ID NO: 276836 - DNA, 120 bp, Artificial Sequence
  ENSG00000128656_37 (sequence is synthesized)
catccatgccccgctggcatcctcatcaccatcttcgattagctgagtgagacccaagcccggactcaagttttggggccagaaagctgaaagaagctttaggggccttctgtgggggac

SEQ ID NO: 276837 - DNA, 120 bp, Artificial Sequence
  ENSG00000128656_38 (sequence is synthesized)
ccatcagccactgtaggagaaggggcccagtcaaagaaaagctcagtggagcttaattttcttagctaacatttaaattaagatttgcttccatggctctccaatttgtctttgcttcaa

SEQ ID NO: 276838 - DNA, 120 bp, Artificial Sequence
  ENSG00000128656_39 (sequence is synthesized)
ggaccagtaacatctcggggaaatgcatgtactgattgcttgtctaacctagcatctgctcctagaacagggaaatgggtcagcttgttctggaagaaagaattcagttgcttacttttc

SEQ ID NO: 276839 - DNA, 120 bp, Artificial Sequence
  ENSG00000128656_40 (sequence is synthesized)
agtgctactaatgggaagaaaggaaaataggatacattttctgcgtttttttttttttcttttctttagcaagccatatggttaaatggatacgtaagaaaggaattgtcctcttgagag

SEQ ID NO: 276840 - DNA, 120 bp, Artificial Sequence
  ENSG00000128656_41 (sequence is synthesized)
gtttcatggcatgatctccagagaagcagccgaccagctcttgattgtggctgaggggagctacctcatccgggagagccagcggcagccagggacctacactttggctttaaggtgtca

SEQ ID NO: 276841 - DNA, 120 bp, Artificial Sequence
  ENSG00000128656_42 (sequence is synthesized)
tccaacaggacagggttgatgacctgttcaacagcttgaaacgttgattccctgtcacaatggatgacatttttgacatcacttgttagaagagcaactctgaaagaaaacgagcaaatt

SEQ ID NO: 276842 - DNA, 120 bp, Artificial Sequence
  ENSG00000128656_43 (sequence is synthesized)
gacaaaactggatgttccctccatccccaaaagtccaagtaaatagtgttgccacattgaaactaagagcctttggaaatctggacttgaaccttaaaaataatttccaaagctgtggac

SEQ ID NO: 276843 - DNA, 120 bp, Artificial Sequence
  ENSG00000128656_44 (sequence is synthesized)
aaggaattacgagaaagcatttcttaccagtttcagagcattatcacaagaatagaattcagtgaaccatttgtatcagttttgtgttatttcttttcttcttggtattcgacttgctat

SEQ ID NO: 276844 - DNA, 120 bp, Artificial Sequence
  ENSG00000128656_45 (sequence is synthesized)
catgtgcatcagggagattgagtctagaggtgagccatttgcagtgcgggttgcagtggtctccgttcactaccagtaccaatcctgatgccttttgggtacctcattgcacaatacggt

SEQ ID NO: 276845 - DNA, 120 bp, Artificial Sequence
  ENSG00000128656_46 (sequence is synthesized)
tgtcttctgtaatttggaggggaatggtttcatatgtcaaatgatctcaaagactgaaatgaattaatttaacaattaaatagcttgatttcaaggtacatttaactaagtgtagccaat

SEQ ID NO: 276846 - DNA, 80 bp, Artificial Sequence
  ENSG00000128656_47 (sequence is synthesized)
ggatcacgagatcaggagatcaagaccaaaaaattagccagccatggtggcatgcgcctttagtcccagctactcaggag

SEQ ID NO: 276847 - DNA, 80 bp, Artificial Sequence
  ENSG00000128656_48 (sequence is synthesized)
atagattttgttattgtgacttctggtttaaaacacaatatagctttgaaagtatataattagttaacaaagagaaccaa

SEQ ID NO: 276848 - DNA, 120 bp, Artificial Sequence
  ENSG00000128656_49 (sequence is synthesized)
tagctttgaaagtatataattagttaacaaagagaaccaatttacagaattaggcaggagtttcatgggattgtcttttgaatgtccagttgcagtttagatatatgtagatttccagtc

SEQ ID NO: 276849 - DNA, 120 bp, Artificial Sequence
  ENSG00000128656_50 (sequence is synthesized)
gggaattttaaaaatgctatttaataaaatgtttcattttgtttcatgttctgttcacacatactttttaattttttaagtatgtgagaaactgaaagtgagaaattggcagtactttgg

SEQ ID NO: 276850 - DNA, 120 bp, Artificial Sequence
  ENSG00000128656_51 (sequence is synthesized)
aaagtcctgaagtatttattagtaagactattatctttgttgaaaaatagctatattattcctttcttaaaataatttgagacctcacaaatgaagacataataaaaagaataaagaaaa

SEQ ID NO: 276851 - DNA, 120 bp, Artificial Sequence
  ENSG00000128656_52 (sequence is synthesized)
gttgaaggaataaaaacagcaaaatgccagtagattgcagtgctgattgaggctcaatgtagttgtgtgaaaagtgtttcacagttataaagtatatgaaactctgaaggccagtatgat

SEQ ID NO: 276852 - DNA, 120 bp, Artificial Sequence
  ENSG00000128656_53 (sequence is synthesized)
ccagttttttcctgaattaaattgttttaaaaaaattcatttggtgtgacattaaggtacgataaatcaatggaactcacttttgaagagctaagctgatgtggtcacagtagatagctt

SEQ ID NO: 276853 - DNA, 120 bp, Artificial Sequence
  ENSG00000128656_54 (sequence is synthesized)
tctgatgattcaccttgatgcaaagacacaagatagaataatatactggatgaatagatggatgttagagtctctgaaaataatttccttttatttacctttgctctgtgattgaatgct

SEQ ID NO: 276854 - DNA, 120 bp, Artificial Sequence
  ENSG00000128656_55 (sequence is synthesized)
gccatcccctgaggaactagaccaattatttgtattctctcctttggttaaaagcaggcatgaaagcattgaaaaaccagaaaagcaaattgtacaattgacattttcctacttaaattg

SEQ ID NO: 276855 - DNA, 120 bp, Artificial Sequence
  ENSG00000128656_56 (sequence is synthesized)
tttcctacttaaattgagcaatgtattcatcatttccactttgcaatataaaaaatatttattgtattaacttttcacaatattttgtgaaatatttatgtttcacaaaaatatagattt

SEQ ID NO: 276856 - DNA, 120 bp, Artificial Sequence
  ENSG00000128656_57 (sequence is synthesized)
gtttgtttatatttaaaaatatttatatttttttctccaaaaaaatagtcatgttctaatgactaaattggtgggcaaggaatgctgttcagaatgaaaggatttactgtgactggctct

SEQ ID NO: 276857 - DNA, 120 bp, Artificial Sequence
  ENSG00000128656_58 (sequence is synthesized)
ccttgtacattgaaactatccttacatattattcacaacttatagtctgttacttattaacagcttatagtcagttccttaagtttgactgtttaataaggattaaatatgtgtgcatac

SEQ ID NO: 276858 - DNA, 120 bp, Artificial Sequence
  ENSG00000128656_59 (sequence is synthesized)
gattcacaatttcaagaactacctttgtttggagcttcacctcttgcatgtgacacaaccctgatctctgcttgtgctctgcctggtacacatgcccttgttcttaaagagaagtccatc

SEQ ID NO: 276859 - DNA, 120 bp, Artificial Sequence
  ENSG00000128656_60 (sequence is synthesized)
tctagggggtgtgctaatttgctttgatggttgctgttacagctcattactccgcaattgtattacttcagtgtgtttttcttaatctgttaccatgaatatatttactatttgatggaa

SEQ ID NO: 276860 - DNA, 120 bp, Artificial Sequence
  ENSG00000128656_61 (sequence is synthesized)
agaagctgcaagaagagcttagctgtgcagcttggggaagaggttattgtggataaagtgaaatggctcttcttacctttcaatgcacctccttctgggctttgcatttacctggagtac

SEQ ID NO: 276861 - DNA, 120 bp, Artificial Sequence
  ENSG00000128656_62 (sequence is synthesized)
atgctttgaaatgaggatatttgaggcatccagccttgtttgtctttcccaagatcgttttggccatttgtggtcttttgagatttcatatgaatttcagaatcttttttctacttctgc

SEQ ID NO: 276862 - DNA, 120 bp, Artificial Sequence
  ENSG00000128656_63 (sequence is synthesized)
aaaaattctatggaggttttagtagggattgctttagtgtctagattgctttagtgtctagattgctttggatagtatggacatttttaacagtattaagttttctaacctgtaaacatg

SEQ ID NO: 276863 - DNA, 120 bp, Artificial Sequence
  ENSG00000128656_64 (sequence is synthesized)
agtatcttcgcatttatttgtgtcttcttcaatttctttcagtaatgttttgtagtttttagtatacaagtcttttgccttttaagtttatttctaagtattttattctttttgatactc

SEQ ID NO: 276864 - DNA, 120 bp, Artificial Sequence
  ENSG00000128656_65 (sequence is synthesized)
ttatgtggcagtactttgtcttgaaaacaacaagagaaggtggtggtggtgggacgttgttttatcttgttttattgaaaaatgtagaaagcacagtttctgaatagactttgtttctta

SEQ ID NO: 276865 - DNA, 120 bp, Artificial Sequence
  ENSG00000128656_66 (sequence is synthesized)
ttttttttttttttttttttgccttgagccagcaagaaacttacttacatgagaggagggagaaacagagacagattgacatcacttgttagaagagcaactctgaaagaaaacgagcaa

SEQ ID NO: 276866 - DNA, 120 bp, Artificial Sequence
  ENSG00000128683_0 (sequence is synthesized)
ctcttctcctggcgctcgcgtgcgagagggaactagcgagaacgaggaagcagctggaggtgacgccgggcagattacgcctgtcagggccgagccgagcggatcgctgggcgctgtgca

SEQ ID NO: 276867 - DNA, 120 bp, Artificial Sequence
  ENSG00000128683_1 (sequence is synthesized)
gaggaaaggcgggagtgcccggctcgctgtcgcagagccgagcctgtttctgcgccggaccagtcgaggactctggacagtagaggccccgggacgaccgagctgatggcgtcttcgacc

SEQ ID NO: 276868 - DNA, 120 bp, Artificial Sequence
  ENSG00000128683_2 (sequence is synthesized)
ccatcttcgtccgcaacctcctcgaacgcgggagcggaccccaataccactaacctgcgccccacaacgtacgatacctggtgcggcgtggcccatggatgcaccagaaaactggggctc

SEQ ID NO: 276869 - DNA, 120 bp, Artificial Sequence
  ENSG00000128683_3 (sequence is synthesized)
aagatctgcggcttcttgcaaaggaccaacagcctggaagagaagagtcgccttgtgagtgccttcaaggagaggcaatcctccaagaacctgctttcctgtgaaaacagcgaccgggat

SEQ ID NO: 276870 - DNA, 120 bp, Artificial Sequence
  ENSG00000128683_4 (sequence is synthesized)
gcccgcttccggcgcacagagactgacttctctaatctgtttgctagagatctgcttccggctaagaacggtgaggagcaaaccgtgcaattcctcctggaagtggtggacatactcctc

SEQ ID NO: 276871 - DNA, 120 bp, Artificial Sequence
  ENSG00000128683_5 (sequence is synthesized)
aactatgtccgcaagacatttgatcgctccaccaaggtgctggactttcatcacccacaccagttgctggaaggcatggagggcttcaacttggagctctctgaccaccccgagtccctg

SEQ ID NO: 276872 - DNA, 120 bp, Artificial Sequence
  ENSG00000128683_6 (sequence is synthesized)
gagcagatcctggttgactgcagagacaccttgaagtatggggttcgcacaggtcatcctcgatttttcaaccagctctccactggattggatattattggcctagctggagaatggctg

SEQ ID NO: 276873 - DNA, 120 bp, Artificial Sequence
  ENSG00000128683_7 (sequence is synthesized)
acatcaacggccaataccaacatgtttacatatgaaattgcaccagtgtttgtcctcatggaacaaataacacttaagaagatgagagagatagttggatggtcaagtaaagatggtgat

SEQ ID NO: 276874 - DNA, 120 bp, Artificial Sequence
  ENSG00000128683_8 (sequence is synthesized)
gggatattttctcctgggggcgccatatccaacatgtacagcatcatggctgctcgctacaagtacttcccggaagttaagacaaagggcatggcggctgtgcctaaactggtcctcttc

SEQ ID NO: 276875 - DNA, 120 bp, Artificial Sequence
  ENSG00000128683_9 (sequence is synthesized)
acctcagaacagagtcactattccataaagaaagctggggctgcacttggctttggaactgacaatgtgattttgataaagtgcaatgaaagggggaaaataattccagctgattttgag

SEQ ID NO: 276876 - DNA, 120 bp, Artificial Sequence
  ENSG00000128683_10 (sequence is synthesized)
gcaaaaattcttgaagccaaacagaagggatatgttcccttttatgtcaatgcaactgctggcacgactgtttatggagcttttgatccgatacaagagattgcagatatatgtgagaaa

SEQ ID NO: 276877 - DNA, 120 bp, Artificial Sequence
  ENSG00000128683_11 (sequence is synthesized)
tataacctttggttgcatgtcgatgctgcctggggaggtgggctgctcatgtccaggaagcaccgccataaactcaacggcatagaaagggccaactcagtcacctggaaccctcacaag

SEQ ID NO: 276878 - DNA, 120 bp, Artificial Sequence
  ENSG00000128683_12 (sequence is synthesized)
atgatgggcgtgctgttgcagtgctctgccattctcgtcaaggaaaagggtatactccaaggatgcaaccagatgtgtgcaggatacctcttccagccagacaagcagtatgatgtctcc

SEQ ID NO: 276879 - DNA, 120 bp, Artificial Sequence
  ENSG00000128683_13 (sequence is synthesized)
gtggatatcttcaagttctggctgatgtggaaagcaaagggcacagtgggatttgaaaaccagatcaacaaatgcctggaactggctgaatacctctatgccaagattaaaaacagagaa

SEQ ID NO: 276880 - DNA, 120 bp, Artificial Sequence
  ENSG00000128683_14 (sequence is synthesized)
gaatttgagatggttttcaatggcgagcctgagcacacaaacgtctgtttttggtatattccacaaagcctcaggggtgtgccagacagccctcaacgacgggaaaagctacacaaggtg

SEQ ID NO: 276881 - DNA, 120 bp, Artificial Sequence
  ENSG00000128683_15 (sequence is synthesized)
gctccaaaaatcaaagccctgatgatggagtcaggtacgaccatggttggctaccagccccaaggggacaaggccaacttcttccggatggtcatctccaacccagccgctacccagtct

SEQ ID NO: 276882 - DNA, 120 bp, Artificial Sequence
  ENSG00000128683_16 (sequence is synthesized)
gacattgacttcctcattgaggagatagaaagactgggccaggatctgtaatcatccttcgcagaacatgagtttatgggaatgccttttccctctggcactccagaacaaacctctata

SEQ ID NO: 276883 - DNA, 120 bp, Artificial Sequence
  ENSG00000128683_17 (sequence is synthesized)
tgttgctgaaacacacaggccatttcattgagggaaaacataatatcttgaagaatattgttaaaaccttacttaaagcttgtttgttctagttagcaggaaatagtgttctttttaaaa

SEQ ID NO: 276884 - DNA, 120 bp, Artificial Sequence
  ENSG00000128683_18 (sequence is synthesized)
agttgcacattaggaacagagtatatatgtacagttatacatacctctctctatatatacatgtatagtgagtgtggcttagtaatagatcacggcatgtttcccgctccaagagaattc

SEQ ID NO: 276885 - DNA, 120 bp, Artificial Sequence
  ENSG00000128683_19 (sequence is synthesized)
actttaccttcagcagttaccgaggagctaaacatgctgccaaccagcttgtccaacaactccaggaaaactgtttttcaaaacgccatgtcctaggggccgagggaaatgctgttggtg

SEQ ID NO: 276886 - DNA, 120 bp, Artificial Sequence
  ENSG00000128683_20 (sequence is synthesized)
agaatcgacctcactgtcagcgtttctccacctgaagtgatgatggatgagaaaaaacaccaccaaatgacaagtcacaccctccccattagtatcctgttaggggaaaatagtagcaga

SEQ ID NO: 276887 - DNA, 120 bp, Artificial Sequence
  ENSG00000128683_21 (sequence is synthesized)
gtcattgttacaggtgtactatggctgtatttttagagattaatttgtgtagattgtgtaaattcctgttgtctgaccttggtggtgggagggggagactatgtgtcatgatttcaatga

SEQ ID NO: 276888 - DNA, 120 bp, Artificial Sequence
  ENSG00000128683_22 (sequence is synthesized)
ttgtttaattgtaggtcaatgaaatatttgcttatttatattcagagatgtaccatgttaaagaggcgtcttgtattttcttcccatttgtaatgtatcttatttatatatgaagtaagt

SEQ ID NO: 276889 - DNA, 120 bp, Artificial Sequence
  ENSG00000128683_23 (sequence is synthesized)
tctgaaaactgtttatggtattttcgtgcatttgtgagccaaagagaaaagattaaaattagtgagatttgtatttatattagagtgcccttaaaataatgatttaagcattttactgtc

SEQ ID NO: 276890 - DNA, 120 bp, Artificial Sequence
  ENSG00000128683_24 (sequence is synthesized)
tgtaagagaattctaagattgtacataaagtcatatatatggaaatcctgttacttaaatagcatctgctcttctcttacgctctctgtctggctgtacgtctggtgttctcaatgcttt

SEQ ID NO: 276891 - DNA, 120 bp, Artificial Sequence
  ENSG00000128683_25 (sequence is synthesized)
tctagcaactgttggataataactagatctcctgtaattttgtagtagttgatgaccaatctctgtgactcgcttagctgaaacctaaggcaacatttccgaagaccttctgaagatctc

SEQ ID NO: 276892 - DNA, 120 bp, Artificial Sequence
  ENSG00000128683_26 (sequence is synthesized)
agataaagtgaccaggctcacaactgtttttgaagaagggaaattcacactgtgcgttttagagtatgcaagaagaatataaataaataaaaatattctccatggagaatttgaacaaaa

SEQ ID NO: 276893 - DNA, 120 bp, Artificial Sequence
  ENSG00000128683_27 (sequence is synthesized)
attttcctgcctcccagctgtgagtgttgtgtggtctgttgggatgggggtgtggatttagctatgatccttcaaaaaagtccagaataattcagggaactatctttaaagtacaaaaac

SEQ ID NO: 276894 - DNA, 120 bp, Artificial Sequence
  ENSG00000128683_28 (sequence is synthesized)
agcaaatggaccttagctccgacttaagcagaatgaaaggttaagtaacgcttcccccagttctcgtctcgggagacagacgtttaaccgcctgtttctgcgccggaccagtcgaggact

SEQ ID NO: 276895 - DNA, 120 bp, Artificial Sequence
  ENSG00000128683_29 (sequence is synthesized)
ctattttgttggtgaagtatcacagggctggcacttccaccacctctctcagtaacccaggctggtttctgacattttatgatcggcgacttaatgcatttccaggaaatgaatcatgtt

SEQ ID NO: 276896 - DNA, 120 bp, Artificial Sequence
  ENSG00000128683_30 (sequence is synthesized)
agtggtttggaacagcttttttttagaacccaactacaaatactaaaccaatcctctgtgttcctaaaataagtggtttgacttctttattttctttcatccttcttcttaccacctttc

SEQ ID NO: 276897 - DNA, 120 bp, Artificial Sequence
  ENSG00000128683_31 (sequence is synthesized)
taaagatggtgatgggatattttctcctgggtaaagggtccagtgggaagccccagcaatagggaagccagcaaaacctatcaggatattatcctttcgcttcctgacctcccttgtctc

SEQ ID NO: 276898 - DNA, 120 bp, Artificial Sequence
  ENSG00000128683_32 (sequence is synthesized)
ttgagacaccagctcagcgttcgtttttagaaacaataatcaaagagccccaacacctcccaatatgtccgcttgctgacagggggcgccatatccaacatgtacagcatcatggctgct

SEQ ID NO: 276899 - DNA, 120 bp, Artificial Sequence
  ENSG00000128683_33 (sequence is synthesized)
ggtagcccctgccccactcccgccccatgctagccagtagatttcttatttgagtttcttgactttttcctgcaattttacttcttttatcaagaaatgtcattattctctctgaaccca

SEQ ID NO: 276900 - DNA, 120 bp, Artificial Sequence
  ENSG00000128683_34 (sequence is synthesized)
catgaaactgcttttgtgactttgggggaatataattgactccctccctccctgctggccaggtctccatcattttggaaactggatgaaggcagtcaataaaagtcaactctaaagaca

SEQ ID NO: 276901 - DNA, 120 bp, Artificial Sequence
  ENSG00000128683_35 (sequence is synthesized)
aggtagaggagaaacgctgaaaccggaccgaaacctcgccctaggcttagcgatggctaaaaaccggctgggataagagggaggcaagcaacattccgactcgctgctttctggctgtct

SEQ ID NO: 276902 - DNA, 120 bp, Artificial Sequence
  ENSG00000128683_36 (sequence is synthesized)
cctccagaggtgatggtaactgcacacatggtttccaagggtcttcctcctaaatttccaggggcctcccaaggaaaatggacatattctttttggaaataaaatacttctaccaacata

SEQ ID NO: 276903 - DNA, 120 bp, Artificial Sequence
  ENSG00000128683_37 (sequence is synthesized)
gtgcgtgtcatcaaccttcaaacgtgattaatcaggaggccttcttttcccatcaccaagggggccaaagcgaggagcgagcgcatagcaaaagggacgcggggtccttttctctgccgg

SEQ ID NO: 276904 - DNA, 120 bp, Artificial Sequence
  ENSG00000128683_38 (sequence is synthesized)
tggcactgggtagctgtggccagctccagaggcggtcaggcacctgcagaggagccccgccgctccgccgactagctgcccccgcgagcaacggcctcgtgatttccccgccgatccggt

SEQ ID NO: 276905 - DNA, 120 bp, Artificial Sequence
  ENSG00000128683_39 (sequence is synthesized)
gaattcttcgtaggaattatcttttccctcctctcacccgacagcctgcctatttccaaaggaaaaaaaaaaagcgtgttgagtacgttctggattactcataagaccttttttttttcc

SEQ ID NO: 276906 - DNA, 120 bp, Artificial Sequence
  ENSG00000128683_40 (sequence is synthesized)
ctcacaattggccaataggatcatctgccttgctactgaactaatgactaacaaaggctgtgtcacgtggcatcccaactattcagtaaacatgcatcatggctgcctggggaggtgggc

SEQ ID NO: 276907 - DNA, 120 bp, Artificial Sequence
  ENSG00000128683_41 (sequence is synthesized)
cataaatgttagctattgttaatagcagttacttctaagatatagtccgtaatgtaatactccgagactgcctgcaaaacatttgtttgctacttgattagtcaattcaggagaataggc

SEQ ID NO: 276908 - DNA, 120 bp, Artificial Sequence
  ENSG00000128683_42 (sequence is synthesized)
atggataatatttactaacttgagttggaatgggtgttttcctcaagagaacagttgcgtctttccaactcctgcaccttctcgaagtctcatgtgcttctttcagggccaactcagtca

SEQ ID NO: 276909 - DNA, 120 bp, Artificial Sequence
  ENSG00000128683_43 (sequence is synthesized)
cctggaaccctcacaagatgatgggcgtgctgttgcagtgctctgccattctcgtcaaggaaaaggtctgtactccctccaaagctacactggggcccgtacgttctttagaaagcacaa

SEQ ID NO: 276910 - DNA, 120 bp, Artificial Sequence
  ENSG00000128683_44 (sequence is synthesized)
aaagacacacgtggggtctctttgcagtacttgttggctgactcacgagattggcagccccactgagagactactgctgctgtcctttcctgcccttgcagctaacctggtttcttctct

SEQ ID NO: 276911 - DNA, 120 bp, Artificial Sequence
  ENSG00000128683_45 (sequence is synthesized)
tggctcttgctggctactgtgcttcttctttgatcagtactcagggtctgtcagcaactgaacctttaaggaaattatttaattgagtattccttcatgtttgcacaaaaaaagtgggag

SEQ ID NO: 276912 - DNA, 120 bp, Artificial Sequence
  ENSG00000128683_46 (sequence is synthesized)
caagtaggtgaggcatccaatcagttttgtcctcagtgaggacaaaagcactcactggagcatactcggagttcttagtataaacgtgtggtcccaagaactgaaataaatgagacagaa

SEQ ID NO: 276913 - DNA, 120 bp, Artificial Sequence
  ENSG00000128683_47 (sequence is synthesized)
caacaactacaaatatcaacttagggccacaaggaatattgccccaaaagctgctgtaaatggttgagcctcatattcccttcttcacatgcctaatgttaggatcctgccctccaaggc

SEQ ID NO: 276914 - DNA, 120 bp, Artificial Sequence
  ENSG00000128683_48 (sequence is synthesized)
tttgttgctccagtaaaacttctgcacacagaagcattccaaaaagtctgtctccagcctgtaggagccagaatctgcacagcgtctttagtccactcatatgtggaatccatgttaatg

SEQ ID NO: 276915 - DNA, 120 bp, Artificial Sequence
  ENSG00000128683_49 (sequence is synthesized)
tcataggaggtcctggaaaggttggaagacttttgccagagcgcttttggagagaaaaattcttcacagcatgaaactatcccacccactgaggaattttctatctctaaccctggccca

SEQ ID NO: 276916 - DNA, 120 bp, Artificial Sequence
  ENSG00000128683_50 (sequence is synthesized)
ctgaatgccgtagcacttcccaatcttgaaacaatcccagacacccatacacatttccccttagagggatggcatctgagacggaaagatcatcttctaatcagagagtcagagacaaaa

SEQ ID NO: 276917 - DNA, 120 bp, Artificial Sequence
  ENSG00000128683_51 (sequence is synthesized)
gggatggcagtttttccaagagtgattttagaaaagggcatcagaacaagtgtaaggcctcataaagacatcagaagaaagattgcatatgaccccaagcccctccttccaagcagccta

SEQ ID NO: 276918 - DNA, 120 bp, Artificial Sequence
  ENSG00000128683_52 (sequence is synthesized)
cttgtgcagctaaagtccagaggaactttgaaaaagaaatgacaagcaatgaagaatcacaactgattgaacaatcagtgtgggctgaacttttctgagaaacttatgtttttcaccttg

SEQ ID NO: 276919 - DNA, 120 bp, Artificial Sequence
  ENSG00000128683_53 (sequence is synthesized)
tactttcttgctcatgttttagtagaagtgaggactgactagttttagattcttaaatgtcactgctcccctcttcctctcctttctctgtccccacaggctgcctggggaggtgggctg

SEQ ID NO: 276920 - DNA, 120 bp, Artificial Sequence
  ENSG00000128683_54 (sequence is synthesized)
cagtgggtgttgggcagctcgatcggagcctggccctttgcgtgtgggtcagccttcacccaactccgaccccacctccggagctgccgggcgggggtcgcttacgggcccggaggggcg

SEQ ID NO: 276921 - DNA, 120 bp, Artificial Sequence
  ENSG00000128683_55 (sequence is synthesized)
ccgggtgccccgcctctcagagacaccgttccatatttgaagccaggagcaggaagggagtatgatgggggcttagagtatatgcctgtcggctcacagatttggctcctagctcctttc

SEQ ID NO: 276922 - DNA, 120 bp, Artificial Sequence
  ENSG00000128683_56 (sequence is synthesized)
tccagaggtttacatatgaaattgcaccagtgtttgtcctcatggaacaaataacacttaagaagatgagagagatagttggatggtcaagtaaagatggtgatgggatattttctcctg

SEQ ID NO: 276923 - DNA, 120 bp, Artificial Sequence
  ENSG00000128683_57 (sequence is synthesized)
cctcatcttcctccctcagctgtcctcacctctcctcctccctctgctgtcctcaccctcctccctcagctgtcctcacctctcctcctacctctgctgttctctcccctcctccttctg

SEQ ID NO: 276924 - DNA, 120 bp, Artificial Sequence
  ENSG00000128683_58 (sequence is synthesized)
cttatacagcccataaacagtgctggcagcatcttctctgattgtgtctcctcctttaaagccctatcctggggctggtcactggagtggaagctgtccaacttacttaattgtgagttc

SEQ ID NO: 276925 - DNA, 120 bp, Artificial Sequence
  ENSG00000128683_59 (sequence is synthesized)
actgtcacattcagagaggagaacgggcttcacttactgtttttctctcttgcatgactgggcctctgccactgatgacatttggcactgcccccctccctgcctgaaggcgagcagtgc

SEQ ID NO: 276926 - DNA, 120 bp, Artificial Sequence
  ENSG00000128683_60 (sequence is synthesized)
ttcttatccctgccctccggattcacgccccggggaagcacggaggctgaggctctagttgaagtggggcaagagcgattttcccttgagcttccatgctgcgagcgcctgtccctccaa

SEQ ID NO: 276927 - DNA, 120 bp, Artificial Sequence
  ENSG00000128683_61 (sequence is synthesized)
gagtgcaaggtgactgtggttcttctctggccaagtccgagggagaacgtaaagatatgggcctttttccccctctcaccttgtctcaccaaagtccctagtccccggagcagttagcct

SEQ ID NO: 276928 - DNA, 120 bp, Artificial Sequence
  ENSG00000128683_62 (sequence is synthesized)
ctttctttccagggaattagccagacacaacaacgggaaccagacaccgaaccagacatgcccgccccgtgcgccctccccccgctggcccacacgccggctgctgagtgcccaatgggg

SEQ ID NO: 276929 - DNA, 120 bp, Artificial Sequence
  ENSG00000128683_63 (sequence is synthesized)
cttgtagcggctcggctggaaaatcgctcactgagcgctcccctgtgctcctagcctagtcccccacacccttgcgtcttgtactggccttggacccccaccccgaccccgaccccgcct

SEQ ID NO: 276930 - DNA, 120 bp, Artificial Sequence
  ENSG00000128683_64 (sequence is synthesized)
cgtctcggcgcttcactccaggtcgcgccgatgcaccgccagactcgagagcggcccagggctacgctccctgcgccccagtaccggagctagcgcgcacgtctcctccgctgcccccac

SEQ ID NO: 276931 - DNA, 120 bp, Artificial Sequence
  ENSG00000128683_65 (sequence is synthesized)
ccctgcgcacccctaccaggcaggctcgctgcctttcctccctcttgtctctccagagccggatcttcaaggggagcctccgtgcccccggctgctcagtccctccggtgtgcaggaccc

SEQ ID NO: 276932 - DNA, 120 bp, Artificial Sequence
  ENSG00000128694_0 (sequence is synthesized)
atcacttccgggcgccaggttcgggctttctcctgcagcgataagggcagtcgacagtctttagtagggaaaggagacaagtgctagctactgccgcccaagtggaaggaattatctata

SEQ ID NO: 276933 - DNA, 120 bp, Artificial Sequence
  ENSG00000128694_1 (sequence is synthesized)
gagtaagtatgctaatcttgactaagactgcaggagttttttttaaaccatcaaaaaggaaagtttatgaatttttaagaagttttaattttcatcctggaacactatttcttcataaaa

SEQ ID NO: 276934 - DNA, 120 bp, Artificial Sequence
  ENSG00000128694_2 (sequence is synthesized)
tagtattgggaattgaaactagttgtgatgatacagcagctgctgtggtggatgaaactggaaatgtgttgggagaagcaatacattcccaaactgaagttcatttaaaaacaggtggga

SEQ ID NO: 276935 - DNA, 120 bp, Artificial Sequence
  ENSG00000128694_3 (sequence is synthesized)
ttgttcctccagcagctcaacagcttcacagagaaaatattcaacgaatagtacaagaagctctttctgccagtggagtctctccaagtgacctctcagcaattgcaactaccataaaac

SEQ ID NO: 276936 - DNA, 120 bp, Artificial Sequence
  ENSG00000128694_4 (sequence is synthesized)
caggacttgctttaagcctgggagtgggcttatcatttagcttacagctggtaggacagttaaaaaagccattcattcccattcatcatatggaggctcatgcacttactattaggttga

SEQ ID NO: 276937 - DNA, 120 bp, Artificial Sequence
  ENSG00000128694_5 (sequence is synthesized)
ccaataaagtagaatttccttttttagttcttttgatttctggaggtcactgtctgttggcattagttcaaggagtttcagattttctgcttcttggaaagtctttggacatagcaccag

SEQ ID NO: 276938 - DNA, 120 bp, Artificial Sequence
  ENSG00000128694_6 (sequence is synthesized)
gtgacatgcttgacaaggtggcaagaagactttctttaataaaacatccagagtgctccaccatgagtggtgggaaagccatagaacatttggccaaacaaggaaatagatttcattttg

SEQ ID NO: 276939 - DNA, 120 bp, Artificial Sequence
  ENSG00000128694_7 (sequence is synthesized)
aaggggcaaatcctgtcttcagcagcagacattgctgccacagtacagcacacaatggcatgtcatcttgtgaaaagaacacatcgggctattctgttttgtaagcagagagacttgtta

SEQ ID NO: 276940 - DNA, 120 bp, Artificial Sequence
  ENSG00000128694_8 (sequence is synthesized)
cctcaaaataatgcagtactggttgcatctggtggtgtcgcaagtaacttctatatccgcagagctctggaaattttaacaaatgcaacacagtgcactttgttgtgtcctcctcccaga

SEQ ID NO: 276941 - DNA, 120 bp, Artificial Sequence
  ENSG00000128694_9 (sequence is synthesized)
ctatgcactgataatggcattatgattgcatggaatggtattgaaagactacgtgctggcttgggcattttacatgacatagaaggcatccgctatgaaccaaaatgtcctcttggagta

SEQ ID NO: 276942 - DNA, 120 bp, Artificial Sequence
  ENSG00000128694_10 (sequence is synthesized)
gacatatcaaaagaagttggagaagcttccataaaagtaccacaattaaaaatggagatatgatttctgctgttcaaaaaagtccctaaagagacaggctcttgccatgttgcccgggct

SEQ ID NO: 276943 - DNA, 87 bp, Artificial Sequence
  ENSG00000128694_11 (sequence is synthesized)
agtccctaaagagacaggctcttgccatgttgcccgggctggtcctgaactgctgaattcaagtgatcctcccaccttggcctccag

SEQ ID NO: 276944 - DNA, 120 bp, Artificial Sequence
  ENSG00000128694_12 (sequence is synthesized)
gaagacttatacatttgtaatatttattactaaatatctcaaagtattacaataaatgttaccatgtgagctactttgaatcaggcttcttgcacaccaatttaaaaatgttaactcttg

SEQ ID NO: 276945 - DNA, 120 bp, Artificial Sequence
  ENSG00000128694_13 (sequence is synthesized)
atatatacactagttataccactcatgtcagtcaataaattttaaggtttaagtgcaggcctttgtttacagaaatcctaattttttgaaaccataactctgacctgacactaaattcct

SEQ ID NO: 276946 - DNA, 120 bp, Artificial Sequence
  ENSG00000128694_14 (sequence is synthesized)
gtagacatgctaaggaaaatctgcttagtatcgagatcaagaactttcattcaaaaagattattcagttatgttatttgcatattaccattattaaaaataaaaaaatttttaaaagatg

SEQ ID NO: 276947 - DNA, 120 bp, Artificial Sequence
  ENSG00000128694_15 (sequence is synthesized)
agattccatcctatttctccgatgaaagtatcaggtacctcacccctaagtttagatttgatgatagttcccttaaaaatgaatgacgaataatctaccccatccttttctcacagtagc

SEQ ID NO: 276948 - DNA, 120 bp, Artificial Sequence
  ENSG00000128694_16 (sequence is synthesized)
aaccaaattccagccaagggcaaaaaaaaaatttctttttaatgtagcttagtgtttggaacttgatgttgtgtagtcagacaaacctgtattcggcctccgctggatcagtcactagct

SEQ ID NO: 276949 - DNA, 120 bp, Artificial Sequence
  ENSG00000128694_17 (sequence is synthesized)
gtgtaattttacagaactctcatcacctgcaaatctgggggaaatgcaggtgcgcacagagagcgttttgggcaaagacggcctttaagcttttcttcactaagcatgccgctcgctagc

SEQ ID NO: 276950 - DNA, 120 bp, Artificial Sequence
  ENSG00000128694_18 (sequence is synthesized)
atcacttccgggcgccaggttcgggctttctcctgcagcgataagggcagtcgacagtctttagtagggaaaggagacaagtgctagctactgccgcccaagtggaaggtgggtgaaatt

SEQ ID NO: 276951 - DNA, 120 bp, Artificial Sequence
  ENSG00000128694_19 (sequence is synthesized)
ctccattcttttttgttatgttgtccatttcaactaagtagcaatagatgtgctaccaccattcacctaaatatttctgaattttatcttagtaaactgaaaaaaattcacatatggtga

SEQ ID NO: 276952 - DNA, 120 bp, Artificial Sequence
  ENSG00000128694_20 (sequence is synthesized)
gaaaaaatagaaagagtagtacacaattttataattcttagcctttcttaataaaatggtaagaggttcatatctgtacataaaggctgaaatagtttgcagatacagttatgtattttg

SEQ ID NO: 276953 - DNA, 120 bp, Artificial Sequence
  ENSG00000128694_21 (sequence is synthesized)
ccaaataatgtatgtgaaagaacgtgcttcgtaaactaacatactgcaaaaaaggtaaaataagagaatatatatagattaacataaggacattaaagatgcaatgcacagaattaaatc

SEQ ID NO: 276954 - DNA, 120 bp, Artificial Sequence
  ENSG00000128694_22 (sequence is synthesized)
acacaattacttacaccacagacagggtccccccccacccccctttgttttagaatactacagaggctactgccatatataggaaaacaaacaaacaaacaaacaaaacactgcttccca

SEQ ID NO: 276955 - DNA, 120 bp, Artificial Sequence
  ENSG00000128694_23 (sequence is synthesized)
cagtgaaataataggaagtataggacaagttcttattattgacgttcatcattaagcagttattgtcaacttcaagcccattttccaaccaatagaagagcaaacatagacaggggcagt

SEQ ID NO: 276956 - DNA, 120 bp, Artificial Sequence
  ENSG00000128694_24 (sequence is synthesized)
gattggcctcttattgttcgggtcatcataaggaacagggttgtctgcttacctgaatatcagctatagtctatatttgccaaagtatagcatgttttattcattcaggggttttttgtt

SEQ ID NO: 276957 - DNA, 120 bp, Artificial Sequence
  ENSG00000128694_25 (sequence is synthesized)
ttgttagtaattttcaatttatttcctttgcatcttttcgtttcacagtatttaattttatgactctaaaaaatatgtttctttgataggtggcaagaagactttctttaataaaacatc

SEQ ID NO: 276958 - DNA, 120 bp, Artificial Sequence
  ENSG00000128694_26 (sequence is synthesized)
cttcaacacgttactgataaaataataatgaaaaaggaaaaagaggaaggtatatttctaattagtaaagttgaacagataaatattcctggattgtgcctaaaaatagctgctcatttc

SEQ ID NO: 276959 - DNA, 120 bp, Artificial Sequence
  ENSG00000128694_27 (sequence is synthesized)
aattaaaaatggagatatgatttctgctgttcaaaaaagtccctaaagggtctcactctctgacctcagctggagtacagtagccagatcacaactcactgcaaccctgacttcctgaac

SEQ ID NO: 276960 - DNA, 120 bp, Artificial Sequence
  ENSG00000128694_28 (sequence is synthesized)
tcaagcaatcctcctgccttagcctcttgaatagccgggactacaggtgtgcatgtccatgcccagccaactttatttctattttttgtagagacaggctcttgccatgttgcccgggct

SEQ ID NO: 276961 - DNA, 120 bp, Artificial Sequence
  ENSG00000128694_29 (sequence is synthesized)
actgacgcttttgcgcacctggaaaagcggttccagtttgcgcccgtcgccgccttacagccgacaggagaccagcgctacccaagtcacgtgggttcagcctgcagctttcttggcccg

SEQ ID NO: 276962 - DNA, 120 bp, Artificial Sequence
  ENSG00000128699_0 (sequence is synthesized)
attttaagcaattcttagtctcaagtaaacaccatcattaaaagaactgagaactattatcaattcttcctttggagtccatcttcaatggaaaggagaagggaaaaccttttttaaaaa

SEQ ID NO: 276963 - DNA, 120 bp, Artificial Sequence
  ENSG00000128699_1 (sequence is synthesized)
gaagaaagaaaactgaagtttttgatttgactagagaaatattcagaagactccttattttcacctagtttaatcacaaaattgagaaacaaacattatcccttgaccatgtaaatttta

SEQ ID NO: 276964 - DNA, 120 bp, Artificial Sequence
  ENSG00000128699_2 (sequence is synthesized)
caccacattatgtcaacagcatgtaccttccacattgagtattcagaaagaagtgatctgaactctgaccattctttatggatacattaagtcaaatataagagtctgactacttgacac

SEQ ID NO: 276965 - DNA, 120 bp, Artificial Sequence
  ENSG00000128699_3 (sequence is synthesized)
actggctcggtgagttctgctttttctttttaatataaatttattatgttggtaaatttagcttttggcttttcactttgctctcatgatataagaaaatgtaggttttctctttcagtt

SEQ ID NO: 276966 - DNA, 120 bp, Artificial Sequence
  ENSG00000128699_4 (sequence is synthesized)
tgaattttcctattcagtaaaacaacatgctagaaaacaaacttttggaaaggcattgtaactattttttcaaatagaaccataataacaagtcttgtcttaccctaaagtcaaatgctg

SEQ ID NO: 276967 - DNA, 120 bp, Artificial Sequence
  ENSG00000128699_5 (sequence is synthesized)
aagattctttactgctgtcatcagcatctacaagtagcatattttggatggtgtttgtgtgctacttcaaagtaactaggaaaaaataatcctcgcaacacaggtaccttgtcatgtcag

SEQ ID NO: 276968 - DNA, 120 bp, Artificial Sequence
  ENSG00000128699_6 (sequence is synthesized)
aattgggggtgttaggttgccagttgtatcagtgttgattcatttcattacttcctacagagcaaacatgaacgttggagttgcccacagtgaagtgaatccaaatacccgtgtcatgaa

SEQ ID NO: 276969 - DNA, 120 bp, Artificial Sequence
  ENSG00000128699_7 (sequence is synthesized)
cagccggggtatgtggctgacatatgcattgggagttggcttgcttcatattgtcttactcagcattcccttcttcagtgttcctgttgcttggactttaacaaatattatacataatct

SEQ ID NO: 276970 - DNA, 120 bp, Artificial Sequence
  ENSG00000128699_8 (sequence is synthesized)
ggggatgtacgtatttttgcatgcagtgaaaggaacacctttcgaaactcctgaccagggtaaagcaaggctcctaactcattgggaacaactggactatggagtacagtttacatcttc

SEQ ID NO: 276971 - DNA, 120 bp, Artificial Sequence
  ENSG00000128699_9 (sequence is synthesized)
acggaagtttttcacaatttctccaataattctatattttctggcaagtttctatacgaagtatgatccaactcacttcatcctaaacacagcttctctcctgagtgtactaattcccaa

SEQ ID NO: 276972 - DNA, 120 bp, Artificial Sequence
  ENSG00000128699_10 (sequence is synthesized)
aatgccacaactacatggtgttcggatctttggaattaataagtattgaaatgttttgaaactgaaaaaaaattttacagctactgaatttcttataaggaaggagtggttagtaaactg

SEQ ID NO: 276973 - DNA, 120 bp, Artificial Sequence
  ENSG00000128699_11 (sequence is synthesized)
ggctggtccttcaagtgctgttttgaagtgcagatttccattaaatgatgcctctgtttaatacacctggtacatttctgaagaggggctttataagcaggctgggcaggcccagcttat

SEQ ID NO: 276974 - DNA, 120 bp, Artificial Sequence
  ENSG00000128699_12 (sequence is synthesized)
aagttaaagggcatcacagtgagggtgtagtagataaattcaaggaaataagagatttgtaagaaactaggaccagcttaacttataatgaatgggcattgtgttaagaaaagaacattt

SEQ ID NO: 276975 - DNA, 120 bp, Artificial Sequence
  ENSG00000128699_13 (sequence is synthesized)
ccagtcattcagctgtggttatttaaagcagacttacatgtaaaccggaatcctctctatacaagtttattaaagattatttttattaccgtacatatttctcgttttatgtaagcggat

SEQ ID NO: 276976 - DNA, 120 bp, Artificial Sequence
  ENSG00000128699_14 (sequence is synthesized)
gtatatcctcttgttttatacaagccagttcccacttatgagggtacttttttggttttgctggcttaatattgtgtattggtcaatgaggccatttttacatttattacgttacagagt

SEQ ID NO: 276977 - DNA, 120 bp, Artificial Sequence
  ENSG00000128699_15 (sequence is synthesized)
tcatggaggttcacctttgtgactgattggtgataaaagatagccaagtgtcttacaagcagcttctgagtcaagtgttctaattttggaacaaagcaggttttactgcttttccagaca

SEQ ID NO: 276978 - DNA, 120 bp, Artificial Sequence
  ENSG00000128699_16 (sequence is synthesized)
caaggctgctaaaccaattaagaaaataattaatttctttcaagcaactaaaaaatatatggtaatttaaaggtgtctgcttatttggttgaacaatttaattgggaaagtttgtcatca

SEQ ID NO: 276979 - DNA, 120 bp, Artificial Sequence
  ENSG00000128699_17 (sequence is synthesized)
tttgaaaaaggaaatataaaaggaacaaccatatagccaacctgtggtctggcagaaacaacgtctctagcaatagtaccaaagtaagtaatggagtcttttttttggcaggtctgcagt

SEQ ID NO: 276980 - DNA, 120 bp, Artificial Sequence
  ENSG00000128699_18 (sequence is synthesized)
aaaagataacattttcttttcttagtcctcctgctctcaacccccatattttgcctttgaatacgtgggttttagtatatatagcccaaaatggtaactgtctccagaacagcaaccaca

SEQ ID NO: 276981 - DNA, 120 bp, Artificial Sequence
  ENSG00000128699_19 (sequence is synthesized)
ttgaattcttgtgacttaggaaagcttcttatagttgctgacattaattgcaagaaataactatatactactttgagaagtaaacatgtcaaaaaaaacaaagttcagatatgggacaaa

SEQ ID NO: 276982 - DNA, 120 bp, Artificial Sequence
  ENSG00000128699_20 (sequence is synthesized)
atttaaaaattcagtaacatttataaacagaattgaatgaaaagagttacagaccaacttaaacatcaattcgtgtcagtaaactgacttttgggggtaatgatcattgttttgtatctc

SEQ ID NO: 276983 - DNA, 120 bp, Artificial Sequence
  ENSG00000128699_21 (sequence is synthesized)
aaaagtattgagtttagaaatcagttgtatgatactacctttgtatgtctgtcttttcccgtgtatttttaaataactggtgatctataatttaataaaatttttcgttggtgtaatatt

SEQ ID NO: 276984 - DNA, 120 bp, Artificial Sequence
  ENSG00000128699_22 (sequence is synthesized)
gcaagctgcgcagcgccgggcctgagggcgtgtatccgcggccgtagcagccgggctggtcctgctgcgagccggcggcccggagtggggcggcggagcaaacatgaacgttggagttgc

SEQ ID NO: 276985 - DNA, 120 bp, Artificial Sequence
  ENSG00000128699_23 (sequence is synthesized)
ttcacaatttctccaataattctgtaagtggcagaaatttttaggtatgaggaggattggataagaggaagatatcttttcatcagattgaattggaattagaaacatattttgttgcaa

SEQ ID NO: 276986 - DNA, 120 bp, Artificial Sequence
  ENSG00000128699_24 (sequence is synthesized)
acttctatcaataagtagcacctcggatagaacataaaatatagacaaaatttttaacaagttgataataaactaattttcacttcagtcagtacatatacggagacaatattacatgct

SEQ ID NO: 276987 - DNA, 120 bp, Artificial Sequence
  ENSG00000128699_25 (sequence is synthesized)
gatatacaggtcaaatgtattccagctcccgtccttaggtttcatataaggacacaaaatacataatcatattctatattgcactgtcagattaatctccttaagcaatgatttagataa

SEQ ID NO: 276988 - DNA, 120 bp, Artificial Sequence
  ENSG00000128699_26 (sequence is synthesized)
tgagaagaatttcactggccacctatcctattaagatattcagactccttgggaaagagtatggtttcgaaaaaagtaggtcaggctttcattataggatagacctgggtggagtcctat

SEQ ID NO: 276989 - DNA, 120 bp, Artificial Sequence
  ENSG00000128699_27 (sequence is synthesized)
atatatcactcagccagcttggtttgctcatatataaaattctagctagtgatacctaattcaatcctaatgctgtaagaaataaatgagataataatctacctggatagcatgtaacct

SEQ ID NO: 276990 - DNA, 120 bp, Artificial Sequence
  ENSG00000128699_28 (sequence is synthesized)
gtatctggtatctaatttctttctcctatctgatgttctgggccttccagaaaatagttcttacctccttttcccttgatgtaaatattttatccccacccaactcctacctggccttct

SEQ ID NO: 276991 - DNA, 120 bp, Artificial Sequence
  ENSG00000128699_29 (sequence is synthesized)
aagcagcatttcttgaatatttcatgtgtagtcctatttctgtctttgttcaaatcagttcaaatcatatctcctacctgaaatgcctcctccttttttccccagctttactgaggtata

SEQ ID NO: 276992 - DNA, 120 bp, Artificial Sequence
  ENSG00000128699_30 (sequence is synthesized)
aggattgcattataatacatgtaaaatgcctgacattcagaagttttaatcacagctatcacacaaaaagccaactgagatgtacctgtatacagtgtccatatttctcaaaatgtattt

SEQ ID NO: 276993 - DNA, 120 bp, Artificial Sequence
  ENSG00000128699_31 (sequence is synthesized)
tatgggtctctagagcggaaggagcattatactccggaaacatttgctggaaggggttatgagaaattcctctctgtatgctaactccgtaatacaagcgtttgtgtattttaaaatcac

SEQ ID NO: 276994 - DNA, 120 bp, Artificial Sequence
  ENSG00000128708_0 (sequence is synthesized)
gattcgtccttcctcagccgcgggtgatcgtagctcggaaatggcgggatttggtgctatggagaaatttttggtagaatataagagtgcagtggagaagaaactggcagagtacaaatg

SEQ ID NO: 276995 - DNA, 120 bp, Artificial Sequence
  ENSG00000128708_1 (sequence is synthesized)
taacaccaacacagcaattgaactaaaattagttcgttttcctgaagatcttgaaaatgacattagaactttctttcctgagtatacccatcaactctttggggatgatgaaactgcttt

SEQ ID NO: 276996 - DNA, 120 bp, Artificial Sequence
  ENSG00000128708_2 (sequence is synthesized)
tggttacaagggtctaaagatcctgttatactatattgctggtagcctgtcaacaatgttccgtgttgaatatgcatctaaagttgatgagaactttgactgtgtagaggcagatgatgt

SEQ ID NO: 276997 - DNA, 120 bp, Artificial Sequence
  ENSG00000128708_3 (sequence is synthesized)
tgagggcaaaattagacaaatcattccacctggattttgcacaaacacgaatgatttcctttctttactggaaaaggaagttgatttcaagccattcggaaccttacttcatacctactc

SEQ ID NO: 276998 - DNA, 120 bp, Artificial Sequence
  ENSG00000128708_4 (sequence is synthesized)
agttctcagtccaacaggaggagaaaactttacctttcagatatataaggctgacatgacatgtagaggctttcgagaatatcatgaaaggcttcagacctttttgatgtggtttattga

SEQ ID NO: 276999 - DNA, 120 bp, Artificial Sequence
  ENSG00000128708_5 (sequence is synthesized)
aactgctagctttattgacgtggatgatgaaagatggcactactttctagtatttgagaagtataataaggatggagctacgctctttgcgaccgtaggctacatgacagtctataatta

SEQ ID NO: 277000 - DNA, 120 bp, Artificial Sequence
  ENSG00000128708_6 (sequence is synthesized)
atggtgctcaacttcttgaaacagttcatagatactacactgaatttcctacagttcttgatattacagcggaagatccatccaaaagctatgtgaaattacgagactttgtgcttgtga

SEQ ID NO: 277001 - DNA, 120 bp, Artificial Sequence
  ENSG00000128708_7 (sequence is synthesized)
agctttgtcaagatttgccctgtttttcccgggaaaaattaatgcaaggattcaatgaagatatggtgatagaggcacaacagaagttcaaaataaataagcaacacgctagaagggttt

SEQ ID NO: 277002 - DNA, 120 bp, Artificial Sequence
  ENSG00000128708_8 (sequence is synthesized)
atgaaattcttcgactactggtaactgacatgagtgatgccgaacaatacagaagctacagactggatattaaaagaagactaattagcccatataagaaaaagcagagagatcttgcta

SEQ ID NO: 277003 - DNA, 120 bp, Artificial Sequence
  ENSG00000128708_9 (sequence is synthesized)
agatgagaaaatgtctcagaccagaagaactgacaaaccagatgaaccaaatagaaataagcatgcaacatgaacagctggaagagagttttcaggaactagtggaagattaccggcgtg

SEQ ID NO: 277004 - DNA, 120 bp, Artificial Sequence
  ENSG00000128708_10 (sequence is synthesized)
ttattgaacgacttgctcaagagtaaagattatactgctctgtacaggaagcttgcaaattttctgtacaatgtgctgtgaaaaatctgatgactttaattttaaaatcttgtgacattt

SEQ ID NO: 277005 - DNA, 120 bp, Artificial Sequence
  ENSG00000128708_11 (sequence is synthesized)
tgcttatactaaaagttatctatctttagttgaatattttcttttggagagattgtatattttaaaatactgtttagagtttatgagcatatattgcatttaaagaaagataaagcttct

SEQ ID NO: 277006 - DNA, 120 bp, Artificial Sequence
  ENSG00000128708_12 (sequence is synthesized)
gaaatactactgcaattgcttcccttcttaaacagtataataaatgcttagttgtgatatgttaatgtgtgatgatatgattcttaaatacttacaataaacctcattcttaaatactta

SEQ ID NO: 277007 - DNA, 120 bp, Artificial Sequence
  ENSG00000128708_13 (sequence is synthesized)
attcgtccttcctcagccgcgggtgatcgtagctcggaaatggcgggtctccgtctaccttccactacagtcaacttctgagctagcgcattgctgccttgccctgctctggcgctccca

SEQ ID NO: 277008 - DNA, 120 bp, Artificial Sequence
  ENSG00000128708_14 (sequence is synthesized)
cttggatctcgactgacttcgtagtcgtctcgttaatctgtcacactttagtattccgaggatcgtatttagatgccctttgagaaagactttgttcctgaactgctcccttctctttta

SEQ ID NO: 277009 - DNA, 120 bp, Artificial Sequence
  ENSG00000128708_15 (sequence is synthesized)
gggttggactactataatacaattctcttgtgtacattctagagacccttcaagttacaacatttaataatgtataattgctattactttgtacgtgtattaaggctgttttggtgtgat

SEQ ID NO: 277010 - DNA, 120 bp, Artificial Sequence
  ENSG00000128708_16 (sequence is synthesized)
tatttttttcgattacttatcttttgaagttatggacagtttctttttcctgagacagggtctctctgtcgcccaggctggagtgcagcgatcatagttccgggcagcttccaactcctc

SEQ ID NO: 277011 - DNA, 60 bp, Artificial Sequence
  ENSG00000128708_17 (sequence is synthesized)
gtaaacattcggctaaaaaaaaacaattttttttaaccttttagagacagagtctggctg

SEQ ID NO: 277012 - DNA, 120 bp, Artificial Sequence
  ENSG00000128708_18 (sequence is synthesized)
tatatttttaagttatcatcttagtttgagtttggcatatgagggaattgtgacccatctagttgtgagattgctattcatttggtcagactctagtctcatctcaccactgctggtgat

SEQ ID NO: 277013 - DNA, 120 bp, Artificial Sequence
  ENSG00000128708_19 (sequence is synthesized)
cttttcatgtcttggataatatgatttctttgacacatataaaataataagcaaccttttgccttggccagttcagactgtcatgaaggggtatagtcagctgtttctgcataatggaaa

SEQ ID NO: 277014 - DNA, 120 bp, Artificial Sequence
  ENSG00000128708_20 (sequence is synthesized)
tgtccatagcattgcccttattattgtacttggtatcaggtcacctgccttctcttatttacttttatattatgctcatctcagttttgtgtgatgcagtttgtgcacaggaagctcatc

SEQ ID NO: 277015 - DNA, 120 bp, Artificial Sequence
  ENSG00000128708_21 (sequence is synthesized)
cttttccaattcgctgtgtgtttacttctttagttttcaaccaaagttttgtaatttgtgttggttttgtcagttttaaagaaataaaccatattcaacttaaagtcgaatttgttatta

SEQ ID NO: 277016 - DNA, 120 bp, Artificial Sequence
  ENSG00000128708_22 (sequence is synthesized)
ttacctccacaaagccagcattttaattgtggcagcccaattattgggacagtataatgatatttttcccaggaaagaaaaactattgtttatgaggcttgagttttccttcattatgct

SEQ ID NO: 277017 - DNA, 120 bp, Artificial Sequence
  ENSG00000128708_23 (sequence is synthesized)
ttgggagaccttgagaatagagctgaattaaatgctgttgtccgttagggccctgaatgtaggcttaaacagtaaaatgagctttgcctgtgttttcttttacttgccacctattcatct

SEQ ID NO: 277018 - DNA, 120 bp, Artificial Sequence
  ENSG00000128708_24 (sequence is synthesized)
ttataataggcaagtgcactgaagtgatgtaaagaggtctgatttatccaagttgctgcacaccaattaagtgaattgtacattcagaacatagcaggtgtacccattgggccctcacag

SEQ ID NO: 277019 - DNA, 120 bp, Artificial Sequence
  ENSG00000128708_25 (sequence is synthesized)
agtagcttgctgacactgaaaattcagtcagagaatggaaaagaaaatggacactgcatgggagcgcgactgtaattgacctgcttggctttctgttttatctgcagatttgagaagtat

SEQ ID NO: 277020 - DNA, 120 bp, Artificial Sequence
  ENSG00000128708_26 (sequence is synthesized)
aataaggatggagctacgctctttgcgaccgtaggctacatgacagtctataattactatgtgtacccagacaaaacccggccacgtgtaaggtaattggcagtataacacgtgccttgt

SEQ ID NO: 277021 - DNA, 120 bp, Artificial Sequence
  ENSG00000128708_27 (sequence is synthesized)
cttttatttcagaagaaggaactgctgaagtttccaatacttgttataatagtgttgatttgtttaaaaaaaaaatcactattattcatgggctatgtactgatttatttcattgttccc

SEQ ID NO: 277022 - DNA, 120 bp, Artificial Sequence
  ENSG00000128708_28 (sequence is synthesized)
tttgaaacagtgtagaagattaaactaattttgagtatcttgataatttttgggtatctcaaaggtggattgaaaaaaagatcacacaaactttaaagtgtttgtaatactatagtgatc

SEQ ID NO: 277023 - DNA, 120 bp, Artificial Sequence
  ENSG00000128708_29 (sequence is synthesized)
aagaaaagctaccaaatatcagtatatgagagagtccaagtcattttgtaaaattaacttttacaaaagtagaaatattcttccagtaatttataaaaattctcactcatggccgggcgt

SEQ ID NO: 277024 - DNA, 87 bp, Artificial Sequence
  ENSG00000128708_30 (sequence is synthesized)
agtaatttataaaaattctcactcatggccgcagggaggccaaggcgggtggatcacctcaggtcagaagttcaagaccagcctggc

SEQ ID NO: 277025 - DNA, 68 bp, Artificial Sequence
  ENSG00000128708_31 (sequence is synthesized)
tgtctctactaaaaatacaaacattagctaggcttggtggtgggcgcctgtaatacagtgtgtgagcc

SEQ ID NO: 277026 - DNA, 69 bp, Artificial Sequence
  ENSG00000128708_32 (sequence is synthesized)
ctgggtgacaagagcaaaactccatctgaaaagaaaagaaaagaaaagaaaaaaaacaggtggatcact

SEQ ID NO: 277027 - DNA, 74 bp, Artificial Sequence
  ENSG00000128708_33 (sequence is synthesized)
atgaaattgtgtctcagaacaaacaaacaaacttatcccaaggatagtctaccatggttagcttttctttcatt

SEQ ID NO: 277028 - DNA, 120 bp, Artificial Sequence
  ENSG00000128708_34 (sequence is synthesized)
atcccaaggatagtctaccatggttagcttttctttcatttgtatgcatctttaaaaaatctgaatgcctagtctcttccctaacaaattatgttgtttttcccaagtttcttgtcttct

SEQ ID NO: 277029 - DNA, 120 bp, Artificial Sequence
  ENSG00000128708_35 (sequence is synthesized)
cagttgttatatatatatattctcttttttctctcttcccagataaaagcaaagttatacatatatattctctttgcttttgctttcttcttcctaaaaatagcctttattgctatttat

SEQ ID NO: 277030 - DNA, 120 bp, Artificial Sequence
  ENSG00000128708_36 (sequence is synthesized)
taatataatctttgtactttaccatagccgaaaccatgttagtactattatatttttaaacattcttcttgcccttttttcccacttcgtcgtcatcttccatattttccctcctagatc

SEQ ID NO: 277031 - DNA, 120 bp, Artificial Sequence
  ENSG00000128708_37 (sequence is synthesized)
ccctcctagatcaaattggccttatcatttggacattgtcaggatggatattgtttatgccaccttatgtgaatgaaaatttgctatctaggcaaggcgtggtggctcatgcctgtaatc

SEQ ID NO: 277032 - DNA, 120 bp, Artificial Sequence
  ENSG00000128708_38 (sequence is synthesized)
gtagcctgggttccagaaggcctgcttgggaccggaagcgcggaactctcagcccagcagctccttgttggcggcggtccgcgcccccgcccccaactgcttggggttctgcgccttctg

SEQ ID NO: 277033 - DNA, 120 bp, Artificial Sequence
  ENSG00000128708_39 (sequence is synthesized)
ccagcaatccggcccctaccgagggccgaagacgccagggaaaagcgtcatgatttgggctcgtaaaatgccacatgccttggggcctgtttctcttcccattccttttgtccactgctg

SEQ ID NO: 277034 - DNA, 120 bp, Artificial Sequence
  ENSG00000128708_40 (sequence is synthesized)
cgctggcctttgttgcttttatcatctctttacagggcattcctcatagtctctctacattaaccattccatttttatgaatatgtgggatagacaagctgttgtgtgagctctacagat

SEQ ID NO: 277035 - DNA, 120 bp, Artificial Sequence
  ENSG00000128708_41 (sequence is synthesized)
gtttaaagaaggacttttctaccagatggagattgtaggatcttgaagtaccacagaagagggaggacgtactctaagaattacatctaaattcgaattttgggcccatcatttagtagt

SEQ ID NO: 277036 - DNA, 120 bp, Artificial Sequence
  ENSG00000128708_42 (sequence is synthesized)
tggatgcccttcaactaaacctctttctaagcctgaacttttgaatgtaaaatggggttgatgtaatacctacttatagaattgtgcagattgagctaatatatgatttcacaggttaaa

SEQ ID NO: 277037 - DNA, 120 bp, Artificial Sequence
  ENSG00000128708_43 (sequence is synthesized)
ttttgttgcttacattcctcgaagtaaattctgtaatctcggttctgtagattagggtcagaggggttaagtaatgtgctctagttccctgagcttactagctcagtaagtgtgtgaaat

SEQ ID NO: 277038 - DNA, 120 bp, Artificial Sequence
  ENSG00000128708_44 (sequence is synthesized)
agtcagaatccaggaattctcactccagactattaatctgtactgcttcaagtctttcccattttctgtgtgtgtgttttaacccctttttgaagtttatagcacatcattgtacccctt

SEQ ID NO: 277039 - DNA, 120 bp, Artificial Sequence
  ENSG00000128708_45 (sequence is synthesized)
aagtttatagcacatcattgtacccctttttattttttgcttatggcttttttctgtctgaatttttactgattttttttttttttggagactgagtctcgctctgtcaccaggctggag

SEQ ID NO: 277040 - DNA, 90 bp, Artificial Sequence
  ENSG00000128708_46 (sequence is synthesized)
ggctggagtgcagtggcgcgatctcggcaacctttgccttctggattcaagcaattctgcctcagcctccggagtagctaggactacagt

SEQ ID NO: 277041 - DNA, 70 bp, Artificial Sequence
  ENSG00000128708_47 (sequence is synthesized)
tttactaatcatatgcccattttgtcaggagatttgttatcttgaaagtttctcttgatagtgatatctt

SEQ ID NO: 277042 - DNA, 120 bp, Artificial Sequence
  ENSG00000128708_48 (sequence is synthesized)
gttatcttgaaagtttctcttgatagtgatatcttccaatgttatttattatgtatattattgagtagccactatgtagtaaaactattgtgccagtagctcacagtttatgactttagg

SEQ ID NO: 277043 - DNA, 120 bp, Artificial Sequence
  ENSG00000128708_49 (sequence is synthesized)
catacatgatttttaaatatttaatacagtggaaagatgttttctttgtgcccctgttcctcttccttctttctttacccatggtaactatggttaccagatatttgtgtattcttcttg

SEQ ID NO: 277044 - DNA, 120 bp, Artificial Sequence
  ENSG00000128708_50 (sequence is synthesized)
agacattccatgcattatcatttccttatctgaagcactctggtagactttttccaatacttaaaatgaaattctgtcataattatcagaggacattctcattttgctttttacatctta

SEQ ID NO: 277045 - DNA, 120 bp, Artificial Sequence
  ENSG00000128709_0 (sequence is synthesized)
agtcggtggctcgggcgccggcggggagctgctcggcggcggacagtgtaatgttgggtgggagtgcgggacgcctcaaaatgtcttccagtggcaccctcagcaactactacgtggact

SEQ ID NO: 277046 - DNA, 120 bp, Artificial Sequence
  ENSG00000128709_1 (sequence is synthesized)
cgcttataggccatgagggcgacgaggtgttcgcggcgcgcttcgggccgccggggccaggcgcgcagggccggcctgcaggtgtggctgatggcccggccgccaccgccgccgagttcg

SEQ ID NO: 277047 - DNA, 120 bp, Artificial Sequence
  ENSG00000128709_2 (sequence is synthesized)
cctcgtgtagttttgcccccagatcggccgtgttctctgcctcgtggtccgcggtgccctcccagcccccggcagcggcggcgatgagcggcctctaccacccgtacgttcccccgccgc

SEQ ID NO: 277048 - DNA, 120 bp, Artificial Sequence
  ENSG00000128709_3 (sequence is synthesized)
ctctaccacccgtacgttcccccgccgcccctggccgcctctgcctccgagcccggccgctacgtgcgctcctggatggagccgctgcccggcttcccgggcggtgcgggcggtggcggt

SEQ ID NO: 277049 - DNA, 120 bp, Artificial Sequence
  ENSG00000128709_4 (sequence is synthesized)
gtcccagccctggccccagcggcccagccaacgggcgccactacgggattaagcctgaaacccgagcggccccggcccccgccacggccgcctccaccacctcctcctcctccacttcct

SEQ ID NO: 277050 - DNA, 120 bp, Artificial Sequence
  ENSG00000128709_5 (sequence is synthesized)
tatcctcctcctccaaacggactgagtgctccgtggcccgggagtcccaggggagcagcggccccgagttctcgtgcaactcgttcctgcaggagaaggcggcagcggcgacggggggaa

SEQ ID NO: 277051 - DNA, 120 bp, Artificial Sequence
  ENSG00000128709_6 (sequence is synthesized)
ccgggcctggggcagggatcggggccgcgactgggacgggcggctcgtcggagccctcagcttgcagcgaccacccgatcccaggctgttcgctgaaggaggaggagaagcagcattcgc

SEQ ID NO: 277052 - DNA, 120 bp, Artificial Sequence
  ENSG00000128709_7 (sequence is synthesized)
aagcgctgtccctacaccaaataccagacgcttgagctggagaaagaattcctcttcaacatgtacctcacccgggaccggcgctacgaggtggccaggattctcaacctaacagagaga

SEQ ID NO: 277053 - DNA, 120 bp, Artificial Sequence
  ENSG00000128709_8 (sequence is synthesized)
caggtcaaaatctggtttcagaaccgtaggatgaaaatgaaaaagatgagcaaggagaaatgccccaaaggagactgacccggcgcggtgctggcgggagcgctcaagggcagcggattt

SEQ ID NO: 277054 - DNA, 120 bp, Artificial Sequence
  ENSG00000128709_9 (sequence is synthesized)
gttgttgttgctgttttcctttgtgggtgtttggtgcttgatttccagaaactctccagcgacttggacttcttcttctttttttttttctttttagatagaagtgactgtgtggttggt

SEQ ID NO: 277055 - DNA, 120 bp, Artificial Sequence
  ENSG00000128709_10 (sequence is synthesized)
ctctgaggtatttgggggactctgtatttgctcgtttacgtgttggaaaaaccaagtggctttggggtttcgccctatcccactccctctctttcctgctccattggttccttaagaaat

SEQ ID NO: 277056 - DNA, 120 bp, Artificial Sequence
  ENSG00000128709_11 (sequence is synthesized)
gctatattttgtgagtgcaagctggcttggggagccctctcttgtgtaaatgtcccccatgtttctgaaaagtgctgtagtttagtcccctcacccccagcactgcccaaacaggggcca

SEQ ID NO: 277057 - DNA, 120 bp, Artificial Sequence
  ENSG00000128709_12 (sequence is synthesized)
agtgcgccccaattccaagaatgaaggcagagcgacaacagtgcggacaccccggctgctagcccacggtgaagcccggcggggttgcccaccagttgcgaaagccccctttcctcaggg

SEQ ID NO: 277058 - DNA, 120 bp, Artificial Sequence
  ENSG00000128709_13 (sequence is synthesized)
agcacgcgggacctcggtggagatctccagtgaggcttagaggagcccagggcctcgggcgggttggggtttgtcctcagtgcattggacgcgctgctctctcccctgaaggctgggctc

SEQ ID NO: 277059 - DNA, 120 bp, Artificial Sequence
  ENSG00000128709_14 (sequence is synthesized)
gcgtgggcggccgcgggtggtggccctcccggttcctgcccgaggaccagttgtaaatgttactgcttcctactaataaatgctgacctgatcaaatggagcccagacgctggccctaaa

SEQ ID NO: 277060 - DNA, 120 bp, Artificial Sequence
  ENSG00000128710_0 (sequence is synthesized)
ctgggccggttgtctccagcgcgcactatcgcgggcgcgtagtagatgtcgctgttgtccgtgcttacccggccggccggccaggctctggagcacgtgacccgagaggaggctgcggct

SEQ ID NO: 277061 - DNA, 120 bp, Artificial Sequence
  ENSG00000128710_1 (sequence is synthesized)
caaggccattttcaaatctcattggcttggttgtcatgtggtcggcagaggcatccacaattacacggggaatgttttcctagagatgtcagcctacaaaggacacaatctctcttcttc

SEQ ID NO: 277062 - DNA, 120 bp, Artificial Sequence
  ENSG00000128710_2 (sequence is synthesized)
aaattcttccccaaaatgtcctttcccaacagctctcctgctgctaatacttttttagtagattccttgatcagtgcctgcaggagtgacagtttttattccagcagcgccagcatgtac

SEQ ID NO: 277063 - DNA, 120 bp, Artificial Sequence
  ENSG00000128710_3 (sequence is synthesized)
atgccaccacctagcgcagacatggggacctatggaatgcaaacctgtggactgctcccgtctctggccaaaagagaagtgaaccaccaaaatatgggtatgaatgtgcatccttatata

SEQ ID NO: 277064 - DNA, 120 bp, Artificial Sequence
  ENSG00000128710_4 (sequence is synthesized)
cctcaagtagacagttggacagatccgaacagatcttgtcgaatagagcaacctgttacacagcaagtccccacttgctccttcaccaccaacattaaggaagaatccaattgctgcatg

SEQ ID NO: 277065 - DNA, 120 bp, Artificial Sequence
  ENSG00000128710_5 (sequence is synthesized)
tattctgataagcgcaacaaactcatttcggccgaggtcccttcgtaccagaggctggtccctgagtcttgtcccgttgagaaccctgaggttcccgtccctggatattttagactgagt

SEQ ID NO: 277066 - DNA, 120 bp, Artificial Sequence
  ENSG00000128710_6 (sequence is synthesized)
cagacctacgccaccgggaaaacccaagagtacaataatagccccgaaggcagctccactgtcatgctccagctcaaccctcgtggcgcggccaagccgcagctctccgctgcccagctg

SEQ ID NO: 277067 - DNA, 120 bp, Artificial Sequence
  ENSG00000128710_7 (sequence is synthesized)
cagatggaaaagaagatgaacgagcccgtgagcggccaggagcccaccaaagtctcccaggtggagagccccgaggccaaaggcggccttcccgaagagaggagctgcctggctgaggtc

SEQ ID NO: 277068 - DNA, 120 bp, Artificial Sequence
  ENSG00000128710_8 (sequence is synthesized)
aattggctcactgcaaagagtggcagaaagaagaggtgcccttacactaagcaccaaacgctggaattagaaaaagagttcttgttcaatatgtacctcacccgcgagcgccgcctagag

SEQ ID NO: 277069 - DNA, 120 bp, Artificial Sequence
  ENSG00000128710_9 (sequence is synthesized)
atcagtaagagcgttaacctcaccgacaggcaggtcaagatttggtttcaaaaccgccgaatgaaactcaagaagatgagccgagagaaccggatccgagaactgaccgccaacctcacg

SEQ ID NO: 277070 - DNA, 120 bp, Artificial Sequence
  ENSG00000128710_10 (sequence is synthesized)
ttttcttaggtctgaggccggtctgaggccggtcagaggccaggattggagagggggcaccgcgttccagggcccagtgctggaggactgggaaagcggaaacaaaaccttcaccgctct

SEQ ID NO: 277071 - DNA, 120 bp, Artificial Sequence
  ENSG00000128710_11 (sequence is synthesized)
ttgtttgttgttttgttgtattttgttttcctgctagaatgtgactttggggtcattatgttcgtgctgcaagtgatctgtaatccctatgagtatatatatatatatatatatatatat

SEQ ID NO: 277072 - DNA, 120 bp, Artificial Sequence
  ENSG00000128710_12 (sequence is synthesized)
ataaaaacttagcacgtgtaatttattattttttcatcgtaatgcagggtaactattattgcgcattttcatttgggtcttaacttattggaactgtagagcatccatccatccatccat

SEQ ID NO: 277073 - DNA, 120 bp, Artificial Sequence
  ENSG00000128710_13 (sequence is synthesized)
ccagcaatgtgactttttcatgtctttcctaacacaaaaggtctatgtgtgtggttagtccatgaactcatggcattttgaatacatccagtactttaaaaatgacatatatatttaaaa

SEQ ID NO: 277074 - DNA, 120 bp, Artificial Sequence
  ENSG00000128710_14 (sequence is synthesized)
aaaaaagattaagaaaacccacaagttggagggagggggacttaaaaagcacattacaatgtatcttttcacaaatgaatttagcagttgtccttggtgagatgggatattggcgattta

SEQ ID NO: 277075 - DNA, 120 bp, Artificial Sequence
  ENSG00000128710_15 (sequence is synthesized)
tgccttgtagcctttcccttgtggtgcatctgtggtttggtagaagtacaacagcaacctgtcctttctgtgcatgttctggtcgcatgtataatgcaataaactctggaaatgagttca

SEQ ID NO: 277076 - DNA, 120 bp, Artificial Sequence
  ENSG00000128710_16 (sequence is synthesized)
ctctcaccccctggtctctttgccttgcagttgccccccagcggtcccggaaaaagcgctgtccctataccaagtaccagatccgcgaactggaacgcgagtttttctttaacgtgtaca

SEQ ID NO: 277077 - DNA, 120 bp, Artificial Sequence
  ENSG00000128710_17 (sequence is synthesized)
taaacaaagagaaaagacttcaactctctcggatgctcaacctcactgaccggcaagtcaaaatctggttccagaatcgcaggatgaaagaaaagaaactgaacagagaccgtctgcagt

SEQ ID NO: 277078 - DNA, 120 bp, Artificial Sequence
  ENSG00000128710_18 (sequence is synthesized)
atttcactggaaaccccttattttgagagctccaggaagcgccctcaccccagccccactcacccaccctccttcccaccagcctgctctccgcaggcccactgtccttgggtttaatga

SEQ ID NO: 277079 - DNA, 120 bp, Artificial Sequence
  ENSG00000128710_19 (sequence is synthesized)
gcagcctgcggacgaggccgggacttggccgagcggatcctaataaggggaaaatggggcctggagatccacacgagggcgcgctcacgttccagaagccgcgtttgaccaagaggccgc

SEQ ID NO: 277080 - DNA, 120 bp, Artificial Sequence
  ENSG00000128713_0 (sequence is synthesized)
ctcttgtgcaatcgatggctcaggttggctgcgcggggagcggccagaggctcgctggcgcgcacgccgcggagtcatgaacgactttgacgagtgcggccagagcgcagccagcatgta

SEQ ID NO: 277081 - DNA, 120 bp, Artificial Sequence
  ENSG00000128713_1 (sequence is synthesized)
cctgccgggctgcgcctactatgtggccccgtctgacttcgctagcaagccttcgttcctttcccaaccgtcgtcctgccagatgactttcccctactcttccaacctggctccgcacgt

SEQ ID NO: 277082 - DNA, 120 bp, Artificial Sequence
  ENSG00000128713_2 (sequence is synthesized)
ctcttccaacctggctccgcacgtccagcccgtgcgcgaagtggccttccgcgactacggcctggagcgcgccaagtggccgtaccgcggcggcggcggcggcggcagcgcggggggcgg

SEQ ID NO: 277083 - DNA, 80 bp, Artificial Sequence
  ENSG00000128713_3 (sequence is synthesized)
ccctactacgcggcggcggcggcggcggctgcggcggccgcggcggccgaggaggcggccatgcaacgcgagcttctccc

SEQ ID NO: 277084 - DNA, 120 bp, Artificial Sequence
  ENSG00000128713_4 (sequence is synthesized)
ccggccggacgtgctcttcaaggcgcctgagccggtgtgcgctgcgccggggccgccgcacggccccgcgggcgccgcctccaacttctacagcgcggtgggccgcaatggcatcttgcc

SEQ ID NO: 277085 - DNA, 120 bp, Artificial Sequence
  ENSG00000128713_5 (sequence is synthesized)
atcttgccacagggcttcgaccagttctacgaggcagcgcccgggcccccgttcgccgggccgcagcccccgccgccacccgcgccgccacagcccgagggcgcagccgacaagggcgac

SEQ ID NO: 277086 - DNA, 120 bp, Artificial Sequence
  ENSG00000128713_6 (sequence is synthesized)
gtggcggcgggggcagtccctgcaccaaggcgacccctggctcggagcccaagggggcagcagaaggcagcggtggcgacggcgagggccccccgggagaggcgggggccgagaagagca

SEQ ID NO: 277087 - DNA, 120 bp, Artificial Sequence
  ENSG00000128713_7 (sequence is synthesized)
cagcggtcccggaaaaagcgctgtccctataccaagtaccagatccgcgaactggaacgcgagtttttctttaacgtgtacataaacaaagagaaaagacttcaactctctcggatgctc

SEQ ID NO: 277088 - DNA, 120 bp, Artificial Sequence
  ENSG00000128713_8 (sequence is synthesized)
aacctcactgaccggcaagtcaaaatctggttccagaatcgcaggatgaaagaaaagaaactgaacagagaccgtctgcagtatttcactggaaaccccttattttgagagctccaggaa

SEQ ID NO: 277089 - DNA, 120 bp, Artificial Sequence
  ENSG00000128713_9 (sequence is synthesized)
gcgccctcaccccagccccactcacccaccctccttcccaccagcctgctctccgcaggcccactgtccttgggtttaatgacgtctcttctctgtggaacttcacgattccttcccacg

SEQ ID NO: 277090 - DNA, 120 bp, Artificial Sequence
  ENSG00000128713_10 (sequence is synthesized)
gtcaactcgggacctcccagcgaccactgcagcctgcggacgaggccgggacttggccgagcggatcctaataaggggaaaatggtaaatgcaaacgtcccgttacaattttaccgccag

SEQ ID NO: 277091 - DNA, 120 bp, Artificial Sequence
  ENSG00000128713_11 (sequence is synthesized)
tgtgctgtcgttccccctccccctctccgagtcctcgtggggacacggcggggtctgtaggaagttgggccgggttgggggttgctagaaggcgctggtgttttgctctgagttttaaga

SEQ ID NO: 277092 - DNA, 120 bp, Artificial Sequence
  ENSG00000128713_12 (sequence is synthesized)
gatcccttccttcctcttcggtgaatgcaggttatttaaactttgggaaatgtacttttagtctgtcatatcaaggcatgagtcactgtctttttttgtgtgaataaatggtttctagta

SEQ ID NO: 277093 - DNA, 120 bp, Artificial Sequence
  ENSG00000128713_13 (sequence is synthesized)
aaatggaggttacagcttcaatacactgtatgaattctcctctttgaggtttagtgcctccttaggatattttagtggccagaacccatgcaactgaaaatcgaatgaaatactttttag

SEQ ID NO: 277094 - DNA, 120 bp, Artificial Sequence
  ENSG00000128713_14 (sequence is synthesized)
gaaggctctgtagggaaggaactggctctgggtgttttccctgcatttctcttctttcgtttcttaaaagagcataaataattaaagtttggcagggaggaaaagctttcttgcagaact

SEQ ID NO: 277095 - DNA, 120 bp, Artificial Sequence
  ENSG00000128713_15 (sequence is synthesized)
gtagtggcaataaatgaaatgactcagaatcccttccccagtcagcttttacgagagctgccagacagtgtctgttcacgttctccagataccaggggcgccctgacaaagttaaggtca

SEQ ID NO: 277096 - DNA, 120 bp, Artificial Sequence
  ENSG00000128713_16 (sequence is synthesized)
agttagtgtcttatcttgggtgactcaaaatcaccgcatcgcgtcctggcgctgtgcggaaagctctttctcgcggagcggctggctgcgccccgaaggcctggtgcgctccctgcgttt

SEQ ID NO: 277097 - DNA, 120 bp, Artificial Sequence
  ENSG00000128714_0 (sequence is synthesized)
gttggagggcaggcgggccggaggcgggaggctcacagagggagagagggctagaggaagagggcgggagcgagcgaaccagagagaaaggagaggagggaggaggcgcgccgcgccatg

SEQ ID NO: 277098 - DNA, 120 bp, Artificial Sequence
  ENSG00000128714_1 (sequence is synthesized)
agagagaaaggagaggagggaggaggcgcgccgcgccatggtgtcctgcgcggggccagggccagggccggggccgggccaggccgggccatgagccgcgccgggagctgggacatggac

SEQ ID NO: 277099 - DNA, 120 bp, Artificial Sequence
  ENSG00000128714_2 (sequence is synthesized)
cctcttcctcctcctcatcggtggcggcggcggcggcgtcaggccagtgccgcggctttctctccgcgcctgtgttcgccgggacgcattcggggcgggcggcggcggcggcagcggcgg

SEQ ID NO: 277100 - DNA, 120 bp, Artificial Sequence
  ENSG00000128714_3 (sequence is synthesized)
ctgcggcggcggcggcggcagcctccggctttgcgtaccccgggacctctgagcgcacgggctcttcctcgtcgtcgtcctcttctgccgttgtagcggcgcgcccggaggctcccccag

SEQ ID NO: 277101 - DNA, 120 bp, Artificial Sequence
  ENSG00000128714_4 (sequence is synthesized)
ccaaagagtgcccagcacccacgcctgcagcggccgctgcagcgcccccgagcgctccagcgctgggctacggctaccacttcggcaacggctactacagctgccgtatgtcgcacggcg

SEQ ID NO: 277102 - DNA, 120 bp, Artificial Sequence
  ENSG00000128714_5 (sequence is synthesized)
tgggcttacagcagaatgcgctcaagtcatcgccgcacgcctcgctgggaggctttcccgtggagaagtacatggacgtgtcaggcctggcgagcagcagcgtaccggccaacgaggtgc

SEQ ID NO: 277103 - DNA, 120 bp, Artificial Sequence
  ENSG00000128714_6 (sequence is synthesized)
cagcgcgagccaaggaggtatccttctaccagggctatacgagcccttaccagcacgtgcccggctatatcgacatggtgtccactttcggctccggggagcctcggcacgaggcctaca

SEQ ID NO: 277104 - DNA, 120 bp, Artificial Sequence
  ENSG00000128714_7 (sequence is synthesized)
tctccatggaggggtaccagtcctggacgctggctaacgggtggaacagccaggtgtactgcaccaaggaccagccacaggggtcccacttttggaaatcttcctttccaggggatgtgg

SEQ ID NO: 277105 - DNA, 120 bp, Artificial Sequence
  ENSG00000128714_8 (sequence is synthesized)
ctctaaatcagccggacatgtgcgtctaccgaagagggaggaagaagagagtgccttacaccaaactgcagcttaaagaactggagaacgagtatgccattaacaaattcattaacaagg

SEQ ID NO: 277106 - DNA, 120 bp, Artificial Sequence
  ENSG00000128714_9 (sequence is synthesized)
acaagcggcggcgtatctcggctgctacgaacctatctgagagacaagtgaccatttggtttcagaaccgaagagtgaaggacaagaaaattgtctccaagctcaaagatactgtctcct

SEQ ID NO: 277107 - DNA, 120 bp, Artificial Sequence
  ENSG00000128714_10 (sequence is synthesized)
gccacagacagcttagaagccattcggttgtctccaaaaggcctttggaaagacttgaatatgtatttaattccccccaccccctgccaatggtggcaaattttgtgaattgtttttctc

SEQ ID NO: 277108 - DNA, 120 bp, Artificial Sequence
  ENSG00000128714_11 (sequence is synthesized)
tcttccccttatctggctctaaaaccttctgctgcccaacctgactttgtagttctgatttttacttgtttattattggttttgttcttgcctagggtttttaaaatatctgtttttaat

SEQ ID NO: 277109 - DNA, 120 bp, Artificial Sequence
  ENSG00000128714_12 (sequence is synthesized)
gttttgtttctccctccaggccagtataaagggacttgaagtattttttaataatccgccccccaatgaacttcagaagtgccattctgatttaagggtttttttaaaaaattactttat

SEQ ID NO: 277110 - DNA, 120 bp, Artificial Sequence
  ENSG00000128714_13 (sequence is synthesized)
ttgttcattcccagcactgattatcttcataatccattaggacagaatggttttcagtcgttcatatcctgtaattaggtaattgaatcattagctctcagcagttgccctgaggcaagt

SEQ ID NO: 277111 - DNA, 120 bp, Artificial Sequence
  ENSG00000128714_14 (sequence is synthesized)
ggaaaggcaggcagtgctctggggtcaccgagaaagtctaaaaacaggaggctgaaggtactgtgatggctttaaaaatggccaccttattaaatagggattgtatcaatattgaaatga

SEQ ID NO: 277112 - DNA, 120 bp, Artificial Sequence
  ENSG00000128714_15 (sequence is synthesized)
agacaatctttccaactttgggtgtttcacttgctgttttaattgtttgtttttaacactttgtaggtttgtgttttcataatctttaatttgaaactcatgtgtcctcatggatcgtgg

SEQ ID NO: 277113 - DNA, 120 bp, Artificial Sequence
  ENSG00000128714_16 (sequence is synthesized)
atgccttcatttcttgagctctcaatgcagacatttaaatggctgcaatcagtagagtgacccgcggatggcataaatgcacctccttttcttggccttggatctatgggtctgggattg

SEQ ID NO: 277114 - DNA, 120 bp, Artificial Sequence
  ENSG00000128714_17 (sequence is synthesized)
tggtcatctcctcaatcctcaaaaagaggctgaatcaatgtggccgtgggtgggaacttacatacagaacccaatgaagaacttgactgtctaaacaagggggcctcgcatggagctgta

SEQ ID NO: 277115 - DNA, 120 bp, Artificial Sequence
  ENSG00000128714_18 (sequence is synthesized)
aagcatctaacaaatatgaaaaatgtgaagttccaaggtccaagaagaaaaataatgatgtttctgaaagtgatgataaataattacttttaaagtgctgcatatttatacaattgagag

SEQ ID NO: 277116 - DNA, 120 bp, Artificial Sequence
  ENSG00000128714_19 (sequence is synthesized)
attatttttgtaaatgcaatgtctgtgagctgggatacatgggcagtgcttcagacatttaaaaatcactttttactcctagggagatgccaataaacagaactcttttgtttcttctga

SEQ ID NO: 277117 - DNA, 120 bp, Artificial Sequence
  ENSG00000128731_0 (sequence is synthesized)
ccgggatcgcgggcgccggctgagccagcggctcttgggaggctgcgtccgcgcgccggcgaggcgaggcggccgggccctgcgcgtcaggcctgagacctgggaggaagctggagaaaa

SEQ ID NO: 277118 - DNA, 120 bp, Artificial Sequence
  ENSG00000128731_1 (sequence is synthesized)
ggagaaaagatgccctctgaatctttctgtttggctgcccaggctcgcctcgactccaaatggttgaaaacagatatacagcttgcattcacaagagatgggctctgtggtctgtggaat

SEQ ID NO: 277119 - DNA, 120 bp, Artificial Sequence
  ENSG00000128731_2 (sequence is synthesized)
gaaatggttaaagatggagaaattgtatacactggaacagaatcaacccagaacggagagctccctcctagaaaagatgatagtgtcgaaccaagtggaacaaagaaagaagatctgaat

SEQ ID NO: 277120 - DNA, 120 bp, Artificial Sequence
  ENSG00000128731_3 (sequence is synthesized)
gacaaagagaaaaaagatgaagaagaaactcctgcacctatatatagggccaagtcaattctggacagctgggtatggggcaagcaaccagatgtgaatgaactgaaggagtgtctttct

SEQ ID NO: 277121 - DNA, 120 bp, Artificial Sequence
  ENSG00000128731_4 (sequence is synthesized)
gtgctggttaaagagcagcaggccctggccgtccagtcagccaccaccaccctctcagccctgcgactcaagcagaggctggtgatcttggagcgctatttcattgccttgaatagaacc

SEQ ID NO: 277122 - DNA, 120 bp, Artificial Sequence
  ENSG00000128731_5 (sequence is synthesized)
gtttttcaggagaatgtcaaagttaagtggaaaagcagcggtatttctctgcctcctgtggacaaaaaaagttcccggcctgcgggcaaaggtgtggaggggctcgccagagtgggatcc

SEQ ID NO: 277123 - DNA, 120 bp, Artificial Sequence
  ENSG00000128731_6 (sequence is synthesized)
cgagcggcgctgtcttttgcctttgccttcctgcgcagggcctggcgatcaggcgaggatgcggacctctgcagtgagctgttgcaggagtccctggacgccctgcgagcacttcccgag

SEQ ID NO: 277124 - DNA, 120 bp, Artificial Sequence
  ENSG00000128731_7 (sequence is synthesized)
gcctcgctctttgacgagagcaccgtgtcctctgtgtggctggaggtggtggagagagcgaccaggttcctcaggtccgtcgtgacgggggatgttcacggaacgccagccaccaaaggg

SEQ ID NO: 277125 - DNA, 120 bp, Artificial Sequence
  ENSG00000128731_8 (sequence is synthesized)
ccaggaagcatccccctgcaggaccagcacttggccctggccatcctgctggagctggctgtgcagagaggcacgctgagccaaatgttgtctgccatcctgttgttgcttcagctgtgg

SEQ ID NO: 277126 - DNA, 120 bp, Artificial Sequence
  ENSG00000128731_9 (sequence is synthesized)
gacagcggggcacaggagactgacaatgagcgttccgcccagggcaccagcgccccacttttgcccttgctgcaaaggttccagagcatcatttgcaggaaggatgcaccccactccgag

SEQ ID NO: 277127 - DNA, 120 bp, Artificial Sequence
  ENSG00000128731_10 (sequence is synthesized)
ggcgacatgcaccttttgtctggccctctgagccccaatgagagtttcctgaggtacctcacccttccacaagacaacgagcttgccattgatctgcgacaaacggcggttgttgtcatg

SEQ ID NO: 277128 - DNA, 120 bp, Artificial Sequence
  ENSG00000128731_11 (sequence is synthesized)
gcccatttagaccgtctggctacgccctgtatgcctccgctgtgtagctctccgacatctcataagggatcattgcaagaggtcataggttgggggttaataggatggaaatactatgcc

SEQ ID NO: 277129 - DNA, 120 bp, Artificial Sequence
  ENSG00000128731_12 (sequence is synthesized)
aatgtgattggtccaatccagtgcgaaggcctggccaacctgggagtcacacagattgcctgtgcagagaagcgtttcctgattctgtcacgcaatggccgcgtgtacacacaggcctat

SEQ ID NO: 277130 - DNA, 120 bp, Artificial Sequence
  ENSG00000128731_13 (sequence is synthesized)
aatagtgacacgctggccccacagctggtccaaggccttgcctccagaaacattgtaaaaattgctgcccattctgatggtcaccactacctagccttggctgctactggagaggtgtac

SEQ ID NO: 277131 - DNA, 120 bp, Artificial Sequence
  ENSG00000128731_14 (sequence is synthesized)
tcctggggctgtggggacggcggacggctgggccatggggacactgtgcctttggaggagcctaaggtgatctccgccttctctggaaagcaggccgggaagcacgtggtgcacatcgct

SEQ ID NO: 277132 - DNA, 120 bp, Artificial Sequence
  ENSG00000128731_15 (sequence is synthesized)
tgcgggagcacttacagtgcggccatcactgccgagggggagctgtacacctggggccgcgggaactacggccggctgggccatggctccagtgaggacgaggccattccgatgctggta

SEQ ID NO: 277133 - DNA, 120 bp, Artificial Sequence
  ENSG00000128731_16 (sequence is synthesized)
gccgggcttaaaggactgaaggtcatcgatgtggcgtgtgggagtggggatgctcaaaccctggctgtcactgagaacgggcaagtgtggtcttggggagatggtgactatgggaaattg

SEQ ID NO: 277134 - DNA, 120 bp, Artificial Sequence
  ENSG00000128731_17 (sequence is synthesized)
ggcagaggtggtagtgatggctgcaaaaccccaaagctgattgaaaagcttcaagacttggatgtggtcaaagtccgctgtggaagtcagttttccattgctttgacgaaagatggccaa

SEQ ID NO: 277135 - DNA, 120 bp, Artificial Sequence
  ENSG00000128731_18 (sequence is synthesized)
gtttattcatggggaaaaggtgacaaccagagacttggacatggaacagaggaacatgttcgttatccaaaactcttagaaggcttgcaagggaagaaggtgattgatgtggctgcaggc

SEQ ID NO: 277136 - DNA, 120 bp, Artificial Sequence
  ENSG00000128731_19 (sequence is synthesized)
tccacccactgcctggctctgactgaggacagcgaggtccacagctgggggagcaacgaccagtgccagcactttgacaccttgcgcgtgaccaagccagaacctgcagcattgccagga

SEQ ID NO: 277137 - DNA, 120 bp, Artificial Sequence
  ENSG00000128731_20 (sequence is synthesized)
ctggacaccaaacacatagtgggaattgcctgtgggcctgcccagagctttgcttggtcatcatgttctgagtggtccattggcctccgtgtcccttttgtggtggacatctgctcaatg

SEQ ID NO: 277138 - DNA, 120 bp, Artificial Sequence
  ENSG00000128731_21 (sequence is synthesized)
acttttgagcagctggatctcctgcttcggcaggtgagtgaggggatggatggttccgcggactggcccccgccccaggagaaagagtgtgtggccgtggcaacgctgaatcttctacga

SEQ ID NO: 277139 - DNA, 120 bp, Artificial Sequence
  ENSG00000128731_22 (sequence is synthesized)
cttcagttgcatgctgccattagtcaccaggttgacccggaattccttggtttaggtctgggcagcatcctcctgaacagcctgaagcagacggtggtgaccctggccagcagtgcgggc

SEQ ID NO: 277140 - DNA, 120 bp, Artificial Sequence
  ENSG00000128731_23 (sequence is synthesized)
gtgctgagcaccgtgcagtcggccgcccaggccgtgctgcagagtggctggtccgtgctgctgcccaccgcggaggagcgggcccgggcactctctgctctcctgccctgcgcagtttca

SEQ ID NO: 277141 - DNA, 120 bp, Artificial Sequence
  ENSG00000128731_24 (sequence is synthesized)
ggcaatgaagtgaacataagtccaggtcgtcgattcatgattgatcttctggtgggcagcttgatggctgatggagggttggagtcagccttacacgcagccattactgcagagatccag

SEQ ID NO: 277142 - DNA, 120 bp, Artificial Sequence
  ENSG00000128731_25 (sequence is synthesized)
gatattgaagccaaaaaagaagcacagaaggaaaaagaaattgatgaacaggaagcgaatgcctcaacatttcatagaagcaggactccactggataaagaccttattaatacggggatc

SEQ ID NO: 277143 - DNA, 120 bp, Artificial Sequence
  ENSG00000128731_26 (sequence is synthesized)
tgtgagtcttctggcaaacagtgtttgcctctggttcagctcatacaacagcttcttagaaacattgcttctcagactgtagccagattgaaagatgttgcccgtcggatttcatcatgt

SEQ ID NO: 277144 - DNA, 120 bp, Artificial Sequence
  ENSG00000128731_27 (sequence is synthesized)
ctggactttgagcaacacagtcgtgaaagatctgcttcattggatttgttactgcgttttcaacgtttgcttattagtaaactttatccaggagaaagtattggtcagacctcagatatt

SEQ ID NO: 277145 - DNA, 120 bp, Artificial Sequence
  ENSG00000128731_28 (sequence is synthesized)
tctagtccagagctaatgggtgttggttccttgctgaagaagtacacagccctcctgtgcacgcacattggagatatactgcctgtggccgccagcattgcttctaccagctggcggcac

SEQ ID NO: 277146 - DNA, 120 bp, Artificial Sequence
  ENSG00000128731_29 (sequence is synthesized)
ttcgcggaggtggcttacattgtggaaggggactttactggtgttctccttccagaactagtagtttctatagtgcttctgctcagtaaaaatgctggtctcatgcaagaggctggagct

SEQ ID NO: 277147 - DNA, 120 bp, Artificial Sequence
  ENSG00000128731_30 (sequence is synthesized)
gtacctctgctgggtggcctgttggaacatctggatcggttcaaccatctggcaccaggaaaggaacgggatgatcatgaagagttagcctggcctggcataatggagtcattttttaca

SEQ ID NO: 277148 - DNA, 120 bp, Artificial Sequence
  ENSG00000128731_31 (sequence is synthesized)
ggtcagaactgtagaaataatgaggaagtgacacttatacgcaaagctgatttggagaaccataataaagatggaggcttctggactgtgattgacgggaaggtgtatgatataaaggac

SEQ ID NO: 277149 - DNA, 120 bp, Artificial Sequence
  ENSG00000128731_32 (sequence is synthesized)
ttccagacacagtcgttaacaggaaatagtattcttgctcagtttgcaggggaagacccagtggtagctttggaagctgctttgcagtttgaagacacccgggaatccatgcacgcgttt

SEQ ID NO: 277150 - DNA, 120 bp, Artificial Sequence
  ENSG00000128731_33 (sequence is synthesized)
tgtgttggccagtatttggagcctgaccaagaaatcgtcaccataccagatctggggagtctctcttcacctctgatagacacagagaggaatctgggcctgcttctcggattacacgct

SEQ ID NO: 277151 - DNA, 120 bp, Artificial Sequence
  ENSG00000128731_34 (sequence is synthesized)
tcgtatttggcaatgagcacaccgctgtctcctgtcgagattgaatgtgccaaatggcttcagtcatccatcttctctggaggcctgcagaccagccagatccactacagctacaacgag

SEQ ID NO: 277152 - DNA, 120 bp, Artificial Sequence
  ENSG00000128731_35 (sequence is synthesized)
gagaaagacgaggaccactgcagctccccagggggcacacctgccagcaaatctcgactctgctcccacagacgggccctgggggaccattcccaggcatttctgcaagccattgcagac

SEQ ID NO: 277153 - DNA, 120 bp, Artificial Sequence
  ENSG00000128731_36 (sequence is synthesized)
aacaacattcaggatcacaacgtgaaggactttttgtgtcaaatagaaaggtactgtaggcagtgccatttgaccacaccgatcatgtttccccccgagcatcccgtggaagaggtcggt

SEQ ID NO: 277154 - DNA, 120 bp, Artificial Sequence
  ENSG00000128731_37 (sequence is synthesized)
cgcttgttgttatgttgcctcttaaaacatgaagatttaggtcatgtggcattatctttagttcatgcaggtgcacttggtattgagcaagtaaagcacagaacgttgcctaagtcagtg

SEQ ID NO: 277155 - DNA, 120 bp, Artificial Sequence
  ENSG00000128731_38 (sequence is synthesized)
gtggatgtttgtagagttgtctaccaagcaaaatgttcgctcattaagactcatcaagaacagggccgttcttacaaggaggtctgcgctcctgtcatcgaacgtttgagattcctcttt

SEQ ID NO: 277156 - DNA, 120 bp, Artificial Sequence
  ENSG00000128731_39 (sequence is synthesized)
aatgaattgagacctgctgtttgtaatgacctctctataatgtctaagtttaaattgttaagttctttgccccgttggaggaggatagctcaaaagataattcgagaacgaaggaaaaag

SEQ ID NO: 277157 - DNA, 120 bp, Artificial Sequence
  ENSG00000128731_40 (sequence is synthesized)
agagttcctaagaagccagaatctacggatgatgaagaaaaaattggaaacgaagagagtgatttagaagaagcttgcattttgcctcatagtccaataaatgtggacaagagacccatt

SEQ ID NO: 277158 - DNA, 120 bp, Artificial Sequence
  ENSG00000128731_41 (sequence is synthesized)
gcaattaaatcacccaaggacaaatggcagccgctgttgagtactgttacaggtgttcacaaatacaagtggttgaagcagaatgtgcagggtctttatccgcagtctccactcctcagt

SEQ ID NO: 277159 - DNA, 120 bp, Artificial Sequence
  ENSG00000128731_42 (sequence is synthesized)
acaattgctgaatttgcccttaaagaagagccagtggatgtggaaaaaatgagaaagtgcctactaaaacagttggagagagcagaggttcgcctggaagggatagatacaattttaaaa

SEQ ID NO: 277160 - DNA, 120 bp, Artificial Sequence
  ENSG00000128731_43 (sequence is synthesized)
ctggcgagcaagaatttcttacttccatctgtgcagtatgcgatgttttgtggatggcaaagacttattcctgagggaatcgatataggggaacctcttactgattgtttaaaggatgtt

SEQ ID NO: 277161 - DNA, 120 bp, Artificial Sequence
  ENSG00000128731_44 (sequence is synthesized)
gatttgatcccgccttttaatcggatgctgctggaagtcacctttggcaagctgtacgcttgggctgtacagaacattcgaaatgttttgatggatgccagtgccaaatttaaagagctt

SEQ ID NO: 277162 - DNA, 120 bp, Artificial Sequence
  ENSG00000128731_45 (sequence is synthesized)
ggtatccagccggttcccctgcaaaccatcaccaatgagaacccgtcaggaccgagcctggggaccatcccgcaagcccgcttcctcctggtgatgctcagcatgctcaccctgcagcac

SEQ ID NO: 277163 - DNA, 120 bp, Artificial Sequence
  ENSG00000128731_46 (sequence is synthesized)
ggcgcaaacaacctcgaccttctgctcaattccggcatgctggccctcacgcagacggcactgcgcctgattggccccagttgtgacaacgttgaggaagatatgaatgcttctgctcaa

SEQ ID NO: 277164 - DNA, 120 bp, Artificial Sequence
  ENSG00000128731_47 (sequence is synthesized)
ggtgcttctgccacagttttggaagaaacaaggaaggaaacggctcctgtgcagctccctgtttcaggaccagaactggctgccatgatgaagattggaacaagggtcatgagaggtgtg

SEQ ID NO: 277165 - DNA, 120 bp, Artificial Sequence
  ENSG00000128731_48 (sequence is synthesized)
gactggaaatggggcgatcaggatgggcctcctccaggcctaggccgcgtgattggtgagctgggagaggacggatggataagagtccagtgggacacaggcagcaccaactcctacagg

SEQ ID NO: 277166 - DNA, 120 bp, Artificial Sequence
  ENSG00000128731_49 (sequence is synthesized)
atggggaaagaaggaaaatacgacctcaagctggcagagctgccggctgctgcacagccctcagcagaggattcggacacagaggatgactctgaagccgaacaaactgaaaggaacatt

SEQ ID NO: 277167 - DNA, 120 bp, Artificial Sequence
  ENSG00000128731_50 (sequence is synthesized)
caccccactgcaatgatgtttaccagcactattaacttactgcagactctttgtctgtctgctggagttcatgctgagatcatgcagagcgaagccaccaagactttatgcggactgctg

SEQ ID NO: 277168 - DNA, 120 bp, Artificial Sequence
  ENSG00000128731_51 (sequence is synthesized)
cgaatgttagtggaaagcggaacgacggacaagacatcttctccaaacaggctggtgtacagggagcaacaccggagctggtgcacgctggggtttgtgcggagcatcgctctcacgccg

SEQ ID NO: 277169 - DNA, 120 bp, Artificial Sequence
  ENSG00000128731_52 (sequence is synthesized)
caggtatgcggcgccctcagctccccgcagtggatcacgctgctcatgaaggtcgtggaagggcacgcacccttcactgccacctcgctgcagaggcagatcttagctgtgcatttgttg

SEQ ID NO: 277170 - DNA, 120 bp, Artificial Sequence
  ENSG00000128731_53 (sequence is synthesized)
caagcagtccttccatcatgggacaagaccgaaagggcgagggacatgaaatgcctcgtggagaagctgtttgacttcttgggaagcttgctcactacctgctcctctgacgtgccatta

SEQ ID NO: 277171 - DNA, 120 bp, Artificial Sequence
  ENSG00000128731_54 (sequence is synthesized)
ctcagagagtccacgctgaggcggcgcagggtgcgcccgcaggcctcgctgactgccacccacagcagcacactggcggaggaggtggtggcactgctgcgcacgctgcactccctgact

SEQ ID NO: 277172 - DNA, 120 bp, Artificial Sequence
  ENSG00000128731_55 (sequence is synthesized)
cagtggaatgggctcatcaacaagtacatcaactcccagctccgctccatcacccacagctttgtgggaaggccttccgaaggggcccagttagaggactacttccccgactccgagaac

SEQ ID NO: 277173 - DNA, 120 bp, Artificial Sequence
  ENSG00000128731_56 (sequence is synthesized)
cctgaagtggggggcctcatggcagtcctggctgtgattggaggcatcgatggtcgcctgcgcctgggcggtcaagttatgcacgatgagtttggagaaggcactgtgactcgcatcacc

SEQ ID NO: 277174 - DNA, 120 bp, Artificial Sequence
  ENSG00000128731_57 (sequence is synthesized)
ccaaagggcaaaatcaccgtgcagttctctgacatgcggacgtgtcgcgtttgcccattgaatcagctgaaaccactccctgccgtggcctttaatgtgaacaacctgcccttcacagag

SEQ ID NO: 277175 - DNA, 120 bp, Artificial Sequence
  ENSG00000128731_58 (sequence is synthesized)
cccatgctgtctgtctgggctcagttggtgaacctcgctggaagcaagttagaaaagcacaaaataaagaaatcgactaaacaggcctttgcaggacaagtggacctggacctgctgcgg

SEQ ID NO: 277176 - DNA, 120 bp, Artificial Sequence
  ENSG00000128731_59 (sequence is synthesized)
tgccagcagttgaagctatacatcctgaaagcaggtcgggcgctgctctcccaccaggataaactgcggcagatcctgtctcagccagctgttcaggagactggaactgttcacacagat

SEQ ID NO: 277177 - DNA, 120 bp, Artificial Sequence
  ENSG00000128731_60 (sequence is synthesized)
gatggagcagtggtatcacctgaccttggggacatgtctcctgaagggccgcagccccccatgatcctcttgcagcagctgctggcctcggccacccagccgtctcctgtgaaggccata

SEQ ID NO: 277178 - DNA, 120 bp, Artificial Sequence
  ENSG00000128731_61 (sequence is synthesized)
tttgataaacaggaacttgaggctgctgcactggccgtttgccagtgcttggctgtggagtccactcacccttcgagcccaggatttgaagactgcagctccagtgaggccaccacgcct

SEQ ID NO: 277179 - DNA, 120 bp, Artificial Sequence
  ENSG00000128731_62 (sequence is synthesized)
gtcgccgtgcagcacatccgccctgccagagtgaagaggcgcaagcagtcgcccgttcccgctctgccgatcgtggtgcagctcatggagatgggattttccagaaggaacatcgagttt

SEQ ID NO: 277180 - DNA, 120 bp, Artificial Sequence
  ENSG00000128731_63 (sequence is synthesized)
gacacggtgtccgacgagtattctgacgaggaggtggtggaggacgtggatgatgccgcctactccatgtctactggtgctgttgtgacggagagccagacgtacaaaaaacgagctgat

SEQ ID NO: 277181 - DNA, 120 bp, Artificial Sequence
  ENSG00000128731_64 (sequence is synthesized)
ttcttgagtaatgatgattatgctgtatatgtgagagagaatattcaggtgggaatgatggttagatgctgccgagcgtatgaagaagtgtgcgaaggtgatgttggcaaagtcatcaag

SEQ ID NO: 277182 - DNA, 120 bp, Artificial Sequence
  ENSG00000128731_65 (sequence is synthesized)
ctggacagagatggattgcatgatctcaatgtgcagtgtgactggcagcagaaagggggcacctactgggttaggtacattcatgtggaacttataggctatcctccaccaagttcttct

SEQ ID NO: 277183 - DNA, 120 bp, Artificial Sequence
  ENSG00000128731_66 (sequence is synthesized)
tctcacatcaagattggtgataaagtgcgggtcaaagcctctgtcaccacaccaaaatacaaatggggatctgtgactcatcagagtgtgggggttgtgaaagctttcagtgccaatgga

SEQ ID NO: 277184 - DNA, 120 bp, Artificial Sequence
  ENSG00000128731_67 (sequence is synthesized)
aaagatatcattgtcgactttccccagcagtctcactggactgggttgctatcagaaatggagttggtacccagtattcatcctggggttacgtgtgatggatgtcagatgtttcctatc

SEQ ID NO: 277185 - DNA, 120 bp, Artificial Sequence
  ENSG00000128731_68 (sequence is synthesized)
aatggatccagattcaaatgcagaaactgtgatgactttgatttttgtgaaacgtgtttcaagaccaaaaaacacaataccaggcatacatttggcagaataaatgaaccaggtcagtct

SEQ ID NO: 277186 - DNA, 120 bp, Artificial Sequence
  ENSG00000128731_69 (sequence is synthesized)
gcggtattttgtggccgttctggaaaacagctgaagcgttgccacagcagccagccaggcatgctgctggacagctggtcccgcatggtgaagagcctgaatgtgtcgtcctccgtgaac

SEQ ID NO: 277187 - DNA, 120 bp, Artificial Sequence
  ENSG00000128731_70 (sequence is synthesized)
caggcatcccgtctcattgacggcagcgagccctgctggcagtcatcggggtcgcaaggaaagcactggattcgtttggagattttcccagatgttcttgttcatagattaaaaatgatc

SEQ ID NO: 277188 - DNA, 120 bp, Artificial Sequence
  ENSG00000128731_71 (sequence is synthesized)
gtagatcctgctgacagtagctacatgccgtccctggttgtagtgtcaggtggaaattccctgaataaccttattgaactaaagacaatcaatattaacccttctgacaccacagtgccc

SEQ ID NO: 277189 - DNA, 120 bp, Artificial Sequence
  ENSG00000128731_72 (sequence is synthesized)
cttctgaatgactgcacagagtatcacaggtatattgaaattgctataaagcagtgcaggagctcaggaatcgattgtaaaatccatggtctcatcctgctgggacggatccgtgcagaa

SEQ ID NO: 277190 - DNA, 120 bp, Artificial Sequence
  ENSG00000128731_73 (sequence is synthesized)
gaggaagatttggctgcagttcctttcttagcttcggataatgaagaggaggaggatgagaaaggcaacagcggaagcctcattagaaagaaggctgctgggctggaatcagcagctacg

SEQ ID NO: 277191 - DNA, 120 bp, Artificial Sequence
  ENSG00000128731_74 (sequence is synthesized)
ataagaaccaaggtgtttgtgtggggcctgaatgacaaggaccagctgggcgggctgaaaggctccaagataaaggttccttcgttctctgagacactgtcagctttgaatgtggtacag

SEQ ID NO: 277192 - DNA, 120 bp, Artificial Sequence
  ENSG00000128731_75 (sequence is synthesized)
gtggctggtggatctaaaagtttgtttgcagtgactgtggaagggaaggtgtatgcctgtggagaagccacgaatggccggctggggctgggcatttccagcgggacggtgcccatccca

SEQ ID NO: 277193 - DNA, 120 bp, Artificial Sequence
  ENSG00000128731_76 (sequence is synthesized)
cggcagatcacagctctcagcagctacgtggtcaagaaggtggctgttcactcaggtggccggcacgcgacggctttaactgtcgatggaaaagtgttttcgtggggcgaaggtgacgat

SEQ ID NO: 277194 - DNA, 120 bp, Artificial Sequence
  ENSG00000128731_77 (sequence is synthesized)
ggaaaacttggacacttcagcagaatgaactgtgacaaaccaaggctgatcgaggccctgaaaaccaagcgtatccgggatatcgcctgtgggagctcgcacagcgcagccctcacatcc

SEQ ID NO: 277195 - DNA, 120 bp, Artificial Sequence
  ENSG00000128731_78 (sequence is synthesized)
agcggagaactgtacacctggggcctcggcgagtacggccggctgggacatggggataatacgacacagctaaagcccaaaatggtgaaagtccttctcggtcacagagtaatccaggtt

SEQ ID NO: 277196 - DNA, 120 bp, Artificial Sequence
  ENSG00000128731_79 (sequence is synthesized)
gcatgtgggagtagagacgcgcagaccctggctctgaccgatgaaggtttggtattttcctggggtgatggtgactttggaaaactgggccggggcggaagtgaaggctgtaacattccc

SEQ ID NO: 277197 - DNA, 120 bp, Artificial Sequence
  ENSG00000128731_80 (sequence is synthesized)
cagaacattgagagactaaatggacagggggtgtgccagattgagtgtggagctcagttctccctggcgctcaccaagtctggagtggtgtggacatggggaaagggggattacttcaga

SEQ ID NO: 277198 - DNA, 120 bp, Artificial Sequence
  ENSG00000128731_81 (sequence is synthesized)
ttgggccacggctctgacgtgcacgtgcggaaaccacaggtggtggaagggctgagagggaagaagatcgtgcatgtggctgtcggggccctgcactgcctggcggtcacggactcgggg

SEQ ID NO: 277199 - DNA, 120 bp, Artificial Sequence
  ENSG00000128731_82 (sequence is synthesized)
caggtgtatgcttggggtgacaacgaccacggccagcagggcaatggcacgaccacggttaacaggaagcccacactcgtgcaaggcttagaaggccagaagatcacacgcgtggcttgt

SEQ ID NO: 277200 - DNA, 120 bp, Artificial Sequence
  ENSG00000128731_83 (sequence is synthesized)
gggtcgtcccacagtgtggcgtggacaactgtggatgtggccacgccctctgtccacgagcccgtcctcttccagactgcaagagaccctttaggtgcttcctatttaggcgtgccttca

SEQ ID NO: 277201 - DNA, 120 bp, Artificial Sequence
  ENSG00000128731_84 (sequence is synthesized)
gatgctgattcttctgctgccagtaataaaataagtggtgcaagtaattctaagccaaatcgcccttctcttgccaagattctcttgtcattggatggaaatctggccaaacagcaggcc

SEQ ID NO: 277202 - DNA, 120 bp, Artificial Sequence
  ENSG00000128731_85 (sequence is synthesized)
ttatcacatattcttacagcattgcaaatcatgtatgccagagatgctgttgtcggggccctgatgccggccgccatgatcgccccggtggagtgcccctcgttctcctcggcggcccct

SEQ ID NO: 277203 - DNA, 120 bp, Artificial Sequence
  ENSG00000128731_86 (sequence is synthesized)
tccgacgcatctgcgatggctagtcccatgaatggagaagaatgcatgctggctgttgatatcgaagacagactgagtccaaatccatggcaagaaaagagagagattgtttcctctgag

SEQ ID NO: 277204 - DNA, 120 bp, Artificial Sequence
  ENSG00000128731_87 (sequence is synthesized)
gacgcagtgaccccctctgcagtgactccgtcggccccctcagcctccgctcggccttttatcccagtgacggatgacctgggagccgcaagcatcattgcagaaaccatgaccaaaacc

SEQ ID NO: 277205 - DNA, 120 bp, Artificial Sequence
  ENSG00000128731_88 (sequence is synthesized)
aaagaggatgttgaaagccaaaataaagcagcaggtccggagcctcaggccttggatgagttcaccagtctgctgattgcggatgacactcgtgtggtggtagacctgctcaagctgtca

SEQ ID NO: 277206 - DNA, 120 bp, Artificial Sequence
  ENSG00000128731_89 (sequence is synthesized)
gtgtgcagccgggccggggacaggggcagggatgtgctctccgcggtgctttccggcatggggaccgcctacccacaggtggcagatatgctgttggagctctgtgtcaccgagttggag

SEQ ID NO: 277207 - DNA, 120 bp, Artificial Sequence
  ENSG00000128731_90 (sequence is synthesized)
gatgtggccacagactcgcagagcggccgcctctcttctcagcctgtggtggtggagagtagccacccttacaccgacgacacctccaccagtggcacagtgaagataccaggtgcagaa

SEQ ID NO: 277208 - DNA, 120 bp, Artificial Sequence
  ENSG00000128731_91 (sequence is synthesized)
ggactcagggtagaatttgaccggcagtgctccacagagaggcgccacgaccctctcacagtcatggacggcgtcaacaggatcgtctccgtgcggtcaggccgagagtggtccgactgg

SEQ ID NO: 277209 - DNA, 120 bp, Artificial Sequence
  ENSG00000128731_92 (sequence is synthesized)
tccagcgagctgcgcatcccaggggatgagttaaagtggaagttcatcagcgatgggtctgtgaatggctggggctggcgcttcaccgtctatcccatcatgccagctgctggccctaaa

SEQ ID NO: 277210 - DNA, 120 bp, Artificial Sequence
  ENSG00000128731_93 (sequence is synthesized)
gaactcctctctgaccgctgcgtcctctcctgtccatccatggacttggtgacgtgtctgttagacttccgactcaaccttgcctctaacagaagcatcgtccctcgccttgcggcctcg

SEQ ID NO: 277211 - DNA, 120 bp, Artificial Sequence
  ENSG00000128731_94 (sequence is synthesized)
ctggcagcttgtgcacagctgagtgccctagctgccagtcacagaatgtgggcccttcagagactgaggaagctgcttacaactgaatttgggcagtcaattaacataaataggctgctt

SEQ ID NO: 277212 - DNA, 120 bp, Artificial Sequence
  ENSG00000128731_95 (sequence is synthesized)
ggagaaaatgatggggaaacaagagctttgagttttacaggtagtgctcttgctgctttggtgaaaggtcttccagaagctttgcaaaggcagtttgaatatgaagatcctattgtgagg

SEQ ID NO: 277213 - DNA, 120 bp, Artificial Sequence
  ENSG00000128731_96 (sequence is synthesized)
ggtggcaaacagctgctccacagcccattctttaaggtactggtagctcttgcttgtgacctggagctggacactctgccttgctgtgccgagacgcacaagtgggcctggttccggagg

SEQ ID NO: 277214 - DNA, 120 bp, Artificial Sequence
  ENSG00000128731_97 (sequence is synthesized)
tactgcatggcctcccgtgttgctgtggcccttgacaaaagaacaccgttgccccgtctgtttcttgatgaggtggctaagaaaattcgtgaattaatggcagacagcgaaaacatggat

SEQ ID NO: 277215 - DNA, 120 bp, Artificial Sequence
  ENSG00000128731_98 (sequence is synthesized)
gttctgcatgagagccatgacatttttaaaagagagcaagacgaacaacttgtgcagtggatgaacaggcgaccagatgactggactctctctgctggtggcagtggaacaatttatgga

SEQ ID NO: 277216 - DNA, 120 bp, Artificial Sequence
  ENSG00000128731_99 (sequence is synthesized)
tggggacataatcacaggggccagctcgggggcattgaaggcgcaaaagtcaaagttcccactccctgtgaagcccttgcaactctcagacccgtgcagttaatcggaggggaacagacc

SEQ ID NO: 277217 - DNA, 120 bp, Artificial Sequence
  ENSG00000128731_100 (sequence is synthesized)
ctctttgctgtgacggctgatgggaagctgtatgccactgggtatggtgcaggtggcagactaggcattggagggacagagtcggtgtccaccccaacattgcttgaatccattcagcat

SEQ ID NO: 277218 - DNA, 120 bp, Artificial Sequence
  ENSG00000128731_101 (sequence is synthesized)
gtgtttattaagaaagtagctgtgaactctggaggaaagcactgccttgccctgtcttcagaaggagaagtttactcttggggtgaggcagaagatgggaagttggggcatggcaacaga

SEQ ID NO: 277219 - DNA, 120 bp, Artificial Sequence
  ENSG00000128731_102 (sequence is synthesized)
agtccgtgtgaccgccctcgtgtcatcgagtctctgagaggaattgaagtggtcgatgttgctgctggcggagcccacagcgcctgtgtcacagcagccggggacctctacacatggggc

SEQ ID NO: 277220 - DNA, 120 bp, Artificial Sequence
  ENSG00000128731_103 (sequence is synthesized)
aaaggccgctacggccggctggggcacagcgacagtgaggaccagctgaagccgaagctggtggaggcgctgcagggccaccgtgtggttgacatcgcctgtggcagtggagatgcccag

SEQ ID NO: 277221 - DNA, 120 bp, Artificial Sequence
  ENSG00000128731_104 (sequence is synthesized)
accctctgcctcacagatgacgacactgtctggtcctggggggacggggactacggcaagctcggccggggaggcagcgatggctgtaaagtgcctatgaagattgattctcttactggt

SEQ ID NO: 277222 - DNA, 120 bp, Artificial Sequence
  ENSG00000128731_105 (sequence is synthesized)
cttggagtagttaaagtggaatgcggatcccagttttctgttgcccttaccaaatctggagctgtttatacctggggcaaaggcgattatcacaggttgggccatggatcagatgaccat

SEQ ID NO: 277223 - DNA, 120 bp, Artificial Sequence
  ENSG00000128731_106 (sequence is synthesized)
gttcgaaggcctcggcaggtccaagggttgcaggggaagaaagtcatcgccatcgccactggctccctgcactgtgtgtgctgcacagaggatggtgaggtttatacatggggcgacaat

SEQ ID NO: 277224 - DNA, 120 bp, Artificial Sequence
  ENSG00000128731_107 (sequence is synthesized)
gatgagggacaactgggagacggaaccaccaatgccatccagaggcctcggttggtagctgcccttcagggtaagaaggtcaaccgtgtggcctgtggctcagcacataccctcgcctgg

SEQ ID NO: 277225 - DNA, 120 bp, Artificial Sequence
  ENSG00000128731_108 (sequence is synthesized)
tcgaccagcaagcccgccagtgctggcaaactccctgcacaggtccccatggagtacaatcacctgcaggagatccccatcattgcgctgaggaaccgtctgctgctgctgcaccacctc

SEQ ID NO: 277226 - DNA, 120 bp, Artificial Sequence
  ENSG00000128731_109 (sequence is synthesized)
tccgagctcttctgcccctgcatccccatgttcgacctggaaggctcgctcgacgaaactggactcgggccttctgttgggttcgacactctccgaggaattctgatatcccagggaaag

SEQ ID NO: 277227 - DNA, 120 bp, Artificial Sequence
  ENSG00000128731_110 (sequence is synthesized)
gaggcggctttccggaaagtagtacaagcaactatggtacgcgatcgtcagcatggccccgtcgtggagctgaaccgcatccaggtcaaacgatcaaggagcaaaggcgggctggccggc

SEQ ID NO: 277228 - DNA, 120 bp, Artificial Sequence
  ENSG00000128731_111 (sequence is synthesized)
cccgacggcaccaagtctgtctttgggcagatgtgtgctaagatgagctcgtttggtcccgacagcctcctccttcctcaccgtgtctggaaagtcaagtttgtgggtgaatctgtggat

SEQ ID NO: 277229 - DNA, 120 bp, Artificial Sequence
  ENSG00000128731_112 (sequence is synthesized)
gactgtgggggcggctacagcgagtccatagctgagatctgtgaggagctgcagaacggactcacgcccctgctgatcgtgacacccaacgggagggatgagtctggggccaaccgagac

SEQ ID NO: 277230 - DNA, 120 bp, Artificial Sequence
  ENSG00000128731_113 (sequence is synthesized)
tgctacctgctcagcccggccgccagagcacccgtgcacagcagcatgttccgcttcctgggtgtgttgctgggcattgccatccgaaccgggagtcccctgagcctcaaccttgccgag

SEQ ID NO: 277231 - DNA, 120 bp, Artificial Sequence
  ENSG00000128731_114 (sequence is synthesized)
cctgtctggaagcagctggctgggatgagcctcaccatcgcggacctcagtgaggttgataaggattttattcctggactcatgtacatccgagacaatgaagccacctcagaggagttt

SEQ ID NO: 277232 - DNA, 120 bp, Artificial Sequence
  ENSG00000128731_115 (sequence is synthesized)
gaagccatgagcctgcccttcacagtgccaagtgccagtggccaggacattcagttgagctccaagcacacacacatcaccctggacaaccgcgcggagtacgtgcggctggcgataaac

SEQ ID NO: 277233 - DNA, 120 bp, Artificial Sequence
  ENSG00000128731_116 (sequence is synthesized)
tatagactccatgaatttgatgagcaggtggctgctgttcgggaaggaatggcccgcgttgtgcctgttcccctcctctctctgttcaccggctacgaactggagacgatggtgtgtggc

SEQ ID NO: 277234 - DNA, 120 bp, Artificial Sequence
  ENSG00000128731_117 (sequence is synthesized)
agccctgacatcccgctgcaccttctcaagtcggtggccacctataaaggcatcgagccttccgcatcgctgatccagtggttctgggaggtgatggagtccttctccaacacagagcgc

SEQ ID NO: 277235 - DNA, 120 bp, Artificial Sequence
  ENSG00000128731_118 (sequence is synthesized)
tctcttttccttcgcttcgtctggggccggacgaggctgcccaggaccatcgccgacttccggggccgagacttcgtcatccaggtgttggataaatacaaccctccagaccacttcctc

SEQ ID NO: 277236 - DNA, 120 bp, Artificial Sequence
  ENSG00000128731_119 (sequence is synthesized)
cctgagtcctacacctgtttcttcttgctgaagctgcccaggtattcctgcaagcaggtgctggaggagaagctcaagtacgccatccacttctgcaagtccatagacacagatgactac

SEQ ID NO: 277237 - DNA, 120 bp, Artificial Sequence
  ENSG00000128731_120 (sequence is synthesized)
gctcgcatcgcacttacaggagagccagccgccgacgacagcagcgacgattcagataacgaggatgtcgactcctttgcttcggactctacacaagattatttaacaggacactaagat

SEQ ID NO: 277238 - DNA, 120 bp, Artificial Sequence
  ENSG00000128731_121 (sequence is synthesized)
ggggaaacgtcctcgtgagatgagagcctgagccaggcagcagagcgctcgctgctgtgtagactgtaggctgcctggtgtgtctgatgagaagcgtccgtcctcgagccaggcgggagg

SEQ ID NO: 277239 - DNA, 120 bp, Artificial Sequence
  ENSG00000128731_122 (sequence is synthesized)
agggagtggagagactgactggccgtgatgggaatgacagtgagaaggtccgcctgtgcgcgtggaacactgtggacgctcgacttccaagggtcttctcacccgtaatgctgcattaca

SEQ ID NO: 277240 - DNA, 120 bp, Artificial Sequence
  ENSG00000128731_123 (sequence is synthesized)
tgtaggactgtgtttactaaagtgtgtaaatgtttatataaataccaaattgcagcatccccaaaatgaataaagcctttttacttgtgggtgcaatcgattttttttctttctcctttc

SEQ ID NO: 277241 - DNA, 120 bp, Artificial Sequence
  ENSG00000128731_124 (sequence is synthesized)
tttcaagtgtcgtgagtcgtcttgattgtatattggaaataactgtgtaacaaatcgtattataaatatttcaattaattttactctgaatttgtttattaaaagacttttgaacatgaa

SEQ ID NO: 277242 - DNA, 120 bp, Artificial Sequence
  ENSG00000128731_125 (sequence is synthesized)
atgattagtattacttgaatgcatccagaggatatttaaaccaaaatgaaaaaccagaaggccatttggtgtcccccctcccaggtgtccccttgtagcatatgcattatgtcatctgaa

SEQ ID NO: 277243 - DNA, 120 bp, Artificial Sequence
  ENSG00000128731_126 (sequence is synthesized)
ttgaggcctttctgtgaacagcatcataacttctatcatggaaagtgtactatatataatgtttgtgtcatgtatatgcctaaattttaattatctataaataaaacatctgacataaaa

SEQ ID NO: 277244 - DNA, 120 bp, Artificial Sequence
  ENSG00000128731_127 (sequence is synthesized)
ctattgagcagagaaagtgctgtcccgcaggagcctgtctgcctccagccttatggctgctgttttctgcagcctctgagtgcagacagcctctactagtgggtgtcgtcatggaggaga

SEQ ID NO: 277245 - DNA, 120 bp, Artificial Sequence
  ENSG00000128731_128 (sequence is synthesized)
ggcagccccgtgggcttcggggagctgggtgcacctctcctctcacacagccgccgtgacatagggcatgtcctgttcttttcttgtagcctagtctcctctgggcatgatggagcctta

SEQ ID NO: 277246 - DNA, 120 bp, Artificial Sequence
  ENSG00000128731_129 (sequence is synthesized)
acaagctgccgcgagtttccaggaactcacgtctgtgaacactagccgtgtgtgtggcacgcagacaagttcattctacaggcaactgtggctcctgtcattcttcttgtatttttagtc

SEQ ID NO: 277247 - DNA, 120 bp, Artificial Sequence
  ENSG00000128731_130 (sequence is synthesized)
ttggttatggcagcctgctctgtaagctgtttaaactcaactttaagtgagctaaaggtgaagagagcttcactggaggagtcatcaaaatacattctcaggaccattttttcttcaatt

SEQ ID NO: 277248 - DNA, 120 bp, Artificial Sequence
  ENSG00000128731_131 (sequence is synthesized)
tttctttttgacatccttccagactgggcttcccagatgattctgatgcacagcctcggccacctgccctccgatgtgccgaggtcctgctgcggcggggccctagggctcctgccctgg

SEQ ID NO: 277249 - DNA, 120 bp, Artificial Sequence
  ENSG00000128731_132 (sequence is synthesized)
tgtctttgggaattggaggcccctgagcctttagcaattgtagcttaggatgagaaggatgggcagggagtgactgcctgtgttggggaggctgagtggccccaaggcttggaaatggga

SEQ ID NO: 277250 - DNA, 120 bp, Artificial Sequence
  ENSG00000128731_133 (sequence is synthesized)
tgggtggaagcagatgtggggaagggctggtcctggctgaggcactcactcactgtgtctgcttcagtctcaggggcattgggttgaatctttgagtgccgggagtctgttctggtctgc

SEQ ID NO: 277251 - DNA, 120 bp, Artificial Sequence
  ENSG00000128731_134 (sequence is synthesized)
tgggggagctgcttttggagttcctggtgtcttatttcatgaggtcgtggcaagatggtgaagtagcagcagtgcttagggtgtgaggatggtccgtgccagggtggtgctgccgggccg

SEQ ID NO: 277252 - DNA, 120 bp, Artificial Sequence
  ENSG00000128731_135 (sequence is synthesized)
ccaatggggtgaggcagcggtctcgggtgtccacagtcgagcgccccagacggcagggtctgcctggcgtccacacaagcaggtgtgtgaccagggaggggcccatgcacggtgcctcct

SEQ ID NO: 277253 - DNA, 120 bp, Artificial Sequence
  ENSG00000128731_136 (sequence is synthesized)
cctcgtgcattcgccagtgccgcatatccccgactgtgtgcttcctgctgcggcagcggcctcacgcttgcttgcttcctcctctccaggtcaaacgatcaaggagcaaaggcgggctgg

SEQ ID NO: 277254 - DNA, 120 bp, Artificial Sequence
  ENSG00000128731_137 (sequence is synthesized)
tgccacgtgctggagcacctgtgtccccggcagtggtcgcctgagcccacagggagcacagaggccacatggtgtgggagcgttggggctctctttacacaggactgtgtgaggggactt

SEQ ID NO: 277255 - DNA, 120 bp, Artificial Sequence
  ENSG00000128731_138 (sequence is synthesized)
tctagggtcttgttaacaggcacagtctgttctgcgggtccggtcaggctgtgaactctggcctaatctcagtgcccaggtgacgcagaggctgttggctgtggaccacctttgagtagc

SEQ ID NO: 277256 - DNA, 120 bp, Artificial Sequence
  ENSG00000128731_139 (sequence is synthesized)
gcagtatgcgatgttttgtggatggcaaagacttattcctgagggaatcgatatagggtaaaacgttagcatatttttttcttaattaaggtagctatggcaacaaaatgttgttctgta

SEQ ID NO: 277257 - DNA, 120 bp, Artificial Sequence
  ENSG00000128731_140 (sequence is synthesized)
gccttgccctgtcttcagaaggagaagtttactcttggggtgaggcagaagatgggaagttggggcatggcaacagaaggattttagaaatcacctctttgtaaaggcttaaaacaggta

SEQ ID NO: 277258 - DNA, 120 bp, Artificial Sequence
  ENSG00000128731_141 (sequence is synthesized)
attctcctccccacctctagttggttgagcttgagcctcagatgctgtcctggccctgggcagctggggagcccctgcagccttccagcggtccctttgtgccgagcgcaggctcttcag

SEQ ID NO: 277259 - DNA, 120 bp, Artificial Sequence
  ENSG00000128731_142 (sequence is synthesized)
tggtgcttcagtttagattcagctgtagatttgcgggtagtccgtccgcatatttcgtggttttccctctgtggtttctttctcaggcgggctttccctcgcattctggttactctgcca

SEQ ID NO: 277260 - DNA, 120 bp, Artificial Sequence
  ENSG00000128731_143 (sequence is synthesized)
ggccgggaccccagcccctgcagtgcaggaaggtgcgccgtctgtggttaaatgcgcgtcttgcatgcaggcttctcggggtcaggggttgtactcgttttattgctgattgcgtcagct

SEQ ID NO: 277261 - DNA, 120 bp, Artificial Sequence
  ENSG00000128731_144 (sequence is synthesized)
gttctccagtgccctcaagcagttttaaaaaatattttatccagagttcatgattattatcagccaaaggttagtccagtgcatcctaactctcaattatcagaaccagaactcttggct

SEQ ID NO: 277262 - DNA, 120 bp, Artificial Sequence
  ENSG00000128731_145 (sequence is synthesized)
caatctggctctgaattttaaacttttagaatgaaacctgtcacttccaagttacccagacttcgctgcaaaaccctaggctttgatacttcctgagcaccggggggctccacagtgtcc

SEQ ID NO: 277263 - DNA, 120 bp, Artificial Sequence
  ENSG00000128731_146 (sequence is synthesized)
tcggtttcttcctgattccttcctcacatgctccgtttaacaaaatagcaagtcagtgctatgagagcagctggggaggaggaccagggagttacagacagatcagggaagtgctatttg

SEQ ID NO: 277264 - DNA, 120 bp, Artificial Sequence
  ENSG00000128731_147 (sequence is synthesized)
tgctgtaggtggggagttcccagctgcagagactggcagtttagatgttcactgattcattgcagtgtgtttcccaactaatactcttttatttctcttactttttaataccttgtttaa

SEQ ID NO: 277265 - DNA, 120 bp, Artificial Sequence
  ENSG00000128731_148 (sequence is synthesized)
cctcactgtggttatttaacccttgaatagttgagggttgttttaatggtacatgagagtcctgtgtcatttctggcctgtctaaaacacaggtgcctgtggccgccaccacagtgcctg

SEQ ID NO: 277266 - DNA, 120 bp, Artificial Sequence
  ENSG00000128731_149 (sequence is synthesized)
gttaaggcagggggaatgcctttctccctgctccttcaagcccctgtgactgtttgcttggggctgtaatgaagttttccttaatggacattgatacttggctaatttagtaggctctct

SEQ ID NO: 277267 - DNA, 120 bp, Artificial Sequence
  ENSG00000128731_150 (sequence is synthesized)
gtctgctgaaacaggcaagttattttacccccacgtattttctctgcattaaaccgtgaaacttggctttgtcattttctaacatgttttaggaactcattgaaaaacacacatgtgaat

SEQ ID NO: 277268 - DNA, 120 bp, Artificial Sequence
  ENSG00000128731_151 (sequence is synthesized)
gcgggctttctagacttgcatactgcagttcacagtagaaggccatcacccctgtgttcctagactgtgtaagctagctgagggcacttcccaaatctcccaggaccctcttgtctgccc

SEQ ID NO: 277269 - DNA, 120 bp, Artificial Sequence
  ENSG00000128731_152 (sequence is synthesized)
caagggaggtgacttggccatttctatactagcattgagcccagtttttccccgtttaaataattggttctttctgttttaaattttgacactttaaaagatacaacttattttgtacaa

SEQ ID NO: 277270 - DNA, 120 bp, Artificial Sequence
  ENSG00000128731_153 (sequence is synthesized)
ctgaatttgctgcttatcagttcagcttgaaaaggaaacaaatttcattctcactctctttggtagcagaggtatacttggtaactgctcctagcaaaagttttcatcaggcattttagg

SEQ ID NO: 277271 - DNA, 120 bp, Artificial Sequence
  ENSG00000128731_154 (sequence is synthesized)
ttgctgattgcatctgaacacttcggttttcattaaatatctcagtttctggtggttttcctgaccatatatgtgacgctgaagttgcttttttgtcgtcacacctgttggcatcaagtg

SEQ ID NO: 277272 - DNA, 120 bp, Artificial Sequence
  ENSG00000128731_155 (sequence is synthesized)
ctgaacttgtcacggagtggcaattttttggttaataaggcagctttcaaaatgagtctaagtttatctctggaaaagtttgaaagaatcagtgaaggttcttttaaacagtacccacat

SEQ ID NO: 277273 - DNA, 120 bp, Artificial Sequence
  ENSG00000128731_156 (sequence is synthesized)
actacagatcagcaattatctctctctctcaaatttttagtaaacctttccacataggatgtcagcatgatttttaatacattaaatatatgtaaaataagacaaattaagatacttttg

SEQ ID NO: 277274 - DNA, 120 bp, Artificial Sequence
  ENSG00000128731_157 (sequence is synthesized)
aatctctgaataaatttgagtagcaagtatcagaaacttgatcctaaatattaaaaatacatccttcctttggagggagcgtgtagtaaatgtgttagtgtgattgtaagcatgctgtct

SEQ ID NO: 277275 - DNA, 120 bp, Artificial Sequence
  ENSG00000128731_158 (sequence is synthesized)
ttttaaagcaagactagcatgcatgtcaacggcagtgtttttctctggcgtgtgtgtgtttggtggtaatagcagcgagtcagatgagacaggtgtgggaggtcacttgtttgtggagaa

SEQ ID NO: 277276 - DNA, 120 bp, Artificial Sequence
  ENSG00000128731_159 (sequence is synthesized)
cccaggctcgcctcgactccaaatggttgaaaacagatatacaggtattgagtgttggtagatatgagagtccagtgtttagagctgtgttgcgtggccgggcgcagtggctcacgcctg

SEQ ID NO: 277277 - DNA, 120 bp, Artificial Sequence
  ENSG00000128739_0 (sequence is synthesized)
atgctcaggcggggatgtgtgcgaagcctgccgctgctgcagcgagtctggcgcagagtggagcggccgccggagatgcctgacgcatctgtctgaggagcggtcagtgacgcgatggag

SEQ ID NO: 277278 - DNA, 120 bp, Artificial Sequence
  ENSG00000128739_1 (sequence is synthesized)
cgggcaagggatcgcttacacctgagacgaactacagaacagcacgtaccagaggtggaagtccaagtcaaacgcagaaggactgcctcactgagcaaccaagagtgtcagttgtacccg

SEQ ID NO: 277279 - DNA, 120 bp, Artificial Sequence
  ENSG00000128739_2 (sequence is synthesized)
aggcgttctcagcagcagcaagtacctgtggtggatttccaggctgaactgaggcaggcattcttagctgagacaccaagaggtggttaaagccatattggagtagcgaggaatctgatt

SEQ ID NO: 277280 - DNA, 120 bp, Artificial Sequence
  ENSG00000128739_3 (sequence is synthesized)
ccaagcaaaaaccagccttcccctaggtcttcagaagcatcaagttttaactgtggacattggatttggtggaacagcaatcatgactgttggcaagagtagcaagatgctgcagcacat

SEQ ID NO: 277281 - DNA, 120 bp, Artificial Sequence
  ENSG00000128739_4 (sequence is synthesized)
tgactatagaatgagatgtatcctgcaagatggccgaatcttcattggcacctttaaggcttttgacaagcatatgaatttgatcctctgtgattgtgatgagttcagaaagatcaagcc

SEQ ID NO: 277282 - DNA, 120 bp, Artificial Sequence
  ENSG00000128739_5 (sequence is synthesized)
aagatactggcattgctcgggtaccacttgctggagctgctggaggccctggggttggtagggcagctggtagaggagtaccagctggtgtgccaattccccaggcccctgctggattgg

SEQ ID NO: 277283 - DNA, 120 bp, Artificial Sequence
  ENSG00000128739_6 (sequence is synthesized)
caggccctgtccgaggagttgggggaccatcccagcaggtaatgactccacagggaagaggcactgtagcagctgctgctgttgctgcgactgccagtattgctggagccccaacacagt

SEQ ID NO: 277284 - DNA, 120 bp, Artificial Sequence
  ENSG00000128739_7 (sequence is synthesized)
acccaccaggacggggcactccgcccccacccgtcggcagagcaaccccacctccaggcattatggctcctccacctggtatgagaccacccatgggcccaccaattgggcttccccctg

SEQ ID NO: 277285 - DNA, 120 bp, Artificial Sequence
  ENSG00000128739_8 (sequence is synthesized)
ctcgagggacgccaataggcatgccgcctccgggaatgagaccccctccaccaggcattagaggtccacctcccccaggaatgcgtccaccaagaccttagcatactgttgatccatctc

SEQ ID NO: 277286 - DNA, 120 bp, Artificial Sequence
  ENSG00000128739_9 (sequence is synthesized)
agtcactttttcccctgcaatgcgtcttgtgaaattgtgtagagtgtttgtgagctttttgttccctcattctgcattaataatagctaataataaatgcatagagcaattaaactgtga

SEQ ID NO: 277287 - DNA, 120 bp, Artificial Sequence
  ENSG00000128739_10 (sequence is synthesized)
tttgcctgttgattttgatgagatcttaagttactgtggatgagggtgatgcctattaagcagttgattcaaatcatattctctttaattcttaggataaaaaggttttctgctatctaa

SEQ ID NO: 277288 - DNA, 120 bp, Artificial Sequence
  ENSG00000128739_11 (sequence is synthesized)
agctgagctcagagccttctgtggggtctgcagtggcaaggccagccgccccctgtcttccctctggagctgtttgaggaatgcagttcttttgcataagaaaggcttttctctccagtc

SEQ ID NO: 277289 - DNA, 120 bp, Artificial Sequence
  ENSG00000128739_12 (sequence is synthesized)
attctgcttgctgatcaagaacacttaacagcttcaggctttcctgatactttgacgaaggtaattgggactcccatcaagtctccacacagctagcagccacgtggggcacttctccag

SEQ ID NO: 277290 - DNA, 120 bp, Artificial Sequence
  ENSG00000128739_13 (sequence is synthesized)
catatgtaagtggaactcagaaggcaacattccctgaacatactcttccaccagaatctcctctacagatttttgctgccccttttaccagtggctgaatctactttctcttatggatcg

SEQ ID NO: 277291 - DNA, 120 bp, Artificial Sequence
  ENSG00000128739_14 (sequence is synthesized)
caccaagggctggccgcagccactgtagctgagctcagagccttctgtgtggtttgcgggggcaaggtcagctgccccctgccctctctctggggctatttgaggaatgcggcctttttg

SEQ ID NO: 277292 - DNA, 120 bp, Artificial Sequence
  ENSG00000128739_15 (sequence is synthesized)
cataagaaaggcttttctctacagtaactgtggtcgctgatcaatgacaccttcctggtaacatttcatattgcttttttggagatgtaagtgggatctgtggatctgaaaattcacagt

SEQ ID NO: 277293 - DNA, 120 bp, Artificial Sequence
  ENSG00000128739_16 (sequence is synthesized)
ctgccctctctctggggctatttgaggaatgcggcctttttgcataagaaaggcttttctctacagtaactgtggtcgctgatcaatgacaccttcctgatgtaagtgggatctgtggat

SEQ ID NO: 277294 - DNA, 120 bp, Artificial Sequence
  ENSG00000128739_17 (sequence is synthesized)
agtctccacacagctagcagccacgtggggcacttctccaggttcacagctggagagccattgtctcgggattaattgtaccttgagcatcacctatatctgatttagatgatatttaca

SEQ ID NO: 277295 - DNA, 120 bp, Artificial Sequence
  ENSG00000128739_18 (sequence is synthesized)
tgcgactttcgacttacacttgaaagttgatgctggaatgagttaagacattttggagttactaagatggaatggacatattcttgtggcatatgtaagtggaactcagaaggcaacatt

SEQ ID NO: 277296 - DNA, 120 bp, Artificial Sequence
  ENSG00000128739_19 (sequence is synthesized)
ccctgaacatactcttccaccagaatctcctctacagatttttgctgccccttttaccagtggctgaatctactttctcttatgagacagggtctggctatgttgcccaggttggagtgc

SEQ ID NO: 277297 - DNA, 120 bp, Artificial Sequence
  ENSG00000128739_20 (sequence is synthesized)
aggatcaatatgaaggacggcctaaacatctccctgcaaatgctttagcagcatctccctcccctcacccctggggagaaaggattgttcacacaggataatttgaaagtgagtgactat

SEQ ID NO: 277298 - DNA, 120 bp, Artificial Sequence
  ENSG00000128739_21 (sequence is synthesized)
ttcccctaggtcttcagaagcatcaagttttaactgtggacattggatttggtggaacagcaatcatgacggggtcttgctctgtctcccagtctggagtgcagtggtgcggtcttggct

SEQ ID NO: 277299 - DNA, 120 bp, Artificial Sequence
  ENSG00000128789_0 (sequence is synthesized)
gccttcttgctgccctcgttcttgccagggccgcggttagtccctgctggccaccccactgcgaccatgttcgttccctgcggggagtcggcccccgaccttgccggcttcaccctccta

SEQ ID NO: 277300 - DNA, 120 bp, Artificial Sequence
  ENSG00000128789_1 (sequence is synthesized)
atgccagcagtatctgttggaaatgttggccagcttgcaatggatctgattatttctacactgaatatgtctaagattggttacttctataccgattgtcttgtgccaatggttggaaac

SEQ ID NO: 277301 - DNA, 120 bp, Artificial Sequence
  ENSG00000128789_2 (sequence is synthesized)
aatccatatgcgaccacagaaggaaattcaacagaacttagcataaatgctgaagtgtattcattgccttcaagaaagctggtggctctacagttaagatccatttttattaagtataaa

SEQ ID NO: 277302 - DNA, 120 bp, Artificial Sequence
  ENSG00000128789_3 (sequence is synthesized)
tcaaagccattctgtgaaaaactgctttcctgggtgaaaagcagtggctgtgccagagtcattgttctttcaagcagtcattcatatcagcgtaatgatctgcagcttcgtagtactccc

SEQ ID NO: 277303 - DNA, 120 bp, Artificial Sequence
  ENSG00000128789_4 (sequence is synthesized)
cgagttttgtatccgcattccgggaggaggtatcacaaaaacactctatgatgaaagctgttctaaagaaatccaaatggcagttctgctgaaatttgtttcagaaggggacaacatccc

SEQ ID NO: 277304 - DNA, 120 bp, Artificial Sequence
  ENSG00000128789_5 (sequence is synthesized)
agatgcattaggtcttgttgagtatcttaatgagtggcttcagatactcaaaccacttagcgatgaccccacagtatctgcctcacggtggaaaataccaagttcttggagattactctt

SEQ ID NO: 277305 - DNA, 120 bp, Artificial Sequence
  ENSG00000128789_6 (sequence is synthesized)
tggcagtggtcttccccctgcacttttctgatctaatttctgttttataccttatacccaaaacacttactaccaacacagctgttaaacattctatacaaaaaaattgtatgatctggt

SEQ ID NO: 277306 - DNA, 120 bp, Artificial Sequence
  ENSG00000128789_7 (sequence is synthesized)
attaggaaattactttcacagtaaatatcaaagaaaaaagattaagggtctctttgccatgcttttcatcatatgcaccaaatgtaaattttgtacaataaaattttatttcctaagtaa

SEQ ID NO: 277307 - DNA, 120 bp, Artificial Sequence
  ENSG00000128789_8 (sequence is synthesized)
attatagcttaagcctcttctttgtctggttgtattcattaactcgcactttatatactacctaagtagaccaagtaagtgaacgtttgtattaaatatagacatatctttacataaaat

SEQ ID NO: 277308 - DNA, 120 bp, Artificial Sequence
  ENSG00000128789_9 (sequence is synthesized)
ttagtttaagctgaacttttgaaaattagaggacagttaaccaacctattatttacagttttttcattaaagctgactttccaaaaaggaaaatccttagttcttcattgtacttactat

SEQ ID NO: 277309 - DNA, 120 bp, Artificial Sequence
  ENSG00000128789_10 (sequence is synthesized)
tggttgaatacctccctctccactcccatcttcagggtagaggtctagagctgctcttggctctttatgcattctactttgaccctatgagaacctcatttctcttccaagagaaaggcc

SEQ ID NO: 277310 - DNA, 120 bp, Artificial Sequence
  ENSG00000128789_11 (sequence is synthesized)
gccttggagtatcaagaagccgtccagctcgaagtggtttaacataggaacagactggtctatttatcccattttcatcctagggaaaaggggaaaaacatctgtaatgacatattaatc

SEQ ID NO: 277311 - DNA, 80 bp, Artificial Sequence
  ENSG00000128789_12 (sequence is synthesized)
gcggcgaggacacggctgcagtcccggtcagacagccgccggccggtagcgacgcgatggcgtccggcgccccgccccgc

SEQ ID NO: 277312 - DNA, 120 bp, Artificial Sequence
  ENSG00000128789_13 (sequence is synthesized)
cgggccgggggatgcacgctctggaggcgctggatcgccgaaggtctggttgaaaacttgaacccgcctggagcggatgcctaagaaaatgcaggcccgctgaagcctccccgccgggcc

SEQ ID NO: 277313 - DNA, 120 bp, Artificial Sequence
  ENSG00000128789_14 (sequence is synthesized)
ctgggccctgaaagcctccggcagtttcccgtgaccccgcggccgctctgcgcgttttccgatttcttgctggttgaatacctccctctccactcccatcttcaggagacggggtttcac

SEQ ID NO: 277314 - DNA, 120 bp, Artificial Sequence
  ENSG00000128789_15 (sequence is synthesized)
gatagtaactaggtgttattttctttcagtctctgctgtggtgcttctgaaaattactgtcttctgaagtaggtttggggagtaggtcagaacataccttatctgctgtagccaaggaca

SEQ ID NO: 277315 - DNA, 120 bp, Artificial Sequence
  ENSG00000128789_16 (sequence is synthesized)
gaaaggctggtttttcatgcagccatggggtgaggcatgattgtgcgtgttccccagtgggtgttacaggggcctgctctcacaagtagaaaactctgtgtggggcgaagggagatgata

SEQ ID NO: 277316 - DNA, 120 bp, Artificial Sequence
  ENSG00000128789_17 (sequence is synthesized)
agtgatcttatggtgtggcgtcttttcctttcctaaaccaggtaggttatcgtagctgtaaaaacagacacactagagtcagctcttgtaccctatgaaagaatactgattcttattttt

SEQ ID NO: 277317 - DNA, 120 bp, Artificial Sequence
  ENSG00000128789_18 (sequence is synthesized)
gcacgctctggaggtgaggaccaggcaggagggcctcgcctcgaggcgagatggccgcacggtctctagcccgcagggctctcagagtcgcaggcggtgacgcccggtcggggggcccgg

SEQ ID NO: 277318 - DNA, 120 bp, Artificial Sequence
  ENSG00000128789_19 (sequence is synthesized)
gtaagcaccgtaaagacggggatctttacgggttttcctcactgacttctcccaaaagctaaaccagcgcctggaatataaacatgtacataatttgcaggtgttagttttagcgtcctt

SEQ ID NO: 277319 - DNA, 120 bp, Artificial Sequence
  ENSG00000128789_20 (sequence is synthesized)
gccgcacggtctctagcccgcagggctctcagagtcgcaggcggtgacgcccggtcggggggcccggtcgcaagggacacacagctgggggcgcaatgtcacccgcattgacgttcccta

SEQ ID NO: 277320 - DNA, 120 bp, Artificial Sequence
  ENSG00000128791_0 (sequence is synthesized)
ctgaggggacggcgggaggcgcggcctggcctcgcactcaaagccgccgcagcgcgccccgggctcggccgacccggcggggatctaggggtgggcgacttcgcgggaccgtggcgcatg

SEQ ID NO: 277321 - DNA, 120 bp, Artificial Sequence
  ENSG00000128791_1 (sequence is synthesized)
gggcgacttcgcgggaccgtggcgcatgtttcctgggagttactgatcatcttctttgaagaaacatgaagttacactatgttgctgtgcttactctagccatcctgatgttcctgacat

SEQ ID NO: 277322 - DNA, 120 bp, Artificial Sequence
  ENSG00000128791_2 (sequence is synthesized)
ggcttccagaatcactgagctgtaacaaagcactctgtgctagtgatgtgagcaaatgcctcattcaggagctctgccagtgccggccgggagaaggcaattgctcctgctgtaaggagt

SEQ ID NO: 277323 - DNA, 120 bp, Artificial Sequence
  ENSG00000128791_3 (sequence is synthesized)
gcatgctgtgtcttggggccctttgggacgagtgctgtgactgtgttggtatgtgtaatcctcgaaattatagtgacacacctccaacttcaaagagcacagtggaggagctgcatgaac

SEQ ID NO: 277324 - DNA, 120 bp, Artificial Sequence
  ENSG00000128791_4 (sequence is synthesized)
cgatcccttctctcttccgggcactcacagaaggagatactcagttgaattggaacatcgtttctttccctgttgcagaagaactttcacatcatgagaatctggtttcatttttagaaa

SEQ ID NO: 277325 - DNA, 120 bp, Artificial Sequence
  ENSG00000128791_5 (sequence is synthesized)
ctgtgaaccagccacaccaccagaatgtgtctgtccccagcaataatgttcacgcgccttattccagtgacaaagaacacatgtgtactgtggtttattttgatgactgcatgtccatac

SEQ ID NO: 277326 - DNA, 120 bp, Artificial Sequence
  ENSG00000128791_6 (sequence is synthesized)
atcagtgtaaaatatcctgtgagtccatgggagcatccaaatatcgctggtttcataatgcctgctgcgagtgcattggtccagaatgtattgactatggtagtaaaactgtcaaatgta

SEQ ID NO: 277327 - DNA, 120 bp, Artificial Sequence
  ENSG00000128791_7 (sequence is synthesized)
tgaactgcatgttttaaagaagacaaatgcaaaccaaagcaacttagtaaaataataggtataaaaagttattctgtaagtctgttggttgtatcttgtatcagaatcccagtaagttaa

SEQ ID NO: 277328 - DNA, 120 bp, Artificial Sequence
  ENSG00000128791_8 (sequence is synthesized)
gttgtaaagactttggaataagtttcttttaaaaatatgacatagccagtgatgtgtttaattatataactgttcttactgattttattgccccctagcaataagccctttcctttgaat

SEQ ID NO: 277329 - DNA, 120 bp, Artificial Sequence
  ENSG00000128791_9 (sequence is synthesized)
acatgtacaactttggtcatatgagaagcaggtgcgcagagaattccttgaaagatctgaggtttttaacatgaagtctgacgtggttttcctctagcattccaaaaggtttttgctttg

SEQ ID NO: 277330 - DNA, 120 bp, Artificial Sequence
  ENSG00000128791_10 (sequence is synthesized)
aaagtgttagcagaagcatgttgatgtgaattatgatttcttcatgtgctactgttagcacactgagtttttatagttgcacatcattcctcattgtgccttgttttatccattttataa

SEQ ID NO: 277331 - DNA, 120 bp, Artificial Sequence
  ENSG00000128791_11 (sequence is synthesized)
atagagtagatatttgatataccactctgataactcatataaaaatatcatcataaaaagcttaatttcatcccttttatgttggttttaaaaggtaaatgcttaccatattttataatt

SEQ ID NO: 277332 - DNA, 120 bp, Artificial Sequence
  ENSG00000128791_12 (sequence is synthesized)
gagaactcttacatagtagaatccattctataatacatgtgttgacaaagctttagagaaagtttcctattctcttccatttcccctgcccaaagtgctgacataggcagtgatgaagaa

SEQ ID NO: 277333 - DNA, 120 bp, Artificial Sequence
  ENSG00000128791_13 (sequence is synthesized)
tctttaccaagattttcagggtgtacctatgaaattgctttaaatgcactgctggtgtaaataattagcaagcaaagcgtttctgtgacttcaggtaccagcttaaagagcactagggat

SEQ ID NO: 277334 - DNA, 120 bp, Artificial Sequence
  ENSG00000128791_14 (sequence is synthesized)
ggggaacgaatgccaaatcagactccacctagagcaccaggaaacagcttgtaccctggtagggaaatggtgttgctgaaaggggaggctgagccagtgcgagactgaacttgtgcagcc

SEQ ID NO: 277335 - DNA, 120 bp, Artificial Sequence
  ENSG00000128791_15 (sequence is synthesized)
gacggctgatgggacaggaattgaagaagagaattgactcgtatgaacaggacagggtgaaaatgctgggaattattatgggaaacaaaactatctatgttcatattttgtaatatttca

SEQ ID NO: 277336 - DNA, 120 bp, Artificial Sequence
  ENSG00000128791_16 (sequence is synthesized)
tttgttaagtttatatctggatataatgttctttttaaacaagtataatcatatcgtcggaggttaagattatgaaattttagaatctctattcaagatgatgttcactccaaatacact

SEQ ID NO: 277337 - DNA, 120 bp, Artificial Sequence
  ENSG00000128791_17 (sequence is synthesized)
acagaatttagtcaacattttatataatgtttcaataaatgtttctttcaataaagatactatgtgcccttcatagtaataaaatctcaatcttaaagcatgaatctaaaacataaatat

SEQ ID NO: 277338 - DNA, 120 bp, Artificial Sequence
  ENSG00000128791_18 (sequence is synthesized)
ttatattacagactcaattttacaaaattactaattgctctagtgcatatttgaactacaagcaactttttaggaatacctctttatacgtctacatattttagtatataaaaatagata

SEQ ID NO: 277339 - DNA, 120 bp, Artificial Sequence
  ENSG00000128791_19 (sequence is synthesized)
atgctcttggacacattttgtattattcatgatctgaatagtagttagttaaaagatcatttgtaatattatgatcaactgttataaattaaggtcttaataccttttctgctctttcaa

SEQ ID NO: 277340 - DNA, 120 bp, Artificial Sequence
  ENSG00000128791_20 (sequence is synthesized)
ataactctaatgaatattcaagatattttagccttttaaaaagttgagatttagctcatggatatattttttggtagggaaacattagggtctccttttcttccttttacctagaatgcc

SEQ ID NO: 277341 - DNA, 120 bp, Artificial Sequence
  ENSG00000128791_21 (sequence is synthesized)
tcatttaaaagtgccttgaaaacatttagctccccttcttcatgagcatctgtagagctgaaagtattctggaactttagacagaaagctgaaaggaatctgcagtctcctgctgcagtt

SEQ ID NO: 277342 - DNA, 120 bp, Artificial Sequence
  ENSG00000128791_22 (sequence is synthesized)
caactctgctgtttttcagtcatttcctactgtgagtggagtgatgtttgtgtgtgtgttggcaacatgcctaatgttttcttaatgatgacaacaaatattttaaaactgcatttatca

SEQ ID NO: 277343 - DNA, 120 bp, Artificial Sequence
  ENSG00000128791_23 (sequence is synthesized)
ttttttaggtcttcattaaattttaaaatgtaatatctgtttcccaccccctacattaggaggataatttcttaaaccacattgttttaattgatttttcttatcttgatttctttcatt

SEQ ID NO: 277344 - DNA, 120 bp, Artificial Sequence
  ENSG00000128791_24 (sequence is synthesized)
agaaactatccctaaatgtaaagatcttttgccttcaaatttggcttattttttctgatttatgagggtttgaaagaaagaattcacctaaaagattccatttccagttttataatgtat

SEQ ID NO: 277345 - DNA, 120 bp, Artificial Sequence
  ENSG00000128791_25 (sequence is synthesized)
ttcaggttctgaataacaatatttttccaaattgaaagtaaatattccagaagttgatagcctggttaaaagttagatcctctattaccattctaagcacattcacttctatattgaagt

SEQ ID NO: 277346 - DNA, 120 bp, Artificial Sequence
  ENSG00000128791_26 (sequence is synthesized)
tttggtaaaaattcttttttcttttttaataaaaaattaggttattactttttttataaccagatttttaaagcactaggttttaaatcagtgggtatcataaaagccatatataaaaga

SEQ ID NO: 277347 - DNA, 120 bp, Artificial Sequence
  ENSG00000128791_27 (sequence is synthesized)
tcctttcttatagtaagacttgtgcttgttagcaggtttttctgttagtttttcccccataacatttaattattactaaaattgtatttacaatagtggtgccaaatcaaatggtaattt

SEQ ID NO: 277348 - DNA, 120 bp, Artificial Sequence
  ENSG00000128791_28 (sequence is synthesized)
aaataaaatctattctgtgtttatgtagggtggtataaaaaagaggtcttcatttagacatgtgatttctaaaattccagaaagcaaaattgataagatgttagaaatttggaccattat

SEQ ID NO: 277349 - DNA, 120 bp, Artificial Sequence
  ENSG00000128791_29 (sequence is synthesized)
ttataatcagggtagcattaaaatggagaaaagaaagttttctgaaaaaatgcagtaaatataagccacatttctaaagtttatttttatgaaagcttcttttaagattttgaaatctat

SEQ ID NO: 277350 - DNA, 120 bp, Artificial Sequence
  ENSG00000128791_30 (sequence is synthesized)
tctgcattcccaagagtttatgtttattgtattttatatgatctacaacatataaaattgtgtatttttctttggttgtccctattaacaaaaaagtattttaataaaaaattgaaatga

SEQ ID NO: 277351 - DNA, 120 bp, Artificial Sequence
  ENSG00000128791_31 (sequence is synthesized)
aatagcccacattccggatttgactgcttcctgtggaagtcctaccatactgactgttctgtcataaacaattttcataggattatgttaaggtatgtgtaatcctcgaaattatagtga

SEQ ID NO: 277352 - DNA, 120 bp, Artificial Sequence
  ENSG00000128791_32 (sequence is synthesized)
gtggtctgtccatgtaatctataaaacctatataagaccatcttttggagcagccttttggttttgaatttgtatcatctcacataaattctagactcaataaccctgatcccatcatat

SEQ ID NO: 277353 - DNA, 120 bp, Artificial Sequence
  ENSG00000128791_33 (sequence is synthesized)
tcaataaccctgatcccatcatatctagaggcacatgccagaaggataagagaaaaaaaatatctccaatccttgagtagataaaaaggcatgtcggctgggcgtggtggctcatgcctg

SEQ ID NO: 277354 - DNA, 120 bp, Artificial Sequence
  ENSG00000128805_0 (sequence is synthesized)
ggactgccccgccctggtccagtgattgatcagcagtgattactgaggctttaatggtccgcttggatgggaattaattctgggatggataaataatgcatcgaggtttatgtagtccaa

SEQ ID NO: 277355 - DNA, 120 bp, Artificial Sequence
  ENSG00000128805_1 (sequence is synthesized)
ggcgagccgtccgtccggagccaggagaggtagccgagggagcctgacgggtgacgccagcggccacggggccccgaacgagcaggacatgaggggcgactaggcgcgaggacgagcaaa

SEQ ID NO: 277356 - DNA, 120 bp, Artificial Sequence
  ENSG00000128805_2 (sequence is synthesized)
agcaagtggatgacagcatgaacggccctgcggggctggccggacggctgcaagaacatgctgagcccaaagatcaggcaggccaggagggcccgctccaaaagcctagtgatgggggag

SEQ ID NO: 277357 - DNA, 120 bp, Artificial Sequence
  ENSG00000128805_3 (sequence is synthesized)
cagagccggagccctgggcggatgccgtgccctcacaggctgggccccgtgctgaaggcgggctggctgaagaagcagaggagcatcatgaagaactggcagcagcgctggtttgtgctg

SEQ ID NO: 277358 - DNA, 120 bp, Artificial Sequence
  ENSG00000128805_4 (sequence is synthesized)
cgtggggatcagcttttctactacaaggacaaagatgagatcaagccccagggatttatttctctacaagggacacaggtgactgaacttcctcctggccccgaggacccagggaagcac

SEQ ID NO: 277359 - DNA, 120 bp, Artificial Sequence
  ENSG00000128805_5 (sequence is synthesized)
ctctttgagatcagcccaggtggtgccggggagcgggagaaggtgccggccaaccccgaggcgctcctgctcatggccagctcccagcgtgacatggaggactgggtgcaggccatccgc

SEQ ID NO: 277360 - DNA, 120 bp, Artificial Sequence
  ENSG00000128805_6 (sequence is synthesized)
cgagtcatctgggccccgctgggcggagggatctttgggcagcgcctagaggaaacagtccaccacgagcggaagtatggcccccgcctggcgcccctgctggtggagcagtgtgtggac

SEQ ID NO: 277361 - DNA, 120 bp, Artificial Sequence
  ENSG00000128805_7 (sequence is synthesized)
ttcatccgggagcgcgggctcactgaggaggggctgttccgcatgccaggccaggccaacctggtgagggacctgcaggattccttcgactgtggggagaagccactgtttgacagcaca

SEQ ID NO: 277362 - DNA, 120 bp, Artificial Sequence
  ENSG00000128805_8 (sequence is synthesized)
acagacgtgcacacggtggcctccctgctgaagctgtacctgcgggagctccccgagcccgtggtccccttcgccaggtacgaggacttcctcagctgcgcccagctgctcaccaaggac

SEQ ID NO: 277363 - DNA, 120 bp, Artificial Sequence
  ENSG00000128805_9 (sequence is synthesized)
gagggggagggcactctggagttggctaaacaagtgagcaaccttcctcaggcaaattacaacctgctcagatacatctgcaagtttctggatgaagttcaggcatactcaaatgtcaac

SEQ ID NO: 277364 - DNA, 120 bp, Artificial Sequence
  ENSG00000128805_10 (sequence is synthesized)
aagatgagtgtccagaatctggcaaccgtttttggacctaacattctgcggccacaggtagaggacccagtaaccatcatggaaggcacttccctcgtccagcacctgatgaccgtcctc

SEQ ID NO: 277365 - DNA, 120 bp, Artificial Sequence
  ENSG00000128805_11 (sequence is synthesized)
ggacagccaaggagagcccggcggccccggcctgcccgcgcacaggacctcttccctggacggggcggccgtggcggtgctctccagaacagcccccacggggccggggagccggtgcag

SEQ ID NO: 277366 - DNA, 120 bp, Artificial Sequence
  ENSG00000128805_12 (sequence is synthesized)
gggaagaaggtgcagaccctgcccagttggaagtcctccttccggcagccgaggtccctatcgggaagcccgaaggggggcggctcatccctggaggtgcccatcatctcctccggcggg

SEQ ID NO: 277367 - DNA, 120 bp, Artificial Sequence
  ENSG00000128805_13 (sequence is synthesized)
aactggcttatgaacgggctgtcctccctgcgcggacaccgccgggcctcgtcgggagaccggctcaaggactcgggctccgtgcagagactctccacctacgacaatgtgcccgcgccg

SEQ ID NO: 277368 - DNA, 120 bp, Artificial Sequence
  ENSG00000128805_14 (sequence is synthesized)
ggcctggtccccggcatacccagcgtggccagtatggcgtggtccggggcctcgtccagcgagtcgtcggtggggggctcactcagcagctgcacggcctgccgcgccagcgactcgtct

SEQ ID NO: 277369 - DNA, 120 bp, Artificial Sequence
  ENSG00000128805_15 (sequence is synthesized)
gcccgcagttccctgcacaccgactgggccctggagccctccccgctccccagcagcagcgaggaccccaagtccctggacctggaccacagcatggacgaggcgggcgcgggtgccagc

SEQ ID NO: 277370 - DNA, 120 bp, Artificial Sequence
  ENSG00000128805_16 (sequence is synthesized)
aacagcgagcccagcgagccggacagccccacccgggaacacgcgcgccgctccgaggccttacaggggctggtcactgagctcagggccgagctgtgccgccagcggactgagtacgag

SEQ ID NO: 277371 - DNA, 120 bp, Artificial Sequence
  ENSG00000128805_17 (sequence is synthesized)
aggagtgtgaaaagaatcgaagaagggagtgctgacctgagaaaacgaatgtcccggttagaagaagaactggaccaggaaaagaaaaaatacatcatgctggaaataaagctgcggaac

SEQ ID NO: 277372 - DNA, 120 bp, Artificial Sequence
  ENSG00000128805_18 (sequence is synthesized)
tctgaacgggcgcgggaggatgcggagaggaggaaccagctgttgcagagggaaatggaggagtttttttcgaccctaggaagcttgactgttggggcaaaaggtgccagggccccaaag

SEQ ID NO: 277373 - DNA, 120 bp, Artificial Sequence
  ENSG00000128805_19 (sequence is synthesized)
taaaaggaatggcagagctcacttctgtaccacgtctgctggtctccagccttgtatggagttagaagcgtctgtatctctggagcagccaggcgctctggagccagctggagagagaga

SEQ ID NO: 277374 - DNA, 120 bp, Artificial Sequence
  ENSG00000128805_20 (sequence is synthesized)
gatcctgatacctctgtggggactgtggggacttttgggaccccacacactccaggtgggatcagatgctgctccaaccatgcagttcctggtgagggtcagaaggggacggtaccaaga

SEQ ID NO: 277375 - DNA, 120 bp, Artificial Sequence
  ENSG00000128805_21 (sequence is synthesized)
gtagcgcttagcccttacccaggaaatatccttcatggccacagaaatggagggcgcccaggatccaggcagccaccgggaacagtcagctttctttattaaatgtgctcacaaagcatg

SEQ ID NO: 277376 - DNA, 120 bp, Artificial Sequence
  ENSG00000128805_22 (sequence is synthesized)
acttctcaattctttgttctgtgaagtggttgtcactattgttcccattttacagatttgaggaactgataccccaagaccccgtgactttctcaaggccattccaagatccctagatgc

SEQ ID NO: 277377 - DNA, 120 bp, Artificial Sequence
  ENSG00000128805_23 (sequence is synthesized)
acttacgcttaatgaactaattcttcacagcgaggcttcttgcttaaaatccaagaaaataccagataaagggcattctaaatatatttcttttctatagatgtggatctcctgttactg

SEQ ID NO: 277378 - DNA, 120 bp, Artificial Sequence
  ENSG00000128805_24 (sequence is synthesized)
gaaaacaggaattagcttgtctgcttgaggatgtggttggttctttataaaaaggatacagaagaaatttgcacagactgccagcttcattatgctgccgacagcttccagcaaaaggag

SEQ ID NO: 277379 - DNA, 120 bp, Artificial Sequence
  ENSG00000128805_25 (sequence is synthesized)
agaggcgccgagcagccgggagctccgtcctgcctgaggatgcggggcccaggctgcatccccccggccctgctcgcctgctcatcacacggaggccggggacagggtcacggccaggga

SEQ ID NO: 277380 - DNA, 120 bp, Artificial Sequence
  ENSG00000128805_26 (sequence is synthesized)
gcctgcggggctaaaggagcgggccgggagctcaagagctgccgccgggcggcgaggaaggagccccaggcaggccccgggcggccgaggcaggggaggagacggctggccctggttcca

SEQ ID NO: 277381 - DNA, 120 bp, Artificial Sequence
  ENSG00000128805_27 (sequence is synthesized)
ggtgagcagccccgcccgctctgctggaggccccgcttaccaccggcgggagatgcgggtgcaagccctggggcgcacgtggccaggccactgccacgcccgagggacgggttttcgtcg

SEQ ID NO: 277382 - DNA, 120 bp, Artificial Sequence
  ENSG00000128805_28 (sequence is synthesized)
ccacctcggccctggtgaaccctgtgactggagtgcctcccaatcccaccgtgatgcccacctcggggcgctgccaggtgccaggctaatgcgtgtgatccacagtgtgctgagaagtgc

SEQ ID NO: 277383 - DNA, 120 bp, Artificial Sequence
  ENSG00000128805_29 (sequence is synthesized)
tgactgtcattgtgaatgtccgtggtggggtgacgcccgggcagggtgcactggcctggttccagaagacctggcctctccagctcccacggcgcgcccgtttgctgcgtggcccatgct

SEQ ID NO: 277384 - DNA, 120 bp, Artificial Sequence
  ENSG00000128805_30 (sequence is synthesized)
gctggcggctgctcctggctgagtcattccaagacgagcgtccagtccgcgctctctgccgcccttcccagcgctgcccggcaggccccgggaactgtgcccagctgtgcccgcttagct

SEQ ID NO: 277385 - DNA, 120 bp, Artificial Sequence
  ENSG00000128805_31 (sequence is synthesized)
cgcgataggcgcgccatgggcctgatgccggccgcgcgggcctactccgggatgcagcgcttgcccgcggccgccttgccgcttgcccgcttgttgcgcgcccgccgccccagggatctt

SEQ ID NO: 277386 - DNA, 120 bp, Artificial Sequence
  ENSG00000128805_32 (sequence is synthesized)
aatgcagcaacggggagccaggggcatgctggggaagagcattccagcagagacatggacacgtgcgaaggccccgaggtagggacgagctttgggaacacgaggcatgtcaggaaggcc

SEQ ID NO: 277387 - DNA, 120 bp, Artificial Sequence
  ENSG00000128805_33 (sequence is synthesized)
ctcaggaaacttagaatcatggcggaaggcaaagagggagcagtcatgtcacatggccagagcaggagcaaaagagagagcagggaggtgccacacacacttttaaaccaccagatttcg

SEQ ID NO: 277388 - DNA, 120 bp, Artificial Sequence
  ENSG00000128805_34 (sequence is synthesized)
ttcgtgagaattcactctattttgaggacagcaccaagaagatggtgctaaccactcaagagaaaccgcccccatgatccaaataccttccgccaggccccacctccaacactggggatt

SEQ ID NO: 277389 - DNA, 120 bp, Artificial Sequence
  ENSG00000128805_35 (sequence is synthesized)
ttaaacatgagatttggatggagacacagagccaaaccatatcacgctccttccctgagtccttgacctggagtagatgcctgggttgtctccatttctcaaatgaggaaactgaaggac

SEQ ID NO: 277390 - DNA, 120 bp, Artificial Sequence
  ENSG00000128805_36 (sequence is synthesized)
tgacatcaggccaagactaacaggtactcactctcagatagcgcctgaaagctgacacaagttcagtgagactgctaggacaaccccctgccgtgccattaatgtctgcccacaaaaacc

SEQ ID NO: 277391 - DNA, 120 bp, Artificial Sequence
  ENSG00000128805_37 (sequence is synthesized)
aaaaggcctcagcctgatgcccacaggcagagcacacaggcagccgagtggccgcagccctgcagtggaggagtgcctcgtgcacctggtggttttctgcaccccaacaggtgtgtctgg

SEQ ID NO: 277392 - DNA, 120 bp, Artificial Sequence
  ENSG00000128805_38 (sequence is synthesized)
atgtgtgtgcccccacacaggaaagatggctctattccctgtcccagagccctatgctcccagagtgtggacattcaggcatggcagttgtcagcagcacagaggggtgacgtggggcag

SEQ ID NO: 277393 - DNA, 120 bp, Artificial Sequence
  ENSG00000128805_39 (sequence is synthesized)
ccgagagagttctggcatctcaggtcccaggttccagttccaacctgccacctgctcaccgtgcagccttggtgcctgcttcctcaccccaccccagctggagggcgtgagcgcaggcac

SEQ ID NO: 277394 - DNA, 120 bp, Artificial Sequence
  ENSG00000128805_40 (sequence is synthesized)
agtgcttcctccctgcttgcggctctgtgcctgaggaaggcggttctgcggccccatcctgctgtcctgcctggagttggagggtgtgtggtcctttcctctgggcggatgaaggctccc

SEQ ID NO: 277395 - DNA, 120 bp, Artificial Sequence
  ENSG00000128805_41 (sequence is synthesized)
ttgaggggcggcctggctctggggacagggccagctcccacgaagctgcagcttctccatgactggcagagcgagcctgggccgagtggctggcagcaaggcccttctccgcctctcttc

SEQ ID NO: 277396 - DNA, 120 bp, Artificial Sequence
  ENSG00000128805_42 (sequence is synthesized)
agccccaggtgagaagtgcatgtccggtgtgccgtgggcatcgtggcagggctccacaagagggaagaccatgcccaggagaagggaggaaggcacagagccactgactccatcacagtg

SEQ ID NO: 277397 - DNA, 120 bp, Artificial Sequence
  ENSG00000128805_43 (sequence is synthesized)
atgttttgccaggatttccaaagtaattttcattcttatcccccatgttcctggtatcacagcctgttttactggaacatgtccacaacttctgcaatgaaaatgtttccttaaaatgtt

SEQ ID NO: 277398 - DNA, 80 bp, Artificial Sequence
  ENSG00000128805_44 (sequence is synthesized)
gggcgcaggcggcaggcggggagaggagccgagcggcggggccgcgggcggctgccatggggctgtgctgctgcaaggac

SEQ ID NO: 277399 - DNA, 120 bp, Artificial Sequence
  ENSG00000128805_45 (sequence is synthesized)
agaggagcatcatgaagaactggcagcagcgctggtttgtgctgcgtggggatcagcttttctactacaaggacaaagatgagatcaagccccaggagaataagtgagggaagctcagca

SEQ ID NO: 277400 - DNA, 120 bp, Artificial Sequence
  ENSG00000128805_46 (sequence is synthesized)
tcaagatggatgggaaagcacatgcacttctaggagtggaacattaatattggacagtcggaaaccagaaatctttaagaaagaggaaacctcaggggaagaaagagaggccatcctatc

SEQ ID NO: 277401 - DNA, 120 bp, Artificial Sequence
  ENSG00000128805_47 (sequence is synthesized)
ccataacttgaaagtcacaggaatatttcagcctgcagggaatcttcatttcccaccccattgtttaccaaacttgcacgtcaaaaacaaaaacaaaaaataaaatgttgctttcatgaa

SEQ ID NO: 277402 - DNA, 120 bp, Artificial Sequence
  ENSG00000128805_48 (sequence is synthesized)
gatgctccaaatatccctacaaagtactttattattcctgtttcacagacaaggaaactggggcacagacaggttgaacaatgttcctgtagctgagccaggatttgaacccagggattt

SEQ ID NO: 277403 - DNA, 120 bp, Artificial Sequence
  ENSG00000128815_0 (sequence is synthesized)
gtgaaacggcgctgaggactgacgatgtggggccgggtcctcttcccccgagcctgaggggctgcagctggggatagggggcccatgccttctgatgtctacaggcgctgacggccaccc

SEQ ID NO: 277404 - DNA, 120 bp, Artificial Sequence
  ENSG00000128815_1 (sequence is synthesized)
ctccagatctgctttgccacggcatggaggcagaagatctttcaaaggctgaagacagaaatgaagacccaggttccaaaaatgaagggcagcttgctgctgtgcagcctgatgtcccac

SEQ ID NO: 277405 - DNA, 120 bp, Artificial Sequence
  ENSG00000128815_2 (sequence is synthesized)
atggagggcagtcctccagccccacagctctctgggacatgctggaaaggaagtttctggaataccagcagttgactcacaagagccccattgagcgtcagaagagcctgttgagtcttc

SEQ ID NO: 277406 - DNA, 120 bp, Artificial Sequence
  ENSG00000128815_3 (sequence is synthesized)
tccccctattcctaaaggcctgggaacactccgtggggatcatctgctttcccagtctccaaaggctggctgaagacgtgtctgaccagcttgcccagcaactccagaaggcccttgtgg

SEQ ID NO: 277407 - DNA, 120 bp, Artificial Sequence
  ENSG00000128815_4 (sequence is synthesized)
ggaagcctgcggagcaagctcggttggcagctggacagttgctgtggtggaagggggacgtggatcaggatggctacttgctcctgaagtcagtgtacgtgctcacggggacagactcgg

SEQ ID NO: 277408 - DNA, 120 bp, Artificial Sequence
  ENSG00000128815_5 (sequence is synthesized)
agacgctgggcagggttgctgagtctgggcttccagccctgctcctacagtgcctttacctcttctttgtctttcctctggacaaagatgagcttcttgagagtgatcttcaagttcaaa

SEQ ID NO: 277409 - DNA, 120 bp, Artificial Sequence
  ENSG00000128815_6 (sequence is synthesized)
agatgttcgtgcagatgttgctcaatatttgcagtgactctcagggcctggagggactcctctcaggaagtgagctgcagtctctgctgattgccacgacctgccttcgggagcacagct

SEQ ID NO: 277410 - DNA, 120 bp, Artificial Sequence
  ENSG00000128815_7 (sequence is synthesized)
gctgcttctggaaggaacccaccttctgcgtgctaagggcaatctccaaggcccagaacctcagcatcatccagtacctgcaggccacagactgtgtcaggctctccctccagaacctct

SEQ ID NO: 277411 - DNA, 120 bp, Artificial Sequence
  ENSG00000128815_8 (sequence is synthesized)
ccaggctcacggacactctccctgcccctgaagtgagcgaggctgtaagcctgatcttgggattcgtgaaggactcctaccccgtctcctcggctctgttcctggagtttgagaattcag

SEQ ID NO: 277412 - DNA, 120 bp, Artificial Sequence
  ENSG00000128815_9 (sequence is synthesized)
agggctatcctctgctgctcaaagtgttacttcggtatgatgggctgacccagagcgaagtggacccgcatctggaggagctccttgggctggtggtgtggctgacaacctgtgggaggt

SEQ ID NO: 277413 - DNA, 120 bp, Artificial Sequence
  ENSG00000128815_10 (sequence is synthesized)
cagagctgaaggtgtttgacagcatcacttaccctcagcttgaaggcttcaagttccatcatgaggcatctggggtgactgttaagaatcttcaggccttccaggtcctacagaatgttt

SEQ ID NO: 277414 - DNA, 120 bp, Artificial Sequence
  ENSG00000128815_11 (sequence is synthesized)
tccacaaagccagtgactctgtcctctgcatacaagtcttgtcagtcatcaggaccatgtgggcctggaatgctcgaaacttcttcctgctggagtggaccctgcagcccatctcgcagt

SEQ ID NO: 277415 - DNA, 120 bp, Artificial Sequence
  ENSG00000128815_12 (sequence is synthesized)
ttgtagagatcatgcccctgaagccggccccagtgcaggaacacttcttccagcttctagaggccctggtgttcgagctgcactacgtgcctcatgagatcctgcgaaaggtacagcatc

SEQ ID NO: 277416 - DNA, 120 bp, Artificial Sequence
  ENSG00000128815_13 (sequence is synthesized)
tgatcaaggagagccctgggccatcctgcaccctcatggccctgcagagcatcctcagcatcgctggtggggaccccctcttcaccgacatcttccgggactcagggctcctgggcctgc

SEQ ID NO: 277417 - DNA, 120 bp, Artificial Sequence
  ENSG00000128815_14 (sequence is synthesized)
tactggcacagcttcggaagcaagccaagatcatgaggaagtcaggaaacaaagtgtccactcctggtgttcaggatccagaaagagaactcacctgtgtgatgctgaggattgtagtca

SEQ ID NO: 277418 - DNA, 120 bp, Artificial Sequence
  ENSG00000128815_15 (sequence is synthesized)
cacttctgaaaggctcggtgaggaatgcagttgtcctgaaggaccacggcatggtgcccttcatcaagatcttcctggatgacgagtgctaccgggaggcctcgctcagcatcttggagc

SEQ ID NO: 277419 - DNA, 120 bp, Artificial Sequence
  ENSG00000128815_16 (sequence is synthesized)
agctctcagccatcaacgccgaggagtacatgagcatcattgtgggtgctctatgctcatccactcaaggggagctgcagctgaaactggatctcctgaagtctctgctccggatcctgg

SEQ ID NO: 277420 - DNA, 120 bp, Artificial Sequence
  ENSG00000128815_17 (sequence is synthesized)
tgacccccaagggtcgtgctgccttcagagtctccagcgggttcaacgggctgctgtctctgctctctgacctggaaggctccctccaggagcccccgctgcaggcatggggagcagtat

SEQ ID NO: 277421 - DNA, 120 bp, Artificial Sequence
  ENSG00000128815_18 (sequence is synthesized)
cccccagacagaccctggagctggttttgtacactctctgtgctgtgtccgcagcgctgcactgggaccctgtcaatggctacttcttcaggaggaatgggctctttgagaagctggccg

SEQ ID NO: 277422 - DNA, 120 bp, Artificial Sequence
  ENSG00000128815_19 (sequence is synthesized)
aggacctctgcctgctgggctgttttggagccctggaggaagagggcaacctgctgcgctcttgggtggacacaaaggccaggccatttgcagatttgctgggcactgccttttcctcca

SEQ ID NO: 277423 - DNA, 120 bp, Artificial Sequence
  ENSG00000128815_20 (sequence is synthesized)
gcggctcactcccaccccggatacagagctgcctccagatccttggctttctggacagcatggccagcggcaccctccacttgcgtggggacctgaaggagtccctgaggaccaagcagg

SEQ ID NO: 277424 - DNA, 120 bp, Artificial Sequence
  ENSG00000128815_21 (sequence is synthesized)
ggccggttgtggatgttcagaagggagaaactggcagtgacccccaacgcaacttcaagcagtggccagacctggaggagaggatggatgagggagatgctgcaatcatgcatcccgggg

SEQ ID NO: 277425 - DNA, 120 bp, Artificial Sequence
  ENSG00000128815_22 (sequence is synthesized)
tcgtgtgcatcatggtgaggctgctgcctcggttgtaccatgaagatcacccacagctttccgaggagatccagtgctccctggccagtcatatccagtccctggtgaagtcggagaaga

SEQ ID NO: 277426 - DNA, 120 bp, Artificial Sequence
  ENSG00000128815_23 (sequence is synthesized)
accgccaggtcatgtgcgaagcaggcttgcttgggaccctcatggcctcctgccacagggccctggtcaccagtggcagccccctccactcacgcctcatcaggatctttgagaagctcg

SEQ ID NO: 277427 - DNA, 120 bp, Artificial Sequence
  ENSG00000128815_24 (sequence is synthesized)
cttcccaggccattgaaccggatgtgctaagacagtttctaggtcttggaattccctcatctctgtcggccacaacaaaaatccttgattcatctcacacacacagaggcaaccctgggt

SEQ ID NO: 277428 - DNA, 120 bp, Artificial Sequence
  ENSG00000128815_25 (sequence is synthesized)
gctcagggtcacagactgcacagggcttggctgaggggccctggccagctgccccagatgctgggctgcaccctggagtcacacaggccccgcagcccttgggggaatcccaggattcaa

SEQ ID NO: 277429 - DNA, 120 bp, Artificial Sequence
  ENSG00000128815_26 (sequence is synthesized)
ctactgctcttcagacggcgctgagcctcatctccatgacctccccacgcaacctgcagcctcagagggcagccctggccccatcgtttgtggaatttgacatgtccgtggaaggttatg

SEQ ID NO: 277430 - DNA, 120 bp, Artificial Sequence
  ENSG00000128815_27 (sequence is synthesized)
gctgtttgtttattccaaccctgtccacagttatgggaaccagcactgagtactctgtctctggaggaattgggacaggtgccaccagaccgttccctcctcctggaggtctgaccttct

SEQ ID NO: 277431 - DNA, 120 bp, Artificial Sequence
  ENSG00000128815_28 (sequence is synthesized)
cctgctggttcctgatcagccggcatggagctgccactgagggccacccgctgcgcttcctgacgttggtgcgccacctggccaggactgagcaaccctttgtttgcttctccgtcagcc

SEQ ID NO: 277432 - DNA, 120 bp, Artificial Sequence
  ENSG00000128815_29 (sequence is synthesized)
tctgcccagacgacctctccttggttgtttctacagaagagaaggagtttcagcctctggatgtcatggaacctgaggatgactccgagccttctgcaggatgccagcttcaggtcaggt

SEQ ID NO: 277433 - DNA, 120 bp, Artificial Sequence
  ENSG00000128815_30 (sequence is synthesized)
gtggccagctcctggcttgtggtcagtggcatcacttggctgtggttgtcactaaggaaatgaaaaggcattgtacagtttccacctgtctggatggacaggtcattggctctgccaaga

SEQ ID NO: 277434 - DNA, 120 bp, Artificial Sequence
  ENSG00000128815_31 (sequence is synthesized)
tgttatacatccaggctctaccagggcctttcctttctatggatccatccgcatttgtggatgtttatggatatattgctactcctcgagtctggaaacaaaagtcttcattaatctggc

SEQ ID NO: 277435 - DNA, 120 bp, Artificial Sequence
  ENSG00000128815_32 (sequence is synthesized)
gtcttggccccacatacctctttgaagaagccatttcaatggaaactctggaagttattaacaaacttggcccaagatattgtggtaacttccaagctgtgcatgtccaaggggaggacc

SEQ ID NO: 277436 - DNA, 120 bp, Artificial Sequence
  ENSG00000128815_33 (sequence is synthesized)
tggacagtgaagccacgccctttgttgcagaagaaagagtttcttttggacttcacatagccagctcctctatcaccagtgtagcggacatcagaaatgcttacaatgaggtggacagcc

SEQ ID NO: 277437 - DNA, 120 bp, Artificial Sequence
  ENSG00000128815_34 (sequence is synthesized)
gcctgatcgccaaagagatgaacatttcatcccgtgacaatgccatgcccgtgttcttgctgaggaattgtgctggccacctgtcagggtctctgcggaccattggagctgttgctgtgg

SEQ ID NO: 277438 - DNA, 120 bp, Artificial Sequence
  ENSG00000128815_35 (sequence is synthesized)
gtcaattaggggtgagggtattccactccagccctgctgccagcagcctggacttcattggcgggcctgccatcctcctgggcctcatctccttagcgacagatgaccataccatgtatg

SEQ ID NO: 277439 - DNA, 120 bp, Artificial Sequence
  ENSG00000128815_36 (sequence is synthesized)
cggctgtgaaagttctgcactcggtcctgaccagtaatgccatgtgtgacttcctgatgcaacacatctgtgggtaccagataatggcgtttctcctgaggaagaaggcctctctcctga

SEQ ID NO: 277440 - DNA, 120 bp, Artificial Sequence
  ENSG00000128815_37 (sequence is synthesized)
accatcgaatttttcagctgatcctctcagtggctggcactgtggagctgggcttcaggtcatctgctatcaccaacactggtgtcttccagcacatcctctgcaatttcgagctctgga

SEQ ID NO: 277441 - DNA, 120 bp, Artificial Sequence
  ENSG00000128815_38 (sequence is synthesized)
tgaatactgcagacaatctggagctcagcctcttttcccatcttttggaaatccttcaatcaccaagggaaggacccaggaatgctgaagctgcccaccaggcacagcttatacccaagc

SEQ ID NO: 277442 - DNA, 120 bp, Artificial Sequence
  ENSG00000128815_39 (sequence is synthesized)
tcatcttcctattcaatgagccgagcctcatcccctccaagatctccaccatcattggcatcctggcctgtcagctgaggggccacttcagcacccaggacttgctcaggattgggctgt

SEQ ID NO: 277443 - DNA, 120 bp, Artificial Sequence
  ENSG00000128815_40 (sequence is synthesized)
ttgttgtgtacaccctcaagccttcgtcggtgaatgagaggcagatctgcatggacggagccctggacccttccctgcctgctggaagccaaacatctggaaagacaatctggctcagaa

SEQ ID NO: 277444 - DNA, 120 bp, Artificial Sequence
  ENSG00000128815_41 (sequence is synthesized)
ggccacctgcatgccagcaccactgtgctggcattgaagctgctgctgtactttctggcaagcccctccctccgcacacggtttagagatggcctgtgtgcaggatcctgggtggaacgc

SEQ ID NO: 277445 - DNA, 120 bp, Artificial Sequence
  ENSG00000128815_42 (sequence is synthesized)
agcactgagggcgtggatattgtaatggacaacctgaagagccagtcaccactgcctgagcaaagcccatgcctgcttcctgggttccgtgtcttgaatgactttctggcccaccacgtc

SEQ ID NO: 277446 - DNA, 120 bp, Artificial Sequence
  ENSG00000128815_43 (sequence is synthesized)
cacattccagaggtctacctcatcgtctccaccttcttcctgcagacaccactcacagagctgatggacgggcccaaagacagccttgatgccatgcttcagtggctcctgcagaggcac

SEQ ID NO: 277447 - DNA, 120 bp, Artificial Sequence
  ENSG00000128815_44 (sequence is synthesized)
caccaggaagaagtcctccaggctgggctgtgcacagaaggtgccttgctcctcctggaaatgctgaaggccaccatgagccagcccctggcaggttctgaggatggtgcctgggcacag

SEQ ID NO: 277448 - DNA, 120 bp, Artificial Sequence
  ENSG00000128815_45 (sequence is synthesized)
accttcccggccagcgtgctgcagttcctcagcctcgtccaccgcacctacccccaggacccagcgtggcgagccccggagttcctccagaccttggccatagccgccttccccctggga

SEQ ID NO: 277449 - DNA, 120 bp, Artificial Sequence
  ENSG00000128815_46 (sequence is synthesized)
gcccaaaagggggttggggctgagtccacccggaacaccagcagtcctgaggccgcagctgaaggcgacagcacagtggagggtctccaggctcccaccaaggcacatcccgcccggagg

SEQ ID NO: 277450 - DNA, 120 bp, Artificial Sequence
  ENSG00000128815_47 (sequence is synthesized)
aagctgagggagttcacgcagctcctcttgagggagctcctgcttggagcctccagccccaagcagtggctgcccctggaggtgctcctggaggcttctccagaccacgccaccagccaa

SEQ ID NO: 277451 - DNA, 120 bp, Artificial Sequence
  ENSG00000128815_48 (sequence is synthesized)
cagaagcgagacttccagtccgaggtcctgctttctgctatggaactattccacatgacaagtggaggtgatgcagcgatgttcagagacggcaaagagcctcagccaagtgcagaagct

SEQ ID NO: 277452 - DNA, 120 bp, Artificial Sequence
  ENSG00000128815_49 (sequence is synthesized)
gctgctgccccttctcttgccaacatctcctgcttcacccagaagctggtggagaagctgtacagtgggatgttctcggcagaccccaggcatatcctcctcttcatcctggagcacatc

SEQ ID NO: 277453 - DNA, 120 bp, Artificial Sequence
  ENSG00000128815_50 (sequence is synthesized)
atggtggtcattgagactgcctcttctcaaagggacactgtcctcagcactttatacagcagtttaaataaagtcattctttattgcctatccaagccccagcagtccctctccgaatgc

SEQ ID NO: 277454 - DNA, 120 bp, Artificial Sequence
  ENSG00000128815_51 (sequence is synthesized)
ctcggccttctcagcatcctgggctttctgcaggagcactgggatgttgtctttgccacctacaattccaacatcagcttcctcctgtgtctcatgcattgccttttgctactcaatgag

SEQ ID NO: 277455 - DNA, 120 bp, Artificial Sequence
  ENSG00000128815_52 (sequence is synthesized)
agaagttacccagaaggatttggattggagcccaagcctagaatgtctacttatcatcaagtcttcctttccccaaatgaagacgtgaaagaaaaaagagaagacttaccaagtttgagt

SEQ ID NO: 277456 - DNA, 120 bp, Artificial Sequence
  ENSG00000128815_53 (sequence is synthesized)
gatgtccaacacaacatccagaagacagtgcagactctctggcagcagctggtggcacaaaggcagcagaccctggaggatgccttcaagatcgatctctctgtgaaacctggagagagg

SEQ ID NO: 277457 - DNA, 120 bp, Artificial Sequence
  ENSG00000128815_54 (sequence is synthesized)
gaagtgaagattgaagaggtcacaccgctctgggaggagacgatgctcaaggcctggcagcattacttagcatctgagaagaagtcactggcaagtcgttcaaatgttgcacaccacagc

SEQ ID NO: 277458 - DNA, 120 bp, Artificial Sequence
  ENSG00000128815_55 (sequence is synthesized)
aaagtcactttgtggagtggaagcctgtcctcagccatgaagctgatgcccgggcggcaggccaaggaccctgagtgcaagacagaggattttgtgtcatgtatagagaactacagaaga

SEQ ID NO: 277459 - DNA, 120 bp, Artificial Sequence
  ENSG00000128815_56 (sequence is synthesized)
agaggacaagagctatatgcatctttatacaaagaccatgtgcaaaggcgaaaatgtggcaacatcaaggcagccaacgcctgggccaggatccaggagcagctttttggggagctgggc

SEQ ID NO: 277460 - DNA, 120 bp, Artificial Sequence
  ENSG00000128815_57 (sequence is synthesized)
ttgtggagccagggggaagaaaccaagccctgttccccatgggaactcgactggagagaaggaccagctcgaatgaggaaacgcatcaaacgcttgtctcctttggaggccctgagctca

SEQ ID NO: 277461 - DNA, 120 bp, Artificial Sequence
  ENSG00000128815_58 (sequence is synthesized)
ggaaggcacaaggaaagccaagacaaaaatgatcatatttctcaaacaaatgctgaaaaccaagatgaactgacactgagggaggctgagggcgagccggacgaggtgggggtggactgc

SEQ ID NO: 277462 - DNA, 120 bp, Artificial Sequence
  ENSG00000128815_59 (sequence is synthesized)
acccagctgaccttcttcccagccttacacgaaagtctgcactcagaagacttcttggaactgtgtcgggaaagacaagttattttacaagagcttcttgataaagaaaaggtgacgcag

SEQ ID NO: 277463 - DNA, 120 bp, Artificial Sequence
  ENSG00000128815_60 (sequence is synthesized)
aagttctccctggtgattgtgcagggccacctggtgtcagaaggggtcctgctttttggccaccaacacttctacatctgcgagaacttcacactgtctcccacgggtgatgtctactgt

SEQ ID NO: 277464 - DNA, 120 bp, Artificial Sequence
  ENSG00000128815_61 (sequence is synthesized)
acccgtcactgcttatccaacatcagcgatccgttcattttcaacctgtgcagcaaagacaggtccactgaccattactcgtgccagtgccacagctacgctgacatgcgggagctacgg

SEQ ID NO: 277465 - DNA, 120 bp, Artificial Sequence
  ENSG00000128815_62 (sequence is synthesized)
caggctcgcttcctcctgcaggacatcgccctggagatcttcttccacaatggatattccaagtttcttgtcttctacaacaatgatcggagtaaggcctttaaaagcttctgctctttc

SEQ ID NO: 277466 - DNA, 120 bp, Artificial Sequence
  ENSG00000128815_63 (sequence is synthesized)
caacccagcctgaaggggaaagccacctcggaggacaccctcagtctaaggagataccccggctctgacaggatcatgctgcagaagtggcagaaaagggacatcagcaattttgagtat

SEQ ID NO: 277467 - DNA, 120 bp, Artificial Sequence
  ENSG00000128815_64 (sequence is synthesized)
ctcatgtacctcaacaccgcggctgggagaacctgcaatgactacatgcagtacccagtgttcccctgggtcctcgcagactacacctcagagacattgaacttggcaaatccgaagatt

SEQ ID NO: 277468 - DNA, 120 bp, Artificial Sequence
  ENSG00000128815_65 (sequence is synthesized)
ttccgggatctttcaaagcccatgggggctcagaccaaggaaaggaagctgaaatttatccagaggtttaaagaagttgagaaaactgaaggagacatgactgtccagtgccactactac

SEQ ID NO: 277469 - DNA, 120 bp, Artificial Sequence
  ENSG00000128815_66 (sequence is synthesized)
acccactactcctcggccatcatcgtggcctcctacctggtccggatgccacccttcacccaggccttctgcgctctgcagggcggaagcttcgacgtggcagacagaatgttccacagt

SEQ ID NO: 277470 - DNA, 120 bp, Artificial Sequence
  ENSG00000128815_67 (sequence is synthesized)
gtgaagagcacgtgggagtcggcctccagagagaacatgagtgacgtcagggagctgaccccagagttcttctacctgcctgagttcttaaccaactgcaacggggtagagttcggctgc

SEQ ID NO: 277471 - DNA, 120 bp, Artificial Sequence
  ENSG00000128815_68 (sequence is synthesized)
atgcaggacgggactgtgctaggagacgtgcagctccctccctgggctgatggggaccctcggaaattcatcagcctgcacagaaaggccctggaaagtgactttgtcagtgccaacctc

SEQ ID NO: 277472 - DNA, 120 bp, Artificial Sequence
  ENSG00000128815_69 (sequence is synthesized)
caccattggatagaccttatttttgggtacaagcagcaggggccagccgcagtggatgctgttaatatcttccacccctacttctacggtgacagaatggacctcagcagcatcactgac

SEQ ID NO: 277473 - DNA, 120 bp, Artificial Sequence
  ENSG00000128815_70 (sequence is synthesized)
cccctcatcaaaagcaccatcctggggtttgtcagcaactttggacaggtgcccaaacagctctttaccaaacctcacccagccaggactgcagcagggaagcctctgcctggaaaggat

SEQ ID NO: 277474 - DNA, 120 bp, Artificial Sequence
  ENSG00000128815_71 (sequence is synthesized)
gtctccacccccgtgagcctgcctggccacccacagccctttttctacagcctgcagtcgctgaggccctcccaggtcacggtcaaagatatgtacctcttttctctaggctcagagtcc

SEQ ID NO: 277475 - DNA, 120 bp, Artificial Sequence
  ENSG00000128815_72 (sequence is synthesized)
cccaaaggggccattggccacattgtctctactgagaagaccattctggctgtagagaggaacaaagtgctgctgcctcctctctggaacaggaccttcagctggggctttgatgacttc

SEQ ID NO: 277476 - DNA, 120 bp, Artificial Sequence
  ENSG00000128815_73 (sequence is synthesized)
agctgctgcttggggagctacggctccgacaaggtcctgatgacattcgagaacctggctgcctggggccgctgtctgtgcgccgtgtgcccatccccaacaacgattgtcacctctggg

SEQ ID NO: 277477 - DNA, 120 bp, Artificial Sequence
  ENSG00000128815_74 (sequence is synthesized)
accagcactgtggtgtgtgtgtgggagctcagcatgaccaaaggccgcccgaggggcttgcgcctccggcaggccttgtatggacacacacaggctgtcacgtgcctggcagcgtcagtc

SEQ ID NO: 277478 - DNA, 120 bp, Artificial Sequence
  ENSG00000128815_75 (sequence is synthesized)
accttcagcctcctggtgagcggctcccaggactgcacctgtatcctgtgggatctggaccacctcacccacgtgacccgcctgcccgcccatcgggaaggcatctcagccatcaccatc

SEQ ID NO: 277479 - DNA, 120 bp, Artificial Sequence
  ENSG00000128815_76 (sequence is synthesized)
agtgacgtctcaggcaccattgtctcctgtgcgggagcacacttgtccctgtggaatgtcaatggacagcccctggccagcatcaccacagcctggggcccagaaggagccataacctgc

SEQ ID NO: 277480 - DNA, 120 bp, Artificial Sequence
  ENSG00000128815_77 (sequence is synthesized)
tgctgcctgatggagggcccagcatgggacacaagccagatcatcatcaccgggagtcaagacggcatggtccgggtttggaagactgaggatgtgaagatgtctgttcctggacggcca

SEQ ID NO: 277481 - DNA, 120 bp, Artificial Sequence
  ENSG00000128815_78 (sequence is synthesized)
gcaggagaggagcccccggctcagcctccaagcccaagaggccacaagtgggagaagaacctggccttgagtcgagagctggacgttagcattgctttgacagggaagcccagcaaaacc

SEQ ID NO: 277482 - DNA, 120 bp, Artificial Sequence
  ENSG00000128815_79 (sequence is synthesized)
agccccgcagtgactgctctggccgtgtccagaaaccacaccaaactcctggttggtgatgagagggggagaatattctgctggtctgcagatgggtaggaagagagaggcagcagaggc

SEQ ID NO: 277483 - DNA, 120 bp, Artificial Sequence
  ENSG00000128815_80 (sequence is synthesized)
tctggcacaacagtgccaggctgagggtggcagaggtgactggggcctgagctctgcctacagaagaaacccccagggcctccttccccacagttctcaaggaagggcctctggcaatca

SEQ ID NO: 277484 - DNA, 120 bp, Artificial Sequence
  ENSG00000128815_81 (sequence is synthesized)
cagctctgcagcccaaccctctccatggccgatgggacttctatgaaaaggatgagcacacacactcggagggctgagcagcacgctggaaactgtgacttggtgatgcccagctgcaca

SEQ ID NO: 277485 - DNA, 120 bp, Artificial Sequence
  ENSG00000128815_82 (sequence is synthesized)
cgaaattacacatgactcaccttattaagggctattgcactgaaaaaaaaaaagatgggtcgcttactggaaattattgtattgtctttattttattaaagcaactatgttttaaatgca

SEQ ID NO: 277486 - DNA, 120 bp, Artificial Sequence
  ENSG00000128815_83 (sequence is synthesized)
tttcctgacaagcctccaggaaacctttgctcaaaccctccctgtgatggggaaccccctaaaattcaagttgtcccacccagggggatgtctgtgattcttggaaagaactttctgtta

SEQ ID NO: 277487 - DNA, 120 bp, Artificial Sequence
  ENSG00000128815_84 (sequence is synthesized)
tcaagctgggatctacctccagcaactcctgccagcagtcctggttatgccctctgcagcagaattaggaggaccactctccttcctcttcacatctcatagagagtgaaattggctccc

SEQ ID NO: 277488 - DNA, 120 bp, Artificial Sequence
  ENSG00000128815_85 (sequence is synthesized)
agcacccttctgactgcagagtcacccacagacctcaggactgggcctcttcacagtttctagagccatcttcacttgtctgatgagcaggtccaagcaaacctggaaagacttgaattc

SEQ ID NO: 277489 - DNA, 120 bp, Artificial Sequence
  ENSG00000128815_86 (sequence is synthesized)
aaaggcttcttcaggaacaactccaagagaggagaaatagcccttgtcagctctgtgagggttaaaatcagattcctggcaagttgtgttgtaaatggaaagaagctgctgagctcccta

SEQ ID NO: 277490 - DNA, 120 bp, Artificial Sequence
  ENSG00000128815_87 (sequence is synthesized)
tggctaaagcatggactcccagctaatatcccaaacataggtgccagtgggggccaccgtgctttcagggggaccaggcctgagggctcggctccccacatatccaccagcctcctctct

SEQ ID NO: 277491 - DNA, 120 bp, Artificial Sequence
  ENSG00000128815_88 (sequence is synthesized)
tgcttgctgtctgtgatgcctgcccctcttaacctctgtttgagacccatctgaggagcaggagaggaacatgataaagaaatgaatcccaaaccccaacaggtttaaacagaccttcac

SEQ ID NO: 277492 - DNA, 120 bp, Artificial Sequence
  ENSG00000128815_89 (sequence is synthesized)
ttcatgagtagaaacattgcgttacctgtgaaattctaagggagtagcctataacaaattcattttctatcggactgaaaaactttgtgcatactctttgtattatggattcttttcatg

SEQ ID NO: 277493 - DNA, 120 bp, Artificial Sequence
  ENSG00000128815_90 (sequence is synthesized)
gaagccaaacagatgtttggagatgtatggaccagtccatgctaaggctacaaatcagggtcttctacttctccctctaagtttcttttgaattaaaatcttctggactccgtctccagt

SEQ ID NO: 277494 - DNA, 120 bp, Artificial Sequence
  ENSG00000128815_91 (sequence is synthesized)
ccatgcattgtttggtgtcctgtcccagggttgtcccttcagtggctgggttcctctggaggtccagcaccacatacctgggcaaagtattggggactgactttgaatggctgcatctcc

SEQ ID NO: 277495 - DNA, 120 bp, Artificial Sequence
  ENSG00000128815_92 (sequence is synthesized)
agtcacagccagattctaggggggtgtcatctctgggaagtgtctaggagctcctctgttagaccctaacttctgaagacccacgtctctctgtctttctgtctgtctctctcacacaca

SEQ ID NO: 277496 - DNA, 120 bp, Artificial Sequence
  ENSG00000128815_93 (sequence is synthesized)
tacacacacagacacctctttcaggcacacacacacatctctcttcctcttcctctcttttatacatgcacacacacatgtacacacacataccttctctcctcaagagaccagtggaga

SEQ ID NO: 277497 - DNA, 120 bp, Artificial Sequence
  ENSG00000128815_94 (sequence is synthesized)
gtcccaagtttcacaaggaaggattacagcctctgtgctttggccactggtcctcctaagcagggcaggggactaagctaagcactctaagcaggcagccagtagctaagaacatgtgct

SEQ ID NO: 277498 - DNA, 120 bp, Artificial Sequence
  ENSG00000128815_95 (sequence is synthesized)
ctggggcagatggcccaggagtgcattccagtcctactgcttcctgactgtgtgaccttgggcaagccattgaacctccttgttcccacggggattggaatagcattgaatggatgctac

SEQ ID NO: 277499 - DNA, 120 bp, Artificial Sequence
  ENSG00000128815_96 (sequence is synthesized)
tacagatttgtattgatgcttagataaatgagcctgcagagagttggtgaggaaaagatgaaaaacatgagaaataggttgagccagtgaagggagccatgtgatttagggagggaagag

SEQ ID NO: 277500 - DNA, 120 bp, Artificial Sequence
  ENSG00000128815_97 (sequence is synthesized)
ggtcactctggccctattattgagaaacagttcttccagggaccaggggctcctcaacaaggccagtcagcaagagcgcaatgagatgggccaccttcggtgcccagcacatagtggtga

SEQ ID NO: 277501 - DNA, 120 bp, Artificial Sequence
  ENSG00000128815_98 (sequence is synthesized)
ttattagtccatctcttctgaccataattcagtggcttccttggctgccaccaaggctcagagaggctctatagaagcaggagtccactggggtgggggtggttccactggggtgggggt

SEQ ID NO: 277502 - DNA, 120 bp, Artificial Sequence
  ENSG00000128815_99 (sequence is synthesized)
ggtcccaaccagcccaggagggaggatctcccagatggaagcagaagagagggtgaggctgggttcctagggccatgtatgtatgaagtcgggtgccagtgtcatctgaggacatgcact

SEQ ID NO: 277503 - DNA, 120 bp, Artificial Sequence
  ENSG00000128815_100 (sequence is synthesized)
gccttggggaaatcccactacactgaacaacatgcaggtcccaaggagtatgaagttaagttttcaatggttttagtggtgtccttttttatccttgaagtccaagaacagtgtcattgg

SEQ ID NO: 277504 - DNA, 120 bp, Artificial Sequence
  ENSG00000128815_101 (sequence is synthesized)
cacaccccaccctggtagataaggtgctactgctcttggctctggggaccatgcctccatttgccccaggactggggatccgctgctgcattgaagtccctgggcagtcaggcacagccc

SEQ ID NO: 277505 - DNA, 120 bp, Artificial Sequence
  ENSG00000128815_102 (sequence is synthesized)
ctgccctcatggaaagggacatgaggtgcaaaccacatcaacagtaacaagggagctcaaatctcccatgtgggctccaggagactgatgcagatcttaccagccacgggtcctggggat

SEQ ID NO: 277506 - DNA, 120 bp, Artificial Sequence
  ENSG00000128815_103 (sequence is synthesized)
gctcagtttcttcatgtgtaaggtatggaagacaatggccctgccctcaggcttgtgacagtgccatgaagtggtgtctgtcacacaggcaggcaacaagccagcgctgaggcaggagtc

SEQ ID NO: 277507 - DNA, 120 bp, Artificial Sequence
  ENSG00000128815_104 (sequence is synthesized)
ctggcagatgctggtgccactccgagcacacacactgggccttgctttaaggggcctggctttactctctccctttgatctgagcagccccagaaggtaagggccattgatgccacagtc

SEQ ID NO: 277508 - DNA, 120 bp, Artificial Sequence
  ENSG00000128815_105 (sequence is synthesized)
ccttccctatggggagagacatctcacagtcttatcctggagcctttcctgaatcctgctccctctcttcctcctgggtggtagggtcaggaagagggtggttctcccacttcacccagc

SEQ ID NO: 277509 - DNA, 120 bp, Artificial Sequence
  ENSG00000128815_106 (sequence is synthesized)
acagggcaaggaagggagtggcccccaccaggaggaaggaaaggcccctacgtggtgggtatggtgtgcacagtcttagaaactaggctggcctcagtgttttgagtcaacaagctgcac

SEQ ID NO: 277510 - DNA, 120 bp, Artificial Sequence
  ENSG00000128815_107 (sequence is synthesized)
caggctctgtgccaggggacacacattgaaaggggcatggttttctctactccatgggaagaggctagggtctgaagagatggaatgacttcaccagcataaccagacttggaatgaggt

SEQ ID NO: 277511 - DNA, 120 bp, Artificial Sequence
  ENSG00000128815_108 (sequence is synthesized)
ctgggcagctccaaatcccgtgctgtgagccatattccagctggggctgggggtggctcccagagtggagctgagggaggatgggaattgtgcctccctgtgactcctgccccggggccc

SEQ ID NO: 277512 - DNA, 120 bp, Artificial Sequence
  ENSG00000128815_109 (sequence is synthesized)
ggctacagtgggtgctgtccttctgtgcataagttcaagtccagtgtgtctgcctgtcactcctgcccagggcccagctgcagtgggtgctgtccttccatgcttaagttcaagtccagt

SEQ ID NO: 277513 - DNA, 120 bp, Artificial Sequence
  ENSG00000128815_110 (sequence is synthesized)
gtgtctgcctgtgactcctgcctgggggcccagctgtagtgggtgctgttcttccatgcataagttcgccatactaactggggtgtagatatgtacctcttttctctaggctcagagtcc

SEQ ID NO: 277514 - DNA, 120 bp, Artificial Sequence
  ENSG00000128815_111 (sequence is synthesized)
gatccacatttgctcaggcatttgtattcatgtaattcagttagccactgtatgtggcaggcagtaccctgtattaggtagcgtcaggtgctgtaacaaataaatcccatatcctcagta

SEQ ID NO: 277515 - DNA, 80 bp, Artificial Sequence
  ENSG00000128829_0 (sequence is synthesized)
tgccttgggcgcagcgctgccatggctgggggccgtggggcccccgggcgcggccgggacgagcctccggagagctaccc

SEQ ID NO: 277516 - DNA, 120 bp, Artificial Sequence
  ENSG00000128829_1 (sequence is synthesized)
gagcctccggagagctacccgcaacgacaggaccacgagctacaggccctggaggccatttacggcgcggacttccaagacctgcggccggacgcttgcggaccggtcaaagagccccct

SEQ ID NO: 277517 - DNA, 120 bp, Artificial Sequence
  ENSG00000128829_2 (sequence is synthesized)
gaaatcaatttagttttgtaccctcaaggcctaactggtgaagaagtatatgtaaaagtggatttgagggttaaatgcccacctacctatccagatgtagttcctgaaatagagttaaaa

SEQ ID NO: 277518 - DNA, 120 bp, Artificial Sequence
  ENSG00000128829_3 (sequence is synthesized)
aatgccaaaggtctatcaaatgaaagtgtcaatttgttaaaatctcgcctagaagaactggccaagaaacactgtggggaggtgatgatctttgaactggcttaccacgtgcagtcattt

SEQ ID NO: 277519 - DNA, 120 bp, Artificial Sequence
  ENSG00000128829_4 (sequence is synthesized)
ctcagcgagcataacaagccccctcccaagtcttttcatgaagaaatgctggaaaggcgggctcaggaggagcagcagaggctgttggaggccaagcggaaagaagagcaggagcaacgt

SEQ ID NO: 277520 - DNA, 120 bp, Artificial Sequence
  ENSG00000128829_5 (sequence is synthesized)
gaaatcctgcatgagattcagagaaggaaagaagagataaaagaagagaaaaaaaggaaagaaatggctaagcaggaacgtttggaaattgctagtttgtcaaaccaagatcatacctct

SEQ ID NO: 277521 - DNA, 120 bp, Artificial Sequence
  ENSG00000128829_6 (sequence is synthesized)
aagaaggacccaggaggacacagaacggctgccattctacatggaggctctcctgactttgtaggaaatggtaaacatcgggcaaactcctcaggaaggtctaggcgagaacgtcagtat

SEQ ID NO: 277522 - DNA, 120 bp, Artificial Sequence
  ENSG00000128829_7 (sequence is synthesized)
tctgtatgtaatagtgaagattctcctggctcttgtgaaattctgtatttcaatatggggagtcctgatcagctcatggtgcacaaagggaaatgtattggcagtgatgaacaacttgga

SEQ ID NO: 277523 - DNA, 120 bp, Artificial Sequence
  ENSG00000128829_8 (sequence is synthesized)
aaattagtctacaatgctttggaaacagccactggtggctttgtcttgttgtatgagtgggtccttcagtggcagaaaaaaatgggtccattccttaccagtcaagaaaaagagaagatt

SEQ ID NO: 277524 - DNA, 120 bp, Artificial Sequence
  ENSG00000128829_9 (sequence is synthesized)
gataagtgcaaaaagcagattcaaggaacagaaacagaattcaactcactggtaaaattgagccatccaaatgtagtacgctaccttgcaatgaatctcaaagagcaagacgactccatc

SEQ ID NO: 277525 - DNA, 120 bp, Artificial Sequence
  ENSG00000128829_10 (sequence is synthesized)
gtggtggacattttagtggagcacattagtggggtctctcttgctgcacacctgagccactcaggccccatccctgtgcatcagcttcgcaggtacacagctcagctcctgtcaggcctt

SEQ ID NO: 277526 - DNA, 120 bp, Artificial Sequence
  ENSG00000128829_11 (sequence is synthesized)
gattatctgcacagcaattctgtggtgcataaggtcctgagtgcatctaatgtcttggtggatgcagaaggcaccgtcaagattacggactatagcatttctaagcgcctcgcagacatt

SEQ ID NO: 277527 - DNA, 120 bp, Artificial Sequence
  ENSG00000128829_12 (sequence is synthesized)
tgcaaggaggatgtgtttgagcaaacccgagttcgttttagtgacaatgctctgccttataaaacggggaagaaaggagatgtttggcgtcttggccttctgctgctgtccctcagccaa

SEQ ID NO: 277528 - DNA, 120 bp, Artificial Sequence
  ENSG00000128829_13 (sequence is synthesized)
ggacaggaatgtggagagtaccctgtgaccatccctagtgacttaccagctgactttcaagattttctaaagaaatgtgtgtgcttggatgacaaggaaagatggagtccccagcagttg

SEQ ID NO: 277529 - DNA, 120 bp, Artificial Sequence
  ENSG00000128829_14 (sequence is synthesized)
ttgaaacacagctttataaatccccagccaaaaatgcctctagtggaacaaagtcctgaagattctgaaggacaagattatgttgagactgttattcctagcaaccggctacccagtgct

SEQ ID NO: 277530 - DNA, 120 bp, Artificial Sequence
  ENSG00000128829_15 (sequence is synthesized)
gccttctttagtgagacacagagacagttttcccgatacttcattgagtttgaagaattacaacttcttggtaaaggagcttttggagctgtcatcaaggtgcagaacaagttggacggc

SEQ ID NO: 277531 - DNA, 120 bp, Artificial Sequence
  ENSG00000128829_16 (sequence is synthesized)
tgctgctacgcagtgaagcgcatccccatcaacccggccagccggcagttccgcaggatcaagggcgaagtgacactgctgtcacggctgcaccatgagaacattgtgcgctactacaac

SEQ ID NO: 277532 - DNA, 120 bp, Artificial Sequence
  ENSG00000128829_17 (sequence is synthesized)
gcctggatcgagcggcacgagcggccggcgggaccggggacgccgcccccggactccgggcccctggccaaggatgaccgagctgcacgcgggcagccggcgagcgacacagacggcctg

SEQ ID NO: 277533 - DNA, 120 bp, Artificial Sequence
  ENSG00000128829_18 (sequence is synthesized)
gacagcgtagaggccgccgcgccgccacccatcctcagcagctcggtggagtggagcacttcgggcgagcgctcggccagtgcccgtttccccgccaccggcccgggctccagcgatgac

SEQ ID NO: 277534 - DNA, 120 bp, Artificial Sequence
  ENSG00000128829_19 (sequence is synthesized)
gaggacgacgacgaggacgagcacggtggcgtcttctcccagtccttcctgcctgcttcagattctgaaagtgatattatctttgacaatgaagatgagaacagtaaaagtcagaatcag

SEQ ID NO: 277535 - DNA, 120 bp, Artificial Sequence
  ENSG00000128829_20 (sequence is synthesized)
gatgaagattgcaatgaaaagaatggctgccatgaaagtgagccatcagtgacgactgaggctgtgcactacctatacatccagatggagtactgtgagaagagcactttacgagacacc

SEQ ID NO: 277536 - DNA, 120 bp, Artificial Sequence
  ENSG00000128829_21 (sequence is synthesized)
attgaccagggactgtatcgagacaccgtcagactctggaggctttttcgagagattctggatggattagcttatatccatgagaaaggaatgattcaccgggatttgaagcctgtcaac

SEQ ID NO: 277537 - DNA, 120 bp, Artificial Sequence
  ENSG00000128829_22 (sequence is synthesized)
atttttttggattctgatgaccatgtgaaaataggtgattttggtttggcgacagaccatctagccttttctgctgacagcaaacaagacgatcagacaggagacttgattaagtcagac

SEQ ID NO: 277538 - DNA, 120 bp, Artificial Sequence
  ENSG00000128829_23 (sequence is synthesized)
gggatggttggcactgctctctatgtaagcccagaggtccaaggaagcaccaaatctgcatacaaccagaaagtggatctcttcagcctgggaattatcttctttgagatgtcctatcac

SEQ ID NO: 277539 - DNA, 120 bp, Artificial Sequence
  ENSG00000128829_24 (sequence is synthesized)
cccatggtcacggcttcagaaaggatctttgttctcaaccaactcagagatcccacttcgcctaagtttccagaagactttgacgatggagagcatgcaaagcagaaatcagtcatctcc

SEQ ID NO: 277540 - DNA, 120 bp, Artificial Sequence
  ENSG00000128829_25 (sequence is synthesized)
tggctgttgaaccacgatccagcaaaacggcccacagccacagaactgctcaagagtgagctgctgcccccaccccagatggaggagtcagagctgcatgaagtgctgcaccacacgctg

SEQ ID NO: 277541 - DNA, 120 bp, Artificial Sequence
  ENSG00000128829_26 (sequence is synthesized)
accaacgtggatgggaaggcctaccgcaccatgatggcccagatcttctcgcagcgcatctcccctgccatcgattacacctatgacagcgacatactgaagggcaacttctcaatccgt

SEQ ID NO: 277542 - DNA, 120 bp, Artificial Sequence
  ENSG00000128829_27 (sequence is synthesized)
acagccaagatgcagcagcatgtgtgtgaaaccatcatccgcatctttaaaagacatggagctgttcagttgtgtactccactactgcttccccgaaacagacaaatatatgagcacaac

SEQ ID NO: 277543 - DNA, 120 bp, Artificial Sequence
  ENSG00000128829_28 (sequence is synthesized)
gaagctgccctattcatggaccacagcgggatgctggtgatgcttccttttgacctgcggatcccttttgcaagatatgtggcaagaaataatatattgaatttaaaacgatactgcata

SEQ ID NO: 277544 - DNA, 120 bp, Artificial Sequence
  ENSG00000128829_29 (sequence is synthesized)
gaacgtgtgttcaggccgcgcaagttagatcgatttcatcccaaagaacttctggagtgtgcatttgatattgtcacttctaccaccaacagctttctgcccactgctgaaattatctac

SEQ ID NO: 277545 - DNA, 120 bp, Artificial Sequence
  ENSG00000128829_30 (sequence is synthesized)
actatctatgaaatcatccaagagtttccagcacttcaggaaagaaattacagtatttatttgaaccataccatgttattgaaagcaatactcttacactgtgggatcccagaagataaa

SEQ ID NO: 277546 - DNA, 120 bp, Artificial Sequence
  ENSG00000128829_31 (sequence is synthesized)
ctcagtcaagtctacattattctgtatgatgctgtgacagagaagctgacgaggagagaagtggaagctaaattttgtaatctgtctttgtcttctaatagtctgtgtcgactctacaag

SEQ ID NO: 277547 - DNA, 120 bp, Artificial Sequence
  ENSG00000128829_32 (sequence is synthesized)
tttattgaacagaagggagatttgcaagatcttatgccaacaataaattcattaataaaacagaaaacaggtattgcacagttggtgaagtatggcttaaaagacctagaggaggttgtt

SEQ ID NO: 277548 - DNA, 120 bp, Artificial Sequence
  ENSG00000128829_33 (sequence is synthesized)
ggactgttgaagaaactcggcatcaagttacaggtcttgatcaatttgggcttggtttacaaggtgcagcagcacaatggaatcatcttccagtttgtggctttcatcaaacgaaggcaa

SEQ ID NO: 277549 - DNA, 120 bp, Artificial Sequence
  ENSG00000128829_34 (sequence is synthesized)
agggctgtacctgaaatcctcgcagctggaggcagatatgacctgctgattccccagtttagagggccacaagctctggggccagttcccactgccattggggtcagcatagctatagac

SEQ ID NO: 277550 - DNA, 120 bp, Artificial Sequence
  ENSG00000128829_35 (sequence is synthesized)
aagatatctgctgctgtcctcaacatggaggaatctgttacaataagctcttgtgacctcctggttgtaagtgttggccagatgtctatgtccagggccatcaacctaacccagaaactc

SEQ ID NO: 277551 - DNA, 120 bp, Artificial Sequence
  ENSG00000128829_36 (sequence is synthesized)
tggacagcaggcatcacagcagaaatcatgtacgactggtcacagtcccaagaggaattacaagagtactgcagacatcatgaaatcacctatgtggcccttgtctcggataaagaagga

SEQ ID NO: 277552 - DNA, 120 bp, Artificial Sequence
  ENSG00000128829_37 (sequence is synthesized)
agccatgtcaaggttaagtctttcgagaaggaaaggcagacagagaagcgtgtgctggagactgaacttgtggaccatgtactgcagaaactgaggactaaagtcactgatgaaaggaat

SEQ ID NO: 277553 - DNA, 120 bp, Artificial Sequence
  ENSG00000128829_38 (sequence is synthesized)
ggcagagaagcttccgataatcttgcagtgcaaaatctgaaggggtcattttctaatgcttcaggtttgtttgaaatccatggagcaacagtggttcccattgtgagtgtgctagccccg

SEQ ID NO: 277554 - DNA, 120 bp, Artificial Sequence
  ENSG00000128829_39 (sequence is synthesized)
gagaagctgtcagccagcactaggaggcgctatgaaactcaggtacaaactcgacttcagacctcccttgccaacttacatcagaaaagcagtgaaattgaaattctggctgtggatcta

SEQ ID NO: 277555 - DNA, 120 bp, Artificial Sequence
  ENSG00000128829_40 (sequence is synthesized)
cccaaagaaacaatattacagtttttatcattagagtgggatgctgatgaacaggcatttaacacaactgtgaagcagctgctgtcacgcctgccaaagcaaagatacctcaaattagtc

SEQ ID NO: 277556 - DNA, 120 bp, Artificial Sequence
  ENSG00000128829_41 (sequence is synthesized)
tgtgatgaaatttataacatcaaagtagaaaaaaaggtgtctgtgctatttctgtacagctatagagatgactactacagaatcttattttaaccctaaagaactgtcgttaacctcatt

SEQ ID NO: 277557 - DNA, 120 bp, Artificial Sequence
  ENSG00000128829_42 (sequence is synthesized)
tgtcgttaacctcattcaaacagacagaggcttatactggaataatggaatgttgtacattcatcataatttaaaattaaattctaagaagaggctgggtgcagtggctcacacctttaa

SEQ ID NO: 277558 - DNA, 120 bp, Artificial Sequence
  ENSG00000128829_43 (sequence is synthesized)
ctttgggaagccaaggcaggaagactgcttgaaaccaggagtttgagaccagcctgagcaacaaagcaagaccccatctctataaaaactaaaaaaattagttgggcatggtggcacatg

SEQ ID NO: 277559 - DNA, 80 bp, Artificial Sequence
  ENSG00000128829_44 (sequence is synthesized)
tagtcccagctactccagaggctgagatggatcatctgagcctcaggaggttctgggacaacagagcaagaccctgtctt

SEQ ID NO: 277560 - DNA, 120 bp, Artificial Sequence
  ENSG00000128829_45 (sequence is synthesized)
aaaaaaagaaaaaaaaaatttttttctaagaagctgtcctacaaagttgagctttgttagtttttcatgtgtaatatattataaatttatcttttgggatataataaatgctttcatata

SEQ ID NO: 277561 - DNA, 83 bp, Artificial Sequence
  ENSG00000128829_46 (sequence is synthesized)
cgggcatggtggtgcacgcctgtaaaaacacaggaggcggaggttacagtgagcggagatcgtgccactgtactccagcctgg

SEQ ID NO: 277562 - DNA, 120 bp, Artificial Sequence
  ENSG00000128829_47 (sequence is synthesized)
gtgagactctgtctcagaaaaaaaaagaaaaagttgtttgagtgtgtcttttttttttttttttacaatgtgttttgaagcaaagtctttggcacgctgtgtttctatgcaggatttcaa

SEQ ID NO: 277563 - DNA, 120 bp, Artificial Sequence
  ENSG00000128829_48 (sequence is synthesized)
cttgctctgtcacccaggctggaggtcagtggcgcgtccttggctgcaacatccgcctcccgggccagcgaatgccccccaacattaatccccaccaagtccaagccagggaaaagggga

SEQ ID NO: 277564 - DNA, 120 bp, Artificial Sequence
  ENSG00000128829_49 (sequence is synthesized)
ttcatttagaaatccagacgtgttgaccatgtttaaaaacaaaaacaaaaacaaaacaaaaccaccacttttagagagtaaccaaatgcaatctaaaggagcggtccccagcgtttttag

SEQ ID NO: 277565 - DNA, 120 bp, Artificial Sequence
  ENSG00000128829_50 (sequence is synthesized)
gcaccagggactggtttcatagaagacaatttttccacagacgggtgttagggaaatagtttcgggatgaaactgttccaccttacatcatcaggcattagagtctcataatgactgctg

SEQ ID NO: 277566 - DNA, 120 bp, Artificial Sequence
  ENSG00000128829_51 (sequence is synthesized)
ctcataatgactgctgaaaaagcgcacaacctggatccctcgtgtgcacagttcacaatagtgtttgcgctcctatgagaatctaatgcggctgctgatctgacaggaggtggagctcag

SEQ ID NO: 277567 - DNA, 120 bp, Artificial Sequence
  ENSG00000128829_52 (sequence is synthesized)
acctccggctgtgcggccctaacaggcagtggacctgtacctgtccatggcctggaggtttgggacccctaatctaaaggattttttttcccgctattttcaaaagatctccaaaatcca

SEQ ID NO: 277568 - DNA, 120 bp, Artificial Sequence
  ENSG00000128829_53 (sequence is synthesized)
ggagtcttgatacagtgccaactgcagcccccaaaggtaccaaaccaataattatgatcctaaattttatgcttctcagaatccaccctggatgtttactttcatgattttgttttattt

SEQ ID NO: 277569 - DNA, 120 bp, Artificial Sequence
  ENSG00000128829_54 (sequence is synthesized)
tatccaagtggatacagtttatgattactcttcactattaaattttttgaggaaacttaatctggctaatttttattaaatcaagggttctgtgttttgcataatagcaagtacaaatca

SEQ ID NO: 277570 - DNA, 120 bp, Artificial Sequence
  ENSG00000128829_55 (sequence is synthesized)
gcacagtgtagagtatacattgatgcctgtgggctcatggtgtgatgtctgtagcctcttgtgctttctagtatttaaaaatgtccatgtttataatgataatagggatttctgttcctt

SEQ ID NO: 277571 - DNA, 120 bp, Artificial Sequence
  ENSG00000128829_56 (sequence is synthesized)
tagtatttctgtttccctttttcaggcctgcttcagattctgaaagtgatattatctttgacaatgaagatgagaacagtaaaagtcagaatcaggtatatatatgaatagaaattatat

SEQ ID NO: 277572 - DNA, 120 bp, Artificial Sequence
  ENSG00000128829_57 (sequence is synthesized)
cattttattcgtgatataattgacgtctgatgtcataaaccttaggtaaagtattaaggctttaatctgatattcagatatagaaaccataaattttaaaagatgattattcatttaaaa

SEQ ID NO: 277573 - DNA, 120 bp, Artificial Sequence
  ENSG00000128829_58 (sequence is synthesized)
ggacatctttgcggggctgtactccagcctgccacacttctgaaggcactcagtgcttagtgtgttttgggctctgtatcctgagacctcccacagcatgcaggcctgacacttgccgtg

SEQ ID NO: 277574 - DNA, 120 bp, Artificial Sequence
  ENSG00000128829_59 (sequence is synthesized)
ggtgtggaggtgtggaaagtggcacccaggacacatgcctgccctttggaatgggggcgtaagcagaccatagaaggggtgcactcccaggagatcatccaggttgtacccacattcgcc

SEQ ID NO: 277575 - DNA, 120 bp, Artificial Sequence
  ENSG00000128829_60 (sequence is synthesized)
cacactaaaggtgccccagagcatggcgatgaccagggacacagacccaccaccctcccacctgctctgtttacatcacctgccaggaggcttctgaagctgctgctgtttactcgtgtg

SEQ ID NO: 277576 - DNA, 120 bp, Artificial Sequence
  ENSG00000128829_61 (sequence is synthesized)
tgtgtgttgtatcaaaattcacatcagaagtgtgctgagcaacaatttttaatcatttgacagaacagtgtcctcttctacttgttcacatgtttcataaatcattagagaagtgttctg

SEQ ID NO: 277577 - DNA, 120 bp, Artificial Sequence
  ENSG00000128829_62 (sequence is synthesized)
aaaatccaagcctcgtggccagtgacctcagtcctgcacagtgacaccccacaggcttctctgccccctcctggtttgcttcttcagttctgcttttcaccttcccttatttcctttgtt

SEQ ID NO: 277578 - DNA, 89 bp, Artificial Sequence
  ENSG00000128829_63 (sequence is synthesized)
gttgtataattttgggcatcttttattaagtcttgaagcttttgaaaacctcttactattgattgattattcatggccctttaaacaat

SEQ ID NO: 277579 - DNA, 120 bp, Artificial Sequence
  ENSG00000128829_64 (sequence is synthesized)
ctcttactattgattgattattcatggccctttaaacaatcatgaagggaagggaggcaagagaggccttgttcctcccttgaattctatgcggcttcttgcttaatatttatatccccc

SEQ ID NO: 277580 - DNA, 120 bp, Artificial Sequence
  ENSG00000128829_65 (sequence is synthesized)
tgaagtcagcattttagtaattcacattgagaatataattggaaacagtattttcattctccttaattacttgaagctgttccaggtgctctgtgtttattttctttactatgtttgttt

SEQ ID NO: 277581 - DNA, 120 bp, Artificial Sequence
  ENSG00000128829_66 (sequence is synthesized)
gtttcagtcccaagaggaattacaagagtactgcagacatcatgaaatcacctatgtggcccttgtctcggataaagaaggaagccatgtcaaggttaagtctttcgagaaggaaaggca

SEQ ID NO: 277582 - DNA, 120 bp, Artificial Sequence
  ENSG00000128829_67 (sequence is synthesized)
gtgtggtacagagtcattcccagtcccctttagagctccttctctgttccatttccacaaagactcatggactttacttttattttgggagtggggagggaagtgaatatggctgttgga

SEQ ID NO: 277583 - DNA, 120 bp, Artificial Sequence
  ENSG00000128829_68 (sequence is synthesized)
tactatgctcatcctcaccttcctggagttaaaggttttatttaagttacgctggacacagttgagaattgtcccactcctctttccttgcttcatgtggagcattaacatgaaacacac

SEQ ID NO: 277584 - DNA, 120 bp, Artificial Sequence
  ENSG00000128829_69 (sequence is synthesized)
atggttataacagcacttcaagtggaatcaagacctccacagaaagaacatttttgtgtgctttggttcagaaagaacattgttctttttttctcctgtttgctgttagagttgctgtag

SEQ ID NO: 277585 - DNA, 120 bp, Artificial Sequence
  ENSG00000128829_70 (sequence is synthesized)
ataaaaaggttctaaggttagaagagagatggacttcaaactgggagatggccccagcaggtctcgatggcttttattttccagctattattgggacaggaaagtagcgatgtattatta

SEQ ID NO: 277586 - DNA, 120 bp, Artificial Sequence
  ENSG00000128829_71 (sequence is synthesized)
aggtacactgttgttgggtcttcctttcttcgttctagtctatttgggtgacttttattattatctgccccttgtagaaagaggtttcagctgtttttatataatagaagtatttctttg

SEQ ID NO: 277587 - DNA, 120 bp, Artificial Sequence
  ENSG00000128829_72 (sequence is synthesized)
taaattaggagacccagattattgtattaagtccatatacagtacatgtcatctttcacatatgaaggtaacccaccatcaactgagtatattgtctgttaaggattctgagagtatcat

SEQ ID NO: 277588 - DNA, 120 bp, Artificial Sequence
  ENSG00000128829_73 (sequence is synthesized)
taggaagcattactgttactgtagaaaaacttttacactaaaaaaggaattaaattagttttcctgtggtaaaagacagacaagcaagacagatgtcctgatcagaaagatcataattat

SEQ ID NO: 277589 - DNA, 120 bp, Artificial Sequence
  ENSG00000128829_74 (sequence is synthesized)
gtctaagaggaggggatgattgaagcgtatactgtccctttaacacaatatcattttgatcaaatcctttaacttcattctattttaaattcttgaacgtagaatagtaacaaatttcat

SEQ ID NO: 277590 - DNA, 120 bp, Artificial Sequence
  ENSG00000128829_75 (sequence is synthesized)
ctctttacaagtacttaataatgataggcaagctcatataacaaaaacatctgagtaacttaagcccccacggtttccagtagtttctccctgtgagaatccacagccctcacctcctac

SEQ ID NO: 277591 - DNA, 120 bp, Artificial Sequence
  ENSG00000128829_76 (sequence is synthesized)
ctctgtgcttctgtgtcagagtagggcagcctgcccagtgatctggcattcattagcagttggacccattactgtttctgcaccttttcacttcagtaaatgaattcctaggggtttcca

SEQ ID NO: 277592 - DNA, 120 bp, Artificial Sequence
  ENSG00000128829_77 (sequence is synthesized)
gtatagcaagctttactcccaacccagttcgtatatgatgtgtactgagacaggagatcgaaaggcaatgccaagatccccacctcccgccctacactgtcctcttccctattaatgtgg

SEQ ID NO: 277593 - DNA, 120 bp, Artificial Sequence
  ENSG00000128829_78 (sequence is synthesized)
cagtaaaagaacacagggctatcattttttggagcacctgccatatttcagattgtgtgccaggtgatttacaaaccttgtctttaaatctcaggacattcttacgagatgggtatgatc

SEQ ID NO: 277594 - DNA, 120 bp, Artificial Sequence
  ENSG00000128829_79 (sequence is synthesized)
ctcattccctagatgagggaactgaagctcagagaaggttatgtcctttgcctgagataagggagataaaaccagcattcagacccacctctgttgtactacaaagtgtgtgttcttgtc

SEQ ID NO: 277595 - DNA, 120 bp, Artificial Sequence
  ENSG00000128829_80 (sequence is synthesized)
actatttccatacaaaaaaagataatctgaaactcaattttgtagtacttccttcttattcccaggacttcacttagacttttattagtttaattgaaacttgtgagccaaacaagagaa

SEQ ID NO: 277596 - DNA, 120 bp, Artificial Sequence
  ENSG00000128829_81 (sequence is synthesized)
gttaatggtgagaataaccactggggccaagttagaaggtgagactaggagtggaaagggaggagagggaaggcagacagtacggacagggtcccgatcatgctccccatggagtatatg

SEQ ID NO: 277597 - DNA, 120 bp, Artificial Sequence
  ENSG00000128829_82 (sequence is synthesized)
ggagagtgctgagaccaaggacgggccagatggtggggatcttgatccccaaactaaagaatttaacttgatatctggaaggctgtagcatagtgagatagataagagctcaggctctgg

SEQ ID NO: 277598 - DNA, 120 bp, Artificial Sequence
  ENSG00000128829_83 (sequence is synthesized)
aatctcactgacctggactagaatcctatctctgccactgctttgtagcatgatattggacaattaattaacttctcaatacctcatttgtaaagtgtgcctaatactagtgcctagctg

SEQ ID NO: 277599 - DNA, 120 bp, Artificial Sequence
  ENSG00000128829_84 (sequence is synthesized)
aaaaagttatcaggaagataaataagaatgcaggtaaagcacctagaacagtgcccagcactaagaatgttgaagccggtgttactgatggtgatgcttgtaatgggaagcacctattac

SEQ ID NO: 277600 - DNA, 120 bp, Artificial Sequence
  ENSG00000128829_85 (sequence is synthesized)
aagtgcagacataacaatagtgacttagggtattgacaacactgttgcacatagtggagcaaggtgaggctacctggggggcattagccatgagcgagggtggaacatatttgctgagca

SEQ ID NO: 277601 - DNA, 120 bp, Artificial Sequence
  ENSG00000128829_86 (sequence is synthesized)
gcctctaggaaagaagaataaaaattgatgcagagaaagtaacagcagtgggtaagttgaaagatgaatttgttgtttttaatataatcttactcttcttagaaaacagattctgttttt

SEQ ID NO: 277602 - DNA, 120 bp, Artificial Sequence
  ENSG00000128829_87 (sequence is synthesized)
ggcatttgcaacatgaaaataaattggtttctctaagtgtttgcatatttctgtcctaaagaaagagttgtacagtgattgcccccctccctcttgatttcattgggttttctgagagcc

SEQ ID NO: 277603 - DNA, 120 bp, Artificial Sequence
  ENSG00000128829_88 (sequence is synthesized)
ttgcattagtgggttaactaaactagaaaaaaaattaaaactcaaagcgttattatattattttgatttccatgtaatatttcctcagtcttcatttagaaacagacaagccattctcat

SEQ ID NO: 277604 - DNA, 120 bp, Artificial Sequence
  ENSG00000128829_89 (sequence is synthesized)
ggaataatatcatgttttaattggatatttggcttacttatatttttaggctgacagcaaacaagacgatcagacaggagacttgattaagtcagacccttcaggtaaacccagaagact

SEQ ID NO: 277605 - DNA, 120 bp, Artificial Sequence
  ENSG00000128829_90 (sequence is synthesized)
atatatttcatccatgtgttaaagaccccagaatttcttaacctgaaacctgttttttacttgtaaaggttttattctacggcagattttaattgctccttaagttaacaaaattatgga

SEQ ID NO: 277606 - DNA, 120 bp, Artificial Sequence
  ENSG00000128829_91 (sequence is synthesized)
aacgttttaatctttttttccttttcaatttatgaattattctttgaactttaagaaattagagcttcagtgagtagaataattggctcccaggggtagacagttttattttgtctaacc

SEQ ID NO: 277607 - DNA, 120 bp, Artificial Sequence
  ENSG00000128829_92 (sequence is synthesized)
tccattggtaatgtgaggttacctcatgacctgatccatctggggtcttatctggcactgtccctcctcttcaatagcaaagacatccttgtgtagaaccgaatgtgtggccatacgtga

SEQ ID NO: 277608 - DNA, 120 bp, Artificial Sequence
  ENSG00000128829_93 (sequence is synthesized)
cttatggttattcatttggtacaatgcatgctctgcttcctgtgagtggcatagacagttaacagatcatgcctcacttttaagaaacctttttttgtttttagtttgtgtcttctgtaa

SEQ ID NO: 277609 - DNA, 120 bp, Artificial Sequence
  ENSG00000128829_94 (sequence is synthesized)
acagtatccctgagagtcagagagaatgtgtttatttgattatctccctctgaaaggcaaatatcaatgtggccaagaatttggactttgaacccaggcatccttcccattggttgaaag

SEQ ID NO: 277610 - DNA, 120 bp, Artificial Sequence
  ENSG00000128829_95 (sequence is synthesized)
gttagctcttgctttccaaagcaggccatgaaagatatgtgtcctcttccctgatgtgttcaaagagggatggacttgtcaagacttgttttttgaacctggaaataagcagtgtagtgc

SEQ ID NO: 277611 - DNA, 120 bp, Artificial Sequence
  ENSG00000128829_96 (sequence is synthesized)
cagcattgaatgctacagagaaatcttccatgaaaggaagagtcaatcgatgcagcaacttcattgttgtcttcttttaagaaattgccgcaaccaccccagccttcaccagccaccacc

SEQ ID NO: 277612 - DNA, 120 bp, Artificial Sequence
  ENSG00000128829_97 (sequence is synthesized)
ccccagccttcaccagccaccaccttgatcagtcagcagccatcatcaagacaaaaccctctgtctgcaaaaagattatgacgtcctgaaggttcagatgatcattagcattttttagca

SEQ ID NO: 277613 - DNA, 120 bp, Artificial Sequence
  ENSG00000128833_0 (sequence is synthesized)
gccgccaactcgggaacgggaacaggaggccgttggaaaactttgggcaagatggcccggcggtgatttccgcggcggtctctcctgcgcccggcctctgcggcgcaggcccagcccccg

SEQ ID NO: 277614 - DNA, 120 bp, Artificial Sequence
  ENSG00000128833_1 (sequence is synthesized)
agcctcgcacgttcggcagccccggcctggccccggcccctcctgcccatggcggtggccgagctgtacacgcagtacaacagggtctggattcccgatcctgaagaagtttggaagtct

SEQ ID NO: 277615 - DNA, 120 bp, Artificial Sequence
  ENSG00000128833_2 (sequence is synthesized)
gctgaaatagccaaggactacagagttggtgacaaggtcctgcgactcctgctggaggatggaacggagctggattattctgtcaatccagaatctctgcctccacttcggaatcctgac

SEQ ID NO: 277616 - DNA, 120 bp, Artificial Sequence
  ENSG00000128833_3 (sequence is synthesized)
atcctcgtgggcgagaatgacctcacggctctcagctatcttcacgagcccgcggtgctccacaacctcagaatccgctttgcagaatccaaactcatttacacctacagtggaatcatt

SEQ ID NO: 277617 - DNA, 120 bp, Artificial Sequence
  ENSG00000128833_4 (sequence is synthesized)
ttggtggccatgaatccttacaagcagttgccaatatacggagatgccatcatccacgcctacagcgggcagaacatgggcgatatggacccacacatatttgccgtggcagaagaggca

SEQ ID NO: 277618 - DNA, 120 bp, Artificial Sequence
  ENSG00000128833_5 (sequence is synthesized)
tacaagcagatggccagaaacaacagaaaccagtccataattgtaagtggggagtcaggtgctggaaagacagtgtcggctcgctatgccatgaggtactttgccaccgtcagcaaatcg

SEQ ID NO: 277619 - DNA, 120 bp, Artificial Sequence
  ENSG00000128833_6 (sequence is synthesized)
ggcagcaacgctcacgtggaagacaaggtcctggcatccaatcccatcaccgaggccgttggaaatgccaagaccacccgcaatgacaatagtagtcggtttgggaaatacacagaaatc

SEQ ID NO: 277620 - DNA, 120 bp, Artificial Sequence
  ENSG00000128833_7 (sequence is synthesized)
agttttgatgaacaaaatcaaattataggagccaacatgagcacttacctcctggagaaatccagagttgtctttcaatcggaaaatgaacgaaattaccacattttctatcagctttgt

SEQ ID NO: 277621 - DNA, 120 bp, Artificial Sequence
  ENSG00000128833_8 (sequence is synthesized)
gcatctgcacagcagtcggaatttaaacatcttaaattggggagtgccgaagaatttaattatacaagaatgggaggcaatactgtcattgagggtgtgaatgatcgagctgaaatggta

SEQ ID NO: 277622 - DNA, 120 bp, Artificial Sequence
  ENSG00000128833_9 (sequence is synthesized)
gagactcaaaagaccttcacgcttctgggtttcaaggaggattttcagatggacgtttttaaaatcctggcagccatcctacatctgggcaatgtgcagatcaccgcggtgggcaacgag

SEQ ID NO: 277623 - DNA, 120 bp, Artificial Sequence
  ENSG00000128833_10 (sequence is synthesized)
aggtcctcagttagtgaggatgacagtcacctgaaggtgttctgtgagctcctgggcctggagagtggcagagttgctcagtggctgtgcaatcgcaaaatcgtcacaagctctgagacg

SEQ ID NO: 277624 - DNA, 120 bp, Artificial Sequence
  ENSG00000128833_11 (sequence is synthesized)
gtggtaaaacccatgaccaggcctcaggctgtcaacgccagggatgcactggccaaaaagatctatgctcacctgttcgacttcattgtggagagaattaaccaagcgttgcagttttca

SEQ ID NO: 277625 - DNA, 120 bp, Artificial Sequence
  ENSG00000128833_12 (sequence is synthesized)
ggcaagcagcacacttttattggtgttttggacatttatggttttgaaacctttgatgtgaacagctttgaacaattttgcatcaattacgctaatgaaaaactgcaacaacagtttaac

SEQ ID NO: 277626 - DNA, 120 bp, Artificial Sequence
  ENSG00000128833_13 (sequence is synthesized)
atgcatgtcttcaaactggaacaagaagaatacatgaaggaagatataccttggacgctgatagatttttatgacaatcaaccagttattgacctgattgaagcaaaaatgggaattctg

SEQ ID NO: 277627 - DNA, 120 bp, Artificial Sequence
  ENSG00000128833_14 (sequence is synthesized)
gagttactggatgaagaatgtttgttaccacatggaactgatgaaaactggcttcaaaagctgtataataattttgtcaacaggaaccctttgtttgaaaagcctagaatgtcaaacaca

SEQ ID NO: 277628 - DNA, 120 bp, Artificial Sequence
  ENSG00000128833_15 (sequence is synthesized)
tcctttgtcatccagcactttgctgataaggtagagtataaatgtgaaggtttcctggagaaaaacagagacaccgtctatgacatgctggttgaaatcctgagagcaagcaagtttcat

SEQ ID NO: 277629 - DNA, 120 bp, Artificial Sequence
  ENSG00000128833_16 (sequence is synthesized)
ctctgtgccaacttttttcaagaaaatccaactcctccttctccttttggttcaatgattacagttaaatctgcaaagcaagtcatcaagccaaacagcaagcatttccggaccacagtt

SEQ ID NO: 277630 - DNA, 120 bp, Artificial Sequence
  ENSG00000128833_17 (sequence is synthesized)
gggagcaagttccgcagctctctgtacttgctcatggagaccctcaatgcgacgacgccccactacgttcgatgcatcaagccaaatgatgagaagttaccctttgaatttgactccaaa

SEQ ID NO: 277631 - DNA, 120 bp, Artificial Sequence
  ENSG00000128833_18 (sequence is synthesized)
agaattgttcagcagctgcgagcctgcggcgttttagaaacgattcgcattagtgcacagagctacccttccaggtggacatacatcgagttctacagtcgctacggcattctcatgacc

SEQ ID NO: 277632 - DNA, 120 bp, Artificial Sequence
  ENSG00000128833_19 (sequence is synthesized)
aagcaagagctttccttcagcgataaaaaggaggtgtgcaaggtggttttacacagactcatccaggattctaatcagtaccagtttggtaaaaccaaaattttcttcagagcaggacaa

SEQ ID NO: 277633 - DNA, 120 bp, Artificial Sequence
  ENSG00000128833_20 (sequence is synthesized)
gtggcttatttagagaaacttcgattggataaactgaggcagagttgtgttatggtacaaaagcacatgcgtggctggctccagaggaaaaaattcctccgagagagacgagccgccctg

SEQ ID NO: 277634 - DNA, 120 bp, Artificial Sequence
  ENSG00000128833_21 (sequence is synthesized)
ataatccagcagtacttccggggtcagcaaactgtgaggaaagctattactgcagtggccttaaaagaagcttgggcagccataatcattcagaagcactgccgcgggtatcttgttcgc

SEQ ID NO: 277635 - DNA, 120 bp, Artificial Sequence
  ENSG00000128833_22 (sequence is synthesized)
agcctgtatcagttgattcgcatggccaccatcacaatgcaggcctacagccgaggattcctggcaaggaggaggtatcgaaagatgctggaggaacataaggctgtgatcctacagaaa

SEQ ID NO: 277636 - DNA, 120 bp, Artificial Sequence
  ENSG00000128833_23 (sequence is synthesized)
tacgcacgggcgtggctggccagacgcagattccagagtatccgacgattcgtgcttaatattcagcttacttacagggtccagcgtttgcagaaaaagttggaagatcagaacaaagaa

SEQ ID NO: 277637 - DNA, 120 bp, Artificial Sequence
  ENSG00000128833_24 (sequence is synthesized)
aaccatgggctggtggagaagctgactagcctggctgctcttcgagctggggatgtggaaaagattcagaagctggaagcagaactagaaaaagcagccactcacaggcgaaattacgag

SEQ ID NO: 277638 - DNA, 120 bp, Artificial Sequence
  ENSG00000128833_25 (sequence is synthesized)
gagaaggggaagagatacagggatgctgtggaagagaaattggcaaagcttcagaagcataattcagaactggaaacacagaaagaacaaatacagctgaagcttcaagagaagactgaa

SEQ ID NO: 277639 - DNA, 120 bp, Artificial Sequence
  ENSG00000128833_26 (sequence is synthesized)
gagttaaaagaaaaaatggacaacctcaccaagcagctctttgatgatgtacaaaaggaagaacggcaaagaatgcttcttgaaaaaagttttgaactgaaaacacaagactatgagaag

SEQ ID NO: 277640 - DNA, 120 bp, Artificial Sequence
  ENSG00000128833_27 (sequence is synthesized)
cagattcagtctttgaaagaagaaattaaagctctcaaggatgagaagatgcaactccaacacctggtggagggggagcacgtcacttctgatggcttgaaggcggaagtggcccgcctg

SEQ ID NO: 277641 - DNA, 120 bp, Artificial Sequence
  ENSG00000128833_28 (sequence is synthesized)
agcaagcaggtcaagacaatctctgagttcgaaaaagagatagaactacttcaggcacagaagatagatgtggagaaacatgtgcagtcacaaaaacgggaaatgagagaaaagatgtca

SEQ ID NO: 277642 - DNA, 120 bp, Artificial Sequence
  ENSG00000128833_29 (sequence is synthesized)
tctcgaaagctatgacattgaagatgtaagaagcaggctctctgtggaagatctggaacatttaaatgaggatggagaactttggtttgcttatgaaggactaaagaaagcaacacgtgt

SEQ ID NO: 277643 - DNA, 120 bp, Artificial Sequence
  ENSG00000128833_30 (sequence is synthesized)
tttggagagccatttccagtctcagaaggattgctatgaaaaggagattgaagctttgaacttcaaagtggtgcatctcagtcaagaaatcaaccacctgcagaagttattcagagaaga

SEQ ID NO: 277644 - DNA, 120 bp, Artificial Sequence
  ENSG00000128833_31 (sequence is synthesized)
aaatgacatcaatgaaagcatccgtcatgaagttaccaggctaacatcagagaacatgatgatcccagactttaaacagcaaatttcagaattggagaaacagaagcaagatcttgaaat

SEQ ID NO: 277645 - DNA, 120 bp, Artificial Sequence
  ENSG00000128833_32 (sequence is synthesized)
ccgcctgaatgaacaagctgagaaaatgaaaggaaaactagaagaattgtctaatcagttacatcgcagtcaagaggaggaaggaacacaaagaaaggccttggaagcccaaaatgaaat

SEQ ID NO: 277646 - DNA, 120 bp, Artificial Sequence
  ENSG00000128833_33 (sequence is synthesized)
acataccaaagagaaggagaagctgattgataagattcaagaaatgcaggaggccagtgaccacttgaagaaacaatttgaaactgaaagtgaagtcaagtgtaacttccggcaggaagc

SEQ ID NO: 277647 - DNA, 120 bp, Artificial Sequence
  ENSG00000128833_34 (sequence is synthesized)
atcccggctcactttggaaaacagggatcttgaagaagaattagacatgaaagacagagtgattaaaaagctacaagatcaagtcaagacactaagcaagacaattggaaaagccaatga

SEQ ID NO: 277648 - DNA, 120 bp, Artificial Sequence
  ENSG00000128833_35 (sequence is synthesized)
tgtgcactcgtcctcaggacccaaggagtaccttggaatgctgcaatacaagagagaagacgaggccaagctcattcagaacctcattcttgacttgaagccccgtggcgtggtggtgaa

SEQ ID NO: 277649 - DNA, 120 bp, Artificial Sequence
  ENSG00000128833_36 (sequence is synthesized)
catgatccccgggctgccggctcatatcctgttcatgtgtgtgcgctacgcagactctctgaatgatgccaacatgctgaagtccctcatgaacagcaccattaatggcatcaagcaggt

SEQ ID NO: 277650 - DNA, 120 bp, Artificial Sequence
  ENSG00000128833_37 (sequence is synthesized)
ggttaaggaacatttagaagactttgaaatgctgtccttttggctttccaacacttgtcattttctcaattgcctgaagcagtacagcggagaagaggaattcatgaagcataatagtcc

SEQ ID NO: 277651 - DNA, 120 bp, Artificial Sequence
  ENSG00000128833_38 (sequence is synthesized)
acagcagaataagaattgcttgaacaattttgacctttcagaatacagacagattctcagtgatgtggctatacgaatatatcatcaatttattatcataatggaaaagaatatccaacc

SEQ ID NO: 277652 - DNA, 120 bp, Artificial Sequence
  ENSG00000128833_39 (sequence is synthesized)
gataatagttccgggaatgctggagtatgagagcctgcagggcatttccggcctgaagcccacaggcttccggaagcgctcctctagcatagacgacacggacggctacaccatgacctc

SEQ ID NO: 277653 - DNA, 120 bp, Artificial Sequence
  ENSG00000128833_40 (sequence is synthesized)
cgtcctgcaacagctgagctacttttacaccaccatgtgccagaacggcctggaccccgagcttgtgaggcaggcggtgaagcagctcttcttcttgatcggggcggtcacgctgaacag

SEQ ID NO: 277654 - DNA, 120 bp, Artificial Sequence
  ENSG00000128833_41 (sequence is synthesized)
cctcttcctgcgcaaggacatgtgctcctgcagaaaagggatgcagatcaggtgcaatatcagctacttagaagaatggcttaaagataagaacttgcagaacagcttagcaaaggaaac

SEQ ID NO: 277655 - DNA, 120 bp, Artificial Sequence
  ENSG00000128833_42 (sequence is synthesized)
tttggagcccctctctcaggcagcctggttgcttcaggtcaagaagaccacagacagtgatgccaaggagatctacgaacgctgcacctcactgtctgctgtgcagatcataaagatcct

SEQ ID NO: 277656 - DNA, 120 bp, Artificial Sequence
  ENSG00000128833_43 (sequence is synthesized)
taattcatacacacctatagatgactttgagaagagagtgactccatcctttgttcgcaaagtacaggctctcctaaatagccgggaggattcatcacagctgatgttggataccaaata

SEQ ID NO: 277657 - DNA, 120 bp, Artificial Sequence
  ENSG00000128833_44 (sequence is synthesized)
tctctttcaagtcacatttccttttaccccctctccacatgctctggaaatgattcagatccccagcagtttcaagctaggctttctgaataggttatagcaggagaaaaagtcaatgca

SEQ ID NO: 277658 - DNA, 120 bp, Artificial Sequence
  ENSG00000128833_45 (sequence is synthesized)
ctttttcttcaaaagctaagtgaaggttcaatatgagggatgtgttttattaattggcagtggaaattggaatgtgatttaaggaagaaaacagacttttctcaaatggaccacatcatc

SEQ ID NO: 277659 - DNA, 120 bp, Artificial Sequence
  ENSG00000128833_46 (sequence is synthesized)
tctcactcacagtgacaatgctgctcctgtaattttgtaagaattcacacacaccagctgtatttggaaaagccatgtctcactctcgaatctcagctggttttcactgaaattcctgga

SEQ ID NO: 277660 - DNA, 120 bp, Artificial Sequence
  ENSG00000128833_47 (sequence is synthesized)
gggctcatattttcttccacgtgcctcttgatctgttctgtcttgtggcagggctctaccaggagggagtgagatctggggacacagtggcttccaagttttctaaggttcatgtgaaac

SEQ ID NO: 277661 - DNA, 120 bp, Artificial Sequence
  ENSG00000128833_48 (sequence is synthesized)
ctgagtacatttacaaagctgcaagtggattctagtgctgagtcttccaggaaaaaatcccgtttggccaccgtgacctgccaaaagttctcttgccccatgcctgctggggacagaagg

SEQ ID NO: 277662 - DNA, 120 bp, Artificial Sequence
  ENSG00000128833_49 (sequence is synthesized)
ttttcatgaactctttttactgaaaatgccctgcatttaaaaatgtttattttagacccttctaaatttttttttttttttttttttgagactccggagtctcgctctatcgccaggctg

SEQ ID NO: 277663 - DNA, 120 bp, Artificial Sequence
  ENSG00000128833_50 (sequence is synthesized)
gcccggctgacccttttaatttttaagagtgttcaatccgagatgaatcatttgaagtatttttatatgtatatctatttaaaactaatatattattaaagcttaattgccatgccgttt

SEQ ID NO: 277664 - DNA, 120 bp, Artificial Sequence
  ENSG00000128833_51 (sequence is synthesized)
atcttctctgaaagaacttcaaatcttacctgccaacatattcaccataatttttttattttttaatacctttcatacaataacttttttaaaacaacctcagattgaaaaagcaaccta

SEQ ID NO: 277665 - DNA, 120 bp, Artificial Sequence
  ENSG00000128833_52 (sequence is synthesized)
aattactttcgctctctaatcagcatttcaatgtatttatttttaaattttctcaaaaagtaactaaaaaattgtgtcggaccctacttttgagaaatctacgtttcccaagttttatgg

SEQ ID NO: 277666 - DNA, 120 bp, Artificial Sequence
  ENSG00000128833_53 (sequence is synthesized)
gaactggctattccttgtcccggcacaccttctcattccttcctttcagagcctaaaacctcatttgataagcactcctagtctctggcctgtggatccagtgctattctgtcaccaacc

SEQ ID NO: 277667 - DNA, 120 bp, Artificial Sequence
  ENSG00000128833_54 (sequence is synthesized)
taagaatcccaattgcaccttctgtttctgacagtcacaggtgacagctgtgattctataatacagactggtgtcttagaggtaggaataatacatgattatgaagcatcaccctgctaa

SEQ ID NO: 277668 - DNA, 120 bp, Artificial Sequence
  ENSG00000128833_55 (sequence is synthesized)
tcaccctgctaatacataataatgtctttttatattataagtgattgagtttagttcatttcaatacattgtacatgaaaaaatgaaaagtagaactttgtaatactttaatcaataaaa

SEQ ID NO: 277669 - DNA, 120 bp, Artificial Sequence
  ENSG00000128833_56 (sequence is synthesized)
aggacctggacctgctgactctttacctaaatctttactgcataaccccagccgcagctcctgagctccctccgctttatgtcttcgtctgtgagctggactctcagagggcacccattc

SEQ ID NO: 277670 - DNA, 120 bp, Artificial Sequence
  ENSG00000128833_57 (sequence is synthesized)
taaggctcttcaaaggataattgggccttttcagcagcagctgtactcactgatgtactcataaagaggaatcactacttggagaaattcttcaggatacaatacagtacagttttaatg

SEQ ID NO: 277671 - DNA, 120 bp, Artificial Sequence
  ENSG00000128833_58 (sequence is synthesized)
tatctgaaagccacagacatttacgtgcaaaccagccagaatggggtaggagagtagtcacattgtgagacctgtgaaagctgcttttgtgtatttagctgattgtttgcctctgtctac

SEQ ID NO: 277672 - DNA, 120 bp, Artificial Sequence
  ENSG00000128833_59 (sequence is synthesized)
cctgtacagcctccagaaggagtaggcaggccaggaatgtttctgatcagattcaagtcatacttaacatgtagctttgatgagtgtgtgtttaacagttccttatttgtttttgtggcg

SEQ ID NO: 277673 - DNA, 120 bp, Artificial Sequence
  ENSG00000128833_60 (sequence is synthesized)
agatacatgagttccaactgtactactttaaagacgaatgtgttgttagaagaccacacttctgattttggatgtactgaagttactgaatttcattaacctcttatcagtttattttct

SEQ ID NO: 277674 - DNA, 120 bp, Artificial Sequence
  ENSG00000128833_61 (sequence is synthesized)
atatgaaattgtgataatcaagacagcataattcttccttatgatgaaagctatatttttttctgaagttctatttgattaaactggactatattacagtggcaacataggttaactcaa

SEQ ID NO: 277675 - DNA, 120 bp, Artificial Sequence
  ENSG00000128833_62 (sequence is synthesized)
gaactgtggcagcatctggccttctctgcatgaccagcgtggtgtggcatggatcacacagctgggctggcttgccctcctgtgcttctgtgcccagttgataacagcagtctttgggga

SEQ ID NO: 277676 - DNA, 120 bp, Artificial Sequence
  ENSG00000128833_63 (sequence is synthesized)
aggaaatcacagttatcttacccgccaaggccacgctcccttcccatttggggctcaccagagcctgatcatcctgccctgctggcctcctgcctatcccattcatttcatcccactcct

SEQ ID NO: 277677 - DNA, 120 bp, Artificial Sequence
  ENSG00000128833_64 (sequence is synthesized)
gcccccagtttaggctcacggcatcacctgccttgcactctgatggcaccgtgctccacctcccacctccttcccatcttcctacatcagagcctgattgagacactgccctgcacctgc

SEQ ID NO: 277678 - DNA, 120 bp, Artificial Sequence
  ENSG00000128833_65 (sequence is synthesized)
ctttaaggcccgtgtttcctacagaatagcattcagtctctgacgtgatattcaaagccctccatagcctgggtgcattcataagaatggaagctccatgagggcaggggccacacttgt

SEQ ID NO: 277679 - DNA, 120 bp, Artificial Sequence
  ENSG00000128833_66 (sequence is synthesized)
ctggtcattcatacccagacctagcatggtggctgtcatagaaggtgttcaacaaatatgtttttaaaataacaaatggtgcacatctatttttctaacctcattgacgtctaattttct

SEQ ID NO: 277680 - DNA, 120 bp, Artificial Sequence
  ENSG00000128833_67 (sequence is synthesized)
tcatccatcttattctagtgattccaaacaaactccttttctgagtatttcaggcactgtagagcctccatgcctttactcatgctggtcccttatcctgaaagccttttccagccttca

SEQ ID NO: 277681 - DNA, 120 bp, Artificial Sequence
  ENSG00000128833_68 (sequence is synthesized)
ctgtgtacagacatcctactgcattgggggctggctcacatacccactttccccaagcagaataactgtttttttcccctctcacttacagatctagttaggtggtattttatttttcct

SEQ ID NO: 277682 - DNA, 120 bp, Artificial Sequence
  ENSG00000128833_69 (sequence is synthesized)
ctttcttggccatttgttagtctttctgtacatgaggttgtaaactctaaaggtaaggacattatcttcacctctagtcatttagacaggggcagcaaactttttctgtaaaggacgaga

SEQ ID NO: 277683 - DNA, 120 bp, Artificial Sequence
  ENSG00000128833_70 (sequence is synthesized)
tgataactatttaaggcattgggggcttgcagtctctcctgctgctgtgtcatgaaagcagccgtgggggatatgtaaatagtacgtgattgagcaagtgcagcaccagtgcacagtctc

SEQ ID NO: 277684 - DNA, 120 bp, Artificial Sequence
  ENSG00000128833_71 (sequence is synthesized)
atcatcgtctctgtgggtacctgagtggaggtgaatcgactggcctgaatgaaaagagtgaaagttcccatgtggttcctcaaggacagggaactggggactggcctcaagtaggcatta

SEQ ID NO: 277685 - DNA, 120 bp, Artificial Sequence
  ENSG00000128833_72 (sequence is synthesized)
aagagatacagggatgctgtggaagaggtcagctgcgggcgtgtgagacgggatggaaatatgcggactctctgtgaaaaagatgagcgctgccagcttttcctatgaagtggatttctg

SEQ ID NO: 277686 - DNA, 120 bp, Artificial Sequence
  ENSG00000128833_73 (sequence is synthesized)
cagagcaaatcagattttgctatcaacttccattaccaaagggagcctaccttttaggaaaggcgagatcagaggattagagtctaggggaagggaggaggttaataatgagagaaatgc

SEQ ID NO: 277687 - DNA, 120 bp, Artificial Sequence
  ENSG00000128833_74 (sequence is synthesized)
aacataggttttctctttctttcaagttttgcaaaatgatgacaggcccaaagagccctggctggctgcctccctttcttccaggatgaccttggtctcctatcacttgtccttaaggtc

SEQ ID NO: 277688 - DNA, 120 bp, Artificial Sequence
  ENSG00000128833_75 (sequence is synthesized)
tatgccctggaaatgtcttcccctgaacagcgatgcaaagctagggtagggttttcatctctggtgtagtgaaaagagcagtcagcataaaaaccagatgccctagattcaaatcttgcc

SEQ ID NO: 277689 - DNA, 120 bp, Artificial Sequence
  ENSG00000128833_76 (sequence is synthesized)
tttgtctggctgggcagccttggctaaagtcccttaccctctctgaattttagtttcctcatataaaaaaatgagaataacaaaaaaggactgacagaattgttgtgagaataaaatcat

SEQ ID NO: 277690 - DNA, 120 bp, Artificial Sequence
  ENSG00000128833_77 (sequence is synthesized)
cagatgaaatacgttagccaaatgcctaccataatgaattttagtttcctcctatataaaatgagaataacaaaaagagattgacagaattgttgtgagaataaaatggtcagatgaaat

SEQ ID NO: 277691 - DNA, 120 bp, Artificial Sequence
  ENSG00000128833_78 (sequence is synthesized)
ggttatttataaactgactactaggatatcattaaaaccagaagctttgaggggtatttaaaacttgtagaagacatagcaaacgtttaagcttttaagtgtcaaaaaatatctataaac

SEQ ID NO: 277692 - DNA, 120 bp, Artificial Sequence
  ENSG00000128849_0 (sequence is synthesized)
gcactccggccgggctctgctggctgcggcgggagctggacgcgggaggaggcggcggcggcgctggaacagtgaaccatggagctgtatttcggtgaatatcaacatgtgcagcaggaa

SEQ ID NO: 277693 - DNA, 120 bp, Artificial Sequence
  ENSG00000128849_1 (sequence is synthesized)
tatggggtccatctgagactcgcaagtgatgatacccaaaaatcaaggagttcccagaactccaaggcaggctcctacggtgtcagtattcgggtccagggaattgatggtcacccctat

SEQ ID NO: 277694 - DNA, 120 bp, Artificial Sequence
  ENSG00000128849_2 (sequence is synthesized)
attgtcctgaataacacagaacggtgcctagcaggcacatcgttttctgaaaatgggccaccctttccacctccagtgataaataacctgcctctacattccagcaatggttctgtgcca

SEQ ID NO: 277695 - DNA, 120 bp, Artificial Sequence
  ENSG00000128849_3 (sequence is synthesized)
aaggagaacagtgaagaacttcagcttccagaaaacccatacgcccagcctagcccaataagaaacctgaaacagcccctgctccatgagggcaagaatggagttctagatcgcaaagac

SEQ ID NO: 277696 - DNA, 120 bp, Artificial Sequence
  ENSG00000128849_4 (sequence is synthesized)
gggtctgtgaagccatctcacctgctgaactttcagaggcatccagagcttttgcaaccctatgaccctgaaaagaatgagttgaatttacaaaatcaccagccttctgagagtaattgg

SEQ ID NO: 277697 - DNA, 120 bp, Artificial Sequence
  ENSG00000128849_5 (sequence is synthesized)
ctaaaaacgttgacagaagaaggcatcaacaataagaagccttggacttgctttcccaaacctagcaattcccagcctaccagtccctccttggaagacccggccaaatctggtgtgaca

SEQ ID NO: 277698 - DNA, 120 bp, Artificial Sequence
  ENSG00000128849_6 (sequence is synthesized)
gctattcgtttatgcagctccgtggtcatagaggaccccaaaaagcagacctcagtgtgtgtaaacgttcagagctgcaccaaggagagggtgggagaggaggcccttttcactagcggg

SEQ ID NO: 277699 - DNA, 120 bp, Artificial Sequence
  ENSG00000128849_7 (sequence is synthesized)
aggcccctgactgcccacagcccacatgcccaccctgaaaccaagaaaaccaggccagatgttcttcccttccggcgacaggattcagcgggacccgtcctggatggagctcggtcccgg

SEQ ID NO: 277700 - DNA, 120 bp, Artificial Sequence
  ENSG00000128849_8 (sequence is synthesized)
aggtcctcctcgtcatccacaactcccacgtcagccaactctttgtacaggtttttactggatgatcaggaatgtgccatccatgccgacaacgtcaatcgtcatgaaaacagaaggtat

SEQ ID NO: 277701 - DNA, 120 bp, Artificial Sequence
  ENSG00000128849_9 (sequence is synthesized)
attcccttcctgccaggaactggacgggatattgatacaggatcaattcctggtgtggatcagttaattgaaaaatttgatcaaaaacctgggcttcagagaagaggaaggtctgggaag

SEQ ID NO: 277702 - DNA, 120 bp, Artificial Sequence
  ENSG00000128849_10 (sequence is synthesized)
cgaaacagaattaatacagatgacaggaaaagatccagaagcgtggatagcgcctttccttttggcctccaagggaactcggagtacctgattgaattcagtaggaacttgggcaagtca

SEQ ID NO: 277703 - DNA, 120 bp, Artificial Sequence
  ENSG00000128849_11 (sequence is synthesized)
agcgaacacctcctccggccttcccaggtgtgcccgcagcggccactgtctcaggagcgccgtgggaaacagagcgtgggccgcacctttgcaaagctgcagggagcagcgcacggggct

SEQ ID NO: 277704 - DNA, 120 bp, Artificial Sequence
  ENSG00000128849_12 (sequence is synthesized)
tcatgtgcccactccaggcctccccagccgaacatagatgggaaagttctggaaaccgaaggtagtcaggaaagtacagtgatccgtgcgccctcccttggtgcacagagtaaaaaggag

SEQ ID NO: 277705 - DNA, 120 bp, Artificial Sequence
  ENSG00000128849_13 (sequence is synthesized)
gaggaggtgaaaacagccaccgctacgctgatgttacagaaccgggcaacagcaacttcgcctgattctggtgccaagaaaatttccgtgaagacatttccttcggcctcaaatactcag

SEQ ID NO: 277706 - DNA, 120 bp, Artificial Sequence
  ENSG00000128849_14 (sequence is synthesized)
gccacaccggatctcttaaagggccagcaagagctcactcagcaaaccaatgaggagacagctaagcagattctctacaattacctcaaagaaggaagcactgataatgacgatgctact

SEQ ID NO: 277707 - DNA, 120 bp, Artificial Sequence
  ENSG00000128849_15 (sequence is synthesized)
aaaaggaaagtcaacttggtctttgagaaaatccagaccttaaagtctcgagcagctgggagcgcccaaggaaataaccaagcttgtaattccacatctgaagtcaaagatctattggaa

SEQ ID NO: 277708 - DNA, 120 bp, Artificial Sequence
  ENSG00000128849_16 (sequence is synthesized)
cagaaaagcaagttgaccatagaagtggctgaacttcagagacagcttcaactggaagtcaagaatcaacagaacattaaagaagagagagagaggatgagagcaaacctagaagagctc

SEQ ID NO: 277709 - DNA, 120 bp, Artificial Sequence
  ENSG00000128849_17 (sequence is synthesized)
cgaagccaacacaacgaaaaggtggaggagaactccacattgcagcaacgactggaagaaagtgaaggggagctccggaagaatctggaggagctattccaggtgaagatggaacgggag

SEQ ID NO: 277710 - DNA, 120 bp, Artificial Sequence
  ENSG00000128849_18 (sequence is synthesized)
cagcatcagactgagatcagggatctccaggaccagctctcagaaatgcacgatgaactggacagtgcaaagcgatcggaggacagggagaagggagctctgattgaggagctcttacag

SEQ ID NO: 277711 - DNA, 120 bp, Artificial Sequence
  ENSG00000128849_19 (sequence is synthesized)
gcaaaacaggatcttcaagatctgctgattgccaaagaggagcaagaagacctcttgagaaagcgagagcgtgaactcaccgccctgaagggagccctgaaagaagaggtttccagccat

SEQ ID NO: 277712 - DNA, 120 bp, Artificial Sequence
  ENSG00000128849_20 (sequence is synthesized)
gatcaggagatggacaagctgaaggagcaatatgatgctgagttgcaggccctgagggagagtgtggaagaagcaaccaagaatgtcgaggtcttggcgagcaggagcaacacttcagag

SEQ ID NO: 277713 - DNA, 120 bp, Artificial Sequence
  ENSG00000128849_21 (sequence is synthesized)
caagaccaggcggggactgaaatgcgcgtgaagcttctgcaggaggagaatgagaagctgcagggaagaagcgaagagctggagcggagagttgctcagcttcaaaggcagatcgaggac

SEQ ID NO: 277714 - DNA, 120 bp, Artificial Sequence
  ENSG00000128849_22 (sequence is synthesized)
ctgaaaggcgatgaagccaaggcgaaggaaacgctgaagaagtacgagggagaaatacgacagttagaggaggcccttgtgcacgccagaaaggaagaaaaagaagctgtgtcagccaga

SEQ ID NO: 277715 - DNA, 120 bp, Artificial Sequence
  ENSG00000128849_23 (sequence is synthesized)
agggccctggagaatgaactggaggctgctcagggaaatctgagtcagactacccaggagcagaagcagttgtctgagaagctcaaagaggagagtgagcagaaggagcagctaagaagg

SEQ ID NO: 277716 - DNA, 120 bp, Artificial Sequence
  ENSG00000128849_24 (sequence is synthesized)
ttgaagaacgagatggagaatgagcggtggcacctgggcaaaaccattgagaaactgcagaaggagatggcagacattgttgaggcctcccgtacctcaaccctggagctccagaaccag

SEQ ID NO: 277717 - DNA, 120 bp, Artificial Sequence
  ENSG00000128849_25 (sequence is synthesized)
ctggatgagtataaggagaaaaaccgcagggagctcgcagaaatgcaaagacagttgaaggagaaaacgctggaggcagaaaagtcccgactgacagccatgaaaatgcaggatgagatg

SEQ ID NO: 277718 - DNA, 120 bp, Artificial Sequence
  ENSG00000128849_26 (sequence is synthesized)
cgtctgatggaggaagagttacgggactaccagagagctcaggatgaagcactcacaaaaaggcagcttctggagcagacgctgaaggacctggagtatgagctggaagccaagagtcac

SEQ ID NO: 277719 - DNA, 120 bp, Artificial Sequence
  ENSG00000128849_27 (sequence is synthesized)
ctcaaagatgaccgcagcaggctggtcaagcagatggaggacaaggtgtctcaactggagatggaactggaagaagagagaaacaactcagatttgctgtctgagaggatcagtaggagc

SEQ ID NO: 277720 - DNA, 120 bp, Artificial Sequence
  ENSG00000128849_28 (sequence is synthesized)
agggaacagatggagcagttgaggaatgagctacttcaggagagagctgcgagacaagacttggagtgcgacaagatttccctggagaggcagaacaaggacttaaagagccggattatc

SEQ ID NO: 277721 - DNA, 120 bp, Artificial Sequence
  ENSG00000128849_29 (sequence is synthesized)
cacctggaaggttcctacaggtccagcaaagaggggctggttgtgcagatggaggccaggatcgcggagctggaggaccgcctggagagtgaggagagggatcgggccaatcttcagctc

SEQ ID NO: 277722 - DNA, 120 bp, Artificial Sequence
  ENSG00000128849_30 (sequence is synthesized)
gtgaaggagctggtgatgcaggtggatgatgagcacctgtcattgactgatcagaaggaccagctgagcttgcgtttgaaagccatgaagcggcaggtggaggaggctgaggaggaaatc

SEQ ID NO: 277723 - DNA, 120 bp, Artificial Sequence
  ENSG00000128849_31 (sequence is synthesized)
gacagactggaaagttctaaaaagaagctgcagagggagctggaggagcagatggacatgaatgagcatctgcaggggcagctcaactccatgaagaaggacttaagactgaagaagctg

SEQ ID NO: 277724 - DNA, 120 bp, Artificial Sequence
  ENSG00000128849_32 (sequence is synthesized)
ccgagtaaagtgctggatgacatggatgacgacgatgacctcagcacggatgggggaagcctctatgaggcgcctgtgagctacacattctccaaggacagcaccgtcgccagccagatc

SEQ ID NO: 277725 - DNA, 120 bp, Artificial Sequence
  ENSG00000128849_33 (sequence is synthesized)
tgagtgctctcccgggctgtggaagtacctgtcattcctgcaggagctgcagccacccaaagtgggaggcagggaggggagcatctgtctgccactgagaccaatcacagcctctttgca

SEQ ID NO: 277726 - DNA, 120 bp, Artificial Sequence
  ENSG00000128849_34 (sequence is synthesized)
cagcatgccagctcctcagtgttacattcctcgccagggtctctcagtgggtcttcgacagagagcttttgcagtttaaaatgttgggatgcctgaggaccaggagccaccacccactgg

SEQ ID NO: 277727 - DNA, 120 bp, Artificial Sequence
  ENSG00000128849_35 (sequence is synthesized)
ggtgttgtgagagatacactttggtaggctgaggcccctgttccacagccactatttgcattgctgtccctgccccctcatcactccccctgccaagacaaagggtccagaaggctagga

SEQ ID NO: 277728 - DNA, 120 bp, Artificial Sequence
  ENSG00000128849_36 (sequence is synthesized)
cttacttaatagcactgtgcagggaggaaaccatgtatagcttgtacatattttaaaccagaccttctcacgaactgctgctgttgggtttggaatgtgatggaggcttggtagggtggc

SEQ ID NO: 277729 - DNA, 77 bp, Artificial Sequence
  ENSG00000128849_37 (sequence is synthesized)
ctgttgggtttggaatgtgatggaggcttggtagggtggctggtttgtaaagttcatgcatctatattgagtagagg

SEQ ID NO: 277730 - DNA, 64 bp, Artificial Sequence
  ENSG00000128849_38 (sequence is synthesized)
gagtattcttttttaaaatatgaagctattagattttaagtgttgaggagcagaggtgagaaga

SEQ ID NO: 277731 - DNA, 120 bp, Artificial Sequence
  ENSG00000128849_39 (sequence is synthesized)
gctattagattttaagtgttgaggagcagaggtgagaagagagagagagagagaaagtcaaataaagtcaaagaccagtttggaaaccaaagttggaaaagaagaattgtagtggtcatg

SEQ ID NO: 277732 - DNA, 120 bp, Artificial Sequence
  ENSG00000128849_40 (sequence is synthesized)
gacagctaagactgagcatagcagttcacatggtctgggtaaacaagtcactggcacaggggaaagccagaaggttgcttgtgtctgtgactgcagctatggccttgtttgcttagttta

SEQ ID NO: 277733 - DNA, 120 bp, Artificial Sequence
  ENSG00000128849_41 (sequence is synthesized)
tctggaattctgttataatttctgaactgttctgagacctgttcccagtcactgattgcaatttcttttacacaggttgggtagggagagttgtaggtaaggccttaaacaaatgaggcc

SEQ ID NO: 277734 - DNA, 120 bp, Artificial Sequence
  ENSG00000128849_42 (sequence is synthesized)
gtttctggaaggatagggctgtgtggtcatgtcccacagcaagcttttgggatcgggggaataagagggtatgggggaaaggttcatagacttaggtgtgagaatgaggtgggaggtgtc

SEQ ID NO: 277735 - DNA, 120 bp, Artificial Sequence
  ENSG00000128849_43 (sequence is synthesized)
tggtaaggtcatgggggaagggagatgagagaggagataggcagatgtgggtatggggcccagtgtgagaaggaagacagagaagttcttgaaagctgggggatgtgtgggcaagaggtg

SEQ ID NO: 277736 - DNA, 120 bp, Artificial Sequence
  ENSG00000128849_44 (sequence is synthesized)
gattgagcaggatctcagggttatgtcgaggaagggaagaaagaaacagaagtcaggcagaggcgtgtctgtgcaaactggaggactccttccaacttcctggaacaaagcgacatcgcc

SEQ ID NO: 277737 - DNA, 120 bp, Artificial Sequence
  ENSG00000128849_45 (sequence is synthesized)
agcagcaggctggcagggagtggttgaggtctgggggccaggccacatggctggagaggaatttcagggagcatagcatcgggaggatgctacatatccagggactccctcctggccttc

SEQ ID NO: 277738 - DNA, 120 bp, Artificial Sequence
  ENSG00000128849_46 (sequence is synthesized)
ctgtgtcacttcacaatgtgacagtccccaggcatgcccacaggccaggcccagtcacagctgggcttccacaggtcagaatatgggacaggacatggtcagggagaggaccctgtgagt

SEQ ID NO: 277739 - DNA, 120 bp, Artificial Sequence
  ENSG00000128849_47 (sequence is synthesized)
tggtgacatatatgtggcagagatggtagtgttcagctgcttcagcagtgtccccaaccatcccaatagggtgggggcctgtgggccagaggactccatgacagtagccatggagtccca

SEQ ID NO: 277740 - DNA, 120 bp, Artificial Sequence
  ENSG00000128849_48 (sequence is synthesized)
cctgtgccaggtcagagcccacccggcaggtttcagagtggtcagcccagtttaagggtgggagtctggagccagacagccaagccccttccacatctacagggtcactgtcatcctcac

SEQ ID NO: 277741 - DNA, 120 bp, Artificial Sequence
  ENSG00000128849_49 (sequence is synthesized)
cacagccaggggtgattctcacctctgcctgcttatgtggggtgtggccgattcctccctttagtcattcattcatttagcacatatttattgggcatcggtgatgtgtcaggcacagtc

SEQ ID NO: 277742 - DNA, 120 bp, Artificial Sequence
  ENSG00000128849_50 (sequence is synthesized)
cttggcacacagaatacagcagtgaattaaacaggcaaaaattcctcccctcctggagctcagtgtcaggaaagggggtgataaatgacaatcaaatcgacatggaggttgagcacctct

SEQ ID NO: 277743 - DNA, 120 bp, Artificial Sequence
  ENSG00000128849_51 (sequence is synthesized)
gtactcagccctctgtctgtccttctgaggacgcaacaagcctggttccctagagctcactttgaccctcaatatgttcataatttccctgctgcttctcccatcgttagacatctgcca

SEQ ID NO: 277744 - DNA, 120 bp, Artificial Sequence
  ENSG00000128849_52 (sequence is synthesized)
gtaagcctgctgagagaagcctcagcccactcatacctagagacgctgctggggaaggtcagcacacccaagaactttgggagtgtgtgtctgttttggtttgtgagaaagtagctgccc

SEQ ID NO: 277745 - DNA, 120 bp, Artificial Sequence
  ENSG00000128849_53 (sequence is synthesized)
ctcattctggccagttctttccagtagccatggggctggctacaagaagcaaaactgcccatgcaaagagaacacaggtcacttttcaaaacacttgcatcattaccctaaaaataggct

SEQ ID NO: 277746 - DNA, 120 bp, Artificial Sequence
  ENSG00000128849_54 (sequence is synthesized)
gttatgcgttttgacaattgcgctatcctacactctgagggagttggcaacgcatgcggtatagtggagtgggaagagttgagactgaaagttaagagaagggttttcaagtcccggctc

SEQ ID NO: 277747 - DNA, 120 bp, Artificial Sequence
  ENSG00000128849_55 (sequence is synthesized)
atctcaccccagtgactttgacagtgtgctcactctcagagccatggattacctggaacaaagtgcagattagtgcccacggtcctttccaggtataacatgctatcgttctttaatttt

SEQ ID NO: 277748 - DNA, 120 bp, Artificial Sequence
  ENSG00000128849_56 (sequence is synthesized)
attatatatacatacttttcttctgttttttgctttaagaactaaccccgatcaagagtattttctttagctagcttaaaaagaaaacatatattttatgtaaaaacacatacatggcca

SEQ ID NO: 277749 - DNA, 120 bp, Artificial Sequence
  ENSG00000128849_57 (sequence is synthesized)
aatgcaatactgaagagacaatcatcctgtatcttttatggtttttcctgcttctgagtgtcgttctacaatgcccgttgacttattccattgcgtctctgctttagggtatggtttggt

SEQ ID NO: 277750 - DNA, 120 bp, Artificial Sequence
  ENSG00000128849_58 (sequence is synthesized)
cgctttggttgtcatgagaaagagacattctccttgcagctacctccatgtgagtgaattcctggataaagcaagatttcctttcaataaacgctgtcacccaatgggaattttgactct

SEQ ID NO: 277751 - DNA, 120 bp, Artificial Sequence
  ENSG00000128849_59 (sequence is synthesized)
atttcttgttaccgcgcaagtgggataacctccccaccagtgtctagacacagtaggtgctcaataaataggtgtgggtttgcggtggcagaagagcgctatcccttaagtttctgacag

SEQ ID NO: 277752 - DNA, 120 bp, Artificial Sequence
  ENSG00000128849_60 (sequence is synthesized)
tgagggggaaaaaggctaagcagggaaaggaagggaaaggggtaaactgagctcggcgcagtcgagagcgcgaaatagggagggcttcctgcaggccaggaatttggagaggccgaggct

SEQ ID NO: 277753 - DNA, 120 bp, Artificial Sequence
  ENSG00000128849_61 (sequence is synthesized)
tatcctgtcgtacacaagtcctcggcgtgctcggccggaccatcccctggaaagaaaggggcgtgtgacctttctctccccgatcctccagaccactgcgccgcccagggaggtcatccc

SEQ ID NO: 277754 - DNA, 120 bp, Artificial Sequence
  ENSG00000128849_62 (sequence is synthesized)
cgagagagcccccgcctcactcggagcacacattctagctctccccgggacttttccaagttgcatcactgtttggcctctagacagctggaacagtgaaccatggagctgtatttcggt

SEQ ID NO: 277755 - DNA, 120 bp, Artificial Sequence
  ENSG00000128849_63 (sequence is synthesized)
actgtttggcctctagacagccaaagccttttgtcacccaggctggagtgccatggcacgatcatggttcactgcagcctcagcctcctaggctcaagccatcctcccatctcaacctcc

SEQ ID NO: 277756 - DNA, 120 bp, Artificial Sequence
  ENSG00000128849_64 (sequence is synthesized)
cgagtagctaggaccacaggcacgcaccaccaaaccagggagtttatagtccagtggaagagaaagactcagaaatcacataatcatagtccaacacagaatccatgcatagggcactgt

SEQ ID NO: 277757 - DNA, 120 bp, Artificial Sequence
  ENSG00000128849_65 (sequence is synthesized)
tggagcactgggagagtctacttcaatctgtgggttcaggacggggtcgctaaagtcttgcagaaagaagtcagtcttctgggatatggcttcttcgggaagatactgttaatggggatt

SEQ ID NO: 277758 - DNA, 120 bp, Artificial Sequence
  ENSG00000128849_66 (sequence is synthesized)
ccatcttggattgtgagtgtgtctccaacaccatcttgaaggtgcagtgacttgcatatagtaggtgcttgatatttaccaagtaccccctgtgggtcaggccctactctcaccctaagg

SEQ ID NO: 277759 - DNA, 120 bp, Artificial Sequence
  ENSG00000128849_67 (sequence is synthesized)
atacagcaggaagcaaagcagaggtggagaagatcccactaaacacacaggccgcttggaatgttgggccatctgtccttttgacatgaattttccctgtaatgggggtagagctggtaa

SEQ ID NO: 277760 - DNA, 120 bp, Artificial Sequence
  ENSG00000128849_68 (sequence is synthesized)
ctgttggatcatctgattattggagacagaagtcctgtcacttgcccctgctgttaggaggtgggcttcctgaatggctttctgtatacatgaagaatttcaagaccttccgttaaggtg

SEQ ID NO: 277761 - DNA, 120 bp, Artificial Sequence
  ENSG00000128849_69 (sequence is synthesized)
gtcagagctaagtttcagcgtttacaagaggtctcttggctgacttgctataacttacagcaacctgatgtttggacaccttttcctttttttgtttttagtaaatatgatgagaaaaaa

SEQ ID NO: 277762 - DNA, 120 bp, Artificial Sequence
  ENSG00000128872_0 (sequence is synthesized)
gttgatcgccgcgctcgccccggccacggcgccgcccctgttctcccggccccgctccaccggggctgacggactgacggccagcacagccggctccgggatgagcgcacggacggtatt

SEQ ID NO: 277763 - DNA, 120 bp, Artificial Sequence
  ENSG00000128872_1 (sequence is synthesized)
ctgaagtctcaggaaactggaccatttaaatgtgcatggcccatgagaaaggcttataagaagccatggcactcccctttcaaaaagagctggagaaatacaagaacattgatgaagatg

SEQ ID NO: 277764 - DNA, 120 bp, Artificial Sequence
  ENSG00000128872_2 (sequence is synthesized)
agcttcttggcaaactctcagaagaggaactgaaacagttggaaaatgttctagatgacctagatcctgagagtgccatgctgccagctggatttcgacagaaagaccagacacagaagg

SEQ ID NO: 277765 - DNA, 120 bp, Artificial Sequence
  ENSG00000128872_3 (sequence is synthesized)
cagccaccggcccctttgaccgcgagcacctcctcatgtacctggagaaggaggctttggaacagaaagacagagaggactttgtgcccttcactggagaaaagaaagggagagtcttta

SEQ ID NO: 277766 - DNA, 120 bp, Artificial Sequence
  ENSG00000128872_4 (sequence is synthesized)
tccctaaagaaaagcctatagaaactcgtaaagaagaaaaagtgacccttgacccagaactggaagaagctttggccagtgcctctgacaccgaactctatgatcttgcagctgtccttg

SEQ ID NO: 277767 - DNA, 120 bp, Artificial Sequence
  ENSG00000128872_5 (sequence is synthesized)
gagtacacaatttgctcaacaatccaaagttcgatgaagaaacagccaacaataaaggtggcaaaggacctgtcagaaatgttgtcaaaggtgaaaaagtaaagccagtatttgaggaac

SEQ ID NO: 277768 - DNA, 120 bp, Artificial Sequence
  ENSG00000128872_6 (sequence is synthesized)
caccaaatcccacaaatgtggaaataagcctgcagcagatgaaagccaatgatcctagcttgcaagaagtcaacctcaacaacattaagaacattccaattccaaccctgagggaatttg

SEQ ID NO: 277769 - DNA, 120 bp, Artificial Sequence
  ENSG00000128872_7 (sequence is synthesized)
caaaggctctggagaccaacactcacgtgaagaagttcagcctggccgcaactcgcagcaatgaccctgtggccattgcttttgcagacatgctgaaagtaaacaagaccttgacaagtc

SEQ ID NO: 277770 - DNA, 120 bp, Artificial Sequence
  ENSG00000128872_8 (sequence is synthesized)
taaacatagaatccaattttatcactggaactgggatcctggccctggtagaggcactgaaagaaaatgacaccttgacagaaatcaagattgacaaccagaggcagcagttgggaacag

SEQ ID NO: 277771 - DNA, 120 bp, Artificial Sequence
  ENSG00000128872_9 (sequence is synthesized)
ctgtagagatggaaattgcccagatgctggaggagaattcaaggatcctcaagtttggataccagtttaccaagcaagggccacgaacaagggtggcagctgccatcacaaagaataatg

SEQ ID NO: 277772 - DNA, 120 bp, Artificial Sequence
  ENSG00000128872_10 (sequence is synthesized)
acctggttcgtaagaagagagttgaagcagaccgaaggtaaacttccttgaggagaagtgaagtttcactgtggtatggccattgaaaaacaaaaactcttcttcttccccatcaggacc

SEQ ID NO: 277773 - DNA, 120 bp, Artificial Sequence
  ENSG00000128872_11 (sequence is synthesized)
attttatcaaagttcgttcatttccgttaaccacataactaataatttaattgttattcttttttagcactacttatttatcttggattttgtaatatatgcaattgttttatttgctca

SEQ ID NO: 277774 - DNA, 120 bp, Artificial Sequence
  ENSG00000128872_12 (sequence is synthesized)
tgggcacttctggcaacttgacaaatggaccgatgcagattttagagagtgacgacatggaaaatgaatttaaccactttcttattgggttgtcttgctttcttacatgaacttgttttt

SEQ ID NO: 277775 - DNA, 120 bp, Artificial Sequence
  ENSG00000128872_13 (sequence is synthesized)
ttaatcactgaaaggaatttagtgtataatatgtgtttgtaactgtgattatgatagaggcctatctctgtttacatgcatagctttgagttaggctaaatacatcagaagtgttctact

SEQ ID NO: 277776 - DNA, 120 bp, Artificial Sequence
  ENSG00000128872_14 (sequence is synthesized)
gaccacataagaagttagtattgccaatctttcactgcatgtgaaaatgtgaccaatttagcacaaattctctcttagttccagaaaaatcagtaaatgcacatgccctgttgattggag

SEQ ID NO: 277777 - DNA, 120 bp, Artificial Sequence
  ENSG00000128872_15 (sequence is synthesized)
atcagtagtgtcatcttcataaagcaagacaacattatgacactttaaaacagtagcaaagaagtctatttattaacccacaaatgtagcatcaagccagactcacaggtagcaaaatga

SEQ ID NO: 277778 - DNA, 120 bp, Artificial Sequence
  ENSG00000128872_16 (sequence is synthesized)
attacacacctacttttactgactattcaacataaattgaatctttaacatgactttaaaggctatttacaaagctgttttaaagtttttcaaacatgatagaaattttctaaattttag

SEQ ID NO: 277779 - DNA, 120 bp, Artificial Sequence
  ENSG00000128872_17 (sequence is synthesized)
taagagagaagcttttaaaacagtacattcctgaataaaacaacaatattgtatcttaatcaaggctgtctgatgcagatgattgcattttttggcaaattttagaagcatttattgctt

SEQ ID NO: 277780 - DNA, 120 bp, Artificial Sequence
  ENSG00000128872_18 (sequence is synthesized)
tgtctttagtgtaacaagatcactggattaaatataaacattcaggttaattatctagatttttgtccacagtatatgatccatccagacatttgcaaacgtcaggagaaaaatgtgaat

SEQ ID NO: 277781 - DNA, 120 bp, Artificial Sequence
  ENSG00000128872_19 (sequence is synthesized)
tatttatccagatgcatgtcatctcaaggacaaagcctgtgaaagtacaagtgagatggttgcattgtagtatgcattaatctttcaatgtagtggtgtaaaaatgcagtgctaaactaa

SEQ ID NO: 277782 - DNA, 120 bp, Artificial Sequence
  ENSG00000128872_20 (sequence is synthesized)
tgaagcaggtgactgcagcctttggctcaagctcacaactctgataactgtcagtgcctgaggttgtgattggtgacattctgacactgcccaaggcaactcaccctctattcctccttt

SEQ ID NO: 277783 - DNA, 120 bp, Artificial Sequence
  ENSG00000128872_21 (sequence is synthesized)
ctcccctccctttcttccaattcattgtcttttttttcctcttttctctgtaatttgttactaaacaaattccagaatttgtttagtagctgagtgttcctgagttgcctagtagcaata

SEQ ID NO: 277784 - DNA, 120 bp, Artificial Sequence
  ENSG00000128872_22 (sequence is synthesized)
aaacaagtgaataggaaaataattaatatattattctatttagcttgtaaaacacatggaatctgtttaagatagcccttgtaaaattgaacatttacctgtattgtaagtacccacatc

SEQ ID NO: 277785 - DNA, 120 bp, Artificial Sequence
  ENSG00000128872_23 (sequence is synthesized)
tgtgtctctgaagtcctttgaaacatctcattatcttgaaatttttttaatgtttgagaacaccataagcagaatattctaacacctttggcccctgaaaatcctttaattagtttatgg

SEQ ID NO: 277786 - DNA, 120 bp, Artificial Sequence
  ENSG00000128872_24 (sequence is synthesized)
cttcatctccttatctatttaaaaaacatagtaaataatgtttatggttttcagtctgatttttccttccctttcacccatttaggtgtgatgtgttggagtcaacttgtacaggcttgc

SEQ ID NO: 277787 - DNA, 120 bp, Artificial Sequence
  ENSG00000128872_25 (sequence is synthesized)
caactgttatattttcaagaattttgcaaactggttgttcaatacagccattatttaaaattaaatgatgtgcacttacaactgaatgaattatattaaggacagaagtaacaaatactg

SEQ ID NO: 277788 - DNA, 120 bp, Artificial Sequence
  ENSG00000128872_26 (sequence is synthesized)
tactcaaaaatcttacattttactattttctaacctcttagattatttacatctagtaggtatgtatgtagaaatattaccaaacagtatgctactgaacgtatcctctcaactccatgt

SEQ ID NO: 277789 - DNA, 120 bp, Artificial Sequence
  ENSG00000128872_27 (sequence is synthesized)
tcactaccttcttgttactacagtggcttgaaattggccatggtagaaatatttacaccacagaaattagcaatatgtaagaaattggggttttctccctctccagattgctggttgata

SEQ ID NO: 277790 - DNA, 120 bp, Artificial Sequence
  ENSG00000128872_28 (sequence is synthesized)
aacattcatcagcacaccactgggtgaaattatacatttttttatacatatgtttcgcttatcatgttgccgaagggaagaacatttctcttagatgtcttttctcctctttggatttgt

SEQ ID NO: 277791 - DNA, 90 bp, Artificial Sequence
  ENSG00000128872_29 (sequence is synthesized)
aacatttctcttagatgtcttttctcctctttggatttgttacaaacctgtttaagtgctgagtccctgacctgcctctccaagtaagcc

SEQ ID NO: 277792 - DNA, 120 bp, Artificial Sequence
  ENSG00000128872_30 (sequence is synthesized)
agcattccttgcagccccacagtgctgtgggctgggggctaaagcagttcttggcaaactctggcagaaagcaagaaaaaaagaatcagaattcaatcatggctgtttcttttgtacaag

SEQ ID NO: 277793 - DNA, 120 bp, Artificial Sequence
  ENSG00000128872_31 (sequence is synthesized)
cagttgttgatagtattaaagcaagataatgggacattatcaaaaatatagcactgtttttaccttatgaaatagttgggttgcatgcaacagagtctatgaaatcaaatgttttttact

SEQ ID NO: 277794 - DNA, 120 bp, Artificial Sequence
  ENSG00000128872_32 (sequence is synthesized)
aatcagtttgttttcttattacctgtgtttttaaagtggcttgaaaggtggcatttccatgagtgtgcacatattgatgataacccttagaaaaacatacacttgaggagcctatccatc

SEQ ID NO: 277795 - DNA, 120 bp, Artificial Sequence
  ENSG00000128872_33 (sequence is synthesized)
atttaattagcctaggacttcatctccctctctgcccaaagtgtggaagtggtagctctttcatgatcatgggcacagttaatcctttgctatccattgtgatggggcataatgtatata

SEQ ID NO: 277796 - DNA, 120 bp, Artificial Sequence
  ENSG00000128872_34 (sequence is synthesized)
aaatatttttctatgtatttgttctgccagatactgtgttgagatatttggcaatatctggataactgactgaagggagataacttctccccaggcctatctccctcccccttttagagt

SEQ ID NO: 277797 - DNA, 120 bp, Artificial Sequence
  ENSG00000128872_35 (sequence is synthesized)
tgtgcaggtccactttaagtgtaaaatcactcacctggacttgtgggcttgtatcaccaacatctattatggcacatgtagatgacatttaggagaaaaaccttagaagtctagaaatca

SEQ ID NO: 277798 - DNA, 120 bp, Artificial Sequence
  ENSG00000128872_36 (sequence is synthesized)
tatgattagttcagcactgcagctccccatctgcttatagtgtataactggaagctctttcatcctcatcagcatgattaaatgacttcgtttctttcatctttggagggtataatgtaa

SEQ ID NO: 277799 - DNA, 120 bp, Artificial Sequence
  ENSG00000128872_37 (sequence is synthesized)
ataagtgtcgtgtgtgtatgtgtgtgtgtactgtcagatatctaactaggtatttggctacatctggacaactgattgaagggagatgctctctccccagtcctcttcccttgtcctttt

SEQ ID NO: 277800 - DNA, 120 bp, Artificial Sequence
  ENSG00000128872_38 (sequence is synthesized)
aaattactccctaggctttgcagtttatgttaccaaccaccacattttatagctatgtagaggatgactcttaggaaataaatattagaagcctagaaatcatttagttgttctagcacc

SEQ ID NO: 277801 - DNA, 120 bp, Artificial Sequence
  ENSG00000128872_39 (sequence is synthesized)
aaatctatccatttgcctaatgtatttaacattccatcctcatcaacatgatgaagcccctttcttccatctttgtagggcacattgtatataaatattttgtacataaagatcatcaaa

SEQ ID NO: 277802 - DNA, 120 bp, Artificial Sequence
  ENSG00000128872_40 (sequence is synthesized)
taccataatggggtatttggcttcatctggaaaattgactggagggagatgctgtctcccagccctgcttccctcgtccctgtccaagttgctgcaggcccaggttagaagattaccaac

SEQ ID NO: 277803 - DNA, 120 bp, Artificial Sequence
  ENSG00000128872_41 (sequence is synthesized)
ctggaggggcatgcagttcatcttacaataaaagcccattcatttaaaaactcagaaatcatcccagtgcctgtactcctcaaaccaatttccctaagggaagactggcacaccagccca

SEQ ID NO: 277804 - DNA, 120 bp, Artificial Sequence
  ENSG00000128872_42 (sequence is synthesized)
aagagcaggtgcttctcttccaacagaaacatggcccctgacagggcaccagcattagggaaaccaatgtcctccgaatagctgccatgagaacatttcagatgctcaaactgaaaattc

SEQ ID NO: 277805 - DNA, 120 bp, Artificial Sequence
  ENSG00000128872_43 (sequence is synthesized)
ttaaaaccaatattaagcatcagcatgctttaagtgtaagatagccctttggaatttacaaacacatgtgcagctatttccttcttcacagatatgatgtactcagccccctcctaggca

SEQ ID NO: 277806 - DNA, 120 bp, Artificial Sequence
  ENSG00000128872_44 (sequence is synthesized)
ctacgaagaagacagaggaagcataaaaattctggactaatataattttatatgtgtttctgagattggggagtagactgagtgccttttttacaaagaagatcccatatttaattcaag

SEQ ID NO: 277807 - DNA, 120 bp, Artificial Sequence
  ENSG00000128872_45 (sequence is synthesized)
tatttatagcatcagcaaaaatgggcagagggcgggaagttgagaacactaggttctgtgctatgttacctgtattcagtagaagtgtttctggagtcaggttttaagtcatgatcctga

SEQ ID NO: 277808 - DNA, 120 bp, Artificial Sequence
  ENSG00000128872_46 (sequence is synthesized)
agcttccttcccctcttccactaatgatgcaataatagctgttttcattttaacgagcagagaactaagaggaaaggtcctagctctgccttccacttgcagcttccctttacctcctct

SEQ ID NO: 277809 - DNA, 120 bp, Artificial Sequence
  ENSG00000128872_47 (sequence is synthesized)
tattgctttcatctcaaatatccctgctactcaaccaatcctaaagctaaagtactgagatgcacacaaaggaaaggtgtgagagtgcttggaagcatccagctgagcccactggatgaa

SEQ ID NO: 277810 - DNA, 120 bp, Artificial Sequence
  ENSG00000128872_48 (sequence is synthesized)
aatcagacgatagggcctcctgttgtaatatactagccagagaaaagcgccaagaacttcagggatattattcactgctttattgctccctaaccctagatcagattggattttactttg

SEQ ID NO: 277811 - DNA, 120 bp, Artificial Sequence
  ENSG00000128872_49 (sequence is synthesized)
tagttcaggagttaagaagtcaaattgctgaccgaggtggggaaggatgatggaaattaaaggtttacatttgtttaatggcagaactgagatttgctcagcttatctctttcccatctg

SEQ ID NO: 277812 - DNA, 120 bp, Artificial Sequence
  ENSG00000128872_50 (sequence is synthesized)
tctgtaatagcaatgactgaataatcagtagaccaatggaagaggagttgcaagtttaaatttgtaacctgactctgggttctgttctaggaatagtgcatgttttagaggctttgccag

SEQ ID NO: 277813 - DNA, 120 bp, Artificial Sequence
  ENSG00000128872_51 (sequence is synthesized)
ttgggatacattgttgacttgggggaggatgaaggagagaactgatgacctagacatagaaaagagtagttaactaactagatgttcttctgatctcttccatggtagacattctgagca

SEQ ID NO: 277814 - DNA, 120 bp, Artificial Sequence
  ENSG00000128872_52 (sequence is synthesized)
cattggcccagttagttggtatggtgaaggggcaccgtactaacagatttggagactgaaacctaatcccatcaccaacacttagcaggtatatgatcatgggcaattcattcaattgcc

SEQ ID NO: 277815 - DNA, 120 bp, Artificial Sequence
  ENSG00000128872_53 (sequence is synthesized)
tgccaattatagactatatagggggaagagcactggatttggagtcaagaaacctggacacttggctccacacttccttagctgggtaactttgggcaaaccgcttggtctctcaagcct

SEQ ID NO: 277816 - DNA, 120 bp, Artificial Sequence
  ENSG00000128872_54 (sequence is synthesized)
aaggttcttcagctataaaatgggaataatacttcactaactacctcacagagttgtggtaagaatataatcagataactggataaaaacactatataaactggaaagcgccgtacaaat

SEQ ID NO: 277817 - DNA, 120 bp, Artificial Sequence
  ENSG00000128872_55 (sequence is synthesized)
gtgagagatcagttttattatcaaatcactgttttccactgcctcttgaatcggctttattctaaccaaccattacatctttctcatcttttggagtatgggtaattgaggcttgggtgt

SEQ ID NO: 277818 - DNA, 120 bp, Artificial Sequence
  ENSG00000128872_56 (sequence is synthesized)
gtcatcagggactggagttatttcagctcccatgtagaggtgggagaggtggttgatggggcagtggaagttagataccagcgatgtatatggtaggacattttcctgggtcactttgac

SEQ ID NO: 277819 - DNA, 120 bp, Artificial Sequence
  ENSG00000128872_57 (sequence is synthesized)
agtaccttgggaaattgtcagtccttgcagagggcctaggctgggcacaagggagaaagcgaacagttgactaagaattgaggggagggtctggagcgctactgccctcctgtcattgct

SEQ ID NO: 277820 - DNA, 120 bp, Artificial Sequence
  ENSG00000128872_58 (sequence is synthesized)
gtgggtgggagaggctaagacttcaggtttgactggaggcctaggagagaagagtgtccttagggtttcaagaattttaatgcctagcagctgagtaacaggcattagttctgatagata

SEQ ID NO: 277821 - DNA, 120 bp, Artificial Sequence
  ENSG00000128872_59 (sequence is synthesized)
gtgaaggggagaaagtgccacctgttgtgagatcacctctccagggcagcagctgccttgttatcaccagcaaccttagccctggtcagtaatatttctgctaagaaaggttttgaagca

SEQ ID NO: 277822 - DNA, 120 bp, Artificial Sequence
  ENSG00000128872_60 (sequence is synthesized)
tggcctccaatgactttcataagcccttggaggcaggactgtgtctcatccatctttgtatcttcagtaccatcttgtaaggtgccttgtacatagtaggtgcttaatgaacaaatgttg

SEQ ID NO: 277823 - DNA, 120 bp, Artificial Sequence
  ENSG00000128872_61 (sequence is synthesized)
cttgaatttagctgtcgtccagccccacagagttatgctccatttgccaccatgtgatatttttgagaaacaatagtgatttggatgccagctctatgtgactttgggcaagactctcca

SEQ ID NO: 277824 - DNA, 120 bp, Artificial Sequence
  ENSG00000128872_62 (sequence is synthesized)
tctatcttgtcttcatttcatctgtaaaatgaagtgagtagattcaatgctccctaaggtcccttccagctccaatacttgacaagcttgtgattctaaatcgtttccgttgcctctgaa

SEQ ID NO: 277825 - DNA, 120 bp, Artificial Sequence
  ENSG00000128872_63 (sequence is synthesized)
catgggtgagtaatgcctccactgcagctgtttctctccaggaggctttgttcagaggaggtctgactattgcacagccagttttttcttcctcttcagcagttctttactgtcttcaga

SEQ ID NO: 277826 - DNA, 120 bp, Artificial Sequence
  ENSG00000128872_64 (sequence is synthesized)
gttttttcttcctcttcagcagttctttactgtcttcagaatggttctggataagcggccttttctgaaaggatatttaaaaatatatactatttaggctgggcccagtggctcatgcct

SEQ ID NO: 277827 - DNA, 120 bp, Artificial Sequence
  ENSG00000128872_65 (sequence is synthesized)
actatcttgctcctcagaaccagtggggaagaagagggaaggcaaagaaagaaactgagcatagtaaacacagcatttttttgtaggctcttatttaaaatgtgtgtgtgtgtgtgtatg

SEQ ID NO: 277828 - DNA, 120 bp, Artificial Sequence
  ENSG00000128872_66 (sequence is synthesized)
tgtgtgtttctgagtaagtattgactgggaaaaagagagaagtcaatcaaaagtatactgtgcaattgagagaggctggcccaagatttaaaacttcctgtgggtaatctaactgtgagt

SEQ ID NO: 277829 - DNA, 120 bp, Artificial Sequence
  ENSG00000128872_67 (sequence is synthesized)
agataggaatcggccatatgacgaaatgagatcaataggaaatgtgctttttgaggaaattttattttagtaccaaatgttgccagtgacaatcttcagttaagaagtaagttattctga

SEQ ID NO: 277830 - DNA, 120 bp, Artificial Sequence
  ENSG00000128872_68 (sequence is synthesized)
cctaaaattcttatctctgccactttggtttaaaaacaaaaacccttatatacatggaatagttatattttaattaagcatttattttagttgttttcatccattcaagcaaaatgaata

SEQ ID NO: 277831 - DNA, 120 bp, Artificial Sequence
  ENSG00000128872_69 (sequence is synthesized)
agcagcatttttcattgcacttaaaaatgtaaaatacctgcatgccactaatctgtaacattttaccagttcagatgcctgtaatgtgtgactttatgtgtgtctgtgttgttttgaaga

SEQ ID NO: 277832 - DNA, 120 bp, Artificial Sequence
  ENSG00000128872_70 (sequence is synthesized)
gaataaaggaaataatactttgcaaactgtttaaacaagtgtttaaacttctattggcaacatttattgggctaagcagttattgaaaactccgcatagttttattttccatttgaaact

SEQ ID NO: 277833 - DNA, 120 bp, Artificial Sequence
  ENSG00000128872_71 (sequence is synthesized)
tcaatcaaatcaagactattatattcattagggaattaaagactaatttgctttttaaatgtgaagttgaacactgtgtggaaagtaaatgtgtgatgaagcaaaatgtataaagtatga

SEQ ID NO: 277834 - DNA, 120 bp, Artificial Sequence
  ENSG00000128872_72 (sequence is synthesized)
aatattatacttttaccctggataattattcaggaccccagttggcccaaataggtgcaatttttaatcctttgaaattagccagccagacctaatgctaaggtaaatgtaaactgtttt

SEQ ID NO: 277835 - DNA, 120 bp, Artificial Sequence
  ENSG00000128872_73 (sequence is synthesized)
aattaattaagatctttctgctttcgaaggtataatgtatctatttctgtcaggaatgatatttccaaatgaaaatgtaaagaacattgggaaataataaactttcctttcaaagtaaaa

SEQ ID NO: 277836 - DNA, 120 bp, Artificial Sequence
  ENSG00000128872_74 (sequence is synthesized)
aaacaatggtagaaatcccttagctcggaatgcacattttcttttcttcctctgattggttctgggtcacctgtgtttacaaattcatagagaacctcatagccactacagtgtgataca

SEQ ID NO: 277837 - DNA, 120 bp, Artificial Sequence
  ENSG00000128872_75 (sequence is synthesized)
gcaaatgtatttctcaaaaaccagcccaatgtaaatggggggaaatattttccgttggttgagaaaggactagtcttgtttaggggaaaaagaaggaaagaggaaaagagagcaaatctt

SEQ ID NO: 277838 - DNA, 120 bp, Artificial Sequence
  ENSG00000128872_76 (sequence is synthesized)
actgagttttttctgagtcatatatttctctgggcacagaagcccttgaggtaaactttattaacccctagacatggagaggtaatttatataagattccacactggtaagtgtcagaga

SEQ ID NO: 277839 - DNA, 81 bp, Artificial Sequence
  ENSG00000128872_77 (sequence is synthesized)
ggtaatttatataagattccacactggtaagtgtcagagatggtatttaaaccaggtttttaggcccaaatgcagaaccga

SEQ ID NO: 277840 - DNA, 120 bp, Artificial Sequence
  ENSG00000128872_78 (sequence is synthesized)
ctgtctcaaaaaaaaaaaagaaaaattaaagtatattttaatctttgaaatggattaatatgtgtctaaaatatcttagacaacaaaatcaggaaacattctgtgtttgacaccagaatg

SEQ ID NO: 277841 - DNA, 120 bp, Artificial Sequence
  ENSG00000128872_79 (sequence is synthesized)
tgaaaaaaatagccagccaggtgtggtaacgtacacctctggtcccagcgacttaggaggctgaggtgagacaattgcatgagcccaggagttctaggctgcagtgagctatgattgcac

SEQ ID NO: 277842 - DNA, 120 bp, Artificial Sequence
  ENSG00000128872_80 (sequence is synthesized)
agatagatagataaaagaaaaatagccaactaaaagttctattcttcctatgcattttagataatttagccaaataaggaagccccttgtcccaggtaaatacttataccatcactatca

SEQ ID NO: 277843 - DNA, 120 bp, Artificial Sequence
  ENSG00000128872_81 (sequence is synthesized)
tgatttttattcttcctatcaatagccaattagtaactcctcctatttatagctactttattgaggaattagtaaatgccagcactgatcttcgtgctttccatgcagcatctcatccat

SEQ ID NO: 277844 - DNA, 120 bp, Artificial Sequence
  ENSG00000128872_82 (sequence is synthesized)
ttgtcactgtaatactatgaggtatatactattattagttccaactttaacaaatgagaaaacagcttcagagaggttaagtaagctatccaaggtaatacaaccagtaaatggcaaagc

SEQ ID NO: 277845 - DNA, 120 bp, Artificial Sequence
  ENSG00000128872_83 (sequence is synthesized)
cagaattcactaccaagtctttctggttctacagccaggaagcttaaccatcaagctatgctagatttacacacaatgcctggctgtcatacatttgctaaaatatgtcacttatcaaaa

SEQ ID NO: 277846 - DNA, 120 bp, Artificial Sequence
  ENSG00000128872_84 (sequence is synthesized)
gcctgggcatcagcctgttgttctatggcatttaatgctcagcccttgaatcgagttagaaaaacgcaagttgtctggacttgatggtttgatttaaagtaacatgtcttttggaagatc

SEQ ID NO: 277847 - DNA, 120 bp, Artificial Sequence
  ENSG00000128872_85 (sequence is synthesized)
taaaatagcatttaaaacagatgacatgaaagtaatgactacctatcatggtcctggcacagaatagatgtttgacaagtacttgttaaataaatgaatgatcataacctccaacctcta

SEQ ID NO: 277848 - DNA, 120 bp, Artificial Sequence
  ENSG00000128872_86 (sequence is synthesized)
gcaatagagaatatttctatggtgatcacagcaaacttgaaataagcactcatgtaaaagaggaaccaggctacaaaaatcaatgtttttaccagcagttattacatttctaaattcgta

SEQ ID NO: 277849 - DNA, 120 bp, Artificial Sequence
  ENSG00000128872_87 (sequence is synthesized)
gcttgaaagcagttttgaatttgaaacctatcattaaaatagaaagatggcagaactagataattggtaaggtgaaatgagcagtttaaggattcttatctctgtatgattttgtactat

SEQ ID NO: 277850 - DNA, 120 bp, Artificial Sequence
  ENSG00000128872_88 (sequence is synthesized)
ttctgccttttagtagatttttttcagtaaagcaaaaatattcacaatatactttgtatgtaaatgaataaagggataaagaaatgatttgtcacttctgtttcatatattatttcgagt

SEQ ID NO: 277851 - DNA, 120 bp, Artificial Sequence
  ENSG00000128872_89 (sequence is synthesized)
aaaattgcagggctggggttagttcacaatcaactctcaacactactggtaaataatctaactcctattctagaccaaataaataacttactaagtggattaaataaattccaaatataa

SEQ ID NO: 277852 - DNA, 120 bp, Artificial Sequence
  ENSG00000128872_90 (sequence is synthesized)
atcaaagtgtgatgtgttggagtcaacttgtacaggcttgccaactgttatattttcaagaattttgcaaactggttgttcaatacagccattatttaaaattaaatgatgtgcacttac

SEQ ID NO: 277853 - DNA, 120 bp, Artificial Sequence
  ENSG00000128872_91 (sequence is synthesized)
cattagctaacaattttttagatctggaaaacttaccttctacacagttagtgagcaaaattatagttacaatgcaatagttaaacttcagaactgaactgtcagatgctttaagttatc

SEQ ID NO: 277854 - DNA, 120 bp, Artificial Sequence
  ENSG00000128872_92 (sequence is synthesized)
tggaattttgtcagcattacagttttcagagaaagaaacaagataagtttggcatttaactaactgaatatttagagtttgctctgtgcttaggatacattttctaaaactttcacatct

SEQ ID NO: 277855 - DNA, 120 bp, Artificial Sequence
  ENSG00000128881_0 (sequence is synthesized)
gcagtagtcgccgcagcggcgatgggagcggtggggacgaggcggcggcggcggcaggagggggagcaggtgctggcacaagagcagcggcttgggggagccggcagcagcagtaacagc

SEQ ID NO: 277856 - DNA, 120 bp, Artificial Sequence
  ENSG00000128881_1 (sequence is synthesized)
cagcagcagcagccgccgccgccgccgccagtaaacgcggacggtaccccaggggactacccagccggccggccctggaagccgcgctcgggtcccgccgcagtcggcggtgggggatgg

SEQ ID NO: 277857 - DNA, 120 bp, Artificial Sequence
  ENSG00000128881_2 (sequence is synthesized)
gcagtggcggtcccgcctgccgagggttaacccccgccggtcccggtcctgagctggaccagagccctcctccagaaacccctgcgtccgccacggcccaggttaaatggaaaccaccct

SEQ ID NO: 277858 - DNA, 120 bp, Artificial Sequence
  ENSG00000128881_3 (sequence is synthesized)
tgggaactggatgcctgtgtagctgttctaccatatcagtgtattgcaatgagtgggggaggagagcagctggatatcctgagtgttggaatcctagtgaaagaaagatggaaagtgttg

SEQ ID NO: 277859 - DNA, 120 bp, Artificial Sequence
  ENSG00000128881_4 (sequence is synthesized)
agaaagattgggggtgggggctttggagaaatttacgatgccttggacatgctcaccagggaaaatgttgcactgaaggtggaatcagctcaacaaccaaaacaagttctgaaaatggaa

SEQ ID NO: 277860 - DNA, 120 bp, Artificial Sequence
  ENSG00000128881_5 (sequence is synthesized)
gttgctgttttgaaaaagctgcaagggaaagaccatgtttgtagatttattggctgtgggaggaatgatcgattcaactatgtggtcatgcagttgcagggtcggaatctggcagatctt

SEQ ID NO: 277861 - DNA, 120 bp, Artificial Sequence
  ENSG00000128881_6 (sequence is synthesized)
cgccgtagccagtcccgaggcacattcaccattagtaccactctccggctgggtagacagattttggagtctattgaaagcattcattctgtgggattcttgcatcgagacatcaaaccg

SEQ ID NO: 277862 - DNA, 120 bp, Artificial Sequence
  ENSG00000128881_7 (sequence is synthesized)
tcgaacttcgctatgggtcgctttcctagtacatgtaggaaatgttacatgcttgattttggcttggctcgacaatttaccaattcctgtggtgacgtcagaccacctcgagctgtggca

SEQ ID NO: 277863 - DNA, 120 bp, Artificial Sequence
  ENSG00000128881_8 (sequence is synthesized)
ggttttcgagggacagttcgttatgcatcaatcaacgcacatcggaacagggaaatgggaagacatgatgacctttggtccttattctacatgttggtggagtttgtggttggtcagctg

SEQ ID NO: 277864 - DNA, 120 bp, Artificial Sequence
  ENSG00000128881_9 (sequence is synthesized)
ccctggagaaaaataaaggacaaggagcaagtaggctctattaaggagagatatgaccacaggctcatgttgaaacatctccctccagaattcagcatctttctagaccatatctcttct

SEQ ID NO: 277865 - DNA, 120 bp, Artificial Sequence
  ENSG00000128881_10 (sequence is synthesized)
ttggattattttacaaaaccagactaccagcttcttacatccgtgtttgacaatagcatcaagacttttggagtaattgagagtgacccttttgactgggagaagactggaaatgatggc

SEQ ID NO: 277866 - DNA, 120 bp, Artificial Sequence
  ENSG00000128881_11 (sequence is synthesized)
tccctaacaaccaccactacttctaccacccctcagttgcacactcgcttgacccctgctgcaattggaattgccaatgctactcccatccctggagacttgcttcgagaaaatacagat

SEQ ID NO: 277867 - DNA, 120 bp, Artificial Sequence
  ENSG00000128881_12 (sequence is synthesized)
gaggtatttccagatgaacagcttagcgatggagaaaatggcatccctgttggtgtgtcaccagataaattgcctggatctctgggacacccccgtccccaggagaaggatgtttgggaa

SEQ ID NO: 277868 - DNA, 120 bp, Artificial Sequence
  ENSG00000128881_13 (sequence is synthesized)
gagatggatgccaacaaaaacaagataaagcttggaatttgtaaggctgctactgaagaggagaacagccatggccaggcaaatggtcttctcaatgctccaagccttgggtcaccaatt

SEQ ID NO: 277869 - DNA, 120 bp, Artificial Sequence
  ENSG00000128881_14 (sequence is synthesized)
cgtgtccgctcagagattactcagccagacagagatattccactggtgcgaaagttacgttccattcacagctttgagctggaaaaacgtctgaccctggagccaaagccagacactgac

SEQ ID NO: 277870 - DNA, 120 bp, Artificial Sequence
  ENSG00000128881_15 (sequence is synthesized)
aagttccttgagacctgcctggagaaaatgcagaaagataccagtgcaggaaaagaatctattctccctgctctgctgcataagccttgcgttcctgctgtgtcccgtactgaccacatc

SEQ ID NO: 277871 - DNA, 120 bp, Artificial Sequence
  ENSG00000128881_16 (sequence is synthesized)
tggcactatgatgaagaatatcttccagatgcctccaagcctgcttctgccaacacccctgagcaggcagatggtggtggcagcaatggatttatagctgttaacctgagctcttgcaag

SEQ ID NO: 277872 - DNA, 120 bp, Artificial Sequence
  ENSG00000128881_17 (sequence is synthesized)
caagaaattgattccaaagaatgggtgattgtggacaaggagcaggaccttcaggattttaggacaaatgaggctgtaggacataaaacaactggaagtccttctgatgaggagcctgaa

SEQ ID NO: 277873 - DNA, 120 bp, Artificial Sequence
  ENSG00000128881_18 (sequence is synthesized)
gtacttcaagtcctggaggcatcacctcaagatgaaaagctccagttaggtccttgggcagaaaatgatcatttaaagaaggaaacctcaggtgtggtcttagcactttctgcagagggt

SEQ ID NO: 277874 - DNA, 120 bp, Artificial Sequence
  ENSG00000128881_19 (sequence is synthesized)
cctcctactgctgcttcagaacaatatacagataggctggaactccagcctggagctgctagtcagtttattgcagcgacgcccacaagtctaatggaggcgcaggcagaaggacccctt

SEQ ID NO: 277875 - DNA, 120 bp, Artificial Sequence
  ENSG00000128881_20 (sequence is synthesized)
acagcgattacaattcctagaccttctgtggcatctacacagtcaacttcaggaagctttcactgtggtcagcagccagagaagaaagatcttcagcccatggagcccactgtggaactt

SEQ ID NO: 277876 - DNA, 120 bp, Artificial Sequence
  ENSG00000128881_21 (sequence is synthesized)
tactctccaagggaaaacttctctggcttggttgtgacagagggtgaacctcctagtggaggaagcagaacagatttggggcttcagatagatcacattggtcatgacatgttacccaac

SEQ ID NO: 277877 - DNA, 120 bp, Artificial Sequence
  ENSG00000128881_22 (sequence is synthesized)
attagagaaagtaacaaatctcaagacctgggaccaaaagaacttcctgatcataatagactggttgtgagagaatttgaaaatctccctggggaaactgaagagaaaagcatcctttta

SEQ ID NO: 277878 - DNA, 120 bp, Artificial Sequence
  ENSG00000128881_23 (sequence is synthesized)
gagtcagataatgaagatgagaagttaagtagagggcagcattgtattgagatctcctctctcccaggagatttggtaattgtggaaaaggatcactcagctactactgaacctcttgat

SEQ ID NO: 277879 - DNA, 120 bp, Artificial Sequence
  ENSG00000128881_24 (sequence is synthesized)
gtgacaaaaacacagacttttagtgtggtgccaaatcaagacaaaaataatgagataatgaagcttctgacagttggaacttcagaaatttcttccagagacattgacccacatgttgaa

SEQ ID NO: 277880 - DNA, 120 bp, Artificial Sequence
  ENSG00000128881_25 (sequence is synthesized)
ggtcagataggccaagtggcagaaatgcaaaaaaataagatatctaaggatgatgacatcatgagtgaagacttgccaggtcatcaaggagacctctctacttttttgcaccaagagggc

SEQ ID NO: 277881 - DNA, 120 bp, Artificial Sequence
  ENSG00000128881_26 (sequence is synthesized)
aagagagagaaaatcacccctagaaatggagaactatttcattgtgtttcagagaatgaacatggtgccccaacccggaaggatatggttaggtcatcctttgtaactagacacagccga

SEQ ID NO: 277882 - DNA, 120 bp, Artificial Sequence
  ENSG00000128881_27 (sequence is synthesized)
atccctgttttagcacaagagatagactcaactttggaatcatcctctccagtttctgcaaaagaaaagctcctccaaaagaaagcctatcagccagacctagtcaagcttctggtggaa

SEQ ID NO: 277883 - DNA, 120 bp, Artificial Sequence
  ENSG00000128881_28 (sequence is synthesized)
aaaagacaattcaagtccttccttggcgacctctcaagtgcctctgataaattgctagaggagaaactagctactgttcctgctcccttttgtgaggaggaagtgctcactcccttttca

SEQ ID NO: 277884 - DNA, 120 bp, Artificial Sequence
  ENSG00000128881_29 (sequence is synthesized)
agactgacagtagattctcacctgagtaggtcagctgaagatagctttctgtcacccatcatctcccagtctagaaagagcaaaattccaaggccagtttcatgggtcaacacagatcag

SEQ ID NO: 277885 - DNA, 120 bp, Artificial Sequence
  ENSG00000128881_30 (sequence is synthesized)
gtcaatagctcaacttcgtctcagttctttcctcggccaccaccaggaaagccacccacgaggcctggagtagaagccaggctacgcagatataaagtcctagggagtagtaactccgac

SEQ ID NO: 277886 - DNA, 120 bp, Artificial Sequence
  ENSG00000128881_31 (sequence is synthesized)
tcagaccttttctcccgcctggcccaaattcttcaaaatggatctcagaaaccccggagcactactcagtgcaagagtccaggatctcctcacaatccaaaaacaccacccaagagtcca

SEQ ID NO: 277887 - DNA, 120 bp, Artificial Sequence
  ENSG00000128881_32 (sequence is synthesized)
gttgtccctcgcaggagtcccagtgcctctcctcgaagctcatccttgcctcgcacgtctagttcctcaccatctagggctggacggccccaccatgaccagaggagttcgtccccacat

SEQ ID NO: 277888 - DNA, 120 bp, Artificial Sequence
  ENSG00000128881_33 (sequence is synthesized)
ctggggagaagcaagtcacctcccagccactcaggatcttcctcctccaggaggtcctgccaacaggagcattgcaaacccagcaagaatggcctgaaaggatccggcagcctccaccac

SEQ ID NO: 277889 - DNA, 120 bp, Artificial Sequence
  ENSG00000128881_34 (sequence is synthesized)
cactcagccagcactaaaaccccccaagggaagagtaagccagccagtaaactcagcagataggagccaggctgcatctctttgaaaggtgtgagatcttcctcctaaacctgatgcatg

SEQ ID NO: 277890 - DNA, 120 bp, Artificial Sequence
  ENSG00000128881_35 (sequence is synthesized)
tgtgtccctgtactttctatgtaaaaaaatcagtgttgatcttctcttgcaaaagaaagtaacatgatcaattatttataagaagacataatacatgataaggaattacctaaggcaggc

SEQ ID NO: 277891 - DNA, 120 bp, Artificial Sequence
  ENSG00000128881_36 (sequence is synthesized)
agcaagtagattaggaatcaatgtctttgtacaagaaggaaaaatagagcaaaaatccaagggggagaaactcattaaaatgagctctcattttttaagctgcctttgaaacaaaagagt

SEQ ID NO: 277892 - DNA, 120 bp, Artificial Sequence
  ENSG00000128881_37 (sequence is synthesized)
tgaggataggagatagaatggaattttaggggggttgcctaatttttttaagcctcaattcaaagattatatagcaaaagtgaaacttcttgtttgatattttcattcaaaactttccca

SEQ ID NO: 277893 - DNA, 120 bp, Artificial Sequence
  ENSG00000128881_38 (sequence is synthesized)
ccctgaagagtcattgatcagatattagattatataagaagtctgttgccagggagccagtattcatgtatatttggcttgtgtgtttatttcgtgtattgagaatgaacacctttactt

SEQ ID NO: 277894 - DNA, 120 bp, Artificial Sequence
  ENSG00000128881_39 (sequence is synthesized)
tgcctcattcctagtaccctccctggagttcagatttttttttaaaattttgtatgtctcgtctgattcaatctctctgcttttattttatggtcctagttgtactatcaaatccaatta

SEQ ID NO: 277895 - DNA, 120 bp, Artificial Sequence
  ENSG00000128881_40 (sequence is synthesized)
cttttttttaggtccccctgattttttttttttagagcaagagttcttaacatattacatttttattatgaaaaataagaaagttaggtaaaggaaagaaaagtctaactagagctattt

SEQ ID NO: 277896 - DNA, 120 bp, Artificial Sequence
  ENSG00000128881_41 (sequence is synthesized)
tgcaggctttagtgtttagggagagaaagaaagtgtgggttaatagccttcaagatagaagatgccctttcatctctgttaagtgtcctcctttagaaacttgagtagaaggaaaactga

SEQ ID NO: 277897 - DNA, 120 bp, Artificial Sequence
  ENSG00000128881_42 (sequence is synthesized)
ccagagtagactgcttccttaagtcttctgggttccaactgtttgtaatatcagcatccaagatgatacgagggaagcacaatgctttggactgtgatttgagatttagaaataaattag

SEQ ID NO: 277898 - DNA, 120 bp, Artificial Sequence
  ENSG00000128881_43 (sequence is synthesized)
atatattattgaggcttagaatcctcaaactttgtattttatacatttagccaataaggaattaatatctggggaaataaatttaggcaaatatttcttttttaatgttttattacctgc

SEQ ID NO: 277899 - DNA, 120 bp, Artificial Sequence
  ENSG00000128881_44 (sequence is synthesized)
ttctcctgtgttttagttcaacatttgggcttcttggcctgattttcatacaatctcaatttacgaagctgtaaagaggaagatatttgttctaatctcactcttctaataggaatcagg

SEQ ID NO: 277900 - DNA, 120 bp, Artificial Sequence
  ENSG00000128881_45 (sequence is synthesized)
caaatgaaagtctaccagacttttaaaatgggctgtttttatactctctaggtgttttgtgttgtaaagaccttattaaggtcaggtaaattggtctgcttgctgttgaaatttgccttc

SEQ ID NO: 277901 - DNA, 120 bp, Artificial Sequence
  ENSG00000128881_46 (sequence is synthesized)
taatacagttgaattgggaaacaaaaaaaaaagaaaggaatacatttcctccccaagtgaacatcttctaatgctgcatcaaagctgccctgaagctgcactgaacttctcttgttctct

SEQ ID NO: 277902 - DNA, 120 bp, Artificial Sequence
  ENSG00000128881_47 (sequence is synthesized)
ttatctgtgttgagctttttaaaaaaacaaactcaaaacactattgaggcatataacgtctcttataagaaatgtagcatagtgtggaatcttaatttctctccagtttcaaacactcca

SEQ ID NO: 277903 - DNA, 120 bp, Artificial Sequence
  ENSG00000128881_48 (sequence is synthesized)
gaggaatgcaatagataagacatacttgctgtttatctaaagcaactgtaatattggaagatcagtccttctgtattatattgtataatagttgctataacactacttgcatgtcttcat

SEQ ID NO: 277904 - DNA, 120 bp, Artificial Sequence
  ENSG00000128881_49 (sequence is synthesized)
ggtaaattatataaatatttataaatatatagagagacatatccttatatagagtcattctttgtcattctccatttgtaatttcgagatcacagatggcgaaattccttttctattgtg

SEQ ID NO: 277905 - DNA, 120 bp, Artificial Sequence
  ENSG00000128881_50 (sequence is synthesized)
tgcctcatgtacacttgggccttgcctatcttcattttctgaaactatgttcttggcatgtgacacctcagagtcttcttgccttccctgtgtacaatgcaagggtgggcagtatttaac

SEQ ID NO: 277906 - DNA, 120 bp, Artificial Sequence
  ENSG00000128881_51 (sequence is synthesized)
aagccaagataggttatttaattttcatttcaaaaagattttaatagggaaaaaattacagggacatgcttgtaatactggttcagagatttgtcatgttaatcacatagttctctcctt

SEQ ID NO: 277907 - DNA, 120 bp, Artificial Sequence
  ENSG00000128881_52 (sequence is synthesized)
atagttagagtggataaactgggatgatgatgagtctgacagatttttaaaacatttcttaaaaattgccattctactttcctcttttcatctcactttttttgcagggggtcgggggaa

SEQ ID NO: 277908 - DNA, 120 bp, Artificial Sequence
  ENSG00000128881_53 (sequence is synthesized)
taatgaagaaattgtcatatttctgttgcattagctaaattgtgctaaaagtagctagctttaaatcctgacccctttagtcggaaatatgctagtagtaatcattggaaaagctgatga

SEQ ID NO: 277909 - DNA, 120 bp, Artificial Sequence
  ENSG00000128881_54 (sequence is synthesized)
agctacaactgtggtacgtgtgtgtgattttatttcttattggcatttctctgctggcagttggaactgacagtgatgggaatgtggcaactgaatgttttctctctttcttggttcctt

SEQ ID NO: 277910 - DNA, 120 bp, Artificial Sequence
  ENSG00000128881_55 (sequence is synthesized)
ccatttttatctcaacttttctagtgtgttgtccccttttctaaatggcattgacaaactcatcaagatccagagataaacagtccatcgtttaagaatattttattttgcatgtagagg

SEQ ID NO: 277911 - DNA, 120 bp, Artificial Sequence
  ENSG00000128881_56 (sequence is synthesized)
aaagaattaaccaaagacgtttctgctctgatactttctaaagaaaacagactaattatatataagtggtatcaataggtctgcttataagtattgtcctatgtagagatttactttttg

SEQ ID NO: 277912 - DNA, 120 bp, Artificial Sequence
  ENSG00000128881_57 (sequence is synthesized)
gtttttacaagcatagtttgcgcttttagatgtctctcaggtgaaaaatagaagttggcagccctgagcaagcacctgtgacacagggatttttattttagttttaaagtatgatacaga

SEQ ID NO: 277913 - DNA, 120 bp, Artificial Sequence
  ENSG00000128881_58 (sequence is synthesized)
gaatgaggtttttggtttgatttggtttggttgtgttttttagttctttattttttatttgggggttctcttagtgatggcatatttcaggtttcagtgacatagatcaagtaattttaa

SEQ ID NO: 277914 - DNA, 120 bp, Artificial Sequence
  ENSG00000128881_59 (sequence is synthesized)
accaatttggttattctatctaagatgagggacatggctattaaggtcaagccaaactatactaaaagtagtatagggcagcagttaaaattatcttttgaaaatcaagtattacctggt

SEQ ID NO: 277915 - DNA, 120 bp, Artificial Sequence
  ENSG00000128881_60 (sequence is synthesized)
ttcttctgtcacaacagaatagctggttacctagtcagtcacagttgcccttgccttcccttgttagtccctggaggtacttgagtggaacagaaggtagaattagcaacagctcaatca

SEQ ID NO: 277916 - DNA, 120 bp, Artificial Sequence
  ENSG00000128881_61 (sequence is synthesized)
ctttaggtagcatttctcctgaattctgctgccaaatcctcagggtctatggattggttgaaatagtaaaatcacacatagtgatttcttgcacagcgtagaggcgtttaattttagtgt

SEQ ID NO: 277917 - DNA, 120 bp, Artificial Sequence
  ENSG00000128881_62 (sequence is synthesized)
atagtgaacaaagaaggaaaactgggtcatataaaatttaaccttaaaacacagattataaatatctttgaatgttaagccctaggcagacagacactctcattcttaactctggtatgc

SEQ ID NO: 277918 - DNA, 120 bp, Artificial Sequence
  ENSG00000128881_63 (sequence is synthesized)
aagctggccttgctgacagtggcatagttacattaactgttttttaagttgcatgttgtgatgtgaatgttttttgtaaaagttgccaagttaatcgagtcctaaataagtagccaaatg

SEQ ID NO: 277919 - DNA, 120 bp, Artificial Sequence
  ENSG00000128881_64 (sequence is synthesized)
gtaactgagacccactgtagacattactcgctttatattatttgctttcaaatactaaaacctcagctgctaattcagcgctctaggtgtacagtgtctccttcccttggctcctagcaa

SEQ ID NO: 277920 - DNA, 120 bp, Artificial Sequence
  ENSG00000128881_65 (sequence is synthesized)
tgtagggaacttgaggttcttcagtatcttcagagattccttccaggccacatatttttatgctaatacttctatagttgcattcaatctacaaggagaaagtgtacattggtgcatgtt

SEQ ID NO: 277921 - DNA, 120 bp, Artificial Sequence
  ENSG00000128881_66 (sequence is synthesized)
ttataaacccagacacagatagctaaaaccataattagtttttctatacccagagctttgaattaaaaacagatgctttttttttccccaagagcagacagttctacattcctaacatta

SEQ ID NO: 277922 - DNA, 120 bp, Artificial Sequence
  ENSG00000128881_67 (sequence is synthesized)
ggaattggtgatacgagaagcaggatccagaattcagaatgatttagtgagactcggtgaaaaaaatgcattttcccctggctgtttgaaaatttacttatttgcagataagtctagatt

SEQ ID NO: 277923 - DNA, 120 bp, Artificial Sequence
  ENSG00000128881_68 (sequence is synthesized)
tagtcttggagatcaaagtcttttatattttaaaaacttattctttatattgatcaaacatggcatatgttagagaaccacttcttctgtcatgtttatgtattttggaattaagttgtt

SEQ ID NO: 277924 - DNA, 120 bp, Artificial Sequence
  ENSG00000128881_69 (sequence is synthesized)
tgcattcactttcaaaatctgcccatttctgtttatgtgcacttaccacagatgtgtcgggactttgcctcaggggagaggtactttagcacctgtgtcactgaggagatggagtggttg

SEQ ID NO: 277925 - DNA, 120 bp, Artificial Sequence
  ENSG00000128881_70 (sequence is synthesized)
acaagtactgttgcgctgtgtaacttggggtttggccctgtggacaatatattagcagaatgataccacacaaaagtattacaggattaaggcatgtaacttctatggtagtccttatgt

SEQ ID NO: 277926 - DNA, 120 bp, Artificial Sequence
  ENSG00000128881_71 (sequence is synthesized)
atcagcgtatacccaagttcagaaaccacaggtgcatttttagacctttacttagagaactaaaggcagttccaaccatcagcccatatggcgggattaatgcatgaaaaccctcagagg

SEQ ID NO: 277927 - DNA, 120 bp, Artificial Sequence
  ENSG00000128881_72 (sequence is synthesized)
gtgttgggacatcctacttccctgtcctcacccagtggaactctggtgtgtgccttgaggataaggaagtagagtggaaactcatcctatcattgagtattctcaatattttggccttcc

SEQ ID NO: 277928 - DNA, 120 bp, Artificial Sequence
  ENSG00000128881_73 (sequence is synthesized)
ctctggaattatgagaaatttaacaaagtctcaggaacctttagaatccattgtccaacactgctagaaaaactgtaggaggtacatggagaattcctatagttcttaggtaagtgcaag

SEQ ID NO: 277929 - DNA, 120 bp, Artificial Sequence
  ENSG00000128881_74 (sequence is synthesized)
acatggcacagggatccctatccacataaaggggaatctggatgctgcacacctcaattctgagaaatccctgactgaacttggaattatgacagtaaagttttcgtcctttagttttct

SEQ ID NO: 277930 - DNA, 73 bp, Artificial Sequence
  ENSG00000128881_75 (sequence is synthesized)
ttggaattatgacagtaaagttttcgtcctttagttttctagagcagctcacagaaattttaaaaagtaaaac

SEQ ID NO: 277931 - DNA, 120 bp, Artificial Sequence
  ENSG00000128881_76 (sequence is synthesized)
cccattaagacgtcttctaattcagttgtgattgtctgctcctacttaaaaaaatatttaagcttgatgtttaattattccctttcagcaaatttggatcagaaaattaaagtatgtgac

SEQ ID NO: 277932 - DNA, 120 bp, Artificial Sequence
  ENSG00000128881_77 (sequence is synthesized)
aagatcaggtcaccttgaatttccacacaatctcaagacactgaatagcaaaaaagtaacattacacagtaatgattaggatatttccttagactttgctggatctttggtcttaaggta

SEQ ID NO: 277933 - DNA, 120 bp, Artificial Sequence
  ENSG00000128881_78 (sequence is synthesized)
acatgtaaaagtagtgaagcctttcctttcatggccctgtgcaatgtaacggttttctgcctcctcttcagctggaagcgttagtggtagtatgggcacagaatatatgtacactggcga

SEQ ID NO: 277934 - DNA, 120 bp, Artificial Sequence
  ENSG00000128881_79 (sequence is synthesized)
tgctgaccatgcctcccaggtaccctggctctgggttccttgacctagggaacaagattggatgaggcagatctttgagcccatgtgactatagaatttgctgatgatataattttacaa

SEQ ID NO: 277935 - DNA, 120 bp, Artificial Sequence
  ENSG00000128881_80 (sequence is synthesized)
taacaatggataggaattttacctctctttttattagtttaatattatttaatattatgtacataagtgttcactcgcctaattaaaaacattgagtaaaccaagtttttatatagacta

SEQ ID NO: 277936 - DNA, 120 bp, Artificial Sequence
  ENSG00000128881_81 (sequence is synthesized)
cccttgccatatgatgctctttttctctaataatatgcagtttaaatcctgaggaatcaatgcccagcatttcaccacatctgaactctgtgtgggcattcttcactcgcctacaagggg

SEQ ID NO: 277937 - DNA, 120 bp, Artificial Sequence
  ENSG00000128881_82 (sequence is synthesized)
taaacaaggctaccagaacttgaatttgacttatagggagctacccaggaaggggaaagcccttgggactttttccaaaacaatcttctatttgaactgttcatcagccaaagtagtcca

SEQ ID NO: 277938 - DNA, 120 bp, Artificial Sequence
  ENSG00000128881_83 (sequence is synthesized)
ctgaggtgacaaagctttcagaaatacaaagatgggaagataaaggtaacactggcccacttggggctttgacattggattgggtggactgaataaacacagcctaggtggcctgggctt

SEQ ID NO: 277939 - DNA, 120 bp, Artificial Sequence
  ENSG00000128881_84 (sequence is synthesized)
gagcctcacttacttctccttgatacatagttcctggtctaccttctgaccctttttctaaaatagccagtgtctatttcactaggccatttacttacaagttcccagcttttagggaaa

SEQ ID NO: 277940 - DNA, 120 bp, Artificial Sequence
  ENSG00000128881_85 (sequence is synthesized)
aaagagggaggggggagcatctagttttgaattagatatacatcttagaagtaatgagctattggcagctgttaaatcagattcagccacaaaccagaattctttcttgttgaacaagac

SEQ ID NO: 277941 - DNA, 120 bp, Artificial Sequence
  ENSG00000128881_86 (sequence is synthesized)
caatgagttagatgactttaataattccacttttctctccctctcttctcctcttcctgaaatcagagagatgagaaactactctttgaaatacctccagaggcgttttattgtgttcct

SEQ ID NO: 277942 - DNA, 120 bp, Artificial Sequence
  ENSG00000128881_87 (sequence is synthesized)
ttcccctccaagcagctccctttatacaattttgctcaggcaaccaaggacagagtatcggcagaaacatggagtgcttttgtataggccacctgtacataaaagtgtaattatttattt

SEQ ID NO: 277943 - DNA, 120 bp, Artificial Sequence
  ENSG00000128881_88 (sequence is synthesized)
aattttcccatttgtatcatattaaagctttgtacagtgttttaagttctgttttaaaattattttgtattttatttttataacctagtaataaaatattcattccgcatgcaaaatcta

SEQ ID NO: 277944 - DNA, 120 bp, Artificial Sequence
  ENSG00000128881_89 (sequence is synthesized)
gttctgtttgtgtgatggtctggatttcaaaagtggaaaatatttttctaatttaataaagttattgaatacaccagatgttacaagatcaacggggagcagatagtgttactgtaaatg

SEQ ID NO: 277945 - DNA, 120 bp, Artificial Sequence
  ENSG00000128881_90 (sequence is synthesized)
cagtaccacatctagaagttccctagaaaaagcagcccaggactgaatagaagctaggtgttaagtgtccctgcagttaggagatgttttcctgtaataaaattaaaatattaaaagctc

SEQ ID NO: 277946 - DNA, 120 bp, Artificial Sequence
  ENSG00000128881_91 (sequence is synthesized)
aacagcctctcctacacgagtgggcctggtgcctgcatcagctcctcgagcttctcccgaatgggcagcagcagcttccggggtggcctgggtgcaggatatggtggggccagtggaggc

SEQ ID NO: 277947 - DNA, 120 bp, Artificial Sequence
  ENSG00000128881_92 (sequence is synthesized)
atcaccaccatcactgtcaaccaaagcctgctgagccctcttaacctggaggtggaccccaacatccaggccgtgcgcacccaggaggagaagcagatcaagaccctcaacaacaagttt

SEQ ID NO: 277948 - DNA, 120 bp, Artificial Sequence
  ENSG00000128881_93 (sequence is synthesized)
ttctccttcatagacaaggtacggttcctggagcagcagaacaagatgcttgagaccaagtggagcctcgtgcagcagcagaagatggctcggagcaacatggacaacatgttcgagagc

SEQ ID NO: 277949 - DNA, 120 bp, Artificial Sequence
  ENSG00000128881_94 (sequence is synthesized)
tacatcaacaaccttaagtggcagctggagactctgggccaggagaagctgaagctggaggcggagcttggcaacatgcatgggctggtggaggacttcaggaacaagtatgaggttgag

SEQ ID NO: 277950 - DNA, 120 bp, Artificial Sequence
  ENSG00000128881_95 (sequence is synthesized)
atcagtaaatgtacagagatggagaatgaatttgtgctcatcaaggagtatgtagatgaagcttacatgaacaagatggagctggagtcttccctgaaagagctgactgccaagatcagc

SEQ ID NO: 277951 - DNA, 120 bp, Artificial Sequence
  ENSG00000128881_96 (sequence is synthesized)
ttcctcaggcagctgtatgaagaggagatcgggagctgcagtcccagatctcggatacatctgtggtgctgttcatggacaacagccgcttcctggacatggacagcatcatccctgagg

SEQ ID NO: 277952 - DNA, 120 bp, Artificial Sequence
  ENSG00000128881_97 (sequence is synthesized)
tcaaggccagagggcttccctggaggctgccacgcagataccgagcagcgtggggagctagccattaaggatgccaatgccaagctgtctgagctggaggccgccctgcagctagccagt

SEQ ID NO: 277953 - DNA, 120 bp, Artificial Sequence
  ENSG00000128881_98 (sequence is synthesized)
caagacatggcgcggcagctgcgtgagtaccaggagctgatgaacgtcaagctggccctggatatcaagatcgccacctacaggaagctgttggagggcgaggagagctggctggagtct

SEQ ID NO: 277954 - DNA, 120 bp, Artificial Sequence
  ENSG00000128881_99 (sequence is synthesized)
gggatgcagaacatgagtatccatatgaagaccaccagcagctatgcaggtggtcagagcttggcctatgggggcctcacaagccctggcctcagctacggcctgggctccagctttggc

SEQ ID NO: 277955 - DNA, 120 bp, Artificial Sequence
  ENSG00000128881_100 (sequence is synthesized)
tctggcatgggctccagctccttcagccacaccagctcctccagggccgtggtcatgaagaagatcgaaacccgtgatgggaagctagtgtctgagtcctccaacgtcctgcccaatttg

SEQ ID NO: 277956 - DNA, 120 bp, Artificial Sequence
  ENSG00000128881_101 (sequence is synthesized)
agacctggtataaaatagtgtatttttctttttaaagcttctaaggtaccattattattgttgtcattgttgttattattattgtatatttctgttacataaagtctttcaaataagaaa

SEQ ID NO: 277957 - DNA, 120 bp, Artificial Sequence
  ENSG00000128881_102 (sequence is synthesized)
aagtggtggaatcagctcaacaaccaaaacaagttctgaaaatggaagttgctgttttgaaaaagctgcaagacaggttctcattctgttgcttaggctggagtacagtggcacaatcat

SEQ ID NO: 277958 - DNA, 78 bp, Artificial Sequence
  ENSG00000128881_103 (sequence is synthesized)
tcatggctaactgcagtcttgaactcctgggctcaggcaatccttctgtctcagcctcttcagaagctgggacctgag

SEQ ID NO: 277959 - DNA, 120 bp, Artificial Sequence
  ENSG00000128886_0 (sequence is synthesized)
agaggaggtggcggtggtggccctcgcctgtggcccccgtgctgcttgcactcgaactcgtcgccatggaggagctccaggagcctctgagaggacagctccggctctgcttcacgcaag

SEQ ID NO: 277960 - DNA, 120 bp, Artificial Sequence
  ENSG00000128886_1 (sequence is synthesized)
ctgcccggactagcctcttactgctcaggctcaacgacgctgccctgcgggcgctgcaagagtgtcagcggcaacaggtacggccggtgattgctttccaaggccaccgagggtatctga

SEQ ID NO: 277961 - DNA, 120 bp, Artificial Sequence
  ENSG00000128886_2 (sequence is synthesized)
gactcccaggccctggttggtcctgcctcttctccttcatagtgtcccagtgttgtcaggagggcgctggtggtagcttggaccttgtgtgccaacgcttcctcaggtctgggcctaaca

SEQ ID NO: 277962 - DNA, 120 bp, Artificial Sequence
  ENSG00000128886_3 (sequence is synthesized)
gcctccactgcctgggctcactcagggagcgcctcattatttgggcagccatggattctatcccagccccatcatcagttcagggacacaacctgactgaagatgccagacatcctgaga

SEQ ID NO: 277963 - DNA, 120 bp, Artificial Sequence
  ENSG00000128886_4 (sequence is synthesized)
gttggcagaacacaggaggctattctgaaggagatgcagtatcacagccacagatggcactagaggaggtgtcagtgtcagatccactggcaagcaaccaaggacagtcactcccaggat

SEQ ID NO: 277964 - DNA, 120 bp, Artificial Sequence
  ENSG00000128886_5 (sequence is synthesized)
cctcaagggagcacatggcacagtgggaagtgagaagccagacccatgttccaaacagagaacctgttcaggcactgccttcctctgccagccggaaacgtctggacaagaaacgttcag

SEQ ID NO: 277965 - DNA, 120 bp, Artificial Sequence
  ENSG00000128886_6 (sequence is synthesized)
tgcctgtagccactgtagaactggaagaaaagaggttcagaactctgcctttagtgccaagccccctacaaggcctgaccaatcaggatttacaagagggagaagattgggagcaagaag

SEQ ID NO: 277966 - DNA, 120 bp, Artificial Sequence
  ENSG00000128886_7 (sequence is synthesized)
taccagactacctcctgcaatacagggccatccacagtgcagaacagcaacatgcctatgagcaggactttgagacagattatgctgaataccgcatcctgcatgcccgtgttgggactg

SEQ ID NO: 277967 - DNA, 120 bp, Artificial Sequence
  ENSG00000128886_8 (sequence is synthesized)
caagccaaaggttcatagagctgggagcagagattaaaagagttcggcgaggaactccagaatacaaggtcctggaagacaagataatccaggaatataaaaagttcaggaagcagtacc

SEQ ID NO: 277968 - DNA, 120 bp, Artificial Sequence
  ENSG00000128886_9 (sequence is synthesized)
caagttacagagaagaaaagcgtcgctgtgagtaccttcaccagaaattgtcccacattaaaggtctcatcctggagtttgaggaaaagaacaggggcagctgaagttatcaagggaatt

SEQ ID NO: 277969 - DNA, 120 bp, Artificial Sequence
  ENSG00000128886_10 (sequence is synthesized)
tttgagcctctgcttagtgaaacacaaaggaacaaagcagctataaactaaatagaatgcaactatctgcttttcttatgctgaccactggagtccatggtggcaagtagagagctgctc

SEQ ID NO: 277970 - DNA, 120 bp, Artificial Sequence
  ENSG00000128886_11 (sequence is synthesized)
taggttcttgaggtttggttttcattattaatttttagggtatgggcactgtgcaaagactccatagctgtgcctaggagtctaggaaaagtgacagaggcttggcttttttacctttag

SEQ ID NO: 277971 - DNA, 120 bp, Artificial Sequence
  ENSG00000128886_12 (sequence is synthesized)
ttcagccaagtcattttcaagtcctgagaaatgacatcatcttcaggataaaataatgaggacattagacaaaccaaactaagtgaattttagcctggtagcctctctaaggaaacagta

SEQ ID NO: 277972 - DNA, 120 bp, Artificial Sequence
  ENSG00000128886_13 (sequence is synthesized)
ataataacttctgataagagttaaaagaacttgtagcatacctggatataatgggaaagggcctgggtgttacccatgtactgaaaatgaacttttaccaacatggctaaaaaattaaaa

SEQ ID NO: 277973 - DNA, 120 bp, Artificial Sequence
  ENSG00000128886_14 (sequence is synthesized)
aaaccctcaaggggttgcaggttcagctttcacttagagacagcaactccaaattcagggtcgctggggaaactaaggcaggactggggactctgagtgagaggtcagacgctggtcgcg

SEQ ID NO: 277974 - DNA, 120 bp, Artificial Sequence
  ENSG00000128886_15 (sequence is synthesized)
tcacggtctgaggtagttccgataactgaactccaagtggggcgaggaggctgctggggttgtcccagggggctgtggtttgaggggactgtgctgtttcggcctcctggggaactcagg

SEQ ID NO: 277975 - DNA, 120 bp, Artificial Sequence
  ENSG00000128886_16 (sequence is synthesized)
cccagctgcacctggtgtgctaacaagccctgtgggacccgtcttagtcttacttacggactggctcccggacgagtggcggcggcaggagggggaggggctgacttcatggggcttacc

SEQ ID NO: 277976 - DNA, 120 bp, Artificial Sequence
  ENSG00000128886_17 (sequence is synthesized)
actaacatgggaagctttggcattgtcttcctttctaatctccactcttaaatgttgtaataaaagatccagttccacctcctaccctggtcttcatctgtcccattcccttaaaatatc

SEQ ID NO: 277977 - DNA, 120 bp, Artificial Sequence
  ENSG00000128891_0 (sequence is synthesized)
gggactccgcccctcccgatttcctccgggctacaggcgacagagctgagccaagcgtttactgggcagctgttacggtaagtgaggaggggctggggtgcccagcgttttggatctccc

SEQ ID NO: 277978 - DNA, 120 bp, Artificial Sequence
  ENSG00000128891_1 (sequence is synthesized)
actctggcccggccccggaataccacatagaggccttgggacctgattcatcccgtccagacagccctagagacctgagcgactgaggcctgggatctggacgccggaatttcctgcgtg

SEQ ID NO: 277979 - DNA, 120 bp, Artificial Sequence
  ENSG00000128891_2 (sequence is synthesized)
gttctggacgccctgccctgggctcagattccaaatgaaaatgtttgagagcgctgactctacagccacaagatctggccaggatctctgggctgaaatttgttcctgtctgccaaatcc

SEQ ID NO: 277980 - DNA, 120 bp, Artificial Sequence
  ENSG00000128891_3 (sequence is synthesized)
tgaacaagaagatggtgccaacaatgcattctcagactcctttgtggattcttgccctgaaggtgaaggccagagggaggtggctgactttgctgtccagccagctgtaaagccttgggc

SEQ ID NO: 277981 - DNA, 120 bp, Artificial Sequence
  ENSG00000128891_4 (sequence is synthesized)
tcccttgcaggattcagaagtgtatttagcatctctagagaagaagctaagaagaatcaaaggtttaaatcaggaagtgacttccaaggacatgcttcgaactctggcccaagccaagaa

SEQ ID NO: 277982 - DNA, 120 bp, Artificial Sequence
  ENSG00000128891_5 (sequence is synthesized)
ggaatgctgggatcggttcctccaggagaagttagcttcagagttctttgtggatggacttgattctgatgagagcaccttggaacatttcaagaggtggctccagccagataaagtagc

SEQ ID NO: 277983 - DNA, 120 bp, Artificial Sequence
  ENSG00000128891_6 (sequence is synthesized)
cgtcagcacagaggaggtccagtatctgattcctccagagtcacaggttgagaagccagtggccgaggacgagccagcagccggggacaagccagcagcagcagaacagtaaattacaca

SEQ ID NO: 277984 - DNA, 120 bp, Artificial Sequence
  ENSG00000128891_7 (sequence is synthesized)
cacacacacacacacacacacacacgccgagcagctgtctcgggtccagagcgagcagcgtggagctcagtgacagcagcagggagaaatccactgaaggaaaaaacccaaatttccact

SEQ ID NO: 277985 - DNA, 120 bp, Artificial Sequence
  ENSG00000128891_8 (sequence is synthesized)
tttccactccacaaagaaaacagctgcaagcccccagggacttacctggggctggcatgtgtgactgtctcggatgaagtgactgacccagtgcacactggatcaaaatgctgctttcct

SEQ ID NO: 277986 - DNA, 120 bp, Artificial Sequence
  ENSG00000128891_9 (sequence is synthesized)
ctgtgtctcacagcttggctgagctctgtctctgcaggttagaagtctgctaaagatcaaatgtgaaagtacttggagaaactgaggcctcttatgtgtaatgtgtaagttaagtgagcc

SEQ ID NO: 277987 - DNA, 120 bp, Artificial Sequence
  ENSG00000128891_10 (sequence is synthesized)
atatattttcttgcctcttccggacattcatgcttgtgtcccaagcattcccttggtgaattgtcacgtgagtggggccagtaagagtgaagtctgctccttgaatccaagccccatctg

SEQ ID NO: 277988 - DNA, 120 bp, Artificial Sequence
  ENSG00000128891_11 (sequence is synthesized)
gggcttctctaacaaatctgtagtaagtatacggactccagggagagaggctgggcttctttctctcatttgttccttgtggaacaaatgggcaaaagaagtgtgaaaatgtgggtgttt

SEQ ID NO: 277989 - DNA, 120 bp, Artificial Sequence
  ENSG00000128891_12 (sequence is synthesized)
atgtctgtgtatatgtattttttacttcatgcatggcttctcctccaacttcctcctgcacttaaaaagggccaggttccaaattagacttgtaaatatggtgttagtgtttgacactac

SEQ ID NO: 277990 - DNA, 120 bp, Artificial Sequence
  ENSG00000128891_13 (sequence is synthesized)
tcctggatagttccaaacatcttccttgtggcaggtttcctggctgagcccgagcttccctccctgtttattgtgttcatgatcagtatgtgtttccatataaaacttttctcaacggaa

SEQ ID NO: 277991 - DNA, 120 bp, Artificial Sequence
  ENSG00000128891_14 (sequence is synthesized)
tgcagctacgtgttggtcacagattgaatagagttaaggataaagcattgtgttcatttttaagtatgcaatgaacttgagaaagtagtaactaatcagtctctcatgttcttgaattct

SEQ ID NO: 277992 - DNA, 120 bp, Artificial Sequence
  ENSG00000128891_15 (sequence is synthesized)
ttctcatgaggtttggaaaccatgttactgtaacaaaaggaaaaaccatttactcctcagagagattattttctggaactatctcttcatctcttcttacctctgaatttccactgcttt

SEQ ID NO: 277993 - DNA, 120 bp, Artificial Sequence
  ENSG00000128891_16 (sequence is synthesized)
ttctgatgagagttttttgagaaatgggatctgtgctaagggctttgggcaggccagctaggaggacggaagaagtttcccattcgcttgtggacaaggcctgcacccatataatcaact

SEQ ID NO: 277994 - DNA, 120 bp, Artificial Sequence
  ENSG00000128891_17 (sequence is synthesized)
ccctgtaactccagaacccctggcagcagcagcttttctgaggatggagcgtgggacagccaccagtgtgctgagcagaggtggcgaaggacatttccagcccagcagtcgtcatggtaa

SEQ ID NO: 277995 - DNA, 120 bp, Artificial Sequence
  ENSG00000128891_18 (sequence is synthesized)
gcaggattcagaagtgtatttagcatctctagaaccctcttgcctactgttggttgcccgtatattcaaataactcaaaagtgttaaaccttatgccatcctgcaagaaaatgtgatggc

SEQ ID NO: 277996 - DNA, 120 bp, Artificial Sequence
  ENSG00000128891_19 (sequence is synthesized)
cccagggctacatgtggatttctgatgctggagtttgaaaaacttacataaatagattgattgttgagaatgggagcatattgacataagattcattctgcctcttgttagccattttat

SEQ ID NO: 277997 - DNA, 120 bp, Artificial Sequence
  ENSG00000128891_20 (sequence is synthesized)
ggagaaacagcaacaactacttccctctggcccagccctcagggcttctgggctgggctgaatgaagaaagggagaagctgagaagtgggacagctggcgagagagccaagagagagaca

SEQ ID NO: 277998 - DNA, 120 bp, Artificial Sequence
  ENSG00000128891_21 (sequence is synthesized)
gggctttagtcagagccagctagagaacccatgggaagagggacaggctggtcaccagcaggctcctgcggtgagcccacctgtggcaagcactagacctcaggcccccagttggcagcg

SEQ ID NO: 277999 - DNA, 120 bp, Artificial Sequence
  ENSG00000128891_22 (sequence is synthesized)
ctcatgggtgggtactaaaggtcagttccctatactcagagctcccccagactccttcagatcaaatgtcaccttttccatattgcaaaagcctttattgctctaaggaaaacatgctaa

SEQ ID NO: 278000 - DNA, 120 bp, Artificial Sequence
  ENSG00000128891_23 (sequence is synthesized)
attaaaaagaaccaaattattcttttaaaaatagaaatattttaaatggaaaagttcaaagaaaataaaaggctttccaatcctccctctgcttctcccagctctaaaattcctccacag

SEQ ID NO: 278001 - DNA, 120 bp, Artificial Sequence
  ENSG00000128891_24 (sequence is synthesized)
ttgcttcccatgcctgccaggttggaggaaagggacaggcctgggcccagcggcctcttctctgacaagggcacagaaagggaagccggattggtcgttgcctgaatttgaggggggctt

SEQ ID NO: 278002 - DNA, 120 bp, Artificial Sequence
  ENSG00000128891_25 (sequence is synthesized)
ggactcacaggcttcccgctaattcgaaccagtgaaggagactcatttccctctatgccccctctttctcctattggggcggacatacaggcagcagaaagaggtgcccacaggtgccct

SEQ ID NO: 278003 - DNA, 120 bp, Artificial Sequence
  ENSG00000128891_26 (sequence is synthesized)
gtgaccccttgagggagaggcgaggggtgcagggcagcctcaggtgagctccatggagaacatagcttaccagtggatcccatttccagactttcaaatcatggccatgcaagagatctc

SEQ ID NO: 278004 - DNA, 120 bp, Artificial Sequence
  ENSG00000128891_27 (sequence is synthesized)
gagctttctgggacacactgctatggaaaacaagaccatagcctcagaataaaaaatgtggtcttcttatttactgaaaatctaccttcaggaaagacatgaagggggcactcaccagcc

SEQ ID NO: 278005 - DNA, 120 bp, Artificial Sequence
  ENSG00000128891_28 (sequence is synthesized)
aataggtgggtaacttaacacagcagcaccacaggctttcttttatacaggagtacagtccccaaatccccttggagaactgcctctgggccacttgtacaggggaaggggacacttggc

SEQ ID NO: 278006 - DNA, 120 bp, Artificial Sequence
  ENSG00000128891_29 (sequence is synthesized)
aggagaggggaccgcagaccttgtagtcataagttagcatgctgctaaaagactatttgaaatgagtgctgattacatatatttaaaagtggtcagcattactgaagctccagctttttt

SEQ ID NO: 278007 - DNA, 63 bp, Artificial Sequence
  ENSG00000128891_30 (sequence is synthesized)
atttaaaagtggtcagcattactgaagctccagcttttttttctgaggcggagtcttactcta

SEQ ID NO: 278008 - DNA, 120 bp, Artificial Sequence
  ENSG00000128891_31 (sequence is synthesized)
ctgggattacaggcatgagccaacgcgtctggccaagagccagcatttttgagactcgaacctttctctgactgacatgtattgtggagctcaaaataaacattctgtattttgggagtt

SEQ ID NO: 278009 - DNA, 120 bp, Artificial Sequence
  ENSG00000128891_32 (sequence is synthesized)
attttgggagttggtcatcactctctagttatgctcctgtagagctattactgaacctctggcctcttccctgggttctggaaaccttcatgtacccgtggcccccagagcaaggggtag

SEQ ID NO: 278010 - DNA, 120 bp, Artificial Sequence
  ENSG00000128891_33 (sequence is synthesized)
gctgctagtgccccgatggtcccacacgaggctgggaccttgggacacaggcactgcatcattcactgttccctgcatgggcttcaggagtggatgagagcccagggccaagccccttcc

SEQ ID NO: 278011 - DNA, 120 bp, Artificial Sequence
  ENSG00000128891_34 (sequence is synthesized)
tctttcgttctgcccaagccccttccctccagctgccttccctccttgagtcccttgattcctctgtgatcccccctccagctcagcacctggggctggcaccactccccagggatactg

SEQ ID NO: 278012 - DNA, 120 bp, Artificial Sequence
  ENSG00000128891_35 (sequence is synthesized)
ataaagtcacagagcatctgcccagcgcctgaggtggtgtaagttggggaaggtgggtcatcctgttagttgctcctgccaggcctggagcccctggtggtcctttagaattctagattc

SEQ ID NO: 278013 - DNA, 120 bp, Artificial Sequence
  ENSG00000128891_36 (sequence is synthesized)
tcttggttcctttctccagaatccttcccttctcgctccactcatgctctgggccaggcccaccacgtctcctggcagctgactatctcatgccacctgcctttgttctctattcccttt

SEQ ID NO: 278014 - DNA, 120 bp, Artificial Sequence
  ENSG00000128891_37 (sequence is synthesized)
gccaaaaccatattttctggtgaatccctcttctacttcaaggttcagttcaagtgccaccatataagtgaagctgtcctcagtcgaccctaggtgactctgtggccccatggaactttt

SEQ ID NO: 278015 - DNA, 120 bp, Artificial Sequence
  ENSG00000128891_38 (sequence is synthesized)
tctcatcaccatcgtagcagtcatgactctgttttgacctccacttctccactggagagtgtgttccgtggaatgaactggcttgtagtgtgacctgtgaacctccagagcttggctctg

SEQ ID NO: 278016 - DNA, 120 bp, Artificial Sequence
  ENSG00000128891_39 (sequence is synthesized)
tgttgctcattgagtacttgttcttgcagtgggcccttgccaagagaggcccctgttctgggatgtgagccagagaaggtccgagactcataatttcatgtgtcatactcgtcctccacc

SEQ ID NO: 278017 - DNA, 120 bp, Artificial Sequence
  ENSG00000128891_40 (sequence is synthesized)
cagctccccctggccagatcacagccccctcctgctgcagggcctgtagtgccaggctggttgcaagacaggggtcctcacctctgagaaaatcatggcttggcccattggcaccccacc

SEQ ID NO: 278018 - DNA, 120 bp, Artificial Sequence
  ENSG00000128891_41 (sequence is synthesized)
tgggatgcagaatggagcagcaacagctggctggtgtctgaacgctatttccccagccctgggcagccatctcctgtagctgttccctcatcccatggctttaccaacccctccttgctg

SEQ ID NO: 278019 - DNA, 120 bp, Artificial Sequence
  ENSG00000128891_42 (sequence is synthesized)
cactggagagcctgagagcaagtaggttcagagtgggaagacagggctaaaggcatcttcccggtcttctctccttccccttcctcccagcagttgcagctgtgctgcgtgatgatgtgg

SEQ ID NO: 278020 - DNA, 120 bp, Artificial Sequence
  ENSG00000128891_43 (sequence is synthesized)
aacagagcacagtcttaattactgctcagccctgctcattagtgcttctggaagcccaagaagccagagttaggaagcctcaatcacagtggagacccaggctgcaggcctcctgggtga

SEQ ID NO: 278021 - DNA, 120 bp, Artificial Sequence
  ENSG00000128891_44 (sequence is synthesized)
tcgctagtcctgtgtctcctggtgacttgggacccctttgggggactccagcaaaagacactccctccaaccctgagactggggaagggctgaagctggagggagtcactgctggattaa

SEQ ID NO: 278022 - DNA, 120 bp, Artificial Sequence
  ENSG00000128891_45 (sequence is synthesized)
gggagtcgctgctggattaaccttcctcatgggcagctctgatcaaatacctatgtttctcttgctgacagcatagagtctggagtccttggcttagcagtcaagctcctccacaatttg

SEQ ID NO: 278023 - DNA, 120 bp, Artificial Sequence
  ENSG00000128891_46 (sequence is synthesized)
gtcccacaggactttcccaacctgatttcctccttcaatcctggcagacaaggagggaaggcaaaggctaggccccctcatgggctctcactagtgtgtgcagagcatttcagggacagc

SEQ ID NO: 278024 - DNA, 120 bp, Artificial Sequence
  ENSG00000128891_47 (sequence is synthesized)
atatggtggaacgtgtgaaactccactgcaatcagagaaagatgaacgaatgattaaataaaccacatgtgctcaaatcccgcacactgatgacttccctgcttttggagagacttagca

SEQ ID NO: 278025 - DNA, 120 bp, Artificial Sequence
  ENSG00000128891_48 (sequence is synthesized)
aggagcctggtgtgttgttcagcatgcactattttttttcttttttttttttggttgtgaaaaggaataaagaaccatgaagtgcctgaagactgaacgaaaggaagctgagtggaggag

SEQ ID NO: 278026 - DNA, 120 bp, Artificial Sequence
  ENSG00000128891_49 (sequence is synthesized)
gagagaaggggcgggccctgaaaactataaatctataggcccaatttcaatatgtggaaaaactccttcaaaatataaatttgtaaacaccctagatcaaatgagagaatgctcatgaaa

SEQ ID NO: 278027 - DNA, 120 bp, Artificial Sequence
  ENSG00000128891_50 (sequence is synthesized)
gcactttttgaactgcaaagggttagaaatataaagcattattctgtaatatttctgttcagtgcagactttaaaacagatgctatggagaggctggagatctatgataatggctcatca

SEQ ID NO: 278028 - DNA, 120 bp, Artificial Sequence
  ENSG00000128891_51 (sequence is synthesized)
cctacaaggtgctcatacagtttgggctgtttcatttaattagtcattgcctctcatgtagactactgcagaagtctcctaagtggcctccccacctctgcattctcccccattccattc

SEQ ID NO: 278029 - DNA, 120 bp, Artificial Sequence
  ENSG00000128891_52 (sequence is synthesized)
atcttatatgccaccgtcacgttaatcttcctgatgcacagctctgatcaaatacctgtaatgattctcctgctgactgcacagagcctggagtcgctggcttagcagtcaagaccctcc

SEQ ID NO: 278030 - DNA, 120 bp, Artificial Sequence
  ENSG00000128891_53 (sequence is synthesized)
acagtctggtcccccaggactttcccaaactgatttccttccatcacggcaggcatgggctcgggaagatcaagtcactaaacccaagaccacacagataccaagtggcagatcatacag

SEQ ID NO: 278031 - DNA, 120 bp, Artificial Sequence
  ENSG00000128891_54 (sequence is synthesized)
ccaagccttcagaccctgacatctgactccaagaccattctgagcccatcacttcctcactttgatggtgcaatggactgtgtgtttgtgtccctctaaaatatacatgttgaaacacta

SEQ ID NO: 278032 - DNA, 120 bp, Artificial Sequence
  ENSG00000128891_55 (sequence is synthesized)
atcctgatgtgatggtatatggagatggaactttggggaggtaattaggtcatgagagtggaccctttatcaatgggattagtgcccttacaaaaaggggccagagacctagctagttct

SEQ ID NO: 278033 - DNA, 120 bp, Artificial Sequence
  ENSG00000128891_56 (sequence is synthesized)
cttctgccatgtgaggatacaatgagaagtagacagttggtgatatggtttggctgtgtcccaatccaagtctcatcttgaattgtagttcccacaatccccacgtgtggtgggaaggac

SEQ ID NO: 278034 - DNA, 120 bp, Artificial Sequence
  ENSG00000128891_57 (sequence is synthesized)
ccagcgggaggtaactgaatcaagggggcagtttccctcatgctattcttgtgatagtaagttctcacgagatctgatggttttagaaggggcttcccccttcagtcggctctcattctc

SEQ ID NO: 278035 - DNA, 120 bp, Artificial Sequence
  ENSG00000128891_58 (sequence is synthesized)
cttcctgctgccctgtgaagaagaacatatttgcttccccttctgccatgaatgtaagtttcttgaggcgtccccagccatgccaaactgtgagccaattaaacctctttcctgtacaaa

SEQ ID NO: 278036 - DNA, 120 bp, Artificial Sequence
  ENSG00000128891_59 (sequence is synthesized)
tgattctgatgagaggtgactacaattgcaaagtagaatttgctttgacacctgatgccaggacaatagtatgttaccatccttctatagacattccatatgaacgcacaaaacctatcc

SEQ ID NO: 278037 - DNA, 120 bp, Artificial Sequence
  ENSG00000128891_60 (sequence is synthesized)
tataataatgaagaaacacatggtcaagtgctgaaaactagagaagaaaaaagtgaacaccttgagcgagaacccataatagaacaacttagcaaaatgttctttatgctaagtacggtt

SEQ ID NO: 278038 - DNA, 120 bp, Artificial Sequence
  ENSG00000128891_61 (sequence is synthesized)
ggcatcttcgtggacattagcacagatgtcagaagaaaccggaacctccagaagacagatgatattgaggttcttggggaattaaagagaaatattaccctctgcctcatttgccattgg

SEQ ID NO: 278039 - DNA, 120 bp, Artificial Sequence
  ENSG00000128891_62 (sequence is synthesized)
agacagtgcaatctggtgtatgcactaataataataataacatgtcttttcatatttaaaaaaaaaacacaaaatctttaggaagccgaggtgggtggatcgcttgagtcaggagtttga

SEQ ID NO: 278040 - DNA, 120 bp, Artificial Sequence
  ENSG00000128891_63 (sequence is synthesized)
cgcttgagtcaggagtttgagagcagcctgagcaacatagaccccatctctaaaaaaaattagccaagtgtggtgatgtgtgtctgtggtgccagctacttggaaggctgaggtaggagg

SEQ ID NO: 278041 - DNA, 90 bp, Artificial Sequence
  ENSG00000128891_64 (sequence is synthesized)
ccttcaacaacaacaaaaatcaaaatctatgcaaaatttaaacccaatcttgcgctagtcttgtgggaatgaagattaatttacctaaaa

SEQ ID NO: 278042 - DNA, 120 bp, Artificial Sequence
  ENSG00000128891_65 (sequence is synthesized)
atcttgcgctagtcttgtgggaatgaagattaatttacctaaaaatgctcctctggtttttgtaattctttttgttactttttaaaaatataaatttggccaggcacggtggctcacacc

SEQ ID NO: 278043 - DNA, 120 bp, Artificial Sequence
  ENSG00000128908_0 (sequence is synthesized)
ggtcccaggagccgcggagggagcgagctaggagcgtccacgcccaacgcagtcaccgtcccacggcctcagagagcgaaccgcggctccaccgtcggcggggcgacccccccctccgga

SEQ ID NO: 278044 - DNA, 120 bp, Artificial Sequence
  ENSG00000128908_1 (sequence is synthesized)
ccccgcccgcaccccgccccccctccgccgccgtcgcggcggcggggccaggcggcccgagccgtgcagtcggaggtccttgtgcatgaagacagatttgttctatggcctcggagttgg

SEQ ID NO: 278045 - DNA, 120 bp, Artificial Sequence
  ENSG00000128908_2 (sequence is synthesized)
gtgccagggatgatggaggctgcactgagctggcaaagcccctctatcttcagtacttggagagggccctccggttggaccattttctgcgacaaacgtcagctatcttcaataggaata

SEQ ID NO: 278046 - DNA, 120 bp, Artificial Sequence
  ENSG00000128908_3 (sequence is synthesized)
tttctagtgatgacagtgaagatggactggatgacagtaatccattattgccccagtctggggatcccttaatacaagttaaggaagaacctccaaattcattgcttggtgaaacttctg

SEQ ID NO: 278047 - DNA, 120 bp, Artificial Sequence
  ENSG00000128908_4 (sequence is synthesized)
gagcaggcagttctggaatgttaaacacatattctctgaatggagttctacagtcagaatcaaaatgtgataaggggaatttatataatttctctaagctgaagaaaagcagaaagtggc

SEQ ID NO: 278048 - DNA, 120 bp, Artificial Sequence
  ENSG00000128908_5 (sequence is synthesized)
taaagagcattctgctaagtgatgaatccagcgaggctgattctcagagtgaagacgatgatgaagaagaactcaatctcagcagagaagaacttcacaacatgcttcgactacacaaat

SEQ ID NO: 278049 - DNA, 120 bp, Artificial Sequence
  ENSG00000128908_6 (sequence is synthesized)
ataagaaacttcaccaaaataagtatagtaaagacaaggagttgcagcaatatcagtactacagtgcaggcctgctctccacatatgaccctttctatgagcaacaacggcacctacttg

SEQ ID NO: 278050 - DNA, 120 bp, Artificial Sequence
  ENSG00000128908_7 (sequence is synthesized)
gacccaagaaaaagaaatttaaggaggaaaagaaacttaaagctaagttgaaaaaagtgaagaaaaaaagacgaagagatgaagaactttcctctgaagaatcccctcgtcgccatcacc

SEQ ID NO: 278051 - DNA, 120 bp, Artificial Sequence
  ENSG00000128908_8 (sequence is synthesized)
accagaccaaagtctttgccaagttttctcacgatgcacctccccctggcactaagaaaaagcacttatccattgagcagctgaatgctcgtcgcaggaaagtatggctcagcattgtga

SEQ ID NO: 278052 - DNA, 120 bp, Artificial Sequence
  ENSG00000128908_9 (sequence is synthesized)
aaaaggaactaccaaaggcaaataagcagaaagcttcagctcgtaacctgtttctcaccaatagccgaaagcttgctcaccagtgcatgaaggaggtgcgtcgagctgccttgcaggccc

SEQ ID NO: 278053 - DNA, 120 bp, Artificial Sequence
  ENSG00000128908_10 (sequence is synthesized)
agaagaactgtaaggaaaccttgcctcgtgcccgccgcctcaccaaggagatgcttctgtactggaagaaatatgagaaagtagagaaggagcaccgcaagagagcagagaaggaagctt

SEQ ID NO: 278054 - DNA, 120 bp, Artificial Sequence
  ENSG00000128908_11 (sequence is synthesized)
tggagcagcggaagttggatgaggaaatgcgggaggccaagaggcaacagcgaaaactcaacttcttaattacccagacagagttgtatgcccatttcatgagtcgcaaacgagatatgg

SEQ ID NO: 278055 - DNA, 120 bp, Artificial Sequence
  ENSG00000128908_12 (sequence is synthesized)
gtcatgatggtatccaggaagaaatcctaaggaaactggaagacagttctacccagagacaaatcgatataggtggaggagtggtagttaacatcacacaggaggattatgatagtaacc

SEQ ID NO: 278056 - DNA, 120 bp, Artificial Sequence
  ENSG00000128908_13 (sequence is synthesized)
attttaaagcccaggccctgaagaatgctgaaaatgcttaccatattcaccaagctcggacaaggtcatttgatgaagatgcaaaagaaagtcgagcagctgccctacgggcagcaaaca

SEQ ID NO: 278057 - DNA, 120 bp, Artificial Sequence
  ENSG00000128908_14 (sequence is synthesized)
agtctggcactgggtttggggagagttatagcctggctaacccatctatccgggctggtgaggatattccacagcccacaatttttaatggcaaattgaaaggttatcaactgaaaggca

SEQ ID NO: 278058 - DNA, 120 bp, Artificial Sequence
  ENSG00000128908_15 (sequence is synthesized)
tgaattggttggccaatctatatgaacagggtattaatggcattcttgctgatgaaatgggccttggtaaaacagtacagagcattgcccttctggcccatctggctgagagagagaaca

SEQ ID NO: 278059 - DNA, 120 bp, Artificial Sequence
  ENSG00000128908_16 (sequence is synthesized)
tttggggacctttcttaataatttcacctgcgtctacacttaacaattggcaccaggagtttactagatttgttcctaaatttaaggtgctaccatattggggaaatcctcatgatagaa

SEQ ID NO: 278060 - DNA, 120 bp, Artificial Sequence
  ENSG00000128908_17 (sequence is synthesized)
aagtcatcagaaggttctggagtcagaagaccctctacactcaggatgcccccttccatgtggttattaccagctatcagctggtggtgcaggatgtaaagtatttccagcgggtcaagt

SEQ ID NO: 278061 - DNA, 120 bp, Artificial Sequence
  ENSG00000128908_18 (sequence is synthesized)
ggcaatacatggtactggatgaggctcaggcgctcaagagtagttccagtgttcgttggaagatcctcttacagttccagtgtcggaatcggcttttgctaaccgggaccccaattcaga

SEQ ID NO: 278062 - DNA, 120 bp, Artificial Sequence
  ENSG00000128908_19 (sequence is synthesized)
acaccatggcagagctttgggctctgctgcatttcattatgccaacattatttgattcacatgaggaatttaatgaatggttttccaaggacattgagagccatgccgaaaacaaatctg

SEQ ID NO: 278063 - DNA, 120 bp, Artificial Sequence
  ENSG00000128908_20 (sequence is synthesized)
ctattgatgagaatcaactttctcgcttacacatgattttgaagccatttatgctgaggagaatcaagaaagatgtggaaaatgaattatctgacaagattgagattctaatgtattgcc

SEQ ID NO: 278064 - DNA, 120 bp, Artificial Sequence
  ENSG00000128908_21 (sequence is synthesized)
aactgaccagccgacagaagctgctatatcaggcactaaagaacaaaatttccattgaggatttattgcagtcttctatgggctctacccaacaagcacagaacaccaccagcagcctca

SEQ ID NO: 278065 - DNA, 120 bp, Artificial Sequence
  ENSG00000128908_22 (sequence is synthesized)
tgaatctggtcatgcagtttaggaaggtgtgtaatcacccggagttatttgaacggcaagaaacttggtctccatttcatatttccctaaagccataccacatttcaaagtttatctacc

SEQ ID NO: 278066 - DNA, 120 bp, Artificial Sequence
  ENSG00000128908_23 (sequence is synthesized)
gtcatggacagatcagggtcttcaatcattcacgagacaggtggttaagggttctttctccatttgcaccagactatatccaacggtctctctttcacagaaaaggtattaatgaagaaa

SEQ ID NO: 278067 - DNA, 120 bp, Artificial Sequence
  ENSG00000128908_24 (sequence is synthesized)
cctacaggctccatcagctacgctcctggggagcgccagaaggggagagccaccagagatacctgaggaacaaggatttccttcttggggttaattttccactctcctttccaaaccttt

SEQ ID NO: 278068 - DNA, 120 bp, Artificial Sequence
  ENSG00000128908_25 (sequence is synthesized)
gcagctgccctttgttaaagtctcttgttttcagcagccactgtaaagcagtgagtggctactcagaccaggttgtccatcagcggagatcagctacctcctcgctgcgtcgctgcctgc

SEQ ID NO: 278069 - DNA, 120 bp, Artificial Sequence
  ENSG00000128908_26 (sequence is synthesized)
tcactgagctgccatcttttttgtgtgtggccagtccacgagttaccgcagtgccattggattcttactgcaatgaccgaagtgcagaatatgaaaggcgagttctgaaggaaggaggga

SEQ ID NO: 278070 - DNA, 120 bp, Artificial Sequence
  ENSG00000128908_27 (sequence is synthesized)
gtctggcagccaagcagtgtttgttgaatggggcccctgaactggctgcagactggctaaatagacgatcacagttcttcccagagccagctggaggtctgtggagcatcagacctcaga

SEQ ID NO: 278071 - DNA, 120 bp, Artificial Sequence
  ENSG00000128908_28 (sequence is synthesized)
atggctggtctttcatcaggattccaggcaaggagagcctcatcactgacagtggaaagctgtatgcccttgatgtcctgctgactcggctcaagtctcaagggcatagggtccttatct

SEQ ID NO: 278072 - DNA, 120 bp, Artificial Sequence
  ENSG00000128908_29 (sequence is synthesized)
actcccagatgaccaggatgatagacctactggaggaatacatggtttacaggaagcatacctacatgaggcttgatggctcatccaagatctcggagaggcgagacatggttgctgatt

SEQ ID NO: 278073 - DNA, 120 bp, Artificial Sequence
  ENSG00000128908_30 (sequence is synthesized)
ttcagaacaggaatgacatctttgtgttcctgttaagcacacgagctggaggactgggtatcaatctcactgctgcagacacagtgattttctatgatagcgactggaaccccactgtgg

SEQ ID NO: 278074 - DNA, 120 bp, Artificial Sequence
  ENSG00000128908_31 (sequence is synthesized)
accagcaggccatggacagggcccaccgcttagggcagacaaagcaggttactgtgtaccggctcatctgtaaaggcaccattgaagaacgcattctgcaaagagccaaggagaagagtg

SEQ ID NO: 278075 - DNA, 120 bp, Artificial Sequence
  ENSG00000128908_32 (sequence is synthesized)
agattcagcggatggtgatttcaggtgggaacttcaaaccagataccttgaaacccaaagaggtggttagtcttcttctagacgacgaagagttggagaagaaactgaggctgcggcagg

SEQ ID NO: 278076 - DNA, 120 bp, Artificial Sequence
  ENSG00000128908_33 (sequence is synthesized)
aagagaaacggcaacaggaggaaaccaaccgagtgaaagagcgcaagcggaagcgggaaaagtatgcagagaagaagaaaaaagaagatgaattggatgggaaaaggagaaaagagggtg

SEQ ID NO: 278077 - DNA, 120 bp, Artificial Sequence
  ENSG00000128908_34 (sequence is synthesized)
tgaacctggtgatcccatttgttccctcggctgataactccaacctctctgctgacggagatgactccttcattagcgtggactcagccatgccaagccctttcagtgagatctccatca

SEQ ID NO: 278078 - DNA, 120 bp, Artificial Sequence
  ENSG00000128908_35 (sequence is synthesized)
gcagtgagctgcacactggctccattcccctggacgagagcagcagtgacatgctggtcattgtggatgacccagcctcctcagcccctcagtctcgagctaccaactctcccgcatcca

SEQ ID NO: 278079 - DNA, 120 bp, Artificial Sequence
  ENSG00000128908_36 (sequence is synthesized)
taacaggctccgtctcagataccgtgaatggaatttccattcaggaaatgccagctgcaggacgtggtcactcagcccgaagccgaggccgccccaaaggttcaggaagcacagccaaag

SEQ ID NO: 278080 - DNA, 120 bp, Artificial Sequence
  ENSG00000128908_37 (sequence is synthesized)
gagcagggaagggccggagccgaaagtccacggcaggcagtgctgctgcaatggcaggagccaaagccggggctgcagcggcctctgcagctgcctatgccgcatacgggtacaacgtgt

SEQ ID NO: 278081 - DNA, 120 bp, Artificial Sequence
  ENSG00000128908_38 (sequence is synthesized)
ctaaaggaatctccgccagcagtcctctgcagacatcccttgttcggcctgctggccttgctgactttggaccttcaagcgcctcttctcctttgagttcccctttgagcaagggaaata

SEQ ID NO: 278082 - DNA, 120 bp, Artificial Sequence
  ENSG00000128908_39 (sequence is synthesized)
atgttcctgggaatcccaagaacctccacatgaccagcagcctagccccagactctctggtccggaaacagggcaaaggcaccaacccctctggaggacggtaaccatctgggccctccg

SEQ ID NO: 278083 - DNA, 120 bp, Artificial Sequence
  ENSG00000128908_40 (sequence is synthesized)
acttccttcaaccaaaccagggctagagtcctgacctgccagtggtctttggatggcttgccccgtgcagcatcttgcatcctgagtcagaagtggaaatgtccagcaggggaaggacag

SEQ ID NO: 278084 - DNA, 120 bp, Artificial Sequence
  ENSG00000128908_41 (sequence is synthesized)
gcaggtggatggtgtgagcacttttatcatctgtgtctcatcaggagcatctggggtgcctgtaggaggaaggccacagggcatggatcagccccactgcatctcaagtgaactgtatag

SEQ ID NO: 278085 - DNA, 120 bp, Artificial Sequence
  ENSG00000128908_42 (sequence is synthesized)
ccaagtcttaaacctctcacggggcaagcctgacacagaccccctttagatgctcaggcatactgtttccatcccgattccactcttcggctctgacacgtcccttgcaaagtctccgca

SEQ ID NO: 278086 - DNA, 120 bp, Artificial Sequence
  ENSG00000128908_43 (sequence is synthesized)
ggtgctgtgaagagccttccatggtagagatttctcttaagagtgtgatttctcatagggctagtaagggagattgtatacctgttgtccacagtcttcaggcagctccccaggtctctg

SEQ ID NO: 278087 - DNA, 120 bp, Artificial Sequence
  ENSG00000128908_44 (sequence is synthesized)
aaccccagagtgtcatcattggagagagcagtgactgcgagagatggtggaggccgctaagcatggtagaggctagaggaagtctatccacaggcagttgtgttcccagcaattcctccc

SEQ ID NO: 278088 - DNA, 120 bp, Artificial Sequence
  ENSG00000128908_45 (sequence is synthesized)
atcctgcatggttcacaccaagagaaccttcagatcctaccagcaaccgtagcaccttccacccaggggactcccagaagccagtagagagaccaggagccacctcaatcagcagtgttt

SEQ ID NO: 278089 - DNA, 120 bp, Artificial Sequence
  ENSG00000128908_46 (sequence is synthesized)
gcatgggaggtgtttctgcctgtccctgcctgatgtccctggtggagcaggtacctccgggcgggcaagcctctgatttgcacacctgaaaatcgcggaattgagtttcgatagattgat

SEQ ID NO: 278090 - DNA, 120 bp, Artificial Sequence
  ENSG00000128908_47 (sequence is synthesized)
ttttaaaacttttttggagtagggggtataggggaatcatttaatttaaatcattaagattcccctgctcaaacccagattcctgtgtacagatgctatttagagggaatcagaaaaatg

SEQ ID NO: 278091 - DNA, 120 bp, Artificial Sequence
  ENSG00000128908_48 (sequence is synthesized)
ccaagccttttctctttgaatgtgctatttttataactgaacttgtacatatgtataaagagagacacatcttccttttactaactggataaaaaaatcttaaataaaatggagtgagat

SEQ ID NO: 278092 - DNA, 120 bp, Artificial Sequence
  ENSG00000128908_49 (sequence is synthesized)
cgcctctcctcccccccgccatggctccccgtgtccctgctccgctcctctcagtgagtgaaagtggccgccgccgccgccggcccagcgcccgcagccgcctcagcgccgccgccatct

SEQ ID NO: 278093 - DNA, 120 bp, Artificial Sequence
  ENSG00000128908_50 (sequence is synthesized)
gcccctcttgcagagtcccctttgcccatcctgaatgcacagtctccctgctcatgcccttcagtcccctgcttggctgtatgcactgtctatattgcactgagagaggaagggacagca

SEQ ID NO: 278094 - DNA, 120 bp, Artificial Sequence
  ENSG00000128908_51 (sequence is synthesized)
acgagtctgcgacacacatcctacatgggagatgtttgctctgacccacgatctgctgggatactgccatgtcaagtcatagaagggagagagacccaattttcatccacctgctttgta

SEQ ID NO: 278095 - DNA, 120 bp, Artificial Sequence
  ENSG00000128908_52 (sequence is synthesized)
aagtggagacatagacctcctcatgggtcctaaaacaaatgccctaagagctcgctttccctgtcaggagaaggtgatgttaacatcttggagattgactttttttttttttctttccct

SEQ ID NO: 278096 - DNA, 120 bp, Artificial Sequence
  ENSG00000128915_0 (sequence is synthesized)
gtcatcacgcagggccgagtcggcgcggccacatcctttaaatatggtcttttttgggcgcgcgcgacaatgtgaggagtggggtggagcgtgtgtggtgtgtggctgcggcctgggcaa

SEQ ID NO: 278097 - DNA, 120 bp, Artificial Sequence
  ENSG00000128915_1 (sequence is synthesized)
gagccgccgcggaccatgagctgagtaagttctggagggatcctgcctcttggagccttcgcagccaggcagctgtgaactgtgagctagagtgaagcagaaatctaggaagatgagctc

SEQ ID NO: 278098 - DNA, 120 bp, Artificial Sequence
  ENSG00000128915_2 (sequence is synthesized)
caagatggtcataagtgaaccaggactgaattgggatatttcccccaaaaatggccttaagacatttttctctcgagaaaattataaagatcattccatggctccaagtttaaaagaact

SEQ ID NO: 278099 - DNA, 120 bp, Artificial Sequence
  ENSG00000128915_3 (sequence is synthesized)
acgtgttttatccaacagacgtataggagaaaatttgaatgcctcagcaagttctgtagaaaatgagccggcagttagttcagcaactcaagcaaaggaaaaagttaaaaccacaattgg

SEQ ID NO: 278100 - DNA, 120 bp, Artificial Sequence
  ENSG00000128915_4 (sequence is synthesized)
aatggttcttcttccaaaaccaagagttccttatcctcgtttctctcgtttctcacagagagagcagaggagttatgtggacttgttggttaaatacgcaaagattcctgcaaattccaa

SEQ ID NO: 278101 - DNA, 120 bp, Artificial Sequence
  ENSG00000128915_5 (sequence is synthesized)
agctgttggaataaataaaaatgactacttgcagtacttggatatgaaaaaacatgtgaacgaagaagttactgagttcctaaagtttttgcagaattctgcaaagaaatgtgcgcagga

SEQ ID NO: 278102 - DNA, 120 bp, Artificial Sequence
  ENSG00000128915_6 (sequence is synthesized)
ttataatatgctttctgatgatgcccgtctcttcacagagaaaattttaagagcttgcattgaacaagtgaaaaagtattcagaattctatactctccacgaggtcaccagcttaatggg

SEQ ID NO: 278103 - DNA, 120 bp, Artificial Sequence
  ENSG00000128915_7 (sequence is synthesized)
attcttcccattcagagtagagatgggattaaagttagaaaaaactcttctcgcattgggcagtgtaaaatatgtgaaaacagtatttccctcaatgcctataaagttgcagctgtcaaa

SEQ ID NO: 278104 - DNA, 120 bp, Artificial Sequence
  ENSG00000128915_8 (sequence is synthesized)
ggacgatatagctaccattgaaacgtcagaacaaacagctgaagctatgcattatgatattagtaaagatccaaatgcagagaagcttgtttccagatatcaccctcagatagctctaac

SEQ ID NO: 278105 - DNA, 120 bp, Artificial Sequence
  ENSG00000128915_9 (sequence is synthesized)
tagtcagtcattatttaccttattaaataatcatggaccaacgtacaaggaacagtgggaaattccagtgtgtattcaagtaatacctgttgcaggttcaaaaccagttaaagtaatata

SEQ ID NO: 278106 - DNA, 120 bp, Artificial Sequence
  ENSG00000128915_10 (sequence is synthesized)
tattaattcaccacttccccaaaagaaaatgactatgagagagagaaatcaaatctttcatgaagttccattaaaatttatgatgtccaaaaacacatctgttccagtctctgcagtctt

SEQ ID NO: 278107 - DNA, 120 bp, Artificial Sequence
  ENSG00000128915_11 (sequence is synthesized)
tatggacaaacctgaagagtttatatctgaaatggacatgtcctgtgaagtcaacgagtgccgaaaaattgagagtcttgaaaacttgtatttggattttgatgatgatgtcacagaact

SEQ ID NO: 278108 - DNA, 120 bp, Artificial Sequence
  ENSG00000128915_12 (sequence is synthesized)
tgaaacttttggagtaaccaccaccaaagtatcaaaatcaccaagtccagcaagtacttccacagtacctaacatgacagatgctcctacagcccccaaagcaggaactacaactgtggc

SEQ ID NO: 278109 - DNA, 120 bp, Artificial Sequence
  ENSG00000128915_13 (sequence is synthesized)
accaagtgcaccagacatttctgctaattctagaagtttatctcagattctgatggaacaattgcaaaaggagaaacagctggtcactggtatggatggtggccctgaggaatgcaaaaa

SEQ ID NO: 278110 - DNA, 120 bp, Artificial Sequence
  ENSG00000128915_14 (sequence is synthesized)
taaagatgatcagggatttgaatcatgtgaaaaggtatcaaattctgacaagcctttgatacaagatagtgacttgaaaacatctgatgccttacagttagaaaattctcaggaaattga

SEQ ID NO: 278111 - DNA, 120 bp, Artificial Sequence
  ENSG00000128915_15 (sequence is synthesized)
aacttctaataaaaatgatatgactatagatatattacatgctgatggtgaaagacctaatgttctagaaaacctagacaactcaaaggaaaagactgttggatcagaagcagcaaaaac

SEQ ID NO: 278112 - DNA, 120 bp, Artificial Sequence
  ENSG00000128915_16 (sequence is synthesized)
tgaagatacagttctctgcagcagtgatacagatgaggagtgtttaatcattgatacagaatgtaaaaataatagtgatggaaagacagctgttgtgggttctaacttaagttccagacc

SEQ ID NO: 278113 - DNA, 120 bp, Artificial Sequence
  ENSG00000128915_17 (sequence is synthesized)
agctagtccaaattcttcctcaggacaggcttctgtaggaaaccagactaatactgcttgtagtcctgaagagtcatgtgttttaaaaaaacctatcaaacgagtatataaaaaatttga

SEQ ID NO: 278114 - DNA, 120 bp, Artificial Sequence
  ENSG00000128915_18 (sequence is synthesized)
tccagttggagagattttaaaaatgcaggatgagctcttaaagccaatttccagaaaagtaccagaattgcccttaatgaatttagaaaattctaaacagccttctgtttctgagcaatt

SEQ ID NO: 278115 - DNA, 120 bp, Artificial Sequence
  ENSG00000128915_19 (sequence is synthesized)
gtctggtccttcagactcctctagttggccgaaatctggatggccttctgcatttcagaagccaaaaggacgattgccatatgaacttcaggactatgttgaagatacatcggaatacct

SEQ ID NO: 278116 - DNA, 120 bp, Artificial Sequence
  ENSG00000128915_20 (sequence is synthesized)
agctcctcaggaaggaaattttgtttataagttatttagcctgcaagacctgttgttactcgtacgctgcagtgtccagaggatagagacaagaccacgttctaaaaaacggaagaaaat

SEQ ID NO: 278117 - DNA, 120 bp, Artificial Sequence
  ENSG00000128915_21 (sequence is synthesized)
cagaagacaatttccagtttatgtactaccaaaagtagagtatcaagcttgttatggagttgaagctctgactgaaagtgaactttgtcgcttatggactgaaagtttattgcattccaa

SEQ ID NO: 278118 - DNA, 120 bp, Artificial Sequence
  ENSG00000128915_22 (sequence is synthesized)
cagctcattttatgttgggcatatcgatgcatttacttcaaaactttttctactggaagaaattacctcagaagaattaaaagaaaagctttcagcactcaagatttccaatttatttaa

SEQ ID NO: 278119 - DNA, 120 bp, Artificial Sequence
  ENSG00000128915_23 (sequence is synthesized)
catcctccaacacattctaaagaaactaagtagcttgcaggagggttcctacttgttatctcatgcagcagaagattcttcactcctgatttataaggcctctgatggaaaagttactag

SEQ ID NO: 278120 - DNA, 120 bp, Artificial Sequence
  ENSG00000128915_24 (sequence is synthesized)
gacagcatacaatttgtataaaacacattgcggccttcctggtgtaccttccagtctctcagttccctgggtcccattagatcccagcctgttattaccatatcatatccatcatggaag

SEQ ID NO: 278121 - DNA, 120 bp, Artificial Sequence
  ENSG00000128915_25 (sequence is synthesized)
aataccttgtacttttccaccgaaatcactggataccacaacacaacaaaagattggtggaacgagaatgcctacacgcagccacaggaatccagtttccatggaaaccaaaagcagttg

SEQ ID NO: 278122 - DNA, 120 bp, Artificial Sequence
  ENSG00000128915_26 (sequence is synthesized)
cttgcctgctcagcaagttgaaactgaaggagtggctccacataaaagaaaaataacttgaggactgtaccatggaaaactaaatttaaaaaaacagttataacagtgtttaatttagat

SEQ ID NO: 278123 - DNA, 120 bp, Artificial Sequence
  ENSG00000128915_27 (sequence is synthesized)
aagtttgagggaaaataatcagtaggcaagaggaacatttttcctgtagtagctagagtgccttgaaaaaatgtgttggctatgtgaaggaatatttcaactaaaatggaatggtatgct

SEQ ID NO: 278124 - DNA, 120 bp, Artificial Sequence
  ENSG00000128915_28 (sequence is synthesized)
tttcacccttgaagtttgaggaggatcttgatatgttttaacattatcatggcagggaaatatataaagaagaaaaatatttttacattaaaccttttctaaaaattgtaaatagaaaaa

SEQ ID NO: 278125 - DNA, 120 bp, Artificial Sequence
  ENSG00000128915_29 (sequence is synthesized)
taatttggttttttatcaagaacaacacttatcgttatgtattgtgttagttatattgccagtctgttgcgactgactcaaaaagttaaatgttgccactgctgaagatgattatgagca

SEQ ID NO: 278126 - DNA, 120 bp, Artificial Sequence
  ENSG00000128915_30 (sequence is synthesized)
actttgtttctgacccattttgacagtttttatatactcctttaaaatgatgaatgttacaggttaataaagttaatacctttaaaaacttggtgaaattccattacagaagccaaaaat

SEQ ID NO: 278127 - DNA, 120 bp, Artificial Sequence
  ENSG00000128915_31 (sequence is synthesized)
aaaaactccctgcctctgaaaagtcagattactgacttcttgtttggcaaccatcagtttgtttaataaaagaaaaaatttggtggtataacatgtttgatgacagatgcctctatctct

SEQ ID NO: 278128 - DNA, 120 bp, Artificial Sequence
  ENSG00000128915_32 (sequence is synthesized)
agattcaagctgagtgttgaaatacactgctgaaagcaaagagataggtatgttttccagaaaaaaagtcagtgtcattgctccagatgacaaggttaatgtggtaaagcataagctttt

SEQ ID NO: 278129 - DNA, 120 bp, Artificial Sequence
  ENSG00000128915_33 (sequence is synthesized)
agtgctgggattacaggggtaagccaccgtgcctggccagcataagctatttttatcctcatctatactgattgatttaaattttccgggcctgcagatgaatttggaaaagggcataat

SEQ ID NO: 278130 - DNA, 120 bp, Artificial Sequence
  ENSG00000128915_34 (sequence is synthesized)
tgatttaaattttccgggcctgcagatgaatttggaaaagggcataatcaactgatgttgctgtagcaaatttggacttaagaaactacagacagggccgggcgtggtggctcacacctg

SEQ ID NO: 278131 - DNA, 120 bp, Artificial Sequence
  ENSG00000128915_35 (sequence is synthesized)
gaatcacttgagtccaggggttggagaccagtctgggcaacacagacctcatctctacaaataaaaaagttagccgggtgtggtggggtgtgcctgtagtcccagctactcaaaaggctg

SEQ ID NO: 278132 - DNA, 120 bp, Artificial Sequence
  ENSG00000128915_36 (sequence is synthesized)
aggcagaagaattgcttgagcccaagaagtcaaggctacagtgagttgtgatcgcaccacagaactcagcttgagtatcagagtgtgaccctgtctcaaagaaaaaaaaaaacaggacag

SEQ ID NO: 278133 - DNA, 120 bp, Artificial Sequence
  ENSG00000128915_37 (sequence is synthesized)
gcttgtttaatctttagaacccttacactaaaattttcagaaattatgtatgtcatttgtaaaatataagttttgtaatcctagataattgcttcacattgaaattttttagctattctg

SEQ ID NO: 278134 - DNA, 120 bp, Artificial Sequence
  ENSG00000128915_38 (sequence is synthesized)
tgtaaagaatagctattcttttggcctaatttctgagaaattagaccgaaaaatctcctcaagtattgtaacagttgaaaatacttatattcaactaccaagttttgtttcattttgatt

SEQ ID NO: 278135 - DNA, 120 bp, Artificial Sequence
  ENSG00000128915_39 (sequence is synthesized)
ttttgttataaaacatttttaagttatttgagaagtaattattagtaaaattgtatcttgataaatcatttcctcatcctgccattcccttttataaaacactgagtttttttattcctt

SEQ ID NO: 278136 - DNA, 120 bp, Artificial Sequence
  ENSG00000128915_40 (sequence is synthesized)
aagtcacatatcccagaaatgttttggttgtgaatcatttgccagcgagccaagggagaggcagggattcccttgaaatgtactcttacacttttttattttatttttaatgtacatttg

SEQ ID NO: 278137 - DNA, 120 bp, Artificial Sequence
  ENSG00000128915_41 (sequence is synthesized)
tgtgcaccagaatggaatgtgctctttttaaagagctggacagtggttgcttcagacttctgaataccagaaagacttgccttttaatttttaaatattactttttacatcataaaatgt

SEQ ID NO: 278138 - DNA, 120 bp, Artificial Sequence
  ENSG00000128915_42 (sequence is synthesized)
gttatcttatccatgtatttgaataacatcatatataaaggtagttttttgcttgtgcttagtgaagcctccttttttaacatacatttgatatgctttatgttctttttcttgattttt

SEQ ID NO: 278139 - DNA, 120 bp, Artificial Sequence
  ENSG00000128915_43 (sequence is synthesized)
catttgatatgctttatgttctttttcttgatttttagtactgagaatttataagccaagaagtaactgacaatatgtttagcaggatgtaatcccagctacttgggaagctgaggtggg

SEQ ID NO: 278140 - DNA, 120 bp, Artificial Sequence
  ENSG00000128915_44 (sequence is synthesized)
agctatgatggtgccactgcactccatcctgggtgagagatcaagaccctatctcaaaaaatgagcaagttttttttttttttttaaatcagacttagggctagcaaggatgtgatcacc

SEQ ID NO: 278141 - DNA, 120 bp, Artificial Sequence
  ENSG00000128915_45 (sequence is synthesized)
ctggcccatttatacctcagcagtgaaggtgtaatttatacacacctctttgaaaacagtttaattcagtaagtgagtgcaactatgtgccatgcactccaaagtaggtccccacagtta

SEQ ID NO: 278142 - DNA, 120 bp, Artificial Sequence
  ENSG00000128915_46 (sequence is synthesized)
ttctctcatagccttgttttttcagatctcaccatatttatttgtttctttgattttcttttcttatagattacaagctctgcaaggacaggggcatatttgttttgttcaccattaagt

SEQ ID NO: 278143 - DNA, 120 bp, Artificial Sequence
  ENSG00000128915_47 (sequence is synthesized)
aataaacacctaatacagtgcctgtcatgtagttgcttagcagatattagttagatgcatgaatgtgtaggtatcaaagattttttttttcaggagatcacattctagtggaagacacta

SEQ ID NO: 278144 - DNA, 120 bp, Artificial Sequence
  ENSG00000128915_48 (sequence is synthesized)
tactgctttatgtgataagtgctttgataaagtaagcaagtcatctaaccagatcttggtagttaaggttttctgagatagaacttgagctgagtcttttaaaaatagtaggatttataa

SEQ ID NO: 278145 - DNA, 120 bp, Artificial Sequence
  ENSG00000128915_49 (sequence is synthesized)
gggaaaattaaaggtcttccacaaagaaactaagtgaaactaagcagcctatgaaaaggtgaaagttggagagattataggctatgaacatgggagatgagagagaaaactgcaggatag

SEQ ID NO: 278146 - DNA, 120 bp, Artificial Sequence
  ENSG00000128915_50 (sequence is synthesized)
ggacagaaacactgtgctaagacatttgaactttgtcctgtgcaatgtgggaaccagtagtgaaggttaattaactgacatgatcagatatgtatttgaaaagggctcttgttggcatta

SEQ ID NO: 278147 - DNA, 120 bp, Artificial Sequence
  ENSG00000128915_51 (sequence is synthesized)
gtctagagaatgcgatggagctgggaagcgaaagaagaaatgttgggagcctgtgttgtagtaactgaaaaatggcaatggcccagaattaaagcagcaagaataggagtgggctcaagt

SEQ ID NO: 278148 - DNA, 120 bp, Artificial Sequence
  ENSG00000128915_52 (sequence is synthesized)
gatgtataaggaaaaaaaaaaaaatgacaactcagttttgttgttggtaaggagagtaaagtatggcttctgggtttctcatttgagatactgagtaaatgatggtgttaacccattgag

SEQ ID NO: 278149 - DNA, 120 bp, Artificial Sequence
  ENSG00000128915_53 (sequence is synthesized)
aaaatagtgtggttagagtgggaagaaagttaatttaaaatgttcatttttttttttagtcatttctacttttggattctaggtttgtgtgctatattggttataaccaatttgctgaat

SEQ ID NO: 278150 - DNA, 120 bp, Artificial Sequence
  ENSG00000128915_54 (sequence is synthesized)
aataaattatcccaaaacttagctacttaaaacaacaaacattatctcacagtttctgtaagtcaaaagtccaggtctctcatgaagttgcagtcaggctcttggctagggctgcagtca

SEQ ID NO: 278151 - DNA, 120 bp, Artificial Sequence
  ENSG00000128915_55 (sequence is synthesized)
tctgaaggattagtaagtcgctaagcccacacttaagctccacccttgaagggagaagtttggaaagaatttgtgaacatatttttaaatcacatatgctatgaacaggtttaggggagg

SEQ ID NO: 278152 - DNA, 120 bp, Artificial Sequence
  ENSG00000128915_56 (sequence is synthesized)
gagaggaaagaaaactttaacttttcattagcatactgcatctgtagttcctaatgggcatgttgtaaagatgttaagacgttttctatgcattataggtatatagtagtattttgtttt

SEQ ID NO: 278153 - DNA, 120 bp, Artificial Sequence
  ENSG00000128915_57 (sequence is synthesized)
gttctgtttttttgtttggtatgtagtagtttttaatcaaaccttaacgtatttgatattaagatttattgagtttcttgttgagatgtagaaataaaggggatccatttcatttatcca

SEQ ID NO: 278154 - DNA, 120 bp, Artificial Sequence
  ENSG00000128915_58 (sequence is synthesized)
atcctttaaatatggtcttttttgggcgcgcgcgacaatgtgaggagtggggtggagcgtgtgtggtgtgtggctgcggcctgggcaagagccgccgcggaccatgagggatatttcccc

SEQ ID NO: 278155 - DNA, 120 bp, Artificial Sequence
  ENSG00000128915_59 (sequence is synthesized)
aggggcgggaggagggaacatggcggccgggccaggaccctttgctcctggctctgcgcggctcctacccctgctttgcttgcccttttacctgcttttctggaaccttgtttcccctct

SEQ ID NO: 278156 - DNA, 120 bp, Artificial Sequence
  ENSG00000128915_60 (sequence is synthesized)
ctttgcgtcccctttccctcagccgtttcttttgccttcctcgactattcccccccagctccacactgggtcgaagtgtgagaggtagattaagtgggagccggtcgggcccgttcggtg

SEQ ID NO: 278157 - DNA, 120 bp, Artificial Sequence
  ENSG00000128915_61 (sequence is synthesized)
tcgagagaccgactcctaaatttgattaggttctcgcaggtcactttatcagtctgcctggggtcacaggagaagtactgaacatgagagatcaagcctgatttgtagtcctgatgatgt

SEQ ID NO: 278158 - DNA, 120 bp, Artificial Sequence
  ENSG00000128915_62 (sequence is synthesized)
aaatatggtcttttttgggcgcgcgcgacaatgtgaggagtggggtggagcgtgtgtggtgtgtggctgcggcctgggcaagagccgccgcggaccatgaggttctcgcaggtcacttta

SEQ ID NO: 278159 - DNA, 120 bp, Artificial Sequence
  ENSG00000128915_63 (sequence is synthesized)
acatcctttaaatatggtcttttttgggcgcgcgcgacaatgtgaggagtggggtggagcgtgtgtggtgtgtggctgcggcctgggcaagagccgccgcggaccatgagtctgcctggg

SEQ ID NO: 278160 - DNA, 120 bp, Artificial Sequence
  ENSG00000128915_64 (sequence is synthesized)
gttgaacaatgagaacacatggacccagagagtgaaacaacacacaccggggcctgtcagggggtggggggcaaggtgagagagagcattaggacaaatacctaattcgtgcagggctta

SEQ ID NO: 278161 - DNA, 72 bp, Artificial Sequence
  ENSG00000128915_65 (sequence is synthesized)
agagagcattaggacaaatacctaattcgtgcagggcttaaaacctagatgacaggttgataccattctcca

SEQ ID NO: 278162 - DNA, 120 bp, Artificial Sequence
  ENSG00000128915_66 (sequence is synthesized)
cacatcctttaaatatggtcttttttgggcgcgcgcgacaatgtgaggagtggggtggagcgtgtgtggtgtgtggctgcggcctgggcaagagccgccgcggaccatgaggtcacttta

SEQ ID NO: 278163 - DNA, 120 bp, Artificial Sequence
  ENSG00000128915_67 (sequence is synthesized)
caggtgttaatgtaggcattagtgctctttcatttgtagaatgaaacgagctgctcagagtatttgagcctaagacaatgtgactcatgctttaaaggagaaaaaaattctacctttttt

SEQ ID NO: 278164 - DNA, 120 bp, Artificial Sequence
  ENSG00000128915_68 (sequence is synthesized)
atcctcttgaaaatgactagtatataaaaaagtcagtgcttcccagcatctggctttgagcctttgggcaactatgtatgataggctttgttgcaaggagtctgctgtcagtcacattcc

SEQ ID NO: 278165 - DNA, 120 bp, Artificial Sequence
  ENSG00000128915_69 (sequence is synthesized)
ctgaccaaaatcaaaccttgcctatgtggggaggtatgttgattttggtcacaaatgggaatggtgaggagagatctctttcatccatccaccttttggcaccaaacattcttctattca

SEQ ID NO: 278166 - DNA, 120 bp, Artificial Sequence
  ENSG00000128915_70 (sequence is synthesized)
tcaggcctgaatgtatccatcttacagtgtgaatcctgctgtaattgaaaggatgaaataagattacctgaaagcattttgaaagtggcaaagctgtataggcaaatgtatttgctatta

SEQ ID NO: 278167 - DNA, 62 bp, Artificial Sequence
  ENSG00000128915_71 (sequence is synthesized)
gcagtggcatgatctcagctcaccacaacatccacctcctggattggcttggctaatttttt

SEQ ID NO: 278168 - DNA, 120 bp, Artificial Sequence
  ENSG00000128915_72 (sequence is synthesized)
ttgttttttgttttttgtttttactaaaatgctgagatcgattttaataagggaaagtgtttgtatatagtagccataaatgccggtaacattcatgcttggaatatacagattgagcag

SEQ ID NO: 278169 - DNA, 120 bp, Artificial Sequence
  ENSG00000128915_73 (sequence is synthesized)
ccctaatccaaaattcaaaatgctccaaagtttgaaaacttttaagctccggcatggtatcacaagtggaaaattccacacatgacctcgtatgatgggtcacaggccaaactccagtca

SEQ ID NO: 278170 - DNA, 120 bp, Artificial Sequence
  ENSG00000128915_74 (sequence is synthesized)
aaactttgtttcatgtgtaaaagtatataaaatattgtataaaattactctcaggctctatgtatatggtggatatgaaacataaaagggttttgtgtttagacttgagtcctgtcccca

SEQ ID NO: 278171 - DNA, 120 bp, Artificial Sequence
  ENSG00000128915_75 (sequence is synthesized)
atgtacttgtttatccttttgaagcataaagttttattgcaaatccctaaacctagtagttaaaaatacaggctttagattcaaactgaaattgaatttcgagtctagctggactttagg

SEQ ID NO: 278172 - DNA, 120 bp, Artificial Sequence
  ENSG00000128915_76 (sequence is synthesized)
caactaacttaacctccctcagcctaagttttctcctttcatacatgaaaggaagtagtacctacttgacaaggttattatgagggttaagtttgatattttatgttaaaggctgagcac

SEQ ID NO: 278173 - DNA, 120 bp, Artificial Sequence
  ENSG00000128915_77 (sequence is synthesized)
gtttttagttatgtatgtagtgaaaactccttgatggtggtggttaatatgaggttttgtttaattggtctcattcatattcaagagttttatttttttgagatggaacctcaccctgcc

SEQ ID NO: 278174 - DNA, 120 bp, Artificial Sequence
  ENSG00000128915_78 (sequence is synthesized)
gattacaggcgtcagccactgcacctgacccatatctaagagtttttaagtgtgaaaaggaacaggtgagcttaatttgattgttacagaaagtattttgccagattgttaatcttcagt

SEQ ID NO: 278175 - DNA, 120 bp, Artificial Sequence
  ENSG00000128915_79 (sequence is synthesized)
tacagaaagtattttgccagattgttaatcttcagtatacttagtagctatgtgacctcgggcagattacataatatctctgtgtctagtttgcttatctgtaaaatgggcatcatgata

SEQ ID NO: 278176 - DNA, 120 bp, Artificial Sequence
  ENSG00000128915_80 (sequence is synthesized)
ttacctaactcataggattgtttaggtttaaatgaatttgtacatataaagcatttagagtaacacttggcactctgtaaatattagcttttattattctgtattttaaaatattttttc

SEQ ID NO: 278177 - DNA, 120 bp, Artificial Sequence
  ENSG00000128915_81 (sequence is synthesized)
cattatttttaaatacattgtttatagagaacttgattcattcattccataagtttttattaagcagatactattctatgcagggaggaagcagcagtgaataaaaacaaaacctgtttt

SEQ ID NO: 278178 - DNA, 120 bp, Artificial Sequence
  ENSG00000128915_82 (sequence is synthesized)
ccctcagaccttaaataagtggcagagggcccagataacagtaaaaaagcaggtagtggtaaatgctatggagaaaaatagagtacgttaaggggaaatagagagatgggtggggaaggg

SEQ ID NO: 278179 - DNA, 120 bp, Artificial Sequence
  ENSG00000128915_83 (sequence is synthesized)
gtcattttatattcacgattaagaaggtttttctgaggataggaaatgtggacagagacttgagtaaaatgagggagcaaacaaaattttaaaatataaaaatgtttttcttgtacttaa

SEQ ID NO: 278180 - DNA, 120 bp, Artificial Sequence
  ENSG00000128915_84 (sequence is synthesized)
gagctcatacaattttaaggatattggccttttggtttttatatttgtttatgtttttctctttgccatttgccttttaatatttttatgatacatatgtcataaagcatttttaactta

SEQ ID NO: 278181 - DNA, 120 bp, Artificial Sequence
  ENSG00000128915_85 (sequence is synthesized)
tgttttcttcttacacattttacttttaaaaatctgcctaaaacttatattgaggtgaatgtcaggcagtaacaagaagaaacatgaggtaggttaaaagggatgaaaattgacagtggc

SEQ ID NO: 278182 - DNA, 120 bp, Artificial Sequence
  ENSG00000128915_86 (sequence is synthesized)
ttctttcagtaatggtagaccaggtaatttggaccctccttttattgatgacatctaaaaaagctggacaaatattaaaatgtctttcttagaagtatcaaaaagctaacaagatagtga

SEQ ID NO: 278183 - DNA, 120 bp, Artificial Sequence
  ENSG00000128915_87 (sequence is synthesized)
ggaattgtagggctgagatactgaagaaaacaggattcccagaaggtaagcctattatacttagggtcattttttccttggattatatgtgccagttctgaagaggcaactaagaaaatg

SEQ ID NO: 278184 - DNA, 120 bp, Artificial Sequence
  ENSG00000128915_88 (sequence is synthesized)
aactgtgcttttggcagcatcataggactagggggataaaaggaaaacttcagttttccaccaagggcctggaccccaaaggggctgcacctcaggagtcagggtgaaccagaagtaaat

SEQ ID NO: 278185 - DNA, 120 bp, Artificial Sequence
  ENSG00000128915_89 (sequence is synthesized)
gagctttctctgaaatgacagcctgagttttcaggccctgaacttggagtaaaatgctttttctggattgtgcaggtaaaagtaagtaaaaatgagaggatgataatgctttttttgcct

SEQ ID NO: 278186 - DNA, 120 bp, Artificial Sequence
  ENSG00000128915_90 (sequence is synthesized)
caaattattatacttcttaatgtctattagtctaatttatgttgctaagtgttctggaattattttgatttctgtggtccaacaatttggaatgtttttaaattttgaagtgcttgagtt

SEQ ID NO: 278187 - DNA, 120 bp, Artificial Sequence
  ENSG00000128915_91 (sequence is synthesized)
agtttattgtttgtttacatttttcttaatgatatctaattttatttccttctgaacatagaataagactttatcagattctgctttggtctatattgagattttctttgtatattaatt

SEQ ID NO: 278188 - DNA, 120 bp, Artificial Sequence
  ENSG00000128915_92 (sequence is synthesized)
gttcattttttgaaatgccctttggattcttgggaagggaaaaagtgtatctttgtagtctgtttatatatgtattttcaatctttcatatatattctcatcgtttattattattcatac

SEQ ID NO: 278189 - DNA, 120 bp, Artificial Sequence
  ENSG00000128915_93 (sequence is synthesized)
tttctggattcctttttattttttacttagagacagtatctcattgacttagtataattgtgtctctgtcaaatttttcttttatttttcagtttgtacaataaaaatttatgaccacta

SEQ ID NO: 278190 - DNA, 120 bp, Artificial Sequence
  ENSG00000128915_94 (sequence is synthesized)
gtctttattctcctttttaattttcttgtaattacatacttgtaaattcaattgtgaatacttctattctgcccttttttactttcgtttttatttatgtatttattagttttagggtct

SEQ ID NO: 278191 - DNA, 65 bp, Artificial Sequence
  ENSG00000128915_95 (sequence is synthesized)
ctggagtatagtcagcagccttccaagtagctggggctgcaggcatgtgctaccatgcccagcta

SEQ ID NO: 278192 - DNA, 120 bp, Artificial Sequence
  ENSG00000128915_96 (sequence is synthesized)
ctaccatgcccagctaattttttgttttttcttgagatggggtctcattatattgccagactggtcttgaacttctagcctcaagcaatcctcctaccttagcctccaaaagctctggta

SEQ ID NO: 278193 - DNA, 120 bp, Artificial Sequence
  ENSG00000128915_97 (sequence is synthesized)
ttacagggatgacctaccatgctgacctattttagaaacacttatttaatagtataatcaaaaatacacatttgttttctagcttcttagagtactgtttaattggttaactatttattg

SEQ ID NO: 278194 - DNA, 120 bp, Artificial Sequence
  ENSG00000128915_98 (sequence is synthesized)
acctatatatttattttgaaattttcttataatgacactacttttaaaacctcaaatattttgatgaaatgactttttcctttgtttttgttgttctgctggggtatggggattaggctg

SEQ ID NO: 278195 - DNA, 120 bp, Artificial Sequence
  ENSG00000128915_99 (sequence is synthesized)
aagttcaatttgcattggctcatttcatgtacagttaacatcctcacataatagattacttgctagtcattattggtagtatttcctcccactggaatgtccaatatcgaacatctcaat

SEQ ID NO: 278196 - DNA, 120 bp, Artificial Sequence
  ENSG00000128915_100 (sequence is synthesized)
gcatcccataaatctcaatcctttctaatcatctcagactgctcctctgtgtagtcttttgctttctttgatctcttagtgcagtcttttacttctctgacttgttactttgtactttat

SEQ ID NO: 278197 - DNA, 120 bp, Artificial Sequence
  ENSG00000128915_101 (sequence is synthesized)
tctctcttaacacctatcccttcttcctgttagacaataaacagcttaaggtcagagtctgataaaattctgtgttgagtctaataaaattttgtgttatactgcatagcttgattgctt

SEQ ID NO: 278198 - DNA, 120 bp, Artificial Sequence
  ENSG00000128915_102 (sequence is synthesized)
gtatgtaataaatcctatgagggtgtgtttcttaatcaaagaaaggttattcacttaaaatgttttttcctgttttggttaatcagtattttgttttcatgttttatgagagtattaagt

SEQ ID NO: 278199 - DNA, 120 bp, Artificial Sequence
  ENSG00000128915_103 (sequence is synthesized)
agataattgattctttctgcttaactcaaaaaaggaagtagctaaatgcactaattggtgatgtactgcctgcctcctcctccttcatacacatactcgaagtttttgtagtaattttca

SEQ ID NO: 278200 - DNA, 120 bp, Artificial Sequence
  ENSG00000128915_104 (sequence is synthesized)
ttctgtaaccaaaatttcaatgttcctccaaagacctcacaccaacaatctcaacattagctacttgaatgcaatttgccagccacatccattttagaaaaggcccagttaaaaacttac

SEQ ID NO: 278201 - DNA, 120 bp, Artificial Sequence
  ENSG00000128915_105 (sequence is synthesized)
gagtgaaattttgtttaaagtactgacagagaatggagattcatgacaaaaaaaaaaattaaggtttcagtttttaaatgtacagttcaacatcaactgtatggattacttcattttaat

SEQ ID NO: 278202 - DNA, 120 bp, Artificial Sequence
  ENSG00000128915_106 (sequence is synthesized)
tattttgtaaaatcctaagtaatcctaactgctgattattctctgtgaatcctatcctcttgtgagcctttcatttcattgtactgggatagtatttttggcttctgtgacaagtgtttg

SEQ ID NO: 278203 - DNA, 120 bp, Artificial Sequence
  ENSG00000128915_107 (sequence is synthesized)
gttgtgggattttggtttgttcggggttttttggtggggtgtaggtatggggggataacatctgagtttttgagtttttaaaaatgttataatactcttttaatttaaggaagatgttca

SEQ ID NO: 278204 - DNA, 120 bp, Artificial Sequence
  ENSG00000128915_108 (sequence is synthesized)
agaaaatcacttgaagtgcttttaaaagtggagattgctggccccaccctggagtgtctgattcactaggtctgtattgggacctaagactttctcaggtcgtactgatgctgctagttt

SEQ ID NO: 278205 - DNA, 120 bp, Artificial Sequence
  ENSG00000128915_109 (sequence is synthesized)
agggaccacactttgagaatcaattctatagcttatagtctcttttttcagtagaatcaacacacttgtgatttgtttgtttgctctgctttgctataaacatgttccccactttcccta

SEQ ID NO: 278206 - DNA, 120 bp, Artificial Sequence
  ENSG00000128915_110 (sequence is synthesized)
gttgcagtactctttttatcttttccccataaaaacttgaagatttactcctttaagacagtttcccacatagtctcattgcaacttccgtattcaccctccaaccctataatatttatc

SEQ ID NO: 278207 - DNA, 120 bp, Artificial Sequence
  ENSG00000128915_111 (sequence is synthesized)
aattctatatagttgatatataggcagtcctcacttagcacacagtttcaataagcacaagttttagttatgaccgtgtattaacagtgagtaattgtataaagtataagcttcactgct

SEQ ID NO: 278208 - DNA, 120 bp, Artificial Sequence
  ENSG00000128915_112 (sequence is synthesized)
ggctcttcagtccacagatcactacataagtaacaggcaaatcatgatcagtgaccagtcatgtcacttctttcaaagtctgtttataattgtttattgtgtacccattgagttcatgca

SEQ ID NO: 278209 - DNA, 120 bp, Artificial Sequence
  ENSG00000128915_113 (sequence is synthesized)
cagaaagcagagtgtgcagttgtgttgactctttgtctcccggtgataaacccatgtgatattttaccaaagtagataatcaaaagaattgaccaaaaaatattaaagcaaagcaaagaa

SEQ ID NO: 278210 - DNA, 120 bp, Artificial Sequence
  ENSG00000128915_114 (sequence is synthesized)
acaaaaggtgatactgccagaagtgaaatttgaatggaacataaatggaattacagaggaaatagcaaagagtgggaatgttggcactgctgttgttccagtgactctagatttgctgcc

SEQ ID NO: 278211 - DNA, 120 bp, Artificial Sequence
  ENSG00000128915_115 (sequence is synthesized)
agacaaacttagtgaaagcattgtgacataaaggatgaacaagtgacactggcataagattttacagtaaacaaatcctgaagataatttcatgacattgaaggcaccaaggatacagtg

SEQ ID NO: 278212 - DNA, 120 bp, Artificial Sequence
  ENSG00000128915_116 (sequence is synthesized)
caccaaggatacagtgtcagaagctgatccttaggaatataacggttcaccatggcatagaaaagatgtatccggccaggtacggtgcctcaagcttctaatcccagcactttgggaggc

SEQ ID NO: 278213 - DNA, 69 bp, Artificial Sequence
  ENSG00000128915_117 (sequence is synthesized)
tggtgaaaccctgtctctacttaaaatgtaaaaaattagctgggcagtagtaagagcctgggaggcgga

SEQ ID NO: 278214 - DNA, 120 bp, Artificial Sequence
  ENSG00000128915_118 (sequence is synthesized)
aaaagaaaagatgcatccttcctatgacaaattgtgcaagaaggtaacaagcactgttcaaactgctcttcattaacgtttcatgaagaaaacactttaattttttggattacagtgtac

SEQ ID NO: 278215 - DNA, 120 bp, Artificial Sequence
  ENSG00000128915_119 (sequence is synthesized)
taaaatattttactgttcttttcgttttcctatacatttatgattgatagagaatttatagtgttttgataaaaattttaaaggtaaccaaacagttgtaattttccctattgattgtta

SEQ ID NO: 278216 - DNA, 120 bp, Artificial Sequence
  ENSG00000128915_120 (sequence is synthesized)
caattgtagggtttcagcctgtataggcatttttatggtcctcacactgcatgcaaagcaaggagtacctacctatacacatatgaatgcatgtatgcatgtatatgtttatgtgcatat

SEQ ID NO: 278217 - DNA, 120 bp, Artificial Sequence
  ENSG00000128915_121 (sequence is synthesized)
atatatgaatgaacgcttgtatataaaagctttatttttattatgtatagattttatttgtcctctataaatcagtgctttccaaccttgatgcacataaatatttgtacagcacactgt

SEQ ID NO: 278218 - DNA, 120 bp, Artificial Sequence
  ENSG00000128915_122 (sequence is synthesized)
gatatataagagagattgcttgtggctgaagggcaatagccaggaagcttttgccatcccaagcattgctgagctgcctgaagggctgaggtgatgagtatcttaagcacatatatatct

SEQ ID NO: 278219 - DNA, 120 bp, Artificial Sequence
  ENSG00000128915_123 (sequence is synthesized)
tatttgaggcccacaggttagaaagctccaatgttgagagagttgtgaactccttgagtaggtagatcctcagagcacttagtatggtattctctgtatagttatttttgacagaccata

SEQ ID NO: 278220 - DNA, 120 bp, Artificial Sequence
  ENSG00000128915_124 (sequence is synthesized)
tttgacatatactataaaacttttttaaatgaatttctttcaaaaggtaagaactattagtcttctcaaagacataattagtaaacatctaaaagttattatgcttagtatttcctttct

SEQ ID NO: 278221 - DNA, 120 bp, Artificial Sequence
  ENSG00000128915_125 (sequence is synthesized)
atggtttttaaatcattacgatatgtctttgttattagaaatgccactgtgtaatgagtgttacatataataagtaggtatgggtacaaatgaatttggtgtcttagaaggaagccatct

SEQ ID NO: 278222 - DNA, 120 bp, Artificial Sequence
  ENSG00000128915_126 (sequence is synthesized)
ggtaaaaatgtttctaattatttgtatgagcataaagcaaatgaaagggggcttggtaagaaaatgaaacattaaattatgtgcatttttaattgtcccagtgattgacatcagctttcc

SEQ ID NO: 278223 - DNA, 120 bp, Artificial Sequence
  ENSG00000128915_127 (sequence is synthesized)
aggtaatttgttttgatacctaaatattaggagttaaaaaaataaaaacaatttgtcttcaacattgatacgtcttatattctcatcatgctagttgatgtttttaactatggtacaata

SEQ ID NO: 278224 - DNA, 120 bp, Artificial Sequence
  ENSG00000128915_128 (sequence is synthesized)
catacgatttttgtgttgacttatataacatttaacccaggactcttttatgtcactcttccttggtatatttcaggaccttggtgttagctctcaacctgttttgttttagaacatacg

SEQ ID NO: 278225 - DNA, 120 bp, Artificial Sequence
  ENSG00000128915_129 (sequence is synthesized)
cattacttgttataacaaaagcatcatattgagaatttgctgttttgttttttggaattctagattcatattgtgtttgtgaaaaaagtaagaatcggagccgggtgccgttactcacac

SEQ ID NO: 278226 - DNA, 76 bp, Artificial Sequence
  ENSG00000128915_130 (sequence is synthesized)
acacctgtaatcttagcactttgggagtccaaggcaggtggattgcttgaggcgtaccaaaaataccaaaaaaaaa

SEQ ID NO: 278227 - DNA, 120 bp, Artificial Sequence
  ENSG00000128917_0 (sequence is synthesized)
agtagcggcgctgcgcgcaggccgggaacacgaggccaagagccgcagccccagccgccttggtgcagcgtacaccggcactagcccgcttgcagccccaggattagacagaagacgcgt

SEQ ID NO: 278228 - DNA, 120 bp, Artificial Sequence
  ENSG00000128917_1 (sequence is synthesized)
cctcggcgcggtcgccgcccagccgtagtcacctggattacctacagcggcagctgcagcggagccagcgagaaggccaaaggggagcagcgtcccgagaggagcgcctcttttcaggga

SEQ ID NO: 278229 - DNA, 120 bp, Artificial Sequence
  ENSG00000128917_2 (sequence is synthesized)
ccccgccggctggcggacgcgcgggaaagcggcgtcgcgaacagagccagattgagggcccgcgggtggagagagcgacgcccgaggggatggcggcagcgtcccggagcgcctctggct

SEQ ID NO: 278230 - DNA, 120 bp, Artificial Sequence
  ENSG00000128917_3 (sequence is synthesized)
gggcgctactgctgctggtggcactttggcagcagcgcgcggccggctccggcgtcttccagctgcagctgcaggagttcatcaacgagcgcggcgtactggccagtgggcggccttgcg

SEQ ID NO: 278231 - DNA, 120 bp, Artificial Sequence
  ENSG00000128917_4 (sequence is synthesized)
agcccggctgccggactttcttccgcgtctgccttaagcacttccaggcggtcgtctcgcccggaccctgcaccttcgggaccgtctccacgccggtattgggcaccaactccttcgctg

SEQ ID NO: 278232 - DNA, 120 bp, Artificial Sequence
  ENSG00000128917_5 (sequence is synthesized)
tccgggacgacagtagcggcggggggcgcaaccctctccaactgcccttcaatttcacctggccgggtaccttctcgctcatcatcgaagcttggcacgcgccaggagacgacctgcggc

SEQ ID NO: 278233 - DNA, 120 bp, Artificial Sequence
  ENSG00000128917_6 (sequence is synthesized)
cagaggccttgccaccagatgcactcatcagcaagatcgccatccagggctccctagctgtgggtcagaactggttattggatgagcaaaccagcaccctcacaaggctgcgctactctt

SEQ ID NO: 278234 - DNA, 120 bp, Artificial Sequence
  ENSG00000128917_7 (sequence is synthesized)
accgggtcatctgcagtgacaactactatggagacaactgctcccgcctgtgcaagaagcgcaatgaccacttcggccactatgtgtgccagccagatggcaacttgtcctgcctgcccg

SEQ ID NO: 278235 - DNA, 120 bp, Artificial Sequence
  ENSG00000128917_8 (sequence is synthesized)
gttggactggggaatattgccaacagcctatctgtctttcgggctgtcatgaacagaatggctactgcagcaagccagcagagtgcctctgccgcccaggctggcagggccggctgtgta

SEQ ID NO: 278236 - DNA, 120 bp, Artificial Sequence
  ENSG00000128917_9 (sequence is synthesized)
acgaatgcatcccccacaatggctgtcgccacggcacctgcagcactccctggcaatgtacttgtgatgagggctggggaggcctgttttgtgaccaagatctcaactactgcacccacc

SEQ ID NO: 278237 - DNA, 120 bp, Artificial Sequence
  ENSG00000128917_10 (sequence is synthesized)
actccccatgcaagaatggggcaacgtgctccaacagtgggcagcgaagctacacctgcacctgtcgcccaggctacactggtgtggactgtgagctggagctcagcgagtgtgacagca

SEQ ID NO: 278238 - DNA, 120 bp, Artificial Sequence
  ENSG00000128917_11 (sequence is synthesized)
acccctgtcgcaatggaggcagctgtaaggaccaggaggatggctaccactgcctgtgtcctccgggctactatggcctgcattgtgaacacagcaccttgagctgcgccgactccccct

SEQ ID NO: 278239 - DNA, 120 bp, Artificial Sequence
  ENSG00000128917_12 (sequence is synthesized)
gcttcaatgggggctcctgccgggagcgcaaccagggggccaactatgcttgtgaatgtccccccaacttcaccggctccaactgcgagaagaaagtggacaggtgcaccagcaacccct

SEQ ID NO: 278240 - DNA, 120 bp, Artificial Sequence
  ENSG00000128917_13 (sequence is synthesized)
gtgccaacgggggacagtgcctgaaccgaggtccaagccgcatgtgccgctgccgtcctggattcacgggcacctactgtgaactccacgtcagcgactgtgcccgtaacccttgcgccc

SEQ ID NO: 278241 - DNA, 120 bp, Artificial Sequence
  ENSG00000128917_14 (sequence is synthesized)
gacgctgtgaggtgcggacatccatcgatgcctgtgcctcgagtccctgcttcaacagggccacctgctacaccgacctctccacagacacctttgtgtgcaactgcccttatggctttg

SEQ ID NO: 278242 - DNA, 120 bp, Artificial Sequence
  ENSG00000128917_15 (sequence is synthesized)
tgggcagccgctgcgagttccccgtgggcttgccgcccagcttcccctgggtggccgtctcgctgggtgtggggctggcagtgctgctggtactgctgggcatggtggcagtggctgtgc

SEQ ID NO: 278243 - DNA, 120 bp, Artificial Sequence
  ENSG00000128917_16 (sequence is synthesized)
ggcagctgcggcttcgacggccggacgacggcagcagggaagccatgaacaacttgtcggacttccagaaggacaacctgattcctgccgcccagcttaaaaacacaaaccagaagaagg

SEQ ID NO: 278244 - DNA, 120 bp, Artificial Sequence
  ENSG00000128917_17 (sequence is synthesized)
agctggaagtggactgtggcctggacaagtccaactgtggcaaacagcaaaaccacacattggactataatctggccccagggcccctggggcgggggaccatgccaggaaagtttcccc

SEQ ID NO: 278245 - DNA, 120 bp, Artificial Sequence
  ENSG00000128917_18 (sequence is synthesized)
acagtgacaagagcttaggagagaaggcgccactgcggttacacagtgaaaagccagagtgtcggatatcagcgatatgctcccccagggactccatgtaccagtctgtgtgtttgatat

SEQ ID NO: 278246 - DNA, 120 bp, Artificial Sequence
  ENSG00000128917_19 (sequence is synthesized)
cagaggagaggaatgaatgtgtcattgccacggaggtataaggcaggagcctacctggacatccctgctcagccccgcggctggaccttccttctgcattgtttacattgcatcctggat

SEQ ID NO: 278247 - DNA, 120 bp, Artificial Sequence
  ENSG00000128917_20 (sequence is synthesized)
gggacgtttttcatatgcaacgtgctgctctcaggaggaggagggaatggcaggaaccggacagactgtgaacttgccaagagatgcaatacccttccacacctttgggtgtctgtctgg

SEQ ID NO: 278248 - DNA, 120 bp, Artificial Sequence
  ENSG00000128917_21 (sequence is synthesized)
catcagattggcagctgcaccaaccagaggaacagaagagaagagagatgccactgggcactgccctgccagtagtggccttcagggggctccttccggggctccggcctgttttccaga

SEQ ID NO: 278249 - DNA, 120 bp, Artificial Sequence
  ENSG00000128917_22 (sequence is synthesized)
gagagtggcagtagccccatggggcccggagctgctgtggcctccactggcatccgtgtttccaaaagtgcctttggcccaggctccacggcgacagttgggcccaaatcagaaaggaga

SEQ ID NO: 278250 - DNA, 120 bp, Artificial Sequence
  ENSG00000128917_23 (sequence is synthesized)
gagggggccaatgagggcagggcctcctgtgggctggaaaaccactgggtgcgtctcttgctggggtttgccctggaggtgaggtgagtgctcgagggaggggagtgctttctgccccat

SEQ ID NO: 278251 - DNA, 120 bp, Artificial Sequence
  ENSG00000128917_24 (sequence is synthesized)
gcctccaactactgtatgcaggcctggctctctggtctaggccctttgggcaagaatgtccgtctacccggcttccaccaccctctggccctgggcttctgtaagcagacaggcagaggg

SEQ ID NO: 278252 - DNA, 120 bp, Artificial Sequence
  ENSG00000128917_25 (sequence is synthesized)
cctgcccctcccaccagccaagggtgccaggcctaactggggcactcagggcagtgtgttggaaattccactgagggggaaatcaggtgctgcggccgcctgggccctttcctccctcaa

SEQ ID NO: 278253 - DNA, 120 bp, Artificial Sequence
  ENSG00000128917_26 (sequence is synthesized)
tccctcaagcccatctccacaacctcgagcctgggctctggtccactactgccccagaccaccctcaaagctggtcttcagaaatcaataatatgagtttttattttgtttttttttttt

SEQ ID NO: 278254 - DNA, 120 bp, Artificial Sequence
  ENSG00000128917_27 (sequence is synthesized)
gtttattttggagtctagtatttcaataatttaagaatcagaagcactgacctttctacattttataacattattttgtatataatgtgtatttataatatgaaacagatgtgtacagga

SEQ ID NO: 278255 - DNA, 120 bp, Artificial Sequence
  ENSG00000128917_28 (sequence is synthesized)
atttttggcgtgggaacgcggggagtacggcggtgagaaaggctgaagctgccagcgccgctgacgggccccttcctgtattttacacctttcgcgaattccgctcctttggaaagggaa

SEQ ID NO: 278256 - DNA, 120 bp, Artificial Sequence
  ENSG00000128917_29 (sequence is synthesized)
taatggctttgggatgttgttctgacacagaggaaaaggatatttcagcagcacaacaattctcactttgaaaaggaaaaaagaaaaccattacccacctctggaggcagaacccctgaa

SEQ ID NO: 278257 - DNA, 120 bp, Artificial Sequence
  ENSG00000128917_30 (sequence is synthesized)
tgggcaccaaaggaccccctgctcccagggtcctctctagcctggggagcttttctttctttttctcttttttccattttgacctcttttcctctttcccctccctatctgcctccaaga

SEQ ID NO: 278258 - DNA, 120 bp, Artificial Sequence
  ENSG00000128917_31 (sequence is synthesized)
ccctgggatatcttaacatccttctattgtcccctttttgaatactatcaggccccctgcacatgcacacacgtagggcagctacgtagcggggctttgggtccctctggcctgttcttg

SEQ ID NO: 278259 - DNA, 120 bp, Artificial Sequence
  ENSG00000128917_32 (sequence is synthesized)
ctggcaggcgggggtcatctggataactgggctgattggttggctgatcaccatcatcacagccaagaaggacattggccagccgtcactggcacccttggggactggcgacccttccct

SEQ ID NO: 278260 - DNA, 120 bp, Artificial Sequence
  ENSG00000128917_33 (sequence is synthesized)
ctgggaccaaagccccctccccagatttccttgtacacacacccccacccccaaaaagcccaggatgcattctttcctggctcttcccgactctctcctgagactgatcccagaaaaggc

SEQ ID NO: 278261 - DNA, 120 bp, Artificial Sequence
  ENSG00000128917_34 (sequence is synthesized)
tctcaccagtctccgtcttcccagtttatgtcctcccgtccccagctcttgggacacgattttcattacctaccactctggggcggtaccctaccaccccctcctccagtggctctccct

SEQ ID NO: 278262 - DNA, 120 bp, Artificial Sequence
  ENSG00000128917_35 (sequence is synthesized)
tacactctcccgtctctcaaccctccctctaccgggggttctcctctcgccttccctgctcaagcgctacactgtgcacagccccgttatgttgacccgggcgcagtaactgaatcctgc

SEQ ID NO: 278263 - DNA, 120 bp, Artificial Sequence
  ENSG00000128917_36 (sequence is synthesized)
aattagattaattaaacaggctgccgcaaggcacccccacctctccccgcttgctcatctcgccatctctccgtccccccaccccctttcccagggtaccttctcgctcatcatcgaagc

SEQ ID NO: 278264 - DNA, 120 bp, Artificial Sequence
  ENSG00000128917_37 (sequence is synthesized)
ttggcacgcgccaggagacgacctgcggccaggtgagtagctcgctccgccaccacaggggggcgacacggcgcagcgccgaaagagttaatctgttctaggcgggggaagtgcgggctt

SEQ ID NO: 278265 - DNA, 120 bp, Artificial Sequence
  ENSG00000128917_38 (sequence is synthesized)
gggggtgggaggcaggacgcttagcttggcctggagctgcgccccgcgctggacgctcggattccgctcgctgcctggactcagagcacaattgcgtttcctgcgggttatttttggcgt

SEQ ID NO: 278266 - DNA, 120 bp, Artificial Sequence
  ENSG00000128918_0 (sequence is synthesized)
ggaccgcgcgcacagcccgcactgccccacgccgcgggctagggacacccggcccgccaccatgacttccagcaagatagagatgcccggcgaggtgaaggccgaccccgccgccctcat

SEQ ID NO: 278267 - DNA, 120 bp, Artificial Sequence
  ENSG00000128918_1 (sequence is synthesized)
ggcgtcgctgcacctcctgccgtcgcccacgcccaatctcgaaattaagtacaccaagatctttataaacaacgagtggcagaactcagagagtgggagagtgttccctgtctataatcc

SEQ ID NO: 278268 - DNA, 120 bp, Artificial Sequence
  ENSG00000128918_2 (sequence is synthesized)
agccacaggagaacaggtgtgtgaagttcaagaagcagacaaggcagatatagacaaagcagtgcaggcagcccgcctggctttctctcttggttcagtgtggagaaggatggatgcttc

SEQ ID NO: 278269 - DNA, 120 bp, Artificial Sequence
  ENSG00000128918_3 (sequence is synthesized)
agaaaggggacgtctgttggataagcttgcagacttggtggaacgggacagggcagttcttgcaaccatggaatccctaaatggtggcaaaccattcctgcaagctttttatgtggattt

SEQ ID NO: 278270 - DNA, 120 bp, Artificial Sequence
  ENSG00000128918_4 (sequence is synthesized)
gcagggcgtcatcaaaacctttcgatattacgcaggctgggctgataaaattcatgggatgaccattcctgtagatggagactattttacctttacaagacatgaacccattggagtgtg

SEQ ID NO: 278271 - DNA, 120 bp, Artificial Sequence
  ENSG00000128918_5 (sequence is synthesized)
tggacagatcatcccatggaacttccccctgctgatgtttgcctggaaaatagctccagctttgtgctgtggcaatacagtagttattaagccagcagagcaaacaccactcagtgcact

SEQ ID NO: 278272 - DNA, 120 bp, Artificial Sequence
  ENSG00000128918_6 (sequence is synthesized)
ctacatgggagccctcatcaaggaggctggctttcctcccggggtcatcaatattttgccaggatatgggccaacggctggggcagcaatagcttctcacattggcatagacaagattgc

SEQ ID NO: 278273 - DNA, 120 bp, Artificial Sequence
  ENSG00000128918_7 (sequence is synthesized)
attcacagggtctactgaggttggaaagcttatccaagaagcagctggaagaagtaatttgaagagagtaactctggaacttggaggcaaaagtcctaatattatttttgctgatgctga

SEQ ID NO: 278274 - DNA, 120 bp, Artificial Sequence
  ENSG00000128918_8 (sequence is synthesized)
cttggactatgctgtggagcaggcccaccagggtgtgttcttcaatcaaggtcagtgctgcactgcaggctctcgcatcttcgtggaggagtccatctatgaggagtttgtgagaagaag

SEQ ID NO: 278275 - DNA, 120 bp, Artificial Sequence
  ENSG00000128918_9 (sequence is synthesized)
cgtggagcgggccaagaggcgcgtagtggggagtccctttgaccccaccactgagcagggtccccagattgataagaaacagtacaacaagatcttggaactcatccagagtggtgtggc

SEQ ID NO: 278276 - DNA, 120 bp, Artificial Sequence
  ENSG00000128918_10 (sequence is synthesized)
tgagggcgccaagctggaatgtggaggcaaaggactgggccgaaaggggtttttcattgagcccacagtgttttccaacgtcactgatgatatgcggattgccaaggaggagatctttgg

SEQ ID NO: 278277 - DNA, 120 bp, Artificial Sequence
  ENSG00000128918_11 (sequence is synthesized)
ccctgttcaggaaattttgagatttaagacgatggatgaagttatcgaaagagccaataactcagactttggactcgtagcagctgtctttactaatgacatcaacaaggccctcacagt

SEQ ID NO: 278278 - DNA, 120 bp, Artificial Sequence
  ENSG00000128918_12 (sequence is synthesized)
gtcttctgcaatgcaagctgggactgtttggatcaattgttacaatgccttaaatgcccagagcccctttgggggattcaagatgtctggaaatgggagagaaatgggagaatttggctt

SEQ ID NO: 278279 - DNA, 120 bp, Artificial Sequence
  ENSG00000128918_13 (sequence is synthesized)
gcgggagtactcagaagttaagacggtgacagtaaagatcccccagaagaactcctaagaaggccaagaaggaggatgaagcccagcctgcacgtctgtccctctctgctttctctgtag

SEQ ID NO: 278280 - DNA, 120 bp, Artificial Sequence
  ENSG00000128918_14 (sequence is synthesized)
gagccacggtccttacttaaagattgaaaagataacatgtaggccaggcaggtcactgcacaactaaagcaaaccagctgggtacagtttcttggcactctgtaaggggccaccttaatc

SEQ ID NO: 278281 - DNA, 120 bp, Artificial Sequence
  ENSG00000128918_15 (sequence is synthesized)
ataccaaatattggggaaagtgggataaagggaggaggaggagctagcagacacatccagtatctccttctggagcacaggatgaaataagggagctgtattatttcatgtctttgtcac

SEQ ID NO: 278282 - DNA, 120 bp, Artificial Sequence
  ENSG00000128918_16 (sequence is synthesized)
aaagaactttcctctcaaggaaaggtgacctttctcctgtcttcattttcctccttccaggccctcctcgctcacccacccctccctctcttccaaggagatgtcagctgagctcattct

SEQ ID NO: 278283 - DNA, 120 bp, Artificial Sequence
  ENSG00000128918_17 (sequence is synthesized)
ggggcagatgtttgggccgggaacaatttttcaaggttgtaaagccaaattatcatttcatgttatccatttcttcaaagcaaaacatgaaatggttttagctagagtcagaccagaatg

SEQ ID NO: 278284 - DNA, 120 bp, Artificial Sequence
  ENSG00000128918_18 (sequence is synthesized)
aaaatgccaggagctggtacactacagatgtagtaagaacctgggatattcctgacccaatctggttttcttttacccataaataacatgaatgaaaaaagattgggacaatagagactg

SEQ ID NO: 278285 - DNA, 120 bp, Artificial Sequence
  ENSG00000128918_19 (sequence is synthesized)
gaagtcatcatgtgcagttcaccgcttctgagcttgctgcagttttggggtgtgtgtgtattagattccttctcagttattctggaataaggcaaggagtgggttgtttttcatagctag

SEQ ID NO: 278286 - DNA, 120 bp, Artificial Sequence
  ENSG00000128918_20 (sequence is synthesized)
ataagatcttttccaaagtttttcttagaaccaaccaaaaaacaatccgagtaggcccaagaatttgataatgctggatgccttgcagacatcattcagtttctaatattgggcaacaat

SEQ ID NO: 278287 - DNA, 120 bp, Artificial Sequence
  ENSG00000128918_21 (sequence is synthesized)
tattattaaatgaattatttctgtagttggaatctgtaccttctgaacctctacaccaataactgctgcaggtgtgattttggtctgtcacactgtacatctatcataatgtgccctgta

SEQ ID NO: 278288 - DNA, 120 bp, Artificial Sequence
  ENSG00000128918_22 (sequence is synthesized)
tctattggcagtgaccttggaaaatctggccaagcctaggggtttccttttccatttgccaagttccattgtgccaggactgccgtgctccactgagctcctctgtcacaccccattctt

SEQ ID NO: 278289 - DNA, 120 bp, Artificial Sequence
  ENSG00000128918_23 (sequence is synthesized)
gcccctcactgggcaggccatggcctacagcttgcagggagtaaagcaggcccgcctccctttcttcccatccacatactcctcttctgctttccagtgactccaccagtttgatgtggg

SEQ ID NO: 278290 - DNA, 120 bp, Artificial Sequence
  ENSG00000128918_24 (sequence is synthesized)
aagtgttagcttcctttccttcttccatcccttcttccatctttccagctgtcaaatccaatccagtctctaacctaaatgcagatcatttatttaaaagtaccaaacataacccagagt

SEQ ID NO: 278291 - DNA, 120 bp, Artificial Sequence
  ENSG00000128918_25 (sequence is synthesized)
atgtggaatatgggcaacatatatatagccttctgtatttaacgatcttctgcttcttaaccgtaccagttttctatttataactcttatctatccatgatgttttaaagtctccacttg

SEQ ID NO: 278292 - DNA, 120 bp, Artificial Sequence
  ENSG00000128918_26 (sequence is synthesized)
ctgttatttacaaacgacagtgcattcagcagcccagtgccgtgagccctgacagatgccgtatttctgagtgcttccatgtgaatgctgccctcctgtagcatgtgtccaagtggacat

SEQ ID NO: 278293 - DNA, 120 bp, Artificial Sequence
  ENSG00000128918_27 (sequence is synthesized)
agccactaaccaactagttacctttggactgcaacaaaaaatgtgaaaatgaagatttatttcttttaatttacttaaaaagaaacctctgtgctagcaataaagcatttatattgtgta

SEQ ID NO: 278294 - DNA, 120 bp, Artificial Sequence
  ENSG00000128918_28 (sequence is synthesized)
agctatagtctggcaggaaaactggactgagtggactagcttggggatcgtcaagactcttgatcttattggaggcagcttggtacattgcaatgagggggagatttgggatcagggaac

SEQ ID NO: 278295 - DNA, 120 bp, Artificial Sequence
  ENSG00000128918_29 (sequence is synthesized)
ctgggatggagccatgtctttctcccttcccagctgtgtaaccttggacaagtcacttaacctccaagactcactttcctccttcatcaagtgctgtgtgaagaatgcaggagagtgatt

SEQ ID NO: 278296 - DNA, 120 bp, Artificial Sequence
  ENSG00000128918_30 (sequence is synthesized)
aaatggcaggctgttcatatgcagcaagatccacacttggccaaacctggggtcacagagatggacatggaatcgagggcagaagatctgggtttgagtccagcagtgctttagatcttt

SEQ ID NO: 278297 - DNA, 120 bp, Artificial Sequence
  ENSG00000128918_31 (sequence is synthesized)
agttgtttcttactgtttttcctaaaacagatgtcaagagacagatatgggaattctgggacagtagaatagatctttataaacaacgagtggcagaactcagagagtgggagagtgttc

SEQ ID NO: 278298 - DNA, 120 bp, Artificial Sequence
  ENSG00000128918_32 (sequence is synthesized)
agagcagcaggatggcacttggtgtctggatgcctttggagttgcacatacagcttctttatgaaaggaagaaactggaagacaacaaagatctttataaacaacgagtggcagaactca

SEQ ID NO: 278299 - DNA, 120 bp, Artificial Sequence
  ENSG00000128918_33 (sequence is synthesized)
tgcagactccagtgctcagagcagcaggatggcacttggtgtctggatgcctttggagttgcacatacagcttctttatgaaaggaagaaactggaagacaacaaaggttctcctcctgt

SEQ ID NO: 278300 - DNA, 120 bp, Artificial Sequence
  ENSG00000128918_34 (sequence is synthesized)
tgccaaggcccaggctactgtctgggcaagagcacacatagggtttgaaaccttccagaacaaaatgccagtctacctcctcctatctggaatctaaggcctaacccatcactgcacctg

SEQ ID NO: 278301 - DNA, 120 bp, Artificial Sequence
  ENSG00000128918_35 (sequence is synthesized)
gtcctcactttcacagccagatgaaaatggacgttttgacaatggctcacagattcctggagatgtctgggaggaagcagaaagaagcaagaaggcatcaaaacttgaaaagagaaaaac

SEQ ID NO: 278302 - DNA, 120 bp, Artificial Sequence
  ENSG00000128918_36 (sequence is synthesized)
cctgaatcagtcaacagatatccaacagaaaacatgggagaagagggatatgaagccagcagctaacactgggaaagttcagatcatctctaataatagatctttataaacaacgagtgg

SEQ ID NO: 278303 - DNA, 120 bp, Artificial Sequence
  ENSG00000128918_37 (sequence is synthesized)
attctatgctctgtgggtctcctgaagggactcagtgaattctcggaggagacaccttgcaacacgttcctgtgcaaatcctgcaggaaatctaggggtttctccctggacttggttggc

SEQ ID NO: 278304 - DNA, 120 bp, Artificial Sequence
  ENSG00000128918_38 (sequence is synthesized)
tggcctcgtgtatgccccacttcaggagggaggacagcttcagtaaatgcactaggatccagagaggctggagtgcagtgacatgattttgactcactgcaacctctgcctctcaggttc

SEQ ID NO: 278305 - DNA, 120 bp, Artificial Sequence
  ENSG00000128918_39 (sequence is synthesized)
ctaggattacaggtcctgaaaaggttgcatcagccctttagccattacctgcctcttgatgaagcgtcagagcaggtgtgcatacacctgccagcacagaaaaaccttaacgtaaagttg

SEQ ID NO: 278306 - DNA, 120 bp, Artificial Sequence
  ENSG00000128918_40 (sequence is synthesized)
taccgtattggacagcacagatctagaaacattttatcagttgatacagagttaattatacttggttaaactgactcacagtagtaaatttaataaaagatttattaataaacttgaata

SEQ ID NO: 278307 - DNA, 120 bp, Artificial Sequence
  ENSG00000128918_41 (sequence is synthesized)
gacacctaagctccattggctccatggcaagtcagctcactgctgagcccaagggaggaccctgaaggtggtcgcacaacaaagacaggcagatgggcagggctgagctcctgccagcca

SEQ ID NO: 278308 - DNA, 120 bp, Artificial Sequence
  ENSG00000128918_42 (sequence is synthesized)
acttttattagctatgggatcatagttaaacctcaatttccttatctgtaaaatgaagaaaataaaagtacctatctcagaaggtctttgggaagattgaattaagataataaaggtcaa

SEQ ID NO: 278309 - DNA, 120 bp, Artificial Sequence
  ENSG00000128918_43 (sequence is synthesized)
ctcttgctcaacacagtcctatccataaacataggcaatagtgttgctgaatagaaaataaaagctggtgggacccacggtctcctagggagacagtaggagccgggtgctgctccaaag

SEQ ID NO: 278310 - DNA, 120 bp, Artificial Sequence
  ENSG00000128918_44 (sequence is synthesized)
ggtcagagaggagggagaaggctgtgctaaacaaggtgctggcagtgtcaggagctggcctcctgccttctgggttgagagatatcgaatgctgctttgccaagagctgctttcttgagc

SEQ ID NO: 278311 - DNA, 120 bp, Artificial Sequence
  ENSG00000128918_45 (sequence is synthesized)
tcggtcatttagcaactaatgcacgtcagattaagctgttttgaagtgtaagatataagggatgaatatggaagagttatcataggattttacacaagtccatgtcaatctagaggaaat

SEQ ID NO: 278312 - DNA, 120 bp, Artificial Sequence
  ENSG00000128918_46 (sequence is synthesized)
ttagtgtcttcaaagaagacccattggtgttacggtttaatcccccaagtaccaaacatacagccccaaggccctgtagatttaggagttgtaaattggccaaatacaaaatatagacat

SEQ ID NO: 278313 - DNA, 120 bp, Artificial Sequence
  ENSG00000128918_47 (sequence is synthesized)
gtttacctgtctaaacattacactatgttcaaaacaagaactgcacattaaaatattgatttctgtgaaaattgagaggatctggcaacctggggctcatatttatgcatggcaatgatt

SEQ ID NO: 278314 - DNA, 120 bp, Artificial Sequence
  ENSG00000128918_48 (sequence is synthesized)
aaatgtagtggctttccttcttagcccctccattacattgctttaccacctggcagactcatacctgtaccttatctcccaagccctgtggtatataggggtttgagactcctgttatac

SEQ ID NO: 278315 - DNA, 120 bp, Artificial Sequence
  ENSG00000128918_49 (sequence is synthesized)
acgaggttcagtacctctgtttgcagaataagaaagagacccaaagaagtgaagttgttcaagttcacatagcatgtcagggtgtagttagaactagttgcattcccaatccagggctat

SEQ ID NO: 278316 - DNA, 120 bp, Artificial Sequence
  ENSG00000128918_50 (sequence is synthesized)
tcatggttatgtcatgcagtgagcacactatacctagggctttggagaggggagggaggcggcttcatagacaggcccctccccaggcaaagcggtgagaacatggctgtttcctcttgt

SEQ ID NO: 278317 - DNA, 120 bp, Artificial Sequence
  ENSG00000128918_51 (sequence is synthesized)
gtgctaattgggactgggaagggtttgccaaggattggagctgcagactccagtgctcagagcagcaggatggcacttggtgtctggatgcctttggagttgcacatacagcttctttat

SEQ ID NO: 278318 - DNA, 120 bp, Artificial Sequence
  ENSG00000128918_52 (sequence is synthesized)
gtggaatgtataatttacagtcaagctggaagactacagcaacttaaatggtactaggcacggaacgggcaggaaatcaaaagtcatcaaggaaagttggaggatattccagagattgca

SEQ ID NO: 278319 - DNA, 120 bp, Artificial Sequence
  ENSG00000128918_53 (sequence is synthesized)
acataagccccagaggttcaatgtatttgctgagtaagggccttttagaaaaacaagtctgtgggttgatattattggcacattccctccaaatgacagacatcatctcttctcctgaat

SEQ ID NO: 278320 - DNA, 120 bp, Artificial Sequence
  ENSG00000128918_54 (sequence is synthesized)
agtacaccactacatgctcatgcttcacttttttcatgacagtggatggttcttcctttatttggagtgtttttcttcagttgtgcctcttcctctctaacaggcagatatagacaaagc

SEQ ID NO: 278321 - DNA, 120 bp, Artificial Sequence
  ENSG00000128918_55 (sequence is synthesized)
ggatccagagaggtcctgaaaaggttgcatcagccctttagccattacctgcctcttgatgaagcgtcagagcaggtgtgcatacacctgccagcacagaaaaaccttaacgtaaagttg

SEQ ID NO: 278322 - DNA, 120 bp, Artificial Sequence
  ENSG00000128918_56 (sequence is synthesized)
attgaagcattattataagctccagagtacacgtcttctgtggattttcagtcgtacttacaatttcatgctcagaagaggcctttagtatatattttgcagtgtcttctgtgaagtcaa

SEQ ID NO: 278323 - DNA, 120 bp, Artificial Sequence
  ENSG00000128918_57 (sequence is synthesized)
atttctgctcagatctttataaacaacgagtggcagaactcagagagtgggagagtgttccctgtctataatccagccacaggagaacaggtgtgtgaagttcaagaagcagacaagata

SEQ ID NO: 278324 - DNA, 120 bp, Artificial Sequence
  ENSG00000128918_58 (sequence is synthesized)
tggagttgcacatacagcttctttatgaaaggaagaaactggaagacaacaaagagacaccgccagccacataaatggccattgcaactgccattgaaaatccaacattgatagtgatga

SEQ ID NO: 278325 - DNA, 120 bp, Artificial Sequence
  ENSG00000128918_59 (sequence is synthesized)
cccctccaaaacgtcctcgactgagaatagcttgggcaacacagccacatccaaggacctggaatgagaggaaaactcaacagatgctgaaatggcttttcttaggaggataatcaatgc

SEQ ID NO: 278326 - DNA, 120 bp, Artificial Sequence
  ENSG00000128918_60 (sequence is synthesized)
acttcagttaccctcatcagaatcgccactcagaagattggagcccagatttccagcattacatcttaatttagaaatgttttattgtagcctgaaaagcaacgaggaagccaggctgca

SEQ ID NO: 278327 - DNA, 120 bp, Artificial Sequence
  ENSG00000128918_61 (sequence is synthesized)
attaagtacaccaaggtgtgaaaattggacttgctggcagaatcctttttgggagaagatgaagaatcagtgtgagactgtttggttaaaatccccaataaaactgaaactgatctttat

SEQ ID NO: 278328 - DNA, 120 bp, Artificial Sequence
  ENSG00000128918_62 (sequence is synthesized)
ctctgctgcagatcccttgccctggtcagcagctacttaatcagaaagatcaactcaacattttcccttgacccaattagattatcgaatctccaataaacgtcatctgttatctctgga

SEQ ID NO: 278329 - DNA, 120 bp, Artificial Sequence
  ENSG00000128918_63 (sequence is synthesized)
ataagggcagagccgtcatggttgggattagtaccttatgaaagggctggagggaactaggtagggatcttttgtttttttgttccttccgccatgtgaagacacagcattactgccatc

SEQ ID NO: 278330 - DNA, 120 bp, Artificial Sequence
  ENSG00000128918_64 (sequence is synthesized)
cagaagtcacaatgacaaggtgccagcttagaagtagagattgagccctcatcagacaccaaataccatcatcttggtcttggacttccagactccagaactgctggagtgcagtgacat

SEQ ID NO: 278331 - DNA, 120 bp, Artificial Sequence
  ENSG00000128918_65 (sequence is synthesized)
ggtctccgcggccggggggcgggagcgccgggcggacttgaccgtgggcgccaagcgtcccggccgcgcggcgcgggctttatgtaaatggaggctgcgccgggcgtcctaggtaggatg

SEQ ID NO: 278332 - DNA, 120 bp, Artificial Sequence
  ENSG00000128918_66 (sequence is synthesized)
cagcctctagtaacttgtttcttcctggaaaagatgaatctgatcccaattaacttaaataaaacaaaccaaacaaaactctccactaccagcctggcagctagggaggcattattgggt

SEQ ID NO: 278333 - DNA, 120 bp, Artificial Sequence
  ENSG00000128918_67 (sequence is synthesized)
ctgaatgtaggaaatcaggaaatacttacaatcaagatgaacgtgcccaagaactcagagagggtttctttcgctaagctgctcttcaagaccagtctctgcttgaagctttttcccttt

SEQ ID NO: 278334 - DNA, 120 bp, Artificial Sequence
  ENSG00000128923_0 (sequence is synthesized)
gctgttgctgccaatacagctgtcatggcgtccaaggcgctggctgcggagaagtggccgcggtctccatagagctgggggcgggcggcccggtatggagagcagccccgagagcctgca

SEQ ID NO: 278335 - DNA, 120 bp, Artificial Sequence
  ENSG00000128923_1 (sequence is synthesized)
gccgctagaacacggggtggcggccgggccagcgtcagggacaggttcttcgcaggaagggctacaggagaccaggctcgccgctggtgatggtcctggggtatgggcggcggagaccag

SEQ ID NO: 278336 - DNA, 120 bp, Artificial Sequence
  ENSG00000128923_2 (sequence is synthesized)
cggcgggaatgggctgggggcggcggccgccaggaggagcctcccggactcggcttctcccgcgggctctcctgaggttcccggaccctgcagctcctccgcgggtttggacttgaagga

SEQ ID NO: 278337 - DNA, 120 bp, Artificial Sequence
  ENSG00000128923_3 (sequence is synthesized)
cagtggtttggagagtcctgctgccgccgaggcgcctctgagagggcagtacaaggtgaccgcctccccggagacagccgtggccggagtgggtcatgagttgggtaccgccggagacgc

SEQ ID NO: 278338 - DNA, 120 bp, Artificial Sequence
  ENSG00000128923_4 (sequence is synthesized)
gggagcccgcccggatctcgccggcacctgccaagcagaactgaccgccgccggctccgaagagcccagcagcgccggcggcctcagcagcagttgcagcgacccgagccctcctgggga

SEQ ID NO: 278339 - DNA, 120 bp, Artificial Sequence
  ENSG00000128923_5 (sequence is synthesized)
atctccgagcctggactctctggagtcgttctctaacctgcattcttttcccagtagctgcgagttcaatagtgaggagggagcggagaacagggtccctgaggaggaggagggcgcggc

SEQ ID NO: 278340 - DNA, 120 bp, Artificial Sequence
  ENSG00000128923_6 (sequence is synthesized)
ggtgttgcccggggctgttcctctgtgcaaggaggaggagggggaggagaccgctcaggtgctggcggcctccaaggaacgcttcccgggacaatctgtgtatcacatcaagtggatcca

SEQ ID NO: 278341 - DNA, 120 bp, Artificial Sequence
  ENSG00000128923_7 (sequence is synthesized)
gtggaaggaagagaacacacccatcatcacccagaatgagaacggaccctgccccttgctggccatcctcaatgttttgctcctggcctggaaggtgaaacttccaccgatgatggaaat

SEQ ID NO: 278342 - DNA, 120 bp, Artificial Sequence
  ENSG00000128923_8 (sequence is synthesized)
cataactgctgagcagctgatggaatatttaggagattacatgcttgatgcaaagccaaaagaaatttcagaaattcaacgtttaaattatgaacagaatatgagtgatgccatggcaat

SEQ ID NO: 278343 - DNA, 120 bp, Artificial Sequence
  ENSG00000128923_9 (sequence is synthesized)
tttgcacaaactacagacaggcctggatgtaaatgtaagattcactggtgttcgagtgtttgaatatacaccagaatgcatagtatttgatcttcttgatattcctttgtaccatgggtg

SEQ ID NO: 278344 - DNA, 120 bp, Artificial Sequence
  ENSG00000128923_10 (sequence is synthesized)
gttagtagaccctcagattgatgacattgtaaaagctgttggtaactgcagctacaaccaactagtggagaagatcatctcttgtaaacagtcagacaatagtgagctggttagtgaagg

SEQ ID NO: 278345 - DNA, 120 bp, Artificial Sequence
  ENSG00000128923_11 (sequence is synthesized)
ctttgtagctgagcagtttctaaataacacagccactcaactgacataccatggattatgtgaactaacttcaacggttcaggaaggagaactttgtgtgttctttcggaataatcattt

SEQ ID NO: 278346 - DNA, 120 bp, Artificial Sequence
  ENSG00000128923_12 (sequence is synthesized)
tagcaccatgaccaaatacaagggtcaactgtatttgttggtaacggaccaggggtttcttactgaagagaaagttgtttgggaaagcctacacaacgtagatggtgatggaaatttctg

SEQ ID NO: 278347 - DNA, 120 bp, Artificial Sequence
  ENSG00000128923_13 (sequence is synthesized)
tgactcagaatttcatcttcgacctccttcagatcctgaaactgtatacaaaggacaacaagatcagatagatcaggattatcttatggcattatctctacaacaagaacagcagagcca

SEQ ID NO: 278348 - DNA, 120 bp, Artificial Sequence
  ENSG00000128923_14 (sequence is synthesized)
agagatcaattgggaacaaatcccggaaggaatcagtgatttggaactagcaaagaaactccaagaggaagaggacagacgggcttctcaatactatcaggaacaggaacaagcagcagc

SEQ ID NO: 278349 - DNA, 120 bp, Artificial Sequence
  ENSG00000128923_15 (sequence is synthesized)
tgctgctgctgctgcttctacacaggctcagcagggccagccagcacaagcctctccatcaagtggaagacaatctgggaatagtgaacgtaaacggaaggaaccacgagaaaaagataa

SEQ ID NO: 278350 - DNA, 120 bp, Artificial Sequence
  ENSG00000128923_16 (sequence is synthesized)
agaaaaagaaaaggaaaaaaatagctgtgttattttgtaacaagtgttggcttctgttggaaccacctatatgtcttgagaaacaaaaccacaggaggaaaggaagaaaaaccgatcaat

SEQ ID NO: 278351 - DNA, 120 bp, Artificial Sequence
  ENSG00000128923_17 (sequence is synthesized)
accgtctgtgcctgatttcctaatggattttgttcgttttttcaggggaacggttgttacttagttacaatcagactttttcaagtcacacaatacactctttatgagctggagtttcat

SEQ ID NO: 278352 - DNA, 120 bp, Artificial Sequence
  ENSG00000128923_18 (sequence is synthesized)
gttacaagttggaaatgctgtgtgttgacattcatgaaaaatactgcacttgtagccagattagcaaatcacagcaaattttgtgtcatagtgacattcataactcatatcagttagtaa

SEQ ID NO: 278353 - DNA, 120 bp, Artificial Sequence
  ENSG00000128923_19 (sequence is synthesized)
gctattatatcttctgttctaacaatgaatggaggtaattgatttagtctgattccttcctgaaatctaaatattagcacaatagtttctgaaattttacaatgttaaattatgatctaa

SEQ ID NO: 278354 - DNA, 120 bp, Artificial Sequence
  ENSG00000128923_20 (sequence is synthesized)
ttcatgagaaaccacgggtttaacatagggattcaaaaaaacaaaaacaaaagaataggaataaataacccttaattgtatattggactagttcagcccttaaacagctttacctttatt

SEQ ID NO: 278355 - DNA, 120 bp, Artificial Sequence
  ENSG00000128923_21 (sequence is synthesized)
taggaatgtacattttaggtattatcttgatcatggagcttagttttaatttagatagcaaaaataaagatttgtatttcttttccaatagcaaaaagttacataacactaatacttata

SEQ ID NO: 278356 - DNA, 120 bp, Artificial Sequence
  ENSG00000128923_22 (sequence is synthesized)
acctatcaatatcagatattaatgactttgtagtgttgtaaaattttgaggaattttggagtctttatcataggtaacctggaccacagttactatttattgacaatgtgattgagtgta

SEQ ID NO: 278357 - DNA, 120 bp, Artificial Sequence
  ENSG00000128923_23 (sequence is synthesized)
tggaggaaagcacagtggatgctaggctttgtaaatatggggatgtagaaaagcagatagttcagtgtctacctttttctagaactaccttgaaccttaaattttaagtcatgttcattg

SEQ ID NO: 278358 - DNA, 120 bp, Artificial Sequence
  ENSG00000128923_24 (sequence is synthesized)
ctagaaaattaaatgtacttattaaaaccaatgaaaaagcacatttctgaaatgaagttagagataatctctgtgtcttataaaaagacattaataaaaatctgaaagggccgggcgcag

SEQ ID NO: 278359 - DNA, 120 bp, Artificial Sequence
  ENSG00000128923_25 (sequence is synthesized)
gagggagactccgtctcaaaaaaaaaaaagtctgagagtagctaagaatttatgtaaaagcaatcagagtttttaatttatgggaaccaaataaaactataacctcatagtgtttataag

SEQ ID NO: 278360 - DNA, 120 bp, Artificial Sequence
  ENSG00000128923_26 (sequence is synthesized)
agtgtttataagaactcagaaataatatttatttaactttattatgaggccacacatattttcctgtgtttctatatatagtttggaaaactatccttaatagtctgttttatatgcctt

SEQ ID NO: 278361 - DNA, 120 bp, Artificial Sequence
  ENSG00000128923_27 (sequence is synthesized)
atatttaaaagtttgttttagttattttgaaagactattgctgctgcaaatagttgtgtgctttacattctaagcttcagtacatttatttaagagcatcataatctgacctgagcatcc

SEQ ID NO: 278362 - DNA, 120 bp, Artificial Sequence
  ENSG00000128923_28 (sequence is synthesized)
acttggagagtgttttttttgtgtgtggtctggggtgacaaaagaccacaaaaatgtgtggtctggattttttcaactatgtcattaactttatgatccaagaccagttataggatgaat

SEQ ID NO: 278363 - DNA, 120 bp, Artificial Sequence
  ENSG00000128923_29 (sequence is synthesized)
ctgtatgtaaaaatagagtcttatttatggaaggaattattctaagggaaaaatccagggtcaagctgtatcttttatgtcctttatattgcatgtctatttctgttacacaatttgtta

SEQ ID NO: 278364 - DNA, 120 bp, Artificial Sequence
  ENSG00000128923_30 (sequence is synthesized)
tttcttcaaatttcctatggtagcatgataaatcatcaaagaacctgtttgggatataaaactctgatagaaaatatttaatgagtatcttgattataacctagaatatgtatacgttag

SEQ ID NO: 278365 - DNA, 120 bp, Artificial Sequence
  ENSG00000128923_31 (sequence is synthesized)
taaaataaccagatatactacagaactctctattggctcaaacaggttgacctcaatccaagtttactcttgatatcactctgttggctgaaggaggtaactcaaacctcagggtttgtt

SEQ ID NO: 278366 - DNA, 120 bp, Artificial Sequence
  ENSG00000128923_32 (sequence is synthesized)
tttcccgggacagatagtagtgatagtgcattatatttgaataagaaaaacaaaccagtataccttgagaaattttaaaaagcatagttgaggcatattttttcataattatatacttat

SEQ ID NO: 278367 - DNA, 120 bp, Artificial Sequence
  ENSG00000128923_33 (sequence is synthesized)
ctgtttattgcccatggaaaatatatgtgtagaagtatttcttctgttatttgttactatcttcttaatttgttccaaagaaaatgctgccatactgcattccctctggaaggaaacaaa

SEQ ID NO: 278368 - DNA, 120 bp, Artificial Sequence
  ENSG00000128923_34 (sequence is synthesized)
acaaaacaaaactcactcaaaaccagcagtgctgctatcagataagtagatgtcaatgtatacttacaaggaaaaactaaaaaatgtaatgtgttaattcagcctttttctatgtaatat

SEQ ID NO: 278369 - DNA, 120 bp, Artificial Sequence
  ENSG00000128923_35 (sequence is synthesized)
ttccaagtcagactttcttacattcctggaatttactttgatataccaagaataataatgataaaatgtttgctttgattactgtggggggaaagatgaaatgttcaattgtattaaaac

SEQ ID NO: 278370 - DNA, 86 bp, Artificial Sequence
  ENSG00000128923_36 (sequence is synthesized)
gaaagatgaaatgttcaattgtattaaaacaaacaagcttttcagagatactggtttcctgcccttgaagggtataaagaatttag

SEQ ID NO: 278371 - DNA, 63 bp, Artificial Sequence
  ENSG00000128923_37 (sequence is synthesized)
ggagaatcgcttgaacccaggaggcagtgattgcagtgagctgagatagcaccactgcatgca

SEQ ID NO: 278372 - DNA, 120 bp, Artificial Sequence
  ENSG00000128923_38 (sequence is synthesized)
ttaaattttgcccaaggtaacgttatatatcccaccacttcattgctggtttgggtacataggattttgaaagtggtatattaaagtctttccttccaagtattttgtaatacttgaaaa

SEQ ID NO: 278373 - DNA, 120 bp, Artificial Sequence
  ENSG00000128923_39 (sequence is synthesized)
ttcttagatgtatactgctaacaaaagttagaacttaaacatttttgtttttatcatttatagcctagattagggacatatttgcatcaaccaaatcatcattagatttgaaaataggca

SEQ ID NO: 278374 - DNA, 120 bp, Artificial Sequence
  ENSG00000128923_40 (sequence is synthesized)
gatgaatgaacaaatatggtcattgcactttccttttactttcagagtctaagtatattccttaaggttagtaaccagtctttattaaaaatataaaatttttcttcatgtctaatccca

SEQ ID NO: 278375 - DNA, 120 bp, Artificial Sequence
  ENSG00000128923_41 (sequence is synthesized)
ttgcatccacaatgctgtgatttatagtacatgatcaacacttaaaagtactttacatatgtgtgtttctgaagcaagttttcatgacctctgttagattctcaaaagaattcagaactt

SEQ ID NO: 278376 - DNA, 120 bp, Artificial Sequence
  ENSG00000128923_42 (sequence is synthesized)
caatttaagaatcaccattttaagaatacatgtgtacatatacacattaagcagtataaagcagctaaaattggcattggttttacactggtgcagtgtgcttaggtaaagtaacttctt

SEQ ID NO: 278377 - DNA, 120 bp, Artificial Sequence
  ENSG00000128923_43 (sequence is synthesized)
ccatgtttcaaggtcaggttcagagttgaatgaagtgtagatttaaatttaggattaggctttggaatatatcttgtttttattgtctcacatttctgatattgactacttatcccatat

SEQ ID NO: 278378 - DNA, 120 bp, Artificial Sequence
  ENSG00000128923_44 (sequence is synthesized)
tctgtttcaaattctttatcatatttcaagttctttctcatacttcttgatcttggcttaactaagcaagttagtatcagagactagttgactgaacccaagattaaacattttgcactt

SEQ ID NO: 278379 - DNA, 120 bp, Artificial Sequence
  ENSG00000128923_45 (sequence is synthesized)
gcacaaaaccttcttagcattttgctttcaatgaatcagaaagtcaattcactaagagacagatcatgagaggaaagagaactagaggccaataaataaaataattgttcatatattaat

SEQ ID NO: 278380 - DNA, 120 bp, Artificial Sequence
  ENSG00000128923_46 (sequence is synthesized)
gttcacatgtgaactacatatctaaaatcttggagaaaaatcaaggcaagaatttccagaactgtcctcaaatagctcatttatttaagttttgttaaaaagcaaaagcgaattgattac

SEQ ID NO: 278381 - DNA, 120 bp, Artificial Sequence
  ENSG00000128923_47 (sequence is synthesized)
atttgattaacttttcctattccatgcacaagttaccttaaaacatgataaaaaccttatgggcattacctatcacacagtacttatgcataaacttataatagtaaaattactaatgtt

SEQ ID NO: 278382 - DNA, 120 bp, Artificial Sequence
  ENSG00000128923_48 (sequence is synthesized)
tgataaaataagatggaggcattacaaatagtctacagtttgtattttaaggaattggacatgaagaattctagatcattttgtgtctataaacccgactttctatcttgccttgggcaa

SEQ ID NO: 278383 - DNA, 120 bp, Artificial Sequence
  ENSG00000128923_49 (sequence is synthesized)
actttctgtgcctcaatgtactctttaaatatgtgaaggatgctctttttgattaagtgttttgcactcctgaataaagggcatagtataagcacaaagtatgacttaatttatcacaaa

SEQ ID NO: 278384 - DNA, 120 bp, Artificial Sequence
  ENSG00000128923_50 (sequence is synthesized)
tattacacatcctatgttcttgaatgtgcacacttttttctcaataacaaaatatatcttaagtcagtttttttaatgctgtcaaaatttgtagaattttctttgagtatggcgtgatct

SEQ ID NO: 278385 - DNA, 120 bp, Artificial Sequence
  ENSG00000128923_51 (sequence is synthesized)
cttcccaaatgcattttacagttttttgtgtgttctatagactatagagtcaaaatcaagagtattttgagaggatcagaagcatttaaaaatctatttttttctagtatctttcacaga

SEQ ID NO: 278386 - DNA, 120 bp, Artificial Sequence
  ENSG00000128923_52 (sequence is synthesized)
tctaaatatttagattctctttgcctttttctccatggaatacggtggtatcaaattactaatacagtatataaacttcgtttgcattggtggaattcatttagatctctcaagtaatat

SEQ ID NO: 278387 - DNA, 120 bp, Artificial Sequence
  ENSG00000128923_53 (sequence is synthesized)
tattttagggctatataaattgtgtttttagtgtaaaatgttatttgataatgtgaagttaaatcccttttagaaagtgactgaaaatggtaaaggaactcatcagaatcttagcgttct

SEQ ID NO: 278388 - DNA, 120 bp, Artificial Sequence
  ENSG00000128923_54 (sequence is synthesized)
taagttctctgataatttagtatattttattaatgatgtccaacacctctaagattgttgagaaaacatgaagaattgaggttactcttctcaggtgacactttaaatattaaaatcaga

SEQ ID NO: 278389 - DNA, 120 bp, Artificial Sequence
  ENSG00000128923_55 (sequence is synthesized)
ggcttcctgaacaaaacaaattgcaaaatagcgataatggcatgggagaggccagatgcaggactctggtaaatttaacttactttgaatatctatctaaattttagttcatgcatgttc

SEQ ID NO: 278390 - DNA, 120 bp, Artificial Sequence
  ENSG00000128923_56 (sequence is synthesized)
ttacttaatcctggtgtttttgctcttagatgttagagtttaataaattgtgatacgcatatatttttttacatgaaggattctactttctaattttacttttctgatctcaagaaaatt

SEQ ID NO: 278391 - DNA, 120 bp, Artificial Sequence
  ENSG00000128923_57 (sequence is synthesized)
aaacttgaaaaacggggtaaaattcttcaactattgcctcaagttcagttttgtcctattgtcctgagaaaggagatttagacttgtctgcctaacacaggtattttttagggcatcgta

SEQ ID NO: 278392 - DNA, 120 bp, Artificial Sequence
  ENSG00000128923_58 (sequence is synthesized)
ctatcccagagaaagtgttgagataccatggcagaaatataaaacctaagctttgaaccccagtagacttcttcttctgccattaagtctctctttatctgatattctaaggatttcttc

SEQ ID NO: 278393 - DNA, 120 bp, Artificial Sequence
  ENSG00000128923_59 (sequence is synthesized)
aaactacttaataatttgtcaccattaactttaatatccagttttaatctgcactgtaatatcctgctttgagaagaaagaatgcctcataaattagagaaggacaaaacaaaatgtttt

SEQ ID NO: 278394 - DNA, 120 bp, Artificial Sequence
  ENSG00000128923_60 (sequence is synthesized)
gagaaggacaaaacaaaatgttttggaaggtgatcctggctcctttggctctcataattgttttatagctgaaaataaaaagtcaggaaactggcccggtgcggtggctcatgcctgtaa

SEQ ID NO: 278395 - DNA, 120 bp, Artificial Sequence
  ENSG00000128923_61 (sequence is synthesized)
aaaaaaaaaaaaaaaagtcaagaaactgaaattcccatttaagttctcaaatcagtgatctgtcaaaataggccttgtaactgaaataccttacaaagcagttctaactaatgcaatgtg

SEQ ID NO: 278396 - DNA, 120 bp, Artificial Sequence
  ENSG00000128923_62 (sequence is synthesized)
ttttttaaaaatttttaatgaaccttacattgtgaacataattgcaacatgttttaagacaaacagtatttaatccttgaagacctgtcttgtatgtctctcaattttgtcagaattttt

SEQ ID NO: 278397 - DNA, 120 bp, Artificial Sequence
  ENSG00000128923_63 (sequence is synthesized)
attattgtttttcacatatgtgaaataagcagttttttcagggtacatagggtatctttgttttacagatttttaaagatgaggttttgaaaagccctcagaggtttttgttaaaagact

SEQ ID NO: 278398 - DNA, 120 bp, Artificial Sequence
  ENSG00000128923_64 (sequence is synthesized)
atcttgcttaataaatgacagcttgttacagattcacacattacaagtaggacagtataacaggagattggtgtgtgaatgctacaaaacagtcagcaaaaggaatcatgtttgcttgtg

SEQ ID NO: 278399 - DNA, 120 bp, Artificial Sequence
  ENSG00000128923_65 (sequence is synthesized)
aaacttcagaggtaccctgaaagtcatttcctaaagctagtgcgtgtgaatcttttccttgaattgtgcagaataattggattgaggcacatattttgaggagtagcaagtggaatggta

SEQ ID NO: 278400 - DNA, 120 bp, Artificial Sequence
  ENSG00000128923_66 (sequence is synthesized)
taatgactacagagaaaattatcttgaaatatagcaaggaagagaaacaagttttctttctccactttattgttggactaattgggtcaatttgctgtgacatatcaaagatctctttgt

SEQ ID NO: 278401 - DNA, 120 bp, Artificial Sequence
  ENSG00000128923_67 (sequence is synthesized)
gccaggccaagactggctactgagttctcaaagcgttttaatatatagattacgtatgagtgcctattttttcctcctcctttcattttttatcttaatacccattttacttctgaaata

SEQ ID NO: 278402 - DNA, 120 bp, Artificial Sequence
  ENSG00000128923_68 (sequence is synthesized)
attcatctgttttgctttatgaccagctttaatttcaattgaggaataataacaaccctagagattcataggaaagagcattgaaatacattttttgcataaagatacctaaaaccatct

SEQ ID NO: 278403 - DNA, 120 bp, Artificial Sequence
  ENSG00000128923_69 (sequence is synthesized)
acccagcttagggttgaactgaatttctgtgaaataaatttgttttaaatactaattattttaaaactacttaattcttaaaaacaatgtcatcagtttcaaaactttcactttgggagg

SEQ ID NO: 278404 - DNA, 120 bp, Artificial Sequence
  ENSG00000128923_70 (sequence is synthesized)
atattccttaaaaggcatacatagatggtaaagtataaaatatttctgacagaattattcagtattattcaacatttactttcatgtttgttattgtaccacaaagatagtgtcattgtt

SEQ ID NO: 278405 - DNA, 120 bp, Artificial Sequence
  ENSG00000128923_71 (sequence is synthesized)
gggttaaaatgttggctgtttttgttaatatacttaaaactgtaaccagtgaataacacctgtagtattttttattatagattatattttatttcaataaactttgatatttagaccaaa

SEQ ID NO: 278406 - DNA, 120 bp, Artificial Sequence
  ENSG00000128923_72 (sequence is synthesized)
gagttgaagagtatctgggaggcaaggaaatggagcctcaagggcagaaaacttttgagaagtttgggtacaaatgggtatgggaagtgggagattacatgcttgatgcaaagccaaaag

SEQ ID NO: 278407 - DNA, 120 bp, Artificial Sequence
  ENSG00000128928_0 (sequence is synthesized)
tttccgcagttaggggctgctatttcaacgcagggagataaaaagaaaaaaacacttgctcttctaccccgctaaaaacactcatcctagggagcacgccagcatttgcagcgttcgggg

SEQ ID NO: 278408 - DNA, 120 bp, Artificial Sequence
  ENSG00000128928_1 (sequence is synthesized)
cagggccactcggcctgcggccgttgcactggctggaagctggcaggcgatcacggttgattggctcgggtgcggtccaagggcagcaacgccttcggcgggccgcctagggtgattggc

SEQ ID NO: 278409 - DNA, 120 bp, Artificial Sequence
  ENSG00000128928_2 (sequence is synthesized)
tgctgcagcccaccccctagccggtttggtgggcggcgaagcctggattggtggagctaagagctggctcagtttcagcgctggctcttcgtgcatggcagagatggcgactgcgactcg

SEQ ID NO: 278410 - DNA, 120 bp, Artificial Sequence
  ENSG00000128928_3 (sequence is synthesized)
gctgctggggtggcgtgtggcgagctggaggctgcggccgccgcttgccggcttcgtttcccagcgggcccactcgcttttgcccgtggacgatgcaatcaatgggctaagcgaggagca

SEQ ID NO: 278411 - DNA, 120 bp, Artificial Sequence
  ENSG00000128928_4 (sequence is synthesized)
gaggcagcttcgtcagaccatggctaagttccttcaggagcacctggcccccaaggcccaggagatcgatcgcagcaatgagttcaagaacctgcgagaattttggaagcagctggggaa

SEQ ID NO: 278412 - DNA, 120 bp, Artificial Sequence
  ENSG00000128928_5 (sequence is synthesized)
cctgggcgtattgggcatcacagcccctgttcagtatggcggctccggcctgggctacctggagcatgtgctggtgatggaggagatatcccgagcttccggagcagtggggctcagtta

SEQ ID NO: 278413 - DNA, 120 bp, Artificial Sequence
  ENSG00000128928_6 (sequence is synthesized)
cggtgcccactccaacctctgcatcaaccagcttgtacgcaatgggaatgaggcccagaaagagaagtatctcccgaagctgatcagtggtgagtacatcggagccctggccatgagtga

SEQ ID NO: 278414 - DNA, 120 bp, Artificial Sequence
  ENSG00000128928_7 (sequence is synthesized)
gcccaatgcaggctctgatgttgtctctatgaagctcaaagcggaaaagaaaggaaatcactacatcctgaatggcaacaagttctggatcactaatggccctgatgctgacgtcctgat

SEQ ID NO: 278415 - DNA, 120 bp, Artificial Sequence
  ENSG00000128928_8 (sequence is synthesized)
tgtctatgccaagacagatctggctgctgtgccagcttctcggggcatcacagccttcattgtggagaagggtatgcctggctttagcacctctaagaagctggacaagctggggatgag

SEQ ID NO: 278416 - DNA, 120 bp, Artificial Sequence
  ENSG00000128928_9 (sequence is synthesized)
gggctctaacacctgtgagctaatctttgaagactgcaagattcctgctgccaacatcctgggccatgagaataagggtgtctacgtgctgatgagtgggctggacctggagcggctggt

SEQ ID NO: 278417 - DNA, 120 bp, Artificial Sequence
  ENSG00000128928_10 (sequence is synthesized)
gctggccggggggcctcttgggctcatgcaagcggtcctggaccacaccattccctacctgcacgtgagggaagcctttggccagaagatcggccacttccagttgatgcaggggaagat

SEQ ID NO: 278418 - DNA, 120 bp, Artificial Sequence
  ENSG00000128928_11 (sequence is synthesized)
ggctgacatgtacacccgcctcatggcgtgtcggcagtatgtctacaatgtcgccaaggcctgcgatgagggccattgcactgctaaggactgtgcaggtgtgattctttactcagctga

SEQ ID NO: 278419 - DNA, 120 bp, Artificial Sequence
  ENSG00000128928_12 (sequence is synthesized)
gtgtgccacacaggtagccctggacggcattcagtgttttggtggcaatggctacatcaatgactttcccatgggccgctttcttcgagatgccaagctgtatgagataggggctgggac

SEQ ID NO: 278420 - DNA, 120 bp, Artificial Sequence
  ENSG00000128928_13 (sequence is synthesized)
cagcgaggtgaggcggctggtcatcggcagagccttcaatgcagactttcactagtcctgagacccttcgcccccttttcctgcacctagtggcctttcttgggaagtagagatgtggcg

SEQ ID NO: 278421 - DNA, 120 bp, Artificial Sequence
  ENSG00000128928_14 (sequence is synthesized)
gctttcccaccctgcccacagcaggccctcctgcccagctgctcttgtcagccctctggcctctggatgaggttgagttctccacaacagctcccaagcatcatgggcctcgcagccggg

SEQ ID NO: 278422 - DNA, 120 bp, Artificial Sequence
  ENSG00000128928_15 (sequence is synthesized)
cctgtgccacggctagtgttgtgtgatttaaaatggactcagcaggaagcatattgtctggggattgttgggacaggttttggtgactctgtgcccttgctctctaacttctgagcccac

SEQ ID NO: 278423 - DNA, 120 bp, Artificial Sequence
  ENSG00000128928_16 (sequence is synthesized)
ctcccagggtaggcacctgggggcatgcaggtgcccacctcccagggtaggcacctgggggcatgcaggtacccacctctttctcttgggtgaggctctggcaaggagatctctctgctc

SEQ ID NO: 278424 - DNA, 120 bp, Artificial Sequence
  ENSG00000128928_17 (sequence is synthesized)
aagcacagcagaatcatggcccctctccatgaattggaacttggtacaggttaagtatccctaatcctgaaatctgaaacacttgtggttccaagcattttggataaggcaaattcaact

SEQ ID NO: 278425 - DNA, 83 bp, Artificial Sequence
  ENSG00000128928_18 (sequence is synthesized)
acttgtggttccaagcattttggataaggcaaattcaactttcagtctcttttctgggggaaaaaaataataaacctagccta

SEQ ID NO: 278426 - DNA, 76 bp, Artificial Sequence
  ENSG00000128928_19 (sequence is synthesized)
tgcagtgagccgagtcaaaaaacaaaacaaaacaaaaaaaccctggcccttgtttcttccagtttctagaggtatc

SEQ ID NO: 278427 - DNA, 120 bp, Artificial Sequence
  ENSG00000128928_20 (sequence is synthesized)
aaaaccctggcccttgtttcttccagtttctagaggtatcagctcctagcagcttatgaacacatatgcttgcttggccaggcaaggtggtgtgtgcctgtaatcccagcactttgggag

SEQ ID NO: 278428 - DNA, 120 bp, Artificial Sequence
  ENSG00000128928_21 (sequence is synthesized)
ccgggaggtggaggttgcaatgagccaatatgacaccgctgcagtccagcctgggccatagagtgagactctgtctcaaaaaaggaaagaaaaataggctgggcacagtgactcatgcct

SEQ ID NO: 278429 - DNA, 69 bp, Artificial Sequence
  ENSG00000128928_22 (sequence is synthesized)
attagccaggcctggtggcacgcgcctgtaatcccagttacagagctgagatcgcgccattgcactcca

SEQ ID NO: 278430 - DNA, 120 bp, Artificial Sequence
  ENSG00000128928_23 (sequence is synthesized)
ataaaataaatgaacacacatgctgctgagtccgcagggggggcagagcagaggacagcgtgcttttgtgtactgttggaagactggctcctcctgtacagcacctctgagcccttgtgc

SEQ ID NO: 278431 - DNA, 120 bp, Artificial Sequence
  ENSG00000128928_24 (sequence is synthesized)
accgccctgccacgggcaccatccagtcctggccgtgtgaccacccacagctgactgggcagcaggcacaggccctacccgagcaggccggagttggctcgcatgactccagctgaggct

SEQ ID NO: 278432 - DNA, 120 bp, Artificial Sequence
  ENSG00000128928_25 (sequence is synthesized)
gcctgtgtacatttctccagataccctatggctaattttgttataactgcacagtggctgctgccattttgtattaaatatattgtgaaacaaacctatctggggagaagcaatctactt

SEQ ID NO: 278433 - DNA, 120 bp, Artificial Sequence
  ENSG00000128928_26 (sequence is synthesized)
gccgctgcttcctgtctggatccagcttgtgtccttggagagtggctggcccaggtcctattcctgtcctccagcccgttctttcatgagggacaggaaggtaaaatcagcccttaggag

SEQ ID NO: 278434 - DNA, 120 bp, Artificial Sequence
  ENSG00000128928_27 (sequence is synthesized)
agaggtctcagcctccctttcccagatctcccagtgagttttaaaggaagcagggagcccagagtgctaagttcttacagccagaaggaagcttatagatttctgaaaaccgcccctttg

SEQ ID NO: 278435 - DNA, 120 bp, Artificial Sequence
  ENSG00000128928_28 (sequence is synthesized)
tttttaaaaagatcaacacaatttgactttctcaaggtcaaaacgaactagaatccagatctgctcatggcaaaaatgggggtgttctgagaattccagctttgggccgcactgtacagc

SEQ ID NO: 278436 - DNA, 120 bp, Artificial Sequence
  ENSG00000128928_29 (sequence is synthesized)
agtctggatagagtgtgatctgagaagggaatgggtctgggttgttccaccccttccgagttccaaaaagagggaactggttttcttggttctcagcccagcagcacctatcctggctct

SEQ ID NO: 278437 - DNA, 120 bp, Artificial Sequence
  ENSG00000128928_30 (sequence is synthesized)
tggtcctggcctgcagccaagtgctgttcctagcctgaggcttgagacaggtggggttggctcctcaccaaccccagttccgtcccatcctgagggcaagatcctgggctcataggcagt

SEQ ID NO: 278438 - DNA, 120 bp, Artificial Sequence
  ENSG00000128928_31 (sequence is synthesized)
ccctttcacttccttgtcttgctccctgctatgttggagatgaatgtgactaaaagggccatcttgctggcttaatgtgtggctggagagaccagcctggagacaatgtggcaaaatggg

SEQ ID NO: 278439 - DNA, 120 bp, Artificial Sequence
  ENSG00000128928_32 (sequence is synthesized)
gcgcttcatccagtctgtctaagccctgtcgacttggggaggtgatttctttcctggttctatatgtgaagcaaaataaatgttttaaaattaaaagcaaaaaaaacaaaatgaaccatg

SEQ ID NO: 278440 - DNA, 120 bp, Artificial Sequence
  ENSG00000128928_33 (sequence is synthesized)
tcagtgttttgggcagaccttttccgcccaacacccacctgggagggagggcgagacccgaggtcagacgtccctggagcaggtgagcactgcgagggaactgagatgcaagatcctcct

SEQ ID NO: 278441 - DNA, 120 bp, Artificial Sequence
  ENSG00000128928_34 (sequence is synthesized)
gcctgaactcacaccccgcgtgctgctcccccaactcgcctcttggatctcagaccagaagcttcctttcctcaaaatccttctatgttctccaacgtctttgggacagagctccttggc

SEQ ID NO: 278442 - DNA, 120 bp, Artificial Sequence
  ENSG00000128928_35 (sequence is synthesized)
agggtttacaaagcttaggtggccctacccacttctccagcctcatctgctgcctcacccctataccacagctctgcacctttgctgaaactggtactcggcgcttggggtgtcctcatc

SEQ ID NO: 278443 - DNA, 120 bp, Artificial Sequence
  ENSG00000128928_36 (sequence is synthesized)
ctgcgatgagggccattgcactgctaaggactgtgcaggtgtgattctttactcagctgagtgtgccacacaggtagccctggacggcattcagtgttttgtttctagaggtatcagctc

SEQ ID NO: 278444 - DNA, 120 bp, Artificial Sequence
  ENSG00000128928_37 (sequence is synthesized)
gcaaggcaaatatgactctgatccccctgggccttccccttctgctgcttccctccttccctgctgaatgttcgtgttcttgttgcaaggagtcctcactgccatgtttctcatccctgt

SEQ ID NO: 278445 - DNA, 120 bp, Artificial Sequence
  ENSG00000128928_38 (sequence is synthesized)
gcctttggtctggggcagctctggaagtccttccagcccttcaaactttctcttgcttcctcatctctaaagcctcaggccagggcctgcctccttcaggaagacctctcttctccaacc

SEQ ID NO: 278446 - DNA, 120 bp, Artificial Sequence
  ENSG00000128928_39 (sequence is synthesized)
tcttcccacagtggggaaatatcattaagtaacagacaaaaggcctgaggagcagggtggcttactcggctgtgaaacgacacctgggctgtcacgcccctgcacctctggccagtcagt

SEQ ID NO: 278447 - DNA, 120 bp, Artificial Sequence
  ENSG00000128928_40 (sequence is synthesized)
gccgtaactgtggcaagactttctgaagttgcttttctcctccctgggattctggccttcccacgctagcattttgccaccacacccggtggtgggatgaggaggtgcccacggggcctt

SEQ ID NO: 278448 - DNA, 120 bp, Artificial Sequence
  ENSG00000128928_41 (sequence is synthesized)
gctaatctttgaagactgcaagattcctggtaagtagcaccgggaatcggggagcccctctcctgacccccttccaggctgatctggctgttctcaagttgagaaagcctctgggttaga

SEQ ID NO: 278449 - DNA, 120 bp, Artificial Sequence
  ENSG00000128928_42 (sequence is synthesized)
ttggcttttgcccgtgggccgttgggagcgccagcgcgggggcgggacgcggggcctccgacctcgggtccagtcctctgacctcggcctcacgtctgtggagtgaagatttgagaccgt

SEQ ID NO: 278450 - DNA, 120 bp, Artificial Sequence
  ENSG00000128928_43 (sequence is synthesized)
gggacagtactgctggaagtagagaggaggagtcgaggctgggagagctcctgagagactgatggtgttttggtggaggattggccaggctacctaccgcttgtggcacaagggccctca

SEQ ID NO: 278451 - DNA, 120 bp, Artificial Sequence
  ENSG00000128928_44 (sequence is synthesized)
tagccccttcttggaacgtccccgcacctcaccccagccccttgccaggggcagaccctggcagccttccctcgtcctcagcagccattacgtgttgctgtcataaagttatcactctgt

SEQ ID NO: 278452 - DNA, 120 bp, Artificial Sequence
  ENSG00000128928_45 (sequence is synthesized)
gtgctcagcagcttctgtcactagctctgaatggcctgtctcctggacaaagaagctttcacggactactctgcagggaggtgacattggaccagagctgactccacctgggggaaagag

SEQ ID NO: 278453 - DNA, 120 bp, Artificial Sequence
  ENSG00000128928_46 (sequence is synthesized)
taattctctggtttctttataggtgcctgtgtagaaagagtcagggagggattgggtgacttctagaccaattaacttttcttctttcccatccaagggagtccagagagggaagggaaa

SEQ ID NO: 278454 - DNA, 120 bp, Artificial Sequence
  ENSG00000128928_47 (sequence is synthesized)
tggggtgggagtcctggcagctccacttctgactggaaggggttcacttgatccttttctttcacctggaaccttagttgaataaaggtcaagtgacatattttagtgccttacttgaga

SEQ ID NO: 278455 - DNA, 120 bp, Artificial Sequence
  ENSG00000128928_48 (sequence is synthesized)
gccatgtttccaaatctagtacctttgataaaagtgaggaggctgtggacagctctctccctctgaccagcacttatcctggcagctgccaacatcctgggccatgagaataagggtgtc

SEQ ID NO: 278456 - DNA, 120 bp, Artificial Sequence
  ENSG00000128944_0 (sequence is synthesized)
attagctccattcaagcctacaaattgcatcaccctcctcctctgcccagacctgggggctccaacacctttcgctaggtctggctctggcctctgagcgaaccttccgtacagtatggc

SEQ ID NO: 278457 - DNA, 120 bp, Artificial Sequence
  ENSG00000128944_1 (sequence is synthesized)
ggctcccgaagccccgcccctggacagagttttccgtacaacatggctgtctacagagtgcgattcccacccacttccgcctagctaccggaagtttctatttgaaacccaggcggccga

SEQ ID NO: 278458 - DNA, 120 bp, Artificial Sequence
  ENSG00000128944_2 (sequence is synthesized)
cttagccggtggcacgacagttgctgcagggaatcttttaaacgagagcgagaaggactgcgggcaggaccggcgggctcctggggttcagccgtgccgcctcgttacgatgaccagtgt

SEQ ID NO: 278459 - DNA, 120 bp, Artificial Sequence
  ENSG00000128944_3 (sequence is synthesized)
ggttaagacagtgtatagcctgcagcccccctctgcgctgagcggcggccagccggcagacacacaaactcgggccacttctaagagtctcttacctgttaggtccaaagaagtcgatgt

SEQ ID NO: 278460 - DNA, 120 bp, Artificial Sequence
  ENSG00000128944_4 (sequence is synthesized)
ttccaaacagcttcattcaggaggtccagagaatgatgttacaaaaatcaccaaactgagacgagagaatgggcaaatgaaagctactgacactgccaccagaaggaatgtcagaaaagg

SEQ ID NO: 278461 - DNA, 120 bp, Artificial Sequence
  ENSG00000128944_5 (sequence is synthesized)
ctacaaaccactgagtaagcaaaaatcagaggaagagctcaaggacaagaaccagctgttagaagccgtcaacaagcagttgcaccagaagttgactgaaactcagggagagctgaagga

SEQ ID NO: 278462 - DNA, 120 bp, Artificial Sequence
  ENSG00000128944_6 (sequence is synthesized)
cctgacccagaaggtagagctgctggagaagtttcgggacaactgtttggcaattttggagagcaagggccttgatccagctttaggcagtgagaccctggcatcacgacaagaatccac

SEQ ID NO: 278463 - DNA, 120 bp, Artificial Sequence
  ENSG00000128944_7 (sequence is synthesized)
actttgcaagaggagctgaagctttttaacgaaacagccaaaaagcagatggaggagttacaggccttaaaggtaaagctggagatgaaagaggaaagagtccgattcctagaacagcaa

SEQ ID NO: 278464 - DNA, 120 bp, Artificial Sequence
  ENSG00000128944_8 (sequence is synthesized)
accttatgtaacaatcaagtaaatgatttaacaacagcccttaaggaaatggagcagctattagaaatgtaagaagaagcaagtggccagatggctccctcttgggcataaaatctcaga

SEQ ID NO: 278465 - DNA, 120 bp, Artificial Sequence
  ENSG00000128944_9 (sequence is synthesized)
ggaagctacttaggacatcatcttggccatgatcttctgggactcaccatctccagaatgaaaacaatttctacagtagacttaaggacagtttatgctgaaatggcaattcctcattta

SEQ ID NO: 278466 - DNA, 120 bp, Artificial Sequence
  ENSG00000128944_10 (sequence is synthesized)
agcaagttttcccaaccttcaggttggtcagccctcctgagcctcacaggtggataattgaggcctacaagagaggggagcctaggagcttggattgaccttctagtcaaccacctgact

SEQ ID NO: 278467 - DNA, 120 bp, Artificial Sequence
  ENSG00000128944_11 (sequence is synthesized)
tcagcacaccattacaatcgggagactaaaccaacaaccagaggatctaaaatgtcacattcagattttcaggaagaaaatcttcattacagtggagcacaaatgttccatacaagacat

SEQ ID NO: 278468 - DNA, 120 bp, Artificial Sequence
  ENSG00000128944_12 (sequence is synthesized)
cattgaggagccatgctgtccccttctaacctgaaacacattctttcccatcctggttgggcttctgtacctccttattaatttatgaacctgaagttgcttgaagtgttttgggcttaa

SEQ ID NO: 278469 - DNA, 120 bp, Artificial Sequence
  ENSG00000128944_13 (sequence is synthesized)
taaatggggtgaaagtataggtagcagtaacacctacatgaaacaatacaccttggatcttttaatctaaattacttttcttttttaagtctacttttaaaataaatacttctgtaaata

SEQ ID NO: 278470 - DNA, 120 bp, Artificial Sequence
  ENSG00000128944_14 (sequence is synthesized)
tgcttggatgaatcatgggatattgcaccaaatgtagaggatttcatcgttccagtttagatacaggagtctagtccctctctactactagagggacaattcctaaaaccagtgcataga

SEQ ID NO: 278471 - DNA, 120 bp, Artificial Sequence
  ENSG00000128944_15 (sequence is synthesized)
aataaaatctaaaatagaagatacagtctgttgatactccagtggtcttccttagtggaataggagcataatgttctgatgtgggaattgtgtttcctgttagtcaagagttttgtgtat

SEQ ID NO: 278472 - DNA, 120 bp, Artificial Sequence
  ENSG00000128944_16 (sequence is synthesized)
agtcagtgggcagtgactagctctctcagccaagttggaagtgttcatctctttgatttctatctctgtcccagctttatgatcatatgtaactggaacagtttcaaatttttaggctgc

SEQ ID NO: 278473 - DNA, 120 bp, Artificial Sequence
  ENSG00000128944_17 (sequence is synthesized)
ctcccaggatttttgttttgattttgagcgtgggctggataagtaatatatgcacatgtgaaaaaaaaaaaggtggaaaaccatatacaatgataaacaagtttccttcccttccttgac

SEQ ID NO: 278474 - DNA, 120 bp, Artificial Sequence
  ENSG00000128944_18 (sequence is synthesized)
accagccatccagttcctctcccagtgtctcccatttttaagagacagctttgttaaatcctactgaatttttcctacagtgcaatcctagattttagcaaatacaaattattggaacca

SEQ ID NO: 278475 - DNA, 120 bp, Artificial Sequence
  ENSG00000128944_19 (sequence is synthesized)
tagcctgcagcccccctctgcgctgagcggcggccagccggcagatgattccactcagctggtacataaaccttggcaagatggagcgctgaagtggccaggcacggtggctcacgcctg

SEQ ID NO: 278476 - DNA, 120 bp, Artificial Sequence
  ENSG00000128944_20 (sequence is synthesized)
agaccatcctggctaacacgaacacctgaatggtaatcctggcaccagcggggactaggagttgctggaagaactggagccaggtctctcagctgctgtgtctttcccttagatgcggtg

SEQ ID NO: 278477 - DNA, 120 bp, Artificial Sequence
  ENSG00000128944_21 (sequence is synthesized)
gaatgggtgagaacggatcattagtatccagttagaacatcttcctagaaattgctcaatacaaagaattagaaaacagagttttggacaacacaagtctcctgaacaactggccttcaa

SEQ ID NO: 278478 - DNA, 120 bp, Artificial Sequence
  ENSG00000128944_22 (sequence is synthesized)
tcagtggcccagagcagtgcagcattgctgagctctgtgccagaaccctctgtgttgatctttctgaagagacacagccagagttataagaggtgttctttcctctttcatcgcttgctc

SEQ ID NO: 278479 - DNA, 120 bp, Artificial Sequence
  ENSG00000128944_23 (sequence is synthesized)
tgagcatacaagtggcagcactgtagtcatacagcaaccctgaggggtagtcatgcagggtggggactagttgttatcctaggttgctgctctgaccacacagtccagccctagtgtgtg

SEQ ID NO: 278480 - DNA, 120 bp, Artificial Sequence
  ENSG00000128944_24 (sequence is synthesized)
aactccaagaaacagcctttgattatctgtgatgctagaaaagagaaatgggatgtgtactcaaaatagcatattttacttgaaaggtagctttgtgcttacaaatataagtgagtctga

SEQ ID NO: 278481 - DNA, 120 bp, Artificial Sequence
  ENSG00000128944_25 (sequence is synthesized)
attgaaaatttaaaacacataataggtaaacctgtagagagagctttctcgttcttctgttctatactttatcaaatttctctcctgactcctttgttgagaactgtgtggaaaggatgt

SEQ ID NO: 278482 - DNA, 120 bp, Artificial Sequence
  ENSG00000128944_26 (sequence is synthesized)
tagccatcatctaatgcaagtctggttttatatgaagatttgtttactacattgtgctttcctcttagttgctgttagaaactttgcaagaggagctgaagctttttaacgaaacagcca

SEQ ID NO: 278483 - DNA, 120 bp, Artificial Sequence
  ENSG00000128944_27 (sequence is synthesized)
gcaggtgagggtccaagccacgcccggggcactgcggcctggccggggatggtctcgggagtgtggagatcgaatgggtggcgcgggcacggggaagggcgtcccgtcggccctgaaaac

SEQ ID NO: 278484 - DNA, 120 bp, Artificial Sequence
  ENSG00000128951_0 (sequence is synthesized)
gttcccaggacgggcgcgtcttcagggtggaagcctggcgcacgtccggaggtgccgaggacccaaccagcccaaactctgggggaaatgactcccctctgccctcgccccgcgctctgc

SEQ ID NO: 278485 - DNA, 120 bp, Artificial Sequence
  ENSG00000128951_1 (sequence is synthesized)
taccatttccttacgtctctgcttcgctcagcgatgcaaaacgcgcgaggcgcacggcagagggccgaagccgcggtactctccgggccaggcccgcccctcggccgcgccgcgcagcac

SEQ ID NO: 278486 - DNA, 120 bp, Artificial Sequence
  ENSG00000128951_2 (sequence is synthesized)
gggattccccggccgctgtccagcgctggccgcctgagccaaggctgccgcggagccagtacagtcggggccgctggctggaagggcgagcttcctaaggcggggggaagcccggcgccg

SEQ ID NO: 278487 - DNA, 120 bp, Artificial Sequence
  ENSG00000128951_3 (sequence is synthesized)
gggccggagacacccgccatttcacccagtaagcgggcccggcctgcggaggtgggcggcatgcagctccgctttgcccggctctccgagcacgccacggcccccacccggggctccgcg

SEQ ID NO: 278488 - DNA, 120 bp, Artificial Sequence
  ENSG00000128951_4 (sequence is synthesized)
cgcgccgcgggctacgacctgtacagtgcctatgattacacaataccacctatggagaaagctgttgtgaaaacggacattcagatagcgctcccttctgggtgttatggaagagtggct

SEQ ID NO: 278489 - DNA, 120 bp, Artificial Sequence
  ENSG00000128951_5 (sequence is synthesized)
ccacggtcaggcttggctgcaaaacactttattgatgtaggagctggtgtcatagatgaagattatagaggaaatgttggtgttgtactgtttaattttggcaaagaaaagtttgaagtc

SEQ ID NO: 278490 - DNA, 120 bp, Artificial Sequence
  ENSG00000128951_6 (sequence is synthesized)
aaaaaaggtgatcgaattgcacagctcatttgcgaacggattttttatccagaaatagaagaagttcaagccttggatgacaccgaaaggggttcaggaggttttggttccactggaaag

SEQ ID NO: 278491 - DNA, 120 bp, Artificial Sequence
  ENSG00000128951_7 (sequence is synthesized)
aattaaaatttatgccaagaacagaaaacaagaagtcatacctttttcttaaaaaaaaaaaaaaagtttttgcttcaagtgttttggtgttttgcacttctgtaaacttactagctttac

SEQ ID NO: 278492 - DNA, 120 bp, Artificial Sequence
  ENSG00000128951_8 (sequence is synthesized)
actttgtttttccgcaattgaaggttgtatgtaaatctgctttgtggtgacctgatgtaaacagtgtcttcttaaaatcaaatgtaaatcaattacagattaaaaaaaaaagcctgtatt

SEQ ID NO: 278493 - DNA, 120 bp, Artificial Sequence
  ENSG00000128951_9 (sequence is synthesized)
taactcatatgatctcccttcagcaacttattttgctttaattgctttaaatcttaagcaatattttttattcagtaaacaaattctttcacaaggtacaaaatcttgcataagctgaac

SEQ ID NO: 278494 - DNA, 120 bp, Artificial Sequence
  ENSG00000128951_10 (sequence is synthesized)
taaaataaaaatgaaaaggagagattaaaggtattccttgttcttcccttctcttcactagtctaaaaacttctttttaatcttaagattctttgtgatgagggtgagaaaaagaatcct

SEQ ID NO: 278495 - DNA, 120 bp, Artificial Sequence
  ENSG00000128951_11 (sequence is synthesized)
cagtttatttttccactattaatctttcttttgataaatcctctattgactgggtagaggtatgtttgtgaaagacatgtaacttggggatttgttactttaggtttgttcccttgaatt

SEQ ID NO: 278496 - DNA, 120 bp, Artificial Sequence
  ENSG00000128951_12 (sequence is synthesized)
tcatctcatcaggcaaattgtactagttgtagttacgagttttccctcagtgaagtagcaataggctgtaatcaagaaaatatgccatttatagagataagataaatgaaataatacttc

SEQ ID NO: 278497 - DNA, 120 bp, Artificial Sequence
  ENSG00000128951_13 (sequence is synthesized)
agccaccaggtttttctgtctcacatacataagcagcatttcattgcagatatgggactgattctgtggcttaccttgattaacatcttttggaagttttgctagtgtgctttcctttct

SEQ ID NO: 278498 - DNA, 120 bp, Artificial Sequence
  ENSG00000128951_14 (sequence is synthesized)
ttactatgtttctcagattcctttgtatcagggttttgggtgtcacttaggttttgtccatcagattctgtgagacaccaggcatcgttttgaggatgtgggttatacacatggagtgct

SEQ ID NO: 278499 - DNA, 120 bp, Artificial Sequence
  ENSG00000128951_15 (sequence is synthesized)
tctggaactatcagcccacttgaccacccagtttgtggaagcacaggcaagagtgttcttttctggtgattctccaggccatttaataccctgcaatgtaattgtccctctgtggctcac

SEQ ID NO: 278500 - DNA, 120 bp, Artificial Sequence
  ENSG00000128951_16 (sequence is synthesized)
atttcattagtgagccatgaaatcaactcagtgggacatagccagcatttttgcataccaggttgggctataaaatatttctgttgtcaataaattttaaatgttttcctgctaaactaa

SEQ ID NO: 278501 - DNA, 120 bp, Artificial Sequence
  ENSG00000128951_17 (sequence is synthesized)
agccagaactgtggactcgtcccggggaggggcggtgggtggggcggggctggcgggaaatttcggttttggcgcgctccctgcggcgacgctcatcgtgcgctctcctcttcccccggt

SEQ ID NO: 278502 - DNA, 120 bp, Artificial Sequence
  ENSG00000128951_18 (sequence is synthesized)
ggtgagcggggacctgccggcgaggaggctgggaagggccggccgtccgctgccacagctagaaacagtcaccggagagatcacaggaacacactagctataaataggatttctgccttt

SEQ ID NO: 278503 - DNA, 120 bp, Artificial Sequence
  ENSG00000128951_19 (sequence is synthesized)
ttcgtgtttaaaattttagctttcatctttggcataaattaaatagagatttgggcaaagactgcagaataagtaaaatagctatacggtgtctagcaaggcgttactttgcaacgttta

SEQ ID NO: 278504 - DNA, 120 bp, Artificial Sequence
  ENSG00000128951_20 (sequence is synthesized)
ttttgaggctttacatagtaccagggcaagattcacttattcaattgtaagaatacaaatctcagagctacatgataatgattttgagataatcttacacctctagtattccaatagcaa

SEQ ID NO: 278505 - DNA, 120 bp, Artificial Sequence
  ENSG00000128951_21 (sequence is synthesized)
aacggattttttatccagaaatagaagaagttcaagtaagtattacaaaggaagatacagaataagtaatataacatcttaagtgaagaaatatatataatcttgagaatttaatatgct

SEQ ID NO: 278506 - DNA, 120 bp, Artificial Sequence
  ENSG00000128951_22 (sequence is synthesized)
taaacatactgtgaacttctaatattttattagaattttttaaagttatccagtattctaatttatggagctttttagaatttaattttctttctgtaatctcccttttgaaaagatgat

SEQ ID NO: 278507 - DNA, 120 bp, Artificial Sequence
  ENSG00000128951_23 (sequence is synthesized)
atagcaagagtagaattctggctgtatttttcttaggagctggagaggaaaactgaaagaggctcttaaaaaaaactgtgaagcttactacctttctatctttcaggccttggatgacac

SEQ ID NO: 278508 - DNA, 120 bp, Artificial Sequence
  ENSG00000128951_24 (sequence is synthesized)
ataaacactacaacgtctgacactcggtgctgaaaggaaatcgggcgcggtgtcttgcccacagcttggggagcggccccgggcgcaataactgtcaccggcgccgagatgcggttccgg

SEQ ID NO: 278509 - DNA, 120 bp, Artificial Sequence
  ENSG00000128951_25 (sequence is synthesized)
gctgcaaaacactttattgatgtaggagggcttttgtttggggtagagtattaataacaagtaagatgtgacatggagctgtcttcagttagattcacgtgagtcttatccagcctttca

SEQ ID NO: 278510 - DNA, 120 bp, Artificial Sequence
  ENSG00000128965_0 (sequence is synthesized)
agctggagctaccgagcggtgccaggccaggtgtgtgcgtccgtcggtctttccgtgcccacgccggagaccagccccggaggccgcctgggcctatccctgtgccaggcaccatgaagc

SEQ ID NO: 278511 - DNA, 120 bp, Artificial Sequence
  ENSG00000128965_1 (sequence is synthesized)
aggagtctgcagccccgaacaccccgcccacctcgcagtcccctacgccgtccgctcagttcccccgaaacgacggcgaccctcaagcgctgtggattttcgggtacggctccctggtgt

SEQ ID NO: 278512 - DNA, 120 bp, Artificial Sequence
  ENSG00000128965_2 (sequence is synthesized)
ggaggcccgacttcgcctacagcgacagccgtgtgggcttcgtgcgcggctacagccgccgtttctggcagggagacaccttccatcggggcagcgacaagatgcctggccgtgtggtga

SEQ ID NO: 278513 - DNA, 120 bp, Artificial Sequence
  ENSG00000128965_3 (sequence is synthesized)
cgctccttgaagatcatgagggctgcacttggggcgtggcataccaagtgcaaggggagcaggtaagcaaggccctgaagtacctgaatgtgcgagaggcagtgcttggtggctacgata

SEQ ID NO: 278514 - DNA, 120 bp, Artificial Sequence
  ENSG00000128965_4 (sequence is synthesized)
ccaaggaggtcaccttctatccccaagatgctcctgaccaaccactgaaggcattggcctatgtggccaccccacagaaccctggttacctgggccctgcgcctgaagaggccattgcca

SEQ ID NO: 278515 - DNA, 120 bp, Artificial Sequence
  ENSG00000128965_5 (sequence is synthesized)
cgcagatcctggcctgccggggcttctccggccacaaccttgaatacttgctgcgtctggcagacttcatgcagctctgtgggcctcaggcgcaggacgagcacctggcagccatcgtgg

SEQ ID NO: 278516 - DNA, 120 bp, Artificial Sequence
  ENSG00000128965_6 (sequence is synthesized)
ggagtgctcatgtggacatcagggccagacacccactccagtgcacaagacagacttgcgaccgcttgagcccactgagcagatatggtgggtggctggaggcttctctttctcagtccc

SEQ ID NO: 278517 - DNA, 120 bp, Artificial Sequence
  ENSG00000128965_7 (sequence is synthesized)
tgcctgtctgccagcctgcagctctcctgcttgacactgacttactacttgaaactttatttattgcaccatgttggtgtggtgggcaggtggagggcctgccctggacacaggggccct

SEQ ID NO: 278518 - DNA, 120 bp, Artificial Sequence
  ENSG00000128965_8 (sequence is synthesized)
gctgagcagtggccccatcctggaacttgaccagattccccccagtgctgctgctaaccccacaccacccaggcctccacctccccagggagtctccaagagcctcgatcctctgctcac

SEQ ID NO: 278519 - DNA, 120 bp, Artificial Sequence
  ENSG00000128965_9 (sequence is synthesized)
tcagcccagccatccatagccctgggaattccacctgccaaggatcccagcaggctggatgagggatagtagggcatgaggagaaggagccctgtaaggactgaggccccggccagccct

SEQ ID NO: 278520 - DNA, 120 bp, Artificial Sequence
  ENSG00000128965_10 (sequence is synthesized)
tctcctccaccagttccccagagcagagctggagctgatgcctggacacagctgctgagcctggcctgggcctcttacccacttggttgttttcttgtccctctgtctgtctgtctatct

SEQ ID NO: 278521 - DNA, 120 bp, Artificial Sequence
  ENSG00000128965_11 (sequence is synthesized)
acttgtctgtctgggccactcctgcctgtgtgttggtctattcctgggaagctcatcactacaggccctggcaaccttcccagtctgtcccatactgttacccataaaactatctcttta

SEQ ID NO: 278522 - DNA, 120 bp, Artificial Sequence
  ENSG00000128965_12 (sequence is synthesized)
gagacggaagtttacgacgcccagagcgctccttctggacgtgccctggactcgacttgggactgagtctgtgccgcctaggctggcagggactcggccagatgcactagcggcaaggct

SEQ ID NO: 278523 - DNA, 120 bp, Artificial Sequence
  ENSG00000128965_13 (sequence is synthesized)
cactagcggcaaggctgggctgacaccgcctgggactcgctcgccgtacctccaaggggcccaggtcatgagggggcggctggggagacgcccgcccggtgcccgccctgggcccggcgg

SEQ ID NO: 278524 - DNA, 120 bp, Artificial Sequence
  ENSG00000128965_14 (sequence is synthesized)
gcctgacgcaatccgaggcgcccttgctgcatgccggcgctggagaaacctcccctgccgttgcatcactcctgccaggtttgccacagaggtggagctgaaccaatcagcgggcgcgct

SEQ ID NO: 278525 - DNA, 120 bp, Artificial Sequence
  ENSG00000128965_15 (sequence is synthesized)
gggcccgcggcgcggttaagtgagaagcagaatccgaagttgattggccaaaaggggatttgccccaccccaatcaccgcggcagctggccgcggtgggcgtggtctcccggcaagaagg

SEQ ID NO: 278526 - DNA, 120 bp, Artificial Sequence
  ENSG00000128973_0 (sequence is synthesized)
ctgttcctcccgagggccgcgcgctctcgccggcccgccccgaaccgccccgcgctgggaatttgcggcggcctccgccggggcagccgagctgaaccggtctcttcctcggaaaggcag

SEQ ID NO: 278527 - DNA, 120 bp, Artificial Sequence
  ENSG00000128973_1 (sequence is synthesized)
gaggggcctgcggggcagccatggaggcgacgcggaggcggcagcacctgggagcgacgggcggcccaggcgcgcagctgggcgcctccttcctgcaggccaggcatggctctgtgagcg

SEQ ID NO: 278528 - DNA, 120 bp, Artificial Sequence
  ENSG00000128973_2 (sequence is synthesized)
agcgctgatgaggctgcccgcacggctcccttccacctcgacctctggttctacttcacactgcagaactgggttctggactttgggcgtcccattgccatgctggtattccctctcgag

SEQ ID NO: 278529 - DNA, 120 bp, Artificial Sequence
  ENSG00000128973_3 (sequence is synthesized)
tggtttccactcaacaagcccagtgttggggactacttccacatggcctacaacgtcatcacgccctttctcttgctcaagctcatcgagcggtccccccgcaccctgccacgctccatc

SEQ ID NO: 278530 - DNA, 120 bp, Artificial Sequence
  ENSG00000128973_4 (sequence is synthesized)
acgtacgtgagcatcatcatcttcatcatgggtgccagcatccacctggtgggtgactctgtcaaccaccgcctgctcttcagtggctaccagcaccacctgtctgtccgtgagaacccc

SEQ ID NO: 278531 - DNA, 120 bp, Artificial Sequence
  ENSG00000128973_5 (sequence is synthesized)
atcatcaagaatctcaagccggagacgctgatcgactcctttgagctgctctactattatgatgagtacctgggtcactgcatgtggtacatccccttcttcctcatcctcttcatgtac

SEQ ID NO: 278532 - DNA, 120 bp, Artificial Sequence
  ENSG00000128973_6 (sequence is synthesized)
ttcagcggctgctttactgcctctaaagctgagagcttgattccagggcctgccctgctcctggtggcacccagtggcctgtactactggtacctggtcaccgagggccagatcttcatc

SEQ ID NO: 278533 - DNA, 120 bp, Artificial Sequence
  ENSG00000128973_7 (sequence is synthesized)
ctcttcatcttcaccttcttcgccatgctggccctcgtcctgcaccagaagcgcaagcgcctcttcctggacagcaacggcctcttcctcttctcctccttcgcactgaccctcttgctt

SEQ ID NO: 278534 - DNA, 120 bp, Artificial Sequence
  ENSG00000128973_8 (sequence is synthesized)
gtggcgctctgggtcgcctggctgtggaatgaccctgttctcaggaagaagtacccgggtgtcatctacgtccctgagccctgggctttctacacccttcacgtcagcagtcggcactga

SEQ ID NO: 278535 - DNA, 120 bp, Artificial Sequence
  ENSG00000128973_9 (sequence is synthesized)
gagtagggggggtgtgggtgtgtaaccagagaccgagagcatgagtggggtgtgcctcgtgtgcgtggattcgtgtgtgtgtgtgtgtgtgtcttgtatatgtgtgcgcagagtgcatca

SEQ ID NO: 278536 - DNA, 120 bp, Artificial Sequence
  ENSG00000128973_10 (sequence is synthesized)
ttttcagactctactatttccgtcaagtttctgtttgatttggatcatctcaggatcggattctgttttagagtgtttctgggccaggatccgggcccctgccctcctctgcacctgacc

SEQ ID NO: 278537 - DNA, 120 bp, Artificial Sequence
  ENSG00000128973_11 (sequence is synthesized)
acactccctactcagggctagtctgttcttcccggacatcttctggtagccgtgcaggagagggctgggtggggcagaggccaggaggggacctggtgtgtcacctgcccaccacctggc

SEQ ID NO: 278538 - DNA, 120 bp, Artificial Sequence
  ENSG00000128973_12 (sequence is synthesized)
tcatccctcaggcccaccctgaccctacattacataggttacgtcagcctactgtggctgttgagcaaagcatttctcctttctgggcctcatttgcactagatgggcctgtggtcccaa

SEQ ID NO: 278539 - DNA, 120 bp, Artificial Sequence
  ENSG00000128973_13 (sequence is synthesized)
agtaggtcagtaggttggggttgctgacaccccttgggtgcagctttgggacagatgagtggctctgtcctgtcactgccctctccctgcctgggggctatgtgcactccagacccctgc

SEQ ID NO: 278540 - DNA, 120 bp, Artificial Sequence
  ENSG00000128973_14 (sequence is synthesized)
ccaggctcaggcccatgaggtatggagacaccctggcccccaggagctggaggcaccgcccactcccctggcattccagctttgcaggtgaccctcctctacccaaagctctgtccccct

SEQ ID NO: 278541 - DNA, 120 bp, Artificial Sequence
  ENSG00000128973_15 (sequence is synthesized)
gctcccactccagaagaactgcggcacgcgcttcgggcagcctagccacaggctttgagcgcctgcattcctgggggctggagggtggggtgccaaaggccctgagcaaaagccagagct

SEQ ID NO: 278542 - DNA, 120 bp, Artificial Sequence
  ENSG00000128973_16 (sequence is synthesized)
cctctcatcaaagcctttacaaggtgctgggcccagaggctttgccttgacagagtggcccagggtttcaagggaggaggaacctccccctacctaggacccttcctgtggggggtctac

SEQ ID NO: 278543 - DNA, 120 bp, Artificial Sequence
  ENSG00000128973_17 (sequence is synthesized)
agagtcagggacagaagggaagggacccacaggaagtcacagtggtgcccagggatgtgtcagcccccagccacggggacgcgggattcaagaatgaagtaaatacagtcacagccccaa

SEQ ID NO: 278544 - DNA, 87 bp, Artificial Sequence
  ENSG00000128973_18 (sequence is synthesized)
gagccaagatcacgccattgcactccggcccgggcaagacagtgagacttcatctttagggccggcatggtggcttacgcctgtaag

SEQ ID NO: 278545 - DNA, 77 bp, Artificial Sequence
  ENSG00000128973_19 (sequence is synthesized)
aaaagaaaaagaaaaaaatacaaaaaacttagggccggcatggtggcttacgcctgtaagcccagcactctgggagc

SEQ ID NO: 278546 - DNA, 64 bp, Artificial Sequence
  ENSG00000128973_20 (sequence is synthesized)
ctggccaacatggcaaaacctcatctccattaaaaatacaaaaaagttagccaggtgcggtggt

SEQ ID NO: 278547 - DNA, 120 bp, Artificial Sequence
  ENSG00000128973_21 (sequence is synthesized)
actccagcctgggcgatggagcaacactctgtctcaaaaaagaaaattctacacatatgtacttaacacaaactttgtttcatgtacaaaattatttaaaatgttatataaaattaactt

SEQ ID NO: 278548 - DNA, 89 bp, Artificial Sequence
  ENSG00000128973_22 (sequence is synthesized)
ggaaatataaatgaatttttatactttgggaggctgatacaggaggatcacttgaggccagtagtttgagaccagcctgggcaacatag

SEQ ID NO: 278549 - DNA, 120 bp, Artificial Sequence
  ENSG00000128973_23 (sequence is synthesized)
caaaaaatttaaaaattagctgggcataatggtgcacacctgtagttccagctactctgggggctgaggtgggaggatctcttgagccactatactccagcctgagtgacagagtgagac

SEQ ID NO: 278550 - DNA, 120 bp, Artificial Sequence
  ENSG00000128973_24 (sequence is synthesized)
agtgacagagtgagaccctgtctcaaagaaaaatgaaagaaatgaatttcatgtttagacttgcatatgcattcccaagatatctcattgtgtatatgcaaatattccaaaatctgaaat

SEQ ID NO: 278551 - DNA, 120 bp, Artificial Sequence
  ENSG00000128973_25 (sequence is synthesized)
tgcaaatattccaaaatctgaaatttgaaacatttcagataagggatgctcagcctgtatcaccatttactatcaccatcattttgtattgaagaaagatacttcaaatctccagaagta

SEQ ID NO: 278552 - DNA, 120 bp, Artificial Sequence
  ENSG00000128973_26 (sequence is synthesized)
ggaggggtataatcccagaactccggtgtgttttcagttaaacagtggcatttcagaagcacctgcccccatccctgacattttcttcatgtttgctgggaccactcagaaatcagaagg

SEQ ID NO: 278553 - DNA, 120 bp, Artificial Sequence
  ENSG00000128973_27 (sequence is synthesized)
tgccttcagcaggctgggccagccacccagggacacagccagggacagtgggagggctgggcctgagcctggactcctgcactgaaggctgggctgtcccctccagcctacagctcatgt

SEQ ID NO: 278554 - DNA, 120 bp, Artificial Sequence
  ENSG00000128973_28 (sequence is synthesized)
gtgactttgggaaaggagttgggccctctggtctttttgctccctgggtaaagtcagcggggggtgctgctccacattccctccggggttcataggggtcacgggaggatctggaggctg

SEQ ID NO: 278555 - DNA, 120 bp, Artificial Sequence
  ENSG00000128973_29 (sequence is synthesized)
ggctggcctgctaaagggaccagccactttttggagtgacattccagctggaagcgtccatcccaccccaggtgtgaggggggaagcagagggtgtcacatactgtgacagaggtggggt

SEQ ID NO: 278556 - DNA, 120 bp, Artificial Sequence
  ENSG00000128973_30 (sequence is synthesized)
ctggtgaggccacctcctgctccctgcctgtaagccctaggagcacagtctgtcctgggaggctgaagaaatggcccccacccctcgccgcacctgtcctttcaccaaaggcattctgct

SEQ ID NO: 278557 - DNA, 120 bp, Artificial Sequence
  ENSG00000128973_31 (sequence is synthesized)
aggtgagggcactgtcgcctgccccaagctaggatgctcaagtgttcttaggaagtggtgcacagactgcctcccacctgggcccctgtaacagaaggcgaggccccgggtagggaataa

SEQ ID NO: 278558 - DNA, 120 bp, Artificial Sequence
  ENSG00000128973_32 (sequence is synthesized)
ggcagtgggggaggcctgggactgggagaagggtggtcagaggggatgcttggggccccagcacctccctggactgacatcgacatcccccgactctgccctgcccgttcctccctcaga

SEQ ID NO: 278559 - DNA, 90 bp, Artificial Sequence
  ENSG00000128973_33 (sequence is synthesized)
ttgagcccaggagtttgtgaccagcctggtcaacataaggagacctcatctcgctctctctccatgtcagtacatataaggtgtcatttc

SEQ ID NO: 278560 - DNA, 120 bp, Artificial Sequence
  ENSG00000128973_34 (sequence is synthesized)
tctctctccatgtcagtacatataaggtgtcatttctgttaatggctacttaaccttccatggtaagaagtactatcagggattcaactggtcctgtttgattgaagagtcagcctattt

SEQ ID NO: 278561 - DNA, 120 bp, Artificial Sequence
  ENSG00000128973_35 (sequence is synthesized)
ctgatgttttgctatcacagagtattttagcaagtatatatatgatgtaggtaaagaggcagataaacacatgcacactgagtaagagagagagagagagactgagattgctgcattctg

SEQ ID NO: 278562 - DNA, 120 bp, Artificial Sequence
  ENSG00000128973_36 (sequence is synthesized)
tgagttttatttctgcgggtttagtttatccaatatggcatttctgtgttaaaagagagaaccatctaaatccttccttgaaacttgtgggccttatgtgtgttttcaatcaacagatac

SEQ ID NO: 278563 - DNA, 120 bp, Artificial Sequence
  ENSG00000128973_37 (sequence is synthesized)
tagaagtacagtttgggggttgtgaaatgctttaaccccgcataggggttttcacactggcctggacaaggccagggctcagaagagagagcattgcagaaggaggaactgcccctggcc

SEQ ID NO: 278564 - DNA, 120 bp, Artificial Sequence
  ENSG00000128973_38 (sequence is synthesized)
tgccttcctctctctgggaaggaagagttgcagctactttgtagagcattcttgttttctcctttgtctcctaacgtgtactttgaacctggtttggaagcagtccctccacatcagggc

SEQ ID NO: 278565 - DNA, 120 bp, Artificial Sequence
  ENSG00000128973_39 (sequence is synthesized)
tagcactcaggagactgatctggcactcaggagcgccagaacccgaacggtccaagtaggccctctgggccacctctcttgtgttatagatggggaaaccaaggcccagagaagggaagt

SEQ ID NO: 278566 - DNA, 120 bp, Artificial Sequence
  ENSG00000128973_40 (sequence is synthesized)
attagcccagggtcacccagcaagttggtgccacaacggagtccctgagaagcctaccaactcccaagctggcatcagggtcatttatttggtatctgctgggtgaggggcacagggtca

SEQ ID NO: 278567 - DNA, 120 bp, Artificial Sequence
  ENSG00000128973_41 (sequence is synthesized)
ggccttgactggaattgcatctgctctgtgtctggggacaagtccgttacctcctctgggactcagctttcctgtctggataaacctttgtcccaaggctgccgagaaggtccagcgatc

SEQ ID NO: 278568 - DNA, 120 bp, Artificial Sequence
  ENSG00000128973_42 (sequence is synthesized)
acaggaagaattaagtgtacatgatggggtggggggtgaaaggagttggggtgggcggcattaggggcagactcccttgaggcccgagggccgcgtggggctgtgcccaggtgagcccat

SEQ ID NO: 278569 - DNA, 120 bp, Artificial Sequence
  ENSG00000128973_43 (sequence is synthesized)
actgtcccagggcccccactctctcctgtcatccccattctttgcacacctggcaggaaggtgatgctaagccctgtgtcctgactcaagcacgctcctgcctgctgctggggggtgaag

SEQ ID NO: 278570 - DNA, 120 bp, Artificial Sequence
  ENSG00000128973_44 (sequence is synthesized)
cgctcgctggcggggagaggcctgcagaagtcaggccaggtgtctctctttcccttgggcccgcggcccaaccgcatggcaccaggcagcccccagcggtattgcgacctctgcgtcagt

SEQ ID NO: 278571 - DNA, 120 bp, Artificial Sequence
  ENSG00000128973_45 (sequence is synthesized)
cgcgctcagtccctagatacaggtgtgccggagaagcccagggaagggatgcgtgaccatcactacaccctgccccacgacgcggtgggacgcgcaccctgaccctccccagagccgcgc

SEQ ID NO: 278572 - DNA, 120 bp, Artificial Sequence
  ENSG00000128973_46 (sequence is synthesized)
gagaggcaggccccggccagagacactgggagccatccctaggagggagggaggcgaggcgggcttgagccgagccttcaagccactggcgcaggcgccattgtcctgtgagacttcgct

SEQ ID NO: 278573 - DNA, 65 bp, Artificial Sequence
  ENSG00000128973_47 (sequence is synthesized)
agccactggcgcaggcgccattgtcctgtgagacttcgctgagaaaactcaaattcaaaggtaaa

SEQ ID NO: 278574 - DNA, 120 bp, Artificial Sequence
  ENSG00000128973_48 (sequence is synthesized)
ggcatgagccaccgcacccggcctaggtcttagatgcatggctctgtgagcgctgatgaggctgcccgcacggctcccttccacctcgacctctggttctacttcacactgcagaactgg

SEQ ID NO: 278575 - DNA, 120 bp, Artificial Sequence
  ENSG00000128973_49 (sequence is synthesized)
gaaaatatgccccaagaaagggcttttgatttgagcctcagcctggcgtgccagtgggggaagcagagaggtgttcaggtagaaggacctaaagacaaggctgtgcttgggaaaccgtaa

SEQ ID NO: 278576 - DNA, 120 bp, Artificial Sequence
  ENSG00000128973_50 (sequence is synthesized)
aacatttggggaggctgaggcagaagtgactggaggtccagggagaggtcaaggacccactgggaagagaggaagaagccaggtggcaggagaggcagcagcagcagctgaactccatcc

SEQ ID NO: 278577 - DNA, 120 bp, Artificial Sequence
  ENSG00000128973_51 (sequence is synthesized)
tctgccctggagagccctgagatgtcactgggagcactagcaggaactgctggctttgcactttgccaagtaaggcctttaaaactactataggttgagcatccctaatccaaaaatctg

SEQ ID NO: 278578 - DNA, 120 bp, Artificial Sequence
  ENSG00000128973_52 (sequence is synthesized)
tctgaaatctgaaatgctccaaaggagtctgaaattttttaagcactggcatgatactataagtagaaaactcggccaggcgcggtggctggagcctgtaatcccagcactttgggaggc

SEQ ID NO: 278579 - DNA, 120 bp, Artificial Sequence
  ENSG00000128973_53 (sequence is synthesized)
ctgtgagcgctgatgaggctgcccgcacggctcccttccacctcgacctctggttctacttcacactgcagaactgggttctggactttgggcgtcccattgccatggtgagtgtgaaat

SEQ ID NO: 278580 - DNA, 120 bp, Artificial Sequence
  ENSG00000128973_54 (sequence is synthesized)
ggtgcacagggctctgaccagcactgaggacacttagtgtggcttgaatttgccgagtgaccttagacaagtcacttctcctttatctcctagtaaactgagagaataggcctggatgcc

SEQ ID NO: 278581 - DNA, 120 bp, Artificial Sequence
  ENSG00000128973_55 (sequence is synthesized)
ccaactctcatgggggaactggtggtcctgaacagtcatactgtaatactgtaaccccctctggcctgtgtctggaagcaggtgaaccaggttgaaccaaatcaccaagacagacaaagg

SEQ ID NO: 278582 - DNA, 120 bp, Artificial Sequence
  ENSG00000128973_56 (sequence is synthesized)
ggtataggaaaggaagtggagcaccgcacccccacctccgtctcccctgtccttccccattaccttgggatagtattattttttctggagttgaagggcgtaggctgattttgcatatta

SEQ ID NO: 278583 - DNA, 120 bp, Artificial Sequence
  ENSG00000128989_0 (sequence is synthesized)
ggaaaaaaggaagtgtttggacgacagcgagcgggagaagcggggtcaagtaggtaggggtgcggtgcgggaggggcaggcgggctccggcgtgcgagggccttggccagcggagcgttt

SEQ ID NO: 278584 - DNA, 120 bp, Artificial Sequence
  ENSG00000128989_1 (sequence is synthesized)
cgcggctccgtgtcgtcataaggcggcggccattttcgcgggcggaggcggcccggcgggccctgggagagctgggacgggcggcggccgggtggcctcggccacccgctaattgcatct

SEQ ID NO: 278585 - DNA, 120 bp, Artificial Sequence
  ENSG00000128989_2 (sequence is synthesized)
tttcccggcgtctcgtctgcagagggagcactatgtctgcggaagtccccgaggcagcctccgcggaggagcagaaggaaatggaagataaagtgactagtccagagaaagcagaagaag

SEQ ID NO: 278586 - DNA, 120 bp, Artificial Sequence
  ENSG00000128989_3 (sequence is synthesized)
caaaattaaaagcaagatatcctcatctgggacaaaagcctggaggttcagatttcttaaggaaacggttgcagaaagggcaaaaatattttgattctggggattacaacatggctaaag

SEQ ID NO: 278587 - DNA, 120 bp, Artificial Sequence
  ENSG00000128989_4 (sequence is synthesized)
caaaaatgaagaacaagcaacttcctactgcagctccggataagacggaggtcactggtgaccacattcccactccgcaagaccttcctcaacggaagccgtcccttgttgctagcaagc

SEQ ID NO: 278588 - DNA, 120 bp, Artificial Sequence
  ENSG00000128989_5 (sequence is synthesized)
tggctggctgattaagaggctgaactgcatgaatctgctaaatctcattatttctccttaatatgttacttatctactttttatttcctttcattcactagtcatttgagactgacagct

SEQ ID NO: 278589 - DNA, 120 bp, Artificial Sequence
  ENSG00000128989_6 (sequence is synthesized)
ttgcaggtagcagtagtgtgtgctgctattgtggaatatacgtgtgtagagtttttgattagtttaacagtgcactggtgaagaggacatgttagagcaacataagtaaactacttgaaa

SEQ ID NO: 278590 - DNA, 120 bp, Artificial Sequence
  ENSG00000128989_7 (sequence is synthesized)
atagttgtatatattacctaacttctagtgtagtactggttctaacaagtaacaagcaagttttaaaattttaatgttttggctttcattacttcatcttaattatagctttgtatgtta

SEQ ID NO: 278591 - DNA, 120 bp, Artificial Sequence
  ENSG00000128989_8 (sequence is synthesized)
ctcttatttaatataatctctattgtattgatttcttctgtatttaccttttggattttgtaaaacagaagtttaagaccacaagttagaagaaaggtcacatatttcaaacacaactag

SEQ ID NO: 278592 - DNA, 120 bp, Artificial Sequence
  ENSG00000128989_9 (sequence is synthesized)
atggggctctgaaagatttgtatctctgtgcttgaacttgaatggccttaaacctgtttcagctttaacagtagaattttacttgggcaatatttgcccattctggtgtaacttatgtga

SEQ ID NO: 278593 - DNA, 120 bp, Artificial Sequence
  ENSG00000128989_10 (sequence is synthesized)
ctctagtgcttaacagctgccgttgaagctaatattcagttctgtagagttagaataccttttgttgttgaagatgtgaatgaagtatgcatgtgcattaactgttgaattcacttttgt

SEQ ID NO: 278594 - DNA, 120 bp, Artificial Sequence
  ENSG00000128989_11 (sequence is synthesized)
gccatttttgtaaatacagtagttttgcacaacctctcacaaatgtctgtattaatttcacatacttaaaaagtagataatgtgccaaccagaagcacaagagttcctacacaaaactct

SEQ ID NO: 278595 - DNA, 120 bp, Artificial Sequence
  ENSG00000128989_12 (sequence is synthesized)
gtaaatcattatagcttttgtataataagagtagtttacaatctcgggcttatagaataccaaactgaaatcttagttcaatctgccatagacttaagcttttcatttgttactaatatc

SEQ ID NO: 278596 - DNA, 120 bp, Artificial Sequence
  ENSG00000128989_13 (sequence is synthesized)
catgacattcagtggccttgtgcaaatacgatatgttgcttaggcatatcttttgtcctatgcagaacctttcattttgatttttatgaaagttgcaattcatgtaatttatataaactt

SEQ ID NO: 278597 - DNA, 120 bp, Artificial Sequence
  ENSG00000128989_14 (sequence is synthesized)
tttaaatgtagaaactttttacttccacactcagttttggagaccctagaataaaaggcttcaatactctgcattccatgccctctgccacctgcttttttttcccctttgttctttgac

SEQ ID NO: 278598 - DNA, 120 bp, Artificial Sequence
  ENSG00000128989_15 (sequence is synthesized)
tcaaatggtattgagctgtttgttgtatatggaagcataggtgtctatatccttactcttttatataacacaataatggcgttttccttctaatttctcagttgttaacttctttctctt

SEQ ID NO: 278599 - DNA, 120 bp, Artificial Sequence
  ENSG00000128989_16 (sequence is synthesized)
ttttttttaggatagggccttgctctgtcacctgagctctagtgcagtagtgcaatcacagctcactgcaaccttactcctaggctcaagttaactattcttgatcctttattattacta

SEQ ID NO: 278600 - DNA, 120 bp, Artificial Sequence
  ENSG00000128989_17 (sequence is synthesized)
atattctacaattgtttaaataaaaggaactttataatgaaacggttcggaatactggctcaagaacctatgtcaagatgagctgaattttggtaaattattttaggaattatgacaagc

SEQ ID NO: 278601 - DNA, 120 bp, Artificial Sequence
  ENSG00000128989_18 (sequence is synthesized)
taattgaattaggcttgtgacaattagagtaatttacatgacaggtaaaactcctattaaaaatgtttagatgtttgcttctgtagatgtcactttagtaaaataccaatttagttttac

SEQ ID NO: 278602 - DNA, 120 bp, Artificial Sequence
  ENSG00000128989_19 (sequence is synthesized)
ttgtggcttatctagttagaacttagcagactttactgggacaagtttactgctcttgtaggagctcctctcacaagtagttgtaatgctgtagcatgatactcaggatcagtagcttga

SEQ ID NO: 278603 - DNA, 120 bp, Artificial Sequence
  ENSG00000128989_20 (sequence is synthesized)
gatgctactatttttctcttcatctttgacttgcagagagcctcccgtttttggatccaggcatcttttctgaatcctggttccatcagtatacctgctctcctatgaccccaaatcata

SEQ ID NO: 278604 - DNA, 120 bp, Artificial Sequence
  ENSG00000128989_21 (sequence is synthesized)
gtcaatggtgcctcaaacatagcaccttaagttaaaggctgcctagtgctctgaggaaagcttgctgattatcttcctgatctactcaccccaaaaggcagaaaagcaacacagtcactg

SEQ ID NO: 278605 - DNA, 120 bp, Artificial Sequence
  ENSG00000128989_22 (sequence is synthesized)
agatcagttatatatatatatttgtaatgagagcaagtatatactcattatagaatcaatttaagaagtttaaaataacccagagtagaatttctatatctagtcttggtttttttcatg

SEQ ID NO: 278606 - DNA, 120 bp, Artificial Sequence
  ENSG00000128989_23 (sequence is synthesized)
aatatttgcaagtaattaccattaaattcacacatgaaagattaatctgaaagatcagagaccatgttattcctgaccacgatagaactgctcctgtggtttgggacaagtaataaaaca

SEQ ID NO: 278607 - DNA, 120 bp, Artificial Sequence
  ENSG00000128989_24 (sequence is synthesized)
actgcttgagttttgtttgtaaaatacataattaatatttgacctacctcaaaatgtattgaggatctgtgaaatgctaagtgcccaaaataaaatattgctgattgtctttttattaaa

SEQ ID NO: 278608 - DNA, 120 bp, Artificial Sequence
  ENSG00000128989_25 (sequence is synthesized)
agtaaatttcctcattaagccaacctgccttctgtaagtcacagtgcttaaatctcaggatttttcattaggagagacctgtcgttaaggatttgtaggtataattgcttagcctccatt

SEQ ID NO: 278609 - DNA, 120 bp, Artificial Sequence
  ENSG00000128989_26 (sequence is synthesized)
attggtgcttgggatagagaggttttagatttttgttttttttttgttctgcctcaaagctcagtttattgaagacatttgtaagctattggatcatcacttgaatcaagattttgacta

SEQ ID NO: 278610 - DNA, 120 bp, Artificial Sequence
  ENSG00000128989_27 (sequence is synthesized)
gtgagcttaattgtccatttcttacaatttcaaagttacagtctcagaaatggttaattttaataactgtcctatcataaattaatgttggaataaattgaagttgttgataaatacttc

SEQ ID NO: 278611 - DNA, 120 bp, Artificial Sequence
  ENSG00000128989_28 (sequence is synthesized)
atgaaaactaaagtctgaaataaattacttgttttatgtccaatagctactacatttgatagaacagttttgaggaacatttcattcttgaacgcagcatctgacatggttctcagcaag

SEQ ID NO: 278612 - DNA, 120 bp, Artificial Sequence
  ENSG00000128989_29 (sequence is synthesized)
ttggaatagtaaggattattggcttgtttcgatgagtggaagcggcatgtttgtagcatacaagttattcaataatcttgtgctgatgacctaaaaatatgtcttaactattcatcaagg

SEQ ID NO: 278613 - DNA, 120 bp, Artificial Sequence
  ENSG00000128989_30 (sequence is synthesized)
aaagcctggtgaagcctttacttgttactacttcaacagttggaattagttgctctttttacttgatgaaacaaaactatacctctgaatatttatggatactttttactaaatcaggct

SEQ ID NO: 278614 - DNA, 120 bp, Artificial Sequence
  ENSG00000128989_31 (sequence is synthesized)
tgtgttcttaatccaaattagtaaagttttatggaagctgaaatgtaatacagtagtctccccttatctgtaagagatacattccaagacccctagtggatgcctgaaacctcagatagt

SEQ ID NO: 278615 - DNA, 120 bp, Artificial Sequence
  ENSG00000128989_32 (sequence is synthesized)
actgaaccctttatcaactatgttttttcagtctgacaaccaaggcggctactaagtgactaaggggcaggtagtatacagtgtggataagcaggacaaaggggtgattcacatcccagg

SEQ ID NO: 278616 - DNA, 89 bp, Artificial Sequence
  ENSG00000128989_33 (sequence is synthesized)
gtgtggataagcaggacaaaggggtgattcacatcccaggcaggacagagcaggagatcatgagatttcatcactcaggatggcttgtg

SEQ ID NO: 278617 - DNA, 120 bp, Artificial Sequence
  ENSG00000128989_34 (sequence is synthesized)
gcttatgatttaaaacatgaattgtttatttctggaattttccacataatatttttggaccaaggttgcctcaggtaacaaactacagaaagtgaaattgcagataaaggggattactgc

SEQ ID NO: 278618 - DNA, 120 bp, Artificial Sequence
  ENSG00000128989_35 (sequence is synthesized)
tcctctgctctaaaattggtgtttgggtgatcagaagcaggtagccaatgggaagagcacttctgagtgataactaaagcagtttggtggccttttcacattctccaatgttcaaacata

SEQ ID NO: 278619 - DNA, 120 bp, Artificial Sequence
  ENSG00000128989_36 (sequence is synthesized)
ttttccactttccattttctctttcacctcattttgcctctctatcccccatccctgcttatttcttaagcccattgatggcactcattaaattgtatttagggctaatgagtcattgtt

SEQ ID NO: 278620 - DNA, 120 bp, Artificial Sequence
  ENSG00000128989_37 (sequence is synthesized)
ccttaatatcgttttcaatatgccacaatttaggacacatttaaaattttctaaaacaatatcctaatcaatattgactaatttgagccacattcccaactctaactcagcacacactgc

SEQ ID NO: 278621 - DNA, 120 bp, Artificial Sequence
  ENSG00000128989_38 (sequence is synthesized)
cagtcttccccaatatctgtctcctctcaattccccaccacaccttataaaattgtaatcaaagatatctcactctgtcattgttaatctaagaataaaaacactgactttaatacggtt

SEQ ID NO: 278622 - DNA, 120 bp, Artificial Sequence
  ENSG00000128989_39 (sequence is synthesized)
ttactaagtttcaaccttctaattaggtaggcctctaggtattctgcagatcactgctggtcttgatagccattaatatatgtttgtattatgttatttttcaactaaatcgcagttgga

SEQ ID NO: 278623 - DNA, 120 bp, Artificial Sequence
  ENSG00000128989_40 (sequence is synthesized)
aaaaaacatatttaatattatgcccttggatctgttactgcatcactagcacttgtgatgcaatagaacacttcgcctgtactgaaagggccaagagtaaatgccttgttttgttttttt

SEQ ID NO: 278624 - DNA, 120 bp, Artificial Sequence
  ENSG00000128989_41 (sequence is synthesized)
gttttgttttgttttgctttttgttaaaacatgtctatagagttggcagttaatgctgaatttgtcaaataccccttccaaaattatacttgtatttaaaaaataaatggatctacctaa

SEQ ID NO: 278625 - DNA, 120 bp, Artificial Sequence
  ENSG00000128989_42 (sequence is synthesized)
agaaactacaattcccaggaagcactcggcagccacaaacggatgtgaggtgaggcaggagcggcgacctttgaaggaaaaaaggaagtgtttggacgacagcgagcgggagaagcgggg

SEQ ID NO: 278626 - DNA, 120 bp, Artificial Sequence
  ENSG00000128989_43 (sequence is synthesized)
tacatttcagctattactgtatgcaggaagaaactgacttgtaatctttgattttttttttttttttgcatttgtaaaggctttgtacttaaggtaggattaaatgtttgcagattgtga

SEQ ID NO: 278627 - DNA, 120 bp, Artificial Sequence
  ENSG00000128989_44 (sequence is synthesized)
aatattaaaaatttattataaaaaaacaaatatcaggatcatctgtattcaagaaaaatgtactgataagtaggctgctgttaatttctagtaaagaatctaacttcaaatcatacataa

SEQ ID NO: 278628 - DNA, 120 bp, Artificial Sequence
  ENSG00000128989_45 (sequence is synthesized)
ttttagataaatagaaaaaattctgtatattttaacagtattaggatgattctctaaatataggcaaagaactgaagagttccatagaaggtgactaactataaatgtattatacatgac

SEQ ID NO: 278629 - DNA, 120 bp, Artificial Sequence
  ENSG00000128989_46 (sequence is synthesized)
tggaaaagtaatggcaagcaagacttcagagctgagctatcttgatatttttatccagtgtgtggggtgttacacatgcatcacagctataatagagctatcacatggatcttttgaaaa

SEQ ID NO: 278630 - DNA, 120 bp, Artificial Sequence
  ENSG00000128989_47 (sequence is synthesized)
acaagatagagatgttttaaaggcttctgggtttgatttcttagtcagatgctgtggtacttggcatttaacaactagaattcagaatccagatttttaaaggtgaattattttaaataa

SEQ ID NO: 278631 - DNA, 120 bp, Artificial Sequence
  ENSG00000128989_48 (sequence is synthesized)
agccacaaacggatgtgaggtgaggcaggagcggcgacctttgaaggaaaaaaggaagtgtttggacgacagcgagcgggagaagcggggtcaagaaatggaagataaagtgactagtcc

SEQ ID NO: 278632 - DNA, 120 bp, Artificial Sequence
  ENSG00000128989_49 (sequence is synthesized)
aagtgtttggacgacagcgagcgggagaagcggggtcaaagggagcactatgtctgcggaagtccccgaggcagcctccgcggaggagcagaagcaaaaatattttgattctggggatta

SEQ ID NO: 278633 - DNA, 120 bp, Artificial Sequence
  ENSG00000128989_50 (sequence is synthesized)
tagagggcaatcttatttccaagtttctgagggacactttgttggaaccaacaaacattgcgagtaactattcagatatcaagtagaatgaggattcagtaagaagccgcaggacttggc

SEQ ID NO: 278634 - DNA, 120 bp, Artificial Sequence
  ENSG00000128989_51 (sequence is synthesized)
gaaggaaaaaaggaagtgtttggacgacagcgagcgggagaagcggggtcaaagtgaacacaacatgctcccttggtctctgcaaccatcgattcctaacagcctagaggaaatggaaga

SEQ ID NO: 278635 - DNA, 120 bp, Artificial Sequence
  ENSG00000128989_52 (sequence is synthesized)
gcctgctcccgccaggcggagggccgcgcccgagatgcggggccgaggcgcatgaggccgaggctcctgcgccccacctttggcttcccgccgtcgctggctggtgcgccgacgaattgg

SEQ ID NO: 278636 - DNA, 120 bp, Artificial Sequence
  ENSG00000128989_53 (sequence is synthesized)
tggcttcccgccgtcgctggctggtgcgccgacgaattgggagttccaacgtgccccgcgtttactccgaatcgtgccttttgtaacacctccgtgggtcgcggtgttcctcagtcactt

SEQ ID NO: 278637 - DNA, 120 bp, Artificial Sequence
  ENSG00000128989_54 (sequence is synthesized)
atatttacgcgagagcccaggacgcaggctttgggcgtagagcctaagtttttctgtaagcctcaatttggttaggaagttttattttttcctttgaagaactctccaactacttgtatt

SEQ ID NO: 278638 - DNA, 120 bp, Artificial Sequence
  ENSG00000128989_55 (sequence is synthesized)
gtgagcgtgcggttcactccaaaagcagtgcctcgtgtgcgggccgcgatgtgggccaggattggcatttcagggccaacccttgtaaccatggtcagtgagtaaagtccggccttcagt

SEQ ID NO: 278639 - DNA, 120 bp, Artificial Sequence
  ENSG00000129003_0 (sequence is synthesized)
ggcctgcgccggaggggctgtcatttgcagcgctggtcgcagccctcagctgcgccgggcggttccggctcctccctctccttgtgcctcagcgccaccatggtgctggagtcggtggtc

SEQ ID NO: 278640 - DNA, 120 bp, Artificial Sequence
  ENSG00000129003_1 (sequence is synthesized)
gcggacttgctgaaccgcttcctgggggactatgtggagaacctgaacaagtcccagctgaagctgggcatctggggcggaaatgtggctttagataatctacagataaaagaaaatgcc

SEQ ID NO: 278641 - DNA, 120 bp, Artificial Sequence
  ENSG00000129003_2 (sequence is synthesized)
ctgagtgaattggatgttccttttaaagtcaaggctggccaaattgataaattaactttgaagattccttggaagaacctttatggagaagcagttgttgcgaccctggaaggattatac

SEQ ID NO: 278642 - DNA, 120 bp, Artificial Sequence
  ENSG00000129003_3 (sequence is synthesized)
ctgcttgttgtccctggagcaagtattaagtatgatgctgtaaaagaagaaaaatccttgcaggatgttaaacagaaagagctatcccgaattgaagaagcccttcaaaaagcagcagaa

SEQ ID NO: 278643 - DNA, 120 bp, Artificial Sequence
  ENSG00000129003_4 (sequence is synthesized)
aaagataagccaaaagaagccaaaaaggatacatttgtggaaaaattggcaactcaagtaataaaaaatgtacaagtaaaaatcacagatattcacattaaatatgaagatgatgtcact

SEQ ID NO: 278644 - DNA, 120 bp, Artificial Sequence
  ENSG00000129003_5 (sequence is synthesized)
gatccaaagcggcctctttcatttggtgtcacactgggagagcttagtctactgactgcaaatgaacactggactccatgcatattaaatgaagcagacaaaattatatacaagcttata

SEQ ID NO: 278645 - DNA, 120 bp, Artificial Sequence
  ENSG00000129003_6 (sequence is synthesized)
cgacttgatagtcttagcgcctactggaatgtaaattgcagcatgtcttaccagagatcaagggaacagattttggatcagctgaaaaatgaaattcttacaagtggaaatataccccca

SEQ ID NO: 278646 - DNA, 120 bp, Artificial Sequence
  ENSG00000129003_7 (sequence is synthesized)
aattatcaatacattttccagccaatatcagcctctgcaaaactctacatgaatccttatgcagaatcagagctcaaaacgcccaaactggattgcaacatagaaatacaaaatattgcc

SEQ ID NO: 278647 - DNA, 120 bp, Artificial Sequence
  ENSG00000129003_8 (sequence is synthesized)
attgaactgaccaaacctcagtacttaagtatgattgaccttttggagtcagtggattatatggttaggaatgcgccttataggaaatacaagccttatttaccacttcataccaatggt

SEQ ID NO: 278648 - DNA, 120 bp, Artificial Sequence
  ENSG00000129003_9 (sequence is synthesized)
cgacgatggtggaaatatgcaattgattctgttcttgaagttcatataagaaggtatacacagatgtggtcatggagtaacataaaaaagcacaggcagttactcaagagttataaaatt

SEQ ID NO: 278649 - DNA, 120 bp, Artificial Sequence
  ENSG00000129003_10 (sequence is synthesized)
gcctacaaaaacaagttaacacagtctaaagtctcagaagaaatacagaaagaaattcaggacttggagaagactctagatgtttttaacataattttagcaaggcaacaagcacaagtt

SEQ ID NO: 278650 - DNA, 120 bp, Artificial Sequence
  ENSG00000129003_11 (sequence is synthesized)
gaggtgattcggtctgggcaaaaattaaggaaaaagtctgctgacacaggcgagaaacgtggaggctggtttagtgggttgtggggtaagaaagagtctaagaaaaaggacgaagaatca

SEQ ID NO: 278651 - DNA, 120 bp, Artificial Sequence
  ENSG00000129003_12 (sequence is synthesized)
ttgattcctgaaactattgatgaccttatgactccagaggaaaaagataaactcttcactgccattggttatagtgagagtacccacaacctaactttacctaagcagtatgttgcccat

SEQ ID NO: 278652 - DNA, 120 bp, Artificial Sequence
  ENSG00000129003_13 (sequence is synthesized)
attatgaccctgaagttagtaagcacctctgttacgataagagaaaacaagaatattccagaaatactaaaaattcagataattggcctgggcactcaagtatctcagcgaccaggagca

SEQ ID NO: 278653 - DNA, 120 bp, Artificial Sequence
  ENSG00000129003_14 (sequence is synthesized)
caagcacttaaggtagaagcgaaattagaacactggtatataacaggtttgagacagcaggatattgtgccatcacttgtggcttcaattggtgacactacatcatccttgcttaaaatt

SEQ ID NO: 278654 - DNA, 120 bp, Artificial Sequence
  ENSG00000129003_15 (sequence is synthesized)
aaatttgaaaccaatccggaggatagtcctgctgaccagactctgattgttcagtcccagcctgtggaggtcatctatgatgctaaaactgtcaatgcagtggttgaattctttcaatca

SEQ ID NO: 278655 - DNA, 120 bp, Artificial Sequence
  ENSG00000129003_16 (sequence is synthesized)
aataagggattggatcttgagcaaataacatcagcaacattgatgaagctggaagaaattaaggagagaacagctacaggacttacacatattattgaaactcgaaaagtccttgattta

SEQ ID NO: 278656 - DNA, 120 bp, Artificial Sequence
  ENSG00000129003_17 (sequence is synthesized)
aggataaatctgaagccttcttatctagtagttccacagacgggtttccaccatgaaaagtcagatcttctgattttagattttggtacatttcagctcaacagtaaagatcaaggttta

SEQ ID NO: 278657 - DNA, 120 bp, Artificial Sequence
  ENSG00000129003_18 (sequence is synthesized)
cagaagactactaattcatctctggaagaaataatggataaggcatatgacaagtttgatgttgaaataaaaaatgtacaactactttttgcaagagcagaggaaacctggaaaaagtgt

SEQ ID NO: 278658 - DNA, 120 bp, Artificial Sequence
  ENSG00000129003_19 (sequence is synthesized)
cgatttcagcatccatcaactatgcatatattgcaacccatggatattcatgttgagttggctaaggccatggtagaaaaagacattagaatggccagatttaaagtgtcaggaggactt

SEQ ID NO: 278659 - DNA, 120 bp, Artificial Sequence
  ENSG00000129003_20 (sequence is synthesized)
cctttgatgcatgtgagaatttctgaccagaagatgaaagatgtgctatatttgatgaacagtatacctttgccacagaaatcatcagcccagtctccagagagacaggtatcctcaatt

SEQ ID NO: 278660 - DNA, 120 bp, Artificial Sequence
  ENSG00000129003_21 (sequence is synthesized)
cctattatttcaggtggtacaaaaggtctacttggtacttcactattgctagacactgtggaatcagagtctgatgatgagtattttgatgctgaagatggagaaccacagacttgtaaa

SEQ ID NO: 278661 - DNA, 120 bp, Artificial Sequence
  ENSG00000129003_22 (sequence is synthesized)
agtatgaaaggatcagaacttaaaaaagctgcagaggtcccaaatgaggagctcatcaatcttctactcaagtttgaaattaaagaagtgattttggaatttactaaacagcagaaagaa

SEQ ID NO: 278662 - DNA, 120 bp, Artificial Sequence
  ENSG00000129003_23 (sequence is synthesized)
gaagatacaattctagtatttaatgttactcagttaggaacagaggccacaatgagaacatttgacttaactgtggtatcttatttaaagaaaatcagcttggattatcatgaaattgaa

SEQ ID NO: 278663 - DNA, 120 bp, Artificial Sequence
  ENSG00000129003_24 (sequence is synthesized)
ggatccaaaaggaagccccttcacttgattagctcttctgacaaacctggattagatcttttgaaagtggagtatattaaggctgataagaatggacctagttttcaaactgcttttgga

SEQ ID NO: 278664 - DNA, 120 bp, Artificial Sequence
  ENSG00000129003_25 (sequence is synthesized)
aaaactgaacaaacagttaaggtggccttttcatctttaaatctgttgctgcaaacacaagctcttgtcgcttctattaattacctcacaaccattattccatctgatgatcaaagcata

SEQ ID NO: 278665 - DNA, 120 bp, Artificial Sequence
  ENSG00000129003_26 (sequence is synthesized)
agtgttgctaaggaggtacaaatttcaactgaaaaacaacaaaaaaattcaactctgccaaaagcgattgtatcctccagagatagtgacattattgatttcaggctatttgccaagttg

SEQ ID NO: 278666 - DNA, 120 bp, Artificial Sequence
  ENSG00000129003_27 (sequence is synthesized)
aatgctttctgtgtcattgtttgcaacgaaaagaacaatatcgccgaaatcaagattcaaggactggattcctccctttctctccagtcaagaaagcagtcactttttgcccgactagaa

SEQ ID NO: 278667 - DNA, 120 bp, Artificial Sequence
  ENSG00000129003_28 (sequence is synthesized)
aatattattgtcacagatgttgatccaaagacagttcataagaaagctgtgtcaataatgggaaatgaagttttccgttttaatttggatttgtatccagatgctactgagggggatttg

SEQ ID NO: 278668 - DNA, 120 bp, Artificial Sequence
  ENSG00000129003_29 (sequence is synthesized)
tatactgacatgtccaaagtggatggtgtgctgtctctgaatgttggctgtattcagattgtctatcttcataaattccttatgtcacttctgaacttcctgaataatttccagacagcc

SEQ ID NO: 278669 - DNA, 120 bp, Artificial Sequence
  ENSG00000129003_30 (sequence is synthesized)
aaagagtctctgagtgctgccactgcccaggctgcagaaagggctgccacaagtgtgaaagatcttgcccagaggagttttcgtgtttccatcaatattgatttgaaagcaccggttata

SEQ ID NO: 278670 - DNA, 120 bp, Artificial Sequence
  ENSG00000129003_31 (sequence is synthesized)
gtcatcccacagtcttctatttccaccaatgcagtagtggtagatcttgggttaatcagagttcataatcagttcagtctggtgtctgatgaagactacttaaatcctccagtaattgat

SEQ ID NO: 278671 - DNA, 120 bp, Artificial Sequence
  ENSG00000129003_32 (sequence is synthesized)
agaatggatgtgcagctaacaaagcttacactttataggacagtgatccagccaggcatctaccatcctgatattcagctgttgcacccaattaacttggaatttcttgtaaatcggaat

SEQ ID NO: 278672 - DNA, 120 bp, Artificial Sequence
  ENSG00000129003_33 (sequence is synthesized)
ctagctgcatcttggtaccacaaggtgcctgttgtggaaattaaaggacatcttgattcaatgaatgttagtctaaatcaagaagatcttaatcttttatttaggatactaacagaaaat

SEQ ID NO: 278673 - DNA, 120 bp, Artificial Sequence
  ENSG00000129003_34 (sequence is synthesized)
ctctgtgagggtactgaagacttggataaagtgaaaccaagagtacaagagacaggtgaaattaaagagccccttgaaatctctatatcacaagatgtacatgattcaaaaaatacttta

SEQ ID NO: 278674 - DNA, 120 bp, Artificial Sequence
  ENSG00000129003_35 (sequence is synthesized)
acaactggagtggaagaaattaggtctgtagacatcattaatatgctgctgaattttgaaattaaagaggttgtggttactttgatgaaaaaatcagaaaagaaaggaaggcctttacat

SEQ ID NO: 278675 - DNA, 120 bp, Artificial Sequence
  ENSG00000129003_36 (sequence is synthesized)
gagctaaatgtcctgcaacttggaatggaagctaaagttaaaacctatgacatgactgctaaagcttatctaaaaaaaattagtatgcagtgctttgatttcactgactctaaaggggaa

SEQ ID NO: 278676 - DNA, 120 bp, Artificial Sequence
  ENSG00000129003_37 (sequence is synthesized)
cctcttcacattattaactcttctaatgtgactgacgaaccccttctgaaaatgttactgacaaaggcagacagtgatggaccagaatttaaaactattcatgacagtaccaaacagaga

SEQ ID NO: 278677 - DNA, 120 bp, Artificial Sequence
  ENSG00000129003_38 (sequence is synthesized)
ctgaaggtttcatttgcatccttagacttagtacttcatttggaagctttactttccttcatggattttttatcatctgctgctccattctctgagccttcctcttctgagaaggaatcc

SEQ ID NO: 278678 - DNA, 120 bp, Artificial Sequence
  ENSG00000129003_39 (sequence is synthesized)
gagctgaaaccacttgtgggggagtccagaagtatcgctgtcaaagctgtatccagcaacatttcccaaaaggatgtgtttgatttaaagatcacagctgaattaaatgcatttaatgtc

SEQ ID NO: 278679 - DNA, 120 bp, Artificial Sequence
  ENSG00000129003_40 (sequence is synthesized)
tttgtctgtgatcagaagtgtaacattgcagatattaaaatacatggaatggatgcctctatttctgtgaagcctaagcagactgatgtgtttgccagacttaaagatattatagttatg

SEQ ID NO: 278680 - DNA, 120 bp, Artificial Sequence
  ENSG00000129003_41 (sequence is synthesized)
aatgtagatttgcagtccattcacaaaaaggctgtctctattttgggagatgaagtctttaggttccaactgactctttatccagatgccacagaaggagaggcctatgctgatatgtcc

SEQ ID NO: 278681 - DNA, 120 bp, Artificial Sequence
  ENSG00000129003_42 (sequence is synthesized)
aaagtagacggcaaacttagttttaaagtgggttgtattcagattgtttatgttcataaattcttcatgtctcttttgaacttcctcaacaatttccaaactgctaaagaagctttgagt

SEQ ID NO: 278682 - DNA, 120 bp, Artificial Sequence
  ENSG00000129003_43 (sequence is synthesized)
acagccacagtccaggctgcagaaagagctgcttccagcatgaaagacttggctcaaaagagtttccgccttttgatggatattaatttgaaagcaccagttattattattcctcagtct

SEQ ID NO: 278683 - DNA, 120 bp, Artificial Sequence
  ENSG00000129003_44 (sequence is synthesized)
tcagtatcacctaatgctgttatagcagatctgggtttaatcagagttgaaaacaagtttagcttggttcctatggaacattattctcttcctccagtcattgataaaatgaacatcgaa

SEQ ID NO: 278684 - DNA, 120 bp, Artificial Sequence
  ENSG00000129003_45 (sequence is synthesized)
ctcactcagttgaagctgtcaagaactattttgcaggctagcttgccacaaaatgacattgaaattttaaaaccagtcaacatgcttttgtccatacagcgaaacttagcagcagcatgg

SEQ ID NO: 278685 - DNA, 120 bp, Artificial Sequence
  ENSG00000129003_46 (sequence is synthesized)
tatgtgcaaattccagggatggagataaaaggaaaactaaaacctatgcaggttgctctcagtgaagatgacttgacagttttaatgaaaattttgctagaaaatcttggagaagcttcc

SEQ ID NO: 278686 - DNA, 120 bp, Artificial Sequence
  ENSG00000129003_47 (sequence is synthesized)
tcacaaccaagccctacacagtctgtgcaggagactgtaagagtgagaaaagttgatgtttcaagtgtacctgaccatctcaaagaacaagaagattggacagactcaaagctctctatg

SEQ ID NO: 278687 - DNA, 120 bp, Artificial Sequence
  ENSG00000129003_48 (sequence is synthesized)
aaccagattgtcagtctccaatttgactttcactttgaatctctttccattatcctttataacaatgatatcaaccaggaatctggagttgcatttcataatgacagtttccaacttggt

SEQ ID NO: 278688 - DNA, 120 bp, Artificial Sequence
  ENSG00000129003_49 (sequence is synthesized)
gaactcagactacatcttatggcctcctcagggaagatgtttaaggatggctcaatgaatgtcagcgttaaacttaagacatgcacccttgatgatctcagagaaggaattgagagagca

SEQ ID NO: 278689 - DNA, 120 bp, Artificial Sequence
  ENSG00000129003_50 (sequence is synthesized)
acatcgagaatgattgacagaaagaatgaccaagataacaacagttctatgattgatataagttacaaacaagacaaaaatggaagtcaaattgatgctgttcttgacaagctgtatgta

SEQ ID NO: 278690 - DNA, 120 bp, Artificial Sequence
  ENSG00000129003_51 (sequence is synthesized)
tgtgccagtgtggaatttctgatgactgtggcagatttctttatcaaagctgtgcctcagagtccagaaaatgtggcaaaagaaacacagattttaccaagacagactgccacagggaag

SEQ ID NO: 278691 - DNA, 120 bp, Artificial Sequence
  ENSG00000129003_52 (sequence is synthesized)
gtcaagatagagaaagatgactctgttagaccaaatatgactttaaaggccatgatcacagatccagaagtggtatttgttgccagcctgacaaaggctgatgctcctgctctgacagcc

SEQ ID NO: 278692 - DNA, 120 bp, Artificial Sequence
  ENSG00000129003_53 (sequence is synthesized)
tcgtttcagtgcaacctttctctgtcaacatccaaactcgaacagatgatggaagcttctgtgagagatctgaaagtgctcgcttgcccttttctcagagaaaagagagggaaaaacatt

SEQ ID NO: 278693 - DNA, 120 bp, Artificial Sequence
  ENSG00000129003_54 (sequence is synthesized)
accacagtcttgcagccctgttctttatttatggaaaaatgtacgtgggcttcaggaaagcaaaatataaatattatggttaaagaatttataattaagatttcacccataattcttaat

SEQ ID NO: 278694 - DNA, 120 bp, Artificial Sequence
  ENSG00000129003_55 (sequence is synthesized)
ttaatgattataacacttggtttcttggtgttgacacggcaacagaaataacggaaagcttcaaaggcattgaacattcactgatagaggaaaattgtggtgttgttgtagaatccattc

SEQ ID NO: 278695 - DNA, 120 bp, Artificial Sequence
  ENSG00000129003_56 (sequence is synthesized)
aagttaccttagaatgtggccttggacatcgaactgtacctttattattggcagagtctaagttttcaggaaatattaaaaattggacttctctaatggctgctgttgctgacgtgacac

SEQ ID NO: 278696 - DNA, 120 bp, Artificial Sequence
  ENSG00000129003_57 (sequence is synthesized)
tacaggtgcactattacaatgagatccatgctgtctgggagccactgattgagagagtggaggggaagagacaatggaatttaaggcttgatgtaaagaagaacccagttcaggataaaa

SEQ ID NO: 278697 - DNA, 120 bp, Artificial Sequence
  ENSG00000129003_58 (sequence is synthesized)
gtttgctgccaggagatgattttattcctgagccacaaatggcaattcatatttcttcaggaaatacaatgaatataacaatatccaaaagttgtcttaatgttttcaacaatttagcaa

SEQ ID NO: 278698 - DNA, 120 bp, Artificial Sequence
  ENSG00000129003_59 (sequence is synthesized)
aaggtttttcagagggcactgcttctacttttgactactctttaaaggacagagctccttttacggtaaaaaatgctgtaggtgttcccattaaggtgaagcccaattgtaatctcagag

SEQ ID NO: 278699 - DNA, 120 bp, Artificial Sequence
  ENSG00000129003_60 (sequence is synthesized)
taatgggcttccctgagaaaagtgatatttttgatgttgatgctggccagaatttggaactggagtatgccagcatggtaccttcaagtcaagggaacctatctatattgagccgtcaag

SEQ ID NO: 278700 - DNA, 120 bp, Artificial Sequence
  ENSG00000129003_61 (sequence is synthesized)
aaagctccttcttcactctgaccattgtacctcatggatatacagaagttgcaaatatccctgtggccagacctggacggcgattgtataatgtacggaatcccaatgccagtcattctg

SEQ ID NO: 278701 - DNA, 120 bp, Artificial Sequence
  ENSG00000129003_62 (sequence is synthesized)
actctgtcttggtacaaattgatgcaactgaagggaataaagtaattacccttcgctctcctctacagatcaaaaaccatttctccattgcatttatcatctataaatttgttaagaatg

SEQ ID NO: 278702 - DNA, 120 bp, Artificial Sequence
  ENSG00000129003_63 (sequence is synthesized)
ttaagctattggagcgcattgggatagccagacctgaagaggagttccatgttcctttagattcatatagatgtcaattgtttatccagccagctggaatcttagagcatcagtacaaag

SEQ ID NO: 278703 - DNA, 120 bp, Artificial Sequence
  ENSG00000129003_64 (sequence is synthesized)
aatctaccacttatatttcctggaaggaagaacttcataggagcagggaagtcagatgcatgttgcagtgtccatcagtagaagtcagcttcttacctctcatagtgaatacagttgctc

SEQ ID NO: 278704 - DNA, 120 bp, Artificial Sequence
  ENSG00000129003_65 (sequence is synthesized)
tgcctgatgaattgagctacatatgtacacatggggaagactgggatgtagcttacattattcatctttatccttctctcactttgcggaatcttctcccatattccctaagatatttac

SEQ ID NO: 278705 - DNA, 120 bp, Artificial Sequence
  ENSG00000129003_66 (sequence is synthesized)
ttgagggaacagcagaaactcatgagctggcagaaggcagtactgctgatgttctgcattcgagaatcagtggtgaaataatggaattagtcctggtgaaataccagggcaaaaactgga

SEQ ID NO: 278706 - DNA, 120 bp, Artificial Sequence
  ENSG00000129003_67 (sequence is synthesized)
atggacatttccgcatacgtgatacactaccagaattctttcctgtgtgtttttcttctgactccacagaagtgacgacagtcgacctgtcagtccacgtcaggagaattggcagccgga

SEQ ID NO: 278707 - DNA, 120 bp, Artificial Sequence
  ENSG00000129003_68 (sequence is synthesized)
tggtgctgtctgtctttagtccctattggttaatcaacaagactacccgggttctccagtatcgttcagaagatattcatgtgaaacatccagctgatttcagggatattattttatttt

SEQ ID NO: 278708 - DNA, 120 bp, Artificial Sequence
  ENSG00000129003_69 (sequence is synthesized)
ctttcaagaagaagaacatttttactaaaaataaggtacaattaaaaatttcaaccagtgcctggtccagtagtttctcattggatacagtgggaagttatgggtgtgtgaagtgtcctg

SEQ ID NO: 278709 - DNA, 120 bp, Artificial Sequence
  ENSG00000129003_70 (sequence is synthesized)
ccaacaatatggagtacctggttggtgttagcatcaaaatgagcagtttcaacctttcacgaatagttaccctgactcccttttgtaccattgcaaacaagtcatcattagaactagaag

SEQ ID NO: 278710 - DNA, 120 bp, Artificial Sequence
  ENSG00000129003_71 (sequence is synthesized)
ttggcgagattgcatctgatggctcaatgccaactaataaatggaactatattgcttcttcagagtgccttccattttggccagaaagtttgtcaggcaaactttgtgtgagagtggtgg

SEQ ID NO: 278711 - DNA, 120 bp, Artificial Sequence
  ENSG00000129003_72 (sequence is synthesized)
gctgtgaaggatcttccaaaccattcttttataaccgacaggataatggcactttattgagcttagaagatctgaatgggggtatcttggtggatgtaaacactgccgaacattcaactg

SEQ ID NO: 278712 - DNA, 120 bp, Artificial Sequence
  ENSG00000129003_73 (sequence is synthesized)
tcataactttttctgattaccatgagggatctgcacctgccttgataatgaaccatacaccatgggacatcctcacatacaaacagagtgggtcaccagaagaaatggtcttgctgccaa

SEQ ID NO: 278713 - DNA, 120 bp, Artificial Sequence
  ENSG00000129003_74 (sequence is synthesized)
gacaggctcgactttttgcctgggcagatcctactggtaccagaaaacttacatggacatatgcagcaaatgttggggaacatgatctgttaaaggatggatgtggacagtttccatatg

SEQ ID NO: 278714 - DNA, 120 bp, Artificial Sequence
  ENSG00000129003_75 (sequence is synthesized)
atgcaaacatccagatacactgggtatcatttctggatgggcgccagagagttttgcttttcaccgatgatgttgccttggtttccaaagcactgcaggcagaagaaatggaacaggctg

SEQ ID NO: 278715 - DNA, 120 bp, Artificial Sequence
  ENSG00000129003_76 (sequence is synthesized)
attatgaaataaccttgtctctccacagtcttgggctttcactggttaacaatgaaagcaagcaggaagtttcctatattgggataaccagttctggtgttgtttgggaggtgaaaccaa

SEQ ID NO: 278716 - DNA, 120 bp, Artificial Sequence
  ENSG00000129003_77 (sequence is synthesized)
agcagaaatggaagccatttagtcaaaagcagataatcttattggaacaatcctatcagaaacatcaaatatcaagagaccatggctggattaagctagataataattttgaggtcaatt

SEQ ID NO: 278717 - DNA, 120 bp, Artificial Sequence
  ENSG00000129003_78 (sequence is synthesized)
ttgataaagatccaatggaaatgcgcctccctattcgtagccctattaaacgagactttttatcaggaattcagattgaatttaagcagtcttctcaccagagaagtttaagggccaggt

SEQ ID NO: 278718 - DNA, 120 bp, Artificial Sequence
  ENSG00000129003_79 (sequence is synthesized)
tgtactggcttcaggttgataatcagttaccaggtgcaatgttccctgttgtatttcatcctgttgcccctccaaaatctattgctttagattcagagcccaagcctttcattgatgtga

SEQ ID NO: 278719 - DNA, 120 bp, Artificial Sequence
  ENSG00000129003_80 (sequence is synthesized)
gtgtcatcacaagatttaatgagtacagtaaagtcttacagttcaagtattttatggtcctcattcaggaaatggccttaaaaattgatcaagggtttctaggagctattattgcactgt

SEQ ID NO: 278720 - DNA, 120 bp, Artificial Sequence
  ENSG00000129003_81 (sequence is synthesized)
ttaccccaacaacagaccctgaagctgaaagaagacggacaaagttaatccaacaagatattgatgctctaaatgcagaattaatggagacttcaatgactgatatgtcaattcttagtt

SEQ ID NO: 278721 - DNA, 120 bp, Artificial Sequence
  ENSG00000129003_82 (sequence is synthesized)
tctttgaacatttccatatttctcctgtgaagttgcatttgagtttgtctttgggttccggaggtgaagaatcagacaaagaaaaacaggaaatgtttgcagttcattctgtcaacttgc

SEQ ID NO: 278722 - DNA, 120 bp, Artificial Sequence
  ENSG00000129003_83 (sequence is synthesized)
tgttgaaaagcataggtgctactctgactgatgtggatgaccttatattcaaacttgcttattatgaaattcgatatcagttctacaagagagatcagcttatatggagtgttgttaggc

SEQ ID NO: 278723 - DNA, 120 bp, Artificial Sequence
  ENSG00000129003_84 (sequence is synthesized)
attacagtgaacagttcttgaaacagatgtatgtccttgtattggggttagatgtacttggaaacccatttggattaattagaggtctgtctgaaggagttgaagctttattctatgaac

SEQ ID NO: 278724 - DNA, 120 bp, Artificial Sequence
  ENSG00000129003_85 (sequence is synthesized)
ccttccagggtgctgttcaaggccctgaagaatttgcagaggggttagtgattggagtgagaagcctctttggacacacagtaggtggtgcagcaggagttgtatctcgaatcaccggtt

SEQ ID NO: 278725 - DNA, 120 bp, Artificial Sequence
  ENSG00000129003_86 (sequence is synthesized)
ctgttgggaaaggtttggcagcaattacaatggacaaggaatatcagcaaaaaagaagagaagagttgagtcgacagcccagagattttggagacagcctggccagaggaggaaagggct

SEQ ID NO: 278726 - DNA, 120 bp, Artificial Sequence
  ENSG00000129003_87 (sequence is synthesized)
ttctgcgaggagttgttggtggagtgactggaataataacaaaacctgtggaaggtgccaaaaaggaaggagctgctggattctttaaaggaattggaaaagggcttgtgggtgctgtgg

SEQ ID NO: 278727 - DNA, 120 bp, Artificial Sequence
  ENSG00000129003_88 (sequence is synthesized)
cccgtccaactggtggaatcgtagatatggccagtagtaccttccaaggcattcagagggcagcagaatcaactgaggaagtatctagcctccgtccccctcgcctgatccatgaagatg

SEQ ID NO: 278728 - DNA, 120 bp, Artificial Sequence
  ENSG00000129003_89 (sequence is synthesized)
gcatcattcgtccttatgacagacaggaatctgagggctctgacttacttgagaatcatatcaaaaagttggaaggagagacttaccgataccactgtgctattcctggaagcaagaaga

SEQ ID NO: 278729 - DNA, 120 bp, Artificial Sequence
  ENSG00000129003_90 (sequence is synthesized)
caatccttatggttacaaataggcgagtgttgtgtataaaggaagttgaaatcctgggccttatgtgtgtagactggcaatgtccatttgaagattttgtatttcctcctagtgtcagtg

SEQ ID NO: 278730 - DNA, 120 bp, Artificial Sequence
  ENSG00000129003_91 (sequence is synthesized)
aaaatgtgctaaaaatttcagttaaggaacagggtctgttccacaaaaaagacagtgccaatcaaggctgtgttcgaaaagtttacctgaaggacaccgccacagcagagagagcatgta

SEQ ID NO: 278731 - DNA, 120 bp, Artificial Sequence
  ENSG00000129003_92 (sequence is synthesized)
atgccattgaggatgcacagtcaacgagacagcagcaaaaattgatgaagcagtcatcagtgagacttctcagaccccaattgccatcttaatcacagacctcaggggctccaacaggga

SEQ ID NO: 278732 - DNA, 120 bp, Artificial Sequence
  ENSG00000129003_93 (sequence is synthesized)
gaaaaaacaatcactggtcttgtctataagtcactctgctttatcttgctaaagacaatttttcaagcaatcctttagttttagttttctggaatagctagtattgggttttctagtttt

SEQ ID NO: 278733 - DNA, 120 bp, Artificial Sequence
  ENSG00000129003_94 (sequence is synthesized)
ttcaccttttagtttttactctaattttgtaaccatgtatatgctagcagtccacttctacgccaccacccaaatgggtcagacccttgaagaaacgtcacttcaaactcagaatgaaat

SEQ ID NO: 278734 - DNA, 120 bp, Artificial Sequence
  ENSG00000129003_95 (sequence is synthesized)
tttcattaatattaaaattgtgaagcaaaggtcaataggcttatatttaattaaagccttactgaagaataagaaatgagcttagaatgactagtgttctttgaaaggtttttttatttt

SEQ ID NO: 278735 - DNA, 69 bp, Artificial Sequence
  ENSG00000129003_96 (sequence is synthesized)
gtgccaccacgcctgggtcagtctagtctcgaactcctgaccttgtgatccgcatgcctcagcctccca

SEQ ID NO: 278736 - DNA, 89 bp, Artificial Sequence
  ENSG00000129003_97 (sequence is synthesized)
cgccaaaaggctttaacccatgaacaaatgttggatcctgacattttgtttaagagtgatttgttcaataattgaactgagttaacatt

SEQ ID NO: 278737 - DNA, 120 bp, Artificial Sequence
  ENSG00000129003_98 (sequence is synthesized)
ttaagagtgatttgttcaataattgaactgagttaacattcttggtaaaccaggtaattgaatgaagaaaggtcactaaagggagaaatgacatgttttctattttcttttcatgaaaac

SEQ ID NO: 278738 - DNA, 120 bp, Artificial Sequence
  ENSG00000129003_99 (sequence is synthesized)
actgtttttccccctaataaagcatattttactttggtgcttatttttcctccttgcagtctaataaaaaaatctggacaatcaaaccttaaaatagctacactctgccctctgtaatgt

SEQ ID NO: 278739 - DNA, 120 bp, Artificial Sequence
  ENSG00000129003_100 (sequence is synthesized)
agcattcataaaaatttggaagtatttacatcctctttcaagatgagcttatatgacacaattattatttgctgatacatgaaaatactgcactttaagtttctcaagactctgaaatat

SEQ ID NO: 278740 - DNA, 120 bp, Artificial Sequence
  ENSG00000129003_101 (sequence is synthesized)
gtaaaattcaatatttttatattcccagaaattgtttcttacaggttgaaagtcttttaagggcatcacaaattaacatttactcctaatgcacgcctagaatgtattttaaatacttac

SEQ ID NO: 278741 - DNA, 120 bp, Artificial Sequence
  ENSG00000129003_102 (sequence is synthesized)
taagaagaatgaaaattctttggttgttttatatataaataaggcatatataatgacactgtgttctgtgagggagcaggccctgtgagaatcaattcaggacagtatttttttttgtcc

SEQ ID NO: 278742 - DNA, 120 bp, Artificial Sequence
  ENSG00000129003_103 (sequence is synthesized)
tttctccatccttgatcagagataaactattaaaactttaaaaaatactcaaaaatatgtaagttttttggttgaacctttagatttgctcataatgtttaacataacaacatttatttc

SEQ ID NO: 278743 - DNA, 120 bp, Artificial Sequence
  ENSG00000129003_104 (sequence is synthesized)
aaatcactgaattcatggagatgtggacacgcttggtttgctctatttttgtttatgtgtgatagtggttctgtcatcatcattcatgttttttaaggcctggtcataaaactttaaatt

SEQ ID NO: 278744 - DNA, 120 bp, Artificial Sequence
  ENSG00000129003_105 (sequence is synthesized)
ttactagtgttacttaatgtatattctaaaaagagaatgcagtaactaatgccctaaatgtttgatctctgtttgtcattactttttcaaaattatttttttctgtaaagtataatatat

SEQ ID NO: 278745 - DNA, 120 bp, Artificial Sequence
  ENSG00000129003_106 (sequence is synthesized)
aaaacttcttgcttaaattgaatttctatattagtggttaattgcagtttattaaagggatcattatcagtaatttcatagcaactgttctagtgttttgtgtttttaaaacagaattag

SEQ ID NO: 278746 - DNA, 120 bp, Artificial Sequence
  ENSG00000129003_107 (sequence is synthesized)
gaatttgagatatctgattatatttttcatatgaatcacagctgttgacaatgtcccatatatttaagaaattatatcatactgatactatttgtaacattttgatttgatttaatctcc

SEQ ID NO: 278747 - DNA, 120 bp, Artificial Sequence
  ENSG00000129003_108 (sequence is synthesized)
agggacagaaataattcattggtaaagtgtaataatgcgttttttaaaaatgctttgagaggtaattacttgcatatgagagaaataaaacatttggcacattgtttacaggtgtgaaaa

SEQ ID NO: 278748 - DNA, 120 bp, Artificial Sequence
  ENSG00000129003_109 (sequence is synthesized)
gacagacaggaatctgagggctctgacttacttgagcaagaactggaaatacaggaataaatgtttcctaaactactacttgatttcatccttaaaaatcaaaacaaactgtggtgttaa

SEQ ID NO: 278749 - DNA, 120 bp, Artificial Sequence
  ENSG00000129003_110 (sequence is synthesized)
ttgactgtgtgtgaattccattgtcaattttaatgaaattttctttaaaactctcacctccatctgaacttttcatagtagtgggattgactacaaataaaaacttgtggtattcctggt

SEQ ID NO: 278750 - DNA, 120 bp, Artificial Sequence
  ENSG00000129003_111 (sequence is synthesized)
gaaagcctttattgagctcagaagcagatactgttactatcatttcgaaaattttatcttatggtgttcatgtgcatttcaggtaaaattgaaaaacaggacaattattatgtccaatta

SEQ ID NO: 278751 - DNA, 120 bp, Artificial Sequence
  ENSG00000129003_112 (sequence is synthesized)
atatgtttatgtttgtgagtcttgatgatggaattacatagctttctgtttcacaaatggctctaaatttgcttaagttacgggactattacctggagcatctgctttaataattgaatt

SEQ ID NO: 278752 - DNA, 120 bp, Artificial Sequence
  ENSG00000129003_113 (sequence is synthesized)
gtcagttgctctgagcctgcccttagacctcaagtaataaatagttggcacatgaattttgaggatatgtttcctcttccctctttttcctatttaaccccttggtactgttgctaaata

SEQ ID NO: 278753 - DNA, 120 bp, Artificial Sequence
  ENSG00000129003_114 (sequence is synthesized)
aatgatagccattttataattatgttatatacattttcagcctttagcatttctgcttttcaaaaattgaatctccttgttggttatgcttatttcataattattagttttaattaatgt

SEQ ID NO: 278754 - DNA, 120 bp, Artificial Sequence
  ENSG00000129003_115 (sequence is synthesized)
agatagaagttgaacatgtaattaggcaaattgctgtgtggcacttgaatacatagatttctttattttcaaaaaccaaccttttgcttttaaatccttagagagggtttattatcttag

SEQ ID NO: 278755 - DNA, 120 bp, Artificial Sequence
  ENSG00000129003_116 (sequence is synthesized)
taattataatcattatttttgaaattagtatcctcttaattctcaacataagttatgtttcaatttcttttttttgtaataaatgatggaaatgtttaacaatgtcttatctagcaactt

SEQ ID NO: 278756 - DNA, 120 bp, Artificial Sequence
  ENSG00000129003_117 (sequence is synthesized)
agcaactttcatgcttctcctcagaaatgaagccaaagtataaacttagatttaatgtgttgtatatttgaagagaatgaaactattaacatataattgttcagttggattatgtatttt

SEQ ID NO: 278757 - DNA, 120 bp, Artificial Sequence
  ENSG00000129003_118 (sequence is synthesized)
aaggattgcagttatcaaaataataaattgaatgttttatgtttaaccactttaaagaagaaagactgacatccaaaaaccagcgtgtgctagatatacaaaggaaattacttctgtcct

SEQ ID NO: 278758 - DNA, 120 bp, Artificial Sequence
  ENSG00000129003_119 (sequence is synthesized)
taagggaccaagtataacaaaacatgtaactgttaaaagtagctgacaaacctttcttgtgcctagataatttagcattggcaaaaatgtcaccacatgcagttttctaggagagtcaag

SEQ ID NO: 278759 - DNA, 120 bp, Artificial Sequence
  ENSG00000129003_120 (sequence is synthesized)
cacaaataactaattcaagatgctgacttaaatcatctccaatagttacccttcctgagattctaaagtaacaatttttaattttactggttatattgctgttttactgagacttacttt

SEQ ID NO: 278760 - DNA, 120 bp, Artificial Sequence
  ENSG00000129003_121 (sequence is synthesized)
taagaacccctgtaacttaagattttttcttaattgttttgtttagctctgttattaattttttccttgtgatatctttttataactctctgtcaaaaagcacaaaacttcaagaaactt

SEQ ID NO: 278761 - DNA, 120 bp, Artificial Sequence
  ENSG00000129003_122 (sequence is synthesized)
acttttaattattttgtctgaacatataatcttgtctgatttcttagtttttattaagatatcagacaacttttaaaactttagtgcattattataattactggaagaaaaagaatgatt

SEQ ID NO: 278762 - DNA, 120 bp, Artificial Sequence
  ENSG00000129003_123 (sequence is synthesized)
actaatgagaggacttggtagtttttgtcgtggatgtcaagtgtgggcatggataattgaaatatttaggctatttcattctttgcccatcttgctgtgatcagttagttgggtaaaaat

SEQ ID NO: 278763 - DNA, 120 bp, Artificial Sequence
  ENSG00000129003_124 (sequence is synthesized)
atttattgattatttagactgtactggatatacaaaagaagccttctgtccttaagggaccgagtaaaacaaaacatggaaatattaaagagtattagagtataaaagtatatcttttta

SEQ ID NO: 278764 - DNA, 120 bp, Artificial Sequence
  ENSG00000129003_125 (sequence is synthesized)
gccctttgtaatatggccaaattctaaataatttatttggggatcttttgatcctcatgttcctttttctcctaagtactactttgtattctttaatatgcagctttgagagttactgaa

SEQ ID NO: 278765 - DNA, 120 bp, Artificial Sequence
  ENSG00000129003_126 (sequence is synthesized)
actttgtattctttaatatgcagctttgagagttactgaatcatatattatatttccatgagatgtactattctacttatcctctaatcttcatatatatatacacacacacatatatat

SEQ ID NO: 278766 - DNA, 120 bp, Artificial Sequence
  ENSG00000129003_127 (sequence is synthesized)
atacacacaaacacatatatacacacatacatatacacacatatatatacacatacaaatatacacatatatacacatacatatatatacacacatacaaatatacccatatgtacacat

SEQ ID NO: 278767 - DNA, 120 bp, Artificial Sequence
  ENSG00000129003_128 (sequence is synthesized)
acccatatgtacacatacatatatacacatacatatatacacacacatatacacacatatatacgcaaacatacacatatttacacatacatatatacatacattatatgtatgtatata

SEQ ID NO: 278768 - DNA, 120 bp, Artificial Sequence
  ENSG00000129003_129 (sequence is synthesized)
taatactcattttggttcacatacttatgatcatgcaacgtttaaaacagcatttcttgctttttagttttagttatatttttccatgttcttagaaatgcctcattaacatttttaatt

SEQ ID NO: 278769 - DNA, 120 bp, Artificial Sequence
  ENSG00000129003_130 (sequence is synthesized)
cttgtattgccatctattgaggtgacattacattgtgtttttatctcgtcttaattcatgacattaaattattctactaacagtaataatgctgtaataaacatcattatagattttgct

SEQ ID NO: 278770 - DNA, 120 bp, Artificial Sequence
  ENSG00000129003_131 (sequence is synthesized)
tttttatatcttgtttgctttttcatatttccttagaatttacttgaaaaaattgaattactgggtaaagggcttttgcaaagtattgttaaattcctcgagttgcatttttggaaaggg

SEQ ID NO: 278771 - DNA, 120 bp, Artificial Sequence
  ENSG00000129003_132 (sequence is synthesized)
gacgtgaatattttatcaactaatttggtctccctgctgccattagtgactgaatatcttaatctgaatctcagagtgtagtgggtttttagtagtgctgaagacaagttttctaaagtg

SEQ ID NO: 278772 - DNA, 120 bp, Artificial Sequence
  ENSG00000129003_133 (sequence is synthesized)
tattatggtgataaattatattttaaaaactgtcaatggcttgaagcacaatagcctaataactaacgaaaatacatacaagatagaaagtgggtagtatttcttgtacttgcatttcag

SEQ ID NO: 278773 - DNA, 120 bp, Artificial Sequence
  ENSG00000129003_134 (sequence is synthesized)
atctaaatattttaacatatttaaatttcaagctgcagataaatgcattacattattaaattcatttcccattttctctttgaagaaattaaggcaaaagtgttaaaagattttaactaa

SEQ ID NO: 278774 - DNA, 120 bp, Artificial Sequence
  ENSG00000129003_135 (sequence is synthesized)
ttcgcacaagtgaattgtgaaacaagtagctattgctgtgaaatctgcactcctctctgagactcattctgaagatgagatcccagttctttgtggattcctcttccttattcatggctt

SEQ ID NO: 278775 - DNA, 120 bp, Artificial Sequence
  ENSG00000129003_136 (sequence is synthesized)
tttgcaattgtcaaggaatgactaggtaccaagcaactttaaaaaatgtatatttaagcattgaaataatatcaaatgtgatttctctgcttgtggttatattgattatattatcctttt

SEQ ID NO: 278776 - DNA, 120 bp, Artificial Sequence
  ENSG00000129003_137 (sequence is synthesized)
aataatattggcattatattcttggtcgtaaaatgtcaaggtcttatttattcagtatatttatgttctgtattttcatatatattatctattttcagccatgcattatatataatgtca

SEQ ID NO: 278777 - DNA, 120 bp, Artificial Sequence
  ENSG00000129003_138 (sequence is synthesized)
gtaatagtatttcattagcattcattataaaaaaactcgtttttaatatttgactaattcaagtcacagtacttttgagatagctgaaaaggaaaataaatgtgttttaatgtgctacta

SEQ ID NO: 278778 - DNA, 120 bp, Artificial Sequence
  ENSG00000129003_139 (sequence is synthesized)
catctatgatgctgtaagtgcaaggagaaagtaactctttatttaaatcatcttatgcttctgacatactgttttcttatttctcctctttcatatttaacatttatttacttaataagt

SEQ ID NO: 278779 - DNA, 76 bp, Artificial Sequence
  ENSG00000129003_140 (sequence is synthesized)
tttattgctccccagatgagagtacagcctgtttcttatgtgttccaaagatgatttccctatcagctttttggtc

SEQ ID NO: 278780 - DNA, 120 bp, Artificial Sequence
  ENSG00000129003_141 (sequence is synthesized)
aaaaaaagttacacttttctgaattctgcaagattgacagaaggggaatttttgagtctactttgttgcttggtaggtgtcatatttgctctttatttgacagttatctagacttaaaaa

SEQ ID NO: 278781 - DNA, 120 bp, Artificial Sequence
  ENSG00000129003_142 (sequence is synthesized)
aaatgaagcaggttttttttttagtgccagtttatattgtttactaagcaagtgctacctctgccatccagtagggtgaaatattggcaagaataaactgtcttcatcatttactgtaag

SEQ ID NO: 278782 - DNA, 120 bp, Artificial Sequence
  ENSG00000129003_143 (sequence is synthesized)
gggctctgacttacttgaggtaaattttgttcttcatggtcacgagtgaaatggaattttaatgatttctaggcccaggatttcctaggtggttcttaaagttcctgattcttgaactgc

SEQ ID NO: 278783 - DNA, 120 bp, Artificial Sequence
  ENSG00000129003_144 (sequence is synthesized)
tttaagtattatacatagtttctagagtagaatttgattgtttttcattttagcatgtgttaaatggaaattacagatgattttttttctacatgggagcaaagcttttttttgtgtgca

SEQ ID NO: 278784 - DNA, 120 bp, Artificial Sequence
  ENSG00000129003_145 (sequence is synthesized)
gaaaagataatgttaagtcataggctatatcactatttctgtgatagctcatttagttaacattgttaattttgttttcctgctttgtagctgattattggaacttcattgcttccattt

SEQ ID NO: 278785 - DNA, 120 bp, Artificial Sequence
  ENSG00000129003_146 (sequence is synthesized)
ctcccaaccaaattaatttatttgcactactttgtaaatctagatttattccagtaactagaactagatgagagaataaaagattatgtataattatgatcttgttaaaccttaaaaaaa

SEQ ID NO: 278786 - DNA, 120 bp, Artificial Sequence
  ENSG00000129003_147 (sequence is synthesized)
atttaagagctttttggcttttattttagttttaacttgattatattttgataatatatacatatataaattgctattctcccatgacaggctttcccccaaaagaaatgtattaatatt

SEQ ID NO: 278787 - DNA, 120 bp, Artificial Sequence
  ENSG00000129003_148 (sequence is synthesized)
tttctaccttgactttaaaataaaatgcctcttaattgttcttcctttggtttttattgtatatgattacgttttatctatctttctgcatgcttctaactttattttctttgtttttct

SEQ ID NO: 278788 - DNA, 120 bp, Artificial Sequence
  ENSG00000129003_149 (sequence is synthesized)
tgctatatgagttacctgacagtgaaggaagtagagaagctatcttcactgactccttgtcctaattgaactaaaagtgaattggaagtatttccagaaaaagtagcttttggactttag

SEQ ID NO: 278789 - DNA, 120 bp, Artificial Sequence
  ENSG00000129003_150 (sequence is synthesized)
atggcaaatactgtagttcaaaccagtatattaccttagctctatcaaagtaatttatttacaatttaaaaaatagacctgctttatcttgcctatgtaaagcacctttttaattaattt

SEQ ID NO: 278790 - DNA, 120 bp, Artificial Sequence
  ENSG00000129003_151 (sequence is synthesized)
acctattttaaaaggaaggaattgtaagactaagttaaaaacaactttattttgaacatacctatgccacttttggctatgagtttttaaagcttgttttcctaagcacagctatgtatt

SEQ ID NO: 278791 - DNA, 120 bp, Artificial Sequence
  ENSG00000129003_152 (sequence is synthesized)
ttgttaattaatgaagtctgatagtatgcaaattatcgcatgtaagaaatttagtgaaatatttatcgaaacaatatttaggtagctgagttgattaaatatgttattttttagactctt

SEQ ID NO: 278792 - DNA, 120 bp, Artificial Sequence
  ENSG00000129003_153 (sequence is synthesized)
agcctctgaaagggcccaaagaattcatataccatcctcccatctgatataggaattgctcctgcattagtaatatatcatccagtttctgtatgaataaaatccatgatgaaagagttt

SEQ ID NO: 278793 - DNA, 120 bp, Artificial Sequence
  ENSG00000129003_154 (sequence is synthesized)
ttttagaaataaattgtgccagctattttgaaatcttagaaattgttcatattaatattgtcatattttcttttctataagaaatataatttgatatataaatatacttccccacgcatg

SEQ ID NO: 278794 - DNA, 120 bp, Artificial Sequence
  ENSG00000129003_155 (sequence is synthesized)
cacgcatgtttaacgtataagatcaaatgttcaaagcattaaacattaattatcttggaattttattatgtgtataatatctactaatacctctatgtaaaccagtggttcttaatcttt

SEQ ID NO: 278795 - DNA, 120 bp, Artificial Sequence
  ENSG00000129003_156 (sequence is synthesized)
gagatcacagacccccctctgtgattaaaaaaaaactgacaaaaaatattaactgccctgaaaaaagttttagaactacgttttcaaaattttctattttatgttaggtggttcagagac

SEQ ID NO: 278796 - DNA, 120 bp, Artificial Sequence
  ENSG00000129003_157 (sequence is synthesized)
ccaccgcaaagtgctaccagtgacccctatttcaaatcccctgtaatgttaatgtagttattttatattagcatatgtttcttaattaaagtgtgtgataattgctggtagatattttaa

SEQ ID NO: 278797 - DNA, 120 bp, Artificial Sequence
  ENSG00000129003_158 (sequence is synthesized)
tatttctaagttactacagaacaaaatgtattttaccagaagaccacttggtaagcatttattacatgtttttcttttaaggcaacagtggaagttaacttacaaacatgctgtgaatat

SEQ ID NO: 278798 - DNA, 120 bp, Artificial Sequence
  ENSG00000129003_159 (sequence is synthesized)
ttttctagcttcatgtaccaatatgtagaattgtgcttttatttctaattaattttttcctaacactattattataattagctaatatgcagtattgtaaatactacttaaatgcataac

SEQ ID NO: 278799 - DNA, 120 bp, Artificial Sequence
  ENSG00000129007_0 (sequence is synthesized)
agggctcccgggaagaaacactggcatttgtccctttgcttcggcttctggaggcagagactctgagcccagggagagccttctgcagccccatttcctcaaaaatccaacctgcccagg

SEQ ID NO: 278800 - DNA, 120 bp, Artificial Sequence
  ENSG00000129007_1 (sequence is synthesized)
tggcgggtcatgagctgtgctcaggaagctggaatctgaccctggtggcgtcgggcccagtctccatggcagccgagcatttattacccgggcctccacccagcttggcagactttagac

SEQ ID NO: 278801 - DNA, 120 bp, Artificial Sequence
  ENSG00000129007_2 (sequence is synthesized)
ttgaggctggaggaaagggaactgaacgcggttctgggagcagcaagcccacgggtagcagccgaggccccagaatggccaagtttctttcccaagaccaaattaatgagtacaaggaat

SEQ ID NO: 278802 - DNA, 120 bp, Artificial Sequence
  ENSG00000129007_3 (sequence is synthesized)
gcttctccctgtatgacaagcagcagagggggaagataaaagccaccgacctcatggtggccatgaggtgcctgggggccagcccgacgccaggggaggtgcagcggcacctgcagaccc

SEQ ID NO: 278803 - DNA, 120 bp, Artificial Sequence
  ENSG00000129007_4 (sequence is synthesized)
atttctccacttttctgaccattatgcacatgcaaataaaacaagaagacccaaagaaagaaattcttctagccatgttgatggtggacaaggagaagaaaggttacgtcatggcgtccg

SEQ ID NO: 278804 - DNA, 120 bp, Artificial Sequence
  ENSG00000129007_5 (sequence is synthesized)
acctgcggtcaaaactcacgagtctgggggagaagctcacccacaaggaagtggatgatctcttcagggaagcagatatcgaacccaatggcaaagtgaagtatgatgaatttatccaca

SEQ ID NO: 278805 - DNA, 120 bp, Artificial Sequence
  ENSG00000129007_6 (sequence is synthesized)
agatcacccttcctggacgggactattgaaggaggagaatgggagagcctcccctgggcctgaaaacttggagcaattaattttttttaaaaagtgttcttttcacttgggagagatggc

SEQ ID NO: 278806 - DNA, 120 bp, Artificial Sequence
  ENSG00000129007_7 (sequence is synthesized)
aaacacagtggcaagacaacattacccaactatagaagagaggctaactagcaacaataatagatgatttcagccatggtatgagtagatctttaataaaagatttgtattgattttatt

SEQ ID NO: 278807 - DNA, 120 bp, Artificial Sequence
  ENSG00000129007_8 (sequence is synthesized)
acatcctggcattccctggtcagttgaccttgaaccggctgtgcaggtccagcaggaggccagctggcttcctaggagtctttttccctctgctcactctgctgtgtttgcgggtttcct

SEQ ID NO: 278808 - DNA, 120 bp, Artificial Sequence
  ENSG00000129007_9 (sequence is synthesized)
gaatttcagacaaacaacaaatacttttccaatagaagtatatgtcctatgcaaaatttggggcatacaataaaagtatattcagtgtttatctgaattcggtttaacttggcagtcctg

SEQ ID NO: 278809 - DNA, 120 bp, Artificial Sequence
  ENSG00000129007_10 (sequence is synthesized)
tattttcatttgctgtatctagcacccttgggaggggagagagggatggagggagtaggcaaaaggaaggggaaaagagggagaagagactaaggatggggagggcggcatgggcggaga

SEQ ID NO: 278810 - DNA, 120 bp, Artificial Sequence
  ENSG00000129007_11 (sequence is synthesized)
agaaaaggggagccttcctggccagggtaaccggcactaagaggcctcactccaagcccccgaggagcctgtggtggggctggagacccggctcaggcccctccaccacccttaaagtcc

SEQ ID NO: 278811 - DNA, 120 bp, Artificial Sequence
  ENSG00000129007_12 (sequence is synthesized)
tcagaaggtgggaactgaactggcacaggatgggaaccggctgtgcgctggccacttgattttgccagctgccctgtaattcagctggtgaggaaactgaggcacagactgaggtagaat

SEQ ID NO: 278812 - DNA, 120 bp, Artificial Sequence
  ENSG00000129007_13 (sequence is synthesized)
gattcgccagtcactcagcaagtcagcagacggggaggactgaatcccagcctgagagcaccgaagcttgtatccctgcaataccgagccccaagcctgcgagccccggtgcccatctct

SEQ ID NO: 278813 - DNA, 120 bp, Artificial Sequence
  ENSG00000129007_14 (sequence is synthesized)
gagttaggccgtcttggaagggttcccttcctcctacaagatggtgtgtgaggagccttcaatacgacccggggtgtaaagtgtccaactctagtaggggcctgatggcatccccgccga

SEQ ID NO: 278814 - DNA, 120 bp, Artificial Sequence
  ENSG00000129007_15 (sequence is synthesized)
gcctgggttccagtcctggctctgctgcttcccactgtgactttgggcaaatcatttcactcctcaaagcccccccacacaagctggattcccacttcttacctcatggagcctgttgag

SEQ ID NO: 278815 - DNA, 120 bp, Artificial Sequence
  ENSG00000129007_16 (sequence is synthesized)
gaaggattgagctgatgacttaagggcaatctaccaagagacttattctgtatttgggggctagaaccatcttccatatttccaagattttccaagatgaagccagtgctagctgagaag

SEQ ID NO: 278816 - DNA, 120 bp, Artificial Sequence
  ENSG00000129007_17 (sequence is synthesized)
cagcaatgaacagaaagctgtaacacttatgacaacaattcttgcagtgccagaggcccatttacaaattctcatttccatctcaacagatatagtgacatagctcaggctattcattca

SEQ ID NO: 278817 - DNA, 120 bp, Artificial Sequence
  ENSG00000129007_18 (sequence is synthesized)
taaacacagagtgtagagtgaaaacactagagtgaaaacacatgctacaatgaggcagcatcagctgagagcaggaagagcgatctactttacaccccacaccaaaggaaaccagatgtg

SEQ ID NO: 278818 - DNA, 120 bp, Artificial Sequence
  ENSG00000129007_19 (sequence is synthesized)
agctgctaaattgactggccttgcagagctcaagaagggggcttccaatgctgtgagaattccgagctgttccctgggctctgttaacaggcagagaggttccgggatggtctgctcaag

SEQ ID NO: 278819 - DNA, 120 bp, Artificial Sequence
  ENSG00000129007_20 (sequence is synthesized)
tggcccacactggtcattgccttaagccacctccccaggacttacggagagaaataaggggatgtaaccagcaatggccagggtacaacagccctggaaaacagtagtaggagcactagg

SEQ ID NO: 278820 - DNA, 120 bp, Artificial Sequence
  ENSG00000129007_21 (sequence is synthesized)
ctttctgggagtccatccagctggagtggctttgagtgagttacacagctagaaggtgccaggttggtgctgccagagattcagaggtgccatacacttgtcaaatctggatcattcgta

SEQ ID NO: 278821 - DNA, 120 bp, Artificial Sequence
  ENSG00000129007_22 (sequence is synthesized)
ttgcatccatgtatgtatcaaaagtgggttctctgggctgtggctttgtctagtagtaccacagtggctaaagtagaagaaaaccaaatcaaatgggatgtgtcttttgggaggatgtac

SEQ ID NO: 278822 - DNA, 120 bp, Artificial Sequence
  ENSG00000129007_23 (sequence is synthesized)
aagacacaaatctttcactaggcaccgggcacagggaaaactgcagggaacaagagttgtagtgttagtgcaactgtctcaacgatgctgtgtggcttcagacccaaacaaggccctgag

SEQ ID NO: 278823 - DNA, 120 bp, Artificial Sequence
  ENSG00000129007_24 (sequence is synthesized)
gaaggagactctcatttccccaagcataactgcaaggagaggaggaattcctaggagccaaagagttttgtggggtgagggtaaataaatggcccaaatgccaactaggtgaagttgtga

SEQ ID NO: 278824 - DNA, 120 bp, Artificial Sequence
  ENSG00000129007_25 (sequence is synthesized)
ccatctggctgggaagcccaggtccacacagtgtaggagcagatgttttgtggggtctgaggtttacgagatttggctgccttaagaatacaaaaacagaaatgcagaatttctggggct

SEQ ID NO: 278825 - DNA, 120 bp, Artificial Sequence
  ENSG00000129007_26 (sequence is synthesized)
gctcctaggaccagaacaagtgaagggtcctggtgcttaaacttcattaccttcatggtaaatccaccagagggccggttagatgctggccccgccgagagaactgctgtcactttcagg

SEQ ID NO: 278826 - DNA, 120 bp, Artificial Sequence
  ENSG00000129007_27 (sequence is synthesized)
caaagctcaaaggtcctaggcccacagttcttttgagctccagtcatggacattaggaagtaaatcctgcacagccaacctggaataccaaagattagatgggagatagataccaatgat

SEQ ID NO: 278827 - DNA, 120 bp, Artificial Sequence
  ENSG00000129007_28 (sequence is synthesized)
ttagatggcacaggaagagcaagttctggatataataaatgagggtactttccgtcaaagcttttctatgtctatatttatcactgaatagtcccagtatggttttaaagcaagttttat

SEQ ID NO: 278828 - DNA, 120 bp, Artificial Sequence
  ENSG00000129007_29 (sequence is synthesized)
gaatctcatttgcctaacaggaatctgaaatataacttgccaaaaacacacagttggtgtggaatggtcattagaacctggggctcctcttcacggactccctgctcattaagggattca

SEQ ID NO: 278829 - DNA, 120 bp, Artificial Sequence
  ENSG00000129007_30 (sequence is synthesized)
gtggtccagagtctaagatcctattaagtgtttgattcaaacctctacccgaggaagggctgttaccttactcctggtcctggtttcaagctcattcctgaaattccagctggtttctct

SEQ ID NO: 278830 - DNA, 120 bp, Artificial Sequence
  ENSG00000129007_31 (sequence is synthesized)
agcacctagtgttgtttacaagaaggccacggtgctcttagcattcaaactgcagatactaaacagatgctgtgatttattaaagagttagccatatttcaacaagaaagggaaatgatg

SEQ ID NO: 278831 - DNA, 120 bp, Artificial Sequence
  ENSG00000129007_32 (sequence is synthesized)
gctatattcattacttacctcaaagcatgctgcaagaaaattagttagttacttgtcatgctttgaaatctctggatgaaaggtgctttggaagcacaaaccattatcacttgtctcata

SEQ ID NO: 278832 - DNA, 120 bp, Artificial Sequence
  ENSG00000129007_33 (sequence is synthesized)
gggattgtccccttgaacatccagcagtgttattttacagaagacaaattaactgaaggcttttcttttattacatctaaagagctctacataaacaggtaacattcaataggtaaacaa

SEQ ID NO: 278833 - DNA, 120 bp, Artificial Sequence
  ENSG00000129007_34 (sequence is synthesized)
tttttttccaatgcatgtaataaatattttcacttggtacttttatacaaactgacattgtctactatacatttttaaaagccattttactggtttggcatgcggtatggaaattctaag

SEQ ID NO: 278834 - DNA, 120 bp, Artificial Sequence
  ENSG00000129007_35 (sequence is synthesized)
agagaaagttttaaggcaatgaatcacagatttaagttcatggaatttatggtaactttatctgtttatgtacattttcccctttgttaaacaattaacagcagcacactctgggaccac

SEQ ID NO: 278835 - DNA, 120 bp, Artificial Sequence
  ENSG00000129007_36 (sequence is synthesized)
cagctattttccctctctttctgaaatctaagctttgtatttaattaaaaaacagaattcaacatctattgataaaacaaaattcttactaaaataatttcaaatgtgctttaaaaagtc

SEQ ID NO: 278836 - DNA, 120 bp, Artificial Sequence
  ENSG00000129007_37 (sequence is synthesized)
ctgaagatcttgaaagttttatgtgtttaaaattgaaattgtctaaaaaaatgctctttccacattaatttagttaggatatattttcactccatttcagacacttgactcaaaggaaaa

SEQ ID NO: 278837 - DNA, 120 bp, Artificial Sequence
  ENSG00000129007_38 (sequence is synthesized)
tctgccaaagaatccgatttttcagagcttacgtgaatctttcctcagtaaagatacagaattgtgatcatgtctaaataattagtaaagcaattttaatgctcaaaatagtcaaccaag

SEQ ID NO: 278838 - DNA, 120 bp, Artificial Sequence
  ENSG00000129009_0 (sequence is synthesized)
gtcacttatgaaacacaggtccttgttgctgcagagaagcagttgttttgctggaaggagggagtgcgcgggctgccccgggctcctccctgccgcctcctctcagtggatggttccagg

SEQ ID NO: 278839 - DNA, 120 bp, Artificial Sequence
  ENSG00000129009_1 (sequence is synthesized)
caccctgtctggggcagggagggcacaggcctgcacatcgaaggtggggtgggaccaggctgcccctcgccccagcatccaagtcctcccttgggcgcccgtggccctgcagactctcag

SEQ ID NO: 278840 - DNA, 120 bp, Artificial Sequence
  ENSG00000129009_2 (sequence is synthesized)
ggctaaggtcctctgttgctttttggttccaccttagaagaggctccgcttgactaagagtagcttgaaggaggcaccatgcaggagctgcatctgctctggtgggcgcttctcctgggc

SEQ ID NO: 278841 - DNA, 120 bp, Artificial Sequence
  ENSG00000129009_3 (sequence is synthesized)
ctggctcaggcctgccctgagccctgcgactgtggggaaaagtatggcttccagatcgccgactgtgcctaccgcgacctagaatccgtgccgcctggcttcccggccaatgtgactaca

SEQ ID NO: 278842 - DNA, 120 bp, Artificial Sequence
  ENSG00000129009_4 (sequence is synthesized)
ctgagcctgtcagccaaccggctgccaggcttgccggagggtgccttcagggaggtgcccctgctgcagtcgctgtggctggcacacaatgagatccgcacggtggccgccggagccctg

SEQ ID NO: 278843 - DNA, 120 bp, Artificial Sequence
  ENSG00000129009_5 (sequence is synthesized)
gcctctctgagccatctcaagagcctggacctcagccacaatctcatctctgactttgcctggagcgacctgcacaacctcagtgccctccaattgctcaagatggacagcaacgagctg

SEQ ID NO: 278844 - DNA, 120 bp, Artificial Sequence
  ENSG00000129009_6 (sequence is synthesized)
accttcatcccccgcgacgccttccgcagcctccgtgctctgcgctcgctgcaactcaaccacaaccgcttgcacacattggccgagggcaccttcaccccgctcaccgcgctgtcccac

SEQ ID NO: 278845 - DNA, 120 bp, Artificial Sequence
  ENSG00000129009_7 (sequence is synthesized)
ctgcagatcaacgagaaccccttcgactgcacctgcggcatcgtgtggctcaagacatgggccctgaccacggccgtgtccatcccggagcaggacaacatcgcctgcacctcaccccat

SEQ ID NO: 278846 - DNA, 120 bp, Artificial Sequence
  ENSG00000129009_8 (sequence is synthesized)
gtgctcaagggtacgccgctgagccgcctgccgccactgccatgctcggcgccctcagtgcagctcagctaccaacccagccaggatggtgccgagctgcggcctggttttgtgctggca

SEQ ID NO: 278847 - DNA, 120 bp, Artificial Sequence
  ENSG00000129009_9 (sequence is synthesized)
cagatacccagtggcattgtggagatcaccagccccaacgtgggcactgatgggcgtgccctgcctggcacccctgtggccagctcccagccgcgcttccaggcctttgccaatggcagc

SEQ ID NO: 278848 - DNA, 120 bp, Artificial Sequence
  ENSG00000129009_10 (sequence is synthesized)
ctgcttatccccgactttggcaagctggaggaaggcacctacagctgcctggccaccaatgagctgggcagtgctgagagctcagtggacgtggcactggccacgcccggtgagggtggt

SEQ ID NO: 278849 - DNA, 120 bp, Artificial Sequence
  ENSG00000129009_11 (sequence is synthesized)
gaggacacactggggcgcaggttccatggcaaagcggttgagggaaagggctgctatacggttgacaacgaggtgcagccatcagggccggaggacaatgtggtcatcatctacctcagc

SEQ ID NO: 278850 - DNA, 120 bp, Artificial Sequence
  ENSG00000129009_12 (sequence is synthesized)
cgtgctgggaaccctgaggctgcagtcgcagaaggggtccctgggcagctgcccccaggcctgctcctgctgggccaaagcctcctcctcttcttcttcctcacctccttctagccccac

SEQ ID NO: 278851 - DNA, 120 bp, Artificial Sequence
  ENSG00000129009_13 (sequence is synthesized)
ccagggcttccctaactcctccccttgcccctaccaatgcccctttaagtgctgcaggggtctggggttggcaactcctgaggcctgcatgggtgacttcacattttcctacctctcctt

SEQ ID NO: 278852 - DNA, 120 bp, Artificial Sequence
  ENSG00000129009_14 (sequence is synthesized)
ctaatctcttctagagcacctgctatccccaacttctagacctgctccaaactagtgactaggatagaatttgatcccctaactcactgtctgcggtgctcattgctgctaacagcattg

SEQ ID NO: 278853 - DNA, 120 bp, Artificial Sequence
  ENSG00000129009_15 (sequence is synthesized)
cctgtgctctcctctcaggggcagcatgctaacggggcgacgtcctaatccaactgggagaagcctcagtggtggaattccaggcactgtgactgtcaagctggcaagggccaggattgg

SEQ ID NO: 278854 - DNA, 120 bp, Artificial Sequence
  ENSG00000129009_16 (sequence is synthesized)
gggaatggagctggggcttagctgggaggtggtctgaagcagacagggaatgggagaggaggatgggaagtagacagtggctggtatggctctgaggctccctggggcctgctcaagctc

SEQ ID NO: 278855 - DNA, 120 bp, Artificial Sequence
  ENSG00000129009_17 (sequence is synthesized)
ctcctgctccttgctgttttctgatgatttgggggcttgggagtccctttgtcctcatctgagactgaaatgtggggatccaggatggccttccttcctcttacccttcctccctcagcc

SEQ ID NO: 278856 - DNA, 120 bp, Artificial Sequence
  ENSG00000129009_18 (sequence is synthesized)
tgcaacctctatcctggaacctgtcctccctttctccccaactatgcatctgttgtctgctcctctgcaaaggccagccagcttgggagcagcagagaaataaacagcatttctgatgcc

SEQ ID NO: 278857 - DNA, 120 bp, Artificial Sequence
  ENSG00000129009_19 (sequence is synthesized)
gcaaagtgctgggggaggggggtggctggaaaacagatttcaagtcataaagtcagctaggaacaggccgaggcagggagaactctccactcggaggaggagctggggtcctcttccatc

SEQ ID NO: 278858 - DNA, 120 bp, Artificial Sequence
  ENSG00000129009_20 (sequence is synthesized)
acaatccctagcttggagccgtccagggggcatctgcttcttccacaacccacaactgaggccccagaaatcccagctgcgtttgggctgagcctctggcctcacccaagtcagctgaga

SEQ ID NO: 278859 - DNA, 120 bp, Artificial Sequence
  ENSG00000129028_0 (sequence is synthesized)
agatcgccacttccggtgaccagaggtagggaaggaaacaatcccgacccggagtggacaggtgaggaggggaggacttgcctcgccgaggccgctgcgaggagcgtgcccaagggcgaa

SEQ ID NO: 278860 - DNA, 120 bp, Artificial Sequence
  ENSG00000129028_1 (sequence is synthesized)
ggtccagggaacccggctcccgcgcaccgaagacggccgccatgccggcccgttgtgtggccgcccactgcggcaacaccaccaagtctgggaagtcgctgttccgctttcccaaggacc

SEQ ID NO: 278861 - DNA, 120 bp, Artificial Sequence
  ENSG00000129028_2 (sequence is synthesized)
gggccgtgcggctgctctgggaccgcttcgtgcggggttgccgcgccgactggtacggaggcaatgaccgctcggtcatctgctctgaccactttgccccagcctgttttgacgtctctt

SEQ ID NO: 278862 - DNA, 120 bp, Artificial Sequence
  ENSG00000129028_3 (sequence is synthesized)
cggttatccagaagaacctgcgcttctcccagcgcctgaggctggtggcaggcgccgtgcccaccctgcaccgggtgcccgccccggcacctaagaggggagaggagggagaccaagcag

SEQ ID NO: 278863 - DNA, 120 bp, Artificial Sequence
  ENSG00000129028_4 (sequence is synthesized)
gccgcctggacacgcgaggagagctccaggcagccaggcattctgaggctgccccaggtccagtctcctgtacacgcccccgagctgggaagcaggctgcagcttcacagattacgtgtg

SEQ ID NO: 278864 - DNA, 120 bp, Artificial Sequence
  ENSG00000129028_5 (sequence is synthesized)
aaaatgaacttgtgcaaacccaaccccatgctgataatccatctaatactgtcacttcagtacctactcactgtgaagaaggcccagtgcataaaagtacacaaatttctttgaaaaggc

SEQ ID NO: 278865 - DNA, 120 bp, Artificial Sequence
  ENSG00000129028_6 (sequence is synthesized)
cccgtcaccgtagtgtgggtattcaagccaaagtgaaagcgtttggaaaaagactgtgtaatgcaactactcagacagaggaattgtggtctagaacttcctctctctttgacatttact

SEQ ID NO: 278866 - DNA, 120 bp, Artificial Sequence
  ENSG00000129028_7 (sequence is synthesized)
ccagtgattcagaaacagatacagactgggatatcaagagtgaacagagtgatttgtcttatatggctgtacaggtgaaagaagaaacatgttaaaaactcaacatcaaatgctctgatg

SEQ ID NO: 278867 - DNA, 120 bp, Artificial Sequence
  ENSG00000129028_8 (sequence is synthesized)
gattttcaaatctttactcacataattatctctttgctattgtaaatctttcacttcaagataatttgacagttgagtatcagcataatttgtttagctctaaggcaaaagtttgcttgc

SEQ ID NO: 278868 - DNA, 120 bp, Artificial Sequence
  ENSG00000129028_9 (sequence is synthesized)
ttgccaacacaatgaagataatacctacccacaaacatccctattctctactttcacctttttttttcttttaatccttttggtagaaatcaggttacaaagcaaaaccacaatatcagc

SEQ ID NO: 278869 - DNA, 120 bp, Artificial Sequence
  ENSG00000129028_10 (sequence is synthesized)
aacacttcctaatcaaaattaagcattgaatatttgtttaagcttagttcagaagcaacgctcctacaggacttgacatttgctagttagaatatccctactcttctaaataatttgaaa

SEQ ID NO: 278870 - DNA, 120 bp, Artificial Sequence
  ENSG00000129028_11 (sequence is synthesized)
gtatagagcagtaacacagtaacagtgagcacagccaagcctgacactactaaatgatttggtagtgaagccaggacatctacccttgactattttttatgttatttatttattagtttg

SEQ ID NO: 278871 - DNA, 120 bp, Artificial Sequence
  ENSG00000129028_12 (sequence is synthesized)
tccatttgtaacatgtatagatctgtcctgtgagcatttctgatgaatctatggttcttacagaaatttttcaaaggaatcaatttagagatagagttttcatatacttacattaactta

SEQ ID NO: 278872 - DNA, 120 bp, Artificial Sequence
  ENSG00000129028_13 (sequence is synthesized)
ttaatgaaatctgtttgcatcagtgcttactgcgacacattaattagcttgattaatttagattagaatcattaacatcatgaaaaataaaagtactacatttctaacgtattcccattg

SEQ ID NO: 278873 - DNA, 120 bp, Artificial Sequence
  ENSG00000129028_14 (sequence is synthesized)
caggtgttaggtattttttctgtcaacacctctcttttgaattctacatttgagaaataagcatggaaatattagctgccccgtctgccattcaccaggaaaaatttctatggcaatttt

SEQ ID NO: 278874 - DNA, 120 bp, Artificial Sequence
  ENSG00000129028_15 (sequence is synthesized)
gtaccatgaagtaaactgttacaatagtttctgagaagcatactataactctgatcttccattgagaataacaaaaataaatatcaattttacacctcatatgtcttcttagttctgaat

SEQ ID NO: 278875 - DNA, 120 bp, Artificial Sequence
  ENSG00000129028_16 (sequence is synthesized)
gattagaagaacttgcatgtatttttatcctagaaggtttaaataatacatcaaagttattttcttccaaatgtaattttatgtctgctttaaggaaaataaaataaaatattaatagga

SEQ ID NO: 278876 - DNA, 120 bp, Artificial Sequence
  ENSG00000129038_0 (sequence is synthesized)
attcagagtgggaaagcgccagccgagcggccagccagtgcggggctggccatgtaaggcccacaggcggtcctgcccgcccggtgccctgcggagagcctcgtgcagccctgggcaccg

SEQ ID NO: 278877 - DNA, 120 bp, Artificial Sequence
  ENSG00000129038_1 (sequence is synthesized)
cccctgccctgccctgaccccttggccttgaaatgctgtcatcggaggagccgtcccgctcgggacaaggccagcatggacaaagctagagctggggcaagcaaggagccttcctgtcct

SEQ ID NO: 278878 - DNA, 120 bp, Artificial Sequence
  ENSG00000129038_2 (sequence is synthesized)
cgaggccgtgggaagagaagcacgcccagggggccactcctgagagcctctctgtccaccaggcctctgcagaggggtcaccatggctctggcccgaggcagccggcagctgggggccct

SEQ ID NO: 278879 - DNA, 120 bp, Artificial Sequence
  ENSG00000129038_3 (sequence is synthesized)
ggtgtggggcgcctgcctgtgcgtgctggtgcacgggcagcaggcgcagcccgggcagggctcggaccccgcccgctggcggcagctgatccagtgggagaacaacgggcaggtgtacag

SEQ ID NO: 278880 - DNA, 120 bp, Artificial Sequence
  ENSG00000129038_4 (sequence is synthesized)
cttgctcaactcgggctcagagtacgtgccggccggacctcagcgctccgagagtagctcccgggtgctgctggccggcgcgccccaggcccagcagcggcgcagccacgggagcccccg

SEQ ID NO: 278881 - DNA, 120 bp, Artificial Sequence
  ENSG00000129038_5 (sequence is synthesized)
gccgtccctgcccctgccggggcgcgtgggctcggacaccgtgcgcggccaggcgcggcacccattcggctttggccaggtgcccgacaactggcgcgaggtggccgtcggggacagcac

SEQ ID NO: 278882 - DNA, 120 bp, Artificial Sequence
  ENSG00000129038_6 (sequence is synthesized)
cggggacagcacgggcatggcccgggcccgcacctccgtctcccagcaacggcacgggggctccgcctcctcggtctcggcttcggccttcgccagcacctaccgccagcagccctccta

SEQ ID NO: 278883 - DNA, 120 bp, Artificial Sequence
  ENSG00000129038_7 (sequence is synthesized)
cccgcagcagttcccctacccgcaggcgcccttcgtcagccagtacgagaactacgaccccgcgtcgcggacctacgaccagggtttcgtgtactaccggcccgcgggcggcggcgtggg

SEQ ID NO: 278884 - DNA, 120 bp, Artificial Sequence
  ENSG00000129038_8 (sequence is synthesized)
cgcgggggcggcggccgtggcctcggcgggggtcatctacccctaccagccccgggcgcgctacgaggagtacggcggcggcgaagagctgcccgagtacccgcctcagggcttctaccc

SEQ ID NO: 278885 - DNA, 120 bp, Artificial Sequence
  ENSG00000129038_9 (sequence is synthesized)
gcacagtctgtacagcgagggcacccccggcttcgagcaggcctaccctgaccccggtcccgaggcggcgcaggcccatggcggagacccacgcctgggctggtacccgccctacgccaa

SEQ ID NO: 278886 - DNA, 120 bp, Artificial Sequence
  ENSG00000129038_10 (sequence is synthesized)
cgctggagccgccctacctgccggtgcgcagctccgacacgcccccgccgggtggggagcggaacggcgcgcagcagggccgcctcagcgtgggcagcgtgtaccggcccaaccagaacg

SEQ ID NO: 278887 - DNA, 120 bp, Artificial Sequence
  ENSG00000129038_11 (sequence is synthesized)
cgtgggcagcgtgtaccggcccaaccagaacggccgcggtctccctgacttggtcccagaccccaactatgtgcaagcatccacttatgtgcagagagcccacctgtactccctgcgctg

SEQ ID NO: 278888 - DNA, 120 bp, Artificial Sequence
  ENSG00000129038_12 (sequence is synthesized)
tgctgcggaggagaagtgtctggccagcacagcctatgcccctgaggccaccgactacgatgtgcgggtgctactgcgcttcccccagcgcgtgaagaaccagggcacagcagacttcct

SEQ ID NO: 278889 - DNA, 120 bp, Artificial Sequence
  ENSG00000129038_13 (sequence is synthesized)
ccccaaccggccacggcacacctgggagtggcacagctgccaccagcattaccacagcatggacgagttcagccactacgacctactggatgcagccacaggcaagaaggtggccgaggg

SEQ ID NO: 278890 - DNA, 120 bp, Artificial Sequence
  ENSG00000129038_14 (sequence is synthesized)
ccacaaggccagtttctgcctggaggacagcacctgtgacttcggcaacctcaagcgctatgcatgcacctctcatacccagggcctgagcccaggctgctatgacacctacaatgcgga

SEQ ID NO: 278891 - DNA, 120 bp, Artificial Sequence
  ENSG00000129038_15 (sequence is synthesized)
catcgactgccagtggatcgacataaccgacgtgcagcctgggaactacatcctcaaggtgcacgtgaacccaaagtatattgttttggagtctgacttcaccaacaacgtggtgagatg

SEQ ID NO: 278892 - DNA, 120 bp, Artificial Sequence
  ENSG00000129038_16 (sequence is synthesized)
caacattcactacacaggtcgctacgtttctgcaacaaactgcaaaattgtccaatcctgatctccgggagggacagatggccaatctctccccttccaaagcaggccctgctccccggg

SEQ ID NO: 278893 - DNA, 120 bp, Artificial Sequence
  ENSG00000129038_17 (sequence is synthesized)
cagcctcccgccgaggggcccagcccccaacccacaggcacggaggggcatccctccctgccggcctcagggagcgaacgtggatgaaaaccacagggattccggacgccagaccccatt

SEQ ID NO: 278894 - DNA, 120 bp, Artificial Sequence
  ENSG00000129038_18 (sequence is synthesized)
ttatacttcacttttctctacagtgttgttttgttgttgttggtttttattttttatactttggccataccacagagctagattgcccaggtctgggctgaataaaacaaggtttttcta

SEQ ID NO: 278895 - DNA, 120 bp, Artificial Sequence
  ENSG00000129038_19 (sequence is synthesized)
atacccaggttgggctggagagatggggtttggggcatgggaggataaggagttggggaggcaaagagcgaggcccgctgaggcccggcaagtgccaaggcttctggccactcagctctg

SEQ ID NO: 278896 - DNA, 120 bp, Artificial Sequence
  ENSG00000129038_20 (sequence is synthesized)
ctcacagtgaaggtcttctcaccagtcctcaggctgccacactgccctgcagggactgttccctccctgccccagcccctttcccatgttattccaggtgatctgctcgtggagagaagg

SEQ ID NO: 278897 - DNA, 120 bp, Artificial Sequence
  ENSG00000129038_21 (sequence is synthesized)
aaacatcgcaacagtctggagagcaacacgtcctattggcctgttcacccacccatatccctctttccatcagccaccctaaatatccacaaactgtccatctgtcctgtctctttttat

SEQ ID NO: 278898 - DNA, 120 bp, Artificial Sequence
  ENSG00000129038_22 (sequence is synthesized)
ccattctgccatccatctcgtccctcccacctggctattagatatctgtctttcctctggtccatctagccagtggctttaggaaggtgtggacccaccctgagcagttgccctgggcca

SEQ ID NO: 278899 - DNA, 120 bp, Artificial Sequence
  ENSG00000129038_23 (sequence is synthesized)
gggataatggtggaaggaacatgcaaagagggtgtgtcttaattagcactggctttagggaacaaggaaaagggagaacccgggagtacgggaaggaggctggggcagacaggagtcaga

SEQ ID NO: 278900 - DNA, 120 bp, Artificial Sequence
  ENSG00000129038_24 (sequence is synthesized)
ggcccattccagcccaaacgagaagccagtgagcaaggtggagaccagggatgctgtgaccaaagcagagaggaatgggcggggtggtgctgacaccccagccccgttctgcctgccaga

SEQ ID NO: 278901 - DNA, 120 bp, Artificial Sequence
  ENSG00000129038_25 (sequence is synthesized)
gccccacttaccaggcccgagtccccagaggtcccctcctactccctgctcgattcccttcctcagaggcaggtctgtggcttggctgggaactccagggactgagggagcactgcagct

SEQ ID NO: 278902 - DNA, 120 bp, Artificial Sequence
  ENSG00000129038_26 (sequence is synthesized)
ggaacaggacggacaggccccgggctctggcacatcctggggaacaagggaccacaaggacgggggcagtctccagacttcccctgggcgcttgaccccaggccttgcaggggagagagc

SEQ ID NO: 278903 - DNA, 120 bp, Artificial Sequence
  ENSG00000129048_0 (sequence is synthesized)
catttgattttatactctgtactcaagactgctcctctctgccgactacaacagattggagccatggctttggaacagaaccagtcaacagattattattatgaggaaaatgaaatgaat

SEQ ID NO: 278904 - DNA, 120 bp, Artificial Sequence
  ENSG00000129048_1 (sequence is synthesized)
ggcacttatgactacagtcaatatgaactgatctgtatcaaagaagatgtcagagaatttgcaaaagttttcctccctgtattcctcacaatagttttcgtcattggacttgcaggcaat

SEQ ID NO: 278905 - DNA, 120 bp, Artificial Sequence
  ENSG00000129048_2 (sequence is synthesized)
tccatggtagtggcaatttatgcctattacaagaaacagagaaccaaaacagatgtgtacatcctgaatttggctgtagcagatttactccttctattcactctgcctttttgggctgtt

SEQ ID NO: 278906 - DNA, 120 bp, Artificial Sequence
  ENSG00000129048_3 (sequence is synthesized)
aatgcagttcatgggtgggttttagggaaaataatgtgcaaaataacttcagccttgtacacactaaactttgtctctggaatgcagtttctggcttgtatcagcatagacagatatgtg

SEQ ID NO: 278907 - DNA, 120 bp, Artificial Sequence
  ENSG00000129048_4 (sequence is synthesized)
gcagtaactaaagtccccagccaatcaggagtgggaaaaccatgctggatcatctgtttctgtgtctggatggctgccatcttgctgagcataccccagctggttttttatacagtaaat

SEQ ID NO: 278908 - DNA, 120 bp, Artificial Sequence
  ENSG00000129048_5 (sequence is synthesized)
gacaatgctaggtgcattcccattttcccccgctacctaggaacatcaatgaaagcattgattcaaatgctagagatctgcattggatttgtagtaccctttcttattatgggggtgtgc

SEQ ID NO: 278909 - DNA, 120 bp, Artificial Sequence
  ENSG00000129048_6 (sequence is synthesized)
tactttatcacagcaaggacactcatgaagatgccaaacattaaaatatctcgacccctaaaagttctgctcacagtcgttatagttttcattgtcactcaactgccttataacattgtc

SEQ ID NO: 278910 - DNA, 120 bp, Artificial Sequence
  ENSG00000129048_7 (sequence is synthesized)
aagttctgccgagccatagacatcatctactccctgatcaccagctgcaacatgagcaaacgcatggacatcgccatccaagtcacagaaagcatcgcactctttcacagctgcctcaac

SEQ ID NO: 278911 - DNA, 120 bp, Artificial Sequence
  ENSG00000129048_8 (sequence is synthesized)
ccaatcctttatgtttttatgggagcatctttcaaaaactacgttatgaaagtggccaagaaatatgggtcctggagaagacagagacaaagtgtggaggagtttccttttgattctgag

SEQ ID NO: 278912 - DNA, 120 bp, Artificial Sequence
  ENSG00000129048_9 (sequence is synthesized)
atttaaaggtaaaactgctctgccttttgcttggatacatatgaatgatgctttcccctcaaataaaacatctgcattattctgaaactcaaatctcagacgccgtggttgcaacttata

SEQ ID NO: 278913 - DNA, 120 bp, Artificial Sequence
  ENSG00000129048_10 (sequence is synthesized)
ataaagaatgggttgggggaagggggagaaataaaagccaagaagaggaaacaagataataaatgtacaaaacatgaaaattaaaatgaacaatataggaaaataattgtaacaggcata

SEQ ID NO: 278914 - DNA, 120 bp, Artificial Sequence
  ENSG00000129048_11 (sequence is synthesized)
agtgaataacactctgctgtaacgaagaagagctttgtggtgataattttgtatcttggttgcagtggtgcttatacaaatctacacaagtgataaaatgacacagaactatatacacac

SEQ ID NO: 278915 - DNA, 120 bp, Artificial Sequence
  ENSG00000129048_12 (sequence is synthesized)
attgtaccaatttcaatttcctggttttgacattatagtataattatgtaagatggaaccattggggaaaactgggtgaagggtacccaggaccactctgtaccatctttgtaacttcct

SEQ ID NO: 278916 - DNA, 120 bp, Artificial Sequence
  ENSG00000129048_13 (sequence is synthesized)
gtgaatttataataatttcaaaataaaacaagttaaaaaaaaacccactatgctataagttaggccatctaaaacagattattaaagaggttcatgttaaaaggcatttataattatttt

SEQ ID NO: 278917 - DNA, 120 bp, Artificial Sequence
  ENSG00000129048_14 (sequence is synthesized)
taattatctaagttttaatacaagaacgatttccctgcataattttagtacttgaataagtatgcagcagaactccaactatcttttttcctgttttttttaaatttgtaagtaatttta

SEQ ID NO: 278918 - DNA, 120 bp, Artificial Sequence
  ENSG00000129048_15 (sequence is synthesized)
taaaatccacctcctccaaaaaagcaataaaaaaaaaacaaactataataagcttttctgattcttttcaaaacattcctggtaagttcctaaagacataatttgcttctatgatgtcaa

SEQ ID NO: 278919 - DNA, 120 bp, Artificial Sequence
  ENSG00000129048_16 (sequence is synthesized)
ctttcttactaataactggttatcatgacaaatgttaggtttatcatatatagtctaggtgtaatcctcagactatcattttcatctgggttccaatttcttaacttcctaaagaattca

SEQ ID NO: 278920 - DNA, 120 bp, Artificial Sequence
  ENSG00000129048_17 (sequence is synthesized)
tctgtttatacaagtctaccactgccgattgactaaaaaatacattatcccatgcataaaatgtcctattttcatttaaacactttatttttgagtaataaaaatatgtaccacaataaa

SEQ ID NO: 278921 - DNA, 120 bp, Artificial Sequence
  ENSG00000129048_18 (sequence is synthesized)
ttattgttaattaacatgtacagcttatcttttttaaaaaaatttgctgtaaattattataatccatgtaatatgctcctactaaaattaaattttgctagcaattacattggtcaaaaa

SEQ ID NO: 278922 - DNA, 120 bp, Artificial Sequence
  ENSG00000129048_19 (sequence is synthesized)
gtggaggagtttccttttgattctgagggtcctacagagccaaccagtacttttagcatttaaagctcatccataataactccgggacgactgactacacaaggagagaatggtgattgg

SEQ ID NO: 278923 - DNA, 120 bp, Artificial Sequence
  ENSG00000129048_20 (sequence is synthesized)
agctggcaaaaacaagttccagagaccctcgactttggccatttcctgtcaaggtgatgaacatgccagagtgaccataatttaccaggactcacagtagtttatttctttttttaaata

SEQ ID NO: 278924 - DNA, 120 bp, Artificial Sequence
  ENSG00000129048_21 (sequence is synthesized)
ttggtatttatgatctttgaaatttaaaaacacttatggagttatttattttactgtattctccagtgagcaaaaccaagttcttattaattcattataaatcaacagtttaaccattaa

SEQ ID NO: 278925 - DNA, 120 bp, Artificial Sequence
  ENSG00000129055_0 (sequence is synthesized)
agtgcagacacgtgatgcgggggagggggggggggcgtggcaggagcaagcgtctgccgcggtggccgggtgccgatttgacaagatcaaagctgcaggaaaatggacagtgaggttcag

SEQ ID NO: 278926 - DNA, 120 bp, Artificial Sequence
  ENSG00000129055_1 (sequence is synthesized)
agagatggaaggatcttggatttgattgatgatgcttggcgagaagacaagctgccttatgaggatgtcgcaataccactgaatgagcttcctgaacctgaacaagacaatggtggcacc

SEQ ID NO: 278927 - DNA, 120 bp, Artificial Sequence
  ENSG00000129055_2 (sequence is synthesized)
acagaatctgtcaaagaacaagaaatgaagtggacagacttagccttacagtacctccatgagaatgttccccccattggaaactgacgcttggctcctttcttgtggatggattttctc

SEQ ID NO: 278928 - DNA, 120 bp, Artificial Sequence
  ENSG00000129055_3 (sequence is synthesized)
aaagtacacagataaagcatggtttgtttcagtctccaaattcaaacctttgagtaataaatcagcactcaaaaatgtacacccatttagtttgtggtagcaaagtgcaatgcgaaattg

SEQ ID NO: 278929 - DNA, 120 bp, Artificial Sequence
  ENSG00000129055_4 (sequence is synthesized)
aatgagaaactgagatttctcagtaatggtgaatatttcgctctttaaacctaaaactcttcattgagtagcttatatttgaacatgattggttaaacatttgcctctacctctgatttt

SEQ ID NO: 278930 - DNA, 120 bp, Artificial Sequence
  ENSG00000129055_5 (sequence is synthesized)
tcaaagtttaacaccttccaactacttatgtgtgtcctgtaacacaggtgattgaacgtatgagagggaaaggcaaagaaaaaggaagccagacactaggagaattattaacttctcata

SEQ ID NO: 278931 - DNA, 120 bp, Artificial Sequence
  ENSG00000129055_6 (sequence is synthesized)
cttccccacattgagaagcattcggagtgtatttagcctgtagatgttgtgatatgcaaatatcccattccctggttactggcattcctaagattcttcatggtattttcaaactttgga

SEQ ID NO: 278932 - DNA, 120 bp, Artificial Sequence
  ENSG00000129055_7 (sequence is synthesized)
taaatttacagattagaaagatatctgacagttaatctctgttctccttacaaattccttttgtgctgctggaaaggatctttggctaggtggatgactagttttattcaaagccttttc

SEQ ID NO: 278933 - DNA, 120 bp, Artificial Sequence
  ENSG00000129055_8 (sequence is synthesized)
tcaaagccctttcagttacaaccaccccactatggaatcagtatttagttatacatttgtataagaacctgtattttgaaaaacacattcatgtatatttattcctggaattatttgcct

SEQ ID NO: 278934 - DNA, 120 bp, Artificial Sequence
  ENSG00000129055_9 (sequence is synthesized)
gttaaacagtgtctttcatgttctctccccagattgtaaactctgtaagaagctgcttgtatctgtatcccttgttgaaactctgaaaacactgaataactaaaatctcttctcatcctt

SEQ ID NO: 278935 - DNA, 120 bp, Artificial Sequence
  ENSG00000129055_10 (sequence is synthesized)
gcagacacgtgatgcgggggagggggggggggcgtggcaggagcaagcgtctgccgcggtggccgggtgccggtaagggtttccagcgcccccggcctaggttttggaggcgcgggaatg

SEQ ID NO: 278936 - DNA, 120 bp, Artificial Sequence
  ENSG00000129055_11 (sequence is synthesized)
cgttcgttgctcagtgtcggacttccccctattcccatcggccgaggctgtcactttacgctcataaccgtttttctttactgcactcgtgtcgggaggaaagggacttgcgtggcaccc

SEQ ID NO: 278937 - DNA, 120 bp, Artificial Sequence
  ENSG00000129055_12 (sequence is synthesized)
ccagacctccccgtctccgcttccacgtttggtacatcctgcctgaggcaggaagccgcagctgagggacggcctgtcgtacggtgcggatggtggtggcctgcgaggctcatttctagc

SEQ ID NO: 278938 - DNA, 120 bp, Artificial Sequence
  ENSG00000129055_13 (sequence is synthesized)
aaggaacaaggctttcccgctttgattttataaatattatgtttacaaagctgtaatatatagaaattgataagacgtgtccctgtccctggaaacgcaggcaccgcgtgtttggaaaga

SEQ ID NO: 278939 - DNA, 120 bp, Artificial Sequence
  ENSG00000129055_14 (sequence is synthesized)
cattcatctgggctgtttgacagactccccagttggtgccatgctctgtgcttagggaactgtgagacccctggaggggtgggtaccgggaccgcactcagcctggggtttggaggcggc

SEQ ID NO: 278940 - DNA, 120 bp, Artificial Sequence
  ENSG00000129055_15 (sequence is synthesized)
ctcctataggaagcgacctgggacctaagatttttagactgactgtgggttcactggaataaaaaggaagaaacaaagagcattgcaggcatcgggactgtcacatttgacaagatcaaa

SEQ ID NO: 278941 - DNA, 120 bp, Artificial Sequence
  ENSG00000129055_16 (sequence is synthesized)
acactaaatgagcgggtccccttgtgccgtgaatgaagtagtcccaacagcgctagctagacagcagccctggcagggaggccgcactggggtctctccgctgaaaaggaaggtgggtcc

SEQ ID NO: 278942 - DNA, 120 bp, Artificial Sequence
  ENSG00000129055_17 (sequence is synthesized)
gaatgttcaagttagaagagaagagctacattgagatgcaacatattaatatttgagggcctcgtttaacgtgttgctctcctgtcacactctatgacactggtctgtcagctgggctat

SEQ ID NO: 278943 - DNA, 120 bp, Artificial Sequence
  ENSG00000129055_18 (sequence is synthesized)
gcctgtccagtatacactataaaatatgtatcagttggggttggagagaggaactgtgatcaaagtagtcacccggcccatatgagaaaatgaaccttttcccaaaaggtggccccagac

SEQ ID NO: 278944 - DNA, 120 bp, Artificial Sequence
  ENSG00000129071_0 (sequence is synthesized)
ggcggctgtagccgagggggcggccggaaagcagcggcggcgtctggggcgctttcgcaacattcagacctcggttgcagcccggtgccgtgagctgaagaggtttcacatcttactccg

SEQ ID NO: 278945 - DNA, 120 bp, Artificial Sequence
  ENSG00000129071_1 (sequence is synthesized)
ccccacaccctgggcgttgcggcgctgggctcgttgctgcagccggaccctgctcgatgggcacgactgggctggagagtctgagtctgggggaccgcggagctgcccccaccgtcacct

SEQ ID NO: 278946 - DNA, 120 bp, Artificial Sequence
  ENSG00000129071_2 (sequence is synthesized)
ctagtgagcgcctagtcccagacccgccgaatgacctccgcaaagaagatgttgctatggaattggaaagagtgggagaagatgaggaacaaatgatgataaaaagaagcagtgaatgta

SEQ ID NO: 278947 - DNA, 120 bp, Artificial Sequence
  ENSG00000129071_3 (sequence is synthesized)
atcccttgctacaagaacccatcgcttctgctcagtttggtgctactgcaggaacagaatgccgtaagtctgtcccatgtggatgggaaagagttgtgaagcaaaggttatttgggaaga

SEQ ID NO: 278948 - DNA, 120 bp, Artificial Sequence
  ENSG00000129071_4 (sequence is synthesized)
cagcaggaagatttgatgtgtactttatcagcccacaaggactgaagttcagatccaaaagttcacttgctaattatcttcacaaaaatggagagacttctcttaagccagaagattttg

SEQ ID NO: 278949 - DNA, 120 bp, Artificial Sequence
  ENSG00000129071_5 (sequence is synthesized)
attttactgtactttctaaaaggggtatcaagtcaagatataaagactgcagcatggcagccctgacatcccatctacaaaaccaaagtaacaattcaaactggaacctcaggacccgaa

SEQ ID NO: 278950 - DNA, 120 bp, Artificial Sequence
  ENSG00000129071_6 (sequence is synthesized)
gcaagtgcaaaaaggatgtgtttatgccgccaagtagtagttcagagttgcaggagagcagaggactctctaactttacttccactcatttgcttttgaaagaagatgagggtgttgatg

SEQ ID NO: 278951 - DNA, 120 bp, Artificial Sequence
  ENSG00000129071_7 (sequence is synthesized)
atgttaacttcagaaaggttagaaagcccaaaggaaaggtgactattttgaaaggaatcccaattaagaaaactaaaaaaggatgtaggaagagctgttcaggttttgttcaaagtgata

SEQ ID NO: 278952 - DNA, 120 bp, Artificial Sequence
  ENSG00000129071_8 (sequence is synthesized)
gcaaaagagaatctgtgtgtaataaagcagatgctgaaagtgaacctgttgcacaaaaaagtcagcttgatagaactgtctgcatttctgatgctggagcatgtggtgagaccctcagtg

SEQ ID NO: 278953 - DNA, 120 bp, Artificial Sequence
  ENSG00000129071_9 (sequence is synthesized)
tgaccagtgaagaaaacagccttgtaaaaaaaaaagaaagatcattgagttcaggatcaaatttttgttctgaacaaaaaacttctggcatcataaacaaattttgttcagccaaagact

SEQ ID NO: 278954 - DNA, 120 bp, Artificial Sequence
  ENSG00000129071_10 (sequence is synthesized)
ggaaaggaaagaacatttgcatactgacattttaaaacgtggctctgaaatggacaacaactgctcaccaaccaggaaagacttcactggtgagaaaatatttcaagaagataccatccc

SEQ ID NO: 278955 - DNA, 120 bp, Artificial Sequence
  ENSG00000129071_11 (sequence is synthesized)
acgaacacagatagaaagaaggaaaacaagcctgtatttttccagcaaatataacaaagaagctcttagccccccacgacgtaaagcctttaagaaatggacacctcctcggtcaccttt

SEQ ID NO: 278956 - DNA, 120 bp, Artificial Sequence
  ENSG00000129071_12 (sequence is synthesized)
taatctcgttcaagaaacactttttcatgatccatggaagcttctcatcgctactatatttctcaatcggacctcaggcaaaatggcaatacctgtgctttggaagtttctggagaagta

SEQ ID NO: 278957 - DNA, 120 bp, Artificial Sequence
  ENSG00000129071_13 (sequence is synthesized)
tccttcagctgaggtagcaagaaccgcagactggagagatgtgtcagaacttcttaaacctcttggtctctacgatcttcgggcaaaaaccattgtcaagttctcagatgaatacctgac

SEQ ID NO: 278958 - DNA, 120 bp, Artificial Sequence
  ENSG00000129071_14 (sequence is synthesized)
aaagcagtggaagtatccaattgagcttcatgggattggtaaatatggcaacgactcttaccgaattttttgtgtcaatgagtggaagcaggtgcaccctgaagaccacaaattaaataa

SEQ ID NO: 278959 - DNA, 120 bp, Artificial Sequence
  ENSG00000129071_15 (sequence is synthesized)
atatcatgactggctttgggaaaatcatgaaaaattaagtctatcttaaactctgcagctttcaagctcatctgttatgcatagctttgcacttcaaaaaagcttaattaagtacaacca

SEQ ID NO: 278960 - DNA, 120 bp, Artificial Sequence
  ENSG00000129071_16 (sequence is synthesized)
accacctttccagccatagagattttaattagcccaactagaagcctagtgtgtgtgctttcttaatgtgtgtgccaatggtggatctttgctactgaatgtgtttgaacatgttttgag

SEQ ID NO: 278961 - DNA, 120 bp, Artificial Sequence
  ENSG00000129071_17 (sequence is synthesized)
atttttttaaaataaattattatttgacaacaatccaaaaaaaatacggcttttccaatgatgaaatataatcagaagatgaaaaatagttctaaactatcaataatacaaagcaaattt

SEQ ID NO: 278962 - DNA, 90 bp, Artificial Sequence
  ENSG00000129071_18 (sequence is synthesized)
gaaaaatagttctaaactatcaataatacaaagcaaatttctatcagccttgctaaagctaggggcccactaaatatttttatcgcggaa

SEQ ID NO: 278963 - DNA, 78 bp, Artificial Sequence
  ENSG00000129071_19 (sequence is synthesized)
gaggtcaagtgacagagagagaccctgtctcaaaaaatatatatttaaaaaataaaaataaaagctgaccccaaagac

SEQ ID NO: 278964 - DNA, 120 bp, Artificial Sequence
  ENSG00000129071_20 (sequence is synthesized)
acaaatgctattacagtcacaaacaattgtgttcctggctgcggggaagcgggtggcatgtgggttttggggtttttgatcagtaggcgctcccaagtccacaaagaccagtccagcggc

SEQ ID NO: 278965 - DNA, 120 bp, Artificial Sequence
  ENSG00000129071_21 (sequence is synthesized)
gtggcctctgactcatctccagtggtttgtcacctctggccctgttcctgtcattccctatttgtgtgctatctctaagcctgacgtggttttcctcctgtcaaaagtacaccactacag

SEQ ID NO: 278966 - DNA, 120 bp, Artificial Sequence
  ENSG00000129071_22 (sequence is synthesized)
cttgctccgagcgcgcatgtccgaaagggaaagccagaaaagcagcaaaagcaatggtggcactggagcccctaaggcgccagcgcaaccagagcgcgagcgattggtcggggcgtgtgg

SEQ ID NO: 278967 - DNA, 120 bp, Artificial Sequence
  ENSG00000129071_23 (sequence is synthesized)
actgaatgtaccttgtgttctatatgcttctactctcattatctgctgatctgatcatttaaaagctaatcatgcaaggccagttttcagcataatttggactattagcccaatatatta

SEQ ID NO: 278968 - DNA, 120 bp, Artificial Sequence
  ENSG00000129071_24 (sequence is synthesized)
gcagttttggcatttgattctgaaagtggttgctggttcagataatggcttctcaccagtgtttttttgttttttgttttctttaaaaaaaaaaaccctctggatgagatttctatgaga

SEQ ID NO: 278969 - DNA, 120 bp, Artificial Sequence
  ENSG00000129071_25 (sequence is synthesized)
ggaaaacaagcctgtatttttccagcaaatataacaaagaaggtatccctttcccaatcagaacagcaaattctaattccattttgggttttcaattctgatgcactatgtttgtttagc

SEQ ID NO: 278970 - DNA, 120 bp, Artificial Sequence
  ENSG00000129083_0 (sequence is synthesized)
agccaaggactctggagccgccgccgccgctgctgcggttcatagccggagtagacggagccgcagtagacggatccgcggctgcaccaaaccactgcccctcggagcctggtagtgggc

SEQ ID NO: 278971 - DNA, 120 bp, Artificial Sequence
  ENSG00000129083_1 (sequence is synthesized)
cacaagcccccagtcccagaggcgtggtgggtcgggcagagtcggaagaactggctttctagctggaagatgcggaaggggagcgactaggccgcttgcgtctgggcctggcagaaggga

SEQ ID NO: 278972 - DNA, 120 bp, Artificial Sequence
  ENSG00000129083_2 (sequence is synthesized)
ccggattttctggcatccttaaatcttgtgtcaaggattggttataatataaccagaaaccatgacggcggctgagaacgtatgctacacgttaattaacgtgccaatggattcagaacc

SEQ ID NO: 278973 - DNA, 120 bp, Artificial Sequence
  ENSG00000129083_3 (sequence is synthesized)
accatctgaaattagcttaaaaaatgatctagaaaaaggagatgtaaagtcaaagactgaagctttgaagaaagtaatcattatgattctgaatggtgaaaaacttcctggacttctgat

SEQ ID NO: 278974 - DNA, 120 bp, Artificial Sequence
  ENSG00000129083_4 (sequence is synthesized)
gaccatcattcgttttgtgctacctcttcaggatcacactatcaagaaattacttctggtattttgggaaattgttcctaaaacaactccagatgggagacttttacatgagatgatcct

SEQ ID NO: 278975 - DNA, 120 bp, Artificial Sequence
  ENSG00000129083_5 (sequence is synthesized)
tgtatgtgatgcatacagaaaggatcttcaacatcctaatgaatttattcgaggatctactcttcgttttctttgcaaattgaaagaagcagaattgctagaacctttaatgccagctat

SEQ ID NO: 278976 - DNA, 120 bp, Artificial Sequence
  ENSG00000129083_6 (sequence is synthesized)
tcgtgcatgtttggagcatcgacacagctatgttagaagaaatgctgttttggccatctataccatctatagaaattttgaacatcttatacctgatgctcctgaactgatacatgattt

SEQ ID NO: 278977 - DNA, 120 bp, Artificial Sequence
  ENSG00000129083_7 (sequence is synthesized)
tctggtgaatgagaaggatgcaagttgcaaaaggaatgcatttatgatgctaattcatgcagatcaggatcgagctttggattacttaagtacttgcattgatcaagttcaaacatttgg

SEQ ID NO: 278978 - DNA, 120 bp, Artificial Sequence
  ENSG00000129083_8 (sequence is synthesized)
agacattctgcagctggttattgttgaactgatttataaggtctgtcatgctaatccatcagaaagagctcgttttattcgctgcatctataacttattacagtcatccagccctgctgt

SEQ ID NO: 278979 - DNA, 120 bp, Artificial Sequence
  ENSG00000129083_9 (sequence is synthesized)
aaaatatgaagctgctgggacattagtgacactctctagtgcaccaactgcaatcaaggctgctgctcagtgttacattgatttaattattaaggagagcgacaacaatgtaaaactcat

SEQ ID NO: 278980 - DNA, 120 bp, Artificial Sequence
  ENSG00000129083_10 (sequence is synthesized)
agttttggatcgcttgatagaattaaaagagcatcctgctcatgaacgagtactacaggatctggttatggatatcctaagagtattgagcacaccagacttagaagtacgaaagaaaac

SEQ ID NO: 278981 - DNA, 120 bp, Artificial Sequence
  ENSG00000129083_11 (sequence is synthesized)
tctgcagttagcactggatcttgtctcttctagaaatgttgaagagctggttattgtcctgaagaaggaagtgataaaaacaaataatgtgtctgagcatgaagatactgacaaatacag

SEQ ID NO: 278982 - DNA, 120 bp, Artificial Sequence
  ENSG00000129083_12 (sequence is synthesized)
acaactcctagtgcgaacattgcattcctgttctgtccgatttccagatatggctgcaaatgttattcctgtgttaatggaatttctcagtgacaacaacgaagcagcagctgctgatgt

SEQ ID NO: 278983 - DNA, 120 bp, Artificial Sequence
  ENSG00000129083_13 (sequence is synthesized)
cttggagtttgttcgtgaagccattcagcgctttgataacctgagaatgcttattgttgagaagatgcttgaagtctttcatgctattaaatctgtcaagatttaccgaggagcattatg

SEQ ID NO: 278984 - DNA, 120 bp, Artificial Sequence
  ENSG00000129083_14 (sequence is synthesized)
atcctgggagaatactgtagtaccaaggaagacattcagagtgtgatgactgagatccgcaggtcccttggagagatcccaattgtagagtcagaaataaagaaagaagctggtgaatta

SEQ ID NO: 278985 - DNA, 120 bp, Artificial Sequence
  ENSG00000129083_15 (sequence is synthesized)
aaacctgaagaagaaataactgtagggccagttcagaaattggttactgaaatgggtacctatgcaactcagagtgcccttagcagttctagacccaccaagaaagaggaagacagacct

SEQ ID NO: 278986 - DNA, 120 bp, Artificial Sequence
  ENSG00000129083_16 (sequence is synthesized)
cccttgagaggattccttctggatggagatttctttgttgctgcctcccttgccacaactctgaccaagattgcattgcgctatgtagctttggttcaggagaagaaaaagcaaaattct

SEQ ID NO: 278987 - DNA, 120 bp, Artificial Sequence
  ENSG00000129083_17 (sequence is synthesized)
tttgttgctgaggctatgttgctcatggctactatcctgcatttgggaaaatcctctcttcctaagaagccaattactgatgatgatgtggatcgaatttccctgtgcctcaaggtcttg

SEQ ID NO: 278988 - DNA, 120 bp, Artificial Sequence
  ENSG00000129083_18 (sequence is synthesized)
tctgaatgttcacctttaatgaatgacattttcaataaggaatgcagacagtccctttctcacatgttatctgctaaactagaagaagagaaattatcccaaaagaaagaatctgaaaag

SEQ ID NO: 278989 - DNA, 120 bp, Artificial Sequence
  ENSG00000129083_19 (sequence is synthesized)
aggaatgtgacagtacagcctgatgaccccatttccttcatgcaactaactgctaagaatgaaatgaactgcaaggaagatcagtttcagctgagtttactggcagcaatgggtaacaca

SEQ ID NO: 278990 - DNA, 120 bp, Artificial Sequence
  ENSG00000129083_20 (sequence is synthesized)
cagaggaaagaggcagcagatcccctagcatctaaacttaacaaggtcacccaattgacaggtttctcagatcctgtatatgcagaagcttacgttcatgtcaaccaatatgatattgtc

SEQ ID NO: 278991 - DNA, 120 bp, Artificial Sequence
  ENSG00000129083_21 (sequence is synthesized)
ctggatgtacttgttgtgaaccaaaccagtgatactttgcagaattgcacattagaactagctacactaggggatctgaaacttgtggaaaagccgtctcctttgactcttgctcctcat

SEQ ID NO: 278992 - DNA, 120 bp, Artificial Sequence
  ENSG00000129083_22 (sequence is synthesized)
gacttcgcaaatattaaagctaacgtcaaagtagcatcaacagaaaatggaataatttttggtaatatagtttatgatgtctctggagcagcaagtgacagaaattgtgtggttctcagt

SEQ ID NO: 278993 - DNA, 120 bp, Artificial Sequence
  ENSG00000129083_23 (sequence is synthesized)
gatattcacatcgacatcatggactatatccagcctgcaacttgcactgatgcagaattccgtcagatgtgggccgaatttgaatgggaaaacaaagtgacagttaacaccaacatggtt

SEQ ID NO: 278994 - DNA, 120 bp, Artificial Sequence
  ENSG00000129083_24 (sequence is synthesized)
gatttaaatgactacttacagcacatattaaagtcaaccaatatgaaatgcctgactccagaaaaggccctttctggttactgtggctttatggcagccaacctttatgctcgttccata

SEQ ID NO: 278995 - DNA, 120 bp, Artificial Sequence
  ENSG00000129083_25 (sequence is synthesized)
tttggtgaagatgcacttgcaaatgtcagcattgagaagccaattcaccagggaccagatgctgctgttaccggccatataagaattcgtgcaaagagccagggaatggccttaagtctt

SEQ ID NO: 278996 - DNA, 120 bp, Artificial Sequence
  ENSG00000129083_26 (sequence is synthesized)
ggagataaaatcaacttgtcacagaagaaaactagtatataaaaataaacaaaaagtccttgaagctttacagttaatttaggtatgggcttactggactccaacatcttttgtactctt

SEQ ID NO: 278997 - DNA, 120 bp, Artificial Sequence
  ENSG00000129083_27 (sequence is synthesized)
tcatgcttatatagaatctgagttcatgctgaatacttttcagccaataatttatagcctttcccttaaatcaagattgagtttaaaattatagtttgtcttttgtcttaacagttctga

SEQ ID NO: 278998 - DNA, 120 bp, Artificial Sequence
  ENSG00000129083_28 (sequence is synthesized)
atgctgtcctcaaagtatataatgtttcatgtaccaagacccttttcacagtacaataaacagatctattcataaatttttgttattttataaataaatgattacataattttagttata

SEQ ID NO: 278999 - DNA, 120 bp, Artificial Sequence
  ENSG00000129083_29 (sequence is synthesized)
tgatttccagagataaatgacttgagcaaagacagattatttggtggagaaccaggtggagaaccttgtcacttgggtttgtacttttattaccattgctgatactgaagtaagaagaaa

SEQ ID NO: 279000 - DNA, 120 bp, Artificial Sequence
  ENSG00000129083_30 (sequence is synthesized)
gcctacagaagtaaccagcaatggcagaatctctgagaagtcagtcatgcagtgacaaaagaatgcaagtgggatttgtgtcttttatctgggctctgtatataattataggattctgag

SEQ ID NO: 279001 - DNA, 120 bp, Artificial Sequence
  ENSG00000129083_31 (sequence is synthesized)
aaaatacgtggtttcattgctctgcggcctaatcaaaccctggacaagagaagaggaagaaaataggatatacttgcagcgcgcaagcgctgcacaaagaaagcatgtcctctctgagtc

SEQ ID NO: 279002 - DNA, 120 bp, Artificial Sequence
  ENSG00000129083_32 (sequence is synthesized)
cagaagtggacacagtaatatattactctaaaattgataaagtatcttcctcttctgtttgggctttaaaaaaatgaaaattgacaaagtaatacaataacaatgtcatgtgattattcc

SEQ ID NO: 279003 - DNA, 120 bp, Artificial Sequence
  ENSG00000129083_33 (sequence is synthesized)
agtggaagagaaaggatttatgaagtcacctcagtttgctgggattagttcaggaccagtgaaggaaatgtccttctctccagcatctgcatccattcggtcattgtctgttttatccca

SEQ ID NO: 279004 - DNA, 120 bp, Artificial Sequence
  ENSG00000129083_34 (sequence is synthesized)
gaatgtctcttaagttattctcatctgtagttcatgcctgctttgtagcttctgaccgttctaaccaaacacccatttacaatggtatgcagttggtcctccatattcacagcttctgca

SEQ ID NO: 279005 - DNA, 120 bp, Artificial Sequence
  ENSG00000129083_35 (sequence is synthesized)
cagcacatattaaagtcaaccaatatgaaatgcctgactccagaaaaggtaaaatttgactaggaaattcagaaatctgatggaatggtagagtaggttcctggccttcctgtatttcct

SEQ ID NO: 279006 - DNA, 120 bp, Artificial Sequence
  ENSG00000129083_36 (sequence is synthesized)
ctagcacatttttgttattcaatatgcagtaccattctaggctatctaaaagatgttatcccatagaatgttggaatctgcttacctctttctattggactataccatcctactttttcc

SEQ ID NO: 279007 - DNA, 120 bp, Artificial Sequence
  ENSG00000129083_37 (sequence is synthesized)
cagggaatggccttaagtcttggagataaaatcaacttgtcacagaagaaaactagtatataaaaataaacaaaaagtccttgaagctttacagttaatttagataaggcatggcagtca

SEQ ID NO: 279008 - DNA, 120 bp, Artificial Sequence
  ENSG00000129083_38 (sequence is synthesized)
gccaacagcaggcatcatcagagaacttggaagaggcttggaggcagaaactgaagtgtgatgctgcatatctggaggatgtgaactgtacgtttgcacactgacagtaagttgttgaca

SEQ ID NO: 279009 - DNA, 120 bp, Artificial Sequence
  ENSG00000129083_39 (sequence is synthesized)
tggtgctcccatggcagctaggcccttagcaaaagcaaagagaatatgctctggaaggtgttgggggcgggggtcaagagcactgggaagcagtacctaactgcatgtttgtggccctgg

SEQ ID NO: 279010 - DNA, 120 bp, Artificial Sequence
  ENSG00000129083_40 (sequence is synthesized)
cttctacttagatatctaccagtaactaaggagagtggaatagctttccctttctcagacttaatcttcaatggccagttcacatggcatttccactataaagttcacttaagctctgaa

SEQ ID NO: 279011 - DNA, 120 bp, Artificial Sequence
  ENSG00000129084_0 (sequence is synthesized)
agtatcacccagagtcacggctgttgactcggacgactttagatgcagcccgccagcgggagaaactggagggaatccgccatacacaggaacctagaagggctacgtgacaggggctgc

SEQ ID NO: 279012 - DNA, 120 bp, Artificial Sequence
  ENSG00000129084_1 (sequence is synthesized)
cccgcagctctcagccgccggcactcccagccaggttttcccgccagtctcagttcctagatcttccgaggctccgcccgccgccgagcggtcggaaagttttaaggagggggaagtgtt

SEQ ID NO: 279013 - DNA, 120 bp, Artificial Sequence
  ENSG00000129084_2 (sequence is synthesized)
gcaagcctatcgatatctctggaatagactgcgctaccctgcgccgccgccgtcaaactcccgcagacttctctgtagatcgctgagcgatactttcggcagcacctccttgattctcag

SEQ ID NO: 279014 - DNA, 120 bp, Artificial Sequence
  ENSG00000129084_3 (sequence is synthesized)
ttttgctggaggccgcaaccaggcccgcgccgccaccatgtttcgaaatcagtatgacaatgatgtcactgtttggagcccccagggcaggattcatcaaattgaatatgcaatggaagc

SEQ ID NO: 279015 - DNA, 120 bp, Artificial Sequence
  ENSG00000129084_4 (sequence is synthesized)
tgttaaacaaggttcagccacagttggtctgaaatcaaaaactcatgcagttttggttgcattgaaaagggcgcaatcagagcttgcagctcatcagaaaaaaattctccatgttgacaa

SEQ ID NO: 279016 - DNA, 120 bp, Artificial Sequence
  ENSG00000129084_5 (sequence is synthesized)
ccatattggtatctcaattgcggggcttactgctgatgctagactgttatgtaattttatgcgtcaggagtgtttggattccagatttgtattcgatagaccactgcctgtgtctcgtct

SEQ ID NO: 279017 - DNA, 120 bp, Artificial Sequence
  ENSG00000129084_6 (sequence is synthesized)
ttggtctccttattgctggttatgatgatatgggccctcacattttccaaacctgtccatctgctaactattttgactgcagagccatgtccattggagcccgttcccaatcagctcgta

SEQ ID NO: 279018 - DNA, 120 bp, Artificial Sequence
  ENSG00000129084_7 (sequence is synthesized)
cttacttggagagacatatgtctgaatttatggagtgtaatttaaatgaactagttaaacatggtctgcgtgccttaagagagacgcttcctgcagaacaggacctgactacaaagaatg

SEQ ID NO: 279019 - DNA, 120 bp, Artificial Sequence
  ENSG00000129084_8 (sequence is synthesized)
tttccattggaattgttggtaaagacttggagtttacaatctatgatgatgatgatgtgtctccattcctggaaggtcttgaagaaagaccacagagaaaggcacagcctgctcaacctg

SEQ ID NO: 279020 - DNA, 120 bp, Artificial Sequence
  ENSG00000129084_9 (sequence is synthesized)
ctgatgaacctgcagaaaaggctgatgaaccaatggaacattaagtgataagccagtctatatatgtattatcaaatatgtaagaatacaggcaccacatactgatgacaataatctata

SEQ ID NO: 279021 - DNA, 120 bp, Artificial Sequence
  ENSG00000129084_10 (sequence is synthesized)
ctttgaaccaaaagttgcagagtggtggaatgctatgttttaggaatcagtccagatgtgagttttttccaagcaacctcactgaaacctatataatggaatacatttttctttgaaagg

SEQ ID NO: 279022 - DNA, 120 bp, Artificial Sequence
  ENSG00000129084_11 (sequence is synthesized)
gtctgtataatcattttctagaaagtatgggtatctatactaatgtttttatatgaagaacataggtgtctttgtggttttaaagacaactgtgaaataaaattgtttcaccgcctggta

SEQ ID NO: 279023 - DNA, 120 bp, Artificial Sequence
  ENSG00000129084_12 (sequence is synthesized)
gccgcaaccaggcccgcgccgccaccatgcgtcgcccggtgccacgaggtatgagagcctcggcagacggccgggctccggcagtgattcagcatctccggcctggccgggctaggggtt

SEQ ID NO: 279024 - DNA, 120 bp, Artificial Sequence
  ENSG00000129084_13 (sequence is synthesized)
ggttccttcagtggagtagattctgagcggtccagaatagctcctagtgctgtgtatgggagaggagaagacagagacttgacttggaggcctacctgtaccaccagtgcggacttgacc

SEQ ID NO: 279025 - DNA, 120 bp, Artificial Sequence
  ENSG00000129084_14 (sequence is synthesized)
gtagatcgctgagcgatactttcggcagcacctccttgattctcagttttgctggaggccgcaaccaggcccgcgccgccaccatggtacgttgaatcccgatctctggaaggtttaggg

SEQ ID NO: 279026 - DNA, 120 bp, Artificial Sequence
  ENSG00000129084_15 (sequence is synthesized)
cgcgagccgggaccacgccgacccagcgtgcccaggccgaggaaagcgcggcggcggcagtccgaagacccaccgggactgaaagagaaggacgaggtcatcttcggacgggaggggcaa

SEQ ID NO: 279027 - DNA, 120 bp, Artificial Sequence
  ENSG00000129084_16 (sequence is synthesized)
gccagccatcctgggaccccaggcgtgcaggttctctttgagggtattccaccctgcaaaaagcatgtattcatggtcagctctcagcaaggccagtagcagagtggtaaaggccttggc

SEQ ID NO: 279028 - DNA, 120 bp, Artificial Sequence
  ENSG00000129084_17 (sequence is synthesized)
cctccaaggctgggaaaagacaatgacaagtcaaatccagacctatgttgtatgttggtctactaggtgactgtctcctggaaatgttatgcagctcagcaaggtgaagtttcgaaatca

SEQ ID NO: 279029 - DNA, 89 bp, Artificial Sequence
  ENSG00000129084_18 (sequence is synthesized)
tttatggagtgtaagtgacagccccagtctatatagtaaataaacatagtatcctaaatgcataaaactgtaagtcttatagaaagaat

SEQ ID NO: 279030 - DNA, 120 bp, Artificial Sequence
  ENSG00000129084_19 (sequence is synthesized)
ggtggattatgcaacaattaaagaataagccagagacctttgttaataatgtataatttgaaaataaagacagtacttcattccttgttaaaacaagctcgttaaccagtctaagagacc

SEQ ID NO: 279031 - DNA, 120 bp, Artificial Sequence
  ENSG00000129084_20 (sequence is synthesized)
cagataccaacacaacgatatggccggagaccatatggtgttggtctccttattgctggttatgatgtaagttcattgaatattgttatatgttaatgattttttttaattaactagaaa

SEQ ID NO: 279032 - DNA, 120 bp, Artificial Sequence
  ENSG00000129084_21 (sequence is synthesized)
agtatcctttttatgttagcatttatggatatgaactttgaagggttttgatacttgtgttaattattaggaatataataataatatgacataggtaagattgtgaaaactttaaaacaa

SEQ ID NO: 279033 - DNA, 120 bp, Artificial Sequence
  ENSG00000129084_22 (sequence is synthesized)
caaattggattgctctttcattagcctttataagcaatttatatttgctagacacaaataagcccaacttcaggaaaatcatctaagcatctttttagaggggatttaaagtttcttaat

SEQ ID NO: 279034 - DNA, 120 bp, Artificial Sequence
  ENSG00000129084_23 (sequence is synthesized)
ctagaccccttgtatccaaaacaaatcaggttttagatgggaagaaattattttgctggcactctttcttaggttcggtagaaagtcaaacattttatattaggccaaagaaatagtgtc

SEQ ID NO: 279035 - DNA, 120 bp, Artificial Sequence
  ENSG00000129084_24 (sequence is synthesized)
aggtgaaggtgagaatatctttgctttttgataaaacacagaatgcatagatttcacatctcactatgtgagcccccacaaaacaaaacctagaggagcatgtgagaaaaacgcatctct

SEQ ID NO: 279036 - DNA, 120 bp, Artificial Sequence
  ENSG00000129103_0 (sequence is synthesized)
tgtgcataggggtcgactgccgctgcggtgcatgagggcgcatgcgcagcggggccgtgggtgtacgcggcgcagcgcggcagtcctgatggcccggcatgggttaccgctgctgcccct

SEQ ID NO: 279037 - DNA, 120 bp, Artificial Sequence
  ENSG00000129103_1 (sequence is synthesized)
gctgtcgctcctggtcggcgcgtggctcaagctaggaaatggacaggctactagcatggtccaactgcagggtgggagattcctgatgggaacaaattctccagacagcagagatggtga

SEQ ID NO: 279038 - DNA, 120 bp, Artificial Sequence
  ENSG00000129103_2 (sequence is synthesized)
cgggcctgtgcgggaggcgacagtgaaaccctttgccatcgacatatttcctgtcaccaacaaagatttcagggattttgtcagggagaaaaagtatcggacagaagctgagatgtttgg

SEQ ID NO: 279039 - DNA, 120 bp, Artificial Sequence
  ENSG00000129103_3 (sequence is synthesized)
atggagctttgtctttgaggactttgtctctgatgagctgagaaacaaagccacccagccaatgaagtctgtactctggtggcttccagtggaaaaggcattttggaggcagcctgcagg

SEQ ID NO: 279040 - DNA, 120 bp, Artificial Sequence
  ENSG00000129103_4 (sequence is synthesized)
tcctggctctggcatccgagagagactggagcacccagtgttacacgtgagctggaatgacgcccgtgcctactgtgcttggcggggaaaacgactgcccacggaggaagagtgggagtt

SEQ ID NO: 279041 - DNA, 120 bp, Artificial Sequence
  ENSG00000129103_5 (sequence is synthesized)
tgccgcccgagggggcttgaagggtcaagtttacccatgggggaactggttccagccaaaccgcaccaacctgtggcagggaaagttccccaagggagacaaagctgaggatggcttcca

SEQ ID NO: 279042 - DNA, 120 bp, Artificial Sequence
  ENSG00000129103_6 (sequence is synthesized)
tggagtctccccagtgaatgctttccccgcccagaacaactacgggctctatgacctcctggggaacgtgtgggagtggacagcatcaccgtaccaggctgctgagcaggacatgcgcgt

SEQ ID NO: 279043 - DNA, 120 bp, Artificial Sequence
  ENSG00000129103_7 (sequence is synthesized)
cctccggggggcatcctggatcgacacagctgatggctctgccaatcaccgggcccgggtcaccaccaggatgggcaacactccagattcagcctcagacaacctcggtttccgctgtgc

SEQ ID NO: 279044 - DNA, 120 bp, Artificial Sequence
  ENSG00000129103_8 (sequence is synthesized)
gccggccgccaggggagctgtaagcagccgggtggtgacaaggagaaaagccttctagggtcactgtcattccctggccatgttgcaaacagcgcaattccaagctcgagagcttcagcc

SEQ ID NO: 279045 - DNA, 120 bp, Artificial Sequence
  ENSG00000129103_9 (sequence is synthesized)
tcaggaaagaacttccccttccctgtctcccatccctctgtggcaggcgcctctcaccagggcaggagaggactcagcctcctgtgttttggagaaggggcccaatgtgtgttgacgatg

SEQ ID NO: 279046 - DNA, 120 bp, Artificial Sequence
  ENSG00000129103_10 (sequence is synthesized)
gctgggggccaggtgtttctgttagaggccaagtattattgacacaggattgcaaacacacaaacaattggaacagagcactctgaaaggccattttttaagcattttaaaatctattct

SEQ ID NO: 279047 - DNA, 120 bp, Artificial Sequence
  ENSG00000129103_11 (sequence is synthesized)
ctccccctttctccctggatgattcaggaagctgacattgtttcctcaaggcagaattttcctggttctgttttctcagccagttgctgtggaaggagaatgctttctttgtggcctcat

SEQ ID NO: 279048 - DNA, 120 bp, Artificial Sequence
  ENSG00000129103_12 (sequence is synthesized)
ctgtggtttcgtgtccctctgaaggaaactagtttccactgtgtaacaggcagacatgtaactatttaaagcacagttcagtcctaaaagggtctgggagaaccagatgatgtactaggt

SEQ ID NO: 279049 - DNA, 120 bp, Artificial Sequence
  ENSG00000129103_13 (sequence is synthesized)
agggtctgggagaaccagatgatgtactaggtgaagcattgcattgtgggaatcacaaagcaaatagtactccagaaagacaaatatcagaagcttcctattcttttttttttttttttt

SEQ ID NO: 279050 - DNA, 76 bp, Artificial Sequence
  ENSG00000129103_14 (sequence is synthesized)
gacagggtctttctctgttgcccaggctagagtgcactggtgatcacggctcactctagccttgaattcctgggcc

SEQ ID NO: 279051 - DNA, 120 bp, Artificial Sequence
  ENSG00000129103_15 (sequence is synthesized)
cacctcgcctgggcccccttctccatatgcctccaaaaacatgtccctggagagtagcctgctcccacactgtcactggatgtcatggggccaataaaatctcctgcaattgtgtatctc

SEQ ID NO: 279052 - DNA, 120 bp, Artificial Sequence
  ENSG00000129103_16 (sequence is synthesized)
gcaatggtatgacgcacaaaagcaatcttaaggggaatgaaaactgtccaaaggttcagaaaagtagtgaaggggcctctggaacggccgggaccctcaacgtggttttccttaattccc

SEQ ID NO: 279053 - DNA, 120 bp, Artificial Sequence
  ENSG00000129103_17 (sequence is synthesized)
ccagaaccatgcttaggattacattgccctggagcacatgaggaggccagggccctctaatgcagttcagcgagtggagaggatgggcatggcaaataaaagcaggtcattcactctttt

SEQ ID NO: 279054 - DNA, 120 bp, Artificial Sequence
  ENSG00000129103_18 (sequence is synthesized)
ttctcatcaccctctaacttccttttgattccctcactctttctgtgttcttttttccttccctaattcttcacctccccctcctctgctgcctccttgctctcctcgcaggtcaagttt

SEQ ID NO: 279055 - DNA, 120 bp, Artificial Sequence
  ENSG00000129103_19 (sequence is synthesized)
ccagaccatgctctccccagccctcatgctccctgatcatggccggccctgcggatgaggcaggcaagatgggtaagccctaggcctttttctcaggacgtgtctgtcctctctcccctt

SEQ ID NO: 279056 - DNA, 75 bp, Artificial Sequence
  ENSG00000129103_20 (sequence is synthesized)
acagcctcaaactgccaggctctagcgattcttccacctcagctcctcaagtatctgggactacaggatgggcaa

SEQ ID NO: 279057 - DNA, 120 bp, Artificial Sequence
  ENSG00000129103_21 (sequence is synthesized)
ctccccagtgaatgctttccccgcccagaacaactacggtaagagctgtcttgggcttgcggctgtgcccatgaactggctgttgggaccatcatgtctgagagaggaggcagagggaag

SEQ ID NO: 279058 - DNA, 120 bp, Artificial Sequence
  ENSG00000129103_22 (sequence is synthesized)
cagcctcctctctacccctcgtacatccaggaacactgagtttcaaagaaggataggggaatatcagggaaagcgctcagcaggcctgtttcacctgcccgaatcctgtttcctgttacc

SEQ ID NO: 279059 - DNA, 120 bp, Artificial Sequence
  ENSG00000129103_23 (sequence is synthesized)
ctggtcttgcagctgaggggataggagtgggacctggacagggaatcctgtgggacatgggttacctgggacacagtggagaatcagacctgagaggtggaggcagaggggaagcaagag

SEQ ID NO: 279060 - DNA, 120 bp, Artificial Sequence
  ENSG00000129103_24 (sequence is synthesized)
ccaagtcaggataggatccaaggaacttgaatcaagagatcaccttggtgggccgagcgtggtgtctcatgcctataatctcagcactttgagaggctgaggtgagtggatcacctgagg

SEQ ID NO: 279061 - DNA, 79 bp, Artificial Sequence
  ENSG00000129103_25 (sequence is synthesized)
gaggtcaggagttcaagaccaacaggcatggtggcacgctcctgtaatctgagctactcaggaggctgaggcatgagaa

SEQ ID NO: 279062 - DNA, 120 bp, Artificial Sequence
  ENSG00000129103_26 (sequence is synthesized)
gtgacagagtgagactgtgtctcaaaagaaaaaaaaaaagagagatcaccttggcaagccaacctctaataagggtggtaagatgggctctataaagattccagtctcagctgggcgcag

SEQ ID NO: 279063 - DNA, 77 bp, Artificial Sequence
  ENSG00000129103_27 (sequence is synthesized)
agccaacctctaataagggtggtaagatgggctctataaagattccagtctcagctgggcgcagcacaattgcttga

SEQ ID NO: 279064 - DNA, 82 bp, Artificial Sequence
  ENSG00000129103_28 (sequence is synthesized)
aagaattcaagaccagcctgggcaacatagatcccatatctacaaaaaaaagaaaaaaaagaaaattagctgggcatggtca

SEQ ID NO: 279065 - DNA, 120 bp, Artificial Sequence
  ENSG00000129116_0 (sequence is synthesized)
gtgaccacggaccaggcagtctctaatgaataggcaaggccacaacctccattctcccagaaaagaagaaatgctcatctgaaattcatcacctctctggagtcttcaaactgaccaagc

SEQ ID NO: 279066 - DNA, 120 bp, Artificial Sequence
  ENSG00000129116_1 (sequence is synthesized)
attgaaaagaacacagtttcagaaaacagtttccagtgcctctggccttcctactgaaagcagacacagagtgcatgaagaccgttcaaatatgtcagggacctcctcccatgagtcctt

SEQ ID NO: 279067 - DNA, 120 bp, Artificial Sequence
  ENSG00000129116_2 (sequence is synthesized)
ctatgactccctctcagacatgcaggaagaaagcaagaatactgacttcttcccgggcctttctgctttcctcagccaggaagagataaacaagagtcttgacctggcccggagagccat

SEQ ID NO: 279068 - DNA, 120 bp, Artificial Sequence
  ENSG00000129116_3 (sequence is synthesized)
agccgactccgaaacagaagattttgactcggaaaaggagatctcgcagattttcagtacttctcctgcaagcctctgtgaacatccttcccataaggagaccaaattgggtgaacacgc

SEQ ID NO: 279069 - DNA, 120 bp, Artificial Sequence
  ENSG00000129116_4 (sequence is synthesized)
ctcgaggagacctcaggataacaggtcaacacctgtccagcctctggcagagaaacaaactaagagtatctcttcacctgtttcaaagaggaaacctgccatgtcacccctgctcaccag

SEQ ID NO: 279070 - DNA, 120 bp, Artificial Sequence
  ENSG00000129116_5 (sequence is synthesized)
gcccagctacatccggagcctccgaaaggctgaaaagcgtggtgcaaaaactcccagcacaaacgtaaagcccaaaacgccacatcaaagaaagggtggcccccagagccagctgtgtga

SEQ ID NO: 279071 - DNA, 120 bp, Artificial Sequence
  ENSG00000129116_6 (sequence is synthesized)
caaggcagctaatttaattgaggagctaacatccatatttaaagccgcaaagccaagaaacagaagcccaaatggggagtcctcgtcaccagacagtgggtacctgtctcctaaaaatca

SEQ ID NO: 279072 - DNA, 120 bp, Artificial Sequence
  ENSG00000129116_7 (sequence is synthesized)
gccgtcagccctgctgagtgcctcagccagccagagccctatggaagaccaaggggagatggaaagagaggtcaagtcccctggggccaggcattgctaccaggacaaccaggacttggc

SEQ ID NO: 279073 - DNA, 120 bp, Artificial Sequence
  ENSG00000129116_8 (sequence is synthesized)
agtgccacacaaccgcaagtctcacccacagccccacagcgccctccacttcccagctgcacctcgattcatccaaaagctgaggagccaagaagtagcagaagggagccgagtttatct

SEQ ID NO: 279074 - DNA, 120 bp, Artificial Sequence
  ENSG00000129116_9 (sequence is synthesized)
ggagtgtagagtcactggaaaccccactcctcgagtcagatggttctgtgaagggaaagaactgcacaacactcctgatattcaaatccactgtgagggaggggacctccataccctgat

SEQ ID NO: 279075 - DNA, 120 bp, Artificial Sequence
  ENSG00000129116_10 (sequence is synthesized)
catagcagaggcctttgaggacgacacaggtcgctacacctgtttggctacgaatcccagcggctcagacacaacatctgctgaggtgttcattgaaggtgccagttcaacagattctga

SEQ ID NO: 279076 - DNA, 120 bp, Artificial Sequence
  ENSG00000129116_11 (sequence is synthesized)
cagtgaaagtttagctttcaaatcaagagctggagctatgccacaagctcaaaagaaaacaacttctgtttccttgacaataggatcatcatctccaaagacaggggtgaccacagctgt

SEQ ID NO: 279077 - DNA, 120 bp, Artificial Sequence
  ENSG00000129116_12 (sequence is synthesized)
gattcaaccactgtctgtccctgtgcaacaggttcacagtccaacttcatatctctgccgacctgatggaaccactactgcctactttcctcctgtttttacaaaggaactgcaaaacac

SEQ ID NO: 279078 - DNA, 120 bp, Artificial Sequence
  ENSG00000129116_13 (sequence is synthesized)
agccgtggcggaaggccaggtggtggttctggagtgccgggtccgtggggcaccccctctgcaggtccagtggtttcggcaagggagtgaaatccaagactctccagatttccgaattct

SEQ ID NO: 279079 - DNA, 120 bp, Artificial Sequence
  ENSG00000129116_14 (sequence is synthesized)
acagaaaaaacctagatctacagctgaacctgaggagatttgcaccctagttatcgctgagactttccctgaagatgcagggatctttacatgttcagcaagaaatgattatggatcagc

SEQ ID NO: 279080 - DNA, 120 bp, Artificial Sequence
  ENSG00000129116_15 (sequence is synthesized)
aaccagcactgcccagctggttgtcacctcagccaacactgaaaactgtagttacgagtcaatgggagaatccaacaatgaccacttccaacactttccacctccccctccaatcttgga

SEQ ID NO: 279081 - DNA, 120 bp, Artificial Sequence
  ENSG00000129116_16 (sequence is synthesized)
gacaagttccttggagttggcttcaaagaaaccatctgagatccagcaggtgaacaaccctgagttaggcctgagcagggcagcccttcaaatgcaattcaatgctgctgagagggaaac

SEQ ID NO: 279082 - DNA, 120 bp, Artificial Sequence
  ENSG00000129116_17 (sequence is synthesized)
gaacggagtccatcccagccgtggagtaaatggactgattaacggcaaagctaacagtaataaatctcttccaacaccagctgtcctgctttcacccactaaggagccaccacctctgct

SEQ ID NO: 279083 - DNA, 120 bp, Artificial Sequence
  ENSG00000129116_18 (sequence is synthesized)
tgccaaaccaaaactaggatttccaaagaaggccagtagaactgctagaatagcctccgatgaggaaattcaaggcacaaaggatgctgttattcaagacctggaacgaaaacttcgctt

SEQ ID NO: 279084 - DNA, 120 bp, Artificial Sequence
  ENSG00000129116_19 (sequence is synthesized)
caaggaggacctcctgaacaatggccagccgaggttaacatacgaagaaagaatggctcgtcgactgctaggtgctgacagtgcaactgtctttaatattcaggagccagaagaggaaac

SEQ ID NO: 279085 - DNA, 120 bp, Artificial Sequence
  ENSG00000129116_20 (sequence is synthesized)
agctaatcaggaatacaaagtctccagctgtgaacagagactcatcagtgaaatagagtacaggctagaaaggtctcctgtggatgaatcaggtgatgaagttcagtatggagatgtgcc

SEQ ID NO: 279086 - DNA, 120 bp, Artificial Sequence
  ENSG00000129116_21 (sequence is synthesized)
tgtggaaaatggaatggcaccattctttgagatgaagctgaaacattacaagatctttgagggaatgccagtaactttcacatgtagagtggctggaaatccaaagccaaagatctattg

SEQ ID NO: 279087 - DNA, 120 bp, Artificial Sequence
  ENSG00000129116_22 (sequence is synthesized)
gtttaaagatgggaagcagatctctccaaagagtgatcactacaccattcaaagagatctcgatgggacctgctccctccataccacagcctccaccctagatgatgatgggaattatac

SEQ ID NO: 279088 - DNA, 120 bp, Artificial Sequence
  ENSG00000129116_23 (sequence is synthesized)
aattatggctgcaaaccctcagggccgcatcagttgtactggacggctaatggtacaggctgtcaaccaaagaggtcgaagtccccggtctccctcaggccatcctcatgtcagaaggcc

SEQ ID NO: 279089 - DNA, 120 bp, Artificial Sequence
  ENSG00000129116_24 (sequence is synthesized)
cgattcttcagacctcacttcttgcaggctcctggagatctgactgttcaagaaggaaaactctgcagaatggactgcaaagtcagtgggttaccaaccccagatctaagctggcaacta

SEQ ID NO: 279090 - DNA, 120 bp, Artificial Sequence
  ENSG00000129116_25 (sequence is synthesized)
gatggaaagcccgtacgccctgacagtgctcacaagatgctggtgcgtgagaacggggtgcactctctgatcatagagccagtcacgtcacgtgatgccggcatctacacatgtatagct

SEQ ID NO: 279091 - DNA, 120 bp, Artificial Sequence
  ENSG00000129116_26 (sequence is synthesized)
accaaccgagcaggacagaactcattcagcctggagcttgtggttgctgctaaagaagcacacaaaccccctgtgtttattgagaagctccaaaacacaggagttgctgatgggtaccca

SEQ ID NO: 279092 - DNA, 120 bp, Artificial Sequence
  ENSG00000129116_27 (sequence is synthesized)
gtgcggctggaatgtcgtgtattgggagtgccaccacctcagatattttggaagaaagaaaatgaatcactcactcacagcactgaccgagtgagcatgcaccaggacaaccacggctac

SEQ ID NO: 279093 - DNA, 120 bp, Artificial Sequence
  ENSG00000129116_28 (sequence is synthesized)
atctgcctgctcattcagggagccacaaaagaagatgctgggtggtatactgtgtcagccaagaatgaagcagggattgtgtcctgtactgccaggctggacgtttacatttctcgacat

SEQ ID NO: 279094 - DNA, 120 bp, Artificial Sequence
  ENSG00000129116_29 (sequence is synthesized)
taatagtgaaccacaccaggagaacaaatacccaacccagtggcatcagcagtcacagagcaccaagccaaaaaaagtacggccctcagccagtcgctatgcagcactttcggaccaggg

SEQ ID NO: 279095 - DNA, 120 bp, Artificial Sequence
  ENSG00000129116_30 (sequence is synthesized)
actagacatcaaagcagcgttccaacctgaggccaacccatctcacctgacactgaatactgccttggtagaaagtgaggacctgtaatccagcattcttgttaaagctgaaacactgaa

SEQ ID NO: 279096 - DNA, 120 bp, Artificial Sequence
  ENSG00000129116_31 (sequence is synthesized)
acagccattgccttgaccaacatattcctttgtcacattatgtaaaaggcagaaacatacctttgactataagaaattaaaaaaaaaacaccaaaataatatttttcttacttgatatac

SEQ ID NO: 279097 - DNA, 120 bp, Artificial Sequence
  ENSG00000129116_32 (sequence is synthesized)
caaacttagtttaagtagataatgctaatacaaatatacacattgcacagaaaatacacatttactgtccaatttaaaactttggaattgctgtgattaaagtgatcaaaatgccaaaat

SEQ ID NO: 279098 - DNA, 120 bp, Artificial Sequence
  ENSG00000129116_33 (sequence is synthesized)
actaaaggaaatcaattgttcacaggtaactacaatttgtattatctacaagtgcctttaaacacaagatataggtgctgtgtagcctgatagtgtgaaatgtttaatgagggagttgta

SEQ ID NO: 279099 - DNA, 120 bp, Artificial Sequence
  ENSG00000129116_34 (sequence is synthesized)
ccacaaacagtactacaatgattctgaagcacagtgtattcagacagatacagtgaaccaagtgcaatatgtaaggatgaaagaagaagagatgacaaagaaatccaagtaaatgccttg

SEQ ID NO: 279100 - DNA, 120 bp, Artificial Sequence
  ENSG00000129116_35 (sequence is synthesized)
tctttgcaaatgtttttatattaaatcataaggaaggaactacttgccttaaatgttaatatcaaaagagttttctaacaaggttaataccttagttcttaacattttttttctttatgt

SEQ ID NO: 279101 - DNA, 120 bp, Artificial Sequence
  ENSG00000129116_36 (sequence is synthesized)
gtagtgttttcatgctaccttggtaggaaacttatttacaaaccatattaaaaggctaatttaaatataaataatataaagtgctctgaataaagcagaaatatattacagttcattcca

SEQ ID NO: 279102 - DNA, 120 bp, Artificial Sequence
  ENSG00000129116_37 (sequence is synthesized)
cagaaagcatccaaaccacccaaatgaccaaggcatatatagtatttggaggaatcaggggtttggaaggagtagggaggagaatgaaggaaaatgcaaccagcatgattatagtgtgtt

SEQ ID NO: 279103 - DNA, 120 bp, Artificial Sequence
  ENSG00000129116_38 (sequence is synthesized)
catttagataaaagtagaaggcacaggagaggtagcaaaggccaggcttttctttggttttcttcaaacataggtgaaaaaaacactgccattcacaagtcaaggaacccagggccagct

SEQ ID NO: 279104 - DNA, 120 bp, Artificial Sequence
  ENSG00000129116_39 (sequence is synthesized)
ggaagtgtggagcacacatgctgtggagcacacatgctgtggagattgcagtgtgtctgaggtttgtgtagtagtggaagattttaggtatgtagagcaagttgaaaatggattgagact

SEQ ID NO: 279105 - DNA, 120 bp, Artificial Sequence
  ENSG00000129116_40 (sequence is synthesized)
gcatggtggcataaatgagaaattgcctgtagcatctagtctacttgaaggaagtggagacataaggagagacaaaaacaggtttgtgccataaagtattttttcaaagacaccaagatg

SEQ ID NO: 279106 - DNA, 120 bp, Artificial Sequence
  ENSG00000129116_41 (sequence is synthesized)
tggtaaatgaaaattattagttcacttccctgctgccatgaaactttgccttaagaaggtgctggattccaaggtttgtaaaggcatctcggtaaagactgctttttgaatgcatatgat

SEQ ID NO: 279107 - DNA, 120 bp, Artificial Sequence
  ENSG00000129116_42 (sequence is synthesized)
tttgcatcagctagactgagttgattctgaccagacttgatggttttaagtcggaaccgataaattttaaaaaggagaaaaaataatttgacctagtagtataaaacatgaggctttaat

SEQ ID NO: 279108 - DNA, 120 bp, Artificial Sequence
  ENSG00000129116_43 (sequence is synthesized)
ggtactttgctatgaaaagaaaacactgtattccttatgcaaaacacatgtatctttcattatttataagtggcctctcttagctcagttactcaattcatacgtagtattttttaaaat

SEQ ID NO: 279109 - DNA, 120 bp, Artificial Sequence
  ENSG00000129116_44 (sequence is synthesized)
aattttatatctgtgtaccaccccatatatttcatattactgtttcacatgtacagctttctacttctttgtaagaacaccaaccaaccaaggtttaagtgattaataggcttgagcacc

SEQ ID NO: 279110 - DNA, 120 bp, Artificial Sequence
  ENSG00000129116_45 (sequence is synthesized)
gggtggcagatgttctatgcagtgtggttcaagtttctttgaccgcacttatatgcattgctaatatggaatttaagataccatacacagtctctcatggacctatctctattgtagaat

SEQ ID NO: 279111 - DNA, 120 bp, Artificial Sequence
  ENSG00000129116_46 (sequence is synthesized)
tatgacttatgtcttacttgccaaatttttctgaatgtgacctttttttgctgatttgctgggtttgggattaactagcattattttgccacctttatattgtatttataaaaaaaaaag

SEQ ID NO: 279112 - DNA, 120 bp, Artificial Sequence
  ENSG00000129116_47 (sequence is synthesized)
tactatcaatcaatcatactactttggattgttgtgctggtgtaatgtggatttaacatcaataaatatttgacaaataatagttgcagttttgtgaagcaaaataaatattcagtttta

SEQ ID NO: 279113 - DNA, 120 bp, Artificial Sequence
  ENSG00000129116_48 (sequence is synthesized)
gcattcgcgcgctggagaccggcggcctctcaccgagcctgagtcgtggccgctgcgccgccaggaggcttcccgggagccggcggggcccaggacctctcgagcgcagcagcgtcccag

SEQ ID NO: 279114 - DNA, 120 bp, Artificial Sequence
  ENSG00000129116_49 (sequence is synthesized)
tcctgcctgtgtttcgagatttgcctcccgttactgcccccagcctgctgctcctctctccttgcacgatctgcgcctcgtccccagacaagctttaccacttcccagttctctttcttc

SEQ ID NO: 279115 - DNA, 120 bp, Artificial Sequence
  ENSG00000129116_50 (sequence is synthesized)
aggctcggagcctcctgagtcacccggcgggcgaggtataaagcccgatacctgccccgcgcccggtccgcggagcccgctgcagctcccgctcgctccggacgcggaatcgggcagcag

SEQ ID NO: 279116 - DNA, 120 bp, Artificial Sequence
  ENSG00000129116_51 (sequence is synthesized)
cgggaggcggcccggagagccgagggaccctctgaagctccagcaactccagaaccaaatccgactggagcaggaggccggcgctcggcagcctccgccagccccgcgcagcgcgccgcc

SEQ ID NO: 279117 - DNA, 120 bp, Artificial Sequence
  ENSG00000129116_52 (sequence is synthesized)
ccgccgcccgccttccccgagctcgcggcctgcacgccgcccgcgtccccggagcccatgagcgcgctggcctcccgctccgcccccgccatgcagtcctccggctccttcaactacgcg

SEQ ID NO: 279118 - DNA, 120 bp, Artificial Sequence
  ENSG00000129116_53 (sequence is synthesized)
ctccttcaactacgcgcgccccaagcagttcatcgccgcgcagaacctcgggcccgcgtcgggccacggcacgccggcctccagccccagctcgtccagcctcccgtcgcccatgtcccc

SEQ ID NO: 279119 - DNA, 120 bp, Artificial Sequence
  ENSG00000129116_54 (sequence is synthesized)
agctcgtccagcctcccgtcgcccatgtccccgacgccgaggcagttcggccgcgcccccgtgccgcccttcgcgcagcccttcggcgctgagcccgaggccccgtggggctcctcctcg

SEQ ID NO: 279120 - DNA, 120 bp, Artificial Sequence
  ENSG00000129116_55 (sequence is synthesized)
cagccccacggctgccttcccggtgcccgacgtgttcccactgccgccgccaccaccgccgctcccgagcccgggacaggcgtcccactgctcgtcgcctgccacccgcttcggccacag

SEQ ID NO: 279121 - DNA, 120 bp, Artificial Sequence
  ENSG00000129116_56 (sequence is synthesized)
ctattattcttttactattttttctattaccattttttctagtaccattttttctattattcttttactataattgtatataatatggcagctgcttgccacatgtactatgtggagaga

SEQ ID NO: 279122 - DNA, 120 bp, Artificial Sequence
  ENSG00000129116_57 (sequence is synthesized)
tgtaccaccctgcatcagcttttaccctacagaaggaaatcagcgttccattatattttattgttatcaacagtttaggaatacatagctttgcttttgcctttttctttccttcccctt

SEQ ID NO: 279123 - DNA, 120 bp, Artificial Sequence
  ENSG00000129116_58 (sequence is synthesized)
gtttcccctcgcctcagagaaaagaaggaaaaaaaaattcatctttcctacccccctctttttggatgataggacttgaagacaatctgaaataccacataaactcacttccagatgttt

SEQ ID NO: 279124 - DNA, 120 bp, Artificial Sequence
  ENSG00000129116_59 (sequence is synthesized)
tttgtttcatatgcaattgaattgggctcagactgtgtttttaagctgtatggtaaaaatatcactgtcttctagggccttattggggggcagggagagacgtgacactttgtcagaagg

SEQ ID NO: 279125 - DNA, 120 bp, Artificial Sequence
  ENSG00000129116_60 (sequence is synthesized)
cccaagtatcattcaggaactttgaattattagcaaaatatgcatgttgatttctcttacattggctagttagttgtggcttccttactcaagcatccttaggagttaacagtaggcaaa

SEQ ID NO: 279126 - DNA, 120 bp, Artificial Sequence
  ENSG00000129116_61 (sequence is synthesized)
agaaaagaagaaatgctcatctgaaattcatcacctctctggagtcttcaaactgaccaagcattgaaaagctctcacttcagagtccaagaaggacacatctaatcgctgtctaggcca

SEQ ID NO: 279127 - DNA, 120 bp, Artificial Sequence
  ENSG00000129116_62 (sequence is synthesized)
agtgccaagacttgtgcccagtctccaagcggctgggaaagaaaatacttggagatttcacatcccattacaagtgagttcagtttctcactgagcctcagaatatgaggaattctccaa

SEQ ID NO: 279128 - DNA, 120 bp, Artificial Sequence
  ENSG00000129116_63 (sequence is synthesized)
ctcaggtaaagaagggtataggtctgggctcagttctgtgtctagtgcttacaggcatttgattagacaaaggaactatttaaaaggtgaagttaagaagtttctttgatttatgaaact

SEQ ID NO: 279129 - DNA, 120 bp, Artificial Sequence
  ENSG00000129116_64 (sequence is synthesized)
atttttccaaattctacatccatcttggtttcagaggatagaaaaattctttgtttcatgaatacttatttattccatcaggtgttattctactccttccacaaatattattaagggtct

SEQ ID NO: 279130 - DNA, 120 bp, Artificial Sequence
  ENSG00000129116_65 (sequence is synthesized)
aatatgtacacactttctatgtgggtgatggggttgcagtggtagactggacaaagtcctatggtaaaaaataagcaattaacaaataatataacttcaggtaggattacatgaagaaaa

SEQ ID NO: 279131 - DNA, 120 bp, Artificial Sequence
  ENSG00000129116_66 (sequence is synthesized)
aaattcagtattacaacctggctcatctcatttcctcatggctttcttcatttttataatgtcagaaccatacaagctatgatgcttctttctctcaacaaaatgtgagcctcttgtcac

SEQ ID NO: 279132 - DNA, 120 bp, Artificial Sequence
  ENSG00000129116_67 (sequence is synthesized)
tgttggatgaacttttctttgagaagaaaagctgaggaacctgtgggacattgtattcaaattttatctagttaaaaaaaaattatctagcaaaaattgctgtgacatttcaatgcatga

SEQ ID NO: 279133 - DNA, 120 bp, Artificial Sequence
  ENSG00000129116_68 (sequence is synthesized)
ggatcactaaaagaacatcctagtgtttattttttatttttctatttttgttctttaattctgtaatttttctaaatgttccacgtgaactatatacaggcatataccttatttatgcat

SEQ ID NO: 279134 - DNA, 120 bp, Artificial Sequence
  ENSG00000129116_69 (sequence is synthesized)
ggaagtattcctataaaatcatacacaatgaattctgctcaatcaactttgaaacacacaaaggaagcttgtaggaaaattggtcttactgagaattcctttagaaaatagtctttttac

SEQ ID NO: 279135 - DNA, 120 bp, Artificial Sequence
  ENSG00000129116_70 (sequence is synthesized)
aaagcaagtgtttttttccttcatctaaatttcatgcatgcatttatttaaacataattatagggagcctaccatgtgtgagatgctaagaatatggccatgaacaaaaattgtttctgc

SEQ ID NO: 279136 - DNA, 120 bp, Artificial Sequence
  ENSG00000129116_71 (sequence is synthesized)
aattgtttctgcactcagaggttatatttcagcgaaccagaaactaacaaactaattacacaataaattatttagcagggtgaggtggcacatagtcccagctacccaggaggctgaggc

SEQ ID NO: 279137 - DNA, 120 bp, Artificial Sequence
  ENSG00000129116_72 (sequence is synthesized)
tatgcaggtatctgaagctggagagagaacacttacagaaaatcatgaaagtgtgttgttttttactctttttcatagggcagtacatatttgtgatttttttctaattttgtatttttt

SEQ ID NO: 279138 - DNA, 120 bp, Artificial Sequence
  ENSG00000129116_73 (sequence is synthesized)
attttgttttcttcataacatttccctgtctgaaattattttattcatgtggtatcatttaagtgcttattatctctctcaccctgctcccatcaccactggagtaaaagctatggttct

SEQ ID NO: 279139 - DNA, 120 bp, Artificial Sequence
  ENSG00000129116_74 (sequence is synthesized)
ctttcagtcagtattagagctgacttgggtgttctgaagctgatggatggctataaaaataacatttcttttaaattgtattttgctgtttaaatatctttttttccatgtttttcatta

SEQ ID NO: 279140 - DNA, 120 bp, Artificial Sequence
  ENSG00000129116_75 (sequence is synthesized)
aggacatgacaaatcttttctgtgtggtttcttccttgtcgcttattgctcactttaaatttgtgctgtaccaattggtggctctctggattaggccattagtactagaaagggaggtaa

SEQ ID NO: 279141 - DNA, 120 bp, Artificial Sequence
  ENSG00000129116_76 (sequence is synthesized)
attcgcgcgctggagaccggcggcctctcaccgagcctgagtcgtggccgctgcgccgccaggaggcttcccgggagccggcggggcccaggacctctcgagcgcagcaggcaaggggcc

SEQ ID NO: 279142 - DNA, 120 bp, Artificial Sequence
  ENSG00000129116_77 (sequence is synthesized)
ggccttttggcagcgcggctgccagttaattttctccgttgcattctgcaaacgagatcgcattcagagcccagaagttgcaagctgggaataagcgagatctgaaagacccccaagagg

SEQ ID NO: 279143 - DNA, 120 bp, Artificial Sequence
  ENSG00000129116_78 (sequence is synthesized)
agctctgcataaccaggctctcaggggaagcagtggaggcagccttcttggacaacagctcacttgtctacacagtcaaaaatggttctgtgaagggaaagaactgcacaacactcctga

SEQ ID NO: 279144 - DNA, 120 bp, Artificial Sequence
  ENSG00000129116_79 (sequence is synthesized)
gaaaatatctgtgcccagtgtgggcttccaacatacagctaaggatgtagccactccctggaggccatggaaaagggggatctactttcagccctttattaaaagcatttcaaaaaagga

SEQ ID NO: 279145 - DNA, 120 bp, Artificial Sequence
  ENSG00000129128_0 (sequence is synthesized)
gctcccggaacgcgcgcaccgcagacggcgcggatcgcagggagccggtccgccgccggaacgggagcctgggtgtgcgtgtggagtccggactcgtgggagacgatcgcgatgaacacg

SEQ ID NO: 279146 - DNA, 120 bp, Artificial Sequence
  ENSG00000129128_1 (sequence is synthesized)
gtgctgtcgcgggcgaactcactgttcgccttctcgctgagcgtgatggcggcgctcaccttcggctgcttcatcaccaccgccttcaaagacaggagcgtcccggtgcggctgcacgtc

SEQ ID NO: 279147 - DNA, 120 bp, Artificial Sequence
  ENSG00000129128_2 (sequence is synthesized)
tcgcggatcatgctaaaaaatgtagaagatttcactggacctagagaaagaagtgatctgggatttatcacatttgatataactgctgatctagagaatatatttgattggaatgttaag

SEQ ID NO: 279148 - DNA, 120 bp, Artificial Sequence
  ENSG00000129128_3 (sequence is synthesized)
cagttgtttctttatttatcagcagaatattcaacaaaaaataatgctctgaaccaagttgtcctatgggacaagattgttttgagaggtgataatccgaagctgctgctgaaagatatg

SEQ ID NO: 279149 - DNA, 120 bp, Artificial Sequence
  ENSG00000129128_4 (sequence is synthesized)
aaaacaaaatattttttctttgacgatggaaatggtctcaagggaaacaggaatgtcactttgaccctgtcttggaacgtcgtaccaaatgctggaattctacctcttgtgacaggatca

SEQ ID NO: 279150 - DNA, 120 bp, Artificial Sequence
  ENSG00000129128_5 (sequence is synthesized)
ggacacgtatctgtcccatttccagatacatatgaaataacgaagagttattaaattattctgaatttgaaacaacatatttttatacttaatgaattgtatctcattaatctcttccct

SEQ ID NO: 279151 - DNA, 120 bp, Artificial Sequence
  ENSG00000129128_6 (sequence is synthesized)
gttttgggtttttttttttttttttttggtataagaactaacatcaaaaggcctgtttaaagggaaaggttaatgggctacttaatattatgaacaaaacaaaaaaacaaggctgccaca

SEQ ID NO: 279152 - DNA, 120 bp, Artificial Sequence
  ENSG00000129128_7 (sequence is synthesized)
tatgaacaaaacaaaaaaacaaggctgccacagtggaatattatcttacaagaataagaactacataaaacagatttgtaaaaaatacatatttgaagtattccctgtatttccattatt

SEQ ID NO: 279153 - DNA, 120 bp, Artificial Sequence
  ENSG00000129128_8 (sequence is synthesized)
ctttatggaatataaagtaagcatgaaaggtagttaaaactttcaggtgcctgtagagtcataataactgtattttatgccttgcattcacgcaaattcacattggatgtgatttaaaag

SEQ ID NO: 279154 - DNA, 120 bp, Artificial Sequence
  ENSG00000129128_9 (sequence is synthesized)
tagacattctctttttcctcttttaggatatgtttgattactggaaaattaatatggttatttgttagaagtctggtttataaaaaagccaaaagtgatggaatttattccatttgtctt

SEQ ID NO: 279155 - DNA, 120 bp, Artificial Sequence
  ENSG00000129128_10 (sequence is synthesized)
aggaaggcccataatacttgtttttcttacatgtgactagcaactttctccacttaaagactaaatacctctttatatgatgtaaattattctaattcattttaaaatcttttaggtcag

SEQ ID NO: 279156 - DNA, 120 bp, Artificial Sequence
  ENSG00000129128_11 (sequence is synthesized)
caaaatgtgtgtcttcagtgctttctctaaaaacgttcctttatagctttgtacttttttttttagcgttgccattgaaagttaaaatgtttgcatggtttaccctctgagttatgtttc

SEQ ID NO: 279157 - DNA, 120 bp, Artificial Sequence
  ENSG00000129128_12 (sequence is synthesized)
ttctagtgagcatgcctgctgtcactaagtgaattatttactactttttgtaggtctatattttaataattattgggataataataattgtggtatgctttccatttacaaaccactcat

SEQ ID NO: 279158 - DNA, 120 bp, Artificial Sequence
  ENSG00000129128_13 (sequence is synthesized)
atactttagtgtatgtcatcctcaataatctaatgaggtaagtagtataagtgttagctctttgcagataagaaactgaaacccagaagtttattgaattgcttcattgttacctagcca

SEQ ID NO: 279159 - DNA, 120 bp, Artificial Sequence
  ENSG00000129128_14 (sequence is synthesized)
gcaaggagtggaattaaaacttgaactcagatcttctaattttctgagctcatcctttctcttatacctcagattgcagactaatcaaattttacttaaaaccttcctgatatttttgtt

SEQ ID NO: 279160 - DNA, 120 bp, Artificial Sequence
  ENSG00000129128_15 (sequence is synthesized)
accctggacaccctttctattctagaaaaggtttcccattttatatggaagtgactaattttcaagctgccaacaacttatatcgaggtaatattttattctctgaataaattcatttca

SEQ ID NO: 279161 - DNA, 120 bp, Artificial Sequence
  ENSG00000129128_16 (sequence is synthesized)
cttatattaaaagcataaggaaatctacatgtatgtaaaaataacttagaaattcagtacataatacatgattgaatacatgatcgtatttaacatgttttttttttctgcagtggacaa

SEQ ID NO: 279162 - DNA, 120 bp, Artificial Sequence
  ENSG00000129128_17 (sequence is synthesized)
ataaacatcctcaaagtagcaactgcaaatcagttacccttagaaaagcaagaccaaacactgtagttacactattagcagtgaccaaaaagggctaatattttctaagaatagtttaaa

SEQ ID NO: 279163 - DNA, 120 bp, Artificial Sequence
  ENSG00000129128_18 (sequence is synthesized)
ttacagacatttgttatatttaccttatgtgaaatacatcactatttaattacattaattttaacatctgttgtgtggagttgtatagttcatgcaaaagcctgtgggtatgggtttttc

SEQ ID NO: 279164 - DNA, 120 bp, Artificial Sequence
  ENSG00000129128_19 (sequence is synthesized)
gaaaggtcaaaggtacctgaatgctaaactgcctggctcccagctttttcattaaacttttcagggtcttggtttctttatctgtaaaatgacagagttggaccagttaactttaatggc

SEQ ID NO: 279165 - DNA, 120 bp, Artificial Sequence
  ENSG00000129128_20 (sequence is synthesized)
catccttttacaccacacaagttgataaaatttatctgttcagcaaagagattgaacaaaaaagcacgttagtaatatgaagacaggaaaacgaatgaaagtctaacacataactcatat

SEQ ID NO: 279166 - DNA, 120 bp, Artificial Sequence
  ENSG00000129128_21 (sequence is synthesized)
tgatttactttatttctgttagattttacactctgaaaatttcacctcatttagtttgtacaaatactagacatggaaacttaaaatgtgcaggtgtcaaagcttaaaaatcaggtgtgt

SEQ ID NO: 279167 - DNA, 120 bp, Artificial Sequence
  ENSG00000129128_22 (sequence is synthesized)
cctctttaaaggcatgtgcgataagcctgcagtcttaaccagacctggtaccagtttaacagttcatgatacttctgtgatgagtggatctgttagtctggtagagattaatgttgaaat

SEQ ID NO: 279168 - DNA, 120 bp, Artificial Sequence
  ENSG00000129128_23 (sequence is synthesized)
ttacttgaattacagttatttgacaagcccactttttttggagtttggtgaggaagataagtaaaaatgcccaactagtacaatgtggagaaagttttctgtttgcttgactaagggaaa

SEQ ID NO: 279169 - DNA, 120 bp, Artificial Sequence
  ENSG00000129128_24 (sequence is synthesized)
ttgctcagaaaaagaatgctccaacatgggaataaggaccttcagtctcaggaactcatttttgggtgcagtttctacatttaaaaaattgacttgtgttcagtttgataaccagttcat

SEQ ID NO: 279170 - DNA, 120 bp, Artificial Sequence
  ENSG00000129128_25 (sequence is synthesized)
ttgctttagtctcagtgttttaaagaagtctcataatgttctacaaagacacaaagcttcaggcttatacaaaactgagtatgattagaaatacctgagcccagaaatgattctgagaaa

SEQ ID NO: 279171 - DNA, 120 bp, Artificial Sequence
  ENSG00000129128_26 (sequence is synthesized)
agagaataatttgaagacacttatttaaaagtaattatggttagaaatgaattaatttaaaaatgtgttcacatatccctttctctaacagtttaacctagacaaacatctgtatcagta

SEQ ID NO: 279172 - DNA, 120 bp, Artificial Sequence
  ENSG00000129128_27 (sequence is synthesized)
tttttttattcccctgattgattacatttggtttctttattctgaaaggaaaataacaaaaacttcagaaattcctaagggtgtaataagaaagtgggttttgagtttcctttcctggaa

SEQ ID NO: 279173 - DNA, 120 bp, Artificial Sequence
  ENSG00000129128_28 (sequence is synthesized)
ttattttacagttctttggtgggtctcgtcagccaattcatagctgggctttaagattatcatcttagagatgatagatgggctttttaaagatttcatcttagagatgaaaagctgggc

SEQ ID NO: 279174 - DNA, 120 bp, Artificial Sequence
  ENSG00000129128_29 (sequence is synthesized)
tttttctctaagatgataatcttaaagcccagctattaattgataatgaacatttttcactatttttttttctatctgaagcttagagatctagagctttggatctttcgggtatatgtc

SEQ ID NO: 279175 - DNA, 120 bp, Artificial Sequence
  ENSG00000129128_30 (sequence is synthesized)
aatggaggtattattttataatactttgcattgacatgaagtgggttcatgggggaaaaccatgagctgtgaacattggtagcaaacaagcatatattcatttcaaaactttccttgctt

SEQ ID NO: 279176 - DNA, 120 bp, Artificial Sequence
  ENSG00000129128_31 (sequence is synthesized)
ttagcagagagaagcctgtatatgttacatgtgtgactttcagtagtttaaagagatgtttcaaaaaattgttgcatgtttttgatgcaatttgggaaattgtttacttcacaatgtagt

SEQ ID NO: 279177 - DNA, 120 bp, Artificial Sequence
  ENSG00000129128_32 (sequence is synthesized)
cattcataaaaaaattcatgaaaatactgaacatatgtttgaggatttttcttttcctttttaaatttttttattttttctgagacggagatctgctcttacgcccaggctagagtgaag

SEQ ID NO: 279178 - DNA, 65 bp, Artificial Sequence
  ENSG00000129128_33 (sequence is synthesized)
taacaggtgtgagccaccgtgcccggctgaagatttttcttaattgcaataaatattcagcattt

SEQ ID NO: 279179 - DNA, 120 bp, Artificial Sequence
  ENSG00000129128_34 (sequence is synthesized)
gctgaagatttttcttaattgcaataaatattcagcattttttctaatgaaaatgaattttgtttaccagtaaaagtatgcattttaaaagactttcagatttatgctttttacgtgaag

SEQ ID NO: 279180 - DNA, 120 bp, Artificial Sequence
  ENSG00000129128_35 (sequence is synthesized)
ctgctaaactaaaagtaaatggaagaaaccaagtctagtaggttttttctttttttttgtgggggtgggatgggggaggttagttacacttaaaatatcttctccagagactgtatgctc

SEQ ID NO: 279181 - DNA, 120 bp, Artificial Sequence
  ENSG00000129128_36 (sequence is synthesized)
ctatactagactgtaagctctttgagggcagtctgtcagatttatctttgtatcttccccagcgcctagtgtagtgccttgcacataataggcgcccaataaatattgatgaagaatgaa

SEQ ID NO: 279182 - DNA, 120 bp, Artificial Sequence
  ENSG00000129128_37 (sequence is synthesized)
gggaattgtcattcttctctctgagaaaagtttgccccttttttgtatctctctctttgctatcatttgtatgcattaagatttcagcaagctcctcaagttgaattcattaacatgtca

SEQ ID NO: 279183 - DNA, 80 bp, Artificial Sequence
  ENSG00000129128_38 (sequence is synthesized)
atgctgtgagtgaggccgggccggcggtgcaggacgccgggaccgggctggggcggaagccgaagccgggccgccgcgcc

SEQ ID NO: 279184 - DNA, 120 bp, Artificial Sequence
  ENSG00000129128_39 (sequence is synthesized)
gttcgcccccgagggcggtcgtcaggggtggacgtcgcaggcttttccggcgtcccctcggaacttgcacccctccaccgtaaattcccgggcttgctcttaaattttaattttgagcgt

SEQ ID NO: 279185 - DNA, 120 bp, Artificial Sequence
  ENSG00000129128_40 (sequence is synthesized)
tcctcaggtcggtgcctccgcttgcttcctgttcctcacttccctccacccacgcctggccaatgagggagcaacacaacagcagagccggcgccgccgcccgcctgggctggcgcctcc

SEQ ID NO: 279186 - DNA, 120 bp, Artificial Sequence
  ENSG00000129128_41 (sequence is synthesized)
cgcgcgtccggtgccgctcgtggtccgcatgcgaggccctccaggcgctgccgccgcgctctgggtcgggcttccgtggggtttcctggcggctctggaggccacaggacggggttgtct

SEQ ID NO: 279187 - DNA, 120 bp, Artificial Sequence
  ENSG00000129128_42 (sequence is synthesized)
ttgtgtcattcatcacccgagtttgccctgtttgacattccctttacagttgttgcctttgcaccttcagaaggcagtaaacagttggagctgctttgaagttggccagagatgttgggc

SEQ ID NO: 279188 - DNA, 120 bp, Artificial Sequence
  ENSG00000129128_43 (sequence is synthesized)
actgagagaattaagcatcttagccttctgatacagcgagatttttgttttgttgggtttctttatttctttttcttttgccaaccacttgaagaagtctgcgaaaacgccaaaaaatgc

SEQ ID NO: 279189 - DNA, 120 bp, Artificial Sequence
  ENSG00000129128_44 (sequence is synthesized)
agttcgaaatgacagtgccatttcgctattgcctattttgtccttgattttattctctggcacttttgtctttaatcgtcgtatttttccatctcttgttctcatacccttctactctat

SEQ ID NO: 279190 - DNA, 120 bp, Artificial Sequence
  ENSG00000129128_45 (sequence is synthesized)
ttccgtcttacacaagttctttaaccttagtttatttctttgtcagaatcgccaagaagccagttatcaaatagcgagccttctccccccaccttttttttttttttttaaattactgta

SEQ ID NO: 279191 - DNA, 120 bp, Artificial Sequence
  ENSG00000129128_46 (sequence is synthesized)
ctgatgtttgttagatattgttcgaatagacctggggtggacatcagcactgccattgtcagccctgtgagggttagaagagcttggtgcatattaaacactgaacagatgttagctgtt

SEQ ID NO: 279192 - DNA, 120 bp, Artificial Sequence
  ENSG00000129128_47 (sequence is synthesized)
ttttcttaccattctgggccttaatttctttttgtttaagatggaagtaatacctaatttttaggttgtgagaattatttgaaatgtgaaaaatattgtcagtgggtctgagccgtagta

SEQ ID NO: 279193 - DNA, 120 bp, Artificial Sequence
  ENSG00000129128_48 (sequence is synthesized)
aacagtaaatagcagctggttacagtagtatccccttaatggggtaggtatacgttccaagacccccagtggatggctgaaaccacggatagcaccaaaccctatatatacttggttttt

SEQ ID NO: 279194 - DNA, 120 bp, Artificial Sequence
  ENSG00000129128_49 (sequence is synthesized)
tcctataccgtacatacatacctacctatgataaaacttacaagttaagcacaataagagattaacaataacataatagaactgtaacaatatactataataaaagttatgtgaatatga

SEQ ID NO: 279195 - DNA, 120 bp, Artificial Sequence
  ENSG00000129128_50 (sequence is synthesized)
tctctttccccttctctcaaaataacttattttactggactcacctattttcacaccagattgaccgcggataattgaaaccggaaagtgaaacctcggataagggggtgattactgtat

SEQ ID NO: 279196 - DNA, 120 bp, Artificial Sequence
  ENSG00000129128_51 (sequence is synthesized)
caccctttaatatgccatctgttagtattcgtatcaccttgtagtcatgtgtagctttcttctacccattctgcaaaattgctttacatcaagtatttactattctttttagcagttttt

SEQ ID NO: 279197 - DNA, 120 bp, Artificial Sequence
  ENSG00000129128_52 (sequence is synthesized)
atccccttctgagttttgttagggattctcttgaggtatatgcaattagctgaagacctactttaatattggattagaatgtttctcctgttttcacacttacaggtttctctggtgttt

SEQ ID NO: 279198 - DNA, 120 bp, Artificial Sequence
  ENSG00000129128_53 (sequence is synthesized)
actcgtttctttgtggaattgcagtttcacctatgcacacacctgtattctttctctttaagaagttacgtgaattgtgtatgttctgttggaaggatggtaaaacttttatctttattc

SEQ ID NO: 279199 - DNA, 120 bp, Artificial Sequence
  ENSG00000129128_54 (sequence is synthesized)
atggaaatggtctcaagtgagcaattcttggtcatttttttacatttaataagaggtgaaaaagagagaaagatgtatttttattttaaagaaaaatacttgagagtaaaaggagaaaaa

SEQ ID NO: 279200 - DNA, 120 bp, Artificial Sequence
  ENSG00000129151_0 (sequence is synthesized)
atattggaatactctgttgacaagtagataccacttcacctctgctagggtgagcgctggtagctcctccctgttaaatgcccatctcaatgcctctgccctaagtgagttgtgcaataa

SEQ ID NO: 279201 - DNA, 120 bp, Artificial Sequence
  ENSG00000129151_1 (sequence is synthesized)
atgagctgtcactctgaacaggtgggaaagaagtgaactgcttgttcacttgctgctgttgccactgctggtacagaaatagaaggtaagacagcacaaaaaaacaaagacaaaaaacct

SEQ ID NO: 279202 - DNA, 120 bp, Artificial Sequence
  ENSG00000129151_2 (sequence is synthesized)
ccaagctcccttcagtagttgctacaccttcagattgagacatccttcctcatttacaaacctcagctgtgtctgggggcagggccacagtgaaactgccaggagcaaaaaggcttccaa

SEQ ID NO: 279203 - DNA, 120 bp, Artificial Sequence
  ENSG00000129151_3 (sequence is synthesized)
gaaaaagtaccacatcagattggaaactggggacagatcattcctgggatgtgacgggcaccagaatgctccctctccaaaggatctaaggaccaaagctgacagtttctttacttgcag

SEQ ID NO: 279204 - DNA, 120 bp, Artificial Sequence
  ENSG00000129151_4 (sequence is synthesized)
gtagctgacagcatctactcctgaagaccggaaacatggcttgtaccatccaaaaggcagaagcacttgacggggctcatttgatgcagatcctctggtatgatgaggaagagtctctct

SEQ ID NO: 279205 - DNA, 120 bp, Artificial Sequence
  ENSG00000129151_5 (sequence is synthesized)
acccagctgtatggttgagagacaactgtccgtgctctgattgctacctggattctgcaaaagcacggaaacttctagtggaagctcttgatgtgaacattggaattaaaggcttgatat

SEQ ID NO: 279206 - DNA, 120 bp, Artificial Sequence
  ENSG00000129151_6 (sequence is synthesized)
ttgacagaaaaaaggtgtacatcacatggcccgatgagcattacagtgaattccaggctgattggctgaagaaaagatgcttttccaagcaggccagagcaaagctccaaagagaattgt

SEQ ID NO: 279207 - DNA, 120 bp, Artificial Sequence
  ENSG00000129151_7 (sequence is synthesized)
tttttccagaatgccaatactggggctcagagctccagctacccactttggattttgaagatgttttaagatatgatgaacacgcatacaagtggctctccaccctcaagaaagtaggca

SEQ ID NO: 279208 - DNA, 120 bp, Artificial Sequence
  ENSG00000129151_8 (sequence is synthesized)
cgatgcaaacaatgtggcttacacaactgggaagctaagctttcacactgattatccagccctccatcatccacctggggttcagcttcttcactgcataaagcaaacagtcacaggggg

SEQ ID NO: 279209 - DNA, 120 bp, Artificial Sequence
  ENSG00000129151_9 (sequence is synthesized)
tgattcagaaattgtagatgggtttaatgtgtgccaaaaactaaagaaaaataatcctcaggcattccagattttgtcctctacctttgtggactttacagacattggagtggattactg

SEQ ID NO: 279210 - DNA, 120 bp, Artificial Sequence
  ENSG00000129151_10 (sequence is synthesized)
tgatttttctgtacaatcaaaacataaaattatagagttagatgataaaggccaagtggttcgcatcaacttcaataacgcaactagggacacaatatttgatgtgcctgttgaaagagt

SEQ ID NO: 279211 - DNA, 120 bp, Artificial Sequence
  ENSG00000129151_11 (sequence is synthesized)
tcagcctttttatgctgctctgaaggagtttgttgacctcatgaacagcaaagaatccaagtttaccttcaagatgaatccaggtgatgtgattacttttgataactggcgcttacttca

SEQ ID NO: 279212 - DNA, 120 bp, Artificial Sequence
  ENSG00000129151_12 (sequence is synthesized)
tggccgacgtagctatgaagcaggaactgagatatcccgccatctagaaggagcttatgctgactgggatgtggtcatgtcaaggcttcgtatcttaaggcagagggtggagaatggaaa

SEQ ID NO: 279213 - DNA, 120 bp, Artificial Sequence
  ENSG00000129151_13 (sequence is synthesized)
ctgaagtcacctgtagataattttaataagattccaatgaccatattttgtgagatatggcacattattcacagaccatgatctttgtgatttacatataatttccttaacaatgaacat

SEQ ID NO: 279214 - DNA, 120 bp, Artificial Sequence
  ENSG00000129151_14 (sequence is synthesized)
gtaacttctctcacaagagtactctttactttgtaatcatatacaatgtcaactttttagatgtttcaccactcttttgcaaataaagcatcctttctgctctgttgcatgcctgctcta

SEQ ID NO: 279215 - DNA, 120 bp, Artificial Sequence
  ENSG00000129151_15 (sequence is synthesized)
atttcttttgcccatatatgagtatctccagaatgtctacaaatagtttttgtagcaaatgaaaatttcttcaaataagccttttgtttcaaataaaacttgtctcaaaacatgcttcta

SEQ ID NO: 279216 - DNA, 120 bp, Artificial Sequence
  ENSG00000129151_16 (sequence is synthesized)
acagtatgtgaaatactctcaccagaacaaaggtcccagcgtcaataagtcaaaccgcagactctgacagctgagtgaatagcagaggccagagtccacttgaagtgttcacactctcag

SEQ ID NO: 279217 - DNA, 120 bp, Artificial Sequence
  ENSG00000129151_17 (sequence is synthesized)
aggtaactttgccaaagtcttcaatgtctttttaaacccttacagtaaaggatttttattaagaaatttgctcacagaaaattcaaacctttgtgctttgattaaaatatgtgacatgta

SEQ ID NO: 279218 - DNA, 120 bp, Artificial Sequence
  ENSG00000129152_0 (sequence is synthesized)
aggggtgaggaagccctggggcgctgccgccgctttccttaaccacaaatcaggccggacaggagagggaggggtgggggacagtgggtgggcattcagactgccagcactttgctatct

SEQ ID NO: 279219 - DNA, 120 bp, Artificial Sequence
  ENSG00000129152_1 (sequence is synthesized)
acagccggggctcccgagcggcagaaagttccggccactctctgccgcttgggttgggcgaagccaggaccgtgccgcgccaccgccaggatatggagctactgtcgccaccgctccgcg

SEQ ID NO: 279220 - DNA, 120 bp, Artificial Sequence
  ENSG00000129152_2 (sequence is synthesized)
acgtagacctgacggcccccgacggctctctctgctcctttgccacaacggacgacttctatgacgacccgtgtttcgactccccggacctgcgcttcttcgaagacctggacccgcgcc

SEQ ID NO: 279221 - DNA, 120 bp, Artificial Sequence
  ENSG00000129152_3 (sequence is synthesized)
tgatgcacgtgggcgcgctcctgaaacccgaagagcactcgcacttccccgcggcggtgcacccggccccgggcgcacgtgaggacgagcatgtgcgcgcgcccagcgggcaccaccagg

SEQ ID NO: 279222 - DNA, 120 bp, Artificial Sequence
  ENSG00000129152_4 (sequence is synthesized)
cgggccgctgcctactgtgggcctgcaaggcgtgcaagcgcaagaccaccaacgccgaccgccgcaaggccgccaccatgcgcgagcggcgccgcctgagcaaagtaaatgaggcctttg

SEQ ID NO: 279223 - DNA, 120 bp, Artificial Sequence
  ENSG00000129152_5 (sequence is synthesized)
agacactcaagcgctgcacgtcgagcaatccaaaccagcggttgcccaaggtggagatcctgcgcaacgccatccgctatatcgagggcctgcaggctctgctgcgcgaccaggacgccg

SEQ ID NO: 279224 - DNA, 120 bp, Artificial Sequence
  ENSG00000129152_6 (sequence is synthesized)
ccctggcgccgcagccgccttctatgcgccgggcccgctgcccccgggccgcggcggcgagcactacagcggcgactccgacgcgtccagcccgcgctccaactgctccgacggcatgat

SEQ ID NO: 279225 - DNA, 120 bp, Artificial Sequence
  ENSG00000129152_7 (sequence is synthesized)
tggactacagcggccccccgagcggcgcccggcggcggaactgctacgaaggcgcctactacaacgaggcgcccagcgaacccaggcccgggaagagtgcggcggtgtcgagcctagact

SEQ ID NO: 279226 - DNA, 120 bp, Artificial Sequence
  ENSG00000129152_8 (sequence is synthesized)
gcctgtccagcatcgtggagcgcatctccaccgagagccctgcggcgcccgccctcctgctggcggacgtgccttctgagtcgcctccgcgcaggcaagaggctgccgcccccagcgagg

SEQ ID NO: 279227 - DNA, 120 bp, Artificial Sequence
  ENSG00000129152_9 (sequence is synthesized)
gagagagcagcggcgaccccacccagtcaccggacgccgccccgcagtgccctgcgggtgcgaaccccaacccgatataccaggtgctctgaggggatggtggccgcccacccgcccgag

SEQ ID NO: 279228 - DNA, 120 bp, Artificial Sequence
  ENSG00000129152_10 (sequence is synthesized)
ggatggtgcccctagggtccctcgcgcccaaaagattgaacttaaatgcccccctcccaacagcgctttaaaagcgacctctcttgaggtaggagaggcgggagaactgaagtttccgcc

SEQ ID NO: 279229 - DNA, 120 bp, Artificial Sequence
  ENSG00000129152_11 (sequence is synthesized)
cccgccccacagggcaaggacacagcgcggttttttccacgcagcacccttctcggagacccattgcgatggccgctccgtgttcctcggtgggccagagctgaaccttgaggggctagg

SEQ ID NO: 279230 - DNA, 120 bp, Artificial Sequence
  ENSG00000129152_12 (sequence is synthesized)
ttcagctttctcgcgccctcccccatgggggtgagaccctcgcagacctaagccctgccccgggatgcaccggttatttgggggggcgtgagacccagtgcactccggtcccaaatgtag

SEQ ID NO: 279231 - DNA, 120 bp, Artificial Sequence
  ENSG00000129152_13 (sequence is synthesized)
caggtgtaaccgtaacccacccccaacccgtttcccggttcaggaccactttttgtaatacttttgtaatctattcctgtaaataagagttgctttgccagagcaggagcccctggggct

SEQ ID NO: 279232 - DNA, 120 bp, Artificial Sequence
  ENSG00000129152_14 (sequence is synthesized)
gtatttatctctgaggcatggtgtgtggtgctacagggaatttgtacgtttataccgcaggcgggcgagccgcgggcgctcgctcaggtgatcaaaataaaggcgctaatttataccgcc

SEQ ID NO: 279233 - DNA, 120 bp, Artificial Sequence
  ENSG00000129158_0 (sequence is synthesized)
gccgtccctcccggaagcgccggcggagcgtcctcgcatggagcgcgagcccagcgcctcggaggccgcccccgcggcggccgcgctcttcgcctggggtgcaaatagctatgggcaact

SEQ ID NO: 279234 - DNA, 120 bp, Artificial Sequence
  ENSG00000129158_1 (sequence is synthesized)
tggcctcggccataaggaagatgtgctgttgccccagcaactgaatgacttctgtaaacccaggagtgtcaggaggatcacaggaggagggggccactctgcagttgtcacagatggagg

SEQ ID NO: 279235 - DNA, 120 bp, Artificial Sequence
  ENSG00000129158_2 (sequence is synthesized)
agacctctttgtttgtggcctgaacaaagatgggcaactggggcttggtcacacagaggatatcccatattttaccccctgcaaatccctctttggctgtcccatccaacaggtggcctg

SEQ ID NO: 279236 - DNA, 120 bp, Artificial Sequence
  ENSG00000129158_3 (sequence is synthesized)
tggctgggattttacgattatgctcacagaaaatggtcaagttctatcatgtggatccaactcctttggccagttaggagttcctcatggacctcgaagatgtgtggttccccaggccat

SEQ ID NO: 279237 - DNA, 120 bp, Artificial Sequence
  ENSG00000129158_4 (sequence is synthesized)
tgagctccataaagagaaggttgtttgtattgctgctggactgaggcatgcagtagctgctacagcgagtggcatcgtgttccagtgggggactggtttggcatcatgtggacgacggtt

SEQ ID NO: 279238 - DNA, 120 bp, Artificial Sequence
  ENSG00000129158_5 (sequence is synthesized)
gtgccctgggcagactcttccattgtttttcacagcaaaggaaccaagcagagtgacaggtctagagaattctaaagcaatgtgtgttcttgctggctcagaccactcagcttcattaac

SEQ ID NO: 279239 - DNA, 120 bp, Artificial Sequence
  ENSG00000129158_6 (sequence is synthesized)
aggtgtatgtttggggaagcaacaagcatgggcaactggctaatgaggctgctttccttcctgtgccccagaaaatagaagcacattgtttccagaatgaaaaggtcactgccatctgga

SEQ ID NO: 279240 - DNA, 120 bp, Artificial Sequence
  ENSG00000129158_7 (sequence is synthesized)
gtggatggacacacctggttgctcagacagaaactggcaagatgtttacctggggccgagcagactatggtcagctagggaggaagttggagacttatgaaggctggaaactagaaaagc

SEQ ID NO: 279241 - DNA, 120 bp, Artificial Sequence
  ENSG00000129158_8 (sequence is synthesized)
aagattcatttctcccctgttcaagaccaccgaacagcatgccttcgtctccgcattgcttaactggagcaactgaggtctcttgtggctcagagcataatttggcaataattggtggag

SEQ ID NO: 279242 - DNA, 120 bp, Artificial Sequence
  ENSG00000129158_9 (sequence is synthesized)
tgtgttactcttggggctggaatgagcatggcatgtgcggagatggcactgaagccaacgtctgggccccaaagccggtgcaggctctgctgtcatcgtcaggactccttgtgggctgtg

SEQ ID NO: 279243 - DNA, 120 bp, Artificial Sequence
  ENSG00000129158_10 (sequence is synthesized)
gggctggccactccttggccctctgccagctgccagctcaccctgcattggtccaggaccccaaggtcacctacctttccccagatgccatcgaggacactgaatctcagaaagccatgg

SEQ ID NO: 279244 - DNA, 120 bp, Artificial Sequence
  ENSG00000129158_11 (sequence is synthesized)
acaaagagagaaactggaaggaaagacaatcagaaacttcaacccaaagccaatctgactggtccagaaatgggggactgtgatagagaatctttaataaagtggcttttcccaccaaaa

SEQ ID NO: 279245 - DNA, 120 bp, Artificial Sequence
  ENSG00000129158_12 (sequence is synthesized)
gcagtagctgctacaggacagcactaattggctgtggcagctgaggctcaggtgcttcgtgagtccacttgtggagtggaggaaggagagaggagcgagtggcatcgtgttccagtgggg

SEQ ID NO: 279246 - DNA, 120 bp, Artificial Sequence
  ENSG00000129158_13 (sequence is synthesized)
cactcagtaattggtagctaatattgccccctgtgggcttctgggacttatgcccctgctatggcttactcttccatctttgagtccttgcagcccaggatggctgtgaaatagactaca

SEQ ID NO: 279247 - DNA, 120 bp, Artificial Sequence
  ENSG00000129158_14 (sequence is synthesized)
gttgtaattattttacatcacctttcctcattcaggtgtcttcaaaaacaaacatatttaaaagattttacttctcatctccaggaagaaccagctaggagtagggtgcaaatagctatg

SEQ ID NO: 279248 - DNA, 120 bp, Artificial Sequence
  ENSG00000129158_15 (sequence is synthesized)
tgcagagaaattaagagatatactcaagatcacagtgttcatgtgtcatggagccatttttgaatcctgtgagagacttcagtgctgatgatcggatgaccagaccatcaaaccatgctg

SEQ ID NO: 279249 - DNA, 120 bp, Artificial Sequence
  ENSG00000129158_16 (sequence is synthesized)
ccggtgcaggccctgaggggcgccgagatgtgggagctgctggccgcggcgtgggcagttcaggggctgggcggctgaggtccgagccgggctctgggttgaaggatcctgggctgggag

SEQ ID NO: 279250 - DNA, 120 bp, Artificial Sequence
  ENSG00000129158_17 (sequence is synthesized)
cggagggggagcggaggaggagcgggcgggcggggaaggaagggtcttcgcggtcgacttaggggcctgccggctggcggggtcagggccggaggggctgtggcgccgcgggaagaacct

SEQ ID NO: 279251 - DNA, 120 bp, Artificial Sequence
  ENSG00000129158_18 (sequence is synthesized)
gcctcggggcagagcgtctggttccgcgagagccctccagcccgaatagcgcctggaagacagcgcggagggctcggtggagaggatcgcccggtcccagagctccgtggggccacctgt

SEQ ID NO: 279252 - DNA, 120 bp, Artificial Sequence
  ENSG00000129158_19 (sequence is synthesized)
aggcatacctggtgatccagaggaagcatactgtattcatgcagtgaggtggcacctcagcttctctgtgctgaaatgcccaaattaattcaccattcttagcagtcttcccagctgaga

SEQ ID NO: 279253 - DNA, 120 bp, Artificial Sequence
  ENSG00000129158_20 (sequence is synthesized)
tagatggcatctccttggaaagtcttccctgatgtccaggtcctaattgatcacttcattctctgaacttccagtaggtctcttgtggctcagagcataatttggcaataattggtggag

SEQ ID NO: 279254 - DNA, 120 bp, Artificial Sequence
  ENSG00000129158_21 (sequence is synthesized)
tgggtacgtgactccgcccccgggccggtgcaggccctgaggggcgccgagatgtgggagctgctggccgcggcgtgggcagttcaggggctgggcggctgagggtgcaaatagctatgg

SEQ ID NO: 279255 - DNA, 120 bp, Artificial Sequence
  ENSG00000129158_22 (sequence is synthesized)
ggcatttgagcatattaaagaactcacaggctgaggggcaccatgtgtagaaagccagacataaaaaggaagaatgattggactgcttctggtttttcgaataaatccccattctaagtt

SEQ ID NO: 279256 - DNA, 120 bp, Artificial Sequence
  ENSG00000129158_23 (sequence is synthesized)
cacatttagtgggaaagagagctatgggaattaaatttggccatactttggacttaaatactgaatgaatgaatgaatgaatgaatgaatacaaagcagaccatgataagaactaggaga

SEQ ID NO: 279257 - DNA, 120 bp, Artificial Sequence
  ENSG00000129158_24 (sequence is synthesized)
gcatggagcgcgagcccagcgcctcggaggccgcccccgcggcggccgcgctcttcgcctgggtgtcttcaaaaacaaacatatttaaaagattttacttctcatctccaggaagaacca

SEQ ID NO: 279258 - DNA, 80 bp, Artificial Sequence
  ENSG00000129159_0 (sequence is synthesized)
gaacgagcaggcgacgggcgagcagcaagcggagcagcagcccgggcggcagcagcgtcgcggcggcggcggcagcggcc

SEQ ID NO: 279259 - DNA, 120 bp, Artificial Sequence
  ENSG00000129159_1 (sequence is synthesized)
gcccgacctccgcagcccccgtctcggccggcagcgcccaccgcctgcccgaagcgaggagcggagtgcggggcgcagaggcaccggagccagtgcccgccggccccgcaaatcaaaccc

SEQ ID NO: 279260 - DNA, 120 bp, Artificial Sequence
  ENSG00000129159_2 (sequence is synthesized)
gccagtgcccgccggccccgcaaatcaaacccagccaggagaacccccgcctggccccgtgcagctccgcgaccgccgggagctgtcccttcagcaccgccgcgggagcccaagtccgag

SEQ ID NO: 279261 - DNA, 120 bp, Artificial Sequence
  ENSG00000129159_3 (sequence is synthesized)
cgcagcccagcggaaccccagctcgagcccgggctcacggagagcagcgctcggcgttagccgcacgagcaacaccccgggtgcccctgcccagggggcccgccatctcctccaggaggc

SEQ ID NO: 279262 - DNA, 120 bp, Artificial Sequence
  ENSG00000129159_4 (sequence is synthesized)
atctcctccaggaggcggggagaaggaacgaggagggcgggcgggcaggcgggcccgccgccggggggagcaggcagccaagcaaggagagagggagggggccggagcccgccctgcgtc

SEQ ID NO: 279263 - DNA, 120 bp, Artificial Sequence
  ENSG00000129159_5 (sequence is synthesized)
ccacgcagggaggaaggcaggcggcatccatctcccccgcgccgagagcgcgccgcggcgaccacctcacagaggagcgcgaatttcccggccctgtctcctcccctccccctcctgggg

SEQ ID NO: 279264 - DNA, 120 bp, Artificial Sequence
  ENSG00000129159_6 (sequence is synthesized)
gctggcctctagtccggccccgggagcggctgacctttcccccaaaagctttgtgccgatttctccattttcccgcggagatggggacgggagcccggccccccaacccattttccccac

SEQ ID NO: 279265 - DNA, 120 bp, Artificial Sequence
  ENSG00000129159_7 (sequence is synthesized)
ctcccggggctcgctgctgagcccgcccccctccctctttccccctcactccctccctccctccctttctccctccctttctccctcccttctttcctcctctgcctcctccgctgccgg

SEQ ID NO: 279266 - DNA, 120 bp, Artificial Sequence
  ENSG00000129159_8 (sequence is synthesized)
accagctccctcccacatctggctcctagagacccctgggatcccgcgcacattcccctggaccggcacccgacaaagcgcccggagaggcttggctcgctcgttggggtggccagagcc

SEQ ID NO: 279267 - DNA, 120 bp, Artificial Sequence
  ENSG00000129159_9 (sequence is synthesized)
gagaggcttggctcgctcgttggggtggccagagccgcaggcctctgttccccccgacggctggggggaggggggaagagggcgcgcgcccccctccccggcgccaactccccctggcgg

SEQ ID NO: 279268 - DNA, 120 bp, Artificial Sequence
  ENSG00000129159_10 (sequence is synthesized)
aagggggcgccgcgatgggccaaggggacgagagcgagcgcatcgtgatcaacgtgggcggcacgcgccaccagacgtaccgctcgaccctgcgcacgctgcccggcacgcggctcgcct

SEQ ID NO: 279269 - DNA, 120 bp, Artificial Sequence
  ENSG00000129159_11 (sequence is synthesized)
ggctggcggagcccgacgcccacagccacttcgactatgacccgcgtgctgacgagttcttcttcgaccgccaccccggcgtcttcgcgcacatcctgaactactaccgcacgggcaagc

SEQ ID NO: 279270 - DNA, 120 bp, Artificial Sequence
  ENSG00000129159_12 (sequence is synthesized)
tgcactgcccagccgacgtgtgcgggccgctctacgaggaggagctggccttctggggcatcgacgagaccgacgtggagccctgctgctggatgacgtaccgccagcaccgcgacgccg

SEQ ID NO: 279271 - DNA, 120 bp, Artificial Sequence
  ENSG00000129159_13 (sequence is synthesized)
aggaggctctggacagcttcggcggcgctcctctggacaacagcgccgacgacgcggacgccgacggccctggcgactcgggcgacggcgaggacgagctggagatgaccaagcgcctgg

SEQ ID NO: 279272 - DNA, 120 bp, Artificial Sequence
  ENSG00000129159_14 (sequence is synthesized)
cgctcagtgactccccggatggccggcctggcggcttttggcgccgctggcagccgcgcatctgggcgctcttcgaggacccgtactcgtcccgctacgcgcggtatgtggccttcgctt

SEQ ID NO: 279273 - DNA, 120 bp, Artificial Sequence
  ENSG00000129159_15 (sequence is synthesized)
ccctcttcttcatcctggtctccatcaccaccttctgcctggagacccacgagcgcttcaaccccatcgtgaacaagacggagatcgagaacgttcgcaatggcacgcaagtgcgctact

SEQ ID NO: 279274 - DNA, 120 bp, Artificial Sequence
  ENSG00000129159_16 (sequence is synthesized)
accgggaggccgagacggaggccttccttacctacatcgagggcgtctgtgtggtctggttcaccttcgagttcctcatgcgtgtcatcttctgccccaacaaggtagagttcatcaaga

SEQ ID NO: 279275 - DNA, 120 bp, Artificial Sequence
  ENSG00000129159_17 (sequence is synthesized)
ggcttcctgcgcgtcgtccgcttcgtgcgcatcttgcgcatctttaagctgacccgccactttgtgggcctgcgggtcctgggccacacgctccgagccagcaccaacgagttcctgctg

SEQ ID NO: 279276 - DNA, 120 bp, Artificial Sequence
  ENSG00000129159_18 (sequence is synthesized)
ctcatcatcttcctggccttgggcgtgctgatcttcgccaccatgatctactacgccgagaggataggggcacagcccaatgaccccagcgccagtgagcacacgcactttaagaacatc

SEQ ID NO: 279277 - DNA, 120 bp, Artificial Sequence
  ENSG00000129159_19 (sequence is synthesized)
cccatcggcttctggtgggccgtggtcaccatgacgaccctgggctatggagacatgtacccgcagacgtggtccggcatgctggtgggggctctgtgtgcgctggcgggcgtgctcacc

SEQ ID NO: 279278 - DNA, 120 bp, Artificial Sequence
  ENSG00000129159_20 (sequence is synthesized)
atcgccatgcccgtgcccgtcatcgtgaacaatttcgggatgtattactccttagccatggctaagcagaaactaccaaagaaaaaaaagaagcatattccgcggccaccgcagctggga

SEQ ID NO: 279279 - DNA, 120 bp, Artificial Sequence
  ENSG00000129159_21 (sequence is synthesized)
tctcccaattattgtaaatctgtcgtaaactctccacaccacagtactcagagtgacacatgtccgctggcccaggaagaaattttagaaattaacagagcagattccaaactgaatggg

SEQ ID NO: 279280 - DNA, 120 bp, Artificial Sequence
  ENSG00000129159_22 (sequence is synthesized)
gaggtggcgaaggccgcgctggcgaacgaagactgcccccacatagaccaggccctcactcccgatgagggcctgccctttacgcgctcgggcacccgcgagagatacggaccctgcttc

SEQ ID NO: 279281 - DNA, 120 bp, Artificial Sequence
  ENSG00000129159_23 (sequence is synthesized)
ctcttatcaaccggggagtacgcgtgcccacctggtggaggaatgagaaaggatctttgcaaagaaagccctgtcattgctaagtatatgccgacagaggctgtgagagtgacttgacca

SEQ ID NO: 279282 - DNA, 120 bp, Artificial Sequence
  ENSG00000129159_24 (sequence is synthesized)
ggcggcttggccgaggacactggtggctattaagcatctgggtggacctgcagcccctcctcaccctcggacagagtaaattcacgccatgcaggtttgccggacgagtccgagtggccc

SEQ ID NO: 279283 - DNA, 120 bp, Artificial Sequence
  ENSG00000129159_25 (sequence is synthesized)
aggcattgtactaggacggacgtagctttttctacggccaaatggtaactgaccgtagaggatttcttttccttcttttcattttttaaaattttattttatttggggagggggggtgga

SEQ ID NO: 279284 - DNA, 120 bp, Artificial Sequence
  ENSG00000129159_26 (sequence is synthesized)
ggggctccttagcatgacttgcatgaagttaaacagaaaacccagcaaaccaaacccaccaaccccctgcaactgtatgattaccctgaacaacaataatgaaaagaaaaacatcaaagc

SEQ ID NO: 279285 - DNA, 120 bp, Artificial Sequence
  ENSG00000129159_27 (sequence is synthesized)
cctctattttctttcaaagctcttgactttcacacacgttgttggagccaaactgtaacggcgttcagtagaaacctgtacatttctgggggtgaggggcgaggggaggagggacagaga

SEQ ID NO: 279286 - DNA, 120 bp, Artificial Sequence
  ENSG00000129159_28 (sequence is synthesized)
tggggaatggattgcttcctttttgtacacaagatcaagaggaaagcttccaaaaagggcagtcggtcagtcatcggtcatattgacctcaccttcatagttcatctctcacgtggaaac

SEQ ID NO: 279287 - DNA, 120 bp, Artificial Sequence
  ENSG00000129159_29 (sequence is synthesized)
tgagaactttgctccaaatagaattgtggaaactcgcacggctgccttcttccccgtttggcatgcttgtgacccagcggatgtctccccaagacccctgacagcagctagtctaggttg

SEQ ID NO: 279288 - DNA, 120 bp, Artificial Sequence
  ENSG00000129159_30 (sequence is synthesized)
attctctcatcttatcggtgtgtagatccagtgtgaccaactttcataacaaattgttcatagtaaataatcaccaccgtatggattttccaagtgttccattaaaaccaggatgtagag

SEQ ID NO: 279289 - DNA, 120 bp, Artificial Sequence
  ENSG00000129159_31 (sequence is synthesized)
caccaaaagatcaggaccacgggaggagcagcctcctccacctttactaaggcacaacctggcattgtatgcaatttagtacttcagagtaaaaacctgcatgcccaatgttatgcaaag

SEQ ID NO: 279290 - DNA, 120 bp, Artificial Sequence
  ENSG00000129159_32 (sequence is synthesized)
cgattctagcatgaaataaattttgtatcatggtttctgtatagtctaaagcagatttgttttcctgaagcagtcggaggtttgcagagacacacttctgcatctcgaataaatatagta

SEQ ID NO: 279291 - DNA, 120 bp, Artificial Sequence
  ENSG00000129159_33 (sequence is synthesized)
ttttcccaacagaaacagaggacagtagcttggctttggtctgattctaaaattagtggggtgggggggaaggatgatatttttgaaaaacacatgcttgagttgaaaaaaatgcaacat

SEQ ID NO: 279292 - DNA, 120 bp, Artificial Sequence
  ENSG00000129159_34 (sequence is synthesized)
ctcaagctttcactgcagctcacaacatttcctggaaagagagcaatgatgctttagctcaacaacctcccctccctgggccctggcccccaataataaaaaactgacttttgagatgaa

SEQ ID NO: 279293 - DNA, 120 bp, Artificial Sequence
  ENSG00000129159_35 (sequence is synthesized)
aggactcaacctttgcaatagcttcttggaatctggaaagtctactaagtaacaggcggatagtatatacatcatggacacactggacaaagagatgattcatgttctgggtgggatgga

SEQ ID NO: 279294 - DNA, 120 bp, Artificial Sequence
  ENSG00000129159_36 (sequence is synthesized)
gtgacatggcatgagatttcatcacgctactcaaaatgtgaaacttttgcattatttctggaattttccattgagtattttcggactgtggctgactgcaggtaacagaaactgtagaaa

SEQ ID NO: 279295 - DNA, 120 bp, Artificial Sequence
  ENSG00000129159_37 (sequence is synthesized)
gtgcaactgcagataaggggaactactgttctccctctgagacacgatttgaagcaaaggggcctgggctgagtggtgggagatctgctttcttagtctgcctgggcaggtcctctggct

SEQ ID NO: 279296 - DNA, 120 bp, Artificial Sequence
  ENSG00000129159_38 (sequence is synthesized)
ggctcacaactgaaacatatcactgccccttctaagacttgaatatttcacttacagatgaagattgggaacagttggcttctgagatcctttccagcaccaacccactttaattctata

SEQ ID NO: 279297 - DNA, 120 bp, Artificial Sequence
  ENSG00000129159_39 (sequence is synthesized)
aacccaacattcccaagtataccatggtcatctgtactttgcaggctctctctagaatggacaaaggttattctgcagtgtgggcacagatgtggtcctgtaatgcaagatactgaaaac

SEQ ID NO: 279298 - DNA, 120 bp, Artificial Sequence
  ENSG00000129159_40 (sequence is synthesized)
cacatccccacccctaacccacaaatttcctctctaggcctcttttataggaatgtcttcagactaccccactgcctatcccactgacaatttaaaggcaatataactaacaagctcatc

SEQ ID NO: 279299 - DNA, 120 bp, Artificial Sequence
  ENSG00000129159_41 (sequence is synthesized)
ctttaccctctgtcaatatctctgctgcccatggctggctcccctgtgctctggcctccctagtgcaagctgactcagtcaatacccaagacttaccatttctaccactaggccctctct

SEQ ID NO: 279300 - DNA, 120 bp, Artificial Sequence
  ENSG00000129159_42 (sequence is synthesized)
tatattgattcccaattacacattactttgttgacttcttttcatattccaccctttagatcctgaattcatcatcctttgtgtaataaattcccagttttcagaaaaagtgaaatggtc

SEQ ID NO: 279301 - DNA, 120 bp, Artificial Sequence
  ENSG00000129159_43 (sequence is synthesized)
cccttctatgccttcatggagacaggctgcagctggagccttttggcagccaaaagagacccctttgcagctcttaacaatctgttactgaataatttgagagaatattgctaattatga

SEQ ID NO: 279302 - DNA, 120 bp, Artificial Sequence
  ENSG00000129159_44 (sequence is synthesized)
acctgtgtctttagatacccaagtccttaagctgcagagtacccaggacaaggttctcctccttgagcaagttaccctctctgccatagtttccccatctgtgaaacaggtataataata

SEQ ID NO: 279303 - DNA, 120 bp, Artificial Sequence
  ENSG00000129159_45 (sequence is synthesized)
gtacctaccttactgttgatgtaaagaatcaattaataatgtatgtaaaatgtgtaaaaccacacatagatcaataatgtcaactattactgttattatggttcaataaatatttgacag

SEQ ID NO: 279304 - DNA, 120 bp, Artificial Sequence
  ENSG00000129159_46 (sequence is synthesized)
ccacacctgctggatccatcaccaactcatctttttgcaaactttgagcaaacccaggagtccccactcccagcactgtgggcagcccgaaggctgcctgaatgagctgaaccccccacc

SEQ ID NO: 279305 - DNA, 120 bp, Artificial Sequence
  ENSG00000129159_47 (sequence is synthesized)
aagccccctgccttgtgccctcctcgctccacagcctgcccgcttttccgtcctcagggacgctcaagctgccctctgccaataccccgcttctggcctgtccccccctgccccccacta

SEQ ID NO: 279306 - DNA, 120 bp, Artificial Sequence
  ENSG00000129159_48 (sequence is synthesized)
acgtatggagttcctattgaggactcaacctttgcaatagcttcttggaatctggaaagtctactaaggtgagttcgtccctataaaaagggaccaggaggctgggcacggtggctcacg

SEQ ID NO: 279307 - DNA, 120 bp, Artificial Sequence
  ENSG00000129159_49 (sequence is synthesized)
agtggtttgttatgggactatctcagttttatgagaacctgcacatagcacataaagttgatcatggggctctggtccgaagatataaagcccatagtctacctctacccatggaatacc

SEQ ID NO: 279308 - DNA, 120 bp, Artificial Sequence
  ENSG00000129159_50 (sequence is synthesized)
gatcacctgaggtcaggagtttgagaagcctggccaacatggcaaaacctgtccctactaaaacaaaaacaaaaaaaacatatatacacacacacaatttagccaggcacagtggcgcac

SEQ ID NO: 279309 - DNA, 77 bp, Artificial Sequence
  ENSG00000129159_51 (sequence is synthesized)
tacacacacacaatttagccaggcactgaggcaggggaaccgcttgaaatcgggaggcagaggttgcagtgagccaa

SEQ ID NO: 279310 - DNA, 120 bp, Artificial Sequence
  ENSG00000129159_52 (sequence is synthesized)
tctgacctttcacctctgccccctgtagcgatgattccagatccagtcagactgcttccttagttccgtgggtgaccccggaccccgcactcagtctggaggtgtggagcctgggggccc

SEQ ID NO: 279311 - DNA, 120 bp, Artificial Sequence
  ENSG00000129159_53 (sequence is synthesized)
agggagatgctgggcggccaaattcagcaggcaagagcctgctagaggaacctcactggtgcccctgggtaaggaggttgacgcggttggtctcgtgatgttctgaagagacaacgcggc

SEQ ID NO: 279312 - DNA, 120 bp, Artificial Sequence
  ENSG00000129159_54 (sequence is synthesized)
ccgccaggttgctgaggactaacttagcaggagccaggggggctctgcttggtggggcaggagtccggtgtgagtctctgactcaggctactgacccggtgttgggacagagtgggggcg

SEQ ID NO: 279313 - DNA, 120 bp, Artificial Sequence
  ENSG00000129159_55 (sequence is synthesized)
ggtgtgatttggaaacgctagacagcctttgatctggtccttaccatggctcccttcaggctgtgtagatggcagagatggtgcatgggatctgggcaggagggtcccttgcaaaggcag

SEQ ID NO: 279314 - DNA, 120 bp, Artificial Sequence
  ENSG00000129159_56 (sequence is synthesized)
gtgcaagggttctcacccccggcagagcctgtctccatagctgagtagaattcctgccctgatttcgggctgcccagctcgaggtccttcccaggagacgcctgtagccctccgtgacaa

SEQ ID NO: 279315 - DNA, 120 bp, Artificial Sequence
  ENSG00000129159_57 (sequence is synthesized)
gcttacttaccccatagcatgctgaaccaactcatcttctaccaccactctagagtttagcctttatctttaggaacctgttgaagtgactctagctttcacgttgtctgtttgggttga

SEQ ID NO: 279316 - DNA, 120 bp, Artificial Sequence
  ENSG00000129159_58 (sequence is synthesized)
tggtcgagtgggagtttccggtgacccgatggaagcggctgccgagcaaaagactagagggggccaccaccctgggcagcttagatgaaagcgctacagaccagcaacagcctcccaccg

SEQ ID NO: 279317 - DNA, 120 bp, Artificial Sequence
  ENSG00000129159_59 (sequence is synthesized)
agggttctccccgtttccagcggtagggactgcagcagcaatatagacatcccaaccagtgtacaaccactttcccgtgaattcactgggggccgggaggggggaggggggcatgaaaca

SEQ ID NO: 279318 - DNA, 120 bp, Artificial Sequence
  ENSG00000129159_60 (sequence is synthesized)
gaaggacctccccatgcccaggtctggcaggaggctgctggctagctcagccccaggtggggaagtttccccctggtttgggtggcctcccccagtggatgattgattttcttccctgct

SEQ ID NO: 279319 - DNA, 120 bp, Artificial Sequence
  ENSG00000129159_61 (sequence is synthesized)
atcgcgctctctgacccaccaccccatcccaatcctcttctggctttaccccacagctatgctggcccgagcactaccctcaaggcccatttctttgcccatgggggtttcccggtcctt

SEQ ID NO: 279320 - DNA, 120 bp, Artificial Sequence
  ENSG00000129159_62 (sequence is synthesized)
tcaccctgccgcatacccttcccttcctgggatttctgtaggtgcctgagaggaacatggccaggggtctccgaggctgaaacagctccgagctctctgctttggattagctagttactt

SEQ ID NO: 279321 - DNA, 120 bp, Artificial Sequence
  ENSG00000129159_63 (sequence is synthesized)
gatttcaggagctaccaacagggctctgggcctctaggaggaacgcgtgggctggcccaggccccagcttccatgtgggcctggcaagaagagctcagcctgagtggcatcactgtggca

SEQ ID NO: 279322 - DNA, 120 bp, Artificial Sequence
  ENSG00000129159_64 (sequence is synthesized)
ctacctggcccttcccctgcatcctccccgacactggatctttcaggagtgttgccccaagcacaggtgccctgggccagccagtcaagaatccccagtgctctccaggcaggcccagat

SEQ ID NO: 279323 - DNA, 120 bp, Artificial Sequence
  ENSG00000129159_65 (sequence is synthesized)
tcctctgtactcttggacaatgacagtattatcctgtgcggagtccccctgccccccagggagtgcagatgtgtttgttcagacatgcacaccagctaatcccaggacacaaaacctgta

SEQ ID NO: 279324 - DNA, 120 bp, Artificial Sequence
  ENSG00000129159_66 (sequence is synthesized)
aaacccatgcactcctgtgggattgcccctgagctccacagtctctccccagccctgcttttgagagccactttgccctggtcccaggtttcaggggcccagacagttctggcttggaca

SEQ ID NO: 279325 - DNA, 120 bp, Artificial Sequence
  ENSG00000129159_67 (sequence is synthesized)
gtctctgtggctgaggaagtatttggggccctcacaagcttgccctctggagcttggatgcctggatccctcctgcctcccccgtcaccaactgtgctcccaagcccttcccaagcactc

SEQ ID NO: 279326 - DNA, 120 bp, Artificial Sequence
  ENSG00000129159_68 (sequence is synthesized)
acttcccggtggtgttggtgctgtcctgatatcctgacccccgaggctccagcctcatccctcaccagaacacttctccctccaaaagctggcgtgtgagaccccggctatccgccacca

SEQ ID NO: 279327 - DNA, 120 bp, Artificial Sequence
  ENSG00000129159_69 (sequence is synthesized)
agaggagttgcggtctttaggggcgttgtccccacctctgcaccccagagttcttcccattcaccttttttcctgcttgcagccatgcacctagatgggcatagggttggggtgagtttg

SEQ ID NO: 279328 - DNA, 120 bp, Artificial Sequence
  ENSG00000129159_70 (sequence is synthesized)
tgggagagtgagggggaggccaggggcaaggaaggtaaatgtggtggccccacaggaattgtgagagatgagatgcagccccccaaggcctttccagtctcactgtacccccaaggcagt

SEQ ID NO: 279329 - DNA, 120 bp, Artificial Sequence
  ENSG00000129159_71 (sequence is synthesized)
ctagtggcctcgccaaaacctgagcttctccaattccacttttaaaaccagagttaggggctgtgtgtggcacgctgggttctgagggcatccctcccgcccccccaggccagcccccag

SEQ ID NO: 279330 - DNA, 120 bp, Artificial Sequence
  ENSG00000129159_72 (sequence is synthesized)
tggtgccagcagcacctgcccctcacctccacctcttggtctcgtctgaagcctcagtctgtgtgtctgtcccagggacaatctggtctcctcctgtgtgctgtggctggcatggcctca

SEQ ID NO: 279331 - DNA, 120 bp, Artificial Sequence
  ENSG00000129159_73 (sequence is synthesized)
gtgtctgagggcttgtcctgggaggggtatcaagaatccaattctcacctggttgtaggacctcttgggggatgctaggagggcgccctggcacagccagggattgcctagggctgaggg

SEQ ID NO: 279332 - DNA, 120 bp, Artificial Sequence
  ENSG00000129159_74 (sequence is synthesized)
gcccaggagaagctacttctctcccagaaaggggctccctcctgcatctgcagtcggatgcccagaccgcccactctggacagcccacaatgcctcctccgtcctgccatgcccattcgc

SEQ ID NO: 279333 - DNA, 120 bp, Artificial Sequence
  ENSG00000129159_75 (sequence is synthesized)
atgtgtcttgtccatctccgctcctgtgatgtgggtcagtcctttgtggtgccgcgtccagggctgcagggtcccacgtcagtgagcagtgggtggccggtggagggggtggtggtggcc

SEQ ID NO: 279334 - DNA, 120 bp, Artificial Sequence
  ENSG00000129159_76 (sequence is synthesized)
gggctcccttcctgcccatggcacctagaacagcagtgaggtctcagagaagcccccgcctgggctccctgggagctaaccttgcagcctctgggttatctttggcaaaggggtctaaag

SEQ ID NO: 279335 - DNA, 120 bp, Artificial Sequence
  ENSG00000129159_77 (sequence is synthesized)
tcccctatccccagcccctctacttcccctgctgggcagcagtggctgcccagtgagtggtgctatccatggaggggggagggagctgggcagcgctgactaggcggcgggtggggctaa

SEQ ID NO: 279336 - DNA, 120 bp, Artificial Sequence
  ENSG00000129159_78 (sequence is synthesized)
gagagtttctgcagggacccagctgcagggtcagcagcctgtgggccctgagtggggtctttgttgtcctcaggtgggctgtgggggaagtagcggagaaatgaagtgacgccaggggcc

SEQ ID NO: 279337 - DNA, 120 bp, Artificial Sequence
  ENSG00000129159_79 (sequence is synthesized)
aggcatgggtgttcttttccgtgttgttcacattttctctctttctctctctctccactaatcatgtttctctctctctcctcgttttgttgcatgacttgtgccggttctcgtgattgt

SEQ ID NO: 279338 - DNA, 120 bp, Artificial Sequence
  ENSG00000129159_80 (sequence is synthesized)
tccctgctcgtgtctcacagactgtccccatttagcctgagacttttttcctgagtccccagctgggcagatccctcagggctaaacccaaggaaatgcccagcaacccccaacccaccc

SEQ ID NO: 279339 - DNA, 120 bp, Artificial Sequence
  ENSG00000129159_81 (sequence is synthesized)
cagccccgcgtgcgcccctccggtgcccgcagctggtgtgaacagtaagtactttggcggtgcctggagaccagggcagaaaagccagctgtgctgactgagggcccagcctcgggttct

SEQ ID NO: 279340 - DNA, 120 bp, Artificial Sequence
  ENSG00000129159_82 (sequence is synthesized)
ccttgctccaaagtttaaaaaaaaatgaccctctcgcagatgctcatctcagcccatttcaagcctggaaaccatctctgagacgctgcccatgctgccatttcatcactgcaggcctgt

SEQ ID NO: 279341 - DNA, 120 bp, Artificial Sequence
  ENSG00000129159_83 (sequence is synthesized)
gggtctagtgggggcctgggggccctgggctgggggaggcagggcccccagcctctggaaagcaggtgggaatggaggctcctagccactatctcatccaaaggatggggcaggggcggg

SEQ ID NO: 279342 - DNA, 120 bp, Artificial Sequence
  ENSG00000129159_84 (sequence is synthesized)
ggctcacacctttgaccctattcatgggttccccagatttatacagttggcccctcgttggtttctctttcttcaagccacccctctggagttggggagggagaatgccccagtttctga

SEQ ID NO: 279343 - DNA, 120 bp, Artificial Sequence
  ENSG00000129159_85 (sequence is synthesized)
aagcatcttaaaccatagatagacgaacagcccaggggcctgggccccttcacagagcaagacttaagcttccccacccaatcattagtccctcctcaaaggttagggttgagagaagca

SEQ ID NO: 279344 - DNA, 120 bp, Artificial Sequence
  ENSG00000129159_86 (sequence is synthesized)
gtaggccctaggggtgtcccgggaatcccccaggagggaaaggtgccaggctatcatccctccagggatccctgatggatgttccttgtcccctgcccaaaaccatcccgaactttgggc

SEQ ID NO: 279345 - DNA, 120 bp, Artificial Sequence
  ENSG00000129159_87 (sequence is synthesized)
cctttagtgattgtgagagctgggagcccccagggcctgggggcttgtggacagaaccagtgggcgggggcccagcattcagagccagagaagggtctcaggcggcaccatctccacaga

SEQ ID NO: 279346 - DNA, 120 bp, Artificial Sequence
  ENSG00000129159_88 (sequence is synthesized)
ggcagaggcagagagaaggcacccccctctgacccacccctccccaggcaagaactgcaggctgtggacacctcccctggcagaggatggccaacagagactcagcaagtcctcactccc

SEQ ID NO: 279347 - DNA, 120 bp, Artificial Sequence
  ENSG00000129159_89 (sequence is synthesized)
ctcccagaaggagacgctgcctgggaggacccactgttctccccttgaggaaaatccatgcagggtgctatgggcctcaacccccacatcgtcatccgcgtcctctccatactgtttccc

SEQ ID NO: 279348 - DNA, 120 bp, Artificial Sequence
  ENSG00000129159_90 (sequence is synthesized)
tcccctctcccaacaccctcctccctcagcccggagacccttggatggaagactgggccagccagagtgggaggcaggaccagcgtgtctgcgagcacacgtgtgtgcctgcagacatgc

SEQ ID NO: 279349 - DNA, 120 bp, Artificial Sequence
  ENSG00000129159_91 (sequence is synthesized)
cccaagaccccagagacgccccggccccagtcacatggtgtcagagttaccttggcaactggcctttttggttcagagtaaattgggaagtgaagcccctgggatttgtcgagaaacgca

SEQ ID NO: 279350 - DNA, 120 bp, Artificial Sequence
  ENSG00000129159_92 (sequence is synthesized)
ctgtacgtgaaatgctttgccatcttgtacgaaagactttttttttaagttccaaaattatgatgggatttttttggatttgctttacgaataaatctgattggtccatttctcttttga

SEQ ID NO: 279351 - DNA, 120 bp, Artificial Sequence
  ENSG00000129159_93 (sequence is synthesized)
atctgcatttactgcttctgtcaagcatcaggcactaagctcagtcctttatatatattatcccgtctaactgtcatagttgctctgagcattttcattctttatctacatagggaaact

SEQ ID NO: 279352 - DNA, 120 bp, Artificial Sequence
  ENSG00000129159_94 (sequence is synthesized)
gaggttcaaggaggttataattcactcaacgttgcattgctaggaaggagcagagctgagtttctttcatggacttagtgtccctctcaaaatcacgtcaacttcatttgaaaattataa

SEQ ID NO: 279353 - DNA, 120 bp, Artificial Sequence
  ENSG00000129159_95 (sequence is synthesized)
tgaaactattaaaactataatattcttactttttatacaaaattattatctttcttttccaaccatacttgtacttgttacaacctcagaaggcctatataaagtaaagcgggggagtag

SEQ ID NO: 279354 - DNA, 120 bp, Artificial Sequence
  ENSG00000129159_96 (sequence is synthesized)
gagagccagagtattatctttattttatagatgtgctattggagcccttggagggcgagtaaattacttaaggtaatttaaatttcattttaaaattgaagattaacaaaggtacctgga

SEQ ID NO: 279355 - DNA, 120 bp, Artificial Sequence
  ENSG00000129159_97 (sequence is synthesized)
cagtttaaggagccagattaaaaagacatcttcactaggggacagtcagtactggatttggaaactgtcacagttttaaatacagtagtgcccccttatcttcaggggacatgttccaag

SEQ ID NO: 279356 - DNA, 120 bp, Artificial Sequence
  ENSG00000129159_98 (sequence is synthesized)
gaagctggagcaccgtgcatcgtccgggccgcctcgcgctcctgcagatgggtgggcagggcggcgggcaagggcgctgaggggcaggcaggcacaccgaggggggcaaggatggaggga

SEQ ID NO: 279357 - DNA, 120 bp, Artificial Sequence
  ENSG00000129159_99 (sequence is synthesized)
atctcccagggtcggcccctggagggctgaggcccttccccccaagtgagatgtcaggctggcagagagaacttgaggccctggcagctgtgggttgctgggagttgagaggggattgga

SEQ ID NO: 279358 - DNA, 120 bp, Artificial Sequence
  ENSG00000129159_100 (sequence is synthesized)
caggttgactttaggccatgaccccaaggcaggggtacccaggaatgcaggaggagccttgactcccccaggctgctcttgcagatggcaggtcaagtcccaaaggcaaagtgatctctc

SEQ ID NO: 279359 - DNA, 120 bp, Artificial Sequence
  ENSG00000129159_101 (sequence is synthesized)
ctctcccctgattgaggagggcagtggagtgggccaggaccctgtgaacttagctacacaagatccgtgttcttggcatggaagaggcatccttgaaagataatcaatccacaagccaga

SEQ ID NO: 279360 - DNA, 120 bp, Artificial Sequence
  ENSG00000129159_102 (sequence is synthesized)
gggaggagaggcaagaagagagagatgtcttcagggcttgggggtaaggccattgtccttgcagtcagaatattgctagtggcagatcgagaacttgccaagagaaggtggttgagcagg

SEQ ID NO: 279361 - DNA, 120 bp, Artificial Sequence
  ENSG00000129159_103 (sequence is synthesized)
acggtcctgccccttccatccgcagcacccacaggcctctgcccagggtgtggtcagcaccctcttgtggttggcgaaggctgaggctgctggtggcccctgctccaggtctctttgtag

SEQ ID NO: 279362 - DNA, 120 bp, Artificial Sequence
  ENSG00000129159_104 (sequence is synthesized)
tcagcacgctaggctgtccccactggagagagaggcttctcctagagcttcagcaccggccggggagaggcttggggtgggggcccagggcgcccgagctcaaggctccaggcactggcc

SEQ ID NO: 279363 - DNA, 120 bp, Artificial Sequence
  ENSG00000129159_105 (sequence is synthesized)
cggacctagaaggcagagggcacctttcttggtgcagcagactggctgggcagctcgtgcatgtcttggagtgcctcacacgtgcacacggatgcatgctgaacggggtgagcaggctgg

SEQ ID NO: 279364 - DNA, 120 bp, Artificial Sequence
  ENSG00000129159_106 (sequence is synthesized)
gtcagaagaggagctgggtttttgaaagcaacagttggtgcagcctatggtcattcacaactgctccagtatttgaagtgattaaaccacacgcaggagaaaacagaatgcaaaagcaaa

SEQ ID NO: 279365 - DNA, 120 bp, Artificial Sequence
  ENSG00000129159_107 (sequence is synthesized)
ggcaaacctagaagaggagaggcagcccgcacggagacgagggaacgtggttctggtcactggtgcttagttgtgcccacctggtctaggctggtctctgcttctctgccctgcccagag

SEQ ID NO: 279366 - DNA, 120 bp, Artificial Sequence
  ENSG00000129159_108 (sequence is synthesized)
gggcctgatgttcccctttgcgactggctttttcccagttggaggtgctagaatgcccagaagcagaatgcccgaggagtgaggggaaaagcaggtagacggttcccagtgtctgtgccc

SEQ ID NO: 279367 - DNA, 120 bp, Artificial Sequence
  ENSG00000129159_109 (sequence is synthesized)
tgcccagtaagctctcgtgggctttctgtctccatcatcttgaatgttagactgattggtgtggccccaaagagcagacaagacagtctctttactgtggtgccagaagcacagaaggga

SEQ ID NO: 279368 - DNA, 120 bp, Artificial Sequence
  ENSG00000129159_110 (sequence is synthesized)
gtgtgggacaggaacagcgctgctccctgcagtggctgggagtccagcggtaagcactgtccacaggagatacccattcctcagtcccaccgaggcttaggtgccagagtctttgggagg

SEQ ID NO: 279369 - DNA, 120 bp, Artificial Sequence
  ENSG00000129159_111 (sequence is synthesized)
cgctaagggtgaagtgtccccacctacatccattcggcccgcgctctcatggagccacgacagccgccgaggacttgtttttctcaggctaattctgagccagaaggcatgcaggtgtgt

SEQ ID NO: 279370 - DNA, 120 bp, Artificial Sequence
  ENSG00000129159_112 (sequence is synthesized)
gagtcaatgtgcagagcagaagtagggactcatcccattcccccaggagggagagaaagaggcgtgctaggctggctcagtgcatgggcaaaccaagccagctggagaagaatctgcctg

SEQ ID NO: 279371 - DNA, 120 bp, Artificial Sequence
  ENSG00000129159_113 (sequence is synthesized)
cctctgcatgcggctgttctgtctttcctcctccttcttaaaaactaagtaccaagcgggatgggagagccaagaagagaagctcaagtgttaattgtattctttacatacagatctttg

SEQ ID NO: 279372 - DNA, 120 bp, Artificial Sequence
  ENSG00000129167_0 (sequence is synthesized)
aattctcctggctagcagttatccatctagtgcatatgtatctagagctggccaggcctttagtttacaaaataaatagaaagccttgtccccactctggaggagcttgctgccttgtta

SEQ ID NO: 279373 - DNA, 120 bp, Artificial Sequence
  ENSG00000129167_1 (sequence is synthesized)
gaaggtgagatatgttcgaatagaacatttggggaaaccatttgagacctggtataatgaagtgctaagattgtgggcaaggtggggaggaggtaggccttcctgactagtttaggctac

SEQ ID NO: 279374 - DNA, 120 bp, Artificial Sequence
  ENSG00000129167_2 (sequence is synthesized)
aatagttgggaagactgcaagaagccagcaggcttcagtcatgccctaaaagagcgattggtttagaaaaaaaacaaaagggaactactaacatgtattctattctaggcaggtgtcagg

SEQ ID NO: 279375 - DNA, 120 bp, Artificial Sequence
  ENSG00000129167_3 (sequence is synthesized)
caaagttgtatcttattttggtctcactagattcttgcaaagcttatctgcatatccaggttttataaaaggttaagaaactgaagctcctagaagtaaatgagcccttagttatcaaat

SEQ ID NO: 279376 - DNA, 120 bp, Artificial Sequence
  ENSG00000129167_4 (sequence is synthesized)
attgtctgcattgtgcaacttcttttttagcccgtagtctttgttttcatactttagttttagagaattactccaaattcatcatgattgaagacaataaggagaacaaagaccattcct

SEQ ID NO: 279377 - DNA, 120 bp, Artificial Sequence
  ENSG00000129167_5 (sequence is synthesized)
tagaaaggggaagagcaagtctcattttttccttaaagaatgaagttggaggacttataaaagccctgaaaatctttcaggagaagcatgtgaatctgttacatatcgagtcccgaaaat

SEQ ID NO: 279378 - DNA, 120 bp, Artificial Sequence
  ENSG00000129167_6 (sequence is synthesized)
caaaaagaagaaactcagaatttgagatttttgttgactgtgacatcaacagagaacaattgaatgatatttttcatctgctgaagtctcataccaatgttctctctgtgaatctaccag

SEQ ID NO: 279379 - DNA, 120 bp, Artificial Sequence
  ENSG00000129167_7 (sequence is synthesized)
ataattttactttgaaggaagatggtatggaaactgttccttggtttccaaagaagatttctgacctggaccattgtgccaacagagttctgatgtatggatctgaactagatgcagacc

SEQ ID NO: 279380 - DNA, 120 bp, Artificial Sequence
  ENSG00000129167_8 (sequence is synthesized)
atcctggcttcaaagacaatgtctaccgtaaacgtcgaaagtattttgcggacttggctatgaactataaacatggagaccccattccaaaggttgaattcactgaagaggagattaaga

SEQ ID NO: 279381 - DNA, 120 bp, Artificial Sequence
  ENSG00000129167_9 (sequence is synthesized)
cctggggaaccgtattccaagagctcaacaaactctacccaacccatgcttgcagagagtatctcaaaaacttacctttgctttctaaatattgtggatatcgggaggataatatcccac

SEQ ID NO: 279382 - DNA, 120 bp, Artificial Sequence
  ENSG00000129167_10 (sequence is synthesized)
aattggaagatgtctccaactttttaaaagagcgtacaggtttttccatccgtcctgtggctggttacttatcaccaagagatttcttatcaggtttagcctttcgagtttttcactgca

SEQ ID NO: 279383 - DNA, 120 bp, Artificial Sequence
  ENSG00000129167_11 (sequence is synthesized)
ctcaatatgtgagacacagttcagatcccttctataccccagagccagatacctgccatgaactcttaggtcatgtcccgcttttggctgaacctagttttgcccaattctcccaagaaa

SEQ ID NO: 279384 - DNA, 120 bp, Artificial Sequence
  ENSG00000129167_12 (sequence is synthesized)
ttggcttggcttctcttggcgcttcagaggaggctgttcaaaaactggcaacgtgctactttttcactgtggagtttggtctatgtaaacaagatggacagctaagagtctttggtgctg

SEQ ID NO: 279385 - DNA, 120 bp, Artificial Sequence
  ENSG00000129167_13 (sequence is synthesized)
gcttactttcttctatcagtgaactcaaacatgcactttctggacatgccaaagtaaagccctttgatcccaagattacctgcaaacaggaatgtcttatcacaacttttcaagatgtct

SEQ ID NO: 279386 - DNA, 120 bp, Artificial Sequence
  ENSG00000129167_14 (sequence is synthesized)
actttgtatctgaaagttttgaagatgcaaaggagaagatgagagaatttaccaaaacaattaagcgtccatttggagtgaagtataatccatatacacggagtattcagatcctgaaag

SEQ ID NO: 279387 - DNA, 120 bp, Artificial Sequence
  ENSG00000129167_15 (sequence is synthesized)
acaccaagagcataaccagtgccatgaatgagctgcagcatgatctcgatgttgtcagtgatgcccttgctaaggtcagcaggaagccgagtatctaacagtagccagtcatccaggaac

SEQ ID NO: 279388 - DNA, 120 bp, Artificial Sequence
  ENSG00000129167_16 (sequence is synthesized)
atttgagcatcaattcggaggtctgggccatctcttgctttccttgaacacctgatcctggagggacagcatcttctggccaaacaatattatcgaattccactacttaaggaatcacta

SEQ ID NO: 279389 - DNA, 87 bp, Artificial Sequence
  ENSG00000129167_17 (sequence is synthesized)
aggtagcagctttaatgagacaatttatataccatacaagccactgaccacccatttttaatagagaagttgtttgacccaatagat

SEQ ID NO: 279390 - DNA, 120 bp, Artificial Sequence
  ENSG00000129167_18 (sequence is synthesized)
ccacccatttttaatagagaagttgtttgacccaatagatagatctaatctcagcctaactctattttccccaatcctccttgagtaaaatgaccctttaggatcgcttagaataacttg

SEQ ID NO: 279391 - DNA, 120 bp, Artificial Sequence
  ENSG00000129167_19 (sequence is synthesized)
aggagtattatggcgctgactcatattgttacctaagatccccttatttctaaagtatctgttacttattgctgaatttgtgccaagctcaatcacattcacactaaaatttaacaggag

SEQ ID NO: 279392 - DNA, 120 bp, Artificial Sequence
  ENSG00000129167_20 (sequence is synthesized)
accctgctgtctttgttgctagcatgagcaaaagtatagaggcctttgcacatggaggatacctagtaaagagcaagtagtctagtttcaagtgtagtatcttgtagggaaatgggagta

SEQ ID NO: 279393 - DNA, 120 bp, Artificial Sequence
  ENSG00000129167_21 (sequence is synthesized)
gctaagcctggaaaggttgaatggggcataatcattaagactaggctaaaaattcgagactttattttttaggcattagggagccccttcccaagtgactatcttccttgaaactttgtt

SEQ ID NO: 279394 - DNA, 120 bp, Artificial Sequence
  ENSG00000129167_22 (sequence is synthesized)
tatcctactcatgggtccaagggaaacttagtagagatgcgacttgcatggggctgtactcagacatgtggtcctaggtattataatgggattgtccccagattaacaggaagcattgtt

SEQ ID NO: 279395 - DNA, 120 bp, Artificial Sequence
  ENSG00000129167_23 (sequence is synthesized)
atcaaaggaagagttcaaactgagatagataagagaagcacaaagtaaaagatagaaaaaacagtgctgagtactttatttctaaggtataaggtgaggccataaacagaaaggtatgca

SEQ ID NO: 279396 - DNA, 120 bp, Artificial Sequence
  ENSG00000129167_24 (sequence is synthesized)
atgagagtagaggctgcagaaaaggggaggaaatagaatgtcagaaaggtcaagaagagtggtttaggactgagactgtaagtaatgtaaggattgccaaggaatggtttttatgcagag

SEQ ID NO: 279397 - DNA, 120 bp, Artificial Sequence
  ENSG00000129167_25 (sequence is synthesized)
tcagctgtgtagcacagggagtaagcagtcctgttataaatgggtgaagctgaactccaaaatacaaacttatgtctctttaatttgcccctttcctccctctagtcactaaatgaagat

SEQ ID NO: 279398 - DNA, 120 bp, Artificial Sequence
  ENSG00000129167_26 (sequence is synthesized)
gttcttcaagtttctgtctttgcacttctactctttttgccatctcttcatggggaatgtcacccagatacatgacttcagttcttattttgaatgactcctctatttgcagttataacc

SEQ ID NO: 279399 - DNA, 120 bp, Artificial Sequence
  ENSG00000129167_27 (sequence is synthesized)
ctgacatctttcttgaatttttttgccccttaattccaacgaactcctggatgtctatgtagatgtctcataatttaggccaatgctgtacaacttcatgtggcatcatccacatagaat

SEQ ID NO: 279400 - DNA, 120 bp, Artificial Sequence
  ENSG00000129167_28 (sequence is synthesized)
gaataggggttgttcaatatgacagccctgccaagcatctcaaattgaacaggtctataaaggaactcagaatcacttgaatatcacagtccatcagcttcctttcccagtaatttaatt

SEQ ID NO: 279401 - DNA, 120 bp, Artificial Sequence
  ENSG00000129167_29 (sequence is synthesized)
tccattaatggtatattaaacatcgtattttcaatcatttttaggtttagtcagctacttaaaaataggctttttcttcacataaataaattgtataccatttaatgtgttttatttcaa

SEQ ID NO: 279402 - DNA, 120 bp, Artificial Sequence
  ENSG00000129167_30 (sequence is synthesized)
tcaacagactaatagatcttttaacacttcttagtcctcaaaataaattattaaaaactttgtatttcatgtcatattatataaggaaatagaattttgaagaataattcatgctgtttt

SEQ ID NO: 279403 - DNA, 120 bp, Artificial Sequence
  ENSG00000129167_31 (sequence is synthesized)
ttttacattgtacattttaatagctaatcaactcttaagtatacatttgatggtaaatagatgctagctaatctagaatcatttgaaatattgattatctgatttatagtttggttgcaa

SEQ ID NO: 279404 - DNA, 120 bp, Artificial Sequence
  ENSG00000129167_32 (sequence is synthesized)
ggaaatctactgtaagcaaatcataatagatagcaaatcttagaacatgtagaaaaaaagaaattaaaaaaagcaaatcttagaacatgtagaaaaaggaaattaaaaaatagatagcaa

SEQ ID NO: 279405 - DNA, 120 bp, Artificial Sequence
  ENSG00000129167_33 (sequence is synthesized)
ataacacaaattatgcatactatatgtggttattttcatacaactttgataacggtgaagaatcatacttattgaattttaaaatgatgatgtttaaaatcactctatgactaaagcaca

SEQ ID NO: 279406 - DNA, 89 bp, Artificial Sequence
  ENSG00000129167_34 (sequence is synthesized)
aaaatgatgatgtttaaaatcactctatgactaaagcacatgagaataaatgttaaaggcacagccttataatccacaacttcagaaca

SEQ ID NO: 279407 - DNA, 120 bp, Artificial Sequence
  ENSG00000129167_35 (sequence is synthesized)
tgagccactgcacccggccaaacattggaaatttttaatgatggatttcagttcttctcacctctgggtatttgtaatatttggtaaatcaggagtcctgagagtcttagaattttcatg

SEQ ID NO: 279408 - DNA, 120 bp, Artificial Sequence
  ENSG00000129167_36 (sequence is synthesized)
ttttcatgcattttaaatatatgtcttcaaagcacctaggaatatgtaaatagttacccaaatgtgagaacagaattgaactaaaagcttcgtttataatttttttttttttttgagaca

SEQ ID NO: 279409 - DNA, 120 bp, Artificial Sequence
  ENSG00000129167_37 (sequence is synthesized)
ctctgttgcccaggctggagcgcagttgcgtgatttcagctcgctgcaacctgggactgcaggcgtgcttcaccatgccccgctaatttttgtttttttagtagagatggggtttcgcca

SEQ ID NO: 279410 - DNA, 120 bp, Artificial Sequence
  ENSG00000129167_38 (sequence is synthesized)
aaatcattattcaaagacatagttaatatcttcatgacttcttaaggatgctcaaaagctggtcttcagaatacctacatttctttatctacatattctgtcatttggagttatacaagt

SEQ ID NO: 279411 - DNA, 120 bp, Artificial Sequence
  ENSG00000129167_39 (sequence is synthesized)
agtaatgacacaccaaaatgtaaataattattgttagcttttaagttggcttccaaattcaaaaaagaaaaaaatcctgaattctctaaaggaacatatgatagagtccatatgttaatt

SEQ ID NO: 279412 - DNA, 120 bp, Artificial Sequence
  ENSG00000129167_40 (sequence is synthesized)
cataggaagtgtttaaggtactatggtctattttggtctaatctttgttttactatgtaatatatatttatgatttacaagtttgttattcagtgggataataaatgaacacaaaattta

SEQ ID NO: 279413 - DNA, 120 bp, Artificial Sequence
  ENSG00000129167_41 (sequence is synthesized)
aagaagagaggaagaacaaagccatggagaggatcttgggggtatttacagggaagggcaagccattttttttgctggagtgtactgtgggttgaatagagctataggaaataagtttgg

SEQ ID NO: 279414 - DNA, 120 bp, Artificial Sequence
  ENSG00000129170_0 (sequence is synthesized)
agttgagctgaacggagtccacacaggcagacttgaccttgaccagatagtcttcaagatgccaaactggggcggaggcgcaaaatgtggagcctgtgaaaagaccgtctaccatgcaga

SEQ ID NO: 279415 - DNA, 120 bp, Artificial Sequence
  ENSG00000129170_1 (sequence is synthesized)
agaaatccagtgcaatggaaggagtttccacaagacgtgtttccactgcatggcctgcaggaaggctcttgacagcacgacagtcgcggctcatgagtcggagatctactgcaaggtgtg

SEQ ID NO: 279416 - DNA, 120 bp, Artificial Sequence
  ENSG00000129170_2 (sequence is synthesized)
ctatgggcgcagatatggccccaaagggatcgggtatggacaaggcgctggctgtctcagcacagacacgggcgagcatctcggcctgcagttccaacagtccccaaagccggcacgctc

SEQ ID NO: 279417 - DNA, 120 bp, Artificial Sequence
  ENSG00000129170_3 (sequence is synthesized)
agttaccaccagcaacccttccaaattcactgcgaagtttggagagtccgagaagtgccctcgatgtggcaagtcagtctatgctgctgagaaggttatgggaggtggcaagccttggca

SEQ ID NO: 279418 - DNA, 120 bp, Artificial Sequence
  ENSG00000129170_4 (sequence is synthesized)
caagacctgtttccgctgtgccatctgtgggaagagtctggagtccacaaatgtcactgacaaagatggggaactttattgcaaagtttgctatgccaaaaattttggccccacgggtat

SEQ ID NO: 279419 - DNA, 120 bp, Artificial Sequence
  ENSG00000129170_5 (sequence is synthesized)
acttgccaagtaatcctgcacagatcgatacctttccccaaatagcctctcctttgtagtcgtacattatgtgtttctcctcagaagtgatcaggtctttactgaatgttagaagaggcc

SEQ ID NO: 279420 - DNA, 120 bp, Artificial Sequence
  ENSG00000129170_6 (sequence is synthesized)
tttggaagaaaattatgtaaagtttaatctataacaaatgctttattatttataatgcttggaatgggagaggcaataaataaatgttttagtgctatcttgtatggctctagatctttt

SEQ ID NO: 279421 - DNA, 120 bp, Artificial Sequence
  ENSG00000129170_7 (sequence is synthesized)
ctttgagatagaaattttcaaaaacataaagctagttcaaaaaacgagttgcagagcatataataaatttggatgtcaactgagaaaggagtgagaaggaagaaacaatgcgcaaaggaa

SEQ ID NO: 279422 - DNA, 120 bp, Artificial Sequence
  ENSG00000129170_8 (sequence is synthesized)
agcagtctttcagaatctgtcagccaagtgtctttctagttactgctaatggagaagaaaacagggggtctgggagaaaatagagaacatgatagcaaaatctaaaaggaaaatcaaaac

SEQ ID NO: 279423 - DNA, 120 bp, Artificial Sequence
  ENSG00000129170_9 (sequence is synthesized)
taataaaattgctgaagagttgatccctttgtcctatcgtggggctttgtaatgttacacatctcgtgaaaactcagaaatgacaataaagcgtggcatttgcctctgtattataaatga

SEQ ID NO: 279424 - DNA, 73 bp, Artificial Sequence
  ENSG00000129170_10 (sequence is synthesized)
caccttaggaatcatctgcctcacacgaatattctcaggccaaggctggtgacagccttcatatatttaaaga

SEQ ID NO: 279425 - DNA, 120 bp, Artificial Sequence
  ENSG00000129170_11 (sequence is synthesized)
ttgagctgaacggagtccacacaggcagttggaacaactggaaagcgggaggaaataatggaaagtctgctgaccttctcgtcttacaaccaccatataattcatggatgacagactttg

SEQ ID NO: 279426 - DNA, 120 bp, Artificial Sequence
  ENSG00000129173_0 (sequence is synthesized)
actgagcgagtggcggccgggggacagtacctgcttgccttattgggcaaatacagccttccaaggtggagtctaacgccgtggtgtgaactggccacccgaacagggagtaaatagtgc

SEQ ID NO: 279427 - DNA, 120 bp, Artificial Sequence
  ENSG00000129173_1 (sequence is synthesized)
tttgtatctttaaggaagcccttttttaaatttaaaaaaaaagtcttaattataagactctttaaatgcccaactgcatacttggagctttgggactgaatttggaactttcctgtcaag

SEQ ID NO: 279428 - DNA, 120 bp, Artificial Sequence
  ENSG00000129173_2 (sequence is synthesized)
cgacctcccacgactttactgctgagcctgtgcacgtgtgtgtaaggggagaaatccaggcatctagatgcagacttgtacccagttacttggggtcgcgtgcgctcagctgggacctgg

SEQ ID NO: 279429 - DNA, 120 bp, Artificial Sequence
  ENSG00000129173_3 (sequence is synthesized)
gctcgtgcgcttagtccggagccctgatctgcgaacaggatattaaaacttttagtacaattgattggactacttgaaccatcgggatttggggaggaactccagatttttcatttttaa

SEQ ID NO: 279430 - DNA, 120 bp, Artificial Sequence
  ENSG00000129173_4 (sequence is synthesized)
actctaaatgtatgaggaatttacagaatggagaacgaaaaggaaaatctcttttgtgagccacataaaaggggactaatgaaaacacctctgaaagaatccaccacagcaaatatcgtg

SEQ ID NO: 279431 - DNA, 120 bp, Artificial Sequence
  ENSG00000129173_5 (sequence is synthesized)
ttggcagagatccagcctgactttggccctttaaccacacctaccaagcccaaggaaggctctcagggagagccgtggacaccgacagccaacctgaaaatgctcatcagtgctgtgagc

SEQ ID NO: 279432 - DNA, 120 bp, Artificial Sequence
  ENSG00000129173_6 (sequence is synthesized)
cctgagatccgcaacagagatcagaaaaggggtttgtttgacaacagaagtggattacctgaggccaaagactgtatacacgaacacttatctggagatgaatttgagaaatcccaacca

SEQ ID NO: 279433 - DNA, 120 bp, Artificial Sequence
  ENSG00000129173_7 (sequence is synthesized)
agtcgaaaagagaaaagtttaggattattgtgtcataagttcttagcacgatatcctaattatcccaaccctgctgtgaataatgacatctgccttgacgaagtggcagaggaacttaat

SEQ ID NO: 279434 - DNA, 120 bp, Artificial Sequence
  ENSG00000129173_8 (sequence is synthesized)
gttgaacgtcgacgcatttacgatatcgtgaacgtcctagagagtttacatatggtgagccgcctcgccaaaaacaggtacacttggcacgggcgacacaatctcaacaaaacccttggc

SEQ ID NO: 279435 - DNA, 120 bp, Artificial Sequence
  ENSG00000129173_9 (sequence is synthesized)
accttgaagagcatcggggaggagaataagtacgccgagcagattatgatgatcaaaaagaaagaatatgagcaagagtttgactttattaagagttacagtatagaggatcatatcatc

SEQ ID NO: 279436 - DNA, 120 bp, Artificial Sequence
  ENSG00000129173_10 (sequence is synthesized)
aaatcaaacactggcccaaatggacacccagacatgtgttttgtggaactccctggagtggaatttcgggcagcttctgtaaacagccgcaaagacaagtctttaagggtaatgagccag

SEQ ID NO: 279437 - DNA, 120 bp, Artificial Sequence
  ENSG00000129173_11 (sequence is synthesized)
aaatttgtgatgctgtttttggtgtcaacgcctcagatagtaagcctagaagttgctgccaagattttaattggggaggaccatgtggaagatttggataaaagcaagtttaaaacaaaa

SEQ ID NO: 279438 - DNA, 120 bp, Artificial Sequence
  ENSG00000129173_12 (sequence is synthesized)
attaggaggttgtatgatatagctaatgttctgagtagcctggatcttatcaagaaagttcatgttacagaggaaagaggccgaaaaccagctttcaaatggaccggcccagaaatcagt

SEQ ID NO: 279439 - DNA, 120 bp, Artificial Sequence
  ENSG00000129173_13 (sequence is synthesized)
ccaaataccagtggctccagcccagtcattcattttactccctctgatttggaggtgagacggtcttcaaaagagaactgtgccaaaaacctcttttccacacgtgggaaaccaaacttt

SEQ ID NO: 279440 - DNA, 120 bp, Artificial Sequence
  ENSG00000129173_14 (sequence is synthesized)
actcgacacccatctcttatcaaattggtaaagagtatagaaagtgatcggagaaagataaattctgcgcccagtagccctatcaagaccaacaaagctgagagttctcagaattctgca

SEQ ID NO: 279441 - DNA, 120 bp, Artificial Sequence
  ENSG00000129173_15 (sequence is synthesized)
gaccctgcaaaccagtagcccctctggaccccccagtgaatgctgagatggagctgacagcaccgtccctcatccagcccctgggaatggttcccctgatccccagccccttgtcatcag

SEQ ID NO: 279442 - DNA, 120 bp, Artificial Sequence
  ENSG00000129173_16 (sequence is synthesized)
cagtgcccctgatcctacctcaggccccttcaggcccatcctatgccatctacctgcagcccactcaagcccaccaaagtgtgacgccaccccaaggcctgagcccaacggtgtgcacca

SEQ ID NO: 279443 - DNA, 120 bp, Artificial Sequence
  ENSG00000129173_17 (sequence is synthesized)
cccactcttctaaagctactggctcaaaagactccacagatgccaccactgagaaggcagccaatgatacctcaaaggccagtgcctctaccaggcctggaagcttgctgccagcaccag

SEQ ID NO: 279444 - DNA, 120 bp, Artificial Sequence
  ENSG00000129173_18 (sequence is synthesized)
agaggcaaggggcaaagagccgaaccagggagccagctggagaaagaggctcaaagagggcaagcatgctcgaggacagtggttccaaaaagaaatttaaagaggacctaaaaggacttg

SEQ ID NO: 279445 - DNA, 120 bp, Artificial Sequence
  ENSG00000129173_19 (sequence is synthesized)
aaaatgtctccgcaaccttgttcccatcaggatacctaatccctctcacgcagtgctcatccctgggggcagagtccattttgtctggtaaagaaaactcaagtgctctttccccaaacc

SEQ ID NO: 279446 - DNA, 120 bp, Artificial Sequence
  ENSG00000129173_20 (sequence is synthesized)
acaggatttacagctccccaattgcaggtgttattccagtgacatcatctgaactcactgctgttaattttccctcttttcatgtaacaccgttgaagctaatggtctcaccaacttccg

SEQ ID NO: 279447 - DNA, 120 bp, Artificial Sequence
  ENSG00000129173_21 (sequence is synthesized)
tggcagccgtacctgtcgggaacagcccggctctcgcttcaagccaccctgttcccatccagaacccaagctcagccattgtaaacttcaccctgcagcacctgggactcatctcaccca

SEQ ID NO: 279448 - DNA, 120 bp, Artificial Sequence
  ENSG00000129173_22 (sequence is synthesized)
atgtgcagttgtctgccagccctgggtctggaatcgttcctgtgtctccaagaatagagtctgttaatgtcgcaccagaaaatgcaggcactcagcaaggaagggccaccaactatgact

SEQ ID NO: 279449 - DNA, 120 bp, Artificial Sequence
  ENSG00000129173_23 (sequence is synthesized)
caccagtcccaggccagagccagccaaatggacaatcagttgctgtgacaggggcacaacagcctgttcctgtgacacccaaagggtcacaattagtggccgaaagtttcttccgtaccc

SEQ ID NO: 279450 - DNA, 120 bp, Artificial Sequence
  ENSG00000129173_24 (sequence is synthesized)
caggtggacccaccaagccaaccagctcatcctgcatggattttgagggtgctaataaaacctccttaggaactctctttgtcccacagcgaaaactggaagtctcaacagaggatgtcc

SEQ ID NO: 279451 - DNA, 120 bp, Artificial Sequence
  ENSG00000129173_25 (sequence is synthesized)
attaatcaacagatgttggcttagtttaattttctaaagagttgtttaatagagaaaatgtacacagactgatttggagaacacattctctgaaaatactgtaaatacgttggggatttg

SEQ ID NO: 279452 - DNA, 79 bp, Artificial Sequence
  ENSG00000129173_26 (sequence is synthesized)
tataaagctaagtttagctttcaatcctacaaaataaaagtaaaatgttgaactctaagatatattaacttctaggggg

SEQ ID NO: 279453 - DNA, 120 bp, Artificial Sequence
  ENSG00000129173_27 (sequence is synthesized)
gtaaaatgttgaactctaagatatattaacttctagggggaaaaatccattattttagctatgcctatactattatgcaaagtaactgtattaaagtttacttccctctaagcaaatatg

SEQ ID NO: 279454 - DNA, 120 bp, Artificial Sequence
  ENSG00000129173_28 (sequence is synthesized)
cttgacatgcctaacacagcattcccttaaacattttgcacaaagaaaatgctgtgtgatgtataatgttgtatttttaaataggggtatagctatattttttgtaatttctttaatctg

SEQ ID NO: 279455 - DNA, 120 bp, Artificial Sequence
  ENSG00000129173_29 (sequence is synthesized)
ttgttgcagtgtatctttttgtaaagtttgcaacaatcctcaatcaagtctatggaaaaattatttataaaatgtatttttaatcataagttgttcaaattaaaacttttctaaaatata

SEQ ID NO: 279456 - DNA, 120 bp, Artificial Sequence
  ENSG00000129173_30 (sequence is synthesized)
aaatcgggggcttggctgctcctggacggtcacgctccctctgcccgccagccggcccgccagtcccggtcccggcgtctctctccggcacccacctcggcgctgcggaaagactgactg

SEQ ID NO: 279457 - DNA, 120 bp, Artificial Sequence
  ENSG00000129173_31 (sequence is synthesized)
ccaggtacgcgggctcccgggcctgagaggggcagcggtgctgacgagtcccggctcagcccccgccggctcccgccgtgaggtggactgacaggatattaaaacttttagtacaattga

SEQ ID NO: 279458 - DNA, 120 bp, Artificial Sequence
  ENSG00000129173_32 (sequence is synthesized)
gaaacatgttctgcattattcggggcaagcattgggaagggtgggagggtattctcctctaggagccaggtgaccagcctgcctgcagcccactccgctggaggctttggtccaatgagg

SEQ ID NO: 279459 - DNA, 80 bp, Artificial Sequence
  ENSG00000129187_0 (sequence is synthesized)
tgaacaccgccggccggaccgcgggctgcgtcacggggaccgggaggcgtacggcgacgcggagcagcgcctttgcggcg

SEQ ID NO: 279460 - DNA, 80 bp, Artificial Sequence
  ENSG00000129187_1 (sequence is synthesized)
cgctgcccccttccggccccgcggcggccccgcctcctcccccgacttccttccctgagcacggcggcggcggggacgag

SEQ ID NO: 279461 - DNA, 120 bp, Artificial Sequence
  ENSG00000129187_2 (sequence is synthesized)
ggcggggacgagcaccggcctgcgcgcggagccggcaccggatgacccaacatgagtgaagtttcctgcaagaaacgggacgactatttggaatggccagagtattttatggctgtggcc

SEQ ID NO: 279462 - DNA, 120 bp, Artificial Sequence
  ENSG00000129187_3 (sequence is synthesized)
ttcttatcagcacagagaagcaaagatccaaattcccaggtcggcgcctgcatcgtgaattcagaaaacaagattgtcgggattgggtacaatgggatgccaaatgggtgcagtgatgac

SEQ ID NO: 279463 - DNA, 120 bp, Artificial Sequence
  ENSG00000129187_4 (sequence is synthesized)
gtgttgccttggagaaggacagcagagaataagctggacaccaaatacccgtacgtgtgccatgcggagctgaatgccatcatgaacaaaaattcgaccgatgtgaaaggctgtagtatg

SEQ ID NO: 279464 - DNA, 120 bp, Artificial Sequence
  ENSG00000129187_5 (sequence is synthesized)
tatgttgccttgttcccttgtaatgaatgcgctaagctcatcatccaggcaggtataaaagaagtgattttcatgtctgataaataccatgatagtgacgaggcaactgctgcgaggctc

SEQ ID NO: 279465 - DNA, 120 bp, Artificial Sequence
  ENSG00000129187_6 (sequence is synthesized)
ctgtttaatatggccggggtgacattccggaaattcataccgaagtgcagcaagattgtcattgactttgattcaattaacagcagaccgagtcaaaagcttcagtgagttacatctcat

SEQ ID NO: 279466 - DNA, 120 bp, Artificial Sequence
  ENSG00000129187_7 (sequence is synthesized)
tcaatctccagaagattgggattatcgtcttctaagaggttgctaatgcctttcatcttgaagttacacataacttcttactagccagtatggcaaaagtaggcatctaaagaatataaa

SEQ ID NO: 279467 - DNA, 120 bp, Artificial Sequence
  ENSG00000129187_8 (sequence is synthesized)
gaactattgctttagggtttaaaataggggagcctgtggtggcctggtgcacagggctagaacgagagtgcctccccttcttgtgtcctggctggctgggatgctggtggctcttcagag

SEQ ID NO: 279468 - DNA, 120 bp, Artificial Sequence
  ENSG00000129187_9 (sequence is synthesized)
gagcatcagctgtctgtcatctgctgcgatccggcagcctctcttcactgctacatgtgctggaaggacaaataaataattgtggttgtgttcttaatggggacgagcagacacactgat

SEQ ID NO: 279469 - DNA, 120 bp, Artificial Sequence
  ENSG00000129187_10 (sequence is synthesized)
ctgaacatctggcccaagtgaagcatggcatatagtgcccttggaagaaaattaggcctcaaatgacagtagcattgaagtgtttgctgcagagttgagggaaacccccagccaccctcc

SEQ ID NO: 279470 - DNA, 120 bp, Artificial Sequence
  ENSG00000129187_11 (sequence is synthesized)
cggaatccgagatagggtggcacatctgtcctgacagacgaggagtgtaactgaaccaggaatatttcctccattcctgctctcccactgcacacagggtggtggcacattatccctctg

SEQ ID NO: 279471 - DNA, 120 bp, Artificial Sequence
  ENSG00000129187_12 (sequence is synthesized)
gggggtggggacgcctgttgttttggctcaatttgggtttgttggtcacatggagctcttccatttcgtttagctgaataatgagttgttcctagaggagacagcctgtctctccttgtt

SEQ ID NO: 279472 - DNA, 120 bp, Artificial Sequence
  ENSG00000129187_13 (sequence is synthesized)
gcccccaaagcccatgccctgccgtggtggcagctggggctgtggatgggaggggtccccaacatggatgtgttgcccctcctccgcatgccaacgcagttcatgtacaaggcccctctg

SEQ ID NO: 279473 - DNA, 120 bp, Artificial Sequence
  ENSG00000129187_14 (sequence is synthesized)
caactggagagaaaattaattcctatcccgtgagtggattgtgagaaattccacccacgtggagacagcttactgcagcactgttggtgttcggagctcttctgtgccctggctccatgc

SEQ ID NO: 279474 - DNA, 120 bp, Artificial Sequence
  ENSG00000129187_15 (sequence is synthesized)
tttcacctacacaagcatcaccttcctaatcaccgcggggcggggagcgtgtggctgtgccccttctctttaatctcatttaatttttattaaacatgctcagtacctgtgttgagaaaa

SEQ ID NO: 279475 - DNA, 120 bp, Artificial Sequence
  ENSG00000129187_16 (sequence is synthesized)
gtagcagatgcctaaataaagtgtggagcctgaagcagaagttttgggagatgcttgccttcctttagaccacattcctcgcctttctcaagatttctccgtgacccaacatgagtgaag

SEQ ID NO: 279476 - DNA, 120 bp, Artificial Sequence
  ENSG00000129187_17 (sequence is synthesized)
gacttccttccctgagcacggcggcggcggggacgagcaccggcctgcgcgcggagccggcaccggatggtgggcgggggccagccgtgcggacccaacatgagtgaagtttcctgcaag

SEQ ID NO: 279477 - DNA, 120 bp, Artificial Sequence
  ENSG00000129187_18 (sequence is synthesized)
ttaaagtgctcttatattttcatgagtttttattttgtctctgagattttgtattccacattctagggtattctgtaatttggctccttaccaatattattaaaatcttattaaaatcta

SEQ ID NO: 279478 - DNA, 120 bp, Artificial Sequence
  ENSG00000129187_19 (sequence is synthesized)
atcgttgtattcgagctccagttctctctgtttctacagctgggcctcagtcctcacagggctctagtgggcgttcagccacaccaggagaaggcgcccaggggattaacaggacccttc

SEQ ID NO: 279479 - DNA, 120 bp, Artificial Sequence
  ENSG00000129187_20 (sequence is synthesized)
cctctcctgctcttccctcgccccccatggctccccctccctcctatttagtaggtacttctccagcaccccacagcgatgatggatgctggccctaaagccagacccaacatgagtgaa

SEQ ID NO: 279480 - DNA, 120 bp, Artificial Sequence
  ENSG00000129187_21 (sequence is synthesized)
gggcgggggcctggggccgcggacgctgggggcgcctcggccgcgctcagcctttagatcggagaatgcgggcggggtgggggcgctcggggtccccgcagtcactccagggtcgatttc

SEQ ID NO: 279481 - DNA, 120 bp, Artificial Sequence
  ENSG00000129187_22 (sequence is synthesized)
gggcgctcggggtccccgcagtcactccagggtcgatttctcggcgggcgccgcggcctgtgcgaggccgggccccttggagtgccccgggaggtggtgctgggcgtctgaacaccacat

SEQ ID NO: 279482 - DNA, 120 bp, Artificial Sequence
  ENSG00000129187_23 (sequence is synthesized)
gatcaggagctcggggaggggtggcctgtgtccggcatcatgcagaaagccacatgcgtggctcactgtaacatttcttcaaaggggagtgcagtggactgaatgtgtctccccccaaat

SEQ ID NO: 279483 - DNA, 120 bp, Artificial Sequence
  ENSG00000129187_24 (sequence is synthesized)
tcacatgttgaaaccctaattccaatgtgctgatatttggaggtggggcctggggggacgtaattaggccatgagggtggagctctcctgaatgggattagtgcccttctaaaagggacc

SEQ ID NO: 279484 - DNA, 120 bp, Artificial Sequence
  ENSG00000129194_0 (sequence is synthesized)
gccacaaacgctgagcccaggtgggagaggtctggcctatccgcgcctggcagctgtcggaactccggagaccacaaaggggtttatggtttaccccctccacggaaggtcggtctgatc

SEQ ID NO: 279485 - DNA, 120 bp, Artificial Sequence
  ENSG00000129194_1 (sequence is synthesized)
gcagctgcgggtcggggagagggaccgggggtcccccagtcagtaggcctcagaacacctcttcagtgccggggcaccagacagcggattttgcattcgactctccccaaagtgtgccga

SEQ ID NO: 279486 - DNA, 120 bp, Artificial Sequence
  ENSG00000129194_2 (sequence is synthesized)
acaggttggaagcaaaggctccggtttaagctctgggcttggggataaaatacactttttaaggacccaagttcctcggcaacgactccagactgggaagacctttccattttcaggatc

SEQ ID NO: 279487 - DNA, 120 bp, Artificial Sequence
  ENSG00000129194_3 (sequence is synthesized)
gacgcttcacgttgaggggagggcattcaggacgccctcttaaggcttctcccaacccatggcgctaccaggctcctcacaggaccaggcctggagcctggagcctccggctgccacggc

SEQ ID NO: 279488 - DNA, 120 bp, Artificial Sequence
  ENSG00000129194_4 (sequence is synthesized)
tgctgcctcctcatcttcgggaccccaggagcgggagggcgctgggagccccgcggcccccgggacgctgcccctggagaaggtgaagcggccgatgaacgcgttcatggtgtggagctc

SEQ ID NO: 279489 - DNA, 120 bp, Artificial Sequence
  ENSG00000129194_5 (sequence is synthesized)
cgctcagcgccgccagatggcgcagcagaaccccaagatgcacaactccgagatctccaagcgcctgggcgcgcagtggaagctgctggacgaggacgagaagcggcccttcgtggagga

SEQ ID NO: 279490 - DNA, 120 bp, Artificial Sequence
  ENSG00000129194_6 (sequence is synthesized)
ggccaagcggctccgcgcccgacacctgcgcgactaccccgactacaagtaccggcctcggcgcaaggccaagagctcgggcgccggaccttcccgctgcggacagggaagaggcaacct

SEQ ID NO: 279491 - DNA, 120 bp, Artificial Sequence
  ENSG00000129194_7 (sequence is synthesized)
ggccagcggcggcccgctctgggggccggggtacgcgaccacccaaccgagcagaggctttgggtacagaccccccagctactcgacagcctacctgcctggcagctatggctcttccca

SEQ ID NO: 279492 - DNA, 120 bp, Artificial Sequence
  ENSG00000129194_8 (sequence is synthesized)
ctgcaaactggaagccccctcaccgtgctccctccctcagagtgaccctaggctccagggggaactgctgcccacctatacccactacctgccccctggctctcccactccatacaaccc

SEQ ID NO: 279493 - DNA, 120 bp, Artificial Sequence
  ENSG00000129194_9 (sequence is synthesized)
tccccttgctggtgcccccatgcccctaacccacctctaaccctcatggacgcagacctcacgggacgggcctcatcctccttttttaatccagcagcatcccctaccccaggctgtcaa

SEQ ID NO: 279494 - DNA, 120 bp, Artificial Sequence
  ENSG00000129194_10 (sequence is synthesized)
ccctttctcctgttggactacagttcagaggcagcctgcagtcctcccatgatagccagggagagccgcacaacatacaattatatttttggtagtattaaacagttttgtattattcaa

SEQ ID NO: 279495 - DNA, 120 bp, Artificial Sequence
  ENSG00000129194_11 (sequence is synthesized)
gacggaggcccatgcgcccctcttctggagccttggtgggggcggatgccggaggacgggagcccacccaagcagaggccactcgcggccaaggtgtggcgggcgcaggcccagtacctc

SEQ ID NO: 279496 - DNA, 120 bp, Artificial Sequence
  ENSG00000129195_0 (sequence is synthesized)
gtgctgcggctgtgctcggccttagtggtgtcggggtctagtggacagagaagactcttggccaggcagatggcttctcggtggcagaacatggggacctccgtgcgccggagatctctc

SEQ ID NO: 279497 - DNA, 120 bp, Artificial Sequence
  ENSG00000129195_1 (sequence is synthesized)
cagcaccaggagcagctggaggacagcaaggagctgcagcctgtggtcagccatcaggagacctctgtaggggccctggggtccctgtgcagacagttccaaaggaggctgcccctgaga

SEQ ID NO: 279498 - DNA, 120 bp, Artificial Sequence
  ENSG00000129195_2 (sequence is synthesized)
gccgtcaacctcaacctccgcgcagggccctcctggaaacgcctggaaaccccagagccaggtcagcagggcctccaggctgcagctcgctcagctaagagtgctttgggtgccgtgtcc

SEQ ID NO: 279499 - DNA, 120 bp, Artificial Sequence
  ENSG00000129195_3 (sequence is synthesized)
cagagaatccaggagtcctgccaaagtggcaccaagtggctggtggagacccaggtgaaggccaggaggcggaagagaggagcacagaagggcagtggatccccaactcacagcctgagc

SEQ ID NO: 279500 - DNA, 120 bp, Artificial Sequence
  ENSG00000129195_4 (sequence is synthesized)
cagaagagcacccggctgtctggagccgcccctgcccactcagccgcagacccctgggagaaggagcatcaccgcctctctgtccggatgggctcacatgcccacccattacggcgatca

SEQ ID NO: 279501 - DNA, 120 bp, Artificial Sequence
  ENSG00000129195_5 (sequence is synthesized)
aggcgggaggctgccttccggagcccctactcctcaacagagcccctctgctctcccagcgagtctgacagtgacctagagcctgtgggggcgggaattcagcatctccagaagctgtcc

SEQ ID NO: 279502 - DNA, 120 bp, Artificial Sequence
  ENSG00000129195_6 (sequence is synthesized)
caagagctagatgaagccattatggcggaagagagtggtgacatcgtctctctcattcatgactgaggaagtgcctgcaggaaacaagccctgtctgaccgccaaggcttcatactcaag

SEQ ID NO: 279503 - DNA, 120 bp, Artificial Sequence
  ENSG00000129195_7 (sequence is synthesized)
cagccacatctggacccatcagtgactgcctgccatagcctgagagtgtcttggggagaccttgcagagggggagaattgttccttctgctttcctaggggactcttgagcttagaaact

SEQ ID NO: 279504 - DNA, 120 bp, Artificial Sequence
  ENSG00000129195_8 (sequence is synthesized)
catcgtacacttgaccttgagccttctatttgcctcatctataacatgaagtgctagcatcagatatttgagagctcttagctctgtacccgggtgcctggtttttggggagtcatccgc

SEQ ID NO: 279505 - DNA, 120 bp, Artificial Sequence
  ENSG00000129195_9 (sequence is synthesized)
agagtcactcacccactgtgtttctggtgccaaggctcttgagggccccactctcatccctcctttccctaccagggactcggaggaaggcataggagatatttccaggcttacgaccct

SEQ ID NO: 279506 - DNA, 120 bp, Artificial Sequence
  ENSG00000129195_10 (sequence is synthesized)
gggctcacgggtacctatttatatgctcagtgcagagcactgtggatgtgccaggaggggtagccctgttcaagagcaatttctgccctttgtaaattatttaagaaacctgctttgtca

SEQ ID NO: 279507 - DNA, 120 bp, Artificial Sequence
  ENSG00000129195_11 (sequence is synthesized)
ttttattagaaagaaaccagcgtgtgactttcctagataacactgctttctcataataaagactatttgcatttgacatctgttccctttcaccggcaacctccaacctcccccgccctc

SEQ ID NO: 279508 - DNA, 120 bp, Artificial Sequence
  ENSG00000129195_12 (sequence is synthesized)
ccacaccactctgggctatagatttgtaatttgtggtttggggtctggccctcatccacctctgctccgagccagtctgcccccaatcccaccccagggagaacatgtagaaagggaaag

SEQ ID NO: 279509 - DNA, 120 bp, Artificial Sequence
  ENSG00000129195_13 (sequence is synthesized)
gtttctcaacttagttcagaccaaaacacattgtaaaggcaaagaaggtttttatttaagtgacaacatttgagagctaaaaaccagctcacatcaaaatcaagacccagttgtaaaaat

SEQ ID NO: 279510 - DNA, 120 bp, Artificial Sequence
  ENSG00000129195_14 (sequence is synthesized)
cttttaactccataatgctgtttttgtcttgttagaaatctgatatcttacattagcgtttctaacggattttgtacaaggcagccataaggaatataataaacctttttcaccacagaa

SEQ ID NO: 279511 - DNA, 120 bp, Artificial Sequence
  ENSG00000129195_15 (sequence is synthesized)
ctccgtggctcgtctgtgccctgcctgcctatggaattgggaaaagcaacctgactgctatggagttcctgtggtgacatcgtctctctcattcatgactgaggaagtgcctgcaggaaa

SEQ ID NO: 279512 - DNA, 120 bp, Artificial Sequence
  ENSG00000129195_16 (sequence is synthesized)
gttgtggacctcccctaacttggggctgtttccccattccacttgtataatggccatgatgggctctaaggctgggccctgccagctctatgtgttgaggggccatattcctaccacatt

SEQ ID NO: 279513 - DNA, 120 bp, Artificial Sequence
  ENSG00000129195_17 (sequence is synthesized)
aaagtgaaggggccgggagggcccctccagccatctttgtaggcaggcgttggttctgctctgacctgctgtgtgaccctggccagtctctgcccctctctgggcctcagtctccctcat

SEQ ID NO: 279514 - DNA, 120 bp, Artificial Sequence
  ENSG00000129195_18 (sequence is synthesized)
ccatctcatgcatgagcaagttaaagaaaaagcccacagagctgatgggcacagcagagtaggtagtacctacttgccgcttgaagccagagctgctaacctcactgaccccgtcattaa

SEQ ID NO: 279515 - DNA, 120 bp, Artificial Sequence
  ENSG00000129195_19 (sequence is synthesized)
cagcacgctgggggccccaagtagctacagccaccttccagcaccccccaccccgcagtgagcagggaaaggcatccctacttctcctaccttgagcacagtgaaaaaggcagctctgtc

SEQ ID NO: 279516 - DNA, 120 bp, Artificial Sequence
  ENSG00000129197_0 (sequence is synthesized)
cggccgccatcttggcccaactgctcccctcactccagttgctcagcccgccgctgagcacagccaatccgcggccgtccactcactgtttcggccaatcaccgagcagacggcccggaa

SEQ ID NO: 279517 - DNA, 120 bp, Artificial Sequence
  ENSG00000129197_1 (sequence is synthesized)
gctcgagaggctcgtgccaggtcggggggcgaaggcgaggccagcccaccaagcaggggcgtcaccaagggaaagccaatcaccattatttctgaagcccaagggggcgggacgagaagt

SEQ ID NO: 279518 - DNA, 120 bp, Artificial Sequence
  ENSG00000129197_2 (sequence is synthesized)
caacataatggtggtgctgctggaaatctagcacctggggagagcctgagacttgtgtatctaattgcctattggacacctccatctgggtaaacccaggcatccagaactttccctcaa

SEQ ID NO: 279519 - DNA, 120 bp, Artificial Sequence
  ENSG00000129197_3 (sequence is synthesized)
gacttacctccctcagtgcaggtcgggctggcctcacgcatttcgcttggatgcctaaatctgtctccacgtggggccggtcgataaaacaacacttcccagaatacgctgcgatccatt

SEQ ID NO: 279520 - DNA, 120 bp, Artificial Sequence
  ENSG00000129197_4 (sequence is synthesized)
cgcggtctgcacccggaaagtacacctcccaggggtctgtgcgcgcctccagggaacgggtcttgtggctttgtctcccgcgaagaggagatggcggagtcgttgaggtctccgcgccgc

SEQ ID NO: 279521 - DNA, 120 bp, Artificial Sequence
  ENSG00000129197_5 (sequence is synthesized)
tccctgtacaaactggtgggctcgccgccttggaaagaggctttccggcagagatgcctggagagaatgagaaacagccgggacaggctcctaaacaggtaccgccaggctggaagcagt

SEQ ID NO: 279522 - DNA, 120 bp, Artificial Sequence
  ENSG00000129197_6 (sequence is synthesized)
ggctcagctggaggagctgatagacatggctgtgctggaggaaattcaacaggagctgatcaaccaagagcagtccatcatcagcgagtatgagaagagcttgcagtttgatgaaaagtg

SEQ ID NO: 279523 - DNA, 120 bp, Artificial Sequence
  ENSG00000129197_7 (sequence is synthesized)
tctcagcatcatgctggctgagtgggaggcaaacccactcatctgtcctgtatgtacaaagtacaacctgagaatcacaagcggtgtggtggtgtgtcagtgtggcctgtccatcccatc

SEQ ID NO: 279524 - DNA, 120 bp, Artificial Sequence
  ENSG00000129197_8 (sequence is synthesized)
tcattcttctgagttgacagagcagaagcttcgtgcctgtttagagggtagtataaatgagcacagtgcacattgtccccacacacctgaattttcagtcactggaggaacagaagaaaa

SEQ ID NO: 279525 - DNA, 120 bp, Artificial Sequence
  ENSG00000129197_9 (sequence is synthesized)
gtccagtcttctcatgagctgtctggcctgtgatacttgggctgtgatcctctagagccagcttggactcacatcattctatggggttgaagacaactcattccctctgaggagccttgt

SEQ ID NO: 279526 - DNA, 120 bp, Artificial Sequence
  ENSG00000129197_10 (sequence is synthesized)
acatacaagccttttatttataacttattttgtattgaaacttttaaacaatactgaagaaaaaaaaacttttccgacatctgttcttggtcttttgtgacgcaggttgaagggggagga

SEQ ID NO: 279527 - DNA, 120 bp, Artificial Sequence
  ENSG00000129197_11 (sequence is synthesized)
atagaaaaagacaaactgccttggaggagataaaccaattttatgtctatcatgttatacaaaaatctagaaataatagatttgtacagaaaaaaatgataataaatgagaacacaaaac

SEQ ID NO: 279528 - DNA, 120 bp, Artificial Sequence
  ENSG00000129197_12 (sequence is synthesized)
gtcagtggagaattgtccagaagacttggctcaggtcaggctgggctatgtgttttcagggagggggactgcaccaccaagaacggctcgtgtcctcttttatttgtttacttgagtcct

SEQ ID NO: 279529 - DNA, 120 bp, Artificial Sequence
  ENSG00000129197_13 (sequence is synthesized)
ttcccctaaccccatttagaattcaacagcctttaacccaggcttttctacacttaatgttagacttgtctagatgaaatggtctgaaataccagaccgtagacctgctcatcactgcaa

SEQ ID NO: 279530 - DNA, 120 bp, Artificial Sequence
  ENSG00000129197_14 (sequence is synthesized)
catcatcatttatgaaactaaaaagaaagaaatttcatttcttgcctccacccttggaaattatgattcagtaggcataggctaggaatctctttctctccctctctctcgctctttttt

SEQ ID NO: 279531 - DNA, 120 bp, Artificial Sequence
  ENSG00000129197_15 (sequence is synthesized)
atcatgctggctgagtgggaggcaaacccactcatctgtcctgtatgtacaaagcctgtgatacttgggctgtgatcctctagagccagcttggactcacatcattctatggggttgaag

SEQ ID NO: 279532 - DNA, 120 bp, Artificial Sequence
  ENSG00000129197_16 (sequence is synthesized)
cagtcttctcatgagctgtctggtaagcgtctcctgggacccactctgtggtaagagggacctgtggttggttttattcccaccttgatagaaataatgacctataaacaggtaaatgtt

SEQ ID NO: 279533 - DNA, 120 bp, Artificial Sequence
  ENSG00000129197_17 (sequence is synthesized)
gtaacccctagtggtagtccttccttacctgtatttagctactggaatactgtgacctttcctccaatcaggattagtttataagtcccctttgtctacctccatcagtcaagtgtccaa

SEQ ID NO: 279534 - DNA, 120 bp, Artificial Sequence
  ENSG00000129197_18 (sequence is synthesized)
aagactccttttgtactctgacatcttggctgtctagcttctcaataataagggtctccagggtgctagaccttgtgctaagaacttctcatttaatgatgctgttttctccatgtgact

SEQ ID NO: 279535 - DNA, 120 bp, Artificial Sequence
  ENSG00000129197_19 (sequence is synthesized)
ccactccaaggtgagtggaatctccccccagatttgttgcctgaaattcaaggtttggagatccaggtctggtggccatgatgctctgggatcctaattctgcttctaggtacaacctga

SEQ ID NO: 279536 - DNA, 120 bp, Artificial Sequence
  ENSG00000129197_20 (sequence is synthesized)
gaatcacaagcggtgtggtggtgtgtcagtgtggcctgtccatcccatctcatgtgagtgttccacacacagatttcatgatacttcttcccacatggatctactttcttgaagatcctc

SEQ ID NO: 279537 - DNA, 120 bp, Artificial Sequence
  ENSG00000129197_21 (sequence is synthesized)
cagtgctgacttggagcccattgtgcatatttcttcccagttttatgttcagtggtgtcacattggtagcttcaaatcagccatggtgagaatatctatggcatgaaaattggcaaacag

SEQ ID NO: 279538 - DNA, 120 bp, Artificial Sequence
  ENSG00000129197_22 (sequence is synthesized)
tacacatcagagcctttagggccctggagagccatcaccgcttaacgtttttatggagacctcagcttgggattggtaacgcctgtatctgacgtttcataaaaattttctatatatgaa

SEQ ID NO: 279539 - DNA, 69 bp, Artificial Sequence
  ENSG00000129197_23 (sequence is synthesized)
gcctgtatctgacgtttcataaaaattttctatatatgaagacatacctaattcagaatttaagcttca

SEQ ID NO: 279540 - DNA, 64 bp, Artificial Sequence
  ENSG00000129197_24 (sequence is synthesized)
ccagtaatcttaaaatacagaaaaagcccttttatctggcatgatggggactgcaagtttgcca

SEQ ID NO: 279541 - DNA, 120 bp, Artificial Sequence
  ENSG00000129197_25 (sequence is synthesized)
tgttttatggtaagtttcaaacacataaatttatttgccagcctttgagtggggccctgctgattggagagctgagtcacctgttttattttttattttatttgagacagagtctcactc

SEQ ID NO: 279542 - DNA, 120 bp, Artificial Sequence
  ENSG00000129197_26 (sequence is synthesized)
cgtgagccactgtgcctcgctgagtcaccttttttacataaacaacttctataatacatagtccagagtttccggttttaattccataaagtggatcaagaaactgagtatacaacttag

SEQ ID NO: 279543 - DNA, 120 bp, Artificial Sequence
  ENSG00000129197_27 (sequence is synthesized)
gaatttttcctccccatcttttacctaattctatagctctttttctttctttcttttttttttaagcagctcatctgtttgtttcctaaacattctacttatcactataaaaataaaact

SEQ ID NO: 279544 - DNA, 120 bp, Artificial Sequence
  ENSG00000129197_28 (sequence is synthesized)
tattatttacataataagtaattagcattactgagttacagtaggaagttcaagtaacccaagcagacccgggagcatatactgctagttgttggtaaggatgcactcagctggtggggg

SEQ ID NO: 279545 - DNA, 120 bp, Artificial Sequence
  ENSG00000129197_29 (sequence is synthesized)
cagaggcagagggaggctggaaagtagcctacaatctctgagcgttcttcctgccatgagtggccatcagtgtgtttgacagcaggagtagagggcgttggttaatctggagaggcagtt

SEQ ID NO: 279546 - DNA, 120 bp, Artificial Sequence
  ENSG00000129197_30 (sequence is synthesized)
aaatggagatgggttaagagatcttggtacagtcatgggcccgagtgtctttaaggctccaaggagtcaagccatcacagtgagccacggttatattggttggcatgaggaatgaggatt

SEQ ID NO: 279547 - DNA, 120 bp, Artificial Sequence
  ENSG00000129197_31 (sequence is synthesized)
agaaagaagggaagaggcagcatgggatcacggcaagaggattggtctgggagttaggacgcctggctccacacctgctcttctttgatcagtagtagtggttttggattcagctggtca

SEQ ID NO: 279548 - DNA, 120 bp, Artificial Sequence
  ENSG00000129197_32 (sequence is synthesized)
tttcatagtcataagacccagataggccatgctggcaccacttttgcggaaggaaacagggcagaagcatagcagggcagcattaggtttgtctgtcagtggagtttttacagaggtcca

SEQ ID NO: 279549 - DNA, 120 bp, Artificial Sequence
  ENSG00000129197_33 (sequence is synthesized)
agggctattcgctaacctgagtgacaactgaggtgtgagggccaggaacacaagtgggtaagggaaccacctgtcttagaagcgtgctataggaaccaatatctcttataatccatgtcc

SEQ ID NO: 279550 - DNA, 120 bp, Artificial Sequence
  ENSG00000129197_34 (sequence is synthesized)
tttccatatatgtgtatgtatgtatgtacatgtgtatatatatcacacaaacacacataaaaccaatatgatacgtattattattgcttttagatcccaggcagggggagccttgggatt

SEQ ID NO: 279551 - DNA, 120 bp, Artificial Sequence
  ENSG00000129197_35 (sequence is synthesized)
aggagcacactgtacttcaggaagttcatagccatggctttctactgggaatttagaattccttcatggccctgtcattccaaatgcagttaacctacagaggtcatttttattataagc

SEQ ID NO: 279552 - DNA, 120 bp, Artificial Sequence
  ENSG00000129197_36 (sequence is synthesized)
agcattgcctggtaacagccatttcacctttatcaagtttcttccataggtattctactcattcattaaaaaaaaaatgaattgaggactcattaacattgagaaatacacatctctcac

SEQ ID NO: 279553 - DNA, 120 bp, Artificial Sequence
  ENSG00000129197_37 (sequence is synthesized)
agagctcaagccttgggttggtaataagagaacagaataaacaggcagtaccctggagagctgtacaaggagggcttatgggagttcagaggagggtgatctcctttatggtgacacctt

SEQ ID NO: 279554 - DNA, 120 bp, Artificial Sequence
  ENSG00000129197_38 (sequence is synthesized)
cctggaggaggcatttaacttggccttgaagcatggaatcgatctggacagacatggagatctggtgagttgtgggggtagagcttaagtggaagatccccacatagaagaacaaggcag

SEQ ID NO: 279555 - DNA, 120 bp, Artificial Sequence
  ENSG00000129197_39 (sequence is synthesized)
agaagcaggaaactggagtatatacaaagagcatcttgttctacttagctggagcattaggttcatgagggagaggatagttcctgttaggaataggaaacagattcagagaagtgatgt

SEQ ID NO: 279556 - DNA, 120 bp, Artificial Sequence
  ENSG00000129197_40 (sequence is synthesized)
caggccttggtggaaggatgccattttccatcagcttgtatggaaagagacatagcaggtgaaagtttaaataaaacccctcactacttcctgttgactacaagcatatgttcccttctg

SEQ ID NO: 279557 - DNA, 120 bp, Artificial Sequence
  ENSG00000129197_41 (sequence is synthesized)
ttccagctatccagcactggtagcagatgctcaaatatgcagtgctttcaggcctctgtgctgttgtttaggctgttctgtctgaatgactttgactcctcccactacatttaaggatca

SEQ ID NO: 279558 - DNA, 120 bp, Artificial Sequence
  ENSG00000129197_42 (sequence is synthesized)
atttaaggatcatttgcacaaatatttaccaagcactacaatatgccgtgtacttcattcagcctgattcctcacaaggaattggccagtctcagctggccacggtggctcacgcctgta

SEQ ID NO: 279559 - DNA, 77 bp, Artificial Sequence
  ENSG00000129197_43 (sequence is synthesized)
gctggattccagcctgggcaacagggtgagattctgtctcaaaaacagaattggtggctgagtgcggtggctcacgc

SEQ ID NO: 279560 - DNA, 67 bp, Artificial Sequence
  ENSG00000129197_44 (sequence is synthesized)
gctgctggattccagcctgggcaacagggtgagattctgtctcaaaaacagaattggtggtcggatc

SEQ ID NO: 279561 - DNA, 89 bp, Artificial Sequence
  ENSG00000129197_45 (sequence is synthesized)
caaaacaaacaaaaaaagaattggccagcctgggaagtccattcctttggagtctgtgttaccattctcaataaacctaatgagggctg

SEQ ID NO: 279562 - DNA, 120 bp, Artificial Sequence
  ENSG00000129197_46 (sequence is synthesized)
gagtctgtgttaccattctcaataaacctaatgagggctggcagaggggaactggccagtctctccttgggctttcaccgtacctcatgccatgtcacctgtaacagtgttgtagttacc

SEQ ID NO: 279563 - DNA, 120 bp, Artificial Sequence
  ENSG00000129197_47 (sequence is synthesized)
tgcttatgtctttgtccttgagggcaaggcccatatttatttttatttccagtgcttggcatatattaataaagaggtgcttaagatgtttgtacaaatgagttaaggtggagggaggag

SEQ ID NO: 279564 - DNA, 120 bp, Artificial Sequence
  ENSG00000129197_48 (sequence is synthesized)
agttgaggcacaggtcagctggctttggcttctgtcttcttagtaaggtgaacagtgagtcatccacacagattataatggtagcagagctggagtctacagctccttgagtatgaaagt

SEQ ID NO: 279565 - DNA, 120 bp, Artificial Sequence
  ENSG00000129197_49 (sequence is synthesized)
ccccttgagtgtgaaagacaaaatgctggtcgggggaagagaaggggaattaaaaggtaagtggaagatggcctaattgccaagtgtacagcttcagctcagcatataattgttatggac

SEQ ID NO: 279566 - DNA, 120 bp, Artificial Sequence
  ENSG00000129197_50 (sequence is synthesized)
cccagttatccactcacctaaccgtcagtgccctgtggctcagagcagcagtgaagctaagtaggaggtgaggtttggaaggtgagtgctgtgcagcagtcttggagatcatagttgaca

SEQ ID NO: 279567 - DNA, 120 bp, Artificial Sequence
  ENSG00000129197_51 (sequence is synthesized)
gtgccggctctggggtgggcaggaagaccattgttgggtaagtgaggggaggtgggggtcacagcaaatatgagaaacacagccaggcactgtggttcacacctgtaaccccagcattta

SEQ ID NO: 279568 - DNA, 83 bp, Artificial Sequence
  ENSG00000129197_52 (sequence is synthesized)
atacagaaattagctgggtgtggtggctcgcacctgtactcccagctactcggaaggctgaagtgggaggatgggggcgccat

SEQ ID NO: 279569 - DNA, 120 bp, Artificial Sequence
  ENSG00000129204_0 (sequence is synthesized)
ctaaaaataccattaagtaatagtattagcttttgtattctgagattcaacagcagcagtcacttccctccactcctatgtgtatcccaggaccaccctgggcggggagggctgaggtca

SEQ ID NO: 279570 - DNA, 66 bp, Artificial Sequence
  ENSG00000129204_1 (sequence is synthesized)
tgtatcccaggaccaccctgggcggggagggctgaggtcagggaggtctgaagctggtcctgggct

SEQ ID NO: 279571 - DNA, 62 bp, Artificial Sequence
  ENSG00000129204_2 (sequence is synthesized)
ctggccagagaagcaacacacacgtgcacagacatgtttatccacatacacatgtgcacgca

SEQ ID NO: 279572 - DNA, 120 bp, Artificial Sequence
  ENSG00000129204_3 (sequence is synthesized)
aatgtcactggtgcttagcacctatccgctctccagactgcgtctgtgttctacggcagttacacacacgcagtggtattcacaagcggttttgtggactcaaaggttttctccctgaga

SEQ ID NO: 279573 - DNA, 120 bp, Artificial Sequence
  ENSG00000129204_4 (sequence is synthesized)
ccaggccagctgattcatcagaatcaggtgagtgtgacctgctctcttccctccaggctgacttggggacagtggctatggtatgggcggtgttggcctctgggcagctacagaggaggg

SEQ ID NO: 279574 - DNA, 120 bp, Artificial Sequence
  ENSG00000129204_5 (sequence is synthesized)
cctctgggcagctacagaggagggtcatccctgagcactcaccgggcgcccgttctacactgcccatgtagacgattttctctttcgtcttcatggtggcttcgtagagtgggtgctgtt

SEQ ID NO: 279575 - DNA, 120 bp, Artificial Sequence
  ENSG00000129204_6 (sequence is synthesized)
cccgaatgtacccattcgacaggtgagccgtctggggtcagagaggcagtaactggcctgggaatccagacaagaccctgggttttgctctcagccctgctgtgtgccatgctagacttc

SEQ ID NO: 279576 - DNA, 120 bp, Artificial Sequence
  ENSG00000129204_7 (sequence is synthesized)
aggcctcaaccctgagacctccctgctctagatcccaaatctgcccagatttccgatcccaatggggcagagcctggccctggcagagacactgggatggatccactgtgggtggggagg

SEQ ID NO: 279577 - DNA, 120 bp, Artificial Sequence
  ENSG00000129204_8 (sequence is synthesized)
agggaagggtcctcagaacacacctggggcctaagctgggtcttgatggtcactgtgggacccactggacacacacagtcccttgtctgggagtggcatggggagccttctgcccttggg

SEQ ID NO: 279578 - DNA, 85 bp, Artificial Sequence
  ENSG00000129204_9 (sequence is synthesized)
ggcactggggctctccccaagtatttcttattctgtctggcctcgctttccttttgccctgagtattctcaggagggacggtcca

SEQ ID NO: 279579 - DNA, 120 bp, Artificial Sequence
  ENSG00000129204_10 (sequence is synthesized)
ctttccttttgccctgagtattctcaggagggacggtccatctagatgtcctccaggagcaaggacccactgttcttcatcagtgacccaggaaaatgaagccccctcctgtggggacag

SEQ ID NO: 279580 - DNA, 120 bp, Artificial Sequence
  ENSG00000129204_11 (sequence is synthesized)
ctcagaatggtggagtccacagtccctccctgagagacatggtttccatgagcacagtggctgctttggagacagtaatcattttcatccccaaaaccaaacacactcctgctcaaatgg

SEQ ID NO: 279581 - DNA, 120 bp, Artificial Sequence
  ENSG00000129204_12 (sequence is synthesized)
tgttattgctaaagcagcttcactggttagactgaagggccatggtagcccaagtgatgagcggggtagaatggagcagtcaggagagatcttgttccccgtaggaaactgggcatctct

SEQ ID NO: 279582 - DNA, 120 bp, Artificial Sequence
  ENSG00000129204_13 (sequence is synthesized)
gtggccctgaacatcccaggaggccgatcgtacagagacctctggtgcctgaccgcagttcacatccacatccctggaatagaccatcacaggctcttcacccttggcaggtggacacca

SEQ ID NO: 279583 - DNA, 120 bp, Artificial Sequence
  ENSG00000129204_14 (sequence is synthesized)
accattcaacctgccggggcaggatggacatggtagagaatgcagatagtttgcaggcacaggagcggaaggacatacttatgaagtatgacaagggacaccgagctgggctgccagagg

SEQ ID NO: 279584 - DNA, 120 bp, Artificial Sequence
  ENSG00000129204_15 (sequence is synthesized)
ggggcctgagcccgttggaatcaacagcagcattgatcgttttggcattttgcatgagacggagctgcctcctgtgactgcacgggaggcgaagaaaattcggcgggagatgacacgaac

SEQ ID NO: 279585 - DNA, 120 bp, Artificial Sequence
  ENSG00000129204_16 (sequence is synthesized)
gagcaagtggatggaaatgctgggagaatgggagacatataagcacagtagcaaactcatagatcgagtgtacaagggaattcccatgaacatccggggcccggtgtggtcagtcctcct

SEQ ID NO: 279586 - DNA, 120 bp, Artificial Sequence
  ENSG00000129204_17 (sequence is synthesized)
cccggaagataccagatcatgaaggagaggggcaagaggtcatctgaacacatccaccacatcgacctggacgtgaggacgactctccggaaccatgtcttctttagggatcgatatgga

SEQ ID NO: 279587 - DNA, 120 bp, Artificial Sequence
  ENSG00000129204_18 (sequence is synthesized)
ggacgactctccggaaccatgtcttctttagggatcgatatggagccaagcagagggaactattctacatcctcctggcctattcggagtataacccggaggtgggctactgcagggacc

SEQ ID NO: 279588 - DNA, 69 bp, Artificial Sequence
  ENSG00000129204_19 (sequence is synthesized)
ggctactgcagggacctgagccacatcaccgccttgttcctcctttatctgcctgaggaggaaggattc

SEQ ID NO: 279589 - DNA, 120 bp, Artificial Sequence
  ENSG00000129204_20 (sequence is synthesized)
ccaagaccaacaggagcatgtggtacccaagtcacaacccaagaccatgtggcatcaggacaaggaaggtctatgcgggcagtgtgcctcgttaggctgccttctccggaacctgattga

SEQ ID NO: 279590 - DNA, 120 bp, Artificial Sequence
  ENSG00000129204_21 (sequence is synthesized)
ctcaccctgcgcctgtgggacgtgtatttggtggaaggagaacaggtgttgatgccaataaccagcattgctcttaaggttcagcagaagcgcctcatgaagacatccaggtgtggcctg

SEQ ID NO: 279591 - DNA, 120 bp, Artificial Sequence
  ENSG00000129204_22 (sequence is synthesized)
atccaggtgtggcctgtgggcacgtctgcggaaccaattcttcgatacctgggccatgaacgatgacaccgtgctcaagcatcttagggcctctacgaagaaactaacaaggaagcaagg

SEQ ID NO: 279592 - DNA, 120 bp, Artificial Sequence
  ENSG00000129204_23 (sequence is synthesized)
ggacctgccacccccagccaaacgcgagcaagggtccttggcacccaggcctgtgccggcttcacgtggtgggaagaccctctgcaaggggtataggcaggcccctccaggcccaccagc

SEQ ID NO: 279593 - DNA, 120 bp, Artificial Sequence
  ENSG00000129204_24 (sequence is synthesized)
caaggggtataggcaggcccctccaggcccaccagcccagttccagcggcccatttgctcagcttccccgccatgggcatctcgtttttccacgccctgtcctggtggggctgtccggga

SEQ ID NO: 279594 - DNA, 120 bp, Artificial Sequence
  ENSG00000129204_25 (sequence is synthesized)
gacctcagggttcctggagattcctggagtggaagtcaatgccccggctcccaacggacctggatatagggggcccttggttcccccattatgattttgaatggagctgctgggtccgtg

SEQ ID NO: 279595 - DNA, 120 bp, Artificial Sequence
  ENSG00000129204_26 (sequence is synthesized)
ccatatcccaggaggaccagctggccacctgctggcaggctgaacactgcggagaggttcacaacaaagatatgagttggcctgaggagatgtcttttacagcaaatagtagtaaaatag

SEQ ID NO: 279596 - DNA, 120 bp, Artificial Sequence
  ENSG00000129204_27 (sequence is synthesized)
agcaaatagtagtaaaatagatagacaaaaggttcccacagaaaagggagccacaggtctaagcaacctgggaaacacatgcttcatgaactcaagcatccagtgcgttagtaacacaca

SEQ ID NO: 279597 - DNA, 120 bp, Artificial Sequence
  ENSG00000129204_28 (sequence is synthesized)
gccactgacacagtattttatctcagggagacatctttatgaactcaacaggacaaatcccattggtatgaaggggcatatggctaaatgctatggtgatttagtgcaggaactctggag

SEQ ID NO: 279598 - DNA, 120 bp, Artificial Sequence
  ENSG00000129204_29 (sequence is synthesized)
tggaactcagaagagtgttgccccattaaagcttcggcggaccatagcaaaatatgctcccaagtttgatgggtttcagcaacaagactcccaagaacttctggcttttctcttggatgg

SEQ ID NO: 279599 - DNA, 120 bp, Artificial Sequence
  ENSG00000129204_30 (sequence is synthesized)
tcttcatgaagatctcaaccgagtccatgaaaagccatatgtggaactgaaggacagtgatggccgaccagactgggaagtagctgcagaggcctgggacaaccatctaagaagaaatag

SEQ ID NO: 279600 - DNA, 120 bp, Artificial Sequence
  ENSG00000129204_31 (sequence is synthesized)
atcaattattgtggatttgttccatgggcagctaagatctcaagtcaaatgcaagacatgtgggcatataagtgtccgatttgaccctttcaattttttgtctttgccactaccaatgga

SEQ ID NO: 279601 - DNA, 120 bp, Artificial Sequence
  ENSG00000129204_32 (sequence is synthesized)
cagttacatggacttagaaataacagtgattaagttagatggtactacccctgtacggtatggactaagactgaatatggatgaaaagtacacaggtttaaaaaaacagctgagggatct

SEQ ID NO: 279602 - DNA, 120 bp, Artificial Sequence
  ENSG00000129204_33 (sequence is synthesized)
agaactttcctcaggataaccaaaaagtacaactctcagtgagcggatttttgtgtgcatttgaaattcctgtcccttcatctccaatttcagcttctagtccaacacaaatagatttct

SEQ ID NO: 279603 - DNA, 120 bp, Artificial Sequence
  ENSG00000129204_34 (sequence is synthesized)
cctcttcaccatctacaaatggaatgttcaccctaactaccaatggggacctacccaaaccaatattcatccccaatggaatgccaaacactgttgtgccatgtggaactgagaagaact

SEQ ID NO: 279604 - DNA, 120 bp, Artificial Sequence
  ENSG00000129204_35 (sequence is synthesized)
tcacaaatggaatggttaatggtcacatgccatctcttcctgacagcccctttacaggttacatcattgcagtccaccgaaaaatgatgaggacagaactgtatttcctgtcacctcagg

SEQ ID NO: 279605 - DNA, 120 bp, Artificial Sequence
  ENSG00000129204_36 (sequence is synthesized)
agaatcgccccagcctctttggaatgccattgattgttccatgcactgtgcatacccggaagaaagacctatatgatgcggtttggattcaagtatcctggttagcaagaccactcccac

SEQ ID NO: 279606 - DNA, 120 bp, Artificial Sequence
  ENSG00000129204_37 (sequence is synthesized)
ctcaggaagctagtattcatgcccaggatcgtgataactgtatgggctatcaatatccattcactctacgagttgtgcagaaagatgggaactcctgtgcttggtgcccacagtatagat

SEQ ID NO: 279607 - DNA, 120 bp, Artificial Sequence
  ENSG00000129204_38 (sequence is synthesized)
tttgcagaggctgtaaaattgattgtggggaagacagagctttcattggaaatgcctatattgctgtggattggcaccccacagcccttcaccttcgctatcaaacatcccaggaaaggg

SEQ ID NO: 279608 - DNA, 120 bp, Artificial Sequence
  ENSG00000129204_39 (sequence is synthesized)
ttgtagataagcatgagagtgtggagcagagtcggcgagcgcaagccgagcccatcaacctggacagctgtctccgtgctttcaccagtgaggaagagctaggggaaagtgagatgtact

SEQ ID NO: 279609 - DNA, 120 bp, Artificial Sequence
  ENSG00000129204_40 (sequence is synthesized)
actgttccaagtgtaagacccactgcttagcaacaaagaagctggatctctggaggcttccacccttcctgattattcaccttaagcgatttcaatttgtaaatgatcagtggataaaat

SEQ ID NO: 279610 - DNA, 120 bp, Artificial Sequence
  ENSG00000129204_41 (sequence is synthesized)
cacagaaaattgtcagatttcttcgggaaagttttgatccgagtgcttttttggtaccacgagacccggccctctgccagcataaaccactcacaccccagggggatgagctctccaagc

SEQ ID NO: 279611 - DNA, 120 bp, Artificial Sequence
  ENSG00000129204_42 (sequence is synthesized)
ccaggattctggcaagagaggtgaagaaagtggatgcgcagagttcggctggaaaagaggacatgctcctaagcaaaagcccatcctcactcagcgctaacatcagcagcagcccaaaag

SEQ ID NO: 279612 - DNA, 120 bp, Artificial Sequence
  ENSG00000129204_43 (sequence is synthesized)
gttctccttcttcatcaagaaaaagtggaaccagctgtccctccagcaaaaacagcagccctaatagcagcccacggactttggggaggagcaaagggaggctccggctgccccagattg

SEQ ID NO: 279613 - DNA, 120 bp, Artificial Sequence
  ENSG00000129204_44 (sequence is synthesized)
gcagcaaaaataagccgtcaagtagtaagaagaacttggatgccagcaaagagaatggggctgggcagatctgtgagctggctgacgccttgagccgagggcatatgcgggggggcagcc

SEQ ID NO: 279614 - DNA, 120 bp, Artificial Sequence
  ENSG00000129204_45 (sequence is synthesized)
aaccagagctggtcactcctcaggaccatgaggtagctttggccaatggattcctttatgagcatgaagcatgtggcaatggctgtggcgatggctacagcaatggtcagcttggaaacc

SEQ ID NO: 279615 - DNA, 120 bp, Artificial Sequence
  ENSG00000129204_46 (sequence is synthesized)
acagtgaagaagacagcactgatgaccaaagagaagacactcatattaagcctatttataatctatatgcaatttcatgccattcaggaattctgagtgggggccattacatcacttatg

SEQ ID NO: 279616 - DNA, 120 bp, Artificial Sequence
  ENSG00000129204_47 (sequence is synthesized)
ccaaaaacccaaactgcaagtggtactgttataatgacagcagctgtgaggaacttcaccctgatgaaattgacaccgactctgcctacattcttttctatgagcagcaggggatagact

SEQ ID NO: 279617 - DNA, 120 bp, Artificial Sequence
  ENSG00000129204_48 (sequence is synthesized)
acgcacaatttctgccaaagattgatggcaaaaagatggcagacacaagcagtacggatgaagactctgagtctgattacgaaaagtactctatgttacagtaaagctaccactctggct

SEQ ID NO: 279618 - DNA, 120 bp, Artificial Sequence
  ENSG00000129204_49 (sequence is synthesized)
gctagacagcttggtggcgagggagatgactccttgtagctgatacttggcaaaagtgtcactgaaagacaagctaaatgtagttattttatcctgttagaacaaaaattctaattaaaa

SEQ ID NO: 279619 - DNA, 120 bp, Artificial Sequence
  ENSG00000129204_50 (sequence is synthesized)
tagttaacttgaagagtagaaacaattgtattttgaagtctcatacaagctgtctgatagagaactttcaggcagatcccaccattagcctgtaaacaaaaggtgtggcaccagccacct

SEQ ID NO: 279620 - DNA, 120 bp, Artificial Sequence
  ENSG00000129204_51 (sequence is synthesized)
gggaccaaataagaattgaattgtgcttgtccagatatgaacaaatatgtagtgagtatagagtttaccaataatcataacaaatattaaagatttccttggagtcagaggaaaaaacaa

SEQ ID NO: 279621 - DNA, 120 bp, Artificial Sequence
  ENSG00000129204_52 (sequence is synthesized)
acaattataatgttgtctagggacgacatgatacgctacctcctttttcctgaagttttattccattatattgacaagatggagaaagcaagatcatgaaggtgtgcaaatgattcttac

SEQ ID NO: 279622 - DNA, 120 bp, Artificial Sequence
  ENSG00000129204_53 (sequence is synthesized)
ggcatggacaaggatttttcaatttattttttaaactgtttccataccctttctttttcttgctttttgtttttgccattgtgtttacgtttgagacacaaccagtcattggtggcaggg

SEQ ID NO: 279623 - DNA, 120 bp, Artificial Sequence
  ENSG00000129204_54 (sequence is synthesized)
gcatagagtggtcagtctgaaagggaggctctcttaagagctatgtgccttccaaccagagggagacccagtagaaagaaaaacatcctgggaaatccagctaccagggccctcccagtg

SEQ ID NO: 279624 - DNA, 120 bp, Artificial Sequence
  ENSG00000129204_55 (sequence is synthesized)
gaggcatcttacatttaggctacttcaagtatcctcagaaatgtattctgcacccccggccccgcccatgctgagggaaggggagcagttgccaatatttgcaccatcttcacatgcaca

SEQ ID NO: 279625 - DNA, 120 bp, Artificial Sequence
  ENSG00000129204_56 (sequence is synthesized)
tgttgcaacaagagcttctgggaaggtaagcggcatcggagctagatcacgtttcacaattagtggttattcttttctgtgtttgttttgcactttaaaaaagagagaacacatgcaaat

SEQ ID NO: 279626 - DNA, 120 bp, Artificial Sequence
  ENSG00000129204_57 (sequence is synthesized)
gaacttgcttgtgtgtatttgatggctctaagggctataaattacaaacaaaacacatcccagacattaggagttcataagtatatttaatgaaattggtggttttaggaagtcaacttt

SEQ ID NO: 279627 - DNA, 120 bp, Artificial Sequence
  ENSG00000129204_58 (sequence is synthesized)
agttttgctttgtttgcatgtccactggtttttttattttgatatttgtctttttttaaattttacagtagtcattgaaagttatgtttctttgcttacttcattttttccctctaatta

SEQ ID NO: 279628 - DNA, 120 bp, Artificial Sequence
  ENSG00000129204_59 (sequence is synthesized)
tttaagattggaacaaaagtataaatattatttatttgaggtagaatttttttcatgtagtttcttaatatatacttgaaggaaatgtttcaccttatttttggtctttgtttattcatt

SEQ ID NO: 279629 - DNA, 120 bp, Artificial Sequence
  ENSG00000129204_60 (sequence is synthesized)
tagaccctgcaagttgattctcattgccagattccattaccctttcttcctcataggtagtaattaccaatgtaactaagcatttgtgttctgatatctgaggccagtaactattaatat

SEQ ID NO: 279630 - DNA, 120 bp, Artificial Sequence
  ENSG00000129204_61 (sequence is synthesized)
ctagttctcagagcatttggaaaggttatcttaaatggctacctaaattgaaatccttttcagaaaaaatataattgcaagtaggtaggagtggcctaaattgtctaatgtaataaagtc

SEQ ID NO: 279631 - DNA, 120 bp, Artificial Sequence
  ENSG00000129204_62 (sequence is synthesized)
agacaaaatgcacactttatagtttcaagattttcagtaaataaaatctgtccattcctacctggacatgtcccattaaaaagtggaagattttaaataatttctttacagatgttttat

SEQ ID NO: 279632 - DNA, 120 bp, Artificial Sequence
  ENSG00000129204_63 (sequence is synthesized)
ttaaacaggtagcacaatctactaatgttgtgtgatttgtgttatactggttgtaattaatttttttaattcatgaactagcggaaaatttattaaattaactattaactacattcacct

SEQ ID NO: 279633 - DNA, 120 bp, Artificial Sequence
  ENSG00000129204_64 (sequence is synthesized)
tgtaaattactgtataaaacttgttgacaatgcactgactttagaaagatgttaatgtacataaatagagtgtaaataaaatagtgttgatgtactgaaatatgaactgtatcaaaagta

SEQ ID NO: 279634 - DNA, 120 bp, Artificial Sequence
  ENSG00000129204_65 (sequence is synthesized)
ttggtaattgtatatggggtgtacctgtttatctgttaactattatccaaacaaattaaatactgtggttgcctctatgtgctgtttttcctcatacaagtaaacacagaaagtcaaatt

SEQ ID NO: 279635 - DNA, 120 bp, Artificial Sequence
  ENSG00000129204_66 (sequence is synthesized)
gccgccgtctcgtgtggtgtctgaggggcgtctacctggagtcactgagccgacgaaagggaaaaggccagtgcctgtccgggaagagctcagcctagtggggcgggcgacaagttacag

SEQ ID NO: 279636 - DNA, 120 bp, Artificial Sequence
  ENSG00000129204_67 (sequence is synthesized)
ttgctgccttacgatggccgtggcccgtggaggcactagaccctcaccaggggtctgtcaggaaaggcgggcagatacgtgaggcctgaacaggaaggaactgggagacccaagactgta

SEQ ID NO: 279637 - DNA, 120 bp, Artificial Sequence
  ENSG00000129204_68 (sequence is synthesized)
ccgccaagaccgctttcgagtcgggccgaccggaatttgaattcgtttcttcacttactagttgatttttttccttgattccttcgtgggactcaagacaggggtgccctgtttactcag

SEQ ID NO: 279638 - DNA, 120 bp, Artificial Sequence
  ENSG00000129204_69 (sequence is synthesized)
cccactgtgctcaacctcttgcaggagtgtgcaggaaatgaaggccctttgaggtcaggtggatgaggatgtcagtgtgaagatggacactgtgcctggagtgaacctgagctggatcct

SEQ ID NO: 279639 - DNA, 120 bp, Artificial Sequence
  ENSG00000129204_70 (sequence is synthesized)
gaatgagatgcatgaccaggacaagaaattggtggagaagagctacaaggatgccaagggctgtttcttcagcatgagagaggggctgaactgcgaggtggccaccaacacagaggccct

SEQ ID NO: 279640 - DNA, 120 bp, Artificial Sequence
  ENSG00000129204_71 (sequence is synthesized)
gcagagcggcaggatagagatatggagctctacatctctgtgcagaacctgagccatcccagctcagcaaggtagggcctctgtcccctccccaccctgtacctatcaccccagggtgag

SEQ ID NO: 279641 - DNA, 120 bp, Artificial Sequence
  ENSG00000129204_72 (sequence is synthesized)
cccagccttatagacccctgcttggaggtgtgttacgggacccaactggcccagctgcaggggctcatcagaagcatggagcagcagctgtgcgagctctgctgcgacgcggagcaccag

SEQ ID NO: 279642 - DNA, 120 bp, Artificial Sequence
  ENSG00000129204_73 (sequence is synthesized)
gaccatgagcaccaggtccttctggacgtgaagacacggctggagcaggagatcgccacctacagccgcttgctagaggttgaggacgctcaagtcacagggagaagacgtccacccaca

SEQ ID NO: 279643 - DNA, 120 bp, Artificial Sequence
  ENSG00000129204_74 (sequence is synthesized)
catcaggagacaggcctggaacagagccttcctgcacagcctcagaagggacccaccctggtgacaccttgatcttggactgacactcatgacctccagtactgtgagacagtaacattc

SEQ ID NO: 279644 - DNA, 120 bp, Artificial Sequence
  ENSG00000129204_75 (sequence is synthesized)
tgttgttgaaggtgcccagtctgtggtactgtaaaacagccctgggaaactaacgcagcctgttagcccacagatggtgaagggatggaatgctccacggagctccaggcttactatcta

SEQ ID NO: 279645 - DNA, 120 bp, Artificial Sequence
  ENSG00000129204_76 (sequence is synthesized)
cagcccccaaagtgtgctgcgggacccttgggtgggtgtaggtatgcaaggtaattttgggtggttcaaggtgaataatttcaattgacataataatgtatttatcttgctgggtaaatg

SEQ ID NO: 279646 - DNA, 120 bp, Artificial Sequence
  ENSG00000129204_77 (sequence is synthesized)
agggatacccaactgttaggaaccaggcaacacagcaggaggtgagcagccagccagtgagcaaagcttcatctgtagaaacagccacttcccatccctcgcattaccgcatgagctctg

SEQ ID NO: 279647 - DNA, 120 bp, Artificial Sequence
  ENSG00000129204_78 (sequence is synthesized)
cctcctgtcagatgagcggtgccgttagattctcacagaagcatgaaccctactgtgaactgcgcatgccagggatctagattgcgtgctccttatgagaacctaatgcctgatgatctg

SEQ ID NO: 279648 - DNA, 71 bp, Artificial Sequence
  ENSG00000129204_79 (sequence is synthesized)
attgcgtgctccttatgagaacctaatgcctgatgatctgtgactgtctcatcactgccagatggaaccac

SEQ ID NO: 279649 - DNA, 83 bp, Artificial Sequence
  ENSG00000129204_80 (sequence is synthesized)
ggctgtcattgggacagtctgagatggggagtcgggggagacaatggatgaatggatggatgaatggacagcagtccagggag

SEQ ID NO: 279650 - DNA, 120 bp, Artificial Sequence
  ENSG00000129204_81 (sequence is synthesized)
atggatgaatggatggatgaatggacagcagtccagggagatgtccctgtgtgtcctgaactgggcccttcctccagtgagaagccttcctgagctgacttggggacagtggctatggta

SEQ ID NO: 279651 - DNA, 61 bp, Artificial Sequence
  ENSG00000129204_82 (sequence is synthesized)
ccatgccccaacggcttccccatgccaggcagcacacacccctccctctgggatcagcaga

SEQ ID NO: 279652 - DNA, 77 bp, Artificial Sequence
  ENSG00000129204_83 (sequence is synthesized)
aggccagctgattcatcagaatcaggtcctgcccctcctgggagtcagagggctgagccctgagctggatagggaca

SEQ ID NO: 279653 - DNA, 76 bp, Artificial Sequence
  ENSG00000129204_84 (sequence is synthesized)
tacgggagccacacagtcccagcagagatggggtgaacgagagggatggggagctgccaagagctctcctggccca

SEQ ID NO: 279654 - DNA, 120 bp, Artificial Sequence
  ENSG00000129204_85 (sequence is synthesized)
cagaacccaggaggatcctgaggagacagaaaacagcaaagaaaatcacacgcaatggtgaaaggtgctctccctgacccacggagacccatggtaggacccacaggagggtggcaggat

SEQ ID NO: 279655 - DNA, 120 bp, Artificial Sequence
  ENSG00000129204_86 (sequence is synthesized)
ggtgaaaggtgctctccctgacccacggagacccatggtaggacccacaggagggtggcaggatggagggcccatgagcctccccaggcaacacagcaccaaatgctgggagaattaggg

SEQ ID NO: 279656 - DNA, 120 bp, Artificial Sequence
  ENSG00000129204_87 (sequence is synthesized)
acatgacatggcacagccacattggcagccagttgggcagtggctcacaaagctcagtggacttgaaccacacatccccatggtgtcacagatattgaacccactgatttgaaaactgac

SEQ ID NO: 279657 - DNA, 120 bp, Artificial Sequence
  ENSG00000129204_88 (sequence is synthesized)
atccacatgaaacctgcatgccaggttcactgcttgattcctcatcactcacacatggagccttcggggatggccttcaacacgggaatggggagagacaggctggtcctcccttcaaac

SEQ ID NO: 279658 - DNA, 120 bp, Artificial Sequence
  ENSG00000129204_89 (sequence is synthesized)
gacccagtgagaaaagggaacgagccagtgatgcctgcacgaacgtgggtggatcctagatgcattttgctaagggaaagaagccagacccaataagctaccatagtaggattcccattc

SEQ ID NO: 279659 - DNA, 63 bp, Artificial Sequence
  ENSG00000129204_90 (sequence is synthesized)
gagaaccctggagatttggaagatgatggagtcgctccaggaggggctggagcggtggccggg

SEQ ID NO: 279660 - DNA, 120 bp, Artificial Sequence
  ENSG00000129204_91 (sequence is synthesized)
tgatggagtcgctccaggaggggctggagcggtggccgggagactgcacattggtttggaaccatggaggaactgtgcacccaaagactgaactggtgtgtgtgcaaaagaaaaaaaaaa

SEQ ID NO: 279661 - DNA, 120 bp, Artificial Sequence
  ENSG00000129214_0 (sequence is synthesized)
aagagttgtctgagccgccgagtggacagtggctgattatggagagcagaggcccactggctacctcgcgcctgctgctgttgctgctgttgctactactgcgtcacacccgccagggat

SEQ ID NO: 279662 - DNA, 120 bp, Artificial Sequence
  ENSG00000129214_1 (sequence is synthesized)
gggccctgagacctgttctccccacccagagtgcccacgaccctccggctgtccacctcagcaatggcccaggacaagagcctatcgctgtcatgacctttgacctcaccaagatcacaa

SEQ ID NO: 279663 - DNA, 120 bp, Artificial Sequence
  ENSG00000129214_2 (sequence is synthesized)
aaacctcctcctcctttgaggttcgaacctgggacccagagggagtgattttttatggggataccaaccctaaggatgactggtttatgctgggacttcgagacggcaggcctgagatcc

SEQ ID NO: 279664 - DNA, 120 bp, Artificial Sequence
  ENSG00000129214_3 (sequence is synthesized)
aactgcacaatcactgggcccagcttacggtgggtgctggaccacggctggatgatgggagatggcaccaggtggaagtcaagatggagggggactctgtgctgctggaggtggatgggg

SEQ ID NO: 279665 - DNA, 120 bp, Artificial Sequence
  ENSG00000129214_4 (sequence is synthesized)
aggaggtgctgcgcctgagacaggtctctgggcccctgaccagcaaacgccatcccatcatgaggattgcgcttggggggctgctcttccccgcttccaaccttcggttgccgctggttc

SEQ ID NO: 279666 - DNA, 120 bp, Artificial Sequence
  ENSG00000129214_5 (sequence is synthesized)
ccccactagcctcagaagctgtgatgtagaatcaaatcccgggatatttctccctccagggactcaggcagaattcaatctccgagacattccccagcctcatgcagagccctgggcctt

SEQ ID NO: 279667 - DNA, 120 bp, Artificial Sequence
  ENSG00000129214_6 (sequence is synthesized)
ctctttggacctgggactcaagcaggcagcaggctcaggccacctccttgctcttgggacaccagagaacccatcttggctcagtctccacctccaagatcaaaaggtggtgttgtcttc

SEQ ID NO: 279668 - DNA, 120 bp, Artificial Sequence
  ENSG00000129214_7 (sequence is synthesized)
tgggtcggggccagggctggatctgcccctggtcttgggactccctcttcagctgaagctgagtatgtccagggtggtcttgagccaagggtcgaagatgaaggcccttgccctgcctcc

SEQ ID NO: 279669 - DNA, 120 bp, Artificial Sequence
  ENSG00000129214_8 (sequence is synthesized)
cttaggcctggctcccctccttaacctctgggccaagcctcaagggcgtctcttcctgggggctttaccaggagaagactcttccacctctttttgcctgaatggcctttgggcacaagg

SEQ ID NO: 279670 - DNA, 120 bp, Artificial Sequence
  ENSG00000129214_9 (sequence is synthesized)
tcagaggctggatgtggaccaggccctgaacagaagccatgagatctggactcacagctgcccccagagcccaggcaatggcactgacgcttcccattaaagctccacctaagaaccccc

SEQ ID NO: 279671 - DNA, 120 bp, Artificial Sequence
  ENSG00000129214_10 (sequence is synthesized)
gtgactgggctcctgggtagagttcaaggttggagtgaagcggcttccttgcggttgtgtgggtgtcccaacctgggtcgagataccccgcggttcaaaggctcccccgcagtgcttttt

SEQ ID NO: 279672 - DNA, 120 bp, Artificial Sequence
  ENSG00000129214_11 (sequence is synthesized)
ctccccacccaggtgcaggagcgggacagggcactcagctcatgcagtcttcccttctctcctctggccctgtagcagggcctctccctctgtctgtctctgacatgtccctactcagct

SEQ ID NO: 279673 - DNA, 120 bp, Artificial Sequence
  ENSG00000129214_12 (sequence is synthesized)
gcttacggtgggtgctggaccacggctggatgatgggagatggcaccagctggttcctgccctggatggctgcctgcgccgggattcctggctggacaaacaggccgagatctcagcatc

SEQ ID NO: 279674 - DNA, 120 bp, Artificial Sequence
  ENSG00000129214_13 (sequence is synthesized)
gcctctctgaggaagatgaaaggatcttttacgggacagagggccttcccaaagggaccgtgtggaagaaagacaattctccatgtgcttggatcgtggggaagatgtgattaaggtcta

SEQ ID NO: 279675 - DNA, 120 bp, Artificial Sequence
  ENSG00000129219_0 (sequence is synthesized)
gtgggctccggctgcagctccggtctgctctcttggctccggaacccccgcgggcgctggctccgtctgccagggatgacggcgacccctgagagcctcttccccactggggacgaactg

SEQ ID NO: 279676 - DNA, 120 bp, Artificial Sequence
  ENSG00000129219_1 (sequence is synthesized)
gactccagccagctccagatggagtccgatgaggtggacaccctgaaggagggagaggacccagccgaccggatgcacccgtttctggccatctatgagcttcagtctctgaaagtgcac

SEQ ID NO: 279677 - DNA, 120 bp, Artificial Sequence
  ENSG00000129219_2 (sequence is synthesized)
cccttggtgttcgcacctggggtccctgtcacagcccaggtggtgggcaccgaaagatataccagcggatccaaggtgggaacctgcactctgtattctgtccgcttgactcacggcgac

SEQ ID NO: 279678 - DNA, 120 bp, Artificial Sequence
  ENSG00000129219_3 (sequence is synthesized)
ttttcctggacaaccaagaagaaataccgtcattttcaggagctgcatcgggacctcctgagacacaaagtcttgatgagtctgctccctctggctcgatttgccgttgcctattctcca

SEQ ID NO: 279679 - DNA, 120 bp, Artificial Sequence
  ENSG00000129219_4 (sequence is synthesized)
gcccgagatgcaggcaacagagagatgccctctctaccccgggcaggtcctgagggctccaccagacatgcagccagcaaacagaaatacctggagaattacctcaaccgtctcttgacc

SEQ ID NO: 279680 - DNA, 120 bp, Artificial Sequence
  ENSG00000129219_5 (sequence is synthesized)
atgtctttctatcgcaactaccatgccatgacagagttcctggaagtcagtcagctgtcctttatcccggacttgggccgcaaaggactggaggggatgatccggaagcgctcaggtggc

SEQ ID NO: 279681 - DNA, 120 bp, Artificial Sequence
  ENSG00000129219_6 (sequence is synthesized)
caccgtgttcctggcctcacctgctgtggccgagaccaagtttgttatcgctggtccaagaggtggctggtggtgaaggactccttcctgctgtacatgtgcctcgagacaggtgccatc

SEQ ID NO: 279682 - DNA, 120 bp, Artificial Sequence
  ENSG00000129219_7 (sequence is synthesized)
tcatttgttcagctctttgaccctggctttgaggtgcaagtggggaaaaggagcacggaggcacggcacggcgtgcggatcgatacctcccacaggtccttgattctcaagtgcagcagc

SEQ ID NO: 279683 - DNA, 120 bp, Artificial Sequence
  ENSG00000129219_8 (sequence is synthesized)
taccggcaggcacggtggtgggcccaagagatcactgagctggcacagggcccaggcagagacttcctacagctgcaccggcatgacagctacgccccaccccggcctgggaccttggcc

SEQ ID NO: 279684 - DNA, 120 bp, Artificial Sequence
  ENSG00000129219_9 (sequence is synthesized)
cggtggtttgtgaatggggcaggttactttgctgctgtggcagatgccatccttcgagctcaagaggagattttcatcacagactggtggttgagtcctgaggtttacctgaagcgtccg

SEQ ID NO: 279685 - DNA, 120 bp, Artificial Sequence
  ENSG00000129219_10 (sequence is synthesized)
gcccattcagatgactggagactggacattatgctcaagaggaaggcggaggagggtgtccgtgtgtctattctgctgtttaaagaagtggaattggccttgggcatcaacagtggctat

SEQ ID NO: 279686 - DNA, 120 bp, Artificial Sequence
  ENSG00000129219_11 (sequence is synthesized)
agcaagagggcgctgatgctgctgcaccccaacataaaggtgatgcgtcacccagaccaagtgacgttgtgggcccatcatgagaagctcctggtggtggaccaagtggtagcattcctg

SEQ ID NO: 279687 - DNA, 120 bp, Artificial Sequence
  ENSG00000129219_12 (sequence is synthesized)
gggggactggaccttgcctatggccgctgggatgacctgcactaccgactgactgaccttggagactcctctgaatcagctgcctcccagcctcccaccccgcgcccagactcaccagcc

SEQ ID NO: 279688 - DNA, 120 bp, Artificial Sequence
  ENSG00000129219_13 (sequence is synthesized)
accccagacctctctcacaaccaattcttctggctgggcaaggactacagcaatcttatcaccaaggactgggtgcagctggaccggcctttcgaagatttcattgacagggagacgacc

SEQ ID NO: 279689 - DNA, 120 bp, Artificial Sequence
  ENSG00000129219_14 (sequence is synthesized)
gaacttcaccaagaccaccaaggccaagtacaagactcccacatacccctacctgcttcccaagtctaccagcacggccaatcagctccccttcacacttccaggagggcagtgcaccac

SEQ ID NO: 279690 - DNA, 120 bp, Artificial Sequence
  ENSG00000129219_15 (sequence is synthesized)
cgtacaggtcttgcgatcagtggaccgctggtcagcagggactctggagaactccatcctcaatgcctacctgcacaccatcagggagagccagcacttcctctacattgagaatcagtt

SEQ ID NO: 279691 - DNA, 120 bp, Artificial Sequence
  ENSG00000129219_16 (sequence is synthesized)
cttcattagctgctcagatgggcggacggttctgaacaaggtgggcgatgagattgtggacagaatcctgaaggcccacaaacaggggtggtgttaccgagtctacgtgcttttgccctt

SEQ ID NO: 279692 - DNA, 120 bp, Artificial Sequence
  ENSG00000129219_17 (sequence is synthesized)
actccctggcttcgagggtgacatctccacgggcggtggcaactccatccaggccattctgcactttacttacaggaccctgtgtcgtggggagtattcaatcctgcatcgccttaaagc

SEQ ID NO: 279693 - DNA, 120 bp, Artificial Sequence
  ENSG00000129219_18 (sequence is synthesized)
agccatggggacagcatggcgggactatatttccatctgcgggcttcgtacacacggagagctgggcgggcaccccgtctcggagctcatctacatccacagcaaggtgctcatcgcaga

SEQ ID NO: 279694 - DNA, 120 bp, Artificial Sequence
  ENSG00000129219_19 (sequence is synthesized)
tgaccggacagtcatcattggttctgcaaacatcaatgaccggagcttgctggggaagcgggacagtgagctggccgtgctgatcgaggacacagagacggaaccatccctcatgaatgg

SEQ ID NO: 279695 - DNA, 120 bp, Artificial Sequence
  ENSG00000129219_20 (sequence is synthesized)
ggcagagtatcaggcgggcaggtttgccttgagtctgcggaagcactgcttcggtgtgattcttggagcaaatacccggccagacttggatctccgagaccccatctgtgatgacttctt

SEQ ID NO: 279696 - DNA, 120 bp, Artificial Sequence
  ENSG00000129219_21 (sequence is synthesized)
ccagttgtggcaagacatggctgagagcaacgccaatatctatgagcagatcttccgctgcctgccatccaatgccacgcgttccctgcggactctccgggagtacgtggccgtggagcc

SEQ ID NO: 279697 - DNA, 120 bp, Artificial Sequence
  ENSG00000129219_22 (sequence is synthesized)
cttggccacggtcagtccccccttggctcggtctgagctcacccaggtccagggccacctggtccacttccccctcaagttcctagaggatgagtctttgctgcccccgctgggtagcaa

SEQ ID NO: 279698 - DNA, 120 bp, Artificial Sequence
  ENSG00000129219_23 (sequence is synthesized)
ggagggcatgatccccctagaagtgtggacatagttgaggcccccgtcagggagaggtcaccagctgctgtgccccaccacgtctggctccctgccccttaaccccaaggactgagggca

SEQ ID NO: 279699 - DNA, 120 bp, Artificial Sequence
  ENSG00000129219_24 (sequence is synthesized)
gtgccctttgagatctggggaggcaggcattcctgaagggaactagaggtgttacagaggacccttacgtgagaaatagctgaaaagggcactcccaaccctgggctggggaggaggaga

SEQ ID NO: 279700 - DNA, 120 bp, Artificial Sequence
  ENSG00000129219_25 (sequence is synthesized)
gagtcccagagctcatcccccctgctgcccagtgcaaaccacttctccatgctgcaaaggagaagcacagctcctgccagggtgagcagggtcaagcctcttattccaggagaagggggc

SEQ ID NO: 279701 - DNA, 120 bp, Artificial Sequence
  ENSG00000129219_26 (sequence is synthesized)
tctgccccaggccctactacccattgttcccttcctcttcctgcccttgaaccccctccctgtcccagggccctcccagcccattgctgccaaggtggagggaaggataaagccacttct

SEQ ID NO: 279702 - DNA, 120 bp, Artificial Sequence
  ENSG00000129219_27 (sequence is synthesized)
ggcttcagcccccaccaggggaaggaaggagggcacattaactccctccaccagcctgctgacagacactaactttgtatccgttcaataagcatttcataaataaaggtgtagaaaagg

SEQ ID NO: 279703 - DNA, 120 bp, Artificial Sequence
  ENSG00000129219_28 (sequence is synthesized)
gggcaaaaggagggctggccagagtggggaggcggggacccacgcaggggacatccattcagttcctcatacccctaggtgggaacctgcactctgtattctgtccgcttgactcacggc

SEQ ID NO: 279704 - DNA, 120 bp, Artificial Sequence
  ENSG00000129219_29 (sequence is synthesized)
cattgagggctggtggagcagaagcagacgcctggagcctgggaccaaggctggaggccgaggacagggccaggggccaggctgctgatgtctgtctctgattcttgccccagaatcagt

SEQ ID NO: 279705 - DNA, 120 bp, Artificial Sequence
  ENSG00000129219_30 (sequence is synthesized)
tcgatttattggtgttctttatgtatgatgtattaatcctcctgttctttagttgattaggttattgtgtctttttgtaatttttatttgtatttagcgcatatgggcaaacactatttt

SEQ ID NO: 279706 - DNA, 120 bp, Artificial Sequence
  ENSG00000129219_31 (sequence is synthesized)
gatgtgtctgataccacttgtgttctctgatcatttctgatctttgaccttgctgtcacctctgacccacgactgtcctccggtcttcactctccagagctttctggcttctgactcccc

SEQ ID NO: 279707 - DNA, 120 bp, Artificial Sequence
  ENSG00000129219_32 (sequence is synthesized)
gcagggtcagaagctggggctggtactgagagtgggatgagaggggtcaacggtggtacagccctccctctggcaggctctttctccctgccccaagtgtcccaaggagtccagccctga

SEQ ID NO: 279708 - DNA, 120 bp, Artificial Sequence
  ENSG00000129219_33 (sequence is synthesized)
ggcgtgagccaccgcacccagccaattttgaattacctgagtagggacaatgtaacttttctggtactcaggttctctaaggatcttaatctggccctgctgggacccctttctcctata

SEQ ID NO: 279709 - DNA, 120 bp, Artificial Sequence
  ENSG00000129219_34 (sequence is synthesized)
acaggtgaggccccccacttcagccagccctcccctttgtctccttcagcctaacaccccaacccactctccctggtgtgagagctgcccacactctcctttcctggggttaagaagcac

SEQ ID NO: 279710 - DNA, 120 bp, Artificial Sequence
  ENSG00000129219_35 (sequence is synthesized)
ttgcccggcacttcatccagcgctggaacttcaccaaggtgttcattccctccgataggggctggaggtagggagggagccagggcagattggcacctcctgctgactctgccatccctc

SEQ ID NO: 279711 - DNA, 120 bp, Artificial Sequence
  ENSG00000129219_36 (sequence is synthesized)
accaccaaggccaagtacaagactcccacatacccctacctgcttcccaagtctaccagcacggccaatcagctccccttcacacttccaggagggcagtgcaccaccgtacagaatcag

SEQ ID NO: 279712 - DNA, 120 bp, Artificial Sequence
  ENSG00000129221_0 (sequence is synthesized)
ccctttctcctgcagccatggatgccgctctgctcctgaacgtggaaggggtcaagaaaaccattctgcacgggggcacgggcgagctcccaaacttcatcaccggatcccgagtgatct

SEQ ID NO: 279713 - DNA, 120 bp, Artificial Sequence
  ENSG00000129221_1 (sequence is synthesized)
ttcatttccgcaccatgaaatgtgatgaggagcggacagtcattgacgacagtcggcaggtgggccagcccatgcacatcatcatcggaaacatgttcaagctcgaggtctgggagatcc

SEQ ID NO: 279714 - DNA, 120 bp, Artificial Sequence
  ENSG00000129221_2 (sequence is synthesized)
tgcttacctccatgcgggtgcacgaggtggccgagttctggtgcgacaccatccacacgggggtctaccccatcctatcccggagcctgaggcagatggcccagggcaaggaccccacag

SEQ ID NO: 279715 - DNA, 120 bp, Artificial Sequence
  ENSG00000129221_3 (sequence is synthesized)
agtggcacgtgcacacgtgcgggctggccaacatgttcgcctaccacacgctgggctacgaggacctggacgagctgcagaaggagcctcagcctctggtctttgtgatcgagctgctgc

SEQ ID NO: 279716 - DNA, 120 bp, Artificial Sequence
  ENSG00000129221_4 (sequence is synthesized)
aggttgatgccccgagtgattaccagagggagacctggaacctgagcaatcatgagaagatgaaggcggtgcccgtcctccacggagagggaaatcggctcttcaagctgggccgctacg

SEQ ID NO: 279717 - DNA, 120 bp, Artificial Sequence
  ENSG00000129221_5 (sequence is synthesized)
aggaggcctcttccaagtaccaggaggccatcatctgcctaaggaacctgcagaccaaggagaagccatgggaggtgcagtggctgaagctggagaagatgatcaatactctgatcctca

SEQ ID NO: 279718 - DNA, 120 bp, Artificial Sequence
  ENSG00000129221_6 (sequence is synthesized)
actactgccagtgcctgctgaagaaggaggagtactatgaggtgctggagcacaccagtgatattctccggcaccacccaggcatcgtgaaggcctactacgtgcgtgcccgggctcacg

SEQ ID NO: 279719 - DNA, 120 bp, Artificial Sequence
  ENSG00000129221_7 (sequence is synthesized)
cagaggtgtggaatgaggccgaggccaaggcggacctccagaaagtgctggagctggagccgtccatgcagaaggcggtgcgcagggagctgaggctgctggagaaccgcatggcggaga

SEQ ID NO: 279720 - DNA, 120 bp, Artificial Sequence
  ENSG00000129221_8 (sequence is synthesized)
agcaggaggaggagcggctgcgctgccggaacatgctgagccagggtgccacgcagcctcccgcagagccacccacagagccacccgcacagtcatccacagagccacctgcagagccac

SEQ ID NO: 279721 - DNA, 120 bp, Artificial Sequence
  ENSG00000129221_9 (sequence is synthesized)
ccacagcaccatctgcagagctgtccgcagggccccctgcagagccagccacagagccacccccgtccccagggcactcgctgcagcactgagccccctgaggcccacagccacccaggc

SEQ ID NO: 279722 - DNA, 120 bp, Artificial Sequence
  ENSG00000129221_10 (sequence is synthesized)
agggagcaagtggcctggtcacttctggttcgattgaccaggatcgtggtgtcactttttaaaatttaaaattaatttttgaaatcaaagtcagacacacccatggtaaaaaaaaaaaaa

SEQ ID NO: 279723 - DNA, 120 bp, Artificial Sequence
  ENSG00000129221_11 (sequence is synthesized)
aaaacaatcccaagggtacagaagagcttatgaataaaagtagttttctcctctacccctctcattccttccgtgccatggttttaattgaccctgtttttaattcttctggtagttttc

SEQ ID NO: 279724 - DNA, 120 bp, Artificial Sequence
  ENSG00000129221_12 (sequence is synthesized)
atctgtttaaatcagtttctagattttaccccatgtcaatgacaaatgaggatttgatgctctgatcctttctcatgcctgatacccctccctgtctccccattttggatagttacattt

SEQ ID NO: 279725 - DNA, 120 bp, Artificial Sequence
  ENSG00000129221_13 (sequence is synthesized)
gggggtcatctcggtgatttttgtaactttacgcaggacacttagagctctctagaatcccactgactttagtgggtcttgatgtagggtgggcaagccccgacactggagcttagcctg

SEQ ID NO: 279726 - DNA, 120 bp, Artificial Sequence
  ENSG00000129221_14 (sequence is synthesized)
actggagcttagcctgagagggttcttggcctcccccaggaaagatttcaaaggcaagcgccagtggtagggtagaagaaaacagctgtggtcgggcacggtggctcacgcctataatcc

SEQ ID NO: 279727 - DNA, 66 bp, Artificial Sequence
  ENSG00000129221_15 (sequence is synthesized)
tcaacaagagtaaaacttcatctcaaaaaacaaaacaaaacaaaaacaacaacaaaaaacaaaaga

SEQ ID NO: 279728 - DNA, 120 bp, Artificial Sequence
  ENSG00000129221_16 (sequence is synthesized)
aaaacaaaacaaaacaaaaacaacaacaaaaaacaaaagaaaaacaaacaaaaccaaaaccaaaacagctgtattgaagctgcagtgttgcagctctgtgactgccctgcagagcagggc

SEQ ID NO: 279729 - DNA, 120 bp, Artificial Sequence
  ENSG00000129221_17 (sequence is synthesized)
taccccataggcagcgagcagcagctcagggcagttctgcagtcagatttatacccacttttaattacatgtagattaaggagctgcatatacaaagatttctagggaaggagtagtaac

SEQ ID NO: 279730 - DNA, 120 bp, Artificial Sequence
  ENSG00000129221_18 (sequence is synthesized)
ttctgggtcctggggtctttgccacggaacagggcagtatgccagggtgttgccacggcaatggtaaactgacatggcaccctgggggtcatgccttagggaaagccgcttccactcgcc

SEQ ID NO: 279731 - DNA, 120 bp, Artificial Sequence
  ENSG00000129221_19 (sequence is synthesized)
cctgttttagctcatcttcaagttagtctggtgtccaagctccaccgcctgcctcagtctggtgacctccttctgtgtctgatgagcatggcagcgttgggaccttccccttccaactct

SEQ ID NO: 279732 - DNA, 120 bp, Artificial Sequence
  ENSG00000129221_20 (sequence is synthesized)
ctccctcctcttcgtcctccctaaaggacgggtacgaggaggggctatcacgccagcgacatcctctagcaccacccaggtgtgtggggtggggcaggggggcgacgaagtatccagccc

SEQ ID NO: 279733 - DNA, 120 bp, Artificial Sequence
  ENSG00000129221_21 (sequence is synthesized)
agggccacgtagtcaactgccaagggcttcctgggcttctcttctgccccagagcttgtctccacccagcaggggttcccccagcgctaactgtatccctaaagttctgatgtactttac

SEQ ID NO: 279734 - DNA, 120 bp, Artificial Sequence
  ENSG00000129221_22 (sequence is synthesized)
ttttccatcttccttgttgttaacatctaccttctgctctgtaagcaaaactaaatcttctgtgctttgtccataggttgattctacaatctgaaaatcaataaacagcatttgcatgat

SEQ ID NO: 279735 - DNA, 120 bp, Artificial Sequence
  ENSG00000129221_23 (sequence is synthesized)
tagccttcctggacttttctttccaccccaccagggcaccaaaccttgtctccacccagccgggtttccccgagtgtgtaactgaattgtgggtgatggatgggcagtgcttggcgcggg

SEQ ID NO: 279736 - DNA, 120 bp, Artificial Sequence
  ENSG00000129221_24 (sequence is synthesized)
gcggccctttattttaatgtgtgtttgaacacttacccaggaagctcgccaagcttgtgatttcagcggaacggtaaacaggcgtttaaaaaagaggggcaatcaatatagggaaaaata

SEQ ID NO: 279737 - DNA, 120 bp, Artificial Sequence
  ENSG00000129221_25 (sequence is synthesized)
ttatgatgtcggtactagtactggtgttgcgaggatatggcaccgtcagtactagtattgacttaatgctcgaatcgtgctcacagtaaaaacatccagcccctggctcatgcatcaggc

SEQ ID NO: 279738 - DNA, 120 bp, Artificial Sequence
  ENSG00000129221_26 (sequence is synthesized)
cataatcaccatatgagggaggtgcagggaaagggcctgaaggttatctaatttaggtagcgtctataagaaaaataaaacaaagttatgaatataaaattactcacagggccttaaaaa

SEQ ID NO: 279739 - DNA, 120 bp, Artificial Sequence
  ENSG00000129221_27 (sequence is synthesized)
ggagaggaggaggtactgctattatgatcatcatctccatcttacagttgaggaaaccgagggatgggggatacagagaggttaaggatcatggcggggctgagggtcttggaggctggt

SEQ ID NO: 279740 - DNA, 120 bp, Artificial Sequence
  ENSG00000129221_28 (sequence is synthesized)
taagactgccccattactgagccctcacgtccagccggctggaatgagctccccgtcgctggaggtattcaaggagcaacctgatgctttcttgtgcttcatgctctgggtgggaggagt

SEQ ID NO: 279741 - DNA, 120 bp, Artificial Sequence
  ENSG00000129226_0 (sequence is synthesized)
gcagacagcctagctggactttgggtgaggcggttcagccatgaggctggctgtgcttttctcgggggccctgctggggctactggcagcccaggggacagggaatgactgtcctcacaa

SEQ ID NO: 279742 - DNA, 120 bp, Artificial Sequence
  ENSG00000129226_1 (sequence is synthesized)
aaaatcagctactttgctgccatccttcacggtgacacccacggttacagagagcactggaacaaccagccacaggactaccaagagccacaaaaccaccactcacaggacaaccaccac

SEQ ID NO: 279743 - DNA, 120 bp, Artificial Sequence
  ENSG00000129226_2 (sequence is synthesized)
aggcaccaccagccacggacccacgactgccactcacaaccccaccaccaccagccatggaaacgtcacagttcatccaacaagcaatagcactgccaccagccagggaccctcaactgc

SEQ ID NO: 279744 - DNA, 120 bp, Artificial Sequence
  ENSG00000129226_3 (sequence is synthesized)
cactcacagtcctgccaccactagtcatggaaatgccacggttcatccaacaagcaacagcactgccaccagcccaggattcaccagttctgcccacccagaaccacctccaccctctcc

SEQ ID NO: 279745 - DNA, 120 bp, Artificial Sequence
  ENSG00000129226_4 (sequence is synthesized)
gagtcctagcccaacctccaaggagaccattggagactacacgtggaccaatggttcccagccctgtgtccacctccaagcccagattcagattcgagtcatgtacacaacccagggtgg

SEQ ID NO: 279746 - DNA, 120 bp, Artificial Sequence
  ENSG00000129226_5 (sequence is synthesized)
aggagaggcctggggcatctctgtactgaaccccaacaaaaccaaggtccagggaagctgtgagggtgcccatccccacctgcttctctcattcccctatggacacctcagctttggatt

SEQ ID NO: 279747 - DNA, 120 bp, Artificial Sequence
  ENSG00000129226_6 (sequence is synthesized)
catgcaggacctccagcagaaggttgtctacctgagctacatggcggtggagtacaatgtgtccttcccccacgcagcacagtggacattctcggctcagaatgcatcccttcgagatct

SEQ ID NO: 279748 - DNA, 120 bp, Artificial Sequence
  ENSG00000129226_7 (sequence is synthesized)
agttgcagcaactcgagcatcattctttcaccagctgtccacctcgacctgctctccctgaggctccaggctgctcagctgccccacacaggggtctttgggcaaagtttctcctgcccc

SEQ ID NO: 279749 - DNA, 120 bp, Artificial Sequence
  ENSG00000129226_8 (sequence is synthesized)
agtgaccggtccatcttgctgcctctcatcatcggcctgatccttcttggcctcctcgccctggtgcttattgctttctgcatcatccggagacgcccatccgcctaccaggccctctga

SEQ ID NO: 279750 - DNA, 120 bp, Artificial Sequence
  ENSG00000129226_9 (sequence is synthesized)
gcatttgcttcaaaccccagggcactgagggggttggggtgtggtgggggggtacccttatttcctcgacacgcaactggctcaaagacaatgttattttccttccctttcttgaagaac

SEQ ID NO: 279751 - DNA, 87 bp, Artificial Sequence
  ENSG00000129226_10 (sequence is synthesized)
taaataaatatgagataatgcagtcgggagaagggagggagagaattttattaaatgtgacgaactgccccccccccccccccagca

SEQ ID NO: 279752 - DNA, 120 bp, Artificial Sequence
  ENSG00000129226_11 (sequence is synthesized)
ttattaaatgtgacgaactgccccccccccccccccagcaggagagcagcaaaatttatgcaaatctttgacggggttttccttgtcctgccaggattaaaagccatgagtttcttgtca

SEQ ID NO: 279753 - DNA, 120 bp, Artificial Sequence
  ENSG00000129226_12 (sequence is synthesized)
ttacaaaaactaatgactaagagagaggtggctagagctgaggcccctgagtcaggctgtgggtgggatcatctccagtacaggaagtgagactttcatttcctcctttccaagagaggg

SEQ ID NO: 279754 - DNA, 120 bp, Artificial Sequence
  ENSG00000129226_13 (sequence is synthesized)
ctgagggagcagggttgagcaactggtgcagacagcctagctggactttgggtgaggcggttcagccatgaggctggctgtgcttttctcgggggccctgctggggctactggcagagag

SEQ ID NO: 279755 - DNA, 120 bp, Artificial Sequence
  ENSG00000129226_14 (sequence is synthesized)
tcatctctcttcttaaccccccaaatctcgctctcccagcttgtcatggctacagggcagctttctttccatcctctacaagactctgccagtttcccccttttatcactgctgagtcac

SEQ ID NO: 279756 - DNA, 120 bp, Artificial Sequence
  ENSG00000129226_15 (sequence is synthesized)
tgcggtgagctcctcaccaatctcctactccccagcatccccccattccctcctcccacctttatcccaaccagcacgtcactgcaaatacctacctgccctatccttccgccaggtttc

SEQ ID NO: 279757 - DNA, 120 bp, Artificial Sequence
  ENSG00000129235_0 (sequence is synthesized)
agtagcggctgcacgtcgtgccaatggcccgctatgaggaggtgagcgtgtccggcttcgaggagttccaccgggccgtggaacagcacaatggcaagaccattttcgcctactttacgg

SEQ ID NO: 279758 - DNA, 120 bp, Artificial Sequence
  ENSG00000129235_1 (sequence is synthesized)
gttctaaggacgccggggggaaaagctggtgccccgactgcgtgcaggctgaaccagtcgtacgagaggggctgaagcacattagtgaaggatgtgtgttcatctactgccaagtaggag

SEQ ID NO: 279759 - DNA, 120 bp, Artificial Sequence
  ENSG00000129235_2 (sequence is synthesized)
aaaagccttattggaaagatccaaataatgacttcagaaaaaacttgaaagtaacagcagtgcctacactacttaagtatggaacacctcaaaaactggtagaatctgagtgtcttcagg

SEQ ID NO: 279760 - DNA, 120 bp, Artificial Sequence
  ENSG00000129235_3 (sequence is synthesized)
ccaacctggtggaaatgttgttctctgaagattaagattttaggatggcaatcatgtcttgatgtcctgatttgttctagtatcaataaactgtatacttgctttgaattcatgttagca

SEQ ID NO: 279761 - DNA, 120 bp, Artificial Sequence
  ENSG00000129235_4 (sequence is synthesized)
ataaatgatgttaaaaaaactggcatgtgtctaaacaatagagtgctattaaaatgcccatgaacctttagtttgcctgtaatacatggatatttttaagatataaagaagtcttcagaa

SEQ ID NO: 279762 - DNA, 120 bp, Artificial Sequence
  ENSG00000129235_5 (sequence is synthesized)
atagcagtaaaggctcaaaggaacgtattcttgaaggtgacggaaatacctaaaaactcctaaaggtgcagagcacaccttccaaatctctcaaaagatcagtatcttttattttaagtt

SEQ ID NO: 279763 - DNA, 120 bp, Artificial Sequence
  ENSG00000129235_6 (sequence is synthesized)
atctccatctgcaaagcaactgatgatattcctgaaaccccttctttgattttggaatgtagaacctaacctcaccactgaaggaaagcacatgacctctaatctagcctctgcttaatt

SEQ ID NO: 279764 - DNA, 120 bp, Artificial Sequence
  ENSG00000129235_7 (sequence is synthesized)
aagactctataacccagttctgggaagaactccaagctgggagtcagtcacactgactctaccacttactagctgtgtaaccacaggcaagttactcaccccgtccaaacctcagttttc

SEQ ID NO: 279765 - DNA, 120 bp, Artificial Sequence
  ENSG00000129235_8 (sequence is synthesized)
tcttctataaacaaggttcttagaataaaatgagaattcaaggaagcacttaacatagcacctggtttgtggtacctcccaaatcaatggtagctttcccaaatgaacacaagtatttga

SEQ ID NO: 279766 - DNA, 120 bp, Artificial Sequence
  ENSG00000129235_9 (sequence is synthesized)
ggctcctcatgtttgttctaaagtcaagagtccagttagtaactaaccactagttgtcctgccatgactaggtcaagtgaggccacagtgattcagtgattcttaaagccaccttgcaaa

SEQ ID NO: 279767 - DNA, 120 bp, Artificial Sequence
  ENSG00000129235_10 (sequence is synthesized)
gcaggtaatacagttatttcctgtcctgcagaattcaagaacctttatgcagttcctgtcctatgatttaaagaggtcagtgactccgctactctcactacatcttagagtagagtggta

SEQ ID NO: 279768 - DNA, 120 bp, Artificial Sequence
  ENSG00000129235_11 (sequence is synthesized)
gagtagttgatctgagacagtaaggttccaggagatggtcttgccctactatatgtcaggaacagctagccttagaattcagtatacttggtggcccacccctaccccatgccccagtgc

SEQ ID NO: 279769 - DNA, 120 bp, Artificial Sequence
  ENSG00000129235_12 (sequence is synthesized)
cttatttggtctaaagcacctaacttttccattcttaatcagctgattatgctaaatgcgtaaaaaagaaaaacaccttacaaatccacagggaaatcaaagaacaattcaggtttaaca

SEQ ID NO: 279770 - DNA, 120 bp, Artificial Sequence
  ENSG00000129235_13 (sequence is synthesized)
gaaatagtctattaacaataaaaagttggatgaaaaagcacactaaaggttctaggggctaccataataaaggtagataggaagagttttcattttttttgtcttcactgtacaaaagaa

SEQ ID NO: 279771 - DNA, 120 bp, Artificial Sequence
  ENSG00000129235_14 (sequence is synthesized)
atacattatatacatgtattaagtgcctcgtttgtatccagtttttcattttcccgatgtgttattttgctgttgctgctctgccaaggcttgctgaaggcgcatccgcttccgggaata

SEQ ID NO: 279772 - DNA, 120 bp, Artificial Sequence
  ENSG00000129235_15 (sequence is synthesized)
cttaccaagactgggggaagggggaaagaacacagtttatacgtgcctgattgtagagttgacgtgcgattattttatctcaactttttttaaagctgaaccagtcgtacgagaggggct

SEQ ID NO: 279773 - DNA, 120 bp, Artificial Sequence
  ENSG00000129235_16 (sequence is synthesized)
atggcaggaaggtcgagcctacggccagaaggggggcttagcggaggcagagtcttggttccagacatccgcggagcaatctgagctgtccccaagtctccttctattaaatcctacccc

SEQ ID NO: 279774 - DNA, 120 bp, Artificial Sequence
  ENSG00000129235_17 (sequence is synthesized)
gccctgccaagagcgctcttccttttaccaccttacccggatgatcttggaatctagttccttaaaacttctcactcccccagtaccattagtgtcttacaggatacgtgagttggtcag

SEQ ID NO: 279775 - DNA, 120 bp, Artificial Sequence
  ENSG00000129235_18 (sequence is synthesized)
caaatacatgtgctttccattgttacgggcgcggtggtgcaggggcaaatcgggactgggatttggtccttacccttaacgtggctctaagaccagaagggaacacctgacttgtgttga

SEQ ID NO: 279776 - DNA, 120 bp, Artificial Sequence
  ENSG00000129235_19 (sequence is synthesized)
gacgtgcacaaattgcatacttaggcgggaagggcctcagggacttacttacccagtttgtcttacaaggtaatgtctgacaagttaaacaattagaagctattaaatacaaatttaaaa

SEQ ID NO: 279777 - DNA, 120 bp, Artificial Sequence
  ENSG00000129235_20 (sequence is synthesized)
tagctggctttacttttatatcttagtcacactttgaaactttgcacagggtaattagtagattaagccatagtccgcaaggttttttaagtgtttgcaagaacagtgattactaaaaaa

SEQ ID NO: 279778 - DNA, 120 bp, Artificial Sequence
  ENSG00000129235_21 (sequence is synthesized)
ttaaatgtaggactatgtcaaatattaagcaaactgtaataaaccaagtaaatttttttcatgatcactttttcttttcgaatagttggaaagatccaaataatgacttcagaaaaaact

SEQ ID NO: 279779 - DNA, 120 bp, Artificial Sequence
  ENSG00000129235_22 (sequence is synthesized)
tgaaagtaacagcagtgcctacactacttaagtatggaacagtaagtatctttaaatatgctgggcctgtaattcactgtcagaactcttttaacttgctgtggatccagatttgaaaag

SEQ ID NO: 279780 - DNA, 120 bp, Artificial Sequence
  ENSG00000129235_23 (sequence is synthesized)
atcttgacatttcatctcaattccattgttgttcagagtgctgctgaaagtccattcctatggccaatcccaataaactgataatgtaaatatctagctattaggtctttttcatgttaa

SEQ ID NO: 279781 - DNA, 120 bp, Artificial Sequence
  ENSG00000129235_24 (sequence is synthesized)
gtcactcttaaaaaaccagaaagtaggttgactcataattccttaaaacatttgcatcaacagttgttttctgtttaattcataattctggttaaaaagtaagggcatctcttctagttc

SEQ ID NO: 279782 - DNA, 120 bp, Artificial Sequence
  ENSG00000129235_25 (sequence is synthesized)
agtcatgcccctgggatcctaaattaaagagttgaggggaagaagagggcactgggcttgctgtctcctgttttagtctgtggagcttcctggtatttggggtttaagtctcttgagcca

SEQ ID NO: 279783 - DNA, 120 bp, Artificial Sequence
  ENSG00000129235_26 (sequence is synthesized)
agtatgttagtgattcatcttacagcaaatatattgattctttcataaaacttgttataactagatgatagtttctgaattgcgtaatttctgtgttcaaagatgagtgtcattcaaggc

SEQ ID NO: 279784 - DNA, 120 bp, Artificial Sequence
  ENSG00000129235_27 (sequence is synthesized)
tctcttgcccacccggaaacagcctcgccccgcctacgcgggacccaaccgcggcgaccggacgtgcactcctccagtagcggctgcacgtcgtgccaatggcccgctatgaggagctga

SEQ ID NO: 279785 - DNA, 120 bp, Artificial Sequence
  ENSG00000129244_0 (sequence is synthesized)
gcactgctgaggagcggagcctccgcctggggggccccccatccctggctgtcccccagctgcgcgtccccgccccacccccgcggctgagccaccaccggtgcagtggtctccgcttgg

SEQ ID NO: 279786 - DNA, 120 bp, Artificial Sequence
  ENSG00000129244_1 (sequence is synthesized)
cggagcgagccttgagcttcgttccacagcttctttgcatcttggatttcggggcggccccctcccccacctctctctgcctttttgtaccccgctttttttctgcgttctgctcggttt

SEQ ID NO: 279787 - DNA, 120 bp, Artificial Sequence
  ENSG00000129244_2 (sequence is synthesized)
ttgtagccgtctgtttttgcaccccatttcgttttgtttctagacggtttggtggggggtgaagctgcattcataccccttcctcttgttattctcccctgctctgacagcacccctttt

SEQ ID NO: 279788 - DNA, 120 bp, Artificial Sequence
  ENSG00000129244_3 (sequence is synthesized)
catcgcagttggggggcctaggatcggtgcatcttccgccgcgctgccagcaccccgcagcgcgtggtcgtgcaccccggaatctgcagcagctgcatatctgaggggggtctcctttgc

SEQ ID NO: 279789 - DNA, 120 bp, Artificial Sequence
  ENSG00000129244_4 (sequence is synthesized)
ccgcgccgccttcgctccccgtgcttttgggtgtgtggagggcttcagcgcgcggcgcccccgcttctccgcaaccccccgccccgcgcccggactcgccccgcgccaccaagatggtca

SEQ ID NO: 279790 - DNA, 120 bp, Artificial Sequence
  ENSG00000129244_5 (sequence is synthesized)
tccagaaagagaagaagagctgcgggcaggtggttgaggagtggaaggagttcgtgtggaacccgaggacgcaccagtttatgggccgcaccgggaccagctgggcctttatcctcctct

SEQ ID NO: 279791 - DNA, 120 bp, Artificial Sequence
  ENSG00000129244_6 (sequence is synthesized)
tctacctcgttttttatgggttcctcaccgccatgttcaccctcaccatgtgggtgatgctgcagactgtctccgaccatacccccaagtaccaggaccgactggccacaccgggcttga

SEQ ID NO: 279792 - DNA, 120 bp, Artificial Sequence
  ENSG00000129244_7 (sequence is synthesized)
tgattcgccccaagactgagaaccttgatgtcattgtcaatgtcagtgacactgaaagctgggaccagcatgttcagaagctcaacaagttcttggagccttacaacgactctatccaag

SEQ ID NO: 279793 - DNA, 120 bp, Artificial Sequence
  ENSG00000129244_8 (sequence is synthesized)
cccaaaagaatgatgtctgccgccctggacgctattacgaacagccagataatggagtcctcaactaccccaaacgtgcctgccaattcaaccggacccagctgggcaactgctccggca

SEQ ID NO: 279794 - DNA, 120 bp, Artificial Sequence
  ENSG00000129244_9 (sequence is synthesized)
ttggggactccacccactatggttacagcactgggcagccctgtgtcttcatcaagatgaaccgggtcatcaacttctatgcaggagcaaaccagagcatgaatgttacctgtgctggga

SEQ ID NO: 279795 - DNA, 120 bp, Artificial Sequence
  ENSG00000129244_10 (sequence is synthesized)
agcgagatgaagatgctgagaatctcggcaacttcgtcatgttccccgccaacggcaacatcgacctcatgtacttcccctactatggcaaaaagttccacgtgaactacacacagcccc

SEQ ID NO: 279796 - DNA, 120 bp, Artificial Sequence
  ENSG00000129244_11 (sequence is synthesized)
tggtggctgtgaagttcctgaatgtgacccccaacgtggaggtgaatgtagaatgtcgcatcaacgccgccaacatcgccacagacgatgagcgagacaagttcgccggccgcgtggcct

SEQ ID NO: 279797 - DNA, 120 bp, Artificial Sequence
  ENSG00000129244_12 (sequence is synthesized)
tcaaactccgcatcaacaaaacctgaggccccttcctcccaccccatctctctcctgtggatgctcctggaatgtccctgaccctgcctgatccctccctcacccaccccaaaggtattt

SEQ ID NO: 279798 - DNA, 120 bp, Artificial Sequence
  ENSG00000129244_13 (sequence is synthesized)
aacttctcccaacctcagatcagtcagacagggagctgggctaagatggccacggaggagttaggagcctttctagttctggtttagctgtgagagctatccactctcctgcctgcatat

SEQ ID NO: 279799 - DNA, 120 bp, Artificial Sequence
  ENSG00000129244_14 (sequence is synthesized)
cccctgagagttataggaagtgcccactgacccacccacccacctacaccccccgccacacacacacacaaacgtgcacacgcgtctcatttgacccctttgcttccagagatgaatgtg

SEQ ID NO: 279800 - DNA, 120 bp, Artificial Sequence
  ENSG00000129244_15 (sequence is synthesized)
gcactccctccttccattcctaagctctggccaccgtcccttgatctctcatactttctccctgtctacacagtcgccatcttggtgactttgaatttatctggctcctgggcaggtctt

SEQ ID NO: 279801 - DNA, 120 bp, Artificial Sequence
  ENSG00000129244_16 (sequence is synthesized)
ctcctcctctccatccctattccctcctctgaaatgcacccctttgtaattgaggacaaggtggttctgtggccttttccctctttgctggcacgttctgcttctcaccctctggtgact

SEQ ID NO: 279802 - DNA, 120 bp, Artificial Sequence
  ENSG00000129244_17 (sequence is synthesized)
ctgtgagctgggaaatgagggactggaagtgaggcctgtgttgacccttcctgaaaatcctctagcagcccccgacttcagcagtttctttctttgtttttttgagatggagtttcgctc

SEQ ID NO: 279803 - DNA, 120 bp, Artificial Sequence
  ENSG00000129244_18 (sequence is synthesized)
acaggcgtgagccaccgcgcccggccttcagtttcttcctaggccgttctgtcacccaaatagctgctacccagaggggcggggttgacctaggctgaatatccactttgtttttatgga

SEQ ID NO: 279804 - DNA, 120 bp, Artificial Sequence
  ENSG00000129244_19 (sequence is synthesized)
gaatatccactttgtttttatggatggctcccttcccccattcgccttcccagaatatccttcaagttccacttcccagggagctctgggggaggggcggccattctggctccgtcccca

SEQ ID NO: 279805 - DNA, 120 bp, Artificial Sequence
  ENSG00000129244_20 (sequence is synthesized)
gtggccaccttggaaacatcggctggctttgggactattccacctccttcccctgagcccagatctgcccccaccatcctttctctggcttcttttagcaagttatcaactaatcactaa

SEQ ID NO: 279806 - DNA, 120 bp, Artificial Sequence
  ENSG00000129244_21 (sequence is synthesized)
ctaactccttccttttcctctgcatgccagcctgaaaattccaaatctagcctctgaatgtcttggctccatctcttcagacccctttgcctttaaaaaaaaaacaaaaacaaaaacaaa

SEQ ID NO: 279807 - DNA, 120 bp, Artificial Sequence
  ENSG00000129244_22 (sequence is synthesized)
cccataatgcccacagaatgtcaaatgaggggcctcctgcctcctgctctgaatattctgtagctgtagaggcattttaaccctttgtcctccagcatcccttcacttcctcatcctctc

SEQ ID NO: 279808 - DNA, 120 bp, Artificial Sequence
  ENSG00000129244_23 (sequence is synthesized)
taacctcctttttctttttttaatgctgcagcctccacactccacccacaggtggacccttccctttttctctagctggatctgtgtttcttcccttcgggcccccatgttttcctgcac

SEQ ID NO: 279809 - DNA, 120 bp, Artificial Sequence
  ENSG00000129244_24 (sequence is synthesized)
ccgccctaccatggtctctctctgcagttatttaatgcctgtgtcagatctactgtaaaaagaggattaagtaaaataaaatgagagcaattatatatataaatatatatcatacacaga

SEQ ID NO: 279810 - DNA, 120 bp, Artificial Sequence
  ENSG00000129245_0 (sequence is synthesized)
gcagtaggcggcggtggcagggggaggtggaggctgtggagcggcagcggcagcagcgggtcccgggactgaggcagcagcgggggcggcggcgggcggaagctgaggtgacgaaggcag

SEQ ID NO: 279811 - DNA, 120 bp, Artificial Sequence
  ENSG00000129245_1 (sequence is synthesized)
cggaagctgaggtgacgaaggcagcggcggcggcggccgtttccctcacggtggcggagaccaaggcggcggcggcggacggggagcggcccggccccggccccctgctcgttggctgtg

SEQ ID NO: 279812 - DNA, 80 bp, Artificial Sequence
  ENSG00000129245_2 (sequence is synthesized)
ggggagacgccgggggcctggcccggcccgcactcagactgctgctgcagccgccgccgggggagtcggaggcggtggcg

SEQ ID NO: 279813 - DNA, 120 bp, Artificial Sequence
  ENSG00000129245_3 (sequence is synthesized)
gcgccatgggcggcctggcctctgggggggatgtggagccgggactgcccgtcgaggtgcgcggctccaacggggccttctacaagggctttgtgaaggatgtccatgaagactctgtca

SEQ ID NO: 279814 - DNA, 120 bp, Artificial Sequence
  ENSG00000129245_4 (sequence is synthesized)
ccatcttctttgaaaacaactggcagagtgagagacaaattccttttggggatgtccggctaccacctccagctgactataataaggagatcacagaaggggatgaagtggaggtttatt

SEQ ID NO: 279815 - DNA, 120 bp, Artificial Sequence
  ENSG00000129245_5 (sequence is synthesized)
ctcgagccaatgaacaggaaccttgtggctggtggctggcccgggtgcggatgatgaagggagatttctatgtcattgaatatgctgcctgtgatgccacctacaatgaaattgttaccc

SEQ ID NO: 279816 - DNA, 120 bp, Artificial Sequence
  ENSG00000129245_6 (sequence is synthesized)
tggagcgacttcggccagttaatcccaatccccttgcaaccaaaggcagcttcttcaaggttaccatggctgtgcccgaggatctgagagaagcctgctccaatgaaaacgtccataaag

SEQ ID NO: 279817 - DNA, 120 bp, Artificial Sequence
  ENSG00000129245_7 (sequence is synthesized)
agttcaagaaagccctgggagccaactgcatctttctcaacatcacaaacagtgagctcttcattctgtcaaccacagaagcccctgtgaagcgagcatctctgctgggtgatatgcatt

SEQ ID NO: 279818 - DNA, 120 bp, Artificial Sequence
  ENSG00000129245_8 (sequence is synthesized)
tccgaagcctgcgcaccaaactgctacttatgtcccgcaatgaagaagctaccaagcacctagagacaagcaagcagttggcagcagccttccaagaggagttcacagtgcgagaggacc

SEQ ID NO: 279819 - DNA, 120 bp, Artificial Sequence
  ENSG00000129245_9 (sequence is synthesized)
tgatgggactggcaattgggactcacggtgccaacatccagcaggcccgaaaagtacctggggtgaccgccattgagttgggtgaagagacctgcactttccgcatctatggggagactc

SEQ ID NO: 279820 - DNA, 120 bp, Artificial Sequence
  ENSG00000129245_10 (sequence is synthesized)
ccgaggcttgccgacaggcccgaagctaccttgagttttctgaggactcagtgcaagtgcccaggaacctggttggcaaagtgattggaaagaacgggaaagtgatccaggagattgtgg

SEQ ID NO: 279821 - DNA, 120 bp, Artificial Sequence
  ENSG00000129245_11 (sequence is synthesized)
ataaatctggtgtggtgagggttcgagtggaaggtgataatgacaagaagaaccccagggaggagggaatggttcccttcatttttgttggcacccgagagaacatcagcaatgcccagg

SEQ ID NO: 279822 - DNA, 120 bp, Artificial Sequence
  ENSG00000129245_12 (sequence is synthesized)
cctgggagtgggcggggcagcggtggcagcgacaaggctggatatagcactgatgagagctcctcctcctccctccatgcgactcgaacctatgggggcagctatgggggccgtggccgt

SEQ ID NO: 279823 - DNA, 120 bp, Artificial Sequence
  ENSG00000129245_13 (sequence is synthesized)
ggccggaggacaggcggtcctgcctatggccccagctcagatgtgtctacagcttcagagactgagtcagagaagagagaggagcccaaccgagctgggcctggcgacagggatccccca

SEQ ID NO: 279824 - DNA, 120 bp, Artificial Sequence
  ENSG00000129245_14 (sequence is synthesized)
acccgaggggaagaaagccggaggcggccgactgggggccggggtaggggacccccacctgccccccggcccacttcgagatacaattcttcatctattagctcagtgctgaaggatcca

SEQ ID NO: 279825 - DNA, 120 bp, Artificial Sequence
  ENSG00000129245_15 (sequence is synthesized)
gacagtaatccctacagcctattggacacgtctgaaccagagcccccggttgattcagaacctggggaaccccccccagcaagtgccaggcgccgccgctcccgccgccgccgcactgat

SEQ ID NO: 279826 - DNA, 120 bp, Artificial Sequence
  ENSG00000129245_16 (sequence is synthesized)
gaagacaggaccgtcatggatggaggcctggaatcagatgggcccaacatgacagagaatggcctggaagatgaatcaagacctcaacgtcgtaatcgcagccgccgccgccgtaaccgt

SEQ ID NO: 279827 - DNA, 120 bp, Artificial Sequence
  ENSG00000129245_17 (sequence is synthesized)
ggtaatcggactgatggctctatcagtggagaccgccagccagtgactgtggctgactatatctcacgagcagagtctcagagccgccagaggccacccctggaacgcactaaaccctca

SEQ ID NO: 279828 - DNA, 120 bp, Artificial Sequence
  ENSG00000129245_18 (sequence is synthesized)
gaagactctctttcaggacagaagggtgactctgtcagcaagcttcctaagggcccctcggagaatggggagctctccgcccccttggagttgggtagtatggtgaatggggtttcataa

SEQ ID NO: 279829 - DNA, 120 bp, Artificial Sequence
  ENSG00000129245_19 (sequence is synthesized)
aacctccaacctgcacccctcccttctccatctcgcttgctgcccaacaccatggccctcacaggcccaactgacctgcgctggagctgctcttatctaggggggaggggggtggcacag

SEQ ID NO: 279830 - DNA, 120 bp, Artificial Sequence
  ENSG00000129245_20 (sequence is synthesized)
cagcttgggtaccccccaacctccaggagctagtggaggggtgtgtaacagggtcataccccctccctcttgtccaccctacccccagggtaaggggagcctctctccttccccatcaga

SEQ ID NO: 279831 - DNA, 120 bp, Artificial Sequence
  ENSG00000129245_21 (sequence is synthesized)
ctggatgtgcctttatcctctaatgccccaatctctctctgaacacccccattctccacctgttggtggggggtgctcctcgacccacccagatttgaccgttcagggggcctcccctgc

SEQ ID NO: 279832 - DNA, 120 bp, Artificial Sequence
  ENSG00000129245_22 (sequence is synthesized)
tatccctcctcccatcctgtaccccccatttctggggcctcatcactgtggaagacggggatagtaagagataagtgggtgggaggcacggggaaggttttggagtagaaccaggggtgt

SEQ ID NO: 279833 - DNA, 120 bp, Artificial Sequence
  ENSG00000129245_23 (sequence is synthesized)
gtatgaaggggggtgacaaggtccccctggggaggggaccaaccttgtctggtggatgagaaggcgtatttatttttcactgtacagtatttaaaaagagaataaaaaaatccaaatggc

SEQ ID NO: 279834 - DNA, 120 bp, Artificial Sequence
  ENSG00000129245_24 (sequence is synthesized)
agaacgggaaagtgatccaggagattgtggataaatctggtgtggtgagggttcgagtggaaggtgataatgacaagaagaaccccagggaggaggtatgggtacggggcaagtgggcat

SEQ ID NO: 279835 - DNA, 120 bp, Artificial Sequence
  ENSG00000129245_25 (sequence is synthesized)
gcccagaatgatcccactgggcaggctcccctaggagactgggcggcgttaatccttccatttcattttcctttctgatccatcgtttctgctctctgttctctagggaatggttccctt

SEQ ID NO: 279836 - DNA, 120 bp, Artificial Sequence
  ENSG00000129245_26 (sequence is synthesized)
cttttatccaggattggcacctccctgtggactcccagtttcacaaggacagagaaacagtctgtaatgggagtgataaaaatgaaagaataaatttctagggattgtaacattttgtcc

SEQ ID NO: 279837 - DNA, 120 bp, Artificial Sequence
  ENSG00000129245_27 (sequence is synthesized)
tgtaaaaacacatcagaaacctagaagcaggagaatgaagtaaatggaatccatataaagaaaatgaggctggaagacggtgtatcagctttattcttatttccttaaaaaaaataaaag

SEQ ID NO: 279838 - DNA, 69 bp, Artificial Sequence
  ENSG00000129245_28 (sequence is synthesized)
ccaggcatggtggtggacacctgtagtcgtagctactcaggaggccgaggcatgagaatcacttgaagt

SEQ ID NO: 279839 - DNA, 120 bp, Artificial Sequence
  ENSG00000129245_29 (sequence is synthesized)
gggcgacagagcgagacgccatctcaaagaaaaaacaaaaagttcctgacctttccacacaggtcctcgtggtccgcggactccagagtggttctagctttctattaatatcacacagtt

SEQ ID NO: 279840 - DNA, 120 bp, Artificial Sequence
  ENSG00000129245_30 (sequence is synthesized)
attaatatcacacagttttccttatttaagttatgcaaagggtcgtgtgcctgggactgtgagattctaccaccatgattcctacagtgacttttcctttcagacaagcaagcagttggc

SEQ ID NO: 279841 - DNA, 120 bp, Artificial Sequence
  ENSG00000129245_31 (sequence is synthesized)
gtggaggctgtggagcggcagcggcagcagcgggtcccgggactgaggcagcagcgggggcggcggcgggcggaagctgagggctttgtgaaggatgtccatgaagactctgtcaccatc

SEQ ID NO: 279842 - DNA, 120 bp, Artificial Sequence
  ENSG00000129245_32 (sequence is synthesized)
cagtgactgtggctgactatatctcacgagcagagtctcagagccgccagaggccacccctggaacgcactaaaccctcagaagactctctttcaggacagaagaggcagctgtgtctga

SEQ ID NO: 279843 - DNA, 120 bp, Artificial Sequence
  ENSG00000129245_33 (sequence is synthesized)
ctttttaacccttttgcagaaagagaagggcttaaatgtgcttatatttatttgtcaagaggactttattgctcctgactcctacaggcccaggtagccctaccttttttttttcttttt

SEQ ID NO: 279844 - DNA, 80 bp, Artificial Sequence
  ENSG00000129250_0 (sequence is synthesized)
cgcgagtccgccgcccgccgcccgggcacccggcgaggggcgggggcagctccgaaccggccccagatccttcccgcttc

SEQ ID NO: 279845 - DNA, 120 bp, Artificial Sequence
  ENSG00000129250_1 (sequence is synthesized)
ccccagatccttcccgcttccgcctcacgcttcccggaaagcttgtccctctccgccgagctgctccgggagccccgccgcgccgagggtatctcccagagccccagctggtgtggccag

SEQ ID NO: 279846 - DNA, 120 bp, Artificial Sequence
  ENSG00000129250_2 (sequence is synthesized)
gccccaggagtaggatggggctccccctacgagggccggtggcagccagaactgatacagcccccctggtctggggccaggacgccagctgaggagggcaggagtgtctggagctatggc

SEQ ID NO: 279847 - DNA, 120 bp, Artificial Sequence
  ENSG00000129250_3 (sequence is synthesized)
tggtgcctcggtgaaagtggcagtgagggttcggccctttaacgcccgtgagaccagccaggatgccaagtgtgtggtcagcatgcagggcaacaccacctccatcatcaatcctaaaca

SEQ ID NO: 279848 - DNA, 120 bp, Artificial Sequence
  ENSG00000129250_4 (sequence is synthesized)
gagcaaggatgcccccaaaagcttcacctttgactactcctactggtcacacacttcgacggaggacccccagtttgcatctcagcagcaagtgtatcgggacattggagaagagatgct

SEQ ID NO: 279849 - DNA, 120 bp, Artificial Sequence
  ENSG00000129250_5 (sequence is synthesized)
gctccacgcctttgaaggctacaacgtgtgcatctttgcctatgggcagaccggggctgggaaatcctataccatgatggggcgacaggagccagggcagcagggcatcgtgccccagct

SEQ ID NO: 279850 - DNA, 120 bp, Artificial Sequence
  ENSG00000129250_6 (sequence is synthesized)
ctgtgaggacctcttctctcgcgttagtgagaaccagagtgctcagctatcctactctgtggaggtgagctatatggagatctactgtgagcgggtacgagacctcttgaaccccaagag

SEQ ID NO: 279851 - DNA, 120 bp, Artificial Sequence
  ENSG00000129250_7 (sequence is synthesized)
tcggggttctctgcgggtccgggagcaccccatcctgggcccgtacgtgcaggacctgtccaaattggctgtgacctcctacgcagacattgctgacctcatggactgtggaaataaagc

SEQ ID NO: 279852 - DNA, 120 bp, Artificial Sequence
  ENSG00000129250_8 (sequence is synthesized)
acggactgtggctgccaccaacatgaatgagaccagcagccgttcccatgccgtctttaccatcgtcttcacacagcgctgccatgaccagctcacggggctggactcggagaaggtcag

SEQ ID NO: 279853 - DNA, 120 bp, Artificial Sequence
  ENSG00000129250_9 (sequence is synthesized)
taagatcagtttggtggaccttgctgggagtgagcgagccgactcctcaggggcccggggcatgcgcctgaaggaaggagccaacatcaataagtccctgactacactagggaaagtgat

SEQ ID NO: 279854 - DNA, 120 bp, Artificial Sequence
  ENSG00000129250_10 (sequence is synthesized)
ctcggcccttgcagatatgcaatcaaagaagcgaaagtcggattttatcccctacagggactctgtgctcacctggctgctcaaggaaaatttgggggggaactcacgcacagccatgat

SEQ ID NO: 279855 - DNA, 120 bp, Artificial Sequence
  ENSG00000129250_11 (sequence is synthesized)
tgcagccctgagccctgctgacatcaattacgaggagactctcagcaccctcaggtatgctgaccgcaccaagcaaatccgctgcaatgccatcatcaacgaggaccctaatgcccggct

SEQ ID NO: 279856 - DNA, 120 bp, Artificial Sequence
  ENSG00000129250_12 (sequence is synthesized)
gattagagagctgcaggaggaagtagcccggctgcgggaactgctgatggctcagggactgtcagcctctgctctggaaggcctgaagacggaagaagggagtgtcagaggcgccctgcc

SEQ ID NO: 279857 - DNA, 120 bp, Artificial Sequence
  ENSG00000129250_13 (sequence is synthesized)
agctgtgtcatctcccccagctccagtttcaccctcatcacccaccacacataatggggagctggagccgtcattctcccccaacacggagtcccagattgggcctgaggaagccatgga

SEQ ID NO: 279858 - DNA, 120 bp, Artificial Sequence
  ENSG00000129250_14 (sequence is synthesized)
gaggctgcaggagacagagaagattatagctgagctgaacgagacatgggaggagaagctacgcaagacagaagccctgaggatggagagagaagcattgctggctgagatgggggtggc

SEQ ID NO: 279859 - DNA, 120 bp, Artificial Sequence
  ENSG00000129250_15 (sequence is synthesized)
cgtccgggaggatgggggaactgtgggcgtcttctctccaaagaagactccccacctggtgaacctgaacgaagaccctctgatgtctgagtgtctgctctaccacatcaaagatggcgt

SEQ ID NO: 279860 - DNA, 120 bp, Artificial Sequence
  ENSG00000129250_16 (sequence is synthesized)
caccagggtcggccaagtagatatggacatcaagctgaccggacagttcattcgggagcaacactgtctgttccggagcatcccccagccagatggagaagtggtggtcactctggagcc

SEQ ID NO: 279861 - DNA, 120 bp, Artificial Sequence
  ENSG00000129250_17 (sequence is synthesized)
ttgtgaaggagctgagacatatgtgaatgggaagcttgtgacggagccgctggtgctgaagtcagggaataggattgtgatgggcaagaaccacgttttccgcttcaaccacccggagca

SEQ ID NO: 279862 - DNA, 120 bp, Artificial Sequence
  ENSG00000129250_18 (sequence is synthesized)
ggcaaggctggaacgggaacgaggggtccccccacccccaggaccgccctctgagccagtcgactggaactttgcccagaaggaactgctggagcagcaaggcatcgacataaagctgga

SEQ ID NO: 279863 - DNA, 120 bp, Artificial Sequence
  ENSG00000129250_19 (sequence is synthesized)
aatggagaagaggctgcaggatctggagaatcagtaccggaaagaaaaggaagaagccgatcttctgctggagcagcagcgactgtatgcagactcggacagcggggatgactctgacaa

SEQ ID NO: 279864 - DNA, 120 bp, Artificial Sequence
  ENSG00000129250_20 (sequence is synthesized)
gcgctcttgtgaagagagctggaggctcatctcctccttgcgggagcagctgccgcccaccacggtccagaccattgtcaaacgctgtggtctgcccagcagtggcaagcgcagggcccc

SEQ ID NO: 279865 - DNA, 120 bp, Artificial Sequence
  ENSG00000129250_21 (sequence is synthesized)
tcgcagggtttatcagatcccccagcgacgcaggctgcagggcaaagacccccgctgggccaccatggctgacctgaagatgcaggcggtgaaggagatctgctacgaggtggccctggc

SEQ ID NO: 279866 - DNA, 120 bp, Artificial Sequence
  ENSG00000129250_22 (sequence is synthesized)
tgacttccgccacgggcgggctgagattgaggccctggccgccctcaagatgcgggagctgtgtcgcacctatggcaagccagacggccccggagacgcctggagggctgtggcccggga

SEQ ID NO: 279867 - DNA, 120 bp, Artificial Sequence
  ENSG00000129250_23 (sequence is synthesized)
tgtctgggacactgtaggcgaggaggaaggaggtggagctggcagtggtggtggcagtgaggagggagcccgaggggcggaggtggaggacctccgggcccacatcgacaagctgacggg

SEQ ID NO: 279868 - DNA, 120 bp, Artificial Sequence
  ENSG00000129250_24 (sequence is synthesized)
gattctgcaggaggtgaagctgcagaacagcagcaaggaccgggagctgcaggccctgcgggaccgcatgctccgcatggagagggtcatccccctggcccaggatcatgaggatgagaa

SEQ ID NO: 279869 - DNA, 120 bp, Artificial Sequence
  ENSG00000129250_25 (sequence is synthesized)
tgaagaaggtggtgaggtcccctgggccccgcctgaaggatcagaggcagcagaggaggcagcccccagtgaccgcatgccgtcagcccggcccccctcgccaccactgtcaagctggga

SEQ ID NO: 279870 - DNA, 120 bp, Artificial Sequence
  ENSG00000129250_26 (sequence is synthesized)
gcgggtgtcacggctcatggaggaggaccctgccttccgtcgtggtcgtcttcgctggctcaagcaggagcagctacggctgcagggactgcagggctctgggggccggggcggggggct

SEQ ID NO: 279871 - DNA, 120 bp, Artificial Sequence
  ENSG00000129250_27 (sequence is synthesized)
gcgcaggcccccagcccgctttgtgccccctcacgactgcaagctacgcttccccttcaagagcaacccccagcaccgggagtcttggccagggatggggagcggggaggctccaactcc

SEQ ID NO: 279872 - DNA, 120 bp, Artificial Sequence
  ENSG00000129250_28 (sequence is synthesized)
gctccaaccccctgaggaggtcactccccatccagccacccctgcccgccggcctccgagtccccgaaggtcccaccatccccgcaggaactccctggatggagggggccgatcccgggg

SEQ ID NO: 279873 - DNA, 120 bp, Artificial Sequence
  ENSG00000129250_29 (sequence is synthesized)
agcgggttctgcacagcctgaaccccagcacttccagcccaaaaagcacaactcttatccccagccaccccaaccctacccagcccagcggcccccagggccccgctaccccccatacac

SEQ ID NO: 279874 - DNA, 120 bp, Artificial Sequence
  ENSG00000129250_30 (sequence is synthesized)
tactcccccacgaatgagacggcagcgttctgcccctgacctcaaggagagtggggcagctgtgtgagtcccacatcctgggcagagggcctggtggggccccttgctaggagaagggaa

SEQ ID NO: 279875 - DNA, 120 bp, Artificial Sequence
  ENSG00000129250_31 (sequence is synthesized)
gacgcccgagacgctgcttccccagaagtgctggggcagggaggcccaggagatgagagagaaggtccgagtaggtgatagaagacaagggggagaccgagccggaggctgaggaaagga

SEQ ID NO: 279876 - DNA, 120 bp, Artificial Sequence
  ENSG00000129250_32 (sequence is synthesized)
ggctggggtgctgcgtagccagtgtttgactttcttttcaagtgggggaaagtgggagaggactgagagtgaggcaagttctccccagcccctgtccgtctgtctgtctgtctgtggtgg

SEQ ID NO: 279877 - DNA, 120 bp, Artificial Sequence
  ENSG00000129250_33 (sequence is synthesized)
tttctgtttcttgggaggcatggtaggatcataagtcattcccctccccttccaggcctcctgctatatttgggggacctgactggtttggctggagtcccatgaggatgtgggcccttt

SEQ ID NO: 279878 - DNA, 120 bp, Artificial Sequence
  ENSG00000129250_34 (sequence is synthesized)
aataaaggatagcaaacagggagcttgtggcctgtttgttttgggttttcatggaggtgtaggttatataaggcaatggcacaggtcttaagcatacttatcagtgaagtattgtatgtg

SEQ ID NO: 279879 - DNA, 120 bp, Artificial Sequence
  ENSG00000129250_35 (sequence is synthesized)
tgctctgtgcaggcaccacccagatctggatataagaatgtttccatcttgtcttcctgaacttcaccctcctgtctcttccttcagggtgcgcagcccgatcttttccccgcttttttt

SEQ ID NO: 279880 - DNA, 86 bp, Artificial Sequence
  ENSG00000129250_36 (sequence is synthesized)
gtgcgcagcccgatcttttccccgctttttttttttgggtacagtcttggctcactgcagcctccgcctcctgagtagctgggatt

SEQ ID NO: 279881 - DNA, 74 bp, Artificial Sequence
  ENSG00000129250_37 (sequence is synthesized)
acaggcatgtgccaccacgcccggctcattactgttttttttgtaggacctcaagtgatccgcccaccttggcc

SEQ ID NO: 279882 - DNA, 120 bp, Artificial Sequence
  ENSG00000129250_38 (sequence is synthesized)
ccgcgcccggcctcccctgctttcatgtttgcttacccagtgtctcagtctgtgccagcagcaccactgtctgttatggacaaagcacagaagcggggatgcgaggggaggtagagggac

SEQ ID NO: 279883 - DNA, 120 bp, Artificial Sequence
  ENSG00000129250_39 (sequence is synthesized)
cgccagcctgtcaatgcttaactggctgttgctgacagatacagaaggatttgtggggtacagaggagttctgctttaagtcacctaacttacttgaaaggtctcccaagcagccagttt

SEQ ID NO: 279884 - DNA, 120 bp, Artificial Sequence
  ENSG00000129250_40 (sequence is synthesized)
ctcttgatagtgaatgggttgggcaagcatactgcgcttacctgattgttttcatcctggttgtgttacctgccttctggcaggctacatcattgttcccagtcgttattttatttgtgt

SEQ ID NO: 279885 - DNA, 90 bp, Artificial Sequence
  ENSG00000129250_41 (sequence is synthesized)
caggctacatcattgttcccagtcgttattttatttgtgttaagactgtttgttggccaggcgcagtggttcacgcctgtaatgccagca

SEQ ID NO: 279886 - DNA, 120 bp, Artificial Sequence
  ENSG00000129250_42 (sequence is synthesized)
tgggcgacagagcgagactccatttcaagaaaaattaaaaaactgtttgttgcctgcttgttttaatgttctggcttgaggcagcgagcccttgactatgccacattgccaggattttgc

SEQ ID NO: 279887 - DNA, 120 bp, Artificial Sequence
  ENSG00000129250_43 (sequence is synthesized)
cccttgactatgccacattgccaggattttgcaggttagattgtactacagcactgcctttggcttgccagactctggagtccccacattttcatcctgttctcaggaaaacactttgac

SEQ ID NO: 279888 - DNA, 120 bp, Artificial Sequence
  ENSG00000129250_44 (sequence is synthesized)
ccacttgaagctctgagctactgcttcacagcttcctggggtcagtctccagccaaaaccatagatatcccaactgcagccaaaccacggctctgggcgaaggaacgattaggtttactc

SEQ ID NO: 279889 - DNA, 120 bp, Artificial Sequence
  ENSG00000129250_45 (sequence is synthesized)
taggtttccacaccctgatgctcctgcctttactttgacacctctgactgccaggttttcacagacctgttgacagtgactcaagatctggaatgtaatggatggtttggcaacagtgtt

SEQ ID NO: 279890 - DNA, 120 bp, Artificial Sequence
  ENSG00000129250_46 (sequence is synthesized)
tgcttgagcagtttaaaatctggccagggagactcaatgtgagcaagaaaatgatagaataccaagttttctggaggtcagagggagctgagttgagtgttaccgagaatgctgtggggt

SEQ ID NO: 279891 - DNA, 120 bp, Artificial Sequence
  ENSG00000129250_47 (sequence is synthesized)
ttgagatgagaaaaatagcttgctaatttaaaagacggattatttttccctaaagaccttgacttatgtaaatgtatattatccataattttaaaaatccacttatggctgggcacagaa

SEQ ID NO: 279892 - DNA, 70 bp, Artificial Sequence
  ENSG00000129250_48 (sequence is synthesized)
ggaggatcaatctacaaaacatagaaaaactagttgggtgtggtggtgtgtacctgtagttccagctact

SEQ ID NO: 279893 - DNA, 120 bp, Artificial Sequence
  ENSG00000129250_49 (sequence is synthesized)
tagttgggtgtggtggtgtgtacctgtagttccagctactagggaggtaggaagatcacctgagcccatggagattgaggctgtggtgagctgtgaaggcaccacagcactctggcctgg

SEQ ID NO: 279894 - DNA, 120 bp, Artificial Sequence
  ENSG00000129250_50 (sequence is synthesized)
ctctctcaaaaaaaaaaaaaaaaaaaaatccacatatccagccttccaagtcagtctttaataatgtgcacgggccaggcacagtggctcacacccgtaatcccaacactttggaatatt

SEQ ID NO: 279895 - DNA, 86 bp, Artificial Sequence
  ENSG00000129250_51 (sequence is synthesized)
ccccccccatctctacaaaaaataaaaatcaaaaataatactgtgggcaaactttacttagattttattcagagtagtgcctgttt

SEQ ID NO: 279896 - DNA, 120 bp, Artificial Sequence
  ENSG00000129250_52 (sequence is synthesized)
gcaaactttacttagattttattcagagtagtgcctgtttatttttcatctgtgctacctgtgccggcattccatatgcatttgatttagtctttaaagtaccccggtaaaataggtctt

SEQ ID NO: 279897 - DNA, 83 bp, Artificial Sequence
  ENSG00000129250_53 (sequence is synthesized)
tttgatttagtctttaaagtaccccggtaaaataggtcttttgtctgcatttttcagatgggaagactgaggttttgtttatt

SEQ ID NO: 279898 - DNA, 120 bp, Artificial Sequence
  ENSG00000129250_54 (sequence is synthesized)
tttttagaatcaagatcttgctatgttgcccaggctgaactcgaactcctgggctcaagcaatcctgcctcccaagccaagcagctggtactgcaagcatgtgccaccgtgcctggctcc

SEQ ID NO: 279899 - DNA, 120 bp, Artificial Sequence
  ENSG00000129250_55 (sequence is synthesized)
tgaagactgaggttggtttagattaatgagttgcccaaattcagacagttcttaagtggcaaagttaggattccaacccaggtcaacataactaaagcccaaaccccatctcacccctct

SEQ ID NO: 279900 - DNA, 80 bp, Artificial Sequence
  ENSG00000129250_56 (sequence is synthesized)
ggtcaacataactaaagcccaaaccccatctcacccctctaggccatcaagtattggctgggtgcggtggtaggactgtt

SEQ ID NO: 279901 - DNA, 70 bp, Artificial Sequence
  ENSG00000129250_57 (sequence is synthesized)
ctacaaaaatatataaattagccgggtgtactggctcacacctgtagctacttgggaggctgaggtggga

SEQ ID NO: 279902 - DNA, 120 bp, Artificial Sequence
  ENSG00000129250_58 (sequence is synthesized)
tgattgcaccaccaggagaccctgtcttaaaaatgtatatataaaaataaaaagaacatcagacatcaccatcacctcgcttagaatccatggggccttctcctcaaattcaatcttccc

SEQ ID NO: 279903 - DNA, 120 bp, Artificial Sequence
  ENSG00000129250_59 (sequence is synthesized)
aggcatttcatgaacttgcgtctagtttctgttccctctcaaattgcccaggctgtcctgtgagtgacagcagctatttcgtgggcctcctctggaatcatgagaagtcacccaaacaat

SEQ ID NO: 279904 - DNA, 120 bp, Artificial Sequence
  ENSG00000129250_60 (sequence is synthesized)
ctcagttttctagctcactccgtcttgacatttctacactgtcatccttggttttcttggaaattaatttgcttttcttcattgtctttctttggagctgctttccttttgttggttact

SEQ ID NO: 279905 - DNA, 120 bp, Artificial Sequence
  ENSG00000129250_61 (sequence is synthesized)
attttatttttagcttctcacaccataccgacatatgttggttattcttttagacatgttttttgttgttgttgtcacctggaacttttgtatcttgaataaatttggggatcaaataca

SEQ ID NO: 279906 - DNA, 120 bp, Artificial Sequence
  ENSG00000129250_62 (sequence is synthesized)
agagaagcattgctggctgagatgggggtggccgtccgggaggatgggggaactgtgggcgtcttctctccaaagaagggatagattgctttctgcttccggagcccatcagcgtttgcc

SEQ ID NO: 279907 - DNA, 120 bp, Artificial Sequence
  ENSG00000129250_63 (sequence is synthesized)
agtcccagagcaggcctgacactgcagtgtagggaggggcatgggagtccctcaggagaagtgtcgcaggagtgatccttggagcacttgggtgaagggcggatgcacaagatacacaga

SEQ ID NO: 279908 - DNA, 120 bp, Artificial Sequence
  ENSG00000129250_64 (sequence is synthesized)
cttctgtccaggctgctttcacccggagcgctcttgtgcatgtccacgccctccttgtcctcaaaggctggctcccatgttacccttccattaagtcctcctgatccccttgaaatccca

SEQ ID NO: 279909 - DNA, 120 bp, Artificial Sequence
  ENSG00000129250_65 (sequence is synthesized)
tagttcttcactttgttcctctttgcatgtgagtccctcccagaacacagtggcactcaaccccctgggaacaaatgaatgaataaacgaacttaaacaagggcatgagacaatcagaaa

SEQ ID NO: 279910 - DNA, 120 bp, Artificial Sequence
  ENSG00000129255_0 (sequence is synthesized)
agctttgcaatatggcggccgaggcggacggaccgcttaaacggctgctcgtgccgattcttttacctgagaaatgctacgaccaacttttcgttcagtgggacttgcttcacgtcccct

SEQ ID NO: 279911 - DNA, 120 bp, Artificial Sequence
  ENSG00000129255_1 (sequence is synthesized)
gcctcaagattctcctcagcaaaggcctggggctgggcattgtggctggctcacttctagtaaagctgccccaggtgtttaaaatcctgggagccaagagtgctgaagggttgagtctcc

SEQ ID NO: 279912 - DNA, 120 bp, Artificial Sequence
  ENSG00000129255_2 (sequence is synthesized)
agtctgtaatgctggagctagtggcattgactgggaccatggtctacagcatcactaacaacttcccattcagctcttggggtgaagccttattcctgatgctccagacgatcaccatct

SEQ ID NO: 279913 - DNA, 120 bp, Artificial Sequence
  ENSG00000129255_3 (sequence is synthesized)
gcttcctggtcatgcactacagaggacagactgtgaaaggtgtcgctttcctcgcttgctacggcctggtcctgctggtgcttctctcacctctgacgcccttgactgtagtcaccctgc

SEQ ID NO: 279914 - DNA, 120 bp, Artificial Sequence
  ENSG00000129255_4 (sequence is synthesized)
tccaggcctccaatgtgcctgctgtggtggtggggaggcttctccaggcagccaccaactaccacaacgggcacacaggccagctctcagccatcacagtcttcctgctgtttgggggct

SEQ ID NO: 279915 - DNA, 120 bp, Artificial Sequence
  ENSG00000129255_5 (sequence is synthesized)
cccagctgctcttctactggaatgcaaagcctccccacaagcagaaaaaggcgcagtagagccagctactggagtcattccgtttccactcattcacccaacctcagggttctccccatc

SEQ ID NO: 279916 - DNA, 120 bp, Artificial Sequence
  ENSG00000129255_6 (sequence is synthesized)
tgagccagcctgctggtgtgacttactcatcctccattcctctgcacttgcagactttctgagccagggttttcttttagtggaaacaaatggttgatggatccagatccttagaaaagg

SEQ ID NO: 279917 - DNA, 120 bp, Artificial Sequence
  ENSG00000129255_7 (sequence is synthesized)
agaggatgggggtagagtctcccaagccaaaattttgacatttgagtgctttcgtaagccctgtacatgtactattaattcagtcattcagccaagcctcctcctctagcagcaatttcc

SEQ ID NO: 279918 - DNA, 120 bp, Artificial Sequence
  ENSG00000129255_8 (sequence is synthesized)
agctgtgtaacactatcctgggcaaatgttttaccctgtcctccagcctccctgcttcccttctggccctggaagactgagtctggacggcagagtggagggactgggaggctgtggctg

SEQ ID NO: 279919 - DNA, 120 bp, Artificial Sequence
  ENSG00000129255_9 (sequence is synthesized)
cctccctccctcagcccggctgggactgtctcccggaccccagtgctggggtgggggaagggggacggagaatgactcaggcagggccccagggtggggtgaggaggttcctgctctggc

SEQ ID NO: 279920 - DNA, 120 bp, Artificial Sequence
  ENSG00000129255_10 (sequence is synthesized)
aggtctaggcggaagggagtggagatggggctggttcctgctgcagtgaggggaacagatgggacaataaagactggagactcagttgaataatacaaaactgtttaatactaccaaaaa

SEQ ID NO: 279921 - DNA, 120 bp, Artificial Sequence
  ENSG00000129255_11 (sequence is synthesized)
gaaagttttaagcccttttagaaacctaatcatcaccagtggaggtgatcttgagaaggggtgagcatcccgagaatggccacgattcagaatgagccagtcccgtgtgggggctgtaga

SEQ ID NO: 279922 - DNA, 120 bp, Artificial Sequence
  ENSG00000129255_12 (sequence is synthesized)
gaagcgtgatcagagcatagtgtccctggatggatgggctatggaggctttccctgcctctttctaggcccgcctttcttcctcccaactcttgactctgcagctcttggggtgaagcct

SEQ ID NO: 279923 - DNA, 120 bp, Artificial Sequence
  ENSG00000129255_13 (sequence is synthesized)
ggggaagagtagaagatcaaagtgtgggggtgttgtacttgggggagcatgggaagagctcaggtgacagagccaaaggtctcaactcctcccctagcttctccaggcagccaccaacta

SEQ ID NO: 279924 - DNA, 120 bp, Artificial Sequence
  ENSG00000129255_14 (sequence is synthesized)
agacaagatggcgcccagcaggaggagcggagaaaggcaggggtgtaaatctggcttccaaactggaagcgtcaacaaaggcgtgggaggtctaaccgcgcaggcgtgcagcttcggcaa

SEQ ID NO: 279925 - DNA, 120 bp, Artificial Sequence
  ENSG00000129255_15 (sequence is synthesized)
gctttacaattccaacagcgcgtccaaaacgtggtccctgactgagacttattttacgccactagagtgagggtgggtagcgtcagaaagagcggggcacggggcgggccagcttcgccg

SEQ ID NO: 279926 - DNA, 120 bp, Artificial Sequence
  ENSG00000129255_16 (sequence is synthesized)
cttagtccaagccttgatcggcgactaagtgacggcagtgactgccgccatgccgagctggacggaagtcacttctgagaagggcggaagtgtctcgggctccttagagggaggacacca

SEQ ID NO: 279927 - DNA, 120 bp, Artificial Sequence
  ENSG00000129255_17 (sequence is synthesized)
tattagtgccagtggggaagtcaccgggtggaattacttctttgtggagtttgtgctgtagcgacaatgaaaaacgaagagtcaacttttataaaacaaaataaaaattaagtcaaatca

SEQ ID NO: 279928 - DNA, 120 bp, Artificial Sequence
  ENSG00000129255_18 (sequence is synthesized)
aatatggcggccgaggcggacggaccgcttaaacggctgctcgtgccgattcttttacctgagaaatgctacgaccaacttttcgttcagtgggacttgcttcacgacatctcctgtctg

SEQ ID NO: 279929 - DNA, 120 bp, Artificial Sequence
  ENSG00000129255_19 (sequence is synthesized)
cacccttccaccccaagggtaatacccacaactctaatggggattaaggtgaaggaggttacaaggcagcaaagtggccgggcccagtggcttgcacctgtaaccccagcactttgggag

SEQ ID NO: 279930 - DNA, 120 bp, Artificial Sequence
  ENSG00000129255_20 (sequence is synthesized)
gcttcctggtcatgcactacagaggacagactgtgaaaggtgctggggacttacccaagagcaggctgtgtggttcctgggaaccctgctgggaactcaggtctgggaaagccaaatgat

SEQ ID NO: 279931 - DNA, 120 bp, Artificial Sequence
  ENSG00000129255_21 (sequence is synthesized)
tcacttccattcaggggtgagcatcccattctctcagctctgaggaaggattctggtgtccagagttggctgacctggctggcggtctccactgatagagccatcagtccgattaccacg

SEQ ID NO: 279932 - DNA, 120 bp, Artificial Sequence
  ENSG00000129255_22 (sequence is synthesized)
gttacggcggcggcggctgcgattacgacgttgaggtcttgattcatcttctgtagggtaggaaaaaaccagagtcacacatccaacctcccaccctcgattcctacccatctctaactt

SEQ ID NO: 279933 - DNA, 120 bp, Artificial Sequence
  ENSG00000129255_23 (sequence is synthesized)
tccagaccccaggcacaccctcacccaggccattctctgtcatgttgggcccatctgattccaggcctccatccatgacggtcctgtcttcatcagtgcggcggcggcgggagcggcggc

SEQ ID NO: 279934 - DNA, 120 bp, Artificial Sequence
  ENSG00000129255_24 (sequence is synthesized)
tacagaggacagactgtgaaagcttctccaggcagccaccaactaccacaacgggcacacaggccagctctcagccatcacagtcttcctgctgtttgggggctccctggcccgaatctt

SEQ ID NO: 279935 - DNA, 120 bp, Artificial Sequence
  ENSG00000129292_0 (sequence is synthesized)
cgtcagggctggccggcggcggaggcggcggcggcggcggcgatggcagcggaccctgagcgagcttgagggctcggacccagctccctcccgcgaaaccttgggcggatccggcgctgc

SEQ ID NO: 279936 - DNA, 120 bp, Artificial Sequence
  ENSG00000129292_1 (sequence is synthesized)
tccccggccgctgcctgggcggaggcagaggcagaggcccgggctggccgccctgctcgtgccccagctcggccccggacggcccggctgctgtgcagagaggaggccgagtcggtagtg

SEQ ID NO: 279937 - DNA, 120 bp, Artificial Sequence
  ENSG00000129292_2 (sequence is synthesized)
gtgcagagaggaggccgagtcggtagtgaaaagagaatactgaagaataggatctcaagatgagtaaaaagcccccaaatcgccctggaatcacttttgagattggtgctcgtttggagg

SEQ ID NO: 279938 - DNA, 120 bp, Artificial Sequence
  ENSG00000129292_3 (sequence is synthesized)
cactggactacttacaaaaatggtatccatcacgaattgaaaaaattgactatgaggagggcaagatgttggtccattttgagcgctggagtcatcgttatgatgagtggatttactggg

SEQ ID NO: 279939 - DNA, 120 bp, Artificial Sequence
  ENSG00000129292_4 (sequence is synthesized)
atagcaatagattgcgaccccttgagagaccagcactaagaaaagaagggctaaaagatgaggaagatttctttgattttaaagctggagaagaagttctggctcgttggacagactgtc

SEQ ID NO: 279940 - DNA, 120 bp, Artificial Sequence
  ENSG00000129292_5 (sequence is synthesized)
gctattaccctgccaagattgaagcaattaacaaagaaggaacatttacagttcagttttatgatggagtaattcgttgtttaaaaagaatgcacattaaagccatgcccgaggatgcta

SEQ ID NO: 279941 - DNA, 120 bp, Artificial Sequence
  ENSG00000129292_6 (sequence is synthesized)
aggggcaggtgaaatcccagcatccactaagctggtgttgtcctatcgacccagctggatcgtgtaaccagtctatgggaagtgaggattggatagctttagtcaaagcagctgctgcag

SEQ ID NO: 279942 - DNA, 120 bp, Artificial Sequence
  ENSG00000129292_7 (sequence is synthesized)
ctgcagccaagaacaaaacagggagtaaacctcgaaccagcgctaacagcaataaagataaggataaagatgagagaaagtggtttaaagtaccttcaaagaaggaggaaacttcaactt

SEQ ID NO: 279943 - DNA, 120 bp, Artificial Sequence
  ENSG00000129292_8 (sequence is synthesized)
gtatagccacaccagacgtagagaagaaggaagatctgcctacatctagtgaaacatttggacttcatgtagagaacgttccaaagatggtctttccacagccagagagcacattatcaa

SEQ ID NO: 279944 - DNA, 120 bp, Artificial Sequence
  ENSG00000129292_9 (sequence is synthesized)
acaagaggaaaaataatcaaggcaactcgtttcaggcaaagagagctcgacttaacaagattactggtttgttggcatccaaagctgttggggttgatggtgctgaaaaaaaggaagact

SEQ ID NO: 279945 - DNA, 120 bp, Artificial Sequence
  ENSG00000129292_10 (sequence is synthesized)
acaatgaaacagctccaatgctggagcaggcgatttcacctaaacctcaaagtcagaaaaaaaatgaagctgacattagcagttctgccaacactcagaaacctgcactgttatcctcaa

SEQ ID NO: 279946 - DNA, 120 bp, Artificial Sequence
  ENSG00000129292_11 (sequence is synthesized)
ctttgtcttcagggaaggctcgcagcaagaaatgcaaacatgaatctggagattcttctgggtgtataaaaccccctaaatcaccactttccccagaattaatacaagtcgaggatttga

SEQ ID NO: 279947 - DNA, 120 bp, Artificial Sequence
  ENSG00000129292_12 (sequence is synthesized)
cgcttgtatctcagctttcttcttcagtgataaataaaactagtcctccacagcctgtgaatccccctagacctttcaagcatagtgagcggagaagaagatctcagcgtttagccacct

SEQ ID NO: 279948 - DNA, 120 bp, Artificial Sequence
  ENSG00000129292_13 (sequence is synthesized)
tacccatgcctgatgattctgtagaaaaggtttcttctccctctccagccactgatgggaaagtattctccatcagttctcaaaatcagcaagaatcttcagtaccagaggtgcctgatg

SEQ ID NO: 279949 - DNA, 120 bp, Artificial Sequence
  ENSG00000129292_14 (sequence is synthesized)
ttgcacatttgccacttgagaagctgggaccctgtctccctcttgacttaagtcgtggttcagaagttacagcaccggtagcctcagattcctcttaccgtaatgaatgtcccagggcag

SEQ ID NO: 279950 - DNA, 120 bp, Artificial Sequence
  ENSG00000129292_15 (sequence is synthesized)
aaaaagaggatacacagatgcttccaaatccttcttccaaagcaatagctgatggaagaggagctccagcagcagcaggaatatcgaaaacagaaaaaaaagtgaaattggaagacaaaa

SEQ ID NO: 279951 - DNA, 120 bp, Artificial Sequence
  ENSG00000129292_16 (sequence is synthesized)
gctcaacagcatttggtaagagaaaagaaaaagataaggaaagaagagagaagagagacaaagatcactacagaccaaaacagaagaagaagaaaaaaaagaaaaagaaatctaagcaac

SEQ ID NO: 279952 - DNA, 120 bp, Artificial Sequence
  ENSG00000129292_17 (sequence is synthesized)
atgactattcagactatgaagacagttccctcgaatttttggaaaggtgctcttctccactaactcgatcttctgggagttctctggcttcacgaagcatgtttacggagaaaactacaa

SEQ ID NO: 279953 - DNA, 120 bp, Artificial Sequence
  ENSG00000129292_18 (sequence is synthesized)
cctatcagtacccaagggcaattctatccgttgatcttagtggtgaaaacttatcagatgtagacttcctagatgattcttcaacggagagtttgcttctgagtggggatgaatacaatc

SEQ ID NO: 279954 - DNA, 120 bp, Artificial Sequence
  ENSG00000129292_19 (sequence is synthesized)
aggactttgattcaaccaattttgaggaatctcaggatgaggatgatgctcttaatgaaattgtgcgatgtatttgtgagatggatgaggagaatggcttcatgatccagtgtgaagagt

SEQ ID NO: 279955 - DNA, 120 bp, Artificial Sequence
  ENSG00000129292_20 (sequence is synthesized)
gcttgtgttggcaacacagcgtgtgcatggggctgctggaggagagcattccagagcagtacatctgctatatctgccgggacccaccaggtcagaggtggagtgcaaaatatcgttatg

SEQ ID NO: 279956 - DNA, 120 bp, Artificial Sequence
  ENSG00000129292_21 (sequence is synthesized)
ataaggagtggttgaataatgggagaatgtgcgggttatcatttttcaaagaaaattattctcatctcaatgccaaaaagatagtttctacacatcacctgcttgctgatgtctatggtg

SEQ ID NO: 279957 - DNA, 120 bp, Artificial Sequence
  ENSG00000129292_22 (sequence is synthesized)
ttacagaagtgctacacgggctacagctgaagattggaatactaaagaataaacatcatcctgaccttcatctctgggcttgttccgggaagcgaaaagaccaagatcaaataatagctg

SEQ ID NO: 279958 - DNA, 120 bp, Artificial Sequence
  ENSG00000129292_23 (sequence is synthesized)
gggtggagaaaaaaatagctcaagacacagttaatcgagaagaaaagaaatatgtacagaaccataaagaaccacctcgtttgcccctaaaaatggaaggaacttatataacaagtgagc

SEQ ID NO: 279959 - DNA, 120 bp, Artificial Sequence
  ENSG00000129292_24 (sequence is synthesized)
atagctatcaaaagccacaaagttttggtcaggactgtaaatctctcgcagaccctgggagctcagatgatgatgatgttagtagtttggaagaagaacaagaattccacatgagaagta

SEQ ID NO: 279960 - DNA, 120 bp, Artificial Sequence
  ENSG00000129292_25 (sequence is synthesized)
atcttcagtggcagctcaatctccttacacacatagaaaatgtgcagaacgaagttaccagcaggatggacctaatagaaaaagaagtcgatgttctggaaagctggcttgatttcacag

SEQ ID NO: 279961 - DNA, 120 bp, Artificial Sequence
  ENSG00000129292_26 (sequence is synthesized)
gggagttggagccaccagatcctcttgcaagattgccccaacttaaacgccacataaaacagctcctaattgacatgggcaaagtacagcagatagcaactctttgctctgtatgacaac

SEQ ID NO: 279962 - DNA, 120 bp, Artificial Sequence
  ENSG00000129292_27 (sequence is synthesized)
agtgaacacttaatgaaagaatgtggctttcttcagtcaaagcatttttattatccacgtgatggctaagtggataatttaaaagcttagtaatgtctggtcattcactgatttgtgatg

SEQ ID NO: 279963 - DNA, 120 bp, Artificial Sequence
  ENSG00000129292_28 (sequence is synthesized)
tcaataggatggcaccttggaaagaaaaatgaagaacaactttatcaaggaagctagtatttaaaaacaaattcatgagcaagctgcaaatgagaatgtgttatatgccaaggaacaatg

SEQ ID NO: 279964 - DNA, 120 bp, Artificial Sequence
  ENSG00000129292_29 (sequence is synthesized)
aagtagaatataatgtatactaagggatttcaagttctcagaatttttgagtagttgcttacgtgaagctcaagatacctgtagaaagaaatatggtatatttgtatagtttttaataga

SEQ ID NO: 279965 - DNA, 120 bp, Artificial Sequence
  ENSG00000129292_30 (sequence is synthesized)
aagatctatgtttataaaccagcacttggccaaaaacaaaattgtaaaggaaatttaaattctggagaattctacagggttgctctaagaactgtcttctcagcagttgatccagctgta

SEQ ID NO: 279966 - DNA, 120 bp, Artificial Sequence
  ENSG00000129292_31 (sequence is synthesized)
cggaaatttagggtatttaaacttttaaaggatcatgagctgtttcttgggcgatgaatgttctcaatcagaaaactgacagtagaaatctcacttctggggaaaacagttgtggaattc

SEQ ID NO: 279967 - DNA, 120 bp, Artificial Sequence
  ENSG00000129292_32 (sequence is synthesized)
ttacttcattatgaatgtatttaaaaaacaaacaccaaataattggaatatattgcaggcattaagctcattaaaaacaaactggcttgcagaagggtccgatgtgccaagtgatcatga

SEQ ID NO: 279968 - DNA, 120 bp, Artificial Sequence
  ENSG00000129292_33 (sequence is synthesized)
ttctgctggaaagaggattttaaatattgtgggagttctcccaccctaagtcttacataatgccaccagtccatccaaaacctatatatcacctatactatatatatcatatatatagtt

SEQ ID NO: 279969 - DNA, 120 bp, Artificial Sequence
  ENSG00000129292_34 (sequence is synthesized)
gaatggcagtattcaggctcaacgtacagtttgatcctgagtatgcttggtgtttgccttcagaaaaaaaaaaatacattgtaaataacctcagctgggatgaggagtgacagaatatca

SEQ ID NO: 279970 - DNA, 120 bp, Artificial Sequence
  ENSG00000129292_35 (sequence is synthesized)
aaataatttgtggctgtggatttttttaactgctagtagtggaatactggaaaagcttcatttctgaagatgaattttatttttaaaaaatacatgcacactcaaaacttttagctttga

SEQ ID NO: 279971 - DNA, 120 bp, Artificial Sequence
  ENSG00000129292_36 (sequence is synthesized)
tcacaagtggacaaatttctgaaaccaaaggcaactaagttgctgtgttagctcttgctggattttgagcctaggtcctactgtctgccagtactcatgtgagttgtatgtgcccccagt

SEQ ID NO: 279972 - DNA, 120 bp, Artificial Sequence
  ENSG00000129292_37 (sequence is synthesized)
gctacatacgcaggtatgcgtaagtgtgtatgcttgttttaaacaaacactcaacgtacatatgtacataatctacacatatttatatcacatatctagttttattactatagactatac

SEQ ID NO: 279973 - DNA, 120 bp, Artificial Sequence
  ENSG00000129292_38 (sequence is synthesized)
gaattggtggttaacatgaaatgttaccttttaacagactgtttttaaaaattaaaaatgtatgtataggttttgaaatttttttaaaaggggagaaagactgttaagaggaggctattt

SEQ ID NO: 279974 - DNA, 120 bp, Artificial Sequence
  ENSG00000129292_39 (sequence is synthesized)
gatgacataacacttgaatattttatgcctcattctgtttatcagttctcgcaatctgtataaatgcattttagaactgatagacagtaaacttgaatttatctttgataagaatacatg

SEQ ID NO: 279975 - DNA, 120 bp, Artificial Sequence
  ENSG00000129292_40 (sequence is synthesized)
ccactgtacattcagatattatttaaatttgcaaacacattgttctatatgtaagggtactgtatgtaaaactctgtattaaaactattccacatatcctaaaatttcagcttgcctttt

SEQ ID NO: 279976 - DNA, 120 bp, Artificial Sequence
  ENSG00000129292_41 (sequence is synthesized)
tgcggccttatattttgatgtaaagattaaaagaatgtgcaaaacagtcagaaatttttattgccttttgagattctccaacttgacaaatgtgccaaagatcaacagacagaaaatatc

SEQ ID NO: 279977 - DNA, 120 bp, Artificial Sequence
  ENSG00000129292_42 (sequence is synthesized)
atcctgtgtatttacttgtcatactttaactttgtgaaagatcttactgataaatgaaaagctttagcagaggtggtattgtggggtaattgcttaaatttacatatcaaagtaaaaaag

SEQ ID NO: 279978 - DNA, 120 bp, Artificial Sequence
  ENSG00000129292_43 (sequence is synthesized)
tagtgcctgtattccatgtgtggagtaaatttgctaatgtctatattttatgattgatactattatttttcctttgcattttaaaatagtggctctaatattttccctgtcatggctaca

SEQ ID NO: 279979 - DNA, 120 bp, Artificial Sequence
  ENSG00000129292_44 (sequence is synthesized)
ttctagacattgaatttatatcttctttttttcagatacggagcaaatagcatccttaacctatgaataatggtgttgcctagattcttgtcacacacacagaagaccctttgtacctag

SEQ ID NO: 279980 - DNA, 120 bp, Artificial Sequence
  ENSG00000129292_45 (sequence is synthesized)
taacattcatcctcttgattcctggtgaacacggttaaattcatgcacatttgttcttgtagtttctaaaaattagatcaatttatttgttagccagcaaattgaaaattccattattag

SEQ ID NO: 279981 - DNA, 120 bp, Artificial Sequence
  ENSG00000129292_46 (sequence is synthesized)
atgaaatttttgctctgcttatatgtatacgaactggaaatctgaatttttaaatttagatctttaaatcaaattatttttatgcatattttcatttaatatagagtataccaatcgatt

SEQ ID NO: 279982 - DNA, 120 bp, Artificial Sequence
  ENSG00000129292_47 (sequence is synthesized)
gattgaagcctttcacaagtagtgcgctgagcttttcttattgaagagagtgaattagtttctgagaagtcagtctattgtgaaaagtttcagatgagattattttcttttagtcttttt

SEQ ID NO: 279983 - DNA, 120 bp, Artificial Sequence
  ENSG00000129292_48 (sequence is synthesized)
aaatatcactatatgtatttaaatagaagcaataaactagagagagtgtttcttgaaaagacaatgttttatttgccaccaggcagaacagaatgagcattggtagagaaggctccctct

SEQ ID NO: 279984 - DNA, 120 bp, Artificial Sequence
  ENSG00000129292_49 (sequence is synthesized)
tggtatgttactgataaacttgtacttcctcatacttgtttgtggttctactgacttatttccaaacttaagagtaatgtacttcgaaaacaacttggttattctttaaatttcaggtaa

SEQ ID NO: 279985 - DNA, 120 bp, Artificial Sequence
  ENSG00000129292_50 (sequence is synthesized)
aaccccttttcctaacactcatcttatttccactgtcttatttcctctcagatgttcatatttcacatgttcaaaatgaagcgtactatttcccctccaataaacgaagtctcctgccaa

SEQ ID NO: 279986 - DNA, 120 bp, Artificial Sequence
  ENSG00000129292_51 (sequence is synthesized)
agagaagaaggaagatctgcctacatctagtgaaacatttgataaactctcatatatgtgttctgttgaaagtaggacttcatgtagagaacgttccaaagatggtctttccacagccag

SEQ ID NO: 279987 - DNA, 120 bp, Artificial Sequence
  ENSG00000129292_52 (sequence is synthesized)
ctccagcagcagcaggtaaaagaaaaaaaataaaggctcctataagtagataagtagctaggcttgcagttattaggtataaacattttgaggtttaactacattattttgattcctata

SEQ ID NO: 279988 - DNA, 120 bp, Artificial Sequence
  ENSG00000129292_53 (sequence is synthesized)
taattccttttcataaatactttaacatttataggagagtttcatctccgttttaaaggtcttttgtgtgatcattttacaatcatattccctggacatacatgctgcttaaccttgtca

SEQ ID NO: 279989 - DNA, 120 bp, Artificial Sequence
  ENSG00000129292_54 (sequence is synthesized)
cttgatctatttccttctccctgcttcttttttatatatccttatttctactaaatataaattattagagccaagtatagttacaggaattcttacttttgaagctgggaaatacttaat

SEQ ID NO: 279990 - DNA, 120 bp, Artificial Sequence
  ENSG00000129292_55 (sequence is synthesized)
gggatcagtactttggtttaaggattttgatagaatttaatatttaagaaacactgagctatatgcctgtatcttaaatataattccatattttggggcagaatcctccaaattgaatta

SEQ ID NO: 279991 - DNA, 120 bp, Artificial Sequence
  ENSG00000129292_56 (sequence is synthesized)
aatttgctgtaaagttatttgaggagtgcaatatgtaaaatcagccatccttaataacacattttttgcatgattttgtgatatttattgtagttcgaaagcatttggatgtgtatttta

SEQ ID NO: 279992 - DNA, 120 bp, Artificial Sequence
  ENSG00000129292_57 (sequence is synthesized)
ccaagctgatattttaaatctaataatatctattcatgtttcccttatgtgggtgcattgttttatttagaagtttttaagaattataacctgatctagaatacacataaaataaaaagg

SEQ ID NO: 279993 - DNA, 120 bp, Artificial Sequence
  ENSG00000129292_58 (sequence is synthesized)
ccaatactagttacaaatgcacttctggtaaattactgttggaactagatgtttgaaggaagtctgaatttagtttgttgtgagttggagaaaaacataaggcagtttgttgattcgtta

SEQ ID NO: 279994 - DNA, 120 bp, Artificial Sequence
  ENSG00000129292_59 (sequence is synthesized)
ccaagggtgttggtgatcattgtgtttacaggcgtcttccctgaaaccattttatccattttttggatgaagcataaaatgaaacttattcttttctggtgatggcatgtattgaaataa

SEQ ID NO: 279995 - DNA, 120 bp, Artificial Sequence
  ENSG00000129292_60 (sequence is synthesized)
tggtgatggcatgtattgaaataaaatgattgaagtaacataagagacatatacttatttttattaatttttatctttatataaaggttgaagttactttgtacatgataattctttatc

SEQ ID NO: 279996 - DNA, 120 bp, Artificial Sequence
  ENSG00000129292_61 (sequence is synthesized)
ccaaatgtgaatatttgtagattttgaaacatttcctgtagtttctcaaatcagatctattgtcttttgactcttggtctttccttaagataattaatttttcttttccacttttccaca

SEQ ID NO: 279997 - DNA, 120 bp, Artificial Sequence
  ENSG00000129292_62 (sequence is synthesized)
agatttccaaattgtcattgacccattgagatacttttttgataaaggtcttattcggttctttaacgatctggaatttgttaccgtactgaatatatgaaaaatatgttaaagttataa

SEQ ID NO: 279998 - DNA, 120 bp, Artificial Sequence
  ENSG00000129292_63 (sequence is synthesized)
atggataatgaagcgctgacagtttgagttaataaatcatcttgtctttcaaaagtttttggttttgtgaatgtggaccactttgaaaatctgattaaacttgggaattctcacctcaaa

SEQ ID NO: 279999 - DNA, 120 bp, Artificial Sequence
  ENSG00000129292_64 (sequence is synthesized)
ttttgaaaggtttatatctcccgaatgccctttcacttcagctctgatgattggattcctgttttacttactgcagaattaactgtacaatatcatgcttacatgttcagtgaggatgaa

SEQ ID NO: 280000 - DNA, 120 bp, Artificial Sequence
  ENSG00000129292_65 (sequence is synthesized)
gtaaatgggcattatcaaagattgttgatggggttgtaattagtataatcccttttgaggtcacttgggtagtacctatcaaaataaatgtgcatgttatccagcaatcccatatctaga

SEQ ID NO: 280001 - DNA, 120 bp, Artificial Sequence
  ENSG00000129292_66 (sequence is synthesized)
aatttatctgactgaaatattctgacttgtgtgcaaagacacacacaggtacacaaacatataatggtagggaattggttggctcgactggtacatttgtaactcttcagccctagagta

SEQ ID NO: 280002 - DNA, 120 bp, Artificial Sequence
  ENSG00000129292_67 (sequence is synthesized)
aaagtaagggaaatctatctgtatgacatgatatggcaagatgcccctagcatgttacgtacaaaaaggcagattgtatgtgtcctggatgtgtcacaagaagatgtgtatacttatcca

SEQ ID NO: 280003 - DNA, 120 bp, Artificial Sequence
  ENSG00000129292_68 (sequence is synthesized)
tttaagaactaattttaggtatacagaaaaagtctggaagattatacctcagttatttatgtttgccatgggagaggaaatttttactttctgtgcatttatatttaggatttttgtcat

SEQ ID NO: 280004 - DNA, 120 bp, Artificial Sequence
  ENSG00000129292_69 (sequence is synthesized)
caggagttatcactttttgactgaataaaagtttttaaaatatgctcacattaaagtttttcaaattttacaatgaaaatgacaatgacaaatcagtagaaaaagaaatgcatgtatcaa

SEQ ID NO: 280005 - DNA, 120 bp, Artificial Sequence
  ENSG00000129292_70 (sequence is synthesized)
atgatgatgtgaactatcaacacaattaaatttgttattgcttttctgagtattatttctttaattgagaagattcaaattttggatgaaatcatggagggagttaatttaaagattacc

SEQ ID NO: 280006 - DNA, 120 bp, Artificial Sequence
  ENSG00000129292_71 (sequence is synthesized)
tttgcttttgtcttgagtcctagatgtcctcctaacctaattctgaaatagatcattgtattcagcttgttaatagatttttttttttttctgaactgctgtttttccaactttgtttta

SEQ ID NO: 280007 - DNA, 120 bp, Artificial Sequence
  ENSG00000129292_72 (sequence is synthesized)
aggacttccagagtcatgacatgaacagtttaattgaacccatccactctgggcaggtgactggaatagctgattaaaacataaatgctgcttttaggttaaccacaaaggaacaactca

SEQ ID NO: 280008 - DNA, 120 bp, Artificial Sequence
  ENSG00000129292_73 (sequence is synthesized)
ggatcagtcgtgattgctaaagtattcacttttatcttttaggtaagagaaaagaaaaagataaggaaagaagagagaagagagacaaagatcactacagaccaaaacagaagaagaaga

SEQ ID NO: 280009 - DNA, 120 bp, Artificial Sequence
  ENSG00000129292_74 (sequence is synthesized)
tcagagggaagaatataaatcattttttcccatttatctccttaaatattgtaagatgctcctggtatgtatctgcttcgtgaacattgaagatctttttctaggtcctccacagcctgt

SEQ ID NO: 280010 - DNA, 120 bp, Artificial Sequence
  ENSG00000129292_75 (sequence is synthesized)
atgctggagcaggtatgaaatggtagcatttgatttttttcaaggttcccactggaatgatcacggagctctagtatctacgtaattgaaattccccttttgatcagatatgggaatagg

SEQ ID NO: 280011 - DNA, 120 bp, Artificial Sequence
  ENSG00000129292_76 (sequence is synthesized)
aagctaattaattgatgatatatttttaactctgccttctccaaggtatacagataactacagacttcattagtgtttgatttcatagactggcattaaagcctttgtctccaaaatttg

SEQ ID NO: 280012 - DNA, 120 bp, Artificial Sequence
  ENSG00000129292_77 (sequence is synthesized)
aaggcctggagacaggcatcccagggtataagcttccagctggatcacctttaactagcttacaaaaagacccttacacaaatactttccatttgtgagttaaaacagggttttttgaca

SEQ ID NO: 280013 - DNA, 120 bp, Artificial Sequence
  ENSG00000129292_78 (sequence is synthesized)
tcgaataaagcttcttttgtaagaagtttcttttatattgtaacaattggtgttgttagactgactatgtgttttatgaattgatcaatgagccatacatttttgctaggatgtatattt

SEQ ID NO: 280014 - DNA, 120 bp, Artificial Sequence
  ENSG00000129292_79 (sequence is synthesized)
taataactacaaaaaaagagagtttaaaaaactattaagggtctgtctttaaaccacctaatagaggaatttaaaagtgaaggttgcagttgctagattttgccttggctaccttcagat

SEQ ID NO: 280015 - DNA, 120 bp, Artificial Sequence
  ENSG00000129292_80 (sequence is synthesized)
tcccacaatacttgtacataatgaactgtgcatgcttttacattctctaagggcttaacttcttaggcactgtaagactataagaacgcagtaatagccataactggatttccttggttc

SEQ ID NO: 280016 - DNA, 120 bp, Artificial Sequence
  ENSG00000129292_81 (sequence is synthesized)
tcctgttttaaaatctgagccttaatgtagttttaatatatcctttttgtattacttttctttattagtagcctaataaagaagactttgagtatcttttgctctcctctagatgcgttt

SEQ ID NO: 280017 - DNA, 120 bp, Artificial Sequence
  ENSG00000129292_82 (sequence is synthesized)
taaaaactattccaaatttaattgatattgtattgagtttttcagggttattttaggcctgatttgataacaatgcgttgttttggtgcctccattaatgttgtattaaatcaatgggtc

SEQ ID NO: 280018 - DNA, 120 bp, Artificial Sequence
  ENSG00000129292_83 (sequence is synthesized)
ttttaaattgattaatatgtcattgaatcataccttctgattttctgtgatcatccaacggttaagtctttgccgttattgtcaatatatcaaccaaattttaaataactttttttactg

SEQ ID NO: 280019 - DNA, 120 bp, Artificial Sequence
  ENSG00000129292_84 (sequence is synthesized)
tgtattactatattcaacgtcccagatataacaatattttgtattttcaccactgtttatggtattctcagaatgcgataaatcagggacttgggtaataaaatgtttctggaaaattca

SEQ ID NO: 280020 - DNA, 120 bp, Artificial Sequence
  ENSG00000129292_85 (sequence is synthesized)
gtcataattacctaagcttcaaaaatcttttgtttccatgtccagagacaagtacagtacagtattcttatttgtttgctccccctttttaaaatgtttaatagcttatgttcacttctc

SEQ ID NO: 280021 - DNA, 120 bp, Artificial Sequence
  ENSG00000129292_86 (sequence is synthesized)
atagctcctttctttatgaaaaataacatgaaaatagaaaagttgttctaagtatactttttgtatatattctagacttatcagatgtagacttcctagatgattcttcaacggagagtt

SEQ ID NO: 280022 - DNA, 120 bp, Artificial Sequence
  ENSG00000129292_87 (sequence is synthesized)
ctctttaccagttaatgctaccttaggtgtaagtgatcatctgttttagttcctactagtgttagtcagctccagatacatgatttattaaacacatatcttgttttatatgtaactttt

SEQ ID NO: 280023 - DNA, 120 bp, Artificial Sequence
  ENSG00000129292_88 (sequence is synthesized)
ttgtcaagagagtctcttgctttctccaaaggaacttttgtgtttatgatcatccctagtcaaaattatggctattcaaaaatagacctcgatttaatattgttgagactttagagaatg

SEQ ID NO: 280024 - DNA, 120 bp, Artificial Sequence
  ENSG00000129292_89 (sequence is synthesized)
gatgctagattaaaatagtaattttttcacactttcttcttcattatagtttataaaaatgttattgagttttctgctatactattttctgtgctgtaatgactaaaagtcacaaaataa

SEQ ID NO: 280025 - DNA, 120 bp, Artificial Sequence
  ENSG00000129292_90 (sequence is synthesized)
tggatgatagtcttaaatatactgtagattagttaactggagcttgaatcactgaaagttggtcaaatatgttggataaattataggctaaaccattgtgagttggagcaatagctagta

SEQ ID NO: 280026 - DNA, 120 bp, Artificial Sequence
  ENSG00000129292_91 (sequence is synthesized)
ggatatgtgtgatgatttaatttgaaatgtaggatactgctctaatatttatttttttaagtacatatgattggggaaaagaatgctttacaattttggaaaaattagtttaatgaaata

SEQ ID NO: 280027 - DNA, 120 bp, Artificial Sequence
  ENSG00000129292_92 (sequence is synthesized)
tatttttttttcctcgtgttcttagccttcattgttaaacacacaaagaatgtaaataaagactggaggagttgtttatgaattgatttaattatttttaaagcttatccaaagcaaaaa

SEQ ID NO: 280028 - DNA, 120 bp, Artificial Sequence
  ENSG00000129292_93 (sequence is synthesized)
gtccatcaggttttttttttttaaatctcctaatttattctctcattaaattacatatggaaatgctgagtctcttcattcaggtcctttgtaaattatggagtttaacttcttaccaca

SEQ ID NO: 280029 - DNA, 120 bp, Artificial Sequence
  ENSG00000129292_94 (sequence is synthesized)
tcaggaaattgagaatattactcattgaaggttttaactactgtctgtgttaactttaaggtatcaggagttgggatttctcagcactgctaatgaagatcccctcttatagtccaataa

SEQ ID NO: 280030 - DNA, 120 bp, Artificial Sequence
  ENSG00000129292_95 (sequence is synthesized)
gctattttagattttattcctgtgaaaatatatccatggaatacctgttattgaatatgcttcctattttatgagaggttatgcaatctaactcatttgattattaaatttgataaccta

SEQ ID NO: 280031 - DNA, 120 bp, Artificial Sequence
  ENSG00000129292_96 (sequence is synthesized)
ccatgttcagctatcatgtaaatattgttatctctatatttatgtttatgtagttacctgtgaaagtagctttgaaaatgtgacacatatttttattagtgtaattacattttaattaat

SEQ ID NO: 280032 - DNA, 120 bp, Artificial Sequence
  ENSG00000129292_97 (sequence is synthesized)
tgctgaggtgaatgtgattgtgaaaagtacttattaaatgtggaagttagtgtagagggcagtacccgtcttagagagaagtacagaaaaccacgttttgaaattgaatttaaaaaagaa

SEQ ID NO: 280033 - DNA, 120 bp, Artificial Sequence
  ENSG00000129292_98 (sequence is synthesized)
aggaaaattgtgtaactcggctgtttctattttcataattaaaaacttttgagagtccttgccagttttgtaacaaagagaccaacaatcattaatgaaaaccttgtaaattattttaga

SEQ ID NO: 280034 - DNA, 120 bp, Artificial Sequence
  ENSG00000129292_99 (sequence is synthesized)
ttttcaggaacaccatgccattccctcattttctacttgtcattcaggttgatttcaatgtgaaaatgttttgtgaacaaacacttatttttatcctatgtgttagcctcgcttcatagt

SEQ ID NO: 280035 - DNA, 120 bp, Artificial Sequence
  ENSG00000129292_100 (sequence is synthesized)
taaaaagccgagttataaagctcttaattacatctcaattggtatcagcaatagacctaaaggagaggtattgattgttactaacctctgtttcctaatgagttaaagtaatgtcactca

SEQ ID NO: 280036 - DNA, 120 bp, Artificial Sequence
  ENSG00000129292_101 (sequence is synthesized)
tgacatagattgataacaggcctgtagtcaaaacttactgtgctaatggacttatttatattttttaaaaattcaaactgtggtcttgaaccccaattctcagcttattaattatagatt

SEQ ID NO: 280037 - DNA, 120 bp, Artificial Sequence
  ENSG00000129292_102 (sequence is synthesized)
atttaattgtattagggatatgtcatgttatatttacttttggataaaacttgcattagatgcataataactcagtaagttttaaaaacaatgttaatttttccttgtttagaagttaag

SEQ ID NO: 280038 - DNA, 120 bp, Artificial Sequence
  ENSG00000129292_103 (sequence is synthesized)
caccttatcaagatattaagttttaaaatcttgttttataactttgtaacttgagagtaatggatgctgtagtgatgtctttcacatatgtgaagatgaacaataaaattgtttatttac

SEQ ID NO: 280039 - DNA, 120 bp, Artificial Sequence
  ENSG00000129292_104 (sequence is synthesized)
tcagtattcctagctacccaaagggttatcttcttgaacggtgactgatcaaaatatatttatatgtatattttttaaaaatgaactaattgtagggttatgtgctgatagccccaaata

SEQ ID NO: 280040 - DNA, 120 bp, Artificial Sequence
  ENSG00000129292_105 (sequence is synthesized)
aaggaagcttagactgtaaaataaattatacatttgatttttgcttctttggtttagacctgctaaagttataggtcactagtttctgttccaggtgaaatcccagcatccactaagctg

SEQ ID NO: 280041 - DNA, 120 bp, Artificial Sequence
  ENSG00000129292_106 (sequence is synthesized)
gtgttgtcctatcgacccagctggatcgtgtaaccagtctatgggaagtgaggtaagagccttttttttaaaaattttgttttgtttttcctggtatataatgtcatttagaaagttaaa

SEQ ID NO: 280042 - DNA, 120 bp, Artificial Sequence
  ENSG00000129292_107 (sequence is synthesized)
aatttttaatataaaaatttacattgagttcttatcttcttctttccttctacaaatcatagtcattcatcttcctttaaaaggcgcttacctgacactctgtaggctgtttcagatagg

SEQ ID NO: 280043 - DNA, 120 bp, Artificial Sequence
  ENSG00000129292_108 (sequence is synthesized)
gctctctgagtcatgtgatggaagcagtgtattgtatgctttgtcactgctcaaagcaagaatggatggtaagcattggaaggagaatcttgggtggaggtaaaaaccacaattccattt

SEQ ID NO: 280044 - DNA, 120 bp, Artificial Sequence
  ENSG00000129292_109 (sequence is synthesized)
gttggctatgttttctgaaatactggaaagaaaggtgccattagaaatttaaaatattttcttttctattctgctgttatttgggattttcagcacctggacctacaattaattttaaga

SEQ ID NO: 280045 - DNA, 120 bp, Artificial Sequence
  ENSG00000129292_110 (sequence is synthesized)
aattgaaagtagtgtgtaaaaatgtctaatatggaaatatgctacgtatttgttccataccatgcggtgaaaactgtcattctgaaatgtattgaaattacctggtcagcttcagtcaag

SEQ ID NO: 280046 - DNA, 120 bp, Artificial Sequence
  ENSG00000129292_111 (sequence is synthesized)
tgtaaacatttagtgctctagaaatgtatatctaccacattaaaaaaattattcatgaagaaataagtgtgattgttttaaattgcctggttttcaaaaatttagttatgaaatgattag

SEQ ID NO: 280047 - DNA, 120 bp, Artificial Sequence
  ENSG00000129292_112 (sequence is synthesized)
caagcagatttcttctaattaatatgtaaatgcaatttaaaatgaaaatgcttttgatcaggaagtggctttgtgtcttcccacatgtatgtataaataaagtgttcttttaagcattca

SEQ ID NO: 280048 - DNA, 120 bp, Artificial Sequence
  ENSG00000129292_113 (sequence is synthesized)
gtaatactggttgcttaaacacccttcccttccacggtgggattttctcttcactttcccttgggagtctcaaatgaataagttacagtttgacagcagcagcagagcataagattttat

SEQ ID NO: 280049 - DNA, 120 bp, Artificial Sequence
  ENSG00000129292_114 (sequence is synthesized)
gaatgtgaaaccattatgatctttttatttacttagaaaatttaagtgtgtgataatctttttaatagttcatttttctacatctatttctgatttcatgttgcaactatgtcatgcaaa

SEQ ID NO: 280050 - DNA, 120 bp, Artificial Sequence
  ENSG00000129292_115 (sequence is synthesized)
aagacagtagatattgtaagattgtcttcaacagttgaaattcaggcttgcctttttacagtagatttcatttatagtttatacagataaatgagaactaatataaaatagtaattttgt

SEQ ID NO: 280051 - DNA, 120 bp, Artificial Sequence
  ENSG00000129292_116 (sequence is synthesized)
tatggcattatggtatattttaaattcatcaagctcatctgtatgtgtctttttgtccttttactactgagaggattggggctgggatcatggcagcctgctctgatgtatttctctcca

SEQ ID NO: 280052 - DNA, 120 bp, Artificial Sequence
  ENSG00000129292_117 (sequence is synthesized)
ctctattttattatttttttaaagagttctaacttaaatacgtggaccagctattggataactttaattcatatatttatcattctttctattcactttgccacatacacaccatgtgat

SEQ ID NO: 280053 - DNA, 120 bp, Artificial Sequence
  ENSG00000129292_118 (sequence is synthesized)
gattttaaacccgatttctgtatagagaatgttaaaaggatggcgtttttcagaggttccaaataggtagacattgacaatatagttgcacagtatatggaatacgtatatgtatagaca

SEQ ID NO: 280054 - DNA, 120 bp, Artificial Sequence
  ENSG00000129292_119 (sequence is synthesized)
cacatatacatacagatatacatatatatttctatgtatacacatatacatatatcatatatgtacacatatgcatattgcatatactgtgcaatatatatatacacacacaatttccca

SEQ ID NO: 280055 - DNA, 120 bp, Artificial Sequence
  ENSG00000129292_120 (sequence is synthesized)
atttcccagttcgtatttttcattatgtcatgtaccttattgatagctattattatatggcttatgcatactgatttgaaataaacaattttacttagaaaactagtagtccatactttt

SEQ ID NO: 280056 - DNA, 120 bp, Artificial Sequence
  ENSG00000129292_121 (sequence is synthesized)
ggaacaaagtcacaaacaaattgaatttgattagactttaaactacagaatgtcaagggaataaaggaaaaaaacatcagcagttggtgcatgatctgtttctaataggctctaagagtt

SEQ ID NO: 280057 - DNA, 120 bp, Artificial Sequence
  ENSG00000129292_122 (sequence is synthesized)
cctggaatttcagttagcttaggtgtgtttctgtaacttaaggaatttaaaaagtttaaaaaatcctgaaatttgaattgaccagtagtatgttattgataataatatcaagaatatttg

SEQ ID NO: 280058 - DNA, 120 bp, Artificial Sequence
  ENSG00000129292_123 (sequence is synthesized)
attcttagtcccagcaagaagattgtgttttggaatacctggatgaaaagtagaccaagaatgtaaccactttgctctttctttgttcccctttcccattccagggagctctgggctctg

SEQ ID NO: 280059 - DNA, 120 bp, Artificial Sequence
  ENSG00000129292_124 (sequence is synthesized)
ttctacttattcgtattggcaggaagagaccagctgtgtattttatagctaatatagaatactggaaggttgtaactttattggtgggtggaactgatgactatttgatattcttctttt

SEQ ID NO: 280060 - DNA, 120 bp, Artificial Sequence
  ENSG00000129292_125 (sequence is synthesized)
acctaagtttaaataatttcttgaagcagtgtaatgcattcttattgggcaattttatcccataggggtattcttctagaagagggcctgttagtaatacataggtaattaataggtact

SEQ ID NO: 280061 - DNA, 120 bp, Artificial Sequence
  ENSG00000129292_126 (sequence is synthesized)
tgcttataatttcctttcagttaattcttctcattttctatggatagtgcattttttcctggaatattagcaggtcaagataacagattttggactgcctcttaaggcagaagtagtcag

SEQ ID NO: 280062 - DNA, 120 bp, Artificial Sequence
  ENSG00000129292_127 (sequence is synthesized)
agttatttcttcaagtacctattttgttatttgttccattttattgtttatatttaataacttttgtaagttgatgtgaatgtaaagcatgaaaaaactttattaatcatatttgggctt

SEQ ID NO: 280063 - DNA, 120 bp, Artificial Sequence
  ENSG00000129292_128 (sequence is synthesized)
ttaaattctctagataaccaagtatgcattttaaaatctaattttaagtagtttttcttaagtctcattactttttatgaacacattgcaatgctttatttttccttctcaaaccattaa

SEQ ID NO: 280064 - DNA, 120 bp, Artificial Sequence
  ENSG00000129292_129 (sequence is synthesized)
tggaaagggattttaataaactgggtctgtaatatcctaatgtaaatccatatgttatgggtgaattattttgtttcttttactacttgtggtaccttattttcagctttttagtttgtg

SEQ ID NO: 280065 - DNA, 120 bp, Artificial Sequence
  ENSG00000129292_130 (sequence is synthesized)
atctatttcatctattgagtattaaaaagtatttctaccacctgtgtgaaaggaaacaaagtaaaagatataattatataatatattgaatagcaagatttgtcctgtttgaatagtcct

SEQ ID NO: 280066 - DNA, 120 bp, Artificial Sequence
  ENSG00000129292_131 (sequence is synthesized)
tagaaatataactctactcagtttcctgcaaaagaagaacttgattttctaattatttttatttcaatagttcattgggccttaagaatgttagctggagaataaaaacctaatgaatgt

SEQ ID NO: 280067 - DNA, 120 bp, Artificial Sequence
  ENSG00000129292_132 (sequence is synthesized)
agctttaaatgttaaatattcagtactgtatctttttcagtaatgtaaaaatatgttcagaatataattaggattgaagctgtttttgtaaaattgtttatatacagttgatgtggtatg

SEQ ID NO: 280068 - DNA, 120 bp, Artificial Sequence
  ENSG00000129292_133 (sequence is synthesized)
tttggtttttgcttttttttttttttttaaatctcaaactgggacaaacaccagggttttgttgttgttttttacttattttttaatatagagatggggtcttgctatattgcccaagct

SEQ ID NO: 280069 - DNA, 120 bp, Artificial Sequence
  ENSG00000129292_134 (sequence is synthesized)
ggtctcaaactcctgggctcaagcaactcacccagctcggcctcccaaagtgttacaagcatgagccaccgtgcctaaccttaaataccagttttaatactaatcataaatgtatcaaaa

SEQ ID NO: 280070 - DNA, 120 bp, Artificial Sequence
  ENSG00000129292_135 (sequence is synthesized)
atactaatcataaatgtatcaaaatcattgtcttacactcggccttttttattttaaagtacattctgagtactaggtaccttttgcttaatttagaatttgtttgagtactactttaag

SEQ ID NO: 280071 - DNA, 120 bp, Artificial Sequence
  ENSG00000129292_136 (sequence is synthesized)
taagaagataatttttttaatttatttatctatttagttatttatttagagatggaatctcactctgttccccaggatggagtgcagcggtgccatctcggctcactgcaacctttgcct

SEQ ID NO: 280072 - DNA, 74 bp, Artificial Sequence
  ENSG00000129292_137 (sequence is synthesized)
caagaatataattttaatatgtgaattcctacctagatcacttaacttctttagggtagctgtctgataaagtc

SEQ ID NO: 280073 - DNA, 120 bp, Artificial Sequence
  ENSG00000129292_138 (sequence is synthesized)
agatcacttaacttctttagggtagctgtctgataaagtcaagacatgttgcccatggatacctttacatcatactgcctttgagggggcaccatttttctcctgttaaatatgttgtgg

SEQ ID NO: 280074 - DNA, 120 bp, Artificial Sequence
  ENSG00000129292_139 (sequence is synthesized)
acagcttctgtaatgtatgtagtataattgctgtagtcagtttactattaagttgtcagttgttaaacatgcttcctttggagcaaagtttttgtgtggccaactttgaaataacacaaa

SEQ ID NO: 280075 - DNA, 120 bp, Artificial Sequence
  ENSG00000129292_140 (sequence is synthesized)
aatgatttttggtgaccttttatgagcagggtggccataaacaaaaacaaatacttgttctaggcttataaactggggttcactgaaggtacctgacaaccttgaaatgacacagaaatg

SEQ ID NO: 280076 - DNA, 120 bp, Artificial Sequence
  ENSG00000129292_141 (sequence is synthesized)
aattttggtggccttttatgagcagggtggccttaaacaaggcttataaactagacttcatcgaaggttacctgacaggcttagcaaagaattttaaccaagtaaatgcctatattttat

SEQ ID NO: 280077 - DNA, 120 bp, Artificial Sequence
  ENSG00000129292_142 (sequence is synthesized)
taaagcagagttttaatgtcttgggattcaaattaataatacagttatatattacaataaaatactgtctttttttttttttgtggcggagtcttgctctgccacctagggtggagtgca

SEQ ID NO: 280078 - DNA, 82 bp, Artificial Sequence
  ENSG00000129292_143 (sequence is synthesized)
ttgtggcggagtcttgctctgccacctagggtggagtgcagtggcaggatctcggctcattgcaacttctgcctcctgggtc

SEQ ID NO: 280079 - DNA, 120 bp, Artificial Sequence
  ENSG00000129292_144 (sequence is synthesized)
gagaattagtgacatacatagaagaaaactggaacttctaaaaatttttgtcatttatagacaaaatgacaaaatgaactataatattaagttcagatgttctaggaaagacccacactt

SEQ ID NO: 280080 - DNA, 120 bp, Artificial Sequence
  ENSG00000129292_145 (sequence is synthesized)
tttctcttaacataaaatggatccatctgtgtttaaactcttataagaaggtaaggtacaactggacacacataaagcttagattaaaaggatctaaatgaacttaagaattggtagctt

SEQ ID NO: 280081 - DNA, 120 bp, Artificial Sequence
  ENSG00000129292_146 (sequence is synthesized)
ttttagttactaaaacaacagaaaatctttttttatgttctggatgtttggaaggatttcttctgtcttattctgtttttatagctgtatagacaaaacctgtattataagtattagcaa

SEQ ID NO: 280082 - DNA, 120 bp, Artificial Sequence
  ENSG00000129292_147 (sequence is synthesized)
cctgagcaaccttaatgtagacattaagacagaattttaactttttacagaataaatgtgtgtgtgcaagtgtgtgttttcagtgatttaattgagtaatattaaacaacagacacacaa

SEQ ID NO: 280083 - DNA, 120 bp, Artificial Sequence
  ENSG00000129292_148 (sequence is synthesized)
ctgtataagcaactctcaagttctgattcagtcccttggcttattattaagcatatttgtatttttgaaaagaaaacatttgagattacttcctacgtattaaaaagtataggaaatttc

SEQ ID NO: 280084 - DNA, 120 bp, Artificial Sequence
  ENSG00000129292_149 (sequence is synthesized)
aactgctaagatttttgcaaagttaattagggtgtaaatcagtattttttctaataagcaatttctgtacaatttttctcaaggtttgttggcatccaaagctgttggggttgatggtgc

SEQ ID NO: 280085 - DNA, 120 bp, Artificial Sequence
  ENSG00000129292_150 (sequence is synthesized)
ttgtagttatattgtatttttatgaagttgctttttaaaaactcaagtggatatgatagggaaggcttgaaactatttcaggggcaaaaaccatagacatttcttactgatttattgctt

SEQ ID NO: 280086 - DNA, 120 bp, Artificial Sequence
  ENSG00000129292_151 (sequence is synthesized)
agagactactgctggttgagaatcctttccatttaataacacagattccactgtagtttgactctcctcaactcataatccaagcatactgagaggcctgattcattacaaaaaaaaaaa

SEQ ID NO: 280087 - DNA, 120 bp, Artificial Sequence
  ENSG00000129292_152 (sequence is synthesized)
gttataaaaagacccaggatagctatttttacttaagactattcctgtagattttttgtccccacttgtctataactttcctctgcaatacattttattcattcttattataatatttat

SEQ ID NO: 280088 - DNA, 120 bp, Artificial Sequence
  ENSG00000129292_153 (sequence is synthesized)
agtctagacttcagtttaatctttttaatgaaaaaaaaatgcccccatgattgtatttttaaagattttactgtttcagtacttctaatttttcaagagttaacgcagtctttttcgaaa

SEQ ID NO: 280089 - DNA, 120 bp, Artificial Sequence
  ENSG00000129292_154 (sequence is synthesized)
acacctttcacatgggtatatctatctatctccctatatatctgtatatataaataatacaagatttgtgttgaccctgagtttctcatattagtttagtatcctaagttggagacatga

SEQ ID NO: 280090 - DNA, 120 bp, Artificial Sequence
  ENSG00000129292_155 (sequence is synthesized)
ataacagttatttgaaaagtcagttggtaaatgatggttttttttgctctttatgcaaaaaatgaaatacatgatcagttgagtgaatatgacatgtttccttattccatattgtgtctt

SEQ ID NO: 280091 - DNA, 120 bp, Artificial Sequence
  ENSG00000129292_156 (sequence is synthesized)
ccagaataatcaaagatgttggcattcagaagacttttatcaaacttattaacctattttccttcagttgccatattttctactgaatcattttttcattttgatcaggttttgcttttt

SEQ ID NO: 280092 - DNA, 120 bp, Artificial Sequence
  ENSG00000129292_157 (sequence is synthesized)
ctttttaataggtggaaagaatgggaacataattcaattgttttcctaataagcttcatttcattatggcatttatcatgaaatagtgtcagtagtagtcactggaatgtcatatgacat

SEQ ID NO: 280093 - DNA, 120 bp, Artificial Sequence
  ENSG00000129292_158 (sequence is synthesized)
ttggaaattatatcttggtattataaccacaatattatagcaattaaattttattctttcatatttttaagttatcagcatgtctttttcgttttgattgtaaaattactcttaaatacc

SEQ ID NO: 280094 - DNA, 120 bp, Artificial Sequence
  ENSG00000129292_159 (sequence is synthesized)
attactcttaaatacccaaacatcaatgtctttagactgttcttatttcctctttctaaattaacatgaatatattggcatatataatcttgcctattctagtcaaatgtgtttgtatgc

SEQ ID NO: 280095 - DNA, 120 bp, Artificial Sequence
  ENSG00000129292_160 (sequence is synthesized)
catgtagaaagaagatatctaaaagtgtgagagacatttccaaatatttatattatattgctagaagatgcctaaattacttaccaagttgttaaaaaacacaagtacacaatgtcataa

SEQ ID NO: 280096 - DNA, 120 bp, Artificial Sequence
  ENSG00000129292_161 (sequence is synthesized)
tcttaaatatcctcattatttgctcacaataagtatacaaagttgtttttgttcattttttttttttaatgaatcaggcccagacatgtttataaaactccatttgggggggatgatgat

SEQ ID NO: 280097 - DNA, 120 bp, Artificial Sequence
  ENSG00000129292_162 (sequence is synthesized)
gggataaaattatttacattagtgtaaagtaaatcactaactctataatgttgtatcatctttgtccctgcctttttttcccttagagtttctagatttgcaatgtagcaaaaggaatac

SEQ ID NO: 280098 - DNA, 120 bp, Artificial Sequence
  ENSG00000129292_163 (sequence is synthesized)
atatatatatatttttccttatcttttgctgtaaagagactattttcccgaaggaaaaatggcaatttacacaacgatctgcaattagagaaattaactgtagtctgtcacttgggggag

SEQ ID NO: 280099 - DNA, 120 bp, Artificial Sequence
  ENSG00000129292_164 (sequence is synthesized)
ctacttgaaattaatgttccattttattttcttttagttctagtagagtgtagattttacaatttttgattgactcattttgaatgagggcacaatttttgcctttgattacctttggaa

SEQ ID NO: 280100 - DNA, 120 bp, Artificial Sequence
  ENSG00000129292_165 (sequence is synthesized)
aaaagaagataaagaaaaaactaagagataaagattattaaaatattaagatatttctgctcttatatcttctggagttataagcacttcacttattctacaaatatttattgagtgcct

SEQ ID NO: 280101 - DNA, 120 bp, Artificial Sequence
  ENSG00000129295_0 (sequence is synthesized)
gtcattcgaggtccgggtccggcttgcggggtcagcgaactggagaggcgccatgggctggatcacagaagatcttattagacggaatgctgaacacaacgactgtgtcattttttccct

SEQ ID NO: 280102 - DNA, 120 bp, Artificial Sequence
  ENSG00000129295_1 (sequence is synthesized)
ggaggaactctcgttgcatcagcaagaaatagaaagactagaacacattgataaatggtgccgggatttaaaaattctctatcttcaaaataatcttattgggaaaattgaaaatgttag

SEQ ID NO: 280103 - DNA, 120 bp, Artificial Sequence
  ENSG00000129295_2 (sequence is synthesized)
caaactcaagaaacttgaatatttgaatttagctttaaacaacattgaaaaaatagaaaacttggaaggatgtgaagagctggcaaaacttgacctgactgtgaatttcattggagagct

SEQ ID NO: 280104 - DNA, 120 bp, Artificial Sequence
  ENSG00000129295_3 (sequence is synthesized)
gagcagcattaaaaacttgcagcacaatatccatctgaaggagctctttctcatggggaacccatgtgcttcctttgaccactatagggagttcgtggtagcaactcttccacaattaaa

SEQ ID NO: 280105 - DNA, 120 bp, Artificial Sequence
  ENSG00000129295_4 (sequence is synthesized)
gtggttggatggtaaagaaatagagccttcagaaaggattaaggcattgcaggactattcagtaattgaaccacaaatcagagagcaggaaaaagatcactgtcttaaacgagccaaact

SEQ ID NO: 280106 - DNA, 120 bp, Artificial Sequence
  ENSG00000129295_5 (sequence is synthesized)
caaggaagaggctcagaggaaacaccaagaagaggataaaaatgaagacaagagaagtaacgcaggctttgatggacgttggtacacagacatcaatgctactctttcctctttagagag

SEQ ID NO: 280107 - DNA, 120 bp, Artificial Sequence
  ENSG00000129295_6 (sequence is synthesized)
caaagaccacctacaggcaccagacacagaggaacacaacacaaagaaattagacaacagtgaagatgacttggaattctggaataagccctgtttgtttactcctgaatcaagattgga

SEQ ID NO: 280108 - DNA, 120 bp, Artificial Sequence
  ENSG00000129295_7 (sequence is synthesized)
aactcttagacacatggaaaaacaacggaagaaacaggaaaaattaagtgaaaaaaagaagaaagtgaaaccacccaggactttgatcactgaagatgggaaagccctaaatgtgaatga

SEQ ID NO: 280109 - DNA, 120 bp, Artificial Sequence
  ENSG00000129295_8 (sequence is synthesized)
gcccaaaattgacttctctttgaaagataacgaaaagcagatcatcctggaccttgctgtctataggtatatggatacctctttaatcgatgttgatgtgcaaccaacttacgtgcgagt

SEQ ID NO: 280110 - DNA, 120 bp, Artificial Sequence
  ENSG00000129295_9 (sequence is synthesized)
aatgatcaaaggaaagccatttcagcttgtccttcctgcagaagtgaaacccgatagtagttctgctaaaagatctcagacaacgggtcatttggtcatctgcatgcccaaggtaggaga

SEQ ID NO: 280111 - DNA, 120 bp, Artificial Sequence
  ENSG00000129295_10 (sequence is synthesized)
agtaatcacaggtggtcagcgagcattcaaatctatgaaaactacctcggacaggagcagagaacaaacaaatacaagaagcaagcacatggagaaactagaagtagaccctagcaagca

SEQ ID NO: 280112 - DNA, 120 bp, Artificial Sequence
  ENSG00000129295_11 (sequence is synthesized)
ctcattccctgatgtgactaacatagttcaagagaaaaaacacacacccagaagacgacctgaacccaaaattataccaagtgaggaagacccaacctttgaagacaaccctgaagtgcc

SEQ ID NO: 280113 - DNA, 120 bp, Artificial Sequence
  ENSG00000129295_12 (sequence is synthesized)
tccgctgatttgaaacatctggctgcgttgccattggctgagacccaccaggtccagttttggttggtgtagagaccatatgcatattattcctgggataaacacagagttatttgtcaa

SEQ ID NO: 280114 - DNA, 120 bp, Artificial Sequence
  ENSG00000129295_13 (sequence is synthesized)
ataataaagggttggtattgaaaatgtttagtaagatcatagaactattgcataaaacactgattataaatactgtctacttatgcaaagtattaattcatagataaaaggactgagtat

SEQ ID NO: 280115 - DNA, 120 bp, Artificial Sequence
  ENSG00000129295_14 (sequence is synthesized)
taaattggtacttcagcaaagtggtcaagcttagaagttaaaactgtaatttcagacccaattggaatactttaatatgattttaaacagcatttccattttccttcccatgatgtgtct

SEQ ID NO: 280116 - DNA, 120 bp, Artificial Sequence
  ENSG00000129295_15 (sequence is synthesized)
gctttctctggtggcatggtataatggcaagaatatgagttttgaaaccagacactctatatttggattccagctcaatcactttgtaaagaccttcagcaagtcctttaattctctgag

SEQ ID NO: 280117 - DNA, 120 bp, Artificial Sequence
  ENSG00000129295_16 (sequence is synthesized)
ccttagtggcttcatgtataatctgggaataataacacttgcctcacaggtttgtctcaagataaactgcagaaagcacttagtacagtgtcagccatacatttagagcctcttctctct

SEQ ID NO: 280118 - DNA, 120 bp, Artificial Sequence
  ENSG00000129295_17 (sequence is synthesized)
ctccttcttccctttctcctctctcttctcctccctttctcctgtctctcctcctccctgctccttcttcccctccctccccaattacttttctccccttattctttttcttcacctttt

SEQ ID NO: 280119 - DNA, 120 bp, Artificial Sequence
  ENSG00000129295_18 (sequence is synthesized)
tactccccatcccactccttctcctctatttccttctttacttttttaatatcctacctcttctttatctagaacattatgaattcaatatttcacatacattgtaggacaaattactgt

SEQ ID NO: 280120 - DNA, 120 bp, Artificial Sequence
  ENSG00000129295_19 (sequence is synthesized)
tactctgatcatgatatagcaacatttaagtcagtttccccaaatattcattcaacaaatacttattgagcaactattgagtgctagccccctctctgttcatcagggatttagtagtaa

SEQ ID NO: 280121 - DNA, 120 bp, Artificial Sequence
  ENSG00000129295_20 (sequence is synthesized)
caaagcagacaaatacatacacacagactatgtcaggtggtgttcagagctgtgaaggagagtcagagtgagggaatcaagggtgatgggtgctttttcagacagggcctttctctatta

SEQ ID NO: 280122 - DNA, 120 bp, Artificial Sequence
  ENSG00000129295_21 (sequence is synthesized)
aacaggcttccagtggaagactctgctaatgtttagcagataaccaaaatgcatcagttagaaaaaaatatgatgagaatgagggactggttataggaatgcaattgggcacaaatgtgg

SEQ ID NO: 280123 - DNA, 120 bp, Artificial Sequence
  ENSG00000129295_22 (sequence is synthesized)
gaagagctgggtagtgaagctctagaagggagaggtagagaattggaagaagaagcactggtacaggtagacaattcagaacttgcacagaatctgagaagctgaagtaggactgtgatt

SEQ ID NO: 280124 - DNA, 120 bp, Artificial Sequence
  ENSG00000129295_23 (sequence is synthesized)
gggagcttgtggagaggtctatggaaattatcatgctgctgaaattgttgcctctatttatctgctacccttctggtccgtggccaagatcctggtgggtgggcttggagccagccttcg

SEQ ID NO: 280125 - DNA, 120 bp, Artificial Sequence
  ENSG00000129295_24 (sequence is synthesized)
tcagcaggcctgcggtaagaaagatgggatggacacacagtggtggagatcaaggatcagctgcagcaggctgggtccctctgcatctgtccatcactgcgactgatggcaatgactgag

SEQ ID NO: 280126 - DNA, 120 bp, Artificial Sequence
  ENSG00000129295_25 (sequence is synthesized)
tataacacctttcttcatggtcaactctacccaggaaccacgtagggaaggaaattctggaaaacagctcccagccttagccaacttgacatatcataatccaacagaactcaacctcta

SEQ ID NO: 280127 - DNA, 120 bp, Artificial Sequence
  ENSG00000129295_26 (sequence is synthesized)
ccaacttggaaatcatgtacatttgtcaggactgtatttaatttccacatagagagaaagcaaaattatacttttgaccaaactaatagaattatccattaaacaaacaaaactgtgcca

SEQ ID NO: 280128 - DNA, 120 bp, Artificial Sequence
  ENSG00000129295_27 (sequence is synthesized)
tctgacagtcaggtcgtgggtaagaccagtgatgggcgtccgtcctagaggcctctgacattaaggcggggaaagcaaagaagcaagcacatggagaaactagaagtagaccctagcaag

SEQ ID NO: 280129 - DNA, 120 bp, Artificial Sequence
  ENSG00000129295_28 (sequence is synthesized)
ttttttaaaactgtttcacaaaaatgtattaattgcttttatattctctttgcttgttttttctttccatgctgcccattgttctcatccaccaccaatcttaagtgaaaaaaagaagaa

SEQ ID NO: 280130 - DNA, 120 bp, Artificial Sequence
  ENSG00000129295_29 (sequence is synthesized)
tcaattttctcctacccaccctccgtgtattttcatatgacattgacaggatatcataatgaaatatggcatacggacccatttacggggactggtcttttgaattaactgtgttgggag

SEQ ID NO: 280131 - DNA, 120 bp, Artificial Sequence
  ENSG00000129295_30 (sequence is synthesized)
aggatattacacttgctccccaactctcccacatctaatctctggcctttcttatcctacctgcctcctcctgccttcttccaagctggtctctccatctccacctgtgtcatgaattcc

SEQ ID NO: 280132 - DNA, 120 bp, Artificial Sequence
  ENSG00000129295_31 (sequence is synthesized)
ggcttgcggggtcagcgaactggagaggcgccatgggctggagtaagcccccctccaccttccgtcctcgatcgttccccttgtggaagtagtcccgggtctcgtgggatcctcgccgcc

SEQ ID NO: 280133 - DNA, 120 bp, Artificial Sequence
  ENSG00000129295_32 (sequence is synthesized)
cgctcccgccctgcgctgtcggttcccccgcgcctgggcggaccctaaccccacccggccctccgcaccgcagccccggctgcaccaggtcctctgcagactggccggacagcctggcct

SEQ ID NO: 280134 - DNA, 120 bp, Artificial Sequence
  ENSG00000129295_33 (sequence is synthesized)
gaaaacttggaagatgtcatctattgacttcctgatgtggacgatgcagattttgttctctcacaccatctgcaagctggtctctccatctccacctgtgtcatgaattccaggcaggat

SEQ ID NO: 280135 - DNA, 120 bp, Artificial Sequence
  ENSG00000129295_34 (sequence is synthesized)
actgtcactgtttatgagtcttaaacaactgcagcattcttttccccttttcctttatgtttttaatctgtctaaatttttcacatgaaaataataataaatggcttatgaggaaaaagc

SEQ ID NO: 280136 - DNA, 120 bp, Artificial Sequence
  ENSG00000129315_0 (sequence is synthesized)
agccttcgccgctgccttctggttgaagcactatggagggagagaggaagaacaacaacaaacggtggtatttcactcgagaacagctggaaaatagcccatcccgtcgttttggcgtgg

SEQ ID NO: 280137 - DNA, 120 bp, Artificial Sequence
  ENSG00000129315_1 (sequence is synthesized)
acccagataaagaactttcttatcgccagcaggcggccaatctgcttcaggacatggggcagcgtcttaacgtctcacaattgactatcaacactgctatagtatacatgcatcgattct

SEQ ID NO: 280138 - DNA, 120 bp, Artificial Sequence
  ENSG00000129315_2 (sequence is synthesized)
acatgattcagtccttcacacagttccctggaaattctgtggctccagcagccttgtttctagcagctaaagtggaggagcagcccaaaaaattggaacatgtcatcaaggtagcacata

SEQ ID NO: 280139 - DNA, 120 bp, Artificial Sequence
  ENSG00000129315_3 (sequence is synthesized)
cttgtctccatcctcaggaatcccttcctgatactagaagtgaggcttatttgcaacaagttcaagatctggtcattttagaaagcataattttgcagactttaggctttgaactaacaa

SEQ ID NO: 280140 - DNA, 120 bp, Artificial Sequence
  ENSG00000129315_4 (sequence is synthesized)
ttgatcacccacatactcatgtagtaaagtgcactcaacttgttcgagcaagcaaggacttagcacagacttcttacttcatggcaaccaacagcctgcatttgaccacatttagcctgc

SEQ ID NO: 280141 - DNA, 120 bp, Artificial Sequence
  ENSG00000129315_5 (sequence is synthesized)
agtacacacctcctgtggtggcctgtgtctgcattcacctggcttgcaagtggtccaattgggagatcccagtctcaactgacgggaagcactggtgggagtatgttgacgccactgtga

SEQ ID NO: 280142 - DNA, 120 bp, Artificial Sequence
  ENSG00000129315_6 (sequence is synthesized)
ccttggaacttttagatgaactgacacatgagtttctacagattttggagaaaactcccaacaggctcaaacgcatttggaattggagggcatgcgaggctgccaagaaaacaaaagcag

SEQ ID NO: 280143 - DNA, 120 bp, Artificial Sequence
  ENSG00000129315_7 (sequence is synthesized)
atgaccgaggaacagatgaaaagacttcagagcagacaatcctcaatatgatttcccagagctcttcagacacaaccattgcaggtttaatgagcatgtcaacttctaccacaagtgcag

SEQ ID NO: 280144 - DNA, 120 bp, Artificial Sequence
  ENSG00000129315_8 (sequence is synthesized)
tgccttccctgccagtctccgaagagtcatccagcaacttaaccagtgtggagatgttgccgggcaagcgttggctgtcctcccaaccttctttcaaactagaacctactcagggtcatc

SEQ ID NO: 280145 - DNA, 120 bp, Artificial Sequence
  ENSG00000129315_9 (sequence is synthesized)
ggactagtgagaatttagcacttacaggagttgatcattccttaccacaggatggttcaaatgcatttatttcccagaagcagaatagtaagagtgtgccatcagctaaagtgtcactga

SEQ ID NO: 280146 - DNA, 120 bp, Artificial Sequence
  ENSG00000129315_10 (sequence is synthesized)
aagaataccgcgcgaagcatgcagaagaattggctgcccagaagaggcaactggagaacatggaagccaatgtgaagtcacaatatgcatatgctgcccagaatctcctttctcatcatg

SEQ ID NO: 280147 - DNA, 120 bp, Artificial Sequence
  ENSG00000129315_11 (sequence is synthesized)
atagccattcttcagtcattctaaaaatgcccatagagggttcagaaaaccccgagcggccttttctggaaaaggctgacaaaacagctctcaaaatgagaatcccagtggcaggtggag

SEQ ID NO: 280148 - DNA, 120 bp, Artificial Sequence
  ENSG00000129315_12 (sequence is synthesized)
ataaagctgcgtcttcaaaaccagaggagataaaaatgcgcataaaagtccatgctgcagctgataagcacaattctgtagaggacagtgttacaaagagccgagagcacaaagaaaagc

SEQ ID NO: 280149 - DNA, 120 bp, Artificial Sequence
  ENSG00000129315_13 (sequence is synthesized)
acaagactcacccatctaatcatcatcatcatcataatcaccactcacacaagcactctcattcccaacttccagttggtactgggaacaaacgtcctggtgatccaaaacatagtagcc

SEQ ID NO: 280150 - DNA, 120 bp, Artificial Sequence
  ENSG00000129315_14 (sequence is synthesized)
agacaagcaacttagcacataaaacctatagcttgtctagttctttttcctcttccagttctactcgtaaaaggggaccctctgaagagactggaggggctgtgtttgatcatccagcca

SEQ ID NO: 280151 - DNA, 120 bp, Artificial Sequence
  ENSG00000129315_15 (sequence is synthesized)
agattgccaagagtactaaatcctcttccctaaatttctccttcccttcacttcctacaatgggtcagatgcctgggcatagctcagacacaagtggcctttccttttcacagcccagct

SEQ ID NO: 280152 - DNA, 120 bp, Artificial Sequence
  ENSG00000129315_16 (sequence is synthesized)
gtaaaactcgtgtccctcattcgaaactggataaagggcccactggggccaatggtcacaacacgacccagacaatagactatcaagacactgtgaatatgcttcactccctgctcagtg

SEQ ID NO: 280153 - DNA, 120 bp, Artificial Sequence
  ENSG00000129315_17 (sequence is synthesized)
cccagggtgttcagcccactcagcccactgcatttgaatttgttcgtccttatagtgactatctgaatcctcggtctggtggaatctcctcgagatctggcaatacagacaaaccccggc

SEQ ID NO: 280154 - DNA, 120 bp, Artificial Sequence
  ENSG00000129315_18 (sequence is synthesized)
caccacctctgccatcagaacctcctccaccacttccaccccttcctaagtaaaaaaagaaaaagaagaggagaaaaaaacttctttaaaaaaacacataatttttcttttttttttttg

SEQ ID NO: 280155 - DNA, 120 bp, Artificial Sequence
  ENSG00000129315_19 (sequence is synthesized)
gactaagaaaattacttatgaaatatgtcatccttggactagggaataaattgatattgagacatagttaggagggtggtagaaggccttggctatatatctgctgtctcatgcatttaa

SEQ ID NO: 280156 - DNA, 120 bp, Artificial Sequence
  ENSG00000129315_20 (sequence is synthesized)
ctattttcttacagtttttactggtattagagaggtgttgaagctgtgaaggattaaggacacattctgaattcttggcctctccaccatctaattaggttgattggagttgatatcttc

SEQ ID NO: 280157 - DNA, 120 bp, Artificial Sequence
  ENSG00000129315_21 (sequence is synthesized)
cctcttcttgccagagctgaaaaatggagggtttcttgtatcagacaattgtggatcctttcggtgtttaatatatcagaagagaggaagtatttaaacgtcaaatcttttaatagactt

SEQ ID NO: 280158 - DNA, 120 bp, Artificial Sequence
  ENSG00000129315_22 (sequence is synthesized)
aataatttaaagaaagtaagttatctgtttagtttttttatataattgggaaggggatagggattttgctgtgtgtatatgatacatagcagtaactcctggtgggtgggattggagggt

SEQ ID NO: 280159 - DNA, 120 bp, Artificial Sequence
  ENSG00000129315_23 (sequence is synthesized)
gggaatgtgtgagggtgggtgggaggctaggtttttggctaggagttctgaaataggctcaggccacttttttcagacttttaagtgtgtatgtaagtgtgggtatgtgtgtttttaagt

SEQ ID NO: 280160 - DNA, 120 bp, Artificial Sequence
  ENSG00000129315_24 (sequence is synthesized)
gtgtgtgtttaaaaataatgttttatcttccctccctgttccttaccgttttcattttccaacagtctactagagaaaaacatggttggccttgagaacataaaggaagaggcatgtatt

SEQ ID NO: 280161 - DNA, 120 bp, Artificial Sequence
  ENSG00000129315_25 (sequence is synthesized)
tgacatggtatttttccctttctttatgttataattgagtagtagccctctaatttgtagtttgggcaagtacagccaacaccctgactcttaaccttattatgagaacttcctttttac

SEQ ID NO: 280162 - DNA, 120 bp, Artificial Sequence
  ENSG00000129315_26 (sequence is synthesized)
ccctttttttgtttttgtgcaaaacagagatggggttgaggaaggagggttggcgagcaaggccagcttctgccctacagaattgggtgtgtcttttttttcaagtgaggctttgggaaa

SEQ ID NO: 280163 - DNA, 120 bp, Artificial Sequence
  ENSG00000129315_27 (sequence is synthesized)
gtgttcaaatgagagcagtcttaaggtctctaagagatggggaatgtgctatgtatatcctgcctgtgaaagcccaaaccatatgggagaagctagaggatactaaaaacaatgaaattg

SEQ ID NO: 280164 - DNA, 120 bp, Artificial Sequence
  ENSG00000129315_28 (sequence is synthesized)
tatccgaagggaaacagctacatcctcaagtttttgcagcctatatgacttgagattggagcttgtgaatttaacagtactggtgccatgagaatgagcaaagcctagccaatggatact

SEQ ID NO: 280165 - DNA, 120 bp, Artificial Sequence
  ENSG00000129315_29 (sequence is synthesized)
attgtgtttagattgttcatctttggtagctttaggttcttgatcgaggttcttaagatttctaagtcctttataaaaataggtcaagagtcctgttgttatggaggcttgattatccca

SEQ ID NO: 280166 - DNA, 120 bp, Artificial Sequence
  ENSG00000129315_30 (sequence is synthesized)
gatattaggagtgaacatttttaataaatctttcagaaaatcttggctagaaagaattctaagttagttgtctaaccactgaaaactacctagccagagatcatttaatgagatattctt

SEQ ID NO: 280167 - DNA, 120 bp, Artificial Sequence
  ENSG00000129315_31 (sequence is synthesized)
tgatcttcattgcattttttttgctctggaaaaggtggttcaatttgagtttgttttcatgatttgattgcagcttacttcatgccaaggattttttagggagaggtcgaattatttttc

SEQ ID NO: 280168 - DNA, 120 bp, Artificial Sequence
  ENSG00000129315_32 (sequence is synthesized)
atttggaagtcatagggagacaggagttgtacttatgctgctacttgccaggaacaggttgggaagaaaattgtggctgttggaattgatgatgtactggcctaatatagaaaggaattt

SEQ ID NO: 280169 - DNA, 120 bp, Artificial Sequence
  ENSG00000129315_33 (sequence is synthesized)
gtaggcaggagtaaacgttaactgacggtgggttagtgccctgcatcttgcatatttgaactgtctagagttcctgccattgctgggtataaaacgaggagctctctgttgacctgtaaa

SEQ ID NO: 280170 - DNA, 120 bp, Artificial Sequence
  ENSG00000129315_34 (sequence is synthesized)
tcattaatacttcttgacttagagtgtcacttcactttatagatgacattttcctctttccccttgatattttctatgttgtgttagataattggtagatatatagttgtggtttagtac

SEQ ID NO: 280171 - DNA, 120 bp, Artificial Sequence
  ENSG00000129315_35 (sequence is synthesized)
atttagggcttctatttatttagattttgtttgttggagtctgtttccaaaagggaatgtgccatttagtctgcatctgtatctttgtggacttgatgatcactggtttgattttgaaaa

SEQ ID NO: 280172 - DNA, 120 bp, Artificial Sequence
  ENSG00000129315_36 (sequence is synthesized)
atgtcttttccagcttttagttactctcatcaaatgtcacatattttctaatcacatgcactcctttaccacagaggcacataatcatttggcctcatagcagttatccatggccgtact

SEQ ID NO: 280173 - DNA, 120 bp, Artificial Sequence
  ENSG00000129315_37 (sequence is synthesized)
gtagtaaagttccttagaactttgccaggagtgaactagaaaaaagtgcttactagggcctaagagttgctttgtgccgtgtagtccggcctttgcactagtagatcattgctgacatag

SEQ ID NO: 280174 - DNA, 120 bp, Artificial Sequence
  ENSG00000129315_38 (sequence is synthesized)
gtcagtttagagacctttctgtgttaatgcctcctggtactgtcttaagatacgtacagtgtctgtttttagatctatgcatatgtcatgaagctccttgtgggctctgcatgaagctgc

SEQ ID NO: 280175 - DNA, 120 bp, Artificial Sequence
  ENSG00000129315_39 (sequence is synthesized)
tgctttgtttttgggttaacagatgtgcctgtcaactagcatgtgtattgtccaaattccataaacttaaggtttttaagggctgtgtggtttctgagctctatgtgtctttcctatcct

SEQ ID NO: 280176 - DNA, 120 bp, Artificial Sequence
  ENSG00000129315_40 (sequence is synthesized)
tgtaccttcaaagggtgagaaatgagatttatacatccaaagttagtctgataaatatggctttttgtttctccatgtaacctagactgtcaaaaataagtgatggtgataagtaggcct

SEQ ID NO: 280177 - DNA, 120 bp, Artificial Sequence
  ENSG00000129315_41 (sequence is synthesized)
ggagcctcagcttctgtaaatctcattcctaaaattttgctagactcgtgttggcaaaaacaaatacctgtggattgtccttaaggcttttaatcagatacctgtgttgctgttagctga

SEQ ID NO: 280178 - DNA, 120 bp, Artificial Sequence
  ENSG00000129315_42 (sequence is synthesized)
actgtagtgaagcatcgatccaaatcggtcttctgaagtatcagttatgcttttgagtttagaaaatacttaggtgttagtctagtcttcccattcatgaatcagtgtatgtccatatca

SEQ ID NO: 280179 - DNA, 120 bp, Artificial Sequence
  ENSG00000129315_43 (sequence is synthesized)
gagagcctcaacttcttttttcttcctttttaaaaatgattttagtgttttgatttagtgtatactacatagttcagtattattggctttaccagtgttgacagaaaaattttaaatctc

SEQ ID NO: 280180 - DNA, 120 bp, Artificial Sequence
  ENSG00000129315_44 (sequence is synthesized)
cagttgcaaacagcaatggattaggatatggaaataaaatcatggtgacatcactgctgagttatcttaaacctctgctacttaattctccatattgaaatgcatactcctccacataca

SEQ ID NO: 280181 - DNA, 120 bp, Artificial Sequence
  ENSG00000129315_45 (sequence is synthesized)
tggcttccaagtaaaggcaattgtagaggggccctgtctatcccagtatggttggattttaaacatatctgtgtttccgttattttgggaactgattaatatttacaattttttttgttt

SEQ ID NO: 280182 - DNA, 120 bp, Artificial Sequence
  ENSG00000129315_46 (sequence is synthesized)
atgagttattttgatactaagaaaagagagaatctagaacatcttgcagttgaaatacaaattttattcttttggtcttgggagaatttaagcagtctatgcaactcatcaaatggtgag

SEQ ID NO: 280183 - DNA, 120 bp, Artificial Sequence
  ENSG00000129315_47 (sequence is synthesized)
aaatagccctccgaggttccagtaagctttcagtgactttgatacctccccaagtttcttgagttgctgcttgttaacacccagcttttaactgagtgtttgctcctgatggtttaggag

SEQ ID NO: 280184 - DNA, 120 bp, Artificial Sequence
  ENSG00000129315_48 (sequence is synthesized)
attttcatgttgtatcacactgtcaagttttattttgtctttttatccctccgtggatgtgagtttgaaacaagcacggtacagtaatcctgcctgatagagtagtctggaatgagaatt

SEQ ID NO: 280185 - DNA, 120 bp, Artificial Sequence
  ENSG00000129315_49 (sequence is synthesized)
actttttgggtgagagagttctccattttaatgtttctaaagtttttcatatgaacttggcattggaaaagggaggtaaagaaaaaggacgtttactaaaagcagtgtctactcttcccc

SEQ ID NO: 280186 - DNA, 120 bp, Artificial Sequence
  ENSG00000129315_50 (sequence is synthesized)
tttgtgagtgtttattcatggctaatgaaaaaaagagaaggactcttgggttttgtgttgccatgttaagcatggagagggatgcttgacagcatgctaattgaagccagagcaagtatg

SEQ ID NO: 280187 - DNA, 120 bp, Artificial Sequence
  ENSG00000129315_51 (sequence is synthesized)
tccttcatcaggtaatcaggaactcttcagttgaagctgaggaactaactgattagttgttgatcataatataattggttacaaagtggaagtgccagctggcttaagtacccaaagaaa

SEQ ID NO: 280188 - DNA, 120 bp, Artificial Sequence
  ENSG00000129315_52 (sequence is synthesized)
agaatgcagcagcctaacttagtgttaccatatgttactgaatttgaaactgaccttttttcccaccctacttcacacacctaaaactcttttcttgtcagaccaaagagcgaaaagaaa

SEQ ID NO: 280189 - DNA, 120 bp, Artificial Sequence
  ENSG00000129315_53 (sequence is synthesized)
aaaaaaagtaaaacactttaccaatctgtcactcaggtacaattttgtggtgagatttttgtctgttctctttgtattgctcttaagagtcctttctcagcatattattctgccattgcc

SEQ ID NO: 280190 - DNA, 120 bp, Artificial Sequence
  ENSG00000129315_54 (sequence is synthesized)
tctgtcttccttggggcacctcagctctggatgctacccctgggatatctactgctgttatgtgaatgataggaggtaagtgaccattatagtaagggctctttgtaaaaaaattcaaaa

SEQ ID NO: 280191 - DNA, 120 bp, Artificial Sequence
  ENSG00000129315_55 (sequence is synthesized)
aatttaaaaaggatgtatacattttatagtctggctatcagtttgatatcttgctgtcaagtatgtttctcaatctgtatttatccatcccatcaataaatgttaatggtaaaacactca

SEQ ID NO: 280192 - DNA, 120 bp, Artificial Sequence
  ENSG00000129315_56 (sequence is synthesized)
ttttcttaatttttttcctttctttttttttccctactcccaagcatgcctggatctttatgtatttcaatgcaacttaattttataacttcgatttattgaagtttagattggtgttgt

SEQ ID NO: 280193 - DNA, 120 bp, Artificial Sequence
  ENSG00000129315_57 (sequence is synthesized)
gggaagatacacggtttttaagaaagaacttctaaccccactccaccgcccaacggtcacgtgacgcgcctgcgtcctcgcctcaaggttttttctggtcgcatattggctgttaactcg

SEQ ID NO: 280194 - DNA, 120 bp, Artificial Sequence
  ENSG00000129315_58 (sequence is synthesized)
gctacggggtgtagcgaggtgcattccggaagtaggtcctttgacttttgcttcctctacggaggcaagtaacaacccggcggtcgacgcttagcggaagttcgtcaagtcgcagttgcc

SEQ ID NO: 280195 - DNA, 120 bp, Artificial Sequence
  ENSG00000129315_59 (sequence is synthesized)
cttgaaaagcacttgctgttgatctgtcacatagctggccaaaggtgacttgattcagatgaaaatagttagttagtagttcaggttattcttgtttcattacttctgtttctctcagtc

SEQ ID NO: 280196 - DNA, 120 bp, Artificial Sequence
  ENSG00000129317_0 (sequence is synthesized)
aattacgcccctgtcggaggctgaaacacttaaggcttccgggcatgcgcacagcgttgtgcaaatgaatgccttccactgaaccgaggcactgttatagaagaatggaagaagatacag

SEQ ID NO: 280197 - DNA, 120 bp, Artificial Sequence
  ENSG00000129317_1 (sequence is synthesized)
attatagaatcaggtttagttctttgtgtttctttaatgatcacgttggatttcatggcactataaaaagctcaccaagtgactttattgttattgaaattgatgaacagggacagttag

SEQ ID NO: 280198 - DNA, 120 bp, Artificial Sequence
  ENSG00000129317_2 (sequence is synthesized)
ttaataagaccatcgatgagcctattttcaagattagtgaaatacaacttgagccaaataattttcccaaaaaaccaaaactagatcttcaaaatctgtccttagaagatggaagaaacc

SEQ ID NO: 280199 - DNA, 120 bp, Artificial Sequence
  ENSG00000129317_3 (sequence is synthesized)
aagaagttcatactttgattaagtacactgatggtgaccaaaatcatcagtctggttcagaaaaggaagatactatcgttgatggaacttccaaatgtgaagaaaaagctgatgttttaa

SEQ ID NO: 280200 - DNA, 120 bp, Artificial Sequence
  ENSG00000129317_4 (sequence is synthesized)
gctcctttttggatgaaaaaactcatgagttactgaataattttgcctgtgatgtaagagagaagtggctttctaaaacagagctaattggactacctcctgaattctcaataggcagaa

SEQ ID NO: 280201 - DNA, 120 bp, Artificial Sequence
  ENSG00000129317_5 (sequence is synthesized)
tccttgacaaaaaccagagggctagtttacacagtgccattaggcagaaatttccatttttagtaactgtaggaaaaaacagtgaaattgttgtaaaaccaaatcttgaatataaagaac

SEQ ID NO: 280202 - DNA, 120 bp, Artificial Sequence
  ENSG00000129317_6 (sequence is synthesized)
tttgtcatttggtatctgaagaggaagcatttgacttttttaaatatttggatgcaaagaaagaaaattccaaatttacctttaaacctgatacaaacaaagaccacagaaaagctgtcc

SEQ ID NO: 280203 - DNA, 120 bp, Artificial Sequence
  ENSG00000129317_7 (sequence is synthesized)
accattttgtcaacaaaaagtttggaaaccttgtggaaaccaaatctttttctaaaatgaattgcagtgctggtaatccgaatgtggtggtaacagtaagatttcgggaaaaagcacaca

SEQ ID NO: 280204 - DNA, 120 bp, Artificial Sequence
  ENSG00000129317_8 (sequence is synthesized)
aacgtgggaaaaggcctctttctgaatgccaagaaggaaaagttatatatacagcttttaccctacgaaaggaaaacctggaaatgtttgaagcgattggttttttagctatcaaacttg

SEQ ID NO: 280205 - DNA, 120 bp, Artificial Sequence
  ENSG00000129317_9 (sequence is synthesized)
gtgttattccttcggattttagttatgcaggccttaaagacaagaaagccatcacctatcaagcaatggttgttagaaaagtgactccagagaggttgaaaaatattgaaaaagaaattg

SEQ ID NO: 280206 - DNA, 120 bp, Artificial Sequence
  ENSG00000129317_10 (sequence is synthesized)
aaaagaaaagaatgaatgtctttaatattcggtctgtagatgattccctgagacttggtcagctcaaaggaaatcactttgatattgtcattagaaatttaaaaaaacaaataaatgatt

SEQ ID NO: 280207 - DNA, 120 bp, Artificial Sequence
  ENSG00000129317_11 (sequence is synthesized)
ctgcaaacctgagggagagaattatggaagcaatagaaaatgttaagaaaaaaggctttgtgaattactatggaccacagagatttgggaagggaaggaaagttcacacagaccaaattg

SEQ ID NO: 280208 - DNA, 120 bp, Artificial Sequence
  ENSG00000129317_12 (sequence is synthesized)
gactagctttgctgaagaatgaaatgatgaaagccataaaattgtttcttacaccagaagacttggatgatcctgtaaatagagcaaagaagtattttcttcaaactgaggatgctaaag

SEQ ID NO: 280209 - DNA, 120 bp, Artificial Sequence
  ENSG00000129317_13 (sequence is synthesized)
gcacactttcattgatgcctgaattcaaagtgcgtgagagagcattgttggaggcattgcaccgctttggcatgaccgaggaaggttgtatccaggcatggttctctttaccccattcca

SEQ ID NO: 280210 - DNA, 120 bp, Artificial Sequence
  ENSG00000129317_14 (sequence is synthesized)
tgcgcatattctatgttcacgcatataccagcaaaatttggaatgaggcagtatcttacagacttgaaacctatggagcaagagtagtgcagggtgatttggtctgtttggatgaagaca

SEQ ID NO: 280211 - DNA, 120 bp, Artificial Sequence
  ENSG00000129317_15 (sequence is synthesized)
ttgatgacgagaatttcccaaatagtaaaattcacctggtaactgaagaggagggatcagctaatatgtatgcaatacatcaggtggttcttccagtacttggatacaatattcagtacc

SEQ ID NO: 280212 - DNA, 120 bp, Artificial Sequence
  ENSG00000129317_16 (sequence is synthesized)
cgaagaacaaagtagggcagtggtaccatgacatacttagcagagatggactacagacatgtaggtttaaagtacctactctgaaactgaatataccaggttgctatagacagattttga

SEQ ID NO: 280213 - DNA, 120 bp, Artificial Sequence
  ENSG00000129317_17 (sequence is synthesized)
aacatccctgtaatctctcataccaactaatggaagatcatgacattgatgtcaaaacgaaaggttcccacattgatgaaacagctttgtctcttttgatctcttttgatcttgatgctt

SEQ ID NO: 280214 - DNA, 120 bp, Artificial Sequence
  ENSG00000129317_18 (sequence is synthesized)
catgctatgctaccgtttgtctgaaggaaataatgaagcatgacgtttaaaactgatacccttggtataaccatatatatgtcactctttgaaggaaagggggctaaaatgtcttaagca

SEQ ID NO: 280215 - DNA, 120 bp, Artificial Sequence
  ENSG00000129317_19 (sequence is synthesized)
ccttccatgtgttaggaacttcataattgttatctcttttaattttcacagcatcctgagaagttaggatttgatactgtaattttatagaggatatgtaagtgtcagggtccaaattta

SEQ ID NO: 280216 - DNA, 120 bp, Artificial Sequence
  ENSG00000129317_20 (sequence is synthesized)
aggtccatgtgaccccaaagcctgtgttttttttctattatatgtttcagtgacctttattctgtgtcataaagttacaatcttttaaaaccattaggaatatatataatactgcaagat

SEQ ID NO: 280217 - DNA, 120 bp, Artificial Sequence
  ENSG00000129317_21 (sequence is synthesized)
aacatttaagaaaaaaagttgtgaatattcatatcctccagctccttgcttagaacactagtaaaattaggtcgcagtgaagcaaatgttggagagaaagatagatgaagcattttgcta

SEQ ID NO: 280218 - DNA, 120 bp, Artificial Sequence
  ENSG00000129317_22 (sequence is synthesized)
attattattgtccccctttcctgtttttgaaattattgatcagaacaatatacaagggaaatgccatacctctgtttgtgatagataccccagagtagttattacctctttgtgagataa

SEQ ID NO: 280219 - DNA, 120 bp, Artificial Sequence
  ENSG00000129317_23 (sequence is synthesized)
gtaatctttgatgaagattgaaatacaatttctcatccaatttttatatcttggcatacgctgaccctcttgaccatttgtaattttttcatattatctaaaacaggtgttagagtcaga

SEQ ID NO: 280220 - DNA, 120 bp, Artificial Sequence
  ENSG00000129317_24 (sequence is synthesized)
cagattcattcttagattctagctctgacacttactagtgattttgagtatgttgttgatttttttgtgtgtggttactgatagaatcaagacaattacaacttcataaatgacaaataa

SEQ ID NO: 280221 - DNA, 120 bp, Artificial Sequence
  ENSG00000129317_25 (sequence is synthesized)
taggattatctccacattttctgttgctggaggaacaaaacattgtgcccatttgaaaattttaatttttgttggtttaactatcccacattataaatcatccttcaccattttatatca

SEQ ID NO: 280222 - DNA, 120 bp, Artificial Sequence
  ENSG00000129317_26 (sequence is synthesized)
gttaaatatgggtgtgttggggaggaatgactggcatgtagacatgtattgatttaggaagatctgagcatttctttcattgttggtaagatataatgatgaaatttaaaaagcagtatg

SEQ ID NO: 280223 - DNA, 120 bp, Artificial Sequence
  ENSG00000129317_27 (sequence is synthesized)
gagcattatatatcagtaatgtgatatatatacttaagccagtttaaccattttgggaaatgttagcattaggaaataaaatccaaaagaaggaagagaagctatatgcaatgcaaaatt

SEQ ID NO: 280224 - DNA, 120 bp, Artificial Sequence
  ENSG00000129317_28 (sequence is synthesized)
tgcttattgcaatattttcatatacagacactaaaaacagttttcaaagtccagcattacgtaactaaagtaagtaaaatgatgtgtatcaacttgatggtaaaatatgtagttatttaa

SEQ ID NO: 280225 - DNA, 120 bp, Artificial Sequence
  ENSG00000129317_29 (sequence is synthesized)
aaaagcaatgaacaatttagtttcatgagaaaatgttgccccctaaaagtagaacacatatgttacaactgcaataatactctgaattcatctttcacaaataagagacatgttagcata

SEQ ID NO: 280226 - DNA, 120 bp, Artificial Sequence
  ENSG00000129317_30 (sequence is synthesized)
gtgattaaaagcacagatattggagacaaactaacccagtttgaaccctggcactgccacgtatagcactgcagccttgggaaagttatttaaactcatgggcttcagtttcaacatctg

SEQ ID NO: 280227 - DNA, 120 bp, Artificial Sequence
  ENSG00000129317_31 (sequence is synthesized)
taaaatgggcatgttaacattgcctacctcataggattactgtgagaattttctaagttaatatatgtaaagcaactttaaaaagtgcctggcacttagttattgttaagtaagtgtctg

SEQ ID NO: 280228 - DNA, 120 bp, Artificial Sequence
  ENSG00000129317_32 (sequence is synthesized)
cagatgcaagtttggaagagaaaagcaaataaatgaaaatcccttcctgttaagatgatggggtatttggattttttttaatactaaaaagttttttttgttatatgttttggcaataaa

SEQ ID NO: 280229 - DNA, 120 bp, Artificial Sequence
  ENSG00000129317_33 (sequence is synthesized)
taattctcaatacacaaaattggatattgtagtaccattgattttctttggattactgccatcattttaatgttatattgagaatgaagtgatcctctattaggtagtaaaaaaaattta

SEQ ID NO: 280230 - DNA, 120 bp, Artificial Sequence
  ENSG00000129317_34 (sequence is synthesized)
tcgtatcctataaatgtaatcataaaatgagttatatacattattaaatcctagtttttaaaagttttgaatagcaatcagaaaatacgaaagcatgaaaatatatcattgattttactt

SEQ ID NO: 280231 - DNA, 120 bp, Artificial Sequence
  ENSG00000129317_35 (sequence is synthesized)
gcatgaaaatatatcattgattttactttttttgcctgcagatggcactataattttagacatttattgatttatttagtaaatacttcagcagtgtataaaggaacactaagtttattt

SEQ ID NO: 280232 - DNA, 120 bp, Artificial Sequence
  ENSG00000129317_36 (sequence is synthesized)
catcaccataaaatgtattgagatatcattcatgtggaatattattttatatgccaataagatgccatgttaaactttttttgtttaaggacttttattattaatagtatgctttggacc

SEQ ID NO: 280233 - DNA, 120 bp, Artificial Sequence
  ENSG00000129317_37 (sequence is synthesized)
aactgatgactagtcacttaggtttttgcagttttgctggggcatttcagaccttcataagcatgatctttggattagttttttttttttcttcacctcattattaggagttaatttatt

SEQ ID NO: 280234 - DNA, 120 bp, Artificial Sequence
  ENSG00000129317_38 (sequence is synthesized)
tttaaagtgtcatcttaaactgcaaggatgtcctttaaacatcacatgccaattaaacatgccgaaggagaagctgtgtcatcaaaatgcccacttaacctacccaaacatctcaaacct

SEQ ID NO: 280235 - DNA, 120 bp, Artificial Sequence
  ENSG00000129317_39 (sequence is synthesized)
catctcaaacctaccctttgctgaccttctatagccccatttccaaagttttgctttatttttattttttcttccaacttttattttaggtttaggggtacatgtgcaggtttgttacat

SEQ ID NO: 280236 - DNA, 120 bp, Artificial Sequence
  ENSG00000129317_40 (sequence is synthesized)
ttttgtgggagttctgcatacaaattatttaatcacccagataatgagcatagtacctgataggttgtttttctatcctcatctttctcccaccctccaccctcaagtaggccatggtgc

SEQ ID NO: 280237 - DNA, 120 bp, Artificial Sequence
  ENSG00000129317_41 (sequence is synthesized)
ccaccctcaagtaggccatggtgcctattgttcccttcttagagtccaagtgtactcaaagttcagctcccacttatgagtaagaacatttggtatttggttttctgttcctgcattaat

SEQ ID NO: 280238 - DNA, 120 bp, Artificial Sequence
  ENSG00000129317_42 (sequence is synthesized)
tacatccatgttgctggaaagacattattttgttcttttttatgactgtgtagtattatctggtatacatgtactacattttctttatccagtccactgtaatgggcatctaggttggtt

SEQ ID NO: 280239 - DNA, 89 bp, Artificial Sequence
  ENSG00000129317_43 (sequence is synthesized)
ttctttatccagtccactgtaatgggcatctaggttggttccatgtctttgctattgtcaatagtgctgtaatgaacataggcgtgcat

SEQ ID NO: 280240 - DNA, 120 bp, Artificial Sequence
  ENSG00000129317_44 (sequence is synthesized)
gagaaatcttcaaactgctttccacagaggctgaactaatttatattcccatcagcagtgtatagcattcccttttctctgcagcctccccaacatctgttattttttgactttttaata

SEQ ID NO: 280241 - DNA, 120 bp, Artificial Sequence
  ENSG00000129317_45 (sequence is synthesized)
ttgagaagtgtctgttcatgtcctttcttccgtttttaatgggataattttttgcttgttaagttcttcatagattctggatatcagacctttgttcatgcatactttgaaaatattctc

SEQ ID NO: 280242 - DNA, 120 bp, Artificial Sequence
  ENSG00000129317_46 (sequence is synthesized)
cctttgttcatgcatactttgaaaatattctctcccattctgtagattgtcagtttactctgttgatagtttctttggctgtgcagaagctatttagtttaattaggtcccacttgtcaa

SEQ ID NO: 280243 - DNA, 73 bp, Artificial Sequence
  ENSG00000129317_47 (sequence is synthesized)
cattctcctgccccagcctctcaagtagctgggattacaagtggccaccaccacacctggctaatttttgtat

SEQ ID NO: 280244 - DNA, 120 bp, Artificial Sequence
  ENSG00000129317_48 (sequence is synthesized)
aggcatgagccaccatgcccagccttcacttgtcaattattggctttgttccagttgcttttggagtctgtcatgatatctttgttaggtcttttgtccagaatgatatttcctaggttt

SEQ ID NO: 280245 - DNA, 120 bp, Artificial Sequence
  ENSG00000129317_49 (sequence is synthesized)
ggtttttatagttttaggttttacatttacattgttaacccatcttgagttgatttttgtatatggtaaaaagaaggggtccagtttcaatcctcaggatgtggctaaccagttatccca

SEQ ID NO: 280246 - DNA, 120 bp, Artificial Sequence
  ENSG00000129317_50 (sequence is synthesized)
ggatgtggctaaccagttatcccagcaccatttattaaatagggagtcctttccctgttgcttgttattgttgactttaacaaaaatcaagtagctgtaggtgtgtggcctttatttctg

SEQ ID NO: 280247 - DNA, 79 bp, Artificial Sequence
  ENSG00000129317_51 (sequence is synthesized)
ttagtttgatgtcaggttgtgtgatgcctccctcattgctatatttgaattagttttaattgccaaggttgtttgacgc

SEQ ID NO: 280248 - DNA, 120 bp, Artificial Sequence
  ENSG00000129317_52 (sequence is synthesized)
tatatttgaattagttttaattgccaaggttgtttgacgctgagctagcagtagtgcctgggagtcggttaggtgaaacaaattgaggtcttttactaatattaaaattaaaacaccttg

SEQ ID NO: 280249 - DNA, 120 bp, Artificial Sequence
  ENSG00000129317_53 (sequence is synthesized)
attttttttttgtgagctgtaaaaaactgaaagtcatgtaacttttgatttaactaacattttctgagtatctattatgtcagtatctcacactttaatccatattcccaccctgtgtgg

SEQ ID NO: 280250 - DNA, 120 bp, Artificial Sequence
  ENSG00000129317_54 (sequence is synthesized)
catacctgagtagtttactaacctaatcaaggtcaaacaaaatagcgtgtggttgagcttgattatgcttcttaaatcagtactgttttcatctacctaacatttgccttctgagaacaa

SEQ ID NO: 280251 - DNA, 74 bp, Artificial Sequence
  ENSG00000129317_55 (sequence is synthesized)
tactgttttcatctacctaacatttgccttctgagaacaagtttttggatattaacttccatgaggccaagacg

SEQ ID NO: 280252 - DNA, 120 bp, Artificial Sequence
  ENSG00000129317_56 (sequence is synthesized)
cctaggtgacagagcgaggctccacctcaaaaaaaaaaaaaaactaaactaaaaattaaaatataacttccatttctaccaacttgatataacttgccattgatttaataggcatattgg

SEQ ID NO: 280253 - DNA, 120 bp, Artificial Sequence
  ENSG00000129317_57 (sequence is synthesized)
ggcatgtcttgggagagacaagataccttttgattctgagaccaaaatataaagtaaaggggatcccttcaggaaatccccaaatcattttggagttttcccaaagtattttgggatttg

SEQ ID NO: 280254 - DNA, 120 bp, Artificial Sequence
  ENSG00000129317_58 (sequence is synthesized)
tatcataataatatgtaaaatcattatagatcataggaggtgttttagatggtacctggcacaaatatcattgaaaaagcatagtgagaaacttgttctttttcaatatactttcagtcc

SEQ ID NO: 280255 - DNA, 120 bp, Artificial Sequence
  ENSG00000129317_59 (sequence is synthesized)
tcacatcaatcattctgtttaaggaaggagaaagctgattgatactatttacatatatcaacattggctgatttacctttttagccaactatgcaggcctcaggctcagaaacatcagca

SEQ ID NO: 280256 - DNA, 120 bp, Artificial Sequence
  ENSG00000129317_60 (sequence is synthesized)
gtcaacaatataatatgtagctagaatgtaataggattgcattgttttattgaatttatcttcccttttatttatggtaatcaattctggcttcctgtttatgtgatggtattatgtttc

SEQ ID NO: 280257 - DNA, 120 bp, Artificial Sequence
  ENSG00000129317_61 (sequence is synthesized)
tttcctttaaaactaaatttaattttaaagaggtagaatcaatttaaaggtattaaataaataatagtatagacatagcagtaattatgataccaatacatgaaggattagagtatggga

SEQ ID NO: 280258 - DNA, 120 bp, Artificial Sequence
  ENSG00000129317_62 (sequence is synthesized)
tactggtacagttgagaatccctgaaatcagagatgggctctaccactgctttaatatgcgactttagtaacccactgattctgttgtagaattcttggacttgaagtactgttagttat

SEQ ID NO: 280259 - DNA, 120 bp, Artificial Sequence
  ENSG00000129317_63 (sequence is synthesized)
catttttcagtccaggatagtattgcatcaaacaaaattatgaaatatatacaaatttgagacattatgagcagaggcattgatgaccacatgctatatcttaaaattttactgatagtt

SEQ ID NO: 280260 - DNA, 120 bp, Artificial Sequence
  ENSG00000129317_64 (sequence is synthesized)
gattttagcaagtcttatgaaacactaagaacaatgtctggtgcctagcaaattctcagtaaatttcagctagtattattacagttagtattactttactatgctccctgataaaatttt

SEQ ID NO: 280261 - DNA, 120 bp, Artificial Sequence
  ENSG00000129317_65 (sequence is synthesized)
tataataaaatggttaatgactttccattgaggtctgatctgacttagttttagcataaagtaattacaattcatatttttagaggtttttttttttgtagtagtagaaacaactatttc

SEQ ID NO: 280262 - DNA, 120 bp, Artificial Sequence
  ENSG00000129317_66 (sequence is synthesized)
taaatctggggattcagtagttcattcaaattaggatctttaagagctgtctaggtcaatgttccttaacgttttctacctgggagtaatctttaagagaacaaaaagaaaatgaaactc

SEQ ID NO: 280263 - DNA, 120 bp, Artificial Sequence
  ENSG00000129317_67 (sequence is synthesized)
tatataatttaatgcaaagtcttttacattaatgtaagggtaggaaaagaggttggaggaagatatggggaggtaggaaaatgggacttttttcctccatttacttttgatgtttgaatt

SEQ ID NO: 280264 - DNA, 120 bp, Artificial Sequence
  ENSG00000129317_68 (sequence is synthesized)
tcaaacatgagtatatttgtgtattattttgcggttaaaaacactgaagattgcataaagatcaaagagggaaatttaagggaattaatgggttatgattgcatttgttcagaatggttt

SEQ ID NO: 280265 - DNA, 120 bp, Artificial Sequence
  ENSG00000129317_69 (sequence is synthesized)
tggtggctcatgacaacattttgagagagagagattttaatggcaccaatggcagctaggataactagtttaaagtttagggcctgtgttaatagattttgctttctagtttcagaaaga

SEQ ID NO: 280266 - DNA, 120 bp, Artificial Sequence
  ENSG00000129317_70 (sequence is synthesized)
ttctcttatagtactgttttaatctgtttttctaagccctctgatttatgtatatttaataggccacaaaataatgtcaaatatatggcataataaccaacaaatatttgaataagtgaa

SEQ ID NO: 280267 - DNA, 120 bp, Artificial Sequence
  ENSG00000129317_71 (sequence is synthesized)
aggtactctacaaaatgctatgggaaagacaaaaataaataatatccctttctttgagggattaacagtgttaatatcccttgttttcatttgatttgaaatgccacttgcaagtggaat

SEQ ID NO: 280268 - DNA, 120 bp, Artificial Sequence
  ENSG00000129317_72 (sequence is synthesized)
atgcagactaaatggtaaagagaaaaacaagcagcatcttttcatttcacttacagctcactgtatgaccaataatatgttacttgacctctcagcactccattctaaatccttaaatga

SEQ ID NO: 280269 - DNA, 120 bp, Artificial Sequence
  ENSG00000129317_73 (sequence is synthesized)
tacttatttagcatttctaagcatcttgagatctcctcttaaaatatgctttgaactattcagtctaaatgctgctttctaaaaagctactagtttaaagaatgggaaatggtgttaatg

SEQ ID NO: 280270 - DNA, 120 bp, Artificial Sequence
  ENSG00000129317_74 (sequence is synthesized)
gagttaatcttgtgtaatttcagtgtgggttgtcaagaatacctctaagtaaagaaaatgactctaatcttcttaagcaattcattttctcagcaactttgaggcaggagttaatttact

SEQ ID NO: 280271 - DNA, 120 bp, Artificial Sequence
  ENSG00000129317_75 (sequence is synthesized)
ctgcctgtgtacataggccatctcttacaaaagaaaaattttactatggaaagaagtcagaatagccatgaaattatttaaatttagtctttagaacatattacaaaatataagatatat

SEQ ID NO: 280272 - DNA, 120 bp, Artificial Sequence
  ENSG00000129317_76 (sequence is synthesized)
taaattgtcttttttgttagaaactcaactaccaatgtagaaataaaactcctgttgcaaggatggagtttagccatggagtcaaaacaagagctatttggttattttaaaagagaagag

SEQ ID NO: 280273 - DNA, 120 bp, Artificial Sequence
  ENSG00000129317_77 (sequence is synthesized)
atcaaagagctggtcactccttaactaagggtgtttgggcagcaggatagggtgaagagtggagggggttgaactcaattctttatgcttttataccaagcctcccttttctaataagcc

SEQ ID NO: 280274 - DNA, 120 bp, Artificial Sequence
  ENSG00000129317_78 (sequence is synthesized)
ttactggcatttccttagactagttaagtcaggattctgagtttttcagtacaatagggttttaatctgagctgatcattgtttccaatgcctcccctgtggcaggggaacataaaggac

SEQ ID NO: 280275 - DNA, 120 bp, Artificial Sequence
  ENSG00000129317_79 (sequence is synthesized)
tagtgttcttttctaaaaagggaagatggatattttttctataacctttataattccattataataaaatgaatgataggttataataaaatgaattttttgcatatgattttcaaaagg

SEQ ID NO: 280276 - DNA, 120 bp, Artificial Sequence
  ENSG00000129317_80 (sequence is synthesized)
aaactaatttatttttctataaaatatcgcaaaggaatcgaatacatttttattctatgtaaataataatataattttcacatttaggaggcaatagcaaatctgggaagcagttattct

SEQ ID NO: 280277 - DNA, 120 bp, Artificial Sequence
  ENSG00000129317_81 (sequence is synthesized)
aagttggaagagcattatcccaatgcattgaaaacatttgatgactattttttatgtcttctttattttgatgattataataatgttctaactgggtggccttcgtttttcactctagtc

SEQ ID NO: 280278 - DNA, 120 bp, Artificial Sequence
  ENSG00000129317_82 (sequence is synthesized)
agtccatcttgtttactatgtcaattgttctccaaaaagtagaaatgtcattgttttggggccatagaacatttcagaagctttccagtatctatgcagtaacagtccaaacccctcaac

SEQ ID NO: 280279 - DNA, 120 bp, Artificial Sequence
  ENSG00000129317_83 (sequence is synthesized)
ataacacatttacacctgcaagtatggccccaaatcttcaagtggcttctgtcactactccatagtacataccctttgttacagctgtttcacaaatacaggttgaatatcccttatcta

SEQ ID NO: 280280 - DNA, 120 bp, Artificial Sequence
  ENSG00000129317_84 (sequence is synthesized)
aaatgtttgggactaaaagtttcagatttcagatatgtttggattttggaatatttgtacatgtataatgagatactcttagagttgggacccaagtctaaacaaaattcatttatgttt

SEQ ID NO: 280281 - DNA, 120 bp, Artificial Sequence
  ENSG00000129317_85 (sequence is synthesized)
catatataccttatacacataacctgaaggtaatttatttttcccttgggaacactgaatagactatatgttgtgcacctacattttgactgtgacctatcacatgaagtcaggtgtgga

SEQ ID NO: 280282 - DNA, 120 bp, Artificial Sequence
  ENSG00000129317_86 (sequence is synthesized)
attttccatttgtggcatcatgtcagtactcaaaaagttttggattttggattttgaattttcagattagagatgctcagcctaatagcaaatgttcccatgttatacacctcaacctcc

SEQ ID NO: 280283 - DNA, 120 bp, Artificial Sequence
  ENSG00000129317_87 (sequence is synthesized)
cattcccattggctggaacatctctgcttatattaaatgtcttttatgtgaaatctgtgttctcatagccttttgtatagttctctaccatctcatggctcacattgtattgtacttatt

SEQ ID NO: 280284 - DNA, 120 bp, Artificial Sequence
  ENSG00000129317_88 (sequence is synthesized)
tgattaaatatctggatcatctactgtgaattattcaagagcattgatctttatacctctggcacctatcagtgcctgacatataacagggttaaaaatgctgagtgaatactgcaaata

SEQ ID NO: 280285 - DNA, 120 bp, Artificial Sequence
  ENSG00000129317_89 (sequence is synthesized)
taccttagcaaatttatttgctgaatacacatctcaagaaagttctgaaatagttatttcccctcatagaaagtttagagtattaaaattgggtatctttataatgctttttcttttgta

SEQ ID NO: 280286 - DNA, 120 bp, Artificial Sequence
  ENSG00000129317_90 (sequence is synthesized)
atactttcatctttgccttttattgaaatattaaatgcattgtagaatttgatttaaaatttagaacaagctgtcaggtatgataactagtctcatttaacaaatgaggattccagggct

SEQ ID NO: 280287 - DNA, 120 bp, Artificial Sequence
  ENSG00000129317_91 (sequence is synthesized)
tgaagaagttaagtagcttcctctagattgtaaagagagtctaacctggccctttttggttttaagggcatgatgataaccacttgctctactgatttctaatggaaagtgcttcagttt

SEQ ID NO: 280288 - DNA, 120 bp, Artificial Sequence
  ENSG00000129317_92 (sequence is synthesized)
tccactttgcctagctagtgattatttaatatctgcttatctctgaatttatctgcatatttctaaaactttatgacattaaggaaagttggggaaaattcactttaagtgttgtaatga

SEQ ID NO: 280289 - DNA, 120 bp, Artificial Sequence
  ENSG00000129317_93 (sequence is synthesized)
caatagctatcaatcattgagtactgtgtactaagcattttatattttatcaacaagtacttacatgtgggataagtactgttattattttcattttatagatgaggacacatatagaat

SEQ ID NO: 280290 - DNA, 120 bp, Artificial Sequence
  ENSG00000129317_94 (sequence is synthesized)
gcagttaggaaactagagaaagagaaaacatggagaattatctggaactaataagacagtaaagtacagatttaagaagttcagtgaatcccaagcagtgtaaattaaaaaactacattg

SEQ ID NO: 280291 - DNA, 120 bp, Artificial Sequence
  ENSG00000129317_95 (sequence is synthesized)
agatacatcatagtgaatatgcaaaacatcaataataaaaagaaaaaccttaaaggcagctttaacagtatactgaatgaccaatatactcagcagccacagaacctctattcttttaaa

SEQ ID NO: 280292 - DNA, 120 bp, Artificial Sequence
  ENSG00000129317_96 (sequence is synthesized)
gcatccatgggacatttatagaaattgactatgcactggactataagcatatgcaataaaatttcaaatgactgaaaccatatgagtatattcttttgccacaacacaattaggctagaa

SEQ ID NO: 280293 - DNA, 120 bp, Artificial Sequence
  ENSG00000129317_97 (sequence is synthesized)
atgaacaacaaaaagataacaggaaaatctctatatatcagaaattaagagatgcacttatttattttttgttttttgtgatggagtctcactctatcacccgtgcagtggcacgatctt

SEQ ID NO: 280294 - DNA, 86 bp, Artificial Sequence
  ENSG00000129317_98 (sequence is synthesized)
acctcaaatgatctgccaaagagatacacttctaagtaatctatatgtcaagtaagacaaaatgaaattagaaaatatttttaagt

SEQ ID NO: 280295 - DNA, 120 bp, Artificial Sequence
  ENSG00000129317_99 (sequence is synthesized)
gtcaagtaagacaaaatgaaattagaaaatatttttaagtcaatgatattaaaccatactacacatcaaaacttgtgggatgcacttaaagcagcatgtagagggagattatattcataa

SEQ ID NO: 280296 - DNA, 120 bp, Artificial Sequence
  ENSG00000129317_100 (sequence is synthesized)
atgcttatggtagaaaagaaggaagtctgtacattatgtagctatgcacccatctaaagaagttaggaaaatgacatcaagtagaacatcaaaagaaagaaggaaaggataacttaaaac

SEQ ID NO: 280297 - DNA, 120 bp, Artificial Sequence
  ENSG00000129317_101 (sequence is synthesized)
agaaatgaatgaaataaaaccagaatagaagagacgatctacaaatccaaaagttggtttgttgaaaatactagtagagctgacatacttgtggtgagactgatggaaataatgcagtta

SEQ ID NO: 280298 - DNA, 120 bp, Artificial Sequence
  ENSG00000129317_102 (sequence is synthesized)
caactaaccaatatcataattggaaaggaaatcactataggtgctgtaaaaattaaaaagataatagaatattatgaacaattttctgccaatattattgaaagtttagataaaatggaa

SEQ ID NO: 280299 - DNA, 120 bp, Artificial Sequence
  ENSG00000129317_103 (sequence is synthesized)
aattcatttaaaaatataatttgacagtattatgttatgtgaatactataatgataatcctgtaatcattaaatgaaccagtagtttaaaatttttccatatagggaaggtcagggccag

SEQ ID NO: 280300 - DNA, 120 bp, Artificial Sequence
  ENSG00000129317_104 (sequence is synthesized)
atgtgttcaatggttggttctactagacattcaaaaaaataataattcaagtctacacaaactttcctgagattagaaaaaataaagaagagtccccccacctgtttcttactttatgag

SEQ ID NO: 280301 - DNA, 120 bp, Artificial Sequence
  ENSG00000129317_105 (sequence is synthesized)
accacacctaaaagatagaagactgctttgcaaccaagaaatccttcatgaacacctctttaatcacaagtcctcaactccaaggttagctttatttcaacttttataatacttttctta

SEQ ID NO: 280302 - DNA, 120 bp, Artificial Sequence
  ENSG00000129317_106 (sequence is synthesized)
cttttcttgatagctttaccacccatgtattcattcctaaaaaatacacagttttgtctgattttgaattttatgtgaatggaattgtacatatctgtgtttgtgtcttccttgttttac

SEQ ID NO: 280303 - DNA, 120 bp, Artificial Sequence
  ENSG00000129317_107 (sequence is synthesized)
tcaatactgtttctgagatcaatcacattatttgttaatattttgtttaggatttttgcatctctatttcagtgtgtgtttggaatgtaaatttccattctcagactatcttttggcctg

SEQ ID NO: 280304 - DNA, 120 bp, Artificial Sequence
  ENSG00000129317_108 (sequence is synthesized)
ttggcctgaatttggttacatgagtatatgttctaaaaatattacttacactttcaataaattttaaggacttttatattgttatgtatcaaattttttagaatgcaagaataaatatta

SEQ ID NO: 280305 - DNA, 120 bp, Artificial Sequence
  ENSG00000129317_109 (sequence is synthesized)
tgcaaatgaatgccttccactgaaccgaggtagacggggtcgagtttcttgcgcgatggtgggcttgtatgtgtgtgtgtgtgtgtgtgtgtggggggggggggtgacgaggttggcatt

SEQ ID NO: 280306 - DNA, 120 bp, Artificial Sequence
  ENSG00000129317_110 (sequence is synthesized)
gaggatccataccctttgcgcccaaagaaaggtgacgtggactagtgtcgtgcctttggacaggcagagtaagaggagggagaagaaacaggtagagctgctggccttgtcggggacacc

SEQ ID NO: 280307 - DNA, 120 bp, Artificial Sequence
  ENSG00000129317_111 (sequence is synthesized)
tttggacgtgctggagggcaacgacgccctagttttctgtgaagttaagtagcttctgcaggactgggttcagtatttctagtaccttctcaggatccctcctccgccaacgaattcctc

SEQ ID NO: 280308 - DNA, 120 bp, Artificial Sequence
  ENSG00000129317_112 (sequence is synthesized)
aaccacgggccaagcaaactactcccccgcccactgtcagcagcagtctctgttgaatgggaatactgcaccttcaggcttaacgccacgtgggctcctttgctgtcctccaggcactgt

SEQ ID NO: 280309 - DNA, 120 bp, Artificial Sequence
  ENSG00000129317_113 (sequence is synthesized)
gtgcaaatgaatgccttccactgaaccgaggcactgttatagaagaatggaagaagatacagattatagaatcagcttttaccctacgaaaggaaaacctggaaatgtttgaagcgattg

SEQ ID NO: 280310 - DNA, 120 bp, Artificial Sequence
  ENSG00000129347_0 (sequence is synthesized)
gcgtgcgcaatgggccacagaaccgccatgccggaaccgcgcgggtcgtcgcagctgcgggtgaacgcggcgtttgccgcgcggtacaaccgctaccgggagcgcgaggaactgcagcgg

SEQ ID NO: 280311 - DNA, 120 bp, Artificial Sequence
  ENSG00000129347_1 (sequence is synthesized)
ctgaaggatcgctacggggaccgagacagcagcagcgactccagctccgagtcggactcaagcgacgagcgcgtggaatttgatccccagcaggagcgggacttttacaaaacgctctcc

SEQ ID NO: 280312 - DNA, 120 bp, Artificial Sequence
  ENSG00000129347_2 (sequence is synthesized)
ttgttgaagaagaaggacccccgcatttatcagaaagatgccaccttctataacagaacagcatcgtcatcagacagtgaggaggacccagaagccttggagaagcagaagaaagtgcgg

SEQ ID NO: 280313 - DNA, 120 bp, Artificial Sequence
  ENSG00000129347_3 (sequence is synthesized)
cccatgtacctgaaggactacgagaggaaggttatcttggagaaggcaggcaaatatgttgatgaggagaactcagacggggagacttccaatcacagactccaggagacatcgtcgcaa

SEQ ID NO: 280314 - DNA, 120 bp, Artificial Sequence
  ENSG00000129347_4 (sequence is synthesized)
agttatgtggaggaacagaaacagctcaaggaaagcttccgggcatttgtggaggacagtgaggacgaggacggcgctggggagggcggctccagtttgctgcagaaacgtgccaaaacc

SEQ ID NO: 280315 - DNA, 120 bp, Artificial Sequence
  ENSG00000129347_5 (sequence is synthesized)
aggcaggagaaggcccaggaggaggccgactacatcgagtggctgaagggacagaaagagattcggaacccagattccctgaaggaactgacgcatctcaaggaatactggaacgaccct

SEQ ID NO: 280316 - DNA, 120 bp, Artificial Sequence
  ENSG00000129347_6 (sequence is synthesized)
gagttggatgaaggggagcggttcctgcgggattacatcctcaacaaacgctatgaggaggaggaagaggaggaggaagatgaagaggaaatggaggaagaggagggggtccacggtccc

SEQ ID NO: 280317 - DNA, 120 bp, Artificial Sequence
  ENSG00000129347_7 (sequence is synthesized)
ccagtccagctggctgtggacgactcctcagacgaaggggagctgtttctgaagaaacaggaggactttgaacagaagtacaatttccgtttcgaggagccggactcagcatcggtcaag

SEQ ID NO: 280318 - DNA, 120 bp, Artificial Sequence
  ENSG00000129347_8 (sequence is synthesized)
acctacccacgcagcatcgcgtcctccgtgcgccgtaaggatgagcgcagaaaggagaagagggaagagactcgggagcgaaagaagagggagaaagcaaagaagcaggaagagctcaag

SEQ ID NO: 280319 - DNA, 120 bp, Artificial Sequence
  ENSG00000129347_9 (sequence is synthesized)
cagctgaagaacctgaagaggaaggagattctggccaagctggagaagctgcggaaagtaacaggcaacgagatgctgggcctcgaggagggggaccttgaagacgacttcgaccctgcc

SEQ ID NO: 280320 - DNA, 120 bp, Artificial Sequence
  ENSG00000129347_10 (sequence is synthesized)
cagcacgaccagctcatgcagaagtgctttggggacgagtactacggggccgtggaggaggagaagccacaatttgaggaagaagaagggcttgaagacgactggaactgggacacgtgg

SEQ ID NO: 280321 - DNA, 120 bp, Artificial Sequence
  ENSG00000129347_11 (sequence is synthesized)
gacgggcctgagcaggagggagactggagccagcaggagctgcactgtgaggaccccaacttcaacatggacgccgactacgaccccagccagccgaggaagaaaaagcgcgaggccccc

SEQ ID NO: 280322 - DNA, 120 bp, Artificial Sequence
  ENSG00000129347_12 (sequence is synthesized)
gggcaagaagaagcgcaagtcgcccttcgccgcggccgtggggcaggagaagcccgtgtttgaacccggggacaagacgttcgaggagtacctggatgagtattaccggctggactacga

SEQ ID NO: 280323 - DNA, 120 bp, Artificial Sequence
  ENSG00000129347_13 (sequence is synthesized)
ggacatcatcgacgacctgccctgtcgcttcaagtaccgcacagtggtgccctgtgactttggcctcagcactgaggagatcctcgctgctgacgataaggagctgaaccggtggtgctc

SEQ ID NO: 280324 - DNA, 120 bp, Artificial Sequence
  ENSG00000129347_14 (sequence is synthesized)
cctaaagaagacctgcatgtacaggtcagagcaggaggagctgcgggacaagcgggcgtacagccagaaggcccagaactcatggaaaaagcggcaggtcttcaagtcactctgccgaga

SEQ ID NO: 280325 - DNA, 120 bp, Artificial Sequence
  ENSG00000129347_15 (sequence is synthesized)
agaggcagagacacctgcggaagccacagggaagccacagagagatgaagccggcccacagaggcagctgccagcccttgatggcagcttgatggggccggagagtcccccagcacagga

SEQ ID NO: 280326 - DNA, 120 bp, Artificial Sequence
  ENSG00000129347_16 (sequence is synthesized)
agaggaagcccctgtatcaccccacaagaagccagccccccagaagcggaggagggccaagaaggcacggctgctgggccccactgtgatgcttggtggatgcgagttcagccgccagag

SEQ ID NO: 280327 - DNA, 120 bp, Artificial Sequence
  ENSG00000129347_17 (sequence is synthesized)
actgcaggcctttggcctcaaccccaaacggctgcacttccgccagctgggccggcagcggaggaaacaacaggggcccaagaacagctcctgagcaccagggagcaggcaggggcctca

SEQ ID NO: 280328 - DNA, 120 bp, Artificial Sequence
  ENSG00000129347_18 (sequence is synthesized)
gggcctcaggctcctctcctcaaatcaagccctggacaggtctcgcacccacaagtactatctgctgcagagatcctctcatctgtggccaggcacgcctgtaatcccagcactttggga

SEQ ID NO: 280329 - DNA, 120 bp, Artificial Sequence
  ENSG00000129347_19 (sequence is synthesized)
agcactttgggaggccgaggtgaaaggatcacttgagcccaggaattggagaccagcgtgggcaacttagcgagactccatctctacaaaatgtggtgacacatgcctgtagtcccagct

SEQ ID NO: 280330 - DNA, 69 bp, Artificial Sequence
  ENSG00000129347_20 (sequence is synthesized)
ttgaaaaaaaaaaaaaaattaaaaaacacgtgtagctgtgggtaaggaagtcgtcccattttatggatg

SEQ ID NO: 280331 - DNA, 120 bp, Artificial Sequence
  ENSG00000129347_21 (sequence is synthesized)
gtgtagctgtgggtaaggaagtcgtcccattttatggatgtggaaactgaggctgacttaaacttcccgtgacttggagctctcacctcgagacacctcccagaccccacatcccctcag

SEQ ID NO: 280332 - DNA, 120 bp, Artificial Sequence
  ENSG00000129347_22 (sequence is synthesized)
aacgctgcgcccagccacacccacgatcaagttacacagctttattggcccccagcagccacagttcccccaagggggctttgggacagggagggcccgggcgtccagtgcaaactacag

SEQ ID NO: 280333 - DNA, 120 bp, Artificial Sequence
  ENSG00000129347_23 (sequence is synthesized)
tacgtgagtcaggccctgaggggggtgcccggggtcctccttccctaccctgccaggagggccccgctggtgggagacaggtgtatgggctctgtgggctctgtccctggctgaatggcc

SEQ ID NO: 280334 - DNA, 120 bp, Artificial Sequence
  ENSG00000129347_24 (sequence is synthesized)
ccagactggttgcagctgggcttgaggggctgacaacaggaagtaccatcatcactgccagagctcaagatcccacacccgacatgacataaataaaaaaataaatagtgttgtatcttt

SEQ ID NO: 280335 - DNA, 120 bp, Artificial Sequence
  ENSG00000129347_25 (sequence is synthesized)
gaggagccggactcagcatcggtgtgtggctggggctggggaggactcagcccccagggttcaggcccagggaaccccacatcatctctgcggcccttgtgggcttttctgattgcgcct

SEQ ID NO: 280336 - DNA, 120 bp, Artificial Sequence
  ENSG00000129347_26 (sequence is synthesized)
gggggggaacccccaaccccagagcgccctgcgggagcgtcccatcctccgctccccatcccatgagggacagacagtgccccccctctccccaggggagccaaatccccgttattttct

SEQ ID NO: 280337 - DNA, 120 bp, Artificial Sequence
  ENSG00000129347_27 (sequence is synthesized)
ctcccctgccacgatccccacctgcccactctgatgtgtggggcgactctgtcccccaagaaccccccctttcctctttcatcctcaagagtctagccattttttagtgtactccttgcg

SEQ ID NO: 280338 - DNA, 120 bp, Artificial Sequence
  ENSG00000129347_28 (sequence is synthesized)
ccacgtggggcgcccaacttctcacatcagccctgatcctggccccactgtgcggcctggcccagcccctccccgctgtctctcttgtgccctcagcccacctgccccttgtcaagtctt

SEQ ID NO: 280339 - DNA, 120 bp, Artificial Sequence
  ENSG00000129347_29 (sequence is synthesized)
tgtcttccccaggaattaccttctccttgcccctcaccttcctctacccatatcctgtacctacctgtggcctgcccctgcccaccccaagagggcccctctccctcctgctgtttgacc

SEQ ID NO: 280340 - DNA, 120 bp, Artificial Sequence
  ENSG00000129347_30 (sequence is synthesized)
acctgtttgacctccccagccagatccacccccctccatcctaatccctacgctgagctcacctgctggcgccagggctcttattatctcccttctgaaatctatccccaacccttttcc

SEQ ID NO: 280341 - DNA, 120 bp, Artificial Sequence
  ENSG00000129347_31 (sequence is synthesized)
ggccgtgggtaggcagggggcaccgcggggcctggcatagcccagcagcctggctctgtctcgagcaggggacaagacgttcgaggagtacctggatgagtattaccggctggactacga

SEQ ID NO: 280342 - DNA, 120 bp, Artificial Sequence
  ENSG00000129347_32 (sequence is synthesized)
ggagattctggccaagctggagaagctgcggaaagtaacaggcaacgagatgctgggcctcgaggagggggaccttgaagacgacttcgaccctgcccagcacgaccagctcatgcagac

SEQ ID NO: 280343 - DNA, 120 bp, Artificial Sequence
  ENSG00000129347_33 (sequence is synthesized)
acagaaccgccatgccggaaccgcgcgggtcgtcgcagctgcgggtgaacgcggcgtttgccgcgcggtacaaccgctaccgggagcgcgaggaactgcagcggccatcgtcatcagaca

SEQ ID NO: 280344 - DNA, 120 bp, Artificial Sequence
  ENSG00000129347_34 (sequence is synthesized)
tactacggggccgtggaggaggagaagccacaatttgaggaagaagaagggcttgaaggtgagatcagctggggcactgggctggggattggggactggggactgggactgaagcccaag

SEQ ID NO: 280345 - DNA, 120 bp, Artificial Sequence
  ENSG00000129347_35 (sequence is synthesized)
gcaatgggccacagaaccgccatgccggaaccgcgcgggtcgtcgcagctgcgggtgaacgcggcgtttgccgcgcggtacaaccgctaccgggagcgcgaggaactgcagcggcgtgag

SEQ ID NO: 280346 - DNA, 120 bp, Artificial Sequence
  ENSG00000129351_0 (sequence is synthesized)
atgcgtccaatgcgaatttttgtgaatgatgaccgccatgtgatggcaaagcattcttccgtttatccaacacaagaggagctggaggcagtccagaacatggtgtcccacacggagcgg

SEQ ID NO: 280347 - DNA, 120 bp, Artificial Sequence
  ENSG00000129351_1 (sequence is synthesized)
gcgctcaaagctgtgtccgactggatagacgagcaggaaaagggtagcagcgagcaggcagagtccgataacatggatgtgcccccagaggacgacagtaaagaaggggctggggaacag

SEQ ID NO: 280348 - DNA, 120 bp, Artificial Sequence
  ENSG00000129351_2 (sequence is synthesized)
aagacggagcacatgaccagaaccctgcggggagtgatgcgggtgggcctggtggcaaagggcctcctactcaagggggacttggatctggagctggtgctgctgtgtaaggagaagccc

SEQ ID NO: 280349 - DNA, 120 bp, Artificial Sequence
  ENSG00000129351_3 (sequence is synthesized)
acaaccgccctcctggacaaggtggccgacaacctggccatccagcttgctgctgtaacagaagacaagtacgaaatactgcaatctgtcgacgatgctgcgattgtgataaaaaacaca

SEQ ID NO: 280350 - DNA, 120 bp, Artificial Sequence
  ENSG00000129351_4 (sequence is synthesized)
aaagagcctccattgtccctgaccatccacctgacatcccctgttgtcagagaagaaatggagaaagtattagctggagaaacgctatcagtcaacgaccccccggacgttctggacagg

SEQ ID NO: 280351 - DNA, 120 bp, Artificial Sequence
  ENSG00000129351_5 (sequence is synthesized)
cagaaatgccttgctgccttggcgtccctccgacacgccaagtggttccaggccagagccaacgggctgaagtcttgtgtcattgtgatccgggtcttgagggacctgtgcactcgcgtg

SEQ ID NO: 280352 - DNA, 120 bp, Artificial Sequence
  ENSG00000129351_6 (sequence is synthesized)
cccacctggggtcccctccgaggctggcctctcgagctcctgtgtgagaaatccattggcacggccaacagaccgatgggtgctggcgaggccctgcggagagtgctggagtgcctggcg

SEQ ID NO: 280353 - DNA, 120 bp, Artificial Sequence
  ENSG00000129351_7 (sequence is synthesized)
tcgggcatcgtgatgccagatggttctggcatttatgacccttgtgaaaaagaagccactgatgctattgggcatctagacagacagcaacgggaagatatcacacagagtgcgcagcac

SEQ ID NO: 280354 - DNA, 120 bp, Artificial Sequence
  ENSG00000129351_8 (sequence is synthesized)
gcactgcggctcgctgccttcggccagctccataaagtcctaggcatggaccctctgccttccaagatgcccaagaaaccaaagaatgaaaacccagtggactacaccgttcagatccca

SEQ ID NO: 280355 - DNA, 120 bp, Artificial Sequence
  ENSG00000129351_9 (sequence is synthesized)
ccaagcaccacctatgccattacgcccatgaaacgcccaatggaggaggacggggaggagaagtcgcccagcaaaaagaagaagaagattcagaagaaagaggagaaggcagagcccccc

SEQ ID NO: 280356 - DNA, 120 bp, Artificial Sequence
  ENSG00000129351_10 (sequence is synthesized)
caggctatgaatgccctgatgcggttgaaccagctgaagccagggctgcagtacaagctggtgtcccagactgggcccgtccatgcccccatctttaccatgtctgtggaggttgatggc

SEQ ID NO: 280357 - DNA, 120 bp, Artificial Sequence
  ENSG00000129351_11 (sequence is synthesized)
aattcattcgaggcctctgggccctccaaaaagacggccaagctgcacgtggccgttaaggtgttacaggacatgggcttgccgacgggtgctgaaggcagggactcgagcaagggggag

SEQ ID NO: 280358 - DNA, 120 bp, Artificial Sequence
  ENSG00000129351_12 (sequence is synthesized)
gactcggctgaggagaccgaggcgaagccagcagtggtggcccctgccccagtggtagaagctgtctccacccctagtgcggcctttccctcagatgccactgccgagcaggggccgatc

SEQ ID NO: 280359 - DNA, 120 bp, Artificial Sequence
  ENSG00000129351_13 (sequence is synthesized)
cgcttcgtcatggaggtcgaagtggatggacagaagttccaaggtgctggttccaacaaaaaggtggcgaaggcctacgctgctcttgctgccctagaaaagcttttccctgacacccct

SEQ ID NO: 280360 - DNA, 120 bp, Artificial Sequence
  ENSG00000129351_14 (sequence is synthesized)
ctcgcccttgatgccaacaaaaagaagagagccccagtacccgtcagagggggaccgaaatttgctgctaagccacataaccctggcttcggcatgggaggccccatgcacaacgaagtg

SEQ ID NO: 280361 - DNA, 120 bp, Artificial Sequence
  ENSG00000129351_15 (sequence is synthesized)
cccccaccccccaaccttcgagggcggggaagaggcgggagcatccggggacgagggcgcgggcgaggatttggtggcgccaaccatggaggctacatgaatgccggtgctgggtatgga

SEQ ID NO: 280362 - DNA, 120 bp, Artificial Sequence
  ENSG00000129351_16 (sequence is synthesized)
agctatgggtacggaggcaactcggcgacagcaggctacagtcagttctacagcaacggagggcattctgggaatgccagtggcggtggcggcgggggcggtggtggctcctccggctat

SEQ ID NO: 280363 - DNA, 120 bp, Artificial Sequence
  ENSG00000129351_17 (sequence is synthesized)
ggctcctactaccaaggtgacaactacaactcaccggtgcccccaaaacacgctgggaagaagcagccgcacgggggccagcagaagccctcctacggctcgggctaccagtcccaccag

SEQ ID NO: 280364 - DNA, 120 bp, Artificial Sequence
  ENSG00000129351_18 (sequence is synthesized)
ggccagcagcagtcctacaaccagagcccctacagcaactatggccctccacagggcaagcagaaaggctataaccatggacaaggcagctactcctactcgaactcctacaactctccc

SEQ ID NO: 280365 - DNA, 120 bp, Artificial Sequence
  ENSG00000129351_19 (sequence is synthesized)
gggggcgggggcggatccgactacaactacgagagcaaattcaactacagtggtagtggaggccgaagcggcgggaacagctacggctcaggcggggcatcctacaacccagggtcacac

SEQ ID NO: 280366 - DNA, 120 bp, Artificial Sequence
  ENSG00000129351_20 (sequence is synthesized)
gggggctacggcggaggttctgggggcggctcctcataccaaggcaaacaaggaggctactcacagtcgaactacaactccccggggtccggccagaactacagtggccctcccagctcc

SEQ ID NO: 280367 - DNA, 120 bp, Artificial Sequence
  ENSG00000129351_21 (sequence is synthesized)
taccagtcctcacaaggcggctatggcagaaacgcagaccacagcatgaactaccagtacagataagcccccgcggggcggagatttctaccttctgcacttactccccatcagaagatc

SEQ ID NO: 280368 - DNA, 120 bp, Artificial Sequence
  ENSG00000129351_22 (sequence is synthesized)
gagttttatgcatcacagttaacatgtcagctggccctccaggcccccgcccccatcccgtccacgttgctgtgtcgtgaggtgcagcgggtcaccctgtggcccgtcctgtgacccata

SEQ ID NO: 280369 - DNA, 120 bp, Artificial Sequence
  ENSG00000129351_23 (sequence is synthesized)
tttagccgtgtttgggactccgtgtcttcaatggtttgttagttgccattacaactttgtctgggtagagtttttgagtttttgcagttcagtatccctctgtctattcacacttcgtgt

SEQ ID NO: 280370 - DNA, 120 bp, Artificial Sequence
  ENSG00000129351_24 (sequence is synthesized)
tagtggtaactcagtttgtctttaaatagttacagaagggatacgtcatttgttaatgcttttgtgaagtgagttaaacgagctttctgtattttaatgctttagtgtttcagttttata

SEQ ID NO: 280371 - DNA, 120 bp, Artificial Sequence
  ENSG00000129351_25 (sequence is synthesized)
agtgaagattttattttaaaaaccagtgggaaagagtggggggtttctttttatgtctgggtcattcaggcagtacatctgaattaagctgaatgtagacaaataaagaaaaacaaaact

SEQ ID NO: 280372 - DNA, 120 bp, Artificial Sequence
  ENSG00000129351_26 (sequence is synthesized)
cgctcgcccccggtccggactcctcctcctcctcttctcgccattgcagttggacccagcagcccggcgcgcaccgcgtggcttttgggggcagaccccggcgggctgtggcaggagggc

SEQ ID NO: 280373 - DNA, 120 bp, Artificial Sequence
  ENSG00000129351_27 (sequence is synthesized)
ggcggcggcggctgcggtcgaagaaggggacgccgacaagagttgaagtattgataacaccaaggaactctatcacaatttgaaaagataagcaaaagtttgatttccagacactacaga

SEQ ID NO: 280374 - DNA, 120 bp, Artificial Sequence
  ENSG00000129351_28 (sequence is synthesized)
atgattttgggtcttcctagagcgtctaaaagtattgcacacaaaatcaactttttactccaatttcctccaactccaaaacccaaagtgtccgtgctgtgtccctgtgcttcactgggt

SEQ ID NO: 280375 - DNA, 120 bp, Artificial Sequence
  ENSG00000129351_29 (sequence is synthesized)
ttctcaaccgtggcttttcaccgcagcttgtctgaaactcttagcctgcagaatttaagacaatggcagtttttatcgtgatttgcctttgaacttggtcctattgaagttcacaataag

SEQ ID NO: 280376 - DNA, 120 bp, Artificial Sequence
  ENSG00000129351_30 (sequence is synthesized)
tggaaaacaattttttcagagaatgtatttttgtgcagaattgcacagaattctagagacagcgttgttcggcatcaaggcaaaagcccacctttgctttttatggaaagcattacttta

SEQ ID NO: 280377 - DNA, 120 bp, Artificial Sequence
  ENSG00000129351_31 (sequence is synthesized)
tttaaagagacagacaatgacgcattttaatctacctttgtcttaatttacagcaggttttgtatgaatttttaaccttttaacaaactcccaaatctggttgatgcctttgacagtgat

SEQ ID NO: 280378 - DNA, 120 bp, Artificial Sequence
  ENSG00000129351_32 (sequence is synthesized)
gaaaacgatttcaccacatctgaatccagagaaaccggctttttttcttattgcgagcatgttaaaacgttgggaacatgtggggaattgtatattgcgctgaattaacttctcccgcct

SEQ ID NO: 280379 - DNA, 120 bp, Artificial Sequence
  ENSG00000129351_33 (sequence is synthesized)
cttgtaatgctctggtgggttcttgtttgggaatgcgatattttgtggctggtttagctagagagtgaactctcaaaggtatcaaaactgtgcttccattattagtgcaagaaacagaca

SEQ ID NO: 280380 - DNA, 120 bp, Artificial Sequence
  ENSG00000129351_34 (sequence is synthesized)
ggctttaaggggtagatgacgtgaaattttgcaagtcttaattacagctgcagatgcatgggattctggatttttttgttgctttttagtttaatgggactttaaaagtaattgaggaga

SEQ ID NO: 280381 - DNA, 120 bp, Artificial Sequence
  ENSG00000129351_35 (sequence is synthesized)
aagaaccgtgatgttccctgtttctccagtaaaggactggcttttgcttgggcagaggtggtgctgctgggtgtgcagctgccacagactccaaaggcgtagaagtttgtgccaacacac

SEQ ID NO: 280382 - DNA, 120 bp, Artificial Sequence
  ENSG00000129351_36 (sequence is synthesized)
ggagtcattctggctctctgctgaggcccctgttttctggcaggtgccctccttggaaactggttttggctctgatcagcggttctttttgcagcaaagcctgcatctgtgttgacttgc

SEQ ID NO: 280383 - DNA, 120 bp, Artificial Sequence
  ENSG00000129351_37 (sequence is synthesized)
aagattttgcgtttattcaggcaaaaactggtcaaaatggttactacatgatttgttcccagaggtttgaaacattcagtgaaactttttaaaactttgattgcatgatgtatttttttt

SEQ ID NO: 280384 - DNA, 120 bp, Artificial Sequence
  ENSG00000129351_38 (sequence is synthesized)
ttagaaagttattgtttgagaataatgtctttttataccaggaaaatagttatcctgaatgacgttgaaaactccccctcccctttatttttttttaatcaatacatgtgaaagtaacaa

SEQ ID NO: 280385 - DNA, 120 bp, Artificial Sequence
  ENSG00000129351_39 (sequence is synthesized)
tttccccactctattcctgctcttgggaaagcagcgtgggccatcaggatggtccctggtccttagagagggtccagttcaggcttctagacattttactcatgctcagcgaaggctggt

SEQ ID NO: 280386 - DNA, 120 bp, Artificial Sequence
  ENSG00000129351_40 (sequence is synthesized)
tcctggtcccctgggctgtgtagacccggtgtcccaccaggctccaggctcccaccatctacagaggggcttacagcgcccattctggtcttggggaacccatcacaaaataggcttttt

SEQ ID NO: 280387 - DNA, 120 bp, Artificial Sequence
  ENSG00000129351_41 (sequence is synthesized)
ctgctccccgattctggtgtagttctaagtacacagtgatgtcctctgtaggggcgtgcctgtggtggaacataacgcagttacaaaagaaagggcaggtgaggcctgggtaaccccagc

SEQ ID NO: 280388 - DNA, 120 bp, Artificial Sequence
  ENSG00000129351_42 (sequence is synthesized)
catggaccgtcagtggctggagggagcttcgtgtctgtgctggagctgcagcctgctcgccatctggaggctcagtggagtggggagttggggttctcataccagcagatttccctagag

SEQ ID NO: 280389 - DNA, 120 bp, Artificial Sequence
  ENSG00000129351_43 (sequence is synthesized)
cgtgattctcccatctgaggcaatcttgcctcccaggggaaattttgcaatgtttggaggatgttgtcacagctagtagcgggtgctctgggatctggtggatagatgccaaggatgctg

SEQ ID NO: 280390 - DNA, 120 bp, Artificial Sequence
  ENSG00000129351_44 (sequence is synthesized)
tcaagcatactgtactgcccagaacagtggcccatagcagggacctgccctatcaaaatatcaggtgtatggaggtggagtcccaacgctagagcagcccttctcagctccaccctgccc

SEQ ID NO: 280391 - DNA, 120 bp, Artificial Sequence
  ENSG00000129351_45 (sequence is synthesized)
ggggagggaggaggagctctggtttcagagcagtgccgggattgcctttccccaggatctgtgtcggccatccaggaagaactgtactggccaagcctgggaccacacgtctgcagagat

SEQ ID NO: 280392 - DNA, 120 bp, Artificial Sequence
  ENSG00000129351_46 (sequence is synthesized)
cctgctctgctggcctgagccccaggccttggcctcctgtgcttgggtaaccatggccactgggaaaagcaaggaccgtgtttgactttcttggagaggtgaaagaggtgaaagaacaag

SEQ ID NO: 280393 - DNA, 120 bp, Artificial Sequence
  ENSG00000129351_47 (sequence is synthesized)
ttgtgtgctagaaaacttttgaggaattcttatttgtgttagagcagaggaggtcccagataccaagtggcgcctcccaggaaaggctgggagaagaggtggcctggagtaccccgagat

SEQ ID NO: 280394 - DNA, 120 bp, Artificial Sequence
  ENSG00000129351_48 (sequence is synthesized)
cccagcagcgcacacagtggagggatgaggatggatgggtcctaacccctgattttgatgggatgtgttcatgtcctatctcctctcctggacacattaaggggttgggacaagaagaga

SEQ ID NO: 280395 - DNA, 120 bp, Artificial Sequence
  ENSG00000129351_49 (sequence is synthesized)
ctcctgtgagatcagcagacctcgtgtttaaggagagaatgcctgcctgcaacactcatggagagggacacttcctggccccacctgctaaatacctccaaactctgggcaggcgcctgc

SEQ ID NO: 280396 - DNA, 120 bp, Artificial Sequence
  ENSG00000129351_50 (sequence is synthesized)
attctcaacacaggacttcccttaacagtttccggatcagtgaccaccaccacgttcaggtttctgaatgcagacccaccacgagggatggattccacccgcccgccctgctgcagatac

SEQ ID NO: 280397 - DNA, 120 bp, Artificial Sequence
  ENSG00000129351_51 (sequence is synthesized)
atgcggcacagcaggcacgtgcctggagagaacagctcctgagcacagcacccttggagccctcaccccgctcacgatcctcaccagtgctgatgatgccgtcatgctgctggcctgaga

SEQ ID NO: 280398 - DNA, 120 bp, Artificial Sequence
  ENSG00000129351_52 (sequence is synthesized)
cagtatcccagctacaacaggacgacaccgggttcaggaatatgtggctatcaccttgagcactgacagtggccttccaggctagttgccttccaaacgcaggtagccgacctgcaggag

SEQ ID NO: 280399 - DNA, 120 bp, Artificial Sequence
  ENSG00000129351_53 (sequence is synthesized)
ggcctacaaacgggcccagcaagagctgggcaacagctggcttgtgaaatgagacaccttgaccaatatgctttgggtggacggtctcctacatgttcagtggaggccaccaggagcatc

SEQ ID NO: 280400 - DNA, 120 bp, Artificial Sequence
  ENSG00000129351_54 (sequence is synthesized)
catgagcggggaaggggtccacacccttacatggcaagttgatacgatggggtgcttggtggatgggccatggaggtccgtgagctggaactgggcacacgccatcccagagggctcagg

SEQ ID NO: 280401 - DNA, 120 bp, Artificial Sequence
  ENSG00000129351_55 (sequence is synthesized)
atgccccaggaaggaaagaagggcaacagactacacgattggacgtgtgtggttgactgggatgaagttggagggaggggcagggccttgcaggggattggtactgatcccagggaggaa

SEQ ID NO: 280402 - DNA, 120 bp, Artificial Sequence
  ENSG00000129351_56 (sequence is synthesized)
gtgttggggcttcatgaactaggatgaaaggaggcccctgagccatgacaaggggcacatccaggatttccgccaccctgaatttagtagagctagtaggccctggtcgtcactctgggc

SEQ ID NO: 280403 - DNA, 120 bp, Artificial Sequence
  ENSG00000129351_57 (sequence is synthesized)
agggatgccgtcagccttgagggtcgccacccacctgtgtgttgccctctgtcctggcagggaaacatacaccccttgtctcaccaccaaccttgcttgtgtagtcagcagggctggccc

SEQ ID NO: 280404 - DNA, 120 bp, Artificial Sequence
  ENSG00000129351_58 (sequence is synthesized)
tgccccaaggactcactgcatgtacccggacccctaggcctggcctttgcagcatagttgggagcttctggattccatctgcacctgtgagccccatgctggctgtgcactgcgcgggcc

SEQ ID NO: 280405 - DNA, 120 bp, Artificial Sequence
  ENSG00000129351_59 (sequence is synthesized)
tgagactgctggatacaatgttgggcaacaactcagccagcctgatggcagcctcagaggcttactctaacccatcccagaataaatggagacttcatgtgttcattgtttcattcactc

SEQ ID NO: 280406 - DNA, 120 bp, Artificial Sequence
  ENSG00000129351_60 (sequence is synthesized)
ctacagtaagtgtgcgtttctgtctgtctgacctgggaagcagctgcagtgtagcgtctgggcctgagttagcaaagggtggccagagcagcctcgaggaggctgtagaaggggcacaca

SEQ ID NO: 280407 - DNA, 120 bp, Artificial Sequence
  ENSG00000129351_61 (sequence is synthesized)
cctttttgcggtgattaggtcagacggccctcgacccccaccccttcccggccccacagtgggattgattgtgttaatacacgaactcgtgtaactgcaaagttccttaaaagttagaat

SEQ ID NO: 280408 - DNA, 120 bp, Artificial Sequence
  ENSG00000129351_62 (sequence is synthesized)
tttaaatttctctgctttaagccatgcgaagcaccaatcttgtgaatacgcttttccggccagtgcacagctcttgtcttgagaaggagccttcattggggggttacaggagcagagaaa

SEQ ID NO: 280409 - DNA, 120 bp, Artificial Sequence
  ENSG00000129351_63 (sequence is synthesized)
tctaaaacatgaatttcaaatgtggcgctctgtgccctttttcaaaagaattctaatttcttctctctgctctgtctcccccttttgtaggtgactttttcacagactgctacggctatc

SEQ ID NO: 280410 - DNA, 120 bp, Artificial Sequence
  ENSG00000129351_64 (sequence is synthesized)
cgcatgttcgctttctggcattgtgggacacatcctcccccttggtgtcttggctttgtgatggcgggcgagggaggaggcctgcctgaagaacacaaactgaaggttgcagatagttct

SEQ ID NO: 280411 - DNA, 120 bp, Artificial Sequence
  ENSG00000129351_65 (sequence is synthesized)
gtccacgttgtcatgcaggcagcccaccacaccagcgtggggtacacatctccagtgggtggaggcacgtgaggactcccagttaccctacccaggaggcggtgggcccttagtgtcctc

SEQ ID NO: 280412 - DNA, 120 bp, Artificial Sequence
  ENSG00000129351_66 (sequence is synthesized)
aatctgggaaggaaggacaggcagcgtgggagcctccccttccctcccacccaccctgggcctggaggtctgggcagcctgactgggcaaaggtggctgcattcacaagccgacccgctc

SEQ ID NO: 280413 - DNA, 120 bp, Artificial Sequence
  ENSG00000129351_67 (sequence is synthesized)
tgagagcccaggaactcagctgcgcctggtgagcgcttgggcgttggccagcttggctggagagccaccaccatgacccagcctcccacctcacccaccctctgagccttcccacaccca

SEQ ID NO: 280414 - DNA, 120 bp, Artificial Sequence
  ENSG00000129351_68 (sequence is synthesized)
ctgtggaggctccctgtgtggggctcccttgcaaggcttggggtgcagcattccctcagccagtgccgtcccctttgttccactcgagcctctggcggggccgtgtattgacaaacctag

SEQ ID NO: 280415 - DNA, 120 bp, Artificial Sequence
  ENSG00000129351_69 (sequence is synthesized)
tgaccagaagtggggtctcactgctacattttcagcttgcggctgagaatgtagtggctgcactgcacactttcagccctgctgctcagccccacctgcacccagcagctgtgctgggga

SEQ ID NO: 280416 - DNA, 120 bp, Artificial Sequence
  ENSG00000129351_70 (sequence is synthesized)
caaggaaggggcctcgggagtcattagggctgtaggtctaggcctcacccggctttcctgccccagccgtggccactgccctctgccagccaggctggggcttggtcacatcctgagtca

SEQ ID NO: 280417 - DNA, 120 bp, Artificial Sequence
  ENSG00000129351_71 (sequence is synthesized)
catgcttgcatgagtatcgcaagggaggtgcctgcatcattgactgagtctcgatttgtcttccaagaaccaaaccagctcagaccagttggtcttctcaggatgatgacggtccggggc

SEQ ID NO: 280418 - DNA, 120 bp, Artificial Sequence
  ENSG00000129351_72 (sequence is synthesized)
ctctttaaatagcatcttttaggggcctccaggcctgtgcctgtggagcctgttcccagcacagcagggaggaggggggtggctgctgcttctctggggctttgcttttcctgtcaccat

SEQ ID NO: 280419 - DNA, 120 bp, Artificial Sequence
  ENSG00000129351_73 (sequence is synthesized)
tggggatctctgggtagccgtcagctagctgtgaatgtcgtcccgcgctcggagtccatctcattgtaatgttgacatccgctgcaaaagctgctggcgcgtgctgcttggcaaagcccc

SEQ ID NO: 280420 - DNA, 120 bp, Artificial Sequence
  ENSG00000129351_74 (sequence is synthesized)
tgctaaggaccggagccactgctcctctccctccttgtcctactgcctctgacccgggcttgtgggtcagccttcaggacccatggctgccgcctgcccttccctcccttccccctgccc

SEQ ID NO: 280421 - DNA, 120 bp, Artificial Sequence
  ENSG00000129351_75 (sequence is synthesized)
gaccccccttcctcactccttccctaccccctcctcctctttgtcccggtcccgcccccgattccaggagagtcccaggttcccgaggcgggaaaagtcgcctcctttgtcctcacaggt

SEQ ID NO: 280422 - DNA, 120 bp, Artificial Sequence
  ENSG00000129351_76 (sequence is synthesized)
cgcggagaggcggaccccctccttggaagccccttcccacgcggattgctgaggaagcctttgtgggttcgtcgggtttccaaatctctgagttgaagtattgataacaccaaggaactc

SEQ ID NO: 280423 - DNA, 120 bp, Artificial Sequence
  ENSG00000129351_77 (sequence is synthesized)
gcagaaaggctataaccatggacaaggcagctactcctactcgaactcctacaactctcccgggggcgggggcggatccgactacaactacgagagcaaattcagtgagttggcttccag

SEQ ID NO: 280424 - DNA, 120 bp, Artificial Sequence
  ENSG00000129351_78 (sequence is synthesized)
agcccctcggccgggccagggtccaggccccagcagtgcagcccacggagtggcagaagctcggcactgcccagacctctggctgagggccttaggaggaggacaagtggtgctggctgc

SEQ ID NO: 280425 - DNA, 120 bp, Artificial Sequence
  ENSG00000129351_79 (sequence is synthesized)
gggcgggtgctaggaagatggggcgtgggacctcatggtgccgtctccgccactctctctggtgtgttctccgaaggcagggtagctgaggcctctgtcccgaggccctggctgtgggtg

SEQ ID NO: 280426 - DNA, 120 bp, Artificial Sequence
  ENSG00000129351_80 (sequence is synthesized)
aggctgcaaggtgacttcctgggacttgctctagagagttttgcatccagcccctgcaagagcctgacctctccgccaccgcctttccgcttcctcatgcgcagacccagcaggcccggg

SEQ ID NO: 280427 - DNA, 120 bp, Artificial Sequence
  ENSG00000129351_81 (sequence is synthesized)
cccagcagcccggcgcgcaccgcgtggcttttgggggcagaccccggcgggctgtggcaggagggcggcggcggcggctgcggtcgaagaaggggacgccgacaagccagtgggacacct

SEQ ID NO: 280428 - DNA, 120 bp, Artificial Sequence
  ENSG00000129351_82 (sequence is synthesized)
cacaagtcagctccgatgtcctcaggacaagactgctatagtcaccagtgctttgttgctttctggcgctccggtaggatccaggctcacttggtatatcccctgctgcagattacggtc

SEQ ID NO: 280429 - DNA, 120 bp, Artificial Sequence
  ENSG00000129351_83 (sequence is synthesized)
agtttgcttgtccctccttggttcttcagttgtgctcctgcaggctttgcttttacacacgagcgatatagcatcattctgaattgtgcagcttaaaagatgaacgttgggctgcttgct

SEQ ID NO: 280430 - DNA, 120 bp, Artificial Sequence
  ENSG00000129351_84 (sequence is synthesized)
ccagcctgggcaacagagcgagaccttgcttaaaatcagtgttgaaaaattttagaagctaaataggtaaaaaagcaggaaggtgcagacctccactagtgctgctgctttatccatctg

SEQ ID NO: 280431 - DNA, 120 bp, Artificial Sequence
  ENSG00000129351_85 (sequence is synthesized)
gctgctgctttatccatctggtcctgtgaaggctcaccctgaagctatgggatggctgcttttgtttcatttttctcacttgtgatttctgagtccttttaacaatgatgaggcatgatt

SEQ ID NO: 280432 - DNA, 120 bp, Artificial Sequence
  ENSG00000129351_86 (sequence is synthesized)
ggggatgtggaagatgagtaggatggtggtgctacagctggaggccacaggagaggtgcaagctgggctcagtttgtgtggctgccccacccactgtgttacgccacagaggcagccctg

SEQ ID NO: 280433 - DNA, 120 bp, Artificial Sequence
  ENSG00000129351_87 (sequence is synthesized)
ggtggcgccaaccatggaggctacatgaatgccggtgctgggtatggaagctatgggtacggaggcaactcggcgacagcaggctacaactacagtggtagtggaggccgaagcggcggg

SEQ ID NO: 280434 - DNA, 120 bp, Artificial Sequence
  ENSG00000129351_88 (sequence is synthesized)
acatttccaacattgtttgccagttgctgcttaggtgacatggatcagcaacgaagcgtcggtttcagtggtttctttttctggactccgagttgaagtattgataacaccaaggaactc

SEQ ID NO: 280435 - DNA, 120 bp, Artificial Sequence
  ENSG00000129351_89 (sequence is synthesized)
ggcgggaaaagtcgcctcctttgtcctcacaggtcgcggagaggcggaccccctccttggaagccccttcccacgcggattgctgaggaagcctttgtggagttgaagtattgataacac

SEQ ID NO: 280436 - DNA, 120 bp, Artificial Sequence
  ENSG00000129353_0 (sequence is synthesized)
agtgcctccctccagactcgggagggtcgagggggcgcgggagagagcgcgggcggccgccggggctggtcgcctgcagggatgggggacgagcggccccactactacgggaaacacgga

SEQ ID NO: 280437 - DNA, 120 bp, Artificial Sequence
  ENSG00000129353_1 (sequence is synthesized)
acgccacagaagtatgatcccactttcaaaggacccatttacaataggggctgcacggatatcatatgctgtgtgttcctgctcctggccattgtgggctacgtggctgtaggcatcata

SEQ ID NO: 280438 - DNA, 120 bp, Artificial Sequence
  ENSG00000129353_2 (sequence is synthesized)
gcctggactcatggagaccctcgaaaggtgatctaccccactgacagccggggcgagttctgcgggcagaagggcacaaaaaacgagaacaaaccctatctgttttatttcaacattgtg

SEQ ID NO: 280439 - DNA, 120 bp, Artificial Sequence
  ENSG00000129353_3 (sequence is synthesized)
aaatgtgccagccccctggttctgctggaattccaatgtcccactccccagatctgcgtggaaaaatgccccgaccgctacctcacgtacctgaatgctcgcagctcccgggactttgag

SEQ ID NO: 280440 - DNA, 120 bp, Artificial Sequence
  ENSG00000129353_4 (sequence is synthesized)
tactataagcagttctgtgttcctggcttcaagaacaataaaggagtggctgaggtgcttcaagatggtgactgccctgctgtcctcatccccagcaaacccttggcccggagatgcttc

SEQ ID NO: 280441 - DNA, 120 bp, Artificial Sequence
  ENSG00000129353_5 (sequence is synthesized)
cccgctatccacgcctacaagggtgtcctgatggtgggcaatgagacgacctatgaggatgggcatggctcccggaaaaacatcacagacctggtggagggcgccaagaaagccaatgga

SEQ ID NO: 280442 - DNA, 120 bp, Artificial Sequence
  ENSG00000129353_6 (sequence is synthesized)
gtcctagaggcgcggcaactcgccatgcgcatatttgaagattacaccgtctcttggtactggattatcataggcctggtcattgccatggcgatgagcctcctgttcatcatcctgctt

SEQ ID NO: 280443 - DNA, 120 bp, Artificial Sequence
  ENSG00000129353_7 (sequence is synthesized)
cgcttcctggctggtattatggtctgggtgatgatcatcatggtgattctggtgctgggctacggaatatttcactgctacatggagtactcccgactgcgtggtgaggccggctctgat

SEQ ID NO: 280444 - DNA, 120 bp, Artificial Sequence
  ENSG00000129353_8 (sequence is synthesized)
gtctctttggtggacctcggctttcagacggatttccgggtgtacctgcacttacggcagacctggttggcctttatgatcattctgagtatccttgaagtcattatcatcttgctgctc

SEQ ID NO: 280445 - DNA, 120 bp, Artificial Sequence
  ENSG00000129353_9 (sequence is synthesized)
atctttctccggaagagaattctcatcgcgattgcactcatcaaagaagccagcagggctgtgggatacgtcatgtgctccttgctctacccactggtcaccttcttcttgctgtgcctc

SEQ ID NO: 280446 - DNA, 120 bp, Artificial Sequence
  ENSG00000129353_10 (sequence is synthesized)
tgcatcgcctactgggccagcactgctgtcttcctgtccacttccaacgaagcggtctataagatctttgatgacagcccctgcccatttactgcgaaaacctgcaacccagagaccttc

SEQ ID NO: 280447 - DNA, 120 bp, Artificial Sequence
  ENSG00000129353_11 (sequence is synthesized)
ccctcctccaatgagtcccgccaatgccccaatgcccgttgccagttcgccttctacggtggtgagtcgggctaccaccgggccctgctgggcctgcagatcttcaatgccttcatgttc

SEQ ID NO: 280448 - DNA, 120 bp, Artificial Sequence
  ENSG00000129353_12 (sequence is synthesized)
ttctggttggccaacttcgtgctggcgctgggccaggtcacgctggccggggcctttgcctcctactactgggccctgcgcaagccggacgacctgccggccttcccgctcttctctgcc

SEQ ID NO: 280449 - DNA, 120 bp, Artificial Sequence
  ENSG00000129353_13 (sequence is synthesized)
tttggccgggcgctcaggtaccacacaggctccctggcctttggcgcgctcatcctggccattgtgcagatcatccgtgtgatactcgagtacctggatcagcggctgaaagctgcagag

SEQ ID NO: 280450 - DNA, 120 bp, Artificial Sequence
  ENSG00000129353_14 (sequence is synthesized)
gtgcctcatgacctgtctcaaatgctgcttctggtgcctggagaagttcatcaaattccttaataggaatgcctacatcatgattgccatctacggcaccaatttctgcacctcggccag

SEQ ID NO: 280451 - DNA, 120 bp, Artificial Sequence
  ENSG00000129353_15 (sequence is synthesized)
gaatgccttcttcctgctcatgagaaacatcatcagagtggctgtcctggataaagttactgacttcctcttcctgttgggcaaacttctgatcgttggtagtgtggggatcctggcttt

SEQ ID NO: 280452 - DNA, 120 bp, Artificial Sequence
  ENSG00000129353_16 (sequence is synthesized)
cttcttcttcacccaccgtatcaggatcgtgcaggatacagcaccacccctcaattattactgggttcctatactgacggtgatcgttggctcctacttgattgcacacggtttcttcag

SEQ ID NO: 280453 - DNA, 120 bp, Artificial Sequence
  ENSG00000129353_17 (sequence is synthesized)
cgtctatggcatgtgtgtggacacgctgttcctctgcttcttggaggacctggagaggaatgacggctcggccgagaggccttacttcatgtcttccaccctcaagaaactcttgaacaa

SEQ ID NO: 280454 - DNA, 120 bp, Artificial Sequence
  ENSG00000129353_18 (sequence is synthesized)
gaccaacaagaaggcagcggagtcctgaaggccccgtgctccccacctctcaaggagtctcatgccgcagggtgctcagtagctgggtctgttcccccagccccttgggctcacctgaag

SEQ ID NO: 280455 - DNA, 120 bp, Artificial Sequence
  ENSG00000129353_19 (sequence is synthesized)
tcctatcactgccgctctgcccctccccatgagccagatcccaccagtttctggacgtggagagtctggggcatctccttcttatgccaaggggcgcttggagttttcatggctgcccct

SEQ ID NO: 280456 - DNA, 120 bp, Artificial Sequence
  ENSG00000129353_20 (sequence is synthesized)
ccagactgcgagaaacaagtaaaaacccattggggcctcttgatgtctgggatggcacgtggcccgacctccacaagctccctcatgcttcctgtcccccgcttacacgacaacgggcca

SEQ ID NO: 280457 - DNA, 120 bp, Artificial Sequence
  ENSG00000129353_21 (sequence is synthesized)
gaccacaggaaggacggtgtttgtgtctgagggagctgctggccacagtgaacacccacgtttattcctgcctgctccggccaggactgaaccccttctccacacctgaacagttggctc

SEQ ID NO: 280458 - DNA, 120 bp, Artificial Sequence
  ENSG00000129353_22 (sequence is synthesized)
aagggccaccagaagcatttctttattattattattttttaacctggacatgcattaaagggtctattagctttctttccgtctgtctcaacagctgagatggggccgccaaggagtgcc

SEQ ID NO: 280459 - DNA, 120 bp, Artificial Sequence
  ENSG00000129353_23 (sequence is synthesized)
ttccttttgctccctcctagctgggagtgacgggtgggagtgtgtgtgcccaggtgggggtgtctcctggctgggaaggagggaaagggagggagagttttgcgggggttggcagtggag

SEQ ID NO: 280460 - DNA, 120 bp, Artificial Sequence
  ENSG00000129353_24 (sequence is synthesized)
agcaggctggagaggagatggctaatagctgtttaatggaaacctgctgggctggagggagttaggctgaatttcccgacttcctctgccagttattgacacagctctctttgtaagaga

SEQ ID NO: 280461 - DNA, 120 bp, Artificial Sequence
  ENSG00000129353_25 (sequence is synthesized)
ggaaagaaactaaacccacccaagggatgatgtcagggggagaggtggagggcagatgtcctgggcaaaccgggcccctctgcccacacacctcacttgatccttttgccaaacttgtca

SEQ ID NO: 280462 - DNA, 120 bp, Artificial Sequence
  ENSG00000129353_26 (sequence is synthesized)
aactcaggggaactggcttcccagttgcccctttgccatattccaagtccccctcagacttcatgtctctgctcatcagcactgtcccaggatcctggagagggagaactcctggcccca

SEQ ID NO: 280463 - DNA, 120 bp, Artificial Sequence
  ENSG00000129353_27 (sequence is synthesized)
ggggaaagaggggggggtctcccgtttcctgtgcctgcaccagccctgcccccattgcgtctgcacacccctgcgtgtaactgcattccaaccactaataaagtgcctattgtacaggtc

SEQ ID NO: 280464 - DNA, 120 bp, Artificial Sequence
  ENSG00000129353_28 (sequence is synthesized)
acgctgttcctctgcttctgtgaggacctggaaaggaatgacggctctcaggagcgaccctacttcatgtcgcccgagctgagagacatcctgttgaaggggagtgcggaggaggggaag

SEQ ID NO: 280465 - DNA, 120 bp, Artificial Sequence
  ENSG00000129353_29 (sequence is synthesized)
cgggcagaagccgaggagtagagagtgagggagactggcgtgggggccaggtttcctccatgtagactgggggtgcatgaagcgggggggttcctggcctgcgagtgtggggatcctgtg

SEQ ID NO: 280466 - DNA, 120 bp, Artificial Sequence
  ENSG00000129353_30 (sequence is synthesized)
tgtccctcggagcccactacagtctgcccctctctggtcccagtgtgtctgctttctaaccctctgaggcttctctgtgaccctcatccacctaccctgtccttgaggcccctgcccgtg

SEQ ID NO: 280467 - DNA, 120 bp, Artificial Sequence
  ENSG00000129353_31 (sequence is synthesized)
ggaggagcaaaccagagaacctactgggtggaattcttgctgttgaggggacaggcccaagaggcctggcccaccattggttattaccagagtgaattggagtggtatatatttgcgctg

SEQ ID NO: 280468 - DNA, 75 bp, Artificial Sequence
  ENSG00000129353_32 (sequence is synthesized)
ttattaccagagtgaattggagtggtatatatttgcgctgaagagagcaggaataagactggtttattagccggg

SEQ ID NO: 280469 - DNA, 120 bp, Artificial Sequence
  ENSG00000129353_33 (sequence is synthesized)
agcccgcggagcctcccgcccgcccgggctggggtcgcgctggctcggactccgctccccgccccgccgcggccatggaggacgagcggaaaaacggagcctacggaacgccacagaagt

SEQ ID NO: 280470 - DNA, 120 bp, Artificial Sequence
  ENSG00000129353_34 (sequence is synthesized)
tcttcttgctgtgcctctgcatcgcctactgggccagcactgctgtgtatctgcccccagacactgatctctgaccccagggatggctaaagaccaactttgcctagaagtgacctgcag

SEQ ID NO: 280471 - DNA, 120 bp, Artificial Sequence
  ENSG00000129353_35 (sequence is synthesized)
cttagggatagggctggaaactggtgggagaatggattctttcccacaaaagtccctggggtcctcagtcctagacctctgcttccttaacgaacctccagcttcctgtccacttccaac

SEQ ID NO: 280472 - DNA, 120 bp, Artificial Sequence
  ENSG00000129353_36 (sequence is synthesized)
caggtgtgagccacctcgcccggcccatttttccccatttcatttcctgtctccatgccctcttcttgaccccagtgatggccacgtcttgtttctagaatcccttcctttgcacaagcc

SEQ ID NO: 280473 - DNA, 120 bp, Artificial Sequence
  ENSG00000129353_37 (sequence is synthesized)
cacaagccatattctgaactcttaattccttcccttaacttcaatccctatgtctcctgtcctacctcatggttttcctggccccacacctgatgctcagagcccactgtgaacccctgg

SEQ ID NO: 280474 - DNA, 120 bp, Artificial Sequence
  ENSG00000129353_38 (sequence is synthesized)
tggttggcctttagtgagtcacagtctcccattcctgcccccacatgaggccttggagggagtggggagcccagccggctcagcctttgccctttgcagtgatcattctgagtatccttg

SEQ ID NO: 280475 - DNA, 120 bp, Artificial Sequence
  ENSG00000129354_0 (sequence is synthesized)
gcgcttccgcaggaagaaggaagcggcgccgccatcgcctcccggcgctccctccccgactcctaagtccttcggccgccaccatgtccgcctcggctgtcttcattctggacgttaagg

SEQ ID NO: 280476 - DNA, 120 bp, Artificial Sequence
  ENSG00000129354_1 (sequence is synthesized)
gcaagccattgatcagccgcaactacaagggcgatgtggccatgagcaagattgagcacttcatgcctttgctggtacagcgggaggaggaaggcgccctggccccgctgctgagccacg

SEQ ID NO: 280477 - DNA, 120 bp, Artificial Sequence
  ENSG00000129354_2 (sequence is synthesized)
gccaggtccacttcctatggatcaaacacagcaacctctacttggtggccaccacatcgaagaatgccaatgcctccctggtgtactccttcctgtataagacaatagaggtattctgcg

SEQ ID NO: 280478 - DNA, 120 bp, Artificial Sequence
  ENSG00000129354_3 (sequence is synthesized)
aatacttcaaggagctggaggaggagagcatccgggacaactttgtcatcgtctacgagttgctggacgagctcatggactttggcttcccgcagaccaccgacagcaagatcctgcagg

SEQ ID NO: 280479 - DNA, 120 bp, Artificial Sequence
  ENSG00000129354_4 (sequence is synthesized)
agtacatcactcagcagagcaacaagctggagacgggcaagtcacgggtgccacccactgtcaccaacgctgtgtcctggcgctccgagggtatcaagtataagaagaacgaggtcttca

SEQ ID NO: 280480 - DNA, 120 bp, Artificial Sequence
  ENSG00000129354_5 (sequence is synthesized)
ttgatgtcatagagtctgtcaacctgctggtcaatgccaacggcagcgtccttctgagcgaaatcgtcggtaccatcaagctcaaggtgtttctgtcaggaatgccagagctgcggctgg

SEQ ID NO: 280481 - DNA, 120 bp, Artificial Sequence
  ENSG00000129354_6 (sequence is synthesized)
gcctcaatgaccgcgtgctcttcgagctcactggccgcagcaagaacaaatcagtagagctggaggatgtaaaattccaccagtgcgtgcggctctctcgctttgacaacgaccgcacca

SEQ ID NO: 280482 - DNA, 120 bp, Artificial Sequence
  ENSG00000129354_7 (sequence is synthesized)
tgatctggattgagtctgtcattgagaagttctcccacagccgcgtggagatcatggtcaaggccaaggggcagtttaagaaacagtcagtggccaacggtgtggagatatctgtgcctg

SEQ ID NO: 280483 - DNA, 120 bp, Artificial Sequence
  ENSG00000129354_8 (sequence is synthesized)
tacccagcgatgccgactcccccagattcaagaccagtgtgggcagcgccaagtatgtgccggagagaaacgtcgtgatttggagtattaagtctttcccggggggcaaggagtacttga

SEQ ID NO: 280484 - DNA, 120 bp, Artificial Sequence
  ENSG00000129354_9 (sequence is synthesized)
tgcgagcccactttggcctccccagtgtggaaaaggaagaggtggagggccggccccccatcggggtcaagtttgagatcccctacttcaccgtctctgggatccaggtccgatacatga

SEQ ID NO: 280485 - DNA, 120 bp, Artificial Sequence
  ENSG00000129354_10 (sequence is synthesized)
agatcattgagaaaagtggttaccaggccctgccctgggttcgctacatcacccagagtggcgattaccaacttcgtaccagctagaagggagaagagatgggggcttgaacacggggct

SEQ ID NO: 280486 - DNA, 120 bp, Artificial Sequence
  ENSG00000129354_11 (sequence is synthesized)
tccttacagccccggatgcagattttagagggagggcaggtgcgggctgtgtgtgtctgtgtgagggcaggtcctggacttggcagtttcttgctcccagcacccgccccttcctcacct

SEQ ID NO: 280487 - DNA, 120 bp, Artificial Sequence
  ENSG00000129354_12 (sequence is synthesized)
cttccttattccataggctgggagagaaactctctctgcttccctcgcccttggagctttccccatccccctgattttatatgaagaaatagaagaggggcttgaagtcctcctcgcgag

SEQ ID NO: 280488 - DNA, 120 bp, Artificial Sequence
  ENSG00000129354_13 (sequence is synthesized)
tgccttcttgcaattacctgccttagcgggtgttgcgggtccctccttcacagccgctgagcccagaggtcccgctggcccctcctctgaattttaggatgtcattaaaaagatgaatct

SEQ ID NO: 280489 - DNA, 120 bp, Artificial Sequence
  ENSG00000129354_14 (sequence is synthesized)
gcttaggctggggggcaggggcaggtagagatgagggtggtggcaagggacagggtggaggttcggggtctgtattccatttacttctccataaatggcaccttttccttaaccttgctg

SEQ ID NO: 280490 - DNA, 120 bp, Artificial Sequence
  ENSG00000129354_15 (sequence is synthesized)
ccccagtggtggccaccacatcgaagaatgccaatgcctccctggtgtactccttcctgtataagacaatagaggtaggtactagcctcccattggctaactggtctatccgtctatccc

SEQ ID NO: 280491 - DNA, 120 bp, Artificial Sequence
  ENSG00000129354_16 (sequence is synthesized)
gaaggaagcggcgccgccatcgcctcccggcgctccctccccgactcctaagtccttcggccgccaccatgtccgcctcggctgtcttcattctggacgttaagggcaagagggatcccg

SEQ ID NO: 280492 - DNA, 120 bp, Artificial Sequence
  ENSG00000129354_17 (sequence is synthesized)
gatcaaacacagcaacctctactgtatccaccccacgtggtgtccctggaggtgggtgtgggggctgtcggcgatggtggcagctcaggccaagagagggtgggctgaggacaggagttg

SEQ ID NO: 280493 - DNA, 120 bp, Artificial Sequence
  ENSG00000129355_0 (sequence is synthesized)
cgggagcacgttggctccgccccctggcggctgcctcagcggcggcggcggcgcaggctcagagcagaccccgcccggcgaggaggagggagggccgccagtgtcgacatgctgctggag

SEQ ID NO: 280494 - DNA, 120 bp, Artificial Sequence
  ENSG00000129355_1 (sequence is synthesized)
gtgtcgacatgctgctggaggaggttcgcgccggcgaccggctgagtggggcggcggcccggggcgacgtgcaggaggtgcgccgccttctgcaccgggagctggtgcatcccgacgccc

SEQ ID NO: 280495 - DNA, 120 bp, Artificial Sequence
  ENSG00000129355_2 (sequence is synthesized)
tcaaccgcttcggcaagacggcgctgcaggtcatgatgtttggcagcaccgccatcgccctggagctgctgaagcaaggtgccagccccaatgtccaggacacctccggtaccagtccag

SEQ ID NO: 280496 - DNA, 120 bp, Artificial Sequence
  ENSG00000129355_3 (sequence is synthesized)
tccatgacgcagcccgcactggattcctggacaccctgaaggtcctagtggagcacggggctgatgtcaacgtgcctgatggcaccggggcacttccaatccatctggcagttcaagagg

SEQ ID NO: 280497 - DNA, 120 bp, Artificial Sequence
  ENSG00000129355_4 (sequence is synthesized)
ctgctgtggtcagctttctggcagctgaatctgatctccatcgcagggacgccaggggtctcacacccttggagctggcactgcagagaggggctcaggacctcgtggacatcctgcagg

SEQ ID NO: 280498 - DNA, 120 bp, Artificial Sequence
  ENSG00000129355_5 (sequence is synthesized)
gccacatggtggccccgctgtgatctggggtcaccctctccagcaagagaaccccgtggggttatgtatcagaagagaggggaagaaacactttctcttcttgtttctcctgcccactgc

SEQ ID NO: 280499 - DNA, 120 bp, Artificial Sequence
  ENSG00000129355_6 (sequence is synthesized)
tgcagtaggggaggagcacagtttgtggcttataggtgttggttttgggggtgtgagtgtttgggggacgtttctcatttgtttttctcactccttttggtgtgttggacagagaagggc

SEQ ID NO: 280500 - DNA, 120 bp, Artificial Sequence
  ENSG00000129355_7 (sequence is synthesized)
tcctgcaggccacagccacctaaacggttcagtttcttctgcgcctcaggctgctggggcctcagacgagacccaagggcagagcatttaagagtgaagtcatgacctccagggagccta

SEQ ID NO: 280501 - DNA, 120 bp, Artificial Sequence
  ENSG00000129355_8 (sequence is synthesized)
gaagctggtggccttggccggctgtgctcagagacctgaagtgtgcacgttgcttcaggcatggggggtggggggagcgtcccaaatcaataagaaggtagaatgagttatgagttattc

SEQ ID NO: 280502 - DNA, 80 bp, Artificial Sequence
  ENSG00000129355_9 (sequence is synthesized)
agagcagaccccgcccggcgaggaggagggagggtgagttagggggagacccggcccccaaggggcgggcgccgggcagg

SEQ ID NO: 280503 - DNA, 80 bp, Artificial Sequence
  ENSG00000129355_10 (sequence is synthesized)
ctcgccgtcctccggctgacagggggaggagcccgccgggagggccggggtctcgggctggggagccgggacgggagagc

SEQ ID NO: 280504 - DNA, 120 bp, Artificial Sequence
  ENSG00000129355_11 (sequence is synthesized)
ttccagtctcttgtacagcgttttaaaagaaatggattctatttattatgctttattggaaaaaatgttgtaataatttaatgtttttacccattaaattaagacttgtgcatgatcaca

SEQ ID NO: 280505 - DNA, 120 bp, Artificial Sequence
  ENSG00000129422_0 (sequence is synthesized)
agtactgtgtctgatgctcctaaggaggctgtaaagtgcttttgtccattcctttttgtcttttaacaaaggggtttaccatacacccacagagcctgtctagtggcgatgtgttcctgt

SEQ ID NO: 280506 - DNA, 120 bp, Artificial Sequence
  ENSG00000129422_1 (sequence is synthesized)
tgcggattaagcattcaaatcagtgagtctctttcttagtttgatttgctagctggtttaatctgttttgtgtagtgccttggagcttacgcatttttttttttttccctccattcgaat

SEQ ID NO: 280507 - DNA, 120 bp, Artificial Sequence
  ENSG00000129422_2 (sequence is synthesized)
tcactaagagcaagcatgagggatatgagagtgaacatggctgcagtttttcctgcttaagcttgctttgatccttttaaatgactgtaccaggaggatttcgcagttgtacagaaactg

SEQ ID NO: 280508 - DNA, 120 bp, Artificial Sequence
  ENSG00000129422_3 (sequence is synthesized)
atatttcttcaaaaatctttatcaattctacactcaccccaccggctggttcagagaggcactatgatgctaccttattgacactgctggtcgtgggatcgtacagcctttgtataattc

SEQ ID NO: 280509 - DNA, 120 bp, Artificial Sequence
  ENSG00000129422_4 (sequence is synthesized)
ctttgttagccacgtttactgggaaaaaaactggtaatgccgctgtcatcaaatatgaggagaaacctccaaaaccagcatttcagaatggttcctcaggatccttttatttgaagcctt

SEQ ID NO: 280510 - DNA, 120 bp, Artificial Sequence
  ENSG00000129422_5 (sequence is synthesized)
tggtatccagggctcatgttcacttgatgaaaactcctccaaaaggtccttcgagaaaaaatttatttacagctcttaatgcagttgaaaagagcaggcaaaagaatcctcgaagcttat

SEQ ID NO: 280511 - DNA, 120 bp, Artificial Sequence
  ENSG00000129422_6 (sequence is synthesized)
gtatccagccacagacagctcccgatgcgctgccccctgagaaaacacttgaattgacgcaatataaaacaaaatgtgaaaaccaaagtggatttatcctgcagctcaagcagcttcttg

SEQ ID NO: 280512 - DNA, 120 bp, Artificial Sequence
  ENSG00000129422_7 (sequence is synthesized)
cctgtggtaataccaagtttgaggcattgacagttgtgattcagcacctgctgtctgagcgggaggaagcactgaaacaacacaaaaccctatctcaagaacttgttaacctccggggag

SEQ ID NO: 280513 - DNA, 120 bp, Artificial Sequence
  ENSG00000129422_8 (sequence is synthesized)
agctagtcactgcttcaaccacctgtgagaaattagaaaaagccaggaatgagttacaaacagtgtatgaagcattcgtccagcagcaccaggctgaaaaaacagaacgagagaatcggc

SEQ ID NO: 280514 - DNA, 120 bp, Artificial Sequence
  ENSG00000129422_9 (sequence is synthesized)
ttaaagagttttacaccagggagtatgaaaagcttcgggacacttacattgaagaagcagagaagtacaaaatgcaattgcaagagcagtttgacaacttaaatgctgcgcatgaaacct

SEQ ID NO: 280515 - DNA, 120 bp, Artificial Sequence
  ENSG00000129422_10 (sequence is synthesized)
ctaagttggaaattgaagctagccactcagagaaacttgaattgctaaagaaggcctatgaagcctccctttcagaaattaagaaaggccatgaaatagaaaagaaatcgcttgaagatt

SEQ ID NO: 280516 - DNA, 120 bp, Artificial Sequence
  ENSG00000129422_11 (sequence is synthesized)
tactttctgagaagcaggaatcgctagagaagcaaatcaatgatctgaagagtgaaaatgatgctttaaatgaaaaattgaaatcagaagaacaaaaaagaagagcaagagaaaaagcaa

SEQ ID NO: 280517 - DNA, 120 bp, Artificial Sequence
  ENSG00000129422_12 (sequence is synthesized)
atttgaaaaatcctcagatcatgtatctagaacaggagttagaaagcctgaaagctgtgttagagatcaagaatgagaaactgcatcaacaggacatcaagttaatgaaaatggagaaac

SEQ ID NO: 280518 - DNA, 120 bp, Artificial Sequence
  ENSG00000129422_13 (sequence is synthesized)
tggtggacaacaacacagcattggttgacaaattgaagcgtttccagcaggagaatgaagaattgaaagctcggatggacaagcacatggcaatctcaaggcagctttccacggagcagg

SEQ ID NO: 280519 - DNA, 120 bp, Artificial Sequence
  ENSG00000129422_14 (sequence is synthesized)
ctgttctgcaagagtcgctggagaaggagtcgaaagtcaacaagcgactctctatggaaaacgaggagcttctgtggaaactgcacaatggggacctgtgtagccccaagagatccccca

SEQ ID NO: 280520 - DNA, 120 bp, Artificial Sequence
  ENSG00000129422_15 (sequence is synthesized)
catcctccgccatccctttgcagtcaccaaggaattcgggctccttccctagccccagcatttcacccagatgacacctccccaaagtccacagactctctgaaagcattttgatgcagg

SEQ ID NO: 280521 - DNA, 120 bp, Artificial Sequence
  ENSG00000129422_16 (sequence is synthesized)
agaggtatatcagcacacgtgtgatcaccgtagggtaactggagcgtcaccaccggcggaatcgcagcttctgagactggaactctggaggaagacttttgcctccgtccaaaagattcc

SEQ ID NO: 280522 - DNA, 120 bp, Artificial Sequence
  ENSG00000129422_17 (sequence is synthesized)
tccaaaaaaagatttaaaaaaagatttcggcatcgacacggacgttgttgcacaaagcacttaaagaacgagagcatcttgttcattgcctttttcacctaagcatagggggaaaaactc

SEQ ID NO: 280523 - DNA, 120 bp, Artificial Sequence
  ENSG00000129422_18 (sequence is synthesized)
tcagggccctattaagatttataacctttgtaatgttcttcaccacagacaccttcttgtgagttttcagtctgactgtgggggtggggggtgtgaatgaaatggatgtcacagagtgtc

SEQ ID NO: 280524 - DNA, 120 bp, Artificial Sequence
  ENSG00000129422_19 (sequence is synthesized)
atgtgtctgatgcagcctcctctgctgtgtattaaatgtcaaaatctgaatatatctggatatgtactaatcaaataataatcaatcaatcagcatatacatttcagccaaagccataga

SEQ ID NO: 280525 - DNA, 120 bp, Artificial Sequence
  ENSG00000129422_20 (sequence is synthesized)
agaaaaagcaatagttgcttgaattatgatcatctaccaccaactctgctcagccctgtaacagggtagggagagggtataacaggaagagctttgacttgtccctgtctatacattctc

SEQ ID NO: 280526 - DNA, 120 bp, Artificial Sequence
  ENSG00000129422_21 (sequence is synthesized)
tgtatcttttgggggtaacttcttggcagtttttcagtgttcagccatgtcagttgaaactagatttttctgtagattttttacttacccatgtgagcctaacactatcctgtaattcat

SEQ ID NO: 280527 - DNA, 120 bp, Artificial Sequence
  ENSG00000129422_22 (sequence is synthesized)
tttctcaggctatgtgtaaatgtagaaccctaatttttctataaaaaaacaaactaactaactaactgtgtaaagaaagaaaaagggaagtaccaatgggtttttccaccttatttttac

SEQ ID NO: 280528 - DNA, 120 bp, Artificial Sequence
  ENSG00000129422_23 (sequence is synthesized)
ctttgatctacccttgcagatttaacctgtcttcttccctcccattattctcattttccttttacctttctccaccatccagagccacaaaagcaaaccttctacctcctacctactttt

SEQ ID NO: 280529 - DNA, 120 bp, Artificial Sequence
  ENSG00000129422_24 (sequence is synthesized)
ctctgggacaaggataaaggaatatgattttccagagccccagagccagctcatcttccaggtgctgaaaccactttccaaataaactaaagcctggatttgatattacaaattttggga

SEQ ID NO: 280530 - DNA, 120 bp, Artificial Sequence
  ENSG00000129422_25 (sequence is synthesized)
aatcttagaataaagaacgagaacaaggaagtcattggctagtataattaagaaaggtaggattcagtgcttaccgatgatgcagtacttgatagaagaaaacagtctgggaggatagcg

SEQ ID NO: 280531 - DNA, 120 bp, Artificial Sequence
  ENSG00000129422_26 (sequence is synthesized)
ctcatttttcagttaccctttaaggagtccctttgtctttgggaaagtagcagaatggtccgcttctttcccatgagtggaaaatgtggcttgtccaactctcctccaggttgcatttca

SEQ ID NO: 280532 - DNA, 120 bp, Artificial Sequence
  ENSG00000129422_27 (sequence is synthesized)
gtttctttccaaaacttattacctcccctaatcctgagactttggaaaaggtggaaggaagaactgttgctttatctccccctccctgcatgtgtcaacattgtgatgtcagtatttact

SEQ ID NO: 280533 - DNA, 120 bp, Artificial Sequence
  ENSG00000129422_28 (sequence is synthesized)
aatctacattcagtggctgtacaaataacagctgtagtaagaagagattcaggatgctagaggtgaatatttgggtcatttacatgtacactacatagcaagttgatactcatgttgcat

SEQ ID NO: 280534 - DNA, 120 bp, Artificial Sequence
  ENSG00000129422_29 (sequence is synthesized)
gttcttttaaattagtgattttgtgtcttaagtctttaacttccaatacttcatcatgtatgtaaccttccatgtttgcttctgataaatggaaatgtaggttcactgccacttcatgag

SEQ ID NO: 280535 - DNA, 120 bp, Artificial Sequence
  ENSG00000129422_30 (sequence is synthesized)
atatctctgctcacgcttccaagttgttctcaatgacattagccaaagttgggtttgccattcatcccctaggcatggtaaatcttgtgttgttccctgctgtcctccgtattacgtgac

SEQ ID NO: 280536 - DNA, 120 bp, Artificial Sequence
  ENSG00000129422_31 (sequence is synthesized)
cggcaaataaatctcatagcagttaatataaaacatctttggaggatgggagagaacaggagggaagatgggaaacaaaatagagaattcttaagattttgtttaaaccaaatgtttcat

SEQ ID NO: 280537 - DNA, 120 bp, Artificial Sequence
  ENSG00000129422_32 (sequence is synthesized)
gtagaatgcaaaatgttggcacgtcaaaaatatgaatgtgtagacaactgtagttgtgctcagtttgtagtgatgggaagtgtattttactctgatcaaataaataatgctggaatactc

SEQ ID NO: 280538 - DNA, 120 bp, Artificial Sequence
  ENSG00000129422_33 (sequence is synthesized)
acagtgtgatgtggttcagaggcagcttctagacctgcaggagggagattgtattcagaggaagagcatcattttggcaacatctgaaagtgaaaacggaagccagaaacacttggccag

SEQ ID NO: 280539 - DNA, 120 bp, Artificial Sequence
  ENSG00000129422_34 (sequence is synthesized)
ccctgggggatttttttcttctatgcctctctggtggaatgacatttgctgtgtaggcatctttcctctgactgtatttcttggccttgaagagtactgagtttaaaaagacagtatgtg

SEQ ID NO: 280540 - DNA, 120 bp, Artificial Sequence
  ENSG00000129422_35 (sequence is synthesized)
acagtccatggaaattgcctcttctgtgaaatctcgccacctgctccgaagacatgttgttgtctcccaaattctccttatccaccattcacatacgactgacggccaaaggattgcttc

SEQ ID NO: 280541 - DNA, 120 bp, Artificial Sequence
  ENSG00000129422_36 (sequence is synthesized)
tatgagagtaagtagctgcataccctggcacttcaggaatactgggatatgtgacttgcaattaaacaggattgttaccagctttactgttggaattttgaaggtgtggcacaaaatcag

SEQ ID NO: 280542 - DNA, 120 bp, Artificial Sequence
  ENSG00000129422_37 (sequence is synthesized)
agacccgactggtgggtggcgcggccacctgtatgcttcttgcacagtgcgaggggtggggggacttggagacagaagctggaaaatgggctgccccagcagcaaactgtgcctctattc

SEQ ID NO: 280543 - DNA, 120 bp, Artificial Sequence
  ENSG00000129422_38 (sequence is synthesized)
attgctaaagaaggcctatgaagcctccctttcaggcaaggatgctttttttcctctttaaacagaataaaatctgaaggaaccacatgatgttttaagatggaaatgattcataacttc

SEQ ID NO: 280544 - DNA, 120 bp, Artificial Sequence
  ENSG00000129422_39 (sequence is synthesized)
ctgcttcagcgaatgccctgtggccttcaggctggggtgttcttggttcctttttgcgtggtttattgttaacagatgccttttcccactaaggatgcaaataatagttacaaatgccag

SEQ ID NO: 280545 - DNA, 120 bp, Artificial Sequence
  ENSG00000129422_40 (sequence is synthesized)
ccttgtgttaaataggatgggctttggaagactgtaaaggccattttggcggtggtggttgccagcttaggtccctgggaagtggcaagtacaagtttctatcttgtaatccacagtaaa

SEQ ID NO: 280546 - DNA, 120 bp, Artificial Sequence
  ENSG00000129422_41 (sequence is synthesized)
ggatccaccccaagtgctcctgcacagcagtgttgctgtgaaatgtcgatgccacttattgaatagaaaaatagtcttttctatttttcatctgtcatcagtgggagggtgtaagccatt

SEQ ID NO: 280547 - DNA, 120 bp, Artificial Sequence
  ENSG00000129422_42 (sequence is synthesized)
gctttcagaacagaatcggcagtgtcgctcacagtctttctactaaaccagttgcatcttacagagcagcgtggatgagtgctaagaaccggctgtgtgaccttcagcaaggactttctc

SEQ ID NO: 280548 - DNA, 120 bp, Artificial Sequence
  ENSG00000129422_43 (sequence is synthesized)
accacaaaaatagagttgcccaaagtcaggcagaggtgataatgtgtaaaagtgactggctccaggcagacttgtagtgaacattgtttttcttccttcctgctagaaatgagtataatt

SEQ ID NO: 280549 - DNA, 120 bp, Artificial Sequence
  ENSG00000129422_44 (sequence is synthesized)
ttagacttatgtttaggttatgaagagcaaattgaaaagagcacagggtttccagaccaggagtctggagtggcatttatgagagcctgccctgaaatggcactcagtgttgtcctaagg

SEQ ID NO: 280550 - DNA, 120 bp, Artificial Sequence
  ENSG00000129422_45 (sequence is synthesized)
tcgcatggcctctgtgggccatggtgggcttcagtgggcctcagggctctcagtcataaaatgggaatgtctaccctaaccacctctcaaggccattttgagaacagatggccaatttac

SEQ ID NO: 280551 - DNA, 120 bp, Artificial Sequence
  ENSG00000129422_46 (sequence is synthesized)
ataaaagcatactatagatgtaaagtaacgtcatacggcttcatcatcaacccctacatctatatgctttaactgttttagagtacattgatctcatagaatgttattgcctcaaaaata

SEQ ID NO: 280552 - DNA, 120 bp, Artificial Sequence
  ENSG00000129422_47 (sequence is synthesized)
tgttttccgcagcgggaggaagcactgaaacaacacaaaaccctatctcaagaacttgttaacctccggggagagctagcctgtcttccaggagtcttcaaacacactggaatcaatgga

SEQ ID NO: 280553 - DNA, 120 bp, Artificial Sequence
  ENSG00000129422_48 (sequence is synthesized)
aaagggggcggcagcgccggcggagcggaggcgggtctcacgtgggccagcgcagagcctgcggaagggacggatgcggatctcgtcgctgtcaccttgaaagtgaccgaggggcttgac

SEQ ID NO: 280554 - DNA, 120 bp, Artificial Sequence
  ENSG00000129422_49 (sequence is synthesized)
tgtggactccttacgccgcccacccgggcccggcggtcccagccttctcgcagggccccttctcagcagaagcaagcggggccgagaaagcgggtggaatagggttgctgcaggtcccaa

SEQ ID NO: 280555 - DNA, 120 bp, Artificial Sequence
  ENSG00000129422_50 (sequence is synthesized)
agacccctcgtggcgcctcgctactttctgcagcttgtttgcactttttcacgctctagaaaaatctcatcttaattaagggaacaacaaatcatttaatcttcagagcatcttagactg

SEQ ID NO: 280556 - DNA, 120 bp, Artificial Sequence
  ENSG00000129422_51 (sequence is synthesized)
aaaacctttcaactgtgctgaaaaacctagaagacagaccattttgcccaccctctcatttaaaaggaattgaagaagaaataaaatggcagaggtttaaggttactattcaggatgact

SEQ ID NO: 280557 - DNA, 120 bp, Artificial Sequence
  ENSG00000129422_52 (sequence is synthesized)
gatgataattcagatgataaaatagaagatgaattgcaaaccttctttaccagtgataaagatggaaatacacatgcatacaacccgaaatcaccacctacacaaaactcttcagccagc

SEQ ID NO: 280558 - DNA, 120 bp, Artificial Sequence
  ENSG00000129422_53 (sequence is synthesized)
agtgtgaactggaattctgccaacccagatgacatggtggttgattatgaaactgaccctgctgtagttactggtgaaaatatttctttaagccttcagggtgttgaagtatttggtcat

SEQ ID NO: 280559 - DNA, 120 bp, Artificial Sequence
  ENSG00000129422_54 (sequence is synthesized)
gaaaagtcttctagtgatttcattagtaagcaggtgttagatatgcataaagattctatttgtcagtgtcctgcacttgtaggtactgagaagcccaaatatctgcaacacagttgtcat

SEQ ID NO: 280560 - DNA, 120 bp, Artificial Sequence
  ENSG00000129422_55 (sequence is synthesized)
tccctagaagcagttgagggccagagtgttgagccatctttgccttttgtgtggaagcctaatgacaatttgaactgtgcaggctactgtgatgccttggagctaaaccaaacatttgac

SEQ ID NO: 280561 - DNA, 120 bp, Artificial Sequence
  ENSG00000129422_56 (sequence is synthesized)
atgacagtggataaagttaactgcacctttatatcacatcatgccatcggaaagagtcagtccttccatactgctggaagcctgccaccaactggtaggagaagtggaagtacatcttct

SEQ ID NO: 280562 - DNA, 120 bp, Artificial Sequence
  ENSG00000129422_57 (sequence is synthesized)
ttatcctattccacttggacatcttcccattctgataagacgcatgcaagagaaactacttatgatagagaaagctttgaaaaccctcaagtcacaccatcagaagcccaagacatgact

SEQ ID NO: 280563 - DNA, 120 bp, Artificial Sequence
  ENSG00000129422_58 (sequence is synthesized)
tacacagcattttctgatgtggtgatgcaaagtgaggtttttgtttcagatattggaaatcagtgtgcatgttcttcaggaaaggtcaccagtgagtacacagatggatcacaacaaaga

SEQ ID NO: 280564 - DNA, 120 bp, Artificial Sequence
  ENSG00000129422_59 (sequence is synthesized)
ctagttggagaaaaggagacacaagcactaacaccagtttctgatggcatggaagtccccaatgattctgcattacaagagttcttttgtttatcccatgatgaatccaatagcgaacca

SEQ ID NO: 280565 - DNA, 120 bp, Artificial Sequence
  ENSG00000129422_60 (sequence is synthesized)
cattcacagagctcatacaggcacaaggaaatgggccaaaatctgagagagacagtgtcctattgtcttattgatgatgaatgccctttaatggtgccagcttttgataagagcgaagct

SEQ ID NO: 280566 - DNA, 120 bp, Artificial Sequence
  ENSG00000129422_61 (sequence is synthesized)
ccaggacaaaaggtgggctcgtcatttggactgacttgggatgcaaatgatatggtcattagcacagacaaaacgatgtgcatgtcaacaccagtcctagaacccacaaaagtaaccttt

SEQ ID NO: 280567 - DNA, 120 bp, Artificial Sequence
  ENSG00000129422_62 (sequence is synthesized)
tctgtttcaccgattgaagcgacggagaaatgtaagaaagtggagaagggtaatcgagggcttaaaaacataccagactcgaaggaggcacctgtgaacctgtgtaaacccagtttagga

SEQ ID NO: 280568 - DNA, 120 bp, Artificial Sequence
  ENSG00000129422_63 (sequence is synthesized)
aaatcaacaatcaaaacgaataccccaataggctgcaaagttagaaaaactgaaattataagttacccaagaccaaacttcaagaatgtcaaagcaaaagttatgtctagagcagtgttg

SEQ ID NO: 280569 - DNA, 120 bp, Artificial Sequence
  ENSG00000129422_64 (sequence is synthesized)
cagcccaaagatgctgctttatcaaaggtcacgcccagacctcagcagaccagtgcctcatcaccctcatcagtgaattcaagacaacaaacagtcttgagcagaacaccgagatctgac

SEQ ID NO: 280570 - DNA, 120 bp, Artificial Sequence
  ENSG00000129422_65 (sequence is synthesized)
ttgaatgcagacaaaaaagcagaaattctaattaacaagacacataagcagcagtttaataaactcattactagccaggctgtgcatgttacaactcattctaaaaatgcttcacacagg

SEQ ID NO: 280571 - DNA, 120 bp, Artificial Sequence
  ENSG00000129422_66 (sequence is synthesized)
gttccaagaacaacatctgccgtgaaatcgaatcaggaagatgttgacaaagccagttcttctaactcagcatgcgagaccgggtccgtttctgcgttgtttcagaagatcaaaggcata

SEQ ID NO: 280572 - DNA, 120 bp, Artificial Sequence
  ENSG00000129422_67 (sequence is synthesized)
ctccctgttaaaatggaaagtgcagaatgtttggaaatgacctatgttcccaacattgataggattagccctgaaaagaagggtgaaaaagaaaatgggacatctatggaaaaacaagag

SEQ ID NO: 280573 - DNA, 120 bp, Artificial Sequence
  ENSG00000129422_68 (sequence is synthesized)
ctgaaacaagagattatgaatgagacttttgaatatggttctctgtttttgggctctgcttcaaaaacaacgaccacctcaggtaggaatatatccaagcctgactcctgcggtttgagg

SEQ ID NO: 280574 - DNA, 120 bp, Artificial Sequence
  ENSG00000129422_69 (sequence is synthesized)
caaatagctgctccaaaagccaaagtggggccccctgtttcctgtttgaggcggaacagtgacaatagaaatcccagtgctgatcgagccgtatctcctcagaggatcaggcgtgtgtcc

SEQ ID NO: 280575 - DNA, 120 bp, Artificial Sequence
  ENSG00000129422_70 (sequence is synthesized)
agttctggaaagcctacatccttgaaaactgcacagtcgtcatgggtgaatttgcctagaccacttcctaaatccaaagcatctttgaaaagtcctgcgctgcggaggacaggaagcacc

SEQ ID NO: 280576 - DNA, 120 bp, Artificial Sequence
  ENSG00000129422_71 (sequence is synthesized)
ccctcaatagccagcacccacagtgagctgagcacttacagcaacaattgtaagtcgactttatatcacacttcgggggttgtggaaacagtcattacaagaaaaactaatgctctgcaa

SEQ ID NO: 280577 - DNA, 120 bp, Artificial Sequence
  ENSG00000129422_72 (sequence is synthesized)
ataattagaatttttgtttctggggtttcaggaaaaataggcatactgcttccttggagttgctctgaaagtttggcagaaaaaaaattctttgaaaaacactcttgaaataattatgtg

SEQ ID NO: 280578 - DNA, 120 bp, Artificial Sequence
  ENSG00000129422_73 (sequence is synthesized)
ttaaagtatatttttgcatgaaggattcgaaagtgcatcgtctgaagtgatggtgttttggaggtttaagagtagcaacccaggggatttggactctaactggaatcagaaaaaaagatt

SEQ ID NO: 280579 - DNA, 120 bp, Artificial Sequence
  ENSG00000129422_74 (sequence is synthesized)
atttcagtttcatttactttgcaaaagactatctcctgtggaatctttggatgctagattttgtgtaataggactaatataacttgaatcctaattctaaaaaattgaaactcaggagaa

SEQ ID NO: 280580 - DNA, 120 bp, Artificial Sequence
  ENSG00000129422_75 (sequence is synthesized)
ttttaaaaatacccagccgctctgttttgctgttttaaaatctttttcagtatgtttgttagtgtataaatattttaatatggaattgcattttccttaattaaatctccaaagtgtgct

SEQ ID NO: 280581 - DNA, 120 bp, Artificial Sequence
  ENSG00000129422_76 (sequence is synthesized)
gtcaggaactgtgcgtgatgttgcaggacattaggcacagatgaaaatctaagaagtccagtgatgacgtcactgacatggagaaggttgaaaagagcaggcaaaagaatcctcgaagct

SEQ ID NO: 280582 - DNA, 120 bp, Artificial Sequence
  ENSG00000129422_77 (sequence is synthesized)
gaacacagaagcatccaaccgcttctgtcacgtaagcatgctgaggctgcggaaaaagagtgcgtctgactgtagtccgggagaaagggatgggctggcagaggaggaggagaaaatgca

SEQ ID NO: 280583 - DNA, 120 bp, Artificial Sequence
  ENSG00000129422_78 (sequence is synthesized)
ctctgtgtctgtgttcctgagggtagggaaggagacagaggagagttgagcggtgaatcccagttgcgttgctcttcatgcattctttgtgtgtgcacatgtggggacagagtctcgcga

SEQ ID NO: 280584 - DNA, 120 bp, Artificial Sequence
  ENSG00000129422_79 (sequence is synthesized)
cattgcccaggctggacttgaactgctgggctccaagtgatcctccacctctgcctcccagagtgctgaggttacaagtgtgaaccactgccctgacctttgtatgtgttgaggagcctt

SEQ ID NO: 280585 - DNA, 120 bp, Artificial Sequence
  ENSG00000129422_80 (sequence is synthesized)
taaactagagcccacgcttacctgtgaagctgtgacgtctcctaatgtggttgctttgcgtattcaacttaggacatttggttttactgttaaaccacggttttgtttgttgcttacagt

SEQ ID NO: 280586 - DNA, 120 bp, Artificial Sequence
  ENSG00000129422_81 (sequence is synthesized)
agtctctgtcccacagacaggtataaaatgttataagagctctattggaatatctgccacagagaaggcagaacaggtatttctcaagcggatgttggccgattataaatgaggggagtg

SEQ ID NO: 280587 - DNA, 120 bp, Artificial Sequence
  ENSG00000129422_82 (sequence is synthesized)
tattatttaacaagttggatcttgcaacaggccttgctattttttctctattctatgcgttttggaggggcattgattacctgtgtgtaatggttccattaaactttcaagttattttgt

SEQ ID NO: 280588 - DNA, 90 bp, Artificial Sequence
  ENSG00000129422_83 (sequence is synthesized)
tatctcagaattcgtaaccttttgtaggctcttaaagctaggaagacagccatgcagaatgatctaagttctaaagatccccaggatgct

SEQ ID NO: 280589 - DNA, 120 bp, Artificial Sequence
  ENSG00000129422_84 (sequence is synthesized)
gacttctctagtctctgtcccacagacaggtataaaatgttataagagctctattggaatatctgccacagagaaggcagaacagttgaaaagagcaggcaaaagaatcctcgaagctta

SEQ ID NO: 280590 - DNA, 120 bp, Artificial Sequence
  ENSG00000129422_85 (sequence is synthesized)
gatgagcaaaatatttctcttgctgaagagagggacagagttatttttgtaattgtgtgaattcctgttaaataatgttgtcatttttttttctgaagcacttttcatatgagaatagtg

SEQ ID NO: 280591 - DNA, 120 bp, Artificial Sequence
  ENSG00000129422_86 (sequence is synthesized)
gaagtgtaagctgtgtcatctgatttgtcatggcagtgagcactcccttaccttcgatgatgcctcacgtcaccttttgcataaagggaacaacaaatcatttaatcttcagagcatctt

SEQ ID NO: 280592 - DNA, 120 bp, Artificial Sequence
  ENSG00000129422_87 (sequence is synthesized)
tcaaaacaaacaaacaaacaaacaaacagtagaaaatccagtctggattggtggaggggaaatttttacacataatataaaaagatggtttttgttattgagctggtaatgccgctgtca

SEQ ID NO: 280593 - DNA, 120 bp, Artificial Sequence
  ENSG00000129422_88 (sequence is synthesized)
aattcagggaaaatgctttgaatgacaagcaactcttgcctgcaaaggccgggtctcatgatctctgcaacgctgtgatcaggatgtggtgggagctccgtcttgggtgatcctcgtgag

SEQ ID NO: 280594 - DNA, 120 bp, Artificial Sequence
  ENSG00000129422_89 (sequence is synthesized)
ggcatttttcagcgagctttgaaattcttcattttttttttagttactccctggtgctagggaatctaccttttaaggaactcgggaggaagcactgaaacaacacaaaaccctatctca

SEQ ID NO: 280595 - DNA, 120 bp, Artificial Sequence
  ENSG00000129422_90 (sequence is synthesized)
agtctggttgcagtttctgcattgctccatgaaaaagacagtctctgaggtgcaaccaaaggcattaaaaaattttgtttggacagataactcgaataagacatctcttgcttaagttga

SEQ ID NO: 280596 - DNA, 120 bp, Artificial Sequence
  ENSG00000129422_91 (sequence is synthesized)
tagcagttggttttgatattctgaggaatataggccactgaagtttgaatgcagagaaaacgctgcaagatagaaaaatgagacctactcttcattcgggaacaacaaatcatttaatct

SEQ ID NO: 280597 - DNA, 120 bp, Artificial Sequence
  ENSG00000129422_92 (sequence is synthesized)
aaaaataaacatgtctgcgtgaagctttcatctttcatctgaagttacatgattgtgaacattcattttgtgttttgactttgttgttagtgcagaagtttgagtttacaggcttaaaaa

SEQ ID NO: 280598 - DNA, 120 bp, Artificial Sequence
  ENSG00000129422_93 (sequence is synthesized)
ggtttgtgagtagtgagtatgaagttgaaaggatgctgtccatgaaggcaacttggctgaaaaaggcacgttctatgctaatcttactatttggaggggggctgatggttcaccacctcc

SEQ ID NO: 280599 - DNA, 120 bp, Artificial Sequence
  ENSG00000129437_0 (sequence is synthesized)
gcacctagcagatcccaagctggggaatgccagttctggcaccaaccttcctgctccctgctggggcctctgctcccccatctctcaggagtcgaaagtgagaaagcaagacatcaagga

SEQ ID NO: 280600 - DNA, 120 bp, Artificial Sequence
  ENSG00000129437_1 (sequence is synthesized)
gggacctgtgccctgctccacatcctcccacctgccgcccgcagagcctgcaggccccgcccccctcgtctctggtccctacctctctgctgtgtcttcatgtccctgagggtcttgggc

SEQ ID NO: 280601 - DNA, 120 bp, Artificial Sequence
  ENSG00000129437_2 (sequence is synthesized)
tctgggacctggccctcagcccctaaaatgttcctcctgctgacagcacttcaagtcctggctatagccatgacacagagccaagaggatgagaacaagataattggtggccatacgtgc

SEQ ID NO: 280602 - DNA, 120 bp, Artificial Sequence
  ENSG00000129437_3 (sequence is synthesized)
acccggagctcccagccgtggcaggcggccctgctggcgggtcccaggcgccgcttcctctgcggaggcgccctgctttcaggccagtgggtcatcactgctgctcactgcggccgcccg

SEQ ID NO: 280603 - DNA, 120 bp, Artificial Sequence
  ENSG00000129437_4 (sequence is synthesized)
gcaggtgctgcgcgtggttcgtcaggtgacgcaccccaactacaactcccggacccacgacaacgacctcatgctgctgcagctacagcagcccgcacggatcgggagggcagtcaggcc

SEQ ID NO: 280604 - DNA, 120 bp, Artificial Sequence
  ENSG00000129437_5 (sequence is synthesized)
cattgaggtcacccaggcctgtgccagccccgggacctcctgccgagtgtcaggctggggaactatatccagccccatcgccaggtaccccgcctctctgcaatgcgtgaacatcaacat

SEQ ID NO: 280605 - DNA, 120 bp, Artificial Sequence
  ENSG00000129437_6 (sequence is synthesized)
ctccccggatgaggtgtgccagaaggcctatcctagaaccatcacgcctggcatggtctgtgcaggagttccccagggcgggaaggactcttgtcagggtgactctgggggacccctggt

SEQ ID NO: 280606 - DNA, 120 bp, Artificial Sequence
  ENSG00000129437_7 (sequence is synthesized)
gtgcagaggacagctccagggcctcgtgtcttggggaatggagcgctgcgccctgcctggctaccccggtgtctacaccaacctgtgcaagtacagaagctggattgaggaaacgatgcg

SEQ ID NO: 280607 - DNA, 120 bp, Artificial Sequence
  ENSG00000129437_8 (sequence is synthesized)
aagctggattgaggaaacgatgcgggacaaatgatggtcttcacggtgggatggacctcgtcagctgcccaggccctcctctctctactcaggacccaggagtccaggccccagcccctc

SEQ ID NO: 280608 - DNA, 120 bp, Artificial Sequence
  ENSG00000129450_0 (sequence is synthesized)
agttcctgagagaagaaccctgaggaacagacgttccctcgcggccctggcacctctaaccccagacatgctgctgctgctgctgcccctgctctgggggagggagagggcggaaggaca

SEQ ID NO: 280609 - DNA, 120 bp, Artificial Sequence
  ENSG00000129450_1 (sequence is synthesized)
gacaagtaaactgctgacgatgcagagttccgtgacggtgcaggaaggcctgtgtgtccatgtgccctgctccttctcctacccctcgcatggctggatttaccctggcccagtagttca

SEQ ID NO: 280610 - DNA, 120 bp, Artificial Sequence
  ENSG00000129450_2 (sequence is synthesized)
tggctactggttccgggaaggggccaatacagaccaggatgctccagtggccacaaacaacccagctcgggcagtgtgggaggagactcgggaccgattccacctccttggggacccaca

SEQ ID NO: 280611 - DNA, 120 bp, Artificial Sequence
  ENSG00000129450_3 (sequence is synthesized)
taccaagaattgcaccctgagcatcagagatgccagaagaagtgatgcggggagatacttctttcgtatggagaaaggaagtataaaatggaattataaacatcaccggctctctgtgaa

SEQ ID NO: 280612 - DNA, 120 bp, Artificial Sequence
  ENSG00000129450_4 (sequence is synthesized)
tgtgacagccttgacccacaggcccaacatcctcatcccaggcaccctggagtccggctgcccccagaatctgacctgctctgtgccctgggcctgtgagcaggggacaccccctatgat

SEQ ID NO: 280613 - DNA, 120 bp, Artificial Sequence
  ENSG00000129450_5 (sequence is synthesized)
ctcctggatagggacctccgtgtcccccctggacccctccaccacccgctcctcggtgctcaccctcatcccacagccccaggaccatggcaccagcctcacctgtcaggtgaccttccc

SEQ ID NO: 280614 - DNA, 120 bp, Artificial Sequence
  ENSG00000129450_6 (sequence is synthesized)
tggggccagcgtgaccacgaacaagaccgtccatctcaacgtgtcctacccgcctcagaacttgaccatgactgtcttccaaggagacggcacagtatccacagtcttgggaaatggctc

SEQ ID NO: 280615 - DNA, 120 bp, Artificial Sequence
  ENSG00000129450_7 (sequence is synthesized)
ctcccagagggccagtctctgcgcctggtctgtgcagttgatgcagttgacagcaatccccctgccaggctgagcctgagctggagaggcctgaccctgtgcccctcacagccctcaaac

SEQ ID NO: 280616 - DNA, 120 bp, Artificial Sequence
  ENSG00000129450_8 (sequence is synthesized)
ccgggggtgctggagctgccttgggtgcacctgagggatgcagctgaattcacctgcagagctcagaaccctctcggctctcagcaggtctacctgaacgtctccctgcagagcaaagcc

SEQ ID NO: 280617 - DNA, 120 bp, Artificial Sequence
  ENSG00000129450_9 (sequence is synthesized)
acatcaggagtgactcagggggtggtcgggggagctggagccacagccctggtcttcctgtccttctgcgtcatcttcgttgtagtgaggtcctgcaggaagaaatcggcaaggccagca

SEQ ID NO: 280618 - DNA, 120 bp, Artificial Sequence
  ENSG00000129450_10 (sequence is synthesized)
gcgggcgtgggagatacgggcatagaggatgcaaacgctgtcaggggttcagcctctcaggggcccctgactgaaccttgggcagaagacagtcccccagaccagcctcccccagcttct

SEQ ID NO: 280619 - DNA, 120 bp, Artificial Sequence
  ENSG00000129450_11 (sequence is synthesized)
gcccgctcctcagtgggggaaggagagctccagtatgcatccctcagcttccagatggtgaagccttgggactcgcggggacaggaggccactgacaccgagtactcggagatcaagatc

SEQ ID NO: 280620 - DNA, 120 bp, Artificial Sequence
  ENSG00000129450_12 (sequence is synthesized)
cacagatgagaaactgcagagactcaccctgattgagggatcacagcccctccaggcaagggagaagtcagaggctgattcttgtagaattaacagccctcaacgtgatgagctatgata

SEQ ID NO: 280621 - DNA, 120 bp, Artificial Sequence
  ENSG00000129450_13 (sequence is synthesized)
acactatgaattatgtgcagagtgaaaagcacacaggctttagagtcaaagtatctcaaacctgaatccacactgtgccctcccttttatttttttaactaaaagacagacaaattccta

SEQ ID NO: 280622 - DNA, 120 bp, Artificial Sequence
  ENSG00000129450_14 (sequence is synthesized)
gcaaacgctgtcaggggttcagcctctcagatcttgaatcattttattggatttcctacattccttggactgggtttcgagtttctcctgaatctccgtgatctttgttgccatccagat

SEQ ID NO: 280623 - DNA, 120 bp, Artificial Sequence
  ENSG00000129450_15 (sequence is synthesized)
tctgaattctatgtctatcatttcagtcatttcagactcattaagaacattgctggggagatagtgtggtcacttgaaggtaaaatactctggcttttggatgtgtcagatttctttcac

SEQ ID NO: 280624 - DNA, 120 bp, Artificial Sequence
  ENSG00000129450_16 (sequence is synthesized)
tggttcttcctcatctgtgtgggctgatgttcctttaatctttgaagttgctgttctttggatagggctctttgcttttatattctctgatgcccttgagggtttcacagtggtataact

SEQ ID NO: 280625 - DNA, 120 bp, Artificial Sequence
  ENSG00000129450_17 (sequence is synthesized)
tgggcttagacaactgcatttgtttctggatgatttcaaggggcccaggctcaactcagcactcctgagctgcatgctctaactacagggacctgggacctggcccatggcttttttttt

SEQ ID NO: 280626 - DNA, 120 bp, Artificial Sequence
  ENSG00000129450_18 (sequence is synthesized)
tttttttcctggcccttcaaggttaagcacctcctatgctggaatggccaaggtgttccgggtccactggcaacaacgctccaataggggttgctgacaaagcattttggcagggtggcc

SEQ ID NO: 280627 - DNA, 120 bp, Artificial Sequence
  ENSG00000129450_19 (sequence is synthesized)
atgggtgatgggagttcctgcacgtggtgtgcatcagctgcagggtggccgtgggtcttgcaaatctgcttgctaatgttatgcctaagatcacgttataaaagactaacttgtgcctca

SEQ ID NO: 280628 - DNA, 120 bp, Artificial Sequence
  ENSG00000129450_20 (sequence is synthesized)
ttcccccacccctcaataccgtttagagcagaagccagcaaatactatctgtcagggacagatagaaactattttcggcttcatgggccacacagtctcattgcagctcctcaaatctgc

SEQ ID NO: 280629 - DNA, 120 bp, Artificial Sequence
  ENSG00000129451_0 (sequence is synthesized)
catcctgccacccctagccttgctggggacgtgaaccctctccccgcgcctgggaagccttcttggcaccgggacccggagaatccccacggaagccagttccaaaagggatgaaaaggg

SEQ ID NO: 280630 - DNA, 120 bp, Artificial Sequence
  ENSG00000129451_1 (sequence is synthesized)
ggcgtttcgggcactgggagaagcctgtattccagggcccctcccagagcaggaatctgggacccaggagtgccagcctcacccacgcagatcctggccatgagagctccgcacctccac

SEQ ID NO: 280631 - DNA, 120 bp, Artificial Sequence
  ENSG00000129451_2 (sequence is synthesized)
ctctccgccgcctctggcgcccgggctctggcgaagctgctgccgctgctgatggcgcaactctgggccgcagaggcggcgctgctcccccaaaacgacacgcgcttggaccccgaagcc

SEQ ID NO: 280632 - DNA, 120 bp, Artificial Sequence
  ENSG00000129451_3 (sequence is synthesized)
tatggctccccgtgcgcgcgcggctcgcagccctggcaggtctcgctcttcaacggcctctcgttccactgcgcgggtgtcctggtggaccagagttgggtgctgacggccgcgcactgc

SEQ ID NO: 280633 - DNA, 120 bp, Artificial Sequence
  ENSG00000129451_4 (sequence is synthesized)
ggaaacaagccactgtgggctcgagtaggggatgaccacctgctgcttcttcagggagagcagctccgccggaccactcgctctgttgtccatcccaagtaccaccagggctcaggcccc

SEQ ID NO: 280634 - DNA, 120 bp, Artificial Sequence
  ENSG00000129451_5 (sequence is synthesized)
atcctgccaaggcgaacggatgagcacgatctcatgttgctgaagctggccaggcccgtagtgctggggccccgcgtccgggccctgcagcttccctaccgctgtgctcagcccggagac

SEQ ID NO: 280635 - DNA, 120 bp, Artificial Sequence
  ENSG00000129451_6 (sequence is synthesized)
cagtgccaggttgctggctggggcaccacggccgcccggagagtgaagtacaacaagggcctgacctgctccagcatcactatcctgagccctaaagagtgtgaggtcttctaccctggc

SEQ ID NO: 280636 - DNA, 120 bp, Artificial Sequence
  ENSG00000129451_7 (sequence is synthesized)
gtggtcaccaacaacatgatatgtgctggactggaccggggccaggacccttgccagagtgactctggaggccccctggtctgtgacgagaccctccaaggcatcctctcgtggggtgtt

SEQ ID NO: 280637 - DNA, 120 bp, Artificial Sequence
  ENSG00000129451_8 (sequence is synthesized)
tacccctgtggctctgcccagcatccagctgtctacacccagatctgcaaatacatgtcctggatcaataaagtcatacgctccaactgatccagatgctacgctccagctgatccagat

SEQ ID NO: 280638 - DNA, 120 bp, Artificial Sequence
  ENSG00000129451_9 (sequence is synthesized)
gttatgctcctgctgatccagatgcccagaggctccatcgtccatcctcttcctccccagtcggctgaactctccccttgtctgcactgttcaaacctctgccgccctccacacctctaa

SEQ ID NO: 280639 - DNA, 120 bp, Artificial Sequence
  ENSG00000129451_10 (sequence is synthesized)
acatctcccctctcacctcattcccccacctatccccattctctgcctgtactgaagctgaaatgcaggaagtggtggcaaaggtttattccagagaagccaggaagccggtcatcaccc

SEQ ID NO: 280640 - DNA, 120 bp, Artificial Sequence
  ENSG00000129451_11 (sequence is synthesized)
agcctctgagagcagttactggggtcacccaacctgacttcctctgccactccctgctgtgtgactttgggcaagccaagtgccctctctgaacctcagtttcctcatctgcaaaatggg

SEQ ID NO: 280641 - DNA, 120 bp, Artificial Sequence
  ENSG00000129451_12 (sequence is synthesized)
ttctgactaaaggttacctgttgtcgtgatctgaccacgtcccggtgaaagcgtgtgtccagggaagaagtgcacagggtagcccccagtcccaaccttccatccccaacccttagggat

SEQ ID NO: 280642 - DNA, 120 bp, Artificial Sequence
  ENSG00000129451_13 (sequence is synthesized)
gatggaagaatcattttcctcaccctagttccaagtcccaggaaacaccttttaaccacttccttctcatctcccactgtttcccacttctggttccacccaacaccagttcctccgagc

SEQ ID NO: 280643 - DNA, 120 bp, Artificial Sequence
  ENSG00000129451_14 (sequence is synthesized)
taggctggccctgagtcattagcaccttctctgccttcatgaggccactgaactcaagggacctcaccttgcttctatcccagcctctaagaccagagggccgagggggtagtgaagatt

SEQ ID NO: 280644 - DNA, 120 bp, Artificial Sequence
  ENSG00000129451_15 (sequence is synthesized)
gggaaacccttgccacctcaactgcccagcttgtgccaagaaacctccctctgacatttaggggaaaatctttggtttgtctgttattaattggctgtgagattttcgtcctgaaaactt

SEQ ID NO: 280645 - DNA, 120 bp, Artificial Sequence
  ENSG00000129451_16 (sequence is synthesized)
gggaggaggaattgtttgattctccctgaaattgggggagggaaggggagttaatacacagaatccaggtaaggctaatagaagcttcagtgtccgctgggtgtggtggctcacgcctgt

SEQ ID NO: 280646 - DNA, 76 bp, Artificial Sequence
  ENSG00000129451_17 (sequence is synthesized)
aatcctagcactttgggaggccgaggaaagcagatcatctgaggtcaggtgaaaatacaaaaactagccaggcatg

SEQ ID NO: 280647 - DNA, 120 bp, Artificial Sequence
  ENSG00000129451_18 (sequence is synthesized)
aaagagcaaaactccatctcaaaaaaagaagaagtttgagtgtctcagcttatcctgaactttgaagcagtaacataagctagctgaatataggcacaacagaaatttcccattaagcac

SEQ ID NO: 280648 - DNA, 120 bp, Artificial Sequence
  ENSG00000129451_19 (sequence is synthesized)
ggggtttttgtttgtttgtttgtcctttcagttaccaatttatggagcatctattatgtgccaggcccagtgctgggtgctggggacatacgtaggggtgatcacaaggtcccccaccct

SEQ ID NO: 280649 - DNA, 120 bp, Artificial Sequence
  ENSG00000129451_20 (sequence is synthesized)
gcagagcccacaggaggttgatgtacaaggtctgagcacacagctcccttccgtggcctctttcccattctgcccccattagcacacgcaggaaatgtcagacaggcgtatcagctgggt

SEQ ID NO: 280650 - DNA, 120 bp, Artificial Sequence
  ENSG00000129451_21 (sequence is synthesized)
ttgtcatccaaagaccagaagcgaggtcggtggaaacttgaaaactcgattcattattaaaggcaactcacccgtccctttagtcactccacaatgtttatcgagccacgtcttatgcca

SEQ ID NO: 280651 - DNA, 120 bp, Artificial Sequence
  ENSG00000129451_22 (sequence is synthesized)
ggcctcaaagatgaatcagaccaggcactaccctcaaggagctgctagttaggtcagggagacaggccagtcttacattcctgtcattcaggtctccactcaaaagtcacctcctccggg

SEQ ID NO: 280652 - DNA, 120 bp, Artificial Sequence
  ENSG00000129451_23 (sequence is synthesized)
caggtctccactcaaaagtcacctcctccgggaggccttcctgaattgcccaggctataggagtccacttttggtcatccagtcccgatgctctgttttttgtttgtttgtttttttttt

SEQ ID NO: 280653 - DNA, 120 bp, Artificial Sequence
  ENSG00000129451_24 (sequence is synthesized)
acaatctcccttttcaagccagcctctgtccctcctactcaacctgctttatctctaggccttcctccttcctcttccacagtctggcttctcacattgtcactctagcagatcctggcc

SEQ ID NO: 280654 - DNA, 120 bp, Artificial Sequence
  ENSG00000129451_25 (sequence is synthesized)
actcaggccctgtccgatttctgccacccggatcctcgctcttccgtggactcttcgccgcgttctttctcctcctcttacgccgccccatcccggccccgctccattttacactaccgt

SEQ ID NO: 280655 - DNA, 120 bp, Artificial Sequence
  ENSG00000129455_0 (sequence is synthesized)
cgcccctcgtgatgtcaggggcgcagtagctccgcccacgtggagctcgggcggtgtagagctcagccccttgtggccccgtcctgggcgtgtgctgggtttgaatcctggcggagacct

SEQ ID NO: 280656 - DNA, 120 bp, Artificial Sequence
  ENSG00000129455_1 (sequence is synthesized)
ggggggaaattgagggagggtctggatacctttagagccaatgcaacggatgatttttcagtaaacgcgggaaacctcaccttctttctgcctgagctgtgagatgagtggagagcaaac

SEQ ID NO: 280657 - DNA, 120 bp, Artificial Sequence
  ENSG00000129455_2 (sequence is synthesized)
gggtgggcggtgaagggcagatgagggaaccggtaccgccttgcaactcccccttaaacccctatgttccagttcccagaagctccccaggctctagtgcaggaggagaaggaggaggag

SEQ ID NO: 280658 - DNA, 120 bp, Artificial Sequence
  ENSG00000129455_3 (sequence is synthesized)
caggaggtggagattcccagttaaaaggctccagaatcgtgtaccaggcagagaactgaagtactggggcctcctccactgggtccgaatcagtaggtgaccccgcccctggattctgga

SEQ ID NO: 280659 - DNA, 120 bp, Artificial Sequence
  ENSG00000129455_4 (sequence is synthesized)
agacctcaccatgggacgcccccgacctcgtgcggccaagacgtggatgttcctgctcttgctggggggagcctgggcaggacactccagggcacaggaggacaaggtgctggggggtca

SEQ ID NO: 280660 - DNA, 120 bp, Artificial Sequence
  ENSG00000129455_5 (sequence is synthesized)
tgccaaccccattcgcagccttggcaggcggccttgttccagggccagcaactactctgtggcggtgtccttgtaggtggcaactgggtccttacagctgcccactgtaaaaaaccgaaa

SEQ ID NO: 280661 - DNA, 120 bp, Artificial Sequence
  ENSG00000129455_6 (sequence is synthesized)
tacacagtacgcctgggagaccacagcctacagaataaagatggcccagagcaagaaatacctgtggttcagtccatcccacacccctgctacaacagcagcgatgtggaggaccacaac

SEQ ID NO: 280662 - DNA, 120 bp, Artificial Sequence
  ENSG00000129455_7 (sequence is synthesized)
catgatctgatgcttcttcaactgcgtgaccaggcatccctggggtccaaagtgaagcccatcagcctggcagatcattgcacccagcctggccagaagtgcaccgtctcaggctggggc

SEQ ID NO: 280663 - DNA, 120 bp, Artificial Sequence
  ENSG00000129455_8 (sequence is synthesized)
actgtcaccagtccccgagagaattttcctgacactctcaactgtgcagaagtaaaaatctttccccagaagaagtgtgaggatgcttacccggggcagatcacagatggcatggtctgt

SEQ ID NO: 280664 - DNA, 120 bp, Artificial Sequence
  ENSG00000129455_9 (sequence is synthesized)
gcaggcagcagcaaaggggctgacacgtgccagggcgattctggaggccccctggtgtgtgatggtgcactccagggcatcacatcctggggctcagacccctgtgggaggtccgacaaa

SEQ ID NO: 280665 - DNA, 120 bp, Artificial Sequence
  ENSG00000129455_10 (sequence is synthesized)
cctggcgtctataccaacatctgccgctacctggactggatcaagaagatcataggcagcaagggctgattctaggataagcactagatctcccttaataaactcacaactctctggttc

SEQ ID NO: 280666 - DNA, 120 bp, Artificial Sequence
  ENSG00000129455_11 (sequence is synthesized)
tcctgctcttgctggggggagcctgggcagcgtgtggaagcctggacctcctcactaagttgtatgcggagaacttgccgtgtgtccatttgaacccacagtggccttcccagccctcgc

SEQ ID NO: 280667 - DNA, 120 bp, Artificial Sequence
  ENSG00000129455_12 (sequence is synthesized)
gtctaggcccttcttctcccaggacccagcagtcctagctccctcttgactctggaccccaaaatctggacctccaatgaagctgtccctttgggactccagaatccagagagcccctcg

SEQ ID NO: 280668 - DNA, 120 bp, Artificial Sequence
  ENSG00000129455_13 (sequence is synthesized)
ccttccttcacagtgaaaacattgggactcacctaagagagtcaaggagcttctccaggaagtggcaaagtcagcattcaggtccctgcctgcctcactcctgctctgaatgctttggat

SEQ ID NO: 280669 - DNA, 120 bp, Artificial Sequence
  ENSG00000129460_0 (sequence is synthesized)
gggctttgcgaagatggcggcgctgggggtgctggagtccgacctgccaagtgccgtgacacttctgaaaaatctccaggagcaagtgatggctgtaactgcacaagtgaaatcactgac

SEQ ID NO: 280670 - DNA, 120 bp, Artificial Sequence
  ENSG00000129460_1 (sequence is synthesized)
acaaaaagttcaagctggtgcctatcctacagaaaagggtctcagcttcttggaagtgaaagaccagctgctgctcatgtaccttatggatttgacccacctcattctggacaaagcctc

SEQ ID NO: 280671 - DNA, 120 bp, Artificial Sequence
  ENSG00000129460_2 (sequence is synthesized)
aggaggatctcttcagggacatgatgcagttttgagactggtggagattcgcacggttttggaaaagcttcgtcccttggaccaaaagctgaagtatcaaattgacaagctgatcaagac

SEQ ID NO: 280672 - DNA, 120 bp, Artificial Sequence
  ENSG00000129460_3 (sequence is synthesized)
tgcagtgacaggcagccttagtgagaatgacccacttcgttttaagcctcatcccagcaatatgatgagcaagttgagctctgaggatgaggaggaagatgaagcagaagatgaccagtc

SEQ ID NO: 280673 - DNA, 120 bp, Artificial Sequence
  ENSG00000129460_4 (sequence is synthesized)
tgaggcttcagggaagaaatctgtgaagggagtgtctaagaaatatgttcctccacgcttggttccagtacattatgatgaaacagaagctgagcgggagaagaagcgtctagaacgagc

SEQ ID NO: 280674 - DNA, 120 bp, Artificial Sequence
  ENSG00000129460_5 (sequence is synthesized)
caagagacgggcattgagcagctctgtcattcgtgaacttaaggagcagtactcagatgctccagaggaaatccgtgatgctcggcatccccatgttacccgccagagtcaggaggacca

SEQ ID NO: 280675 - DNA, 120 bp, Artificial Sequence
  ENSG00000129460_6 (sequence is synthesized)
acacaggattaactatgaggagagcatgatggtgcgtttgagcgtcagtaagcgagagaaaggacggcgaaaacgagcaaatgtcatgagctcacaacttcattcccttacacacttcag

SEQ ID NO: 280676 - DNA, 120 bp, Artificial Sequence
  ENSG00000129460_7 (sequence is synthesized)
tgacatcagtgctttgacagggggaactgttcatcttgatgaggatcagaatcctattaagaagcggaagaagatacctcagaaaggtcggaagaaaaaaggtcagtgaactgctgggac

SEQ ID NO: 280677 - DNA, 120 bp, Artificial Sequence
  ENSG00000129460_8 (sequence is synthesized)
ttaggtgatcaggtgcaaggtggggagtacaaattgagtctctttggatttgccattctgggtctcaccaagccctgtagtatctcttccatactgggcaataatctccttaggtgggct

SEQ ID NO: 280678 - DNA, 120 bp, Artificial Sequence
  ENSG00000129460_9 (sequence is synthesized)
aatgaatctctggattctgcctctaaggtcccacagctcctgttcaggcttccctaaatagaactggtaaagtgtcacttgaaggaaccattatcccatttcaattttattcctacttct

SEQ ID NO: 280679 - DNA, 120 bp, Artificial Sequence
  ENSG00000129460_10 (sequence is synthesized)
cgtcttttgtcctgggaagatattcagggtactgcctaggagaccccacccctgtgagcccttccctctagatgtcctgttttcctgtccctttagcttttccaactgtcctttgcctca

SEQ ID NO: 280680 - DNA, 120 bp, Artificial Sequence
  ENSG00000129460_11 (sequence is synthesized)
ttcttggtttcccttcctttcaggttttcggaggcggcggtgattatgggtgtacatatttgtatattttttgtcatcctgagatacttctaatttcattgtatataggtggttttccct

SEQ ID NO: 280681 - DNA, 120 bp, Artificial Sequence
  ENSG00000129460_12 (sequence is synthesized)
ggaattcattaattgtttgctttggacatgtggaaagagccttactaataaaattgattttgcttatgaattaaagcccctttttgcacatgtattgtacgactggagtcgttgggtttg

SEQ ID NO: 280682 - DNA, 120 bp, Artificial Sequence
  ENSG00000129460_13 (sequence is synthesized)
ggatatttttggtgagtggttggtgaaaagggaaattttttttggaagtgcaaaacatttgtattgttttctttgataatatatttttcccaaaaactaaaaattggttacgtcacaaaa

SEQ ID NO: 280683 - DNA, 120 bp, Artificial Sequence
  ENSG00000129460_14 (sequence is synthesized)
agtattgagagacgaggctggtataatcaactctttcaacccatgttgccacaacttcctgtatgatttgttataatacaatacagattgagatattaacacatgaattttaggttttat

SEQ ID NO: 280684 - DNA, 120 bp, Artificial Sequence
  ENSG00000129460_15 (sequence is synthesized)
tagtgttatctgggctggccaccaggtggcataagtggttcaagaaacttgagcttggctgtaatcaaaagcaagatagaacctttccacatcagcaagattattcttatctccacttct

SEQ ID NO: 280685 - DNA, 120 bp, Artificial Sequence
  ENSG00000129460_16 (sequence is synthesized)
ctgaatgtttttcatttctttctgaaatagcatgaacataaggctgatctttggtcagttactgagggagtttgtagaaaatagtagagtgagtaagaaggctagagtgaagagtcagta

SEQ ID NO: 280686 - DNA, 120 bp, Artificial Sequence
  ENSG00000129460_17 (sequence is synthesized)
tagtcttgtgtttttcagactctgacccccacccccccgccttcaactgagggtcattttaccagagtcaataaaggccaacccttctataaagagctggcaaaaaaaaaaaaaaaaaaa

SEQ ID NO: 280687 - DNA, 120 bp, Artificial Sequence
  ENSG00000129460_18 (sequence is synthesized)
gggtatcacacagtagctctcatttaagtgagtcttctcatgtttaaggaaaccaaatgagaaaaggtatttttctattcatttgctctactttgtacatattttaggtgccttatgtgg

SEQ ID NO: 280688 - DNA, 120 bp, Artificial Sequence
  ENSG00000129460_19 (sequence is synthesized)
caccttaatatagggactctggtgtgtgcttcattttgggaaggaaatataatcctgattaactaccatgttgtaggttttggaaaagcttcgtcccttggaccaaaagctgaagtatca

SEQ ID NO: 280689 - DNA, 120 bp, Artificial Sequence
  ENSG00000129460_20 (sequence is synthesized)
tgagtgttggagagataaaacaggctctagaagagaaagtgaaccaggatggaatctacaaccctggcaaactgagtattggcttctctcactgaccactgaggggataatttatcaaag

SEQ ID NO: 280690 - DNA, 120 bp, Artificial Sequence
  ENSG00000129460_21 (sequence is synthesized)
acccaatgataaaagcagccctaaaatgctttctttaaaaaatgtgtcctctgagaacatttaggttttgcctctagactctggttaggtgagtgacttcactttgtgcccctttatcct

SEQ ID NO: 280691 - DNA, 120 bp, Artificial Sequence
  ENSG00000129460_22 (sequence is synthesized)
atggttcctcagctagaggagtagtcagcaggtgggacagtgagtcacactctgaaatggctctgtcattcctgtgccataggctgtcaggagtctgggacttctacaggaggctttaga

SEQ ID NO: 280692 - DNA, 120 bp, Artificial Sequence
  ENSG00000129460_23 (sequence is synthesized)
gagggagggaggagatggggtcagctgggacattgataggctttcagagtttggagggaccttatcacctggaaatatggcaaatcaaatttgtattttaaagctattctgtctttgaaa

SEQ ID NO: 280693 - DNA, 120 bp, Artificial Sequence
  ENSG00000129460_24 (sequence is synthesized)
aagactgcagtgacaggcagccttagtaagtgaggagaccatcatgaagttgtggggaccatcagaaagttccaaattttgtaaaattcattgggttatttatttcaggtgagaatgacc

SEQ ID NO: 280694 - DNA, 120 bp, Artificial Sequence
  ENSG00000129460_25 (sequence is synthesized)
cacttcgttttaagcctcatcccagcaatatgatgagcaaggtaaggggttgtagtattctcctgatttttttctgaggcagctatacctagatgagcctcttggtgatcctggataccc

SEQ ID NO: 280695 - DNA, 120 bp, Artificial Sequence
  ENSG00000129460_26 (sequence is synthesized)
tgggattctcttaggacttgattttccaacttgtgtgttagaatgctgagtttgagattcccttttttccctttttatattcccaccaccccagggtactccagctttgggttttcttct

SEQ ID NO: 280696 - DNA, 120 bp, Artificial Sequence
  ENSG00000129460_27 (sequence is synthesized)
tgtggagttgtcctttgccttcagcggctggaggcaaactgttggtaccagggaagggtggtgatgaaagttgcttcagggaggcggcctccctagagttaccgttcctgtccggtaacc

SEQ ID NO: 280697 - DNA, 120 bp, Artificial Sequence
  ENSG00000129460_28 (sequence is synthesized)
caaggggctggctttaaggcgagtctgtgaacccgagtgtgaaggccccgagtctgggtgtctgacggagagagggcagtttcccaccctagacgttccactttcctataatcctgagga

SEQ ID NO: 280698 - DNA, 120 bp, Artificial Sequence
  ENSG00000129460_29 (sequence is synthesized)
acaaaaagttcaagctggtgcctatcctacagaaaaggtaagatgtactcaaacagtaagcatcccctgacttaatgttctcagtagttctttcattgtatgtttattgtgtcttatata

SEQ ID NO: 280699 - DNA, 120 bp, Artificial Sequence
  ENSG00000129460_30 (sequence is synthesized)
tcctaagtgctcgagcttcaaacataaatatgatccagtttctgtgctgaagtctagagggaagacaaagcaaagcaatagatgtaagtattaatagtagcagtcacattacagagttat

SEQ ID NO: 280700 - DNA, 120 bp, Artificial Sequence
  ENSG00000129460_31 (sequence is synthesized)
gggtgggctttgcgaagatggcggcgctgggggtgctggagtccgacctgccaagtgccgtgacacttctgaaaaatctccaggagcaagtgagtagtgtcgcctctggaataaattagt

SEQ ID NO: 280701 - DNA, 120 bp, Artificial Sequence
  ENSG00000129460_32 (sequence is synthesized)
cctcaaaactttggtgattgagatacgtgaatgcttccaaaaaccttagagtaaaatgatgtaatcaaaaccttttcacgccagaattctaagtaattgattctgcacccaagggaatac

SEQ ID NO: 280702 - DNA, 120 bp, Artificial Sequence
  ENSG00000129460_33 (sequence is synthesized)
gaggaggtgataggattttgaggaataaatgggagggacagaaagaaggaacatgtgcaaaggcacaaaggcctgaaagtatggtgataagggaaaggagtaagtcatttttgtgatagg

SEQ ID NO: 280703 - DNA, 120 bp, Artificial Sequence
  ENSG00000129460_34 (sequence is synthesized)
atgtactttctgtgttatgtgtgttgggggtaggaaataagactggaaaagtcactctgaagattactgtaggccaactgaggagttactttcagatttcatctaatctaagacacttat

SEQ ID NO: 280704 - DNA, 85 bp, Artificial Sequence
  ENSG00000129460_35 (sequence is synthesized)
aggagttactttcagatttcatctaatctaagacacttattaattgggacatatcacttattgtatatattaagaaaaaatgtga

SEQ ID NO: 280705 - DNA, 120 bp, Artificial Sequence
  ENSG00000129460_36 (sequence is synthesized)
gatgaggtgaggttgagatatggttgtagtaggatgtgactttcatgctttcagcaaaatgtatgtggggcttattaccatgaggaacttgggaagggatgctggctctcagaaccacag

SEQ ID NO: 280706 - DNA, 120 bp, Artificial Sequence
  ENSG00000129460_37 (sequence is synthesized)
tgccattccatcacttctccatctgtctccaggatcagaatcctattaagaagcggaagaagatacctcagaaaggtcggaagaaaaaaggttttcggaggcggcggtgattatgggtgt

SEQ ID NO: 280707 - DNA, 120 bp, Artificial Sequence
  ENSG00000129465_0 (sequence is synthesized)
ggaaaaagggtaacaacccggaaagtagactcaccgtcttggtctagagactgacccctgcacagacagaccccttcccctctctgcgaaaggaccaagccccagaagtcactccatctc

SEQ ID NO: 280708 - DNA, 120 bp, Artificial Sequence
  ENSG00000129465_1 (sequence is synthesized)
ctacggctcgcaatttccagaggccccctggcaccttccagcctgatgtcgtgcgtcaagttatggcccagcggtgcccccgcccccttggtgtccatcgaggaactggagaaccaggag

SEQ ID NO: 280709 - DNA, 120 bp, Artificial Sequence
  ENSG00000129465_2 (sequence is synthesized)
ctcgtcggcaaaggcgggttcggcacagtgttccgggcgcaacataggaagtggggctacgatgtggcggtcaagatcgtaaactcgaaggcgatatccagggaggtcaaggccatggca

SEQ ID NO: 280710 - DNA, 120 bp, Artificial Sequence
  ENSG00000129465_3 (sequence is synthesized)
agtctggataacgaattcgtgctgcgcctagaaggggttatcgagaaggtgaactgggaccaagatcccaagccggctctggtgactaaattcatggagaacggctccttgtcggggctg

SEQ ID NO: 280711 - DNA, 120 bp, Artificial Sequence
  ENSG00000129465_4 (sequence is synthesized)
ctgcagtcccagtgccctcggccctggccgctcctttgccgcctgctgaaagaagtggtgcttgggatgttttacctgcacgaccagaacccggtgctcctgcaccgggacctcaagcca

SEQ ID NO: 280712 - DNA, 120 bp, Artificial Sequence
  ENSG00000129465_5 (sequence is synthesized)
tccaacgtcctgctggacccagagctgcacgtcaagctggcagattttggcctgtccacatttcagggaggctcacagtcagggacagggtccggggagccagggggcaccctgggctac

SEQ ID NO: 280713 - DNA, 120 bp, Artificial Sequence
  ENSG00000129465_6 (sequence is synthesized)
ttggccccagaactgtttgttaacgtaaaccggaaggcctccacagccagtgacgtctacagcttcgggatcctaatgtgggcagtgcttgctggaagagaagttgagttgccaaccgaa

SEQ ID NO: 280714 - DNA, 120 bp, Artificial Sequence
  ENSG00000129465_7 (sequence is synthesized)
cctgagactcccggcttagaaggactgaaggagctaatgcagctctgctggagcagtgagcccaaggacagaccctccttccaggaatgcctaccaaaaactgatgaagtcttccagatg

SEQ ID NO: 280715 - DNA, 120 bp, Artificial Sequence
  ENSG00000129465_8 (sequence is synthesized)
gtggagaacaatatgaatgctgctgtctccacggtaaaggatttcctgtctcagctcaggagcagcaataggagattttctatcccagagtcaggccaaggagggacagaaatggatggc

SEQ ID NO: 280716 - DNA, 120 bp, Artificial Sequence
  ENSG00000129465_9 (sequence is synthesized)
tttaggagaaccatagaaaaccagcactctcgtaatgatgtcatggtttctgagtggctaaacaaactgaatctagaggagcctcccagctctgttcctaaaaaatgcccgagccttacc

SEQ ID NO: 280717 - DNA, 120 bp, Artificial Sequence
  ENSG00000129465_10 (sequence is synthesized)
aagaggagcagggcacaagaggagcaggttccacaagcctggacagcaggcacatcttcagattcgatggcccaacctccccagactccagagacctcaactttcagaaaccagatgccc

SEQ ID NO: 280718 - DNA, 120 bp, Artificial Sequence
  ENSG00000129465_11 (sequence is synthesized)
agccctacctcaactggaacaccaagtcctggaccccgagggaatcagggggctgagagacaaggcatgaactggtcctgcaggaccccggagccaaatccagtaacagggcgaccgctc

SEQ ID NO: 280719 - DNA, 120 bp, Artificial Sequence
  ENSG00000129465_12 (sequence is synthesized)
gttaacatatacaactgctctggggtgcaagttggagacaacaactacttgactatgcaacagacaactgccttgcccacatggggcttggcaccttcgggcaaggggaggggcttgcag

SEQ ID NO: 280720 - DNA, 120 bp, Artificial Sequence
  ENSG00000129465_13 (sequence is synthesized)
caccccccaccagtaggttcgcaagaaggccctaaagatcctgaagcctggagcaggccacagggttggtataatcatagcgggaaataaagcaccttccaagcttgcctccaagagtta

SEQ ID NO: 280721 - DNA, 120 bp, Artificial Sequence
  ENSG00000129465_14 (sequence is synthesized)
cgagttaaggaagagtgccaccccttgaggcccctgacttccttctagggcagtctggcctgcccacaaactgactttgtgacctgtcccccaggagtcaataaacatgatggaatgcta

SEQ ID NO: 280722 - DNA, 120 bp, Artificial Sequence
  ENSG00000129465_15 (sequence is synthesized)
ctgccaggggacaaagcccagccaggagttttagctcctgcctaccaggtgatagaggccctgagccacacgagtcatttccaccagctgccccaccagcccctccaaagagtcatggct

SEQ ID NO: 280723 - DNA, 120 bp, Artificial Sequence
  ENSG00000129465_16 (sequence is synthesized)
gacccagccctggagactcagaccttgacctagccctaccacaaggcacctagatctaccatccaagggaacctcttcccttgacctccacactccctttacaaagctgaacctgcacct

SEQ ID NO: 280724 - DNA, 120 bp, Artificial Sequence
  ENSG00000129465_17 (sequence is synthesized)
aaacacacagccaggattcctacacttctctgggccctcccaggggatgatgtataggaaaggagtcttgccagtgattggaccgatcctcagctttgtgtctcctgcagcttcgggatc

SEQ ID NO: 280725 - DNA, 120 bp, Artificial Sequence
  ENSG00000129465_18 (sequence is synthesized)
ctaatgtgggcagtgcttgctggaagagaagttgagtgtaagactctaggaggattctgggatccttaaccccaggtgcccttctcttgaaagccccaaggcttccccttcccgctcacc

SEQ ID NO: 280726 - DNA, 120 bp, Artificial Sequence
  ENSG00000129465_19 (sequence is synthesized)
tacttagactgccctcctccctcctcgtgcccccacattacactccctgcctctttccatgatgaagcagataattcccttttaccctgaatgccttctcttctcaccctcctcccctac

SEQ ID NO: 280727 - DNA, 120 bp, Artificial Sequence
  ENSG00000129465_20 (sequence is synthesized)
ggaggggaggggagaagatgatctaactcaaccttctcatttcataaatgggaaaaccgacaccccctgagaaaggagccctctgaggtcacacaacaaagcttggatttgtccctgaat

SEQ ID NO: 280728 - DNA, 120 bp, Artificial Sequence
  ENSG00000129465_21 (sequence is synthesized)
gccgagtcacaggggcgcggggagcagcgctgaggcacggcacggccggctagtgggcgacacccctctctcaggcccagcggtgcccccgcccccttggtgtccatcgaggaactggag

SEQ ID NO: 280729 - DNA, 120 bp, Artificial Sequence
  ENSG00000129467_0 (sequence is synthesized)
agagcgcagcggcgagcgtgactccgccatcaggtccccggctccctccccggacctagcccactccgctgcgccagcgccgcgggcaccccggggctcggggctggggagatcatggcc

SEQ ID NO: 280730 - DNA, 120 bp, Artificial Sequence
  ENSG00000129467_1 (sequence is synthesized)
cgcctcttcagcccccggccgccccccagcgaagacctcttctacgagacctactacagcctgagccagcagtacccgctgctgctgctgctgctggggatcgtgctctgtgcgctcgcg

SEQ ID NO: 280731 - DNA, 120 bp, Artificial Sequence
  ENSG00000129467_2 (sequence is synthesized)
gcgctgctcgcagtggcctgggccagcggcagggagctgacctcagacccgagcttcctgaccactgtgctgtgcgcgctgggcggcttctcgctgctgctgggcctcgcttcccgggag

SEQ ID NO: 280732 - DNA, 120 bp, Artificial Sequence
  ENSG00000129467_3 (sequence is synthesized)
cagcgactgcagcgctggacgcgtcccctgtccggcttggtatgggtcgcgctgctagcgctaggccacgccttcctgttcaccgggggcgtggtgagcgcctgggaccaggtgtcctat

SEQ ID NO: 280733 - DNA, 120 bp, Artificial Sequence
  ENSG00000129467_4 (sequence is synthesized)
tttctcttcgtcatcttcacggcgtatgccatgctgcccttgggcatgcgggacgccgccgtcgcgggcctcgcctcctcactctcgcatctgctggtcctcgggctgtatcttgggcca

SEQ ID NO: 280734 - DNA, 120 bp, Artificial Sequence
  ENSG00000129467_5 (sequence is synthesized)
cagccggactcacggcctgcactgctgccgcagttggcagcaaacgcagtgctgttcctgtgcgggaacgtggcaggagtgtaccacaaggcgctgatggagcgcgccctgcgggccacg

SEQ ID NO: 280735 - DNA, 120 bp, Artificial Sequence
  ENSG00000129467_6 (sequence is synthesized)
ttccgggaggcactcagctccctgcactcacgccggcggctggacaccgagaagaagcaccaggaacaccttctcttgtccatccttcctgcctacctggcccgagagatgaaggcagag

SEQ ID NO: 280736 - DNA, 120 bp, Artificial Sequence
  ENSG00000129467_7 (sequence is synthesized)
atcatggcacggctgcaggcaggacaggggtcacggccagagagcactaacaatttccacagcctctatgtcaagaggcaccagggagtcagcgtgctgtatgctgacatcgtgggcttc

SEQ ID NO: 280737 - DNA, 120 bp, Artificial Sequence
  ENSG00000129467_8 (sequence is synthesized)
acgcggctggccagcgagtgttcccctaaggagctggtgctcatgctcaatgagctctttggcaagttcgaccagattgccaaggagcatgaatgcatgcggatcaagatcctgggggac

SEQ ID NO: 280738 - DNA, 120 bp, Artificial Sequence
  ENSG00000129467_9 (sequence is synthesized)
tgttactactgtgtctctgggctgccactctcactgccagaccatgccatcaactgcgtgcgcatgggcctggacatgtgccgggccatcaggaaactgcgggcagccactggcgtggac

SEQ ID NO: 280739 - DNA, 120 bp, Artificial Sequence
  ENSG00000129467_10 (sequence is synthesized)
atcaacatgcgtgtgggcgtgcactcaggcagcgtactgtgtggagtcatcgggctgcagaagtggcagtacgacgtttggtcacatgatgtcacactggctaaccacatggaggcaggc

SEQ ID NO: 280740 - DNA, 120 bp, Artificial Sequence
  ENSG00000129467_11 (sequence is synthesized)
ggtgtaccagggcgagtgcacatcacaggggctaccctggccctgctggcaggggcttatgctgtggaggacgcaggcatggagcatcgggacccctaccttcgggagctaggggagcct

SEQ ID NO: 280741 - DNA, 120 bp, Artificial Sequence
  ENSG00000129467_12 (sequence is synthesized)
acctatctggtcatcgatccacgggcagaggaggaggatgagaagggcactgcaggaggcttgctgtcctcgcttgagggcctcaagatgcgtccatcactgctgatgacccgttacctg

SEQ ID NO: 280742 - DNA, 120 bp, Artificial Sequence
  ENSG00000129467_13 (sequence is synthesized)
gagtcctggggcgcagccaagccttttgcccacctgagccacggagacagccctgtgtccacctccacccctctcccggagaagaccctggcttccttcagcacccagtggagcctggat

SEQ ID NO: 280743 - DNA, 120 bp, Artificial Sequence
  ENSG00000129467_14 (sequence is synthesized)
tcttccaggtcattgagcagctcaactcgcagaaacagtggaagcagtcgaaggacttcaacccactgacactgtacttcagagagaaggagatggagaaagagtaccgactctctgcaa

SEQ ID NO: 280744 - DNA, 120 bp, Artificial Sequence
  ENSG00000129467_15 (sequence is synthesized)
tccccgccttcaaatactatgaagcctgcaccttcctggtttttctctccaacttcatcatccagatgctagtgacaaacaggcccccagctctggccatcacgtatagcatcaccttcc

SEQ ID NO: 280745 - DNA, 120 bp, Artificial Sequence
  ENSG00000129467_16 (sequence is synthesized)
tcctcttcctcctcatcctttttgtctgcttctcagaggacctgatgaggtgtgtcctgaaaggccccaagatgctgcactggctgcctgcactgtctggcctggtggccacacgaccag

SEQ ID NO: 280746 - DNA, 120 bp, Artificial Sequence
  ENSG00000129467_17 (sequence is synthesized)
gactgagaatagccttgggcaccgccaccatcctccttgtctttgccatggccattaccagcctgttcttcttcccaacatcatcagactgccctttccaagctcccaatgtgtcctcca

SEQ ID NO: 280747 - DNA, 120 bp, Artificial Sequence
  ENSG00000129467_18 (sequence is synthesized)
tgatttccaacctctcctgggagctccctgggtctctgcctctcatcagtgtcccatactccatgcactgctgcacgctgggcttcctctcctgctccctctttctgcacatgagcttcg

SEQ ID NO: 280748 - DNA, 120 bp, Artificial Sequence
  ENSG00000129467_19 (sequence is synthesized)
agctgaagctgctgctgctcctgctgtggctggcggcatcctgctccctcttcctgcactcccatgcctggctgtcggaatgcctcatcgtccgcctctatctgggccccttggactcca

SEQ ID NO: 280749 - DNA, 120 bp, Artificial Sequence
  ENSG00000129467_20 (sequence is synthesized)
ggcccggagtgctgaaggagcccaaactgatgggtgctatctccttcttcatcttcttcttcaccctccttgtcctggctcgccagaatgagtactactgccgcctggacttcctgtgga

SEQ ID NO: 280750 - DNA, 120 bp, Artificial Sequence
  ENSG00000129467_21 (sequence is synthesized)
agaagaagctgaggcaggagagggaggagacagagacgatggagaacctgactcggctgctcttggagaacgtgctccctgcacacgtggccccccagttcattggccagaaccggcgca

SEQ ID NO: 280751 - DNA, 120 bp, Artificial Sequence
  ENSG00000129467_22 (sequence is synthesized)
acgaggatctctaccaccagtcctatgaatgcgtttgtgtcctcttcgcctcagtcccagacttcaaggagttctactctgaatccaacatcaatcatgagggcctagagtgtctgaggc

SEQ ID NO: 280752 - DNA, 120 bp, Artificial Sequence
  ENSG00000129467_23 (sequence is synthesized)
tgctcaatgagataattgctgattttgatgagctgctctccaagcccaagttcagtggggtggagaagatcaagaccatcggcagcacctacatggcagccacaggcttaaatgccacct

SEQ ID NO: 280753 - DNA, 120 bp, Artificial Sequence
  ENSG00000129467_24 (sequence is synthesized)
ctggacaggatgcacaacaggatgctgaacggagctgcagccaccttggcactatggtggaatttgccgtggccctggggtctaagctggacgtcatcaacaagcattcattcaacaact

SEQ ID NO: 280754 - DNA, 120 bp, Artificial Sequence
  ENSG00000129467_25 (sequence is synthesized)
tccgcctgcgagtggggttgaaccatggacccgtagtagctggagttattggggcccagaagccgcaatatgacatttggggcaacacagtgaacgtggccagccgcatggagagtacag

SEQ ID NO: 280755 - DNA, 120 bp, Artificial Sequence
  ENSG00000129467_26 (sequence is synthesized)
gagtccttggcaaaatccaagtgactgaggagacagcatgggccctacagtccctgggctacacctgctacagccggggtgtcatcaaggtgaaaggcaaagggcagctctgcacctact

SEQ ID NO: 280756 - DNA, 120 bp, Artificial Sequence
  ENSG00000129467_27 (sequence is synthesized)
tcctgaacacagacttgacacgaactggacctccttcagctaccctaggctgagattgcactcgccttctaagaacctcaataaagagactctggggtgtctggagcccattgatgtctg

SEQ ID NO: 280757 - DNA, 120 bp, Artificial Sequence
  ENSG00000129467_28 (sequence is synthesized)
agagcgcagcggcgagcgtgactccgccatcaggtccccggctccctccccggacctagcccactccgctgcgccagcgccgcgggcaccagccccggggctcggggctggggagatcat

SEQ ID NO: 280758 - DNA, 120 bp, Artificial Sequence
  ENSG00000129467_29 (sequence is synthesized)
agagcgcagcggcgagcgtgactccgccatcaggtccccggctccctccccggacctagcccactccgctgcgccagcgccgcgggcagagctgacctcagacccgagcttcctgaccac

SEQ ID NO: 280759 - DNA, 120 bp, Artificial Sequence
  ENSG00000129467_30 (sequence is synthesized)
acctctcctgggagctccctgggtctctgcctctcatcagtgtcccagtgagtgttcccacatgcccttaatctccttctgcacacccttcctcagcccaagcccacagccccctgagtg

SEQ ID NO: 280760 - DNA, 120 bp, Artificial Sequence
  ENSG00000129467_31 (sequence is synthesized)
gaggaacgctccattctgtggattagaacagacataagtcacacccagtgtgtatcagtgtgtatgatgccccctgtctcccagataggacctgggcctgggagggacaggaagggagcc

SEQ ID NO: 280761 - DNA, 120 bp, Artificial Sequence
  ENSG00000129467_32 (sequence is synthesized)
ggaagcggaggcctacatgggggcagggagaaggccaggaagggggaaagcaaggggtcaccctgatccatggccccttcaggcccggagtgctgaaggagcccaaactgatgggtgcta

SEQ ID NO: 280762 - DNA, 120 bp, Artificial Sequence
  ENSG00000129467_33 (sequence is synthesized)
tctccagggttgaatgcccattggaagcttctaagcgagccttcctgcttcctttcttctccttcactccctgcccctcctttctcccacacccctatctgggaaagcccatgctttaga

SEQ ID NO: 280763 - DNA, 120 bp, Artificial Sequence
  ENSG00000129467_34 (sequence is synthesized)
aaaagtctgctgccaattctctatccctagtctgaatctaatttcaaggatagtctctctccaagtatacttacaccttaagctctacttctaaactgggggtggggtgggggtggtttc

SEQ ID NO: 280764 - DNA, 120 bp, Artificial Sequence
  ENSG00000129467_35 (sequence is synthesized)
aggcatcatggagttggggctgaacactcaggagctgggcttcccctgctctgtgtctccccatggccccgggtgaccctccccagaatgagtactactgccgcctggacttcctgtgga

SEQ ID NO: 280765 - DNA, 120 bp, Artificial Sequence
  ENSG00000129467_36 (sequence is synthesized)
tgccccactccaagtcctttgttagctgctcccagttcatcctgaagcccctttcctgactcactccctgggatggggtgtgaaggtgctgggcaaggaggtacgaggctctcccactct

SEQ ID NO: 280766 - DNA, 120 bp, Artificial Sequence
  ENSG00000129467_37 (sequence is synthesized)
agagcgcagcggcgagcgtgactccgccatcaggtccccggctccctccccggacctagcccactccgctgcgccagcgccgcgggcagtgagttcggggatcaggggaacccggggctc

SEQ ID NO: 280767 - DNA, 120 bp, Artificial Sequence
  ENSG00000129467_38 (sequence is synthesized)
cttcaagggcaggtgggatttgggagacagagaggtcattagaggcaaaagaaagagcccagtgaaatgcccaaggtcaaagacatgtatagagcatgcagtgtggctcatggtctacct

SEQ ID NO: 280768 - DNA, 120 bp, Artificial Sequence
  ENSG00000129467_39 (sequence is synthesized)
cactgcagggaaaacacccaccatgcccacctccccctgtgctctcccaacaggagaagaccctggcttccttcagcacccagtggagcctggatcggtgaggaggcctcaaagtctttg

SEQ ID NO: 280769 - DNA, 120 bp, Artificial Sequence
  ENSG00000129467_40 (sequence is synthesized)
atcccctcatcgccagctgggagcgggctgggaggccgcagggagggcctgaaaaaggagacgggattgccacgaggttgggggcgcggggtggtagcggctttgagcgggtgagaaaag

SEQ ID NO: 280770 - DNA, 120 bp, Artificial Sequence
  ENSG00000129467_41 (sequence is synthesized)
acgtgctagtaggctccttttagggggttgttgagctgtgactccaagtcaaggtgcaacgctgggcgcaggatacccaaccgtgctttcgcagagctggtacaacagtgtgatgcaatg

SEQ ID NO: 280771 - DNA, 120 bp, Artificial Sequence
  ENSG00000129467_42 (sequence is synthesized)
cctgctgttaccagaagagggatccaggccacacggaagggagtcgtgtcgtggtttaccccggggacaacagatgtggttaatgaaaccttgacagagaatgaaaaaaaaaaaaaaaaa

SEQ ID NO: 280772 - DNA, 120 bp, Artificial Sequence
  ENSG00000129467_43 (sequence is synthesized)
tggaggagggagcatctgggaagggaaacgtccctagggatgccacagtgtggcaccacttgtcccacaatagttaggtccctcactgtaaagcccagtcttccccagccagtctttgag

SEQ ID NO: 280773 - DNA, 120 bp, Artificial Sequence
  ENSG00000129467_44 (sequence is synthesized)
gagcagcgctccgagggaggagttgcttagattacataacggggctcctccacaagttgagtgactctgggcaggtttcttgacctgtttcctcttttgtataaaatgtgggtattgccc

SEQ ID NO: 280774 - DNA, 120 bp, Artificial Sequence
  ENSG00000129467_45 (sequence is synthesized)
atcttagaaggttgtgaggctcaaacaaaccaaagcttataaaaagcactttagagcattatgatattaagtgaactcccattcaggtgttgatactgggagtttagtcactaaaggtga

SEQ ID NO: 280775 - DNA, 120 bp, Artificial Sequence
  ENSG00000129467_46 (sequence is synthesized)
tcagtgtaggatggagtgctggggccctgctgtgtgcagcgggaggacctgggggagcaccctggggagcacctaggatgggcagtgtgggctcctgagtgatttgggggacagggcctc

SEQ ID NO: 280776 - DNA, 120 bp, Artificial Sequence
  ENSG00000129467_47 (sequence is synthesized)
ggtagccccttccaagggaaactcccaccttataagatcccaggcccacttcagtgcatgcaggcccccagatattccagtggaaggaggaaaccctctcaaacattcccagtcatgaag

SEQ ID NO: 280777 - DNA, 120 bp, Artificial Sequence
  ENSG00000129467_48 (sequence is synthesized)
ctgctcaccacacacctcaaacctacagagatccctcaatatcgccacagatgtcccaagtacaatgccccaaacatgctcagagcccccacatatgtgtctctggacactacaaccaaa

SEQ ID NO: 280778 - DNA, 120 bp, Artificial Sequence
  ENSG00000129467_49 (sequence is synthesized)
tctatagagacgttctgatattctaaccttaggaggcccttccaagagaaatttctgccctatgcaacctcagcccagcaacctgcttagactccagggatgcctccaagcaaccaattc

SEQ ID NO: 280779 - DNA, 120 bp, Artificial Sequence
  ENSG00000129467_50 (sequence is synthesized)
ttggattccccccaacctctcaatcctgagaccactaccacgtactcaactctgggtacccccttcaacatgccaaaagtggaaagagccacagccatccagcccttggggaaactcttc

SEQ ID NO: 280780 - DNA, 120 bp, Artificial Sequence
  ENSG00000129467_51 (sequence is synthesized)
tgagaaagagatctgtatgaaagacagttagccccatatcaagtgaaaggagtccctagatctgatctagacactaccccaccttggaagttcttcaggaataccccgctcgctgcccac

SEQ ID NO: 280781 - DNA, 120 bp, Artificial Sequence
  ENSG00000129467_52 (sequence is synthesized)
gtggggggcagcaggcagctgacagaagtcctctttgtgagaatctggggtgtctcacaggcagggctgagggtaggactcagattgtcccacacacacactgctcaggaaactgcgggc

SEQ ID NO: 280782 - DNA, 120 bp, Artificial Sequence
  ENSG00000129467_53 (sequence is synthesized)
acccccagaagggtcacccaagcccttgtgcttgtcaagcgtctttgttttcacaacatcttagattctttctttggtgagcacaaaactgcatttcaaattcttacttggaaggcatgt

SEQ ID NO: 280783 - DNA, 120 bp, Artificial Sequence
  ENSG00000129467_54 (sequence is synthesized)
cttctctaactcatgaccattccatacattccagaagcctaggcgttgatgggagctgtctggagcaggggtccccagcccccaggccgcagactgatactagtccatgacctgttggga

SEQ ID NO: 280784 - DNA, 120 bp, Artificial Sequence
  ENSG00000129467_55 (sequence is synthesized)
gtaccccccggggactagatgatgaactggacaccggggatgccaagttcttccagacagtggaagcagtcgaaggacttcaacccactgacactgtacttcagagagaaggagatggag

SEQ ID NO: 280785 - DNA, 72 bp, Artificial Sequence
  ENSG00000129467_56 (sequence is synthesized)
ctccacccctctcccgagaaagagccctccagctcacctcagagaagatacaagatccctacagacaccacg

SEQ ID NO: 280786 - DNA, 120 bp, Artificial Sequence
  ENSG00000129467_57 (sequence is synthesized)
tttggacgagtcttcccctgactcatccctgggtcagctgaaacccagcacaagccaccactgtgcccaagaagctacctgcctcttcaactcctcatctcctctgcagttcttcttccc

SEQ ID NO: 280787 - DNA, 120 bp, Artificial Sequence
  ENSG00000129467_58 (sequence is synthesized)
gattttgatgagcctgatcctttaactccaaaggcttggggctgggcttctgggagaggtgatggagagagtaagagagactggggacaggactcttctctatatacagctgctctccaa

SEQ ID NO: 280788 - DNA, 120 bp, Artificial Sequence
  ENSG00000129467_59 (sequence is synthesized)
gcccaagttcagtggggtggagaagatcaagaccatcggcagcacctacatggcagccacaggcttaaatgccacctctggacaggatgcacaacaggtacggcaacccttccttaccta

SEQ ID NO: 280789 - DNA, 120 bp, Artificial Sequence
  ENSG00000129472_0 (sequence is synthesized)
gaagatcggtagattgagtggctagagaggtcggaggtaagtggctatagaagtcgggcggacccggaacccagaggacgcgacaccatgacttatgcttatctcttcaagtatatcatc

SEQ ID NO: 280790 - DNA, 120 bp, Artificial Sequence
  ENSG00000129472_1 (sequence is synthesized)
atcggagacacaggtgtggggaagtcatgtctcctcctgcagtttacagataagcggttccagcctgtccacgacctcacaataggtgtggagtttggagctcgtatggtcaacattgat

SEQ ID NO: 280791 - DNA, 120 bp, Artificial Sequence
  ENSG00000129472_2 (sequence is synthesized)
ggaaaacaaatcaaactgcaaatctgggatacggctgggcaagaatccttccgttctatcacccgttcctactacaggggagcagctggagcactgctggtgtacgacattacaaggcgt

SEQ ID NO: 280792 - DNA, 120 bp, Artificial Sequence
  ENSG00000129472_3 (sequence is synthesized)
gaaaccttcaaccacctgacctcatggttagaggatgcccggcagcactctagttccaacatggttatcatgctcattgggaataagagtgacctagagtcccgcagggatgtgaagaga

SEQ ID NO: 280793 - DNA, 120 bp, Artificial Sequence
  ENSG00000129472_4 (sequence is synthesized)
gaagaaggagaggcctttgctagggagcatggacttatattcatggaaacttcagccaaaacagcctgcaatgttgaagaggccttcattaacacagccaaagaaatatataggaagatc

SEQ ID NO: 280794 - DNA, 120 bp, Artificial Sequence
  ENSG00000129472_5 (sequence is synthesized)
cagcagggtttatttgatgtccacaatgaggcaaatggcatcaagattgggccccaacagtcaatttcaacatcagtgggacccagtgcctcccagcggaactctcgtgacatagggtcc

SEQ ID NO: 280795 - DNA, 120 bp, Artificial Sequence
  ENSG00000129472_6 (sequence is synthesized)
aactctggctgctgctgaacatctggcttgaactttttttgtccttcctggaatagcttcagatcaataggcttaatgaaagaggtctttcttgctttggctgagagcagcctcttttta

SEQ ID NO: 280796 - DNA, 120 bp, Artificial Sequence
  ENSG00000129472_7 (sequence is synthesized)
aagtgtgatgttttgcctttccacctaaagaccaggagagaatttgggcccttactgacctgtcctccttcagggacatgagcattccctatagattagggttcttcttatcctcctata

SEQ ID NO: 280797 - DNA, 120 bp, Artificial Sequence
  ENSG00000129472_8 (sequence is synthesized)
tagggttcttcttatcctcctatacaaatttcttaaattgttaggatcaaagttgattatcacagtagttaaaaaataatttcatggcggggcgccatggctcatgcctgtaatcctagc

SEQ ID NO: 280798 - DNA, 120 bp, Artificial Sequence
  ENSG00000129472_9 (sequence is synthesized)
gtgtgagccaccgtgcctggcctaaataaataatttcgtaagcatatacaatccacttcccactaagaattagggtcaaagacattctatttgaacacttgcaattacctagatctagtt

SEQ ID NO: 280799 - DNA, 120 bp, Artificial Sequence
  ENSG00000129472_10 (sequence is synthesized)
ctagatctagttggcctttggttgatagatcctctgcctcggaatttcattgagtttttttcttccttgcctttgggtgtctgcttgccacttcctaagaattcttgtagaaggcagttt

SEQ ID NO: 280800 - DNA, 120 bp, Artificial Sequence
  ENSG00000129472_11 (sequence is synthesized)
cctctacttgcccaagagcactgagtacttctctactatcctattattagcttctatctcttagtgtaacttcaaaacttttaagagcagtgaagttggtcagggacatgtggccactta

SEQ ID NO: 280801 - DNA, 120 bp, Artificial Sequence
  ENSG00000129472_12 (sequence is synthesized)
ttattacctaaagaaaacatttgttccctgttcattttattttaggggccagatctaacattgtagtgtctttcaccagatagacttctactgtttcatcaaactcccttcttaactaga

SEQ ID NO: 280802 - DNA, 120 bp, Artificial Sequence
  ENSG00000129472_13 (sequence is synthesized)
cctagactttctactccaatcaggctaatctacttactgaatgtgacatatttattcctagttccatacctttgcacatgccctactctccactaattatacttaaaagtccaaaaattt

SEQ ID NO: 280803 - DNA, 120 bp, Artificial Sequence
  ENSG00000129472_14 (sequence is synthesized)
tttctttagtaacagacttaggtactgctaagcagttattaacacaatattccttagttttcatatgttggttattcatatgtctatttatatgtatatttatttttatgtatgttacta

SEQ ID NO: 280804 - DNA, 120 bp, Artificial Sequence
  ENSG00000129472_15 (sequence is synthesized)
tgtaaatatggtttgcagttgtttttgtgtggaatcttgtctttccgtataagttgtaagctccttgagagcaggatccatgtcattcctttatttttataaattattccccctatcatt

SEQ ID NO: 280805 - DNA, 120 bp, Artificial Sequence
  ENSG00000129472_16 (sequence is synthesized)
cctttacagtgcctagtgctactcattatgtgttcattgaatttgactgacatagttaaaaacttaaggtttattttagactttcaaggaaacaaaagactttagagtcctctctctgta

SEQ ID NO: 280806 - DNA, 120 bp, Artificial Sequence
  ENSG00000129472_17 (sequence is synthesized)
attctgccccactcatttgtttaccctgggttttatacagttctcttccttctcccctcccacctttccctggctttttgcctccattccatgaggcatacagtaaggctgcctgctagt

SEQ ID NO: 280807 - DNA, 120 bp, Artificial Sequence
  ENSG00000129472_18 (sequence is synthesized)
aagcagtcacataagtgggtacctatccagccattctcttttcagagcatataatactatcttagccaaacttgcctttgcttcactcatcatgcagccttctgggttggttgctatata

SEQ ID NO: 280808 - DNA, 120 bp, Artificial Sequence
  ENSG00000129472_19 (sequence is synthesized)
tatcttttttccttgatgtcccgttctcttccacagccctgaggtcttacgaatttttctactttctttttgctgttgatgaattgtttcattattaaatatatgcatgtatcaaagcta

SEQ ID NO: 280809 - DNA, 120 bp, Artificial Sequence
  ENSG00000129472_20 (sequence is synthesized)
agaacagatgataaaacctgactagctaaattgctaaagtggaaagttagcagccttcagtgttcgaagtaaaaagttacccctcactactttaaactagtccaaacttatgttaatgaa

SEQ ID NO: 280810 - DNA, 120 bp, Artificial Sequence
  ENSG00000129472_21 (sequence is synthesized)
gtgaccaatgaaacgttgatatgtggggagtagtgtaagggagagtatataattgaaaggtaactttttagagtgtgaggtatagactcgtcatataattttttttcaaatacaatttgt

SEQ ID NO: 280811 - DNA, 120 bp, Artificial Sequence
  ENSG00000129472_22 (sequence is synthesized)
aatctgggatacggtgagagtacaaaataatttagtctctgaccaatatccaagtataacaagaaaagctgatgcaaaggaaaggggcgatgagggtggaactaatggtggggataaagt

SEQ ID NO: 280812 - DNA, 120 bp, Artificial Sequence
  ENSG00000129472_23 (sequence is synthesized)
aggggaaaggtgaaatcaaagagagaagtttttgattctgttacagttacaaattctggatgctgtatctttgtgttgtaaacgatccaagtaatagtttattctagtaaaaataaaatc

SEQ ID NO: 280813 - DNA, 120 bp, Artificial Sequence
  ENSG00000129472_24 (sequence is synthesized)
aaacaatataaatttatagaatagaaagtaaatgtccccttttgatacataaactctttctcccttcccatcttggttggtactctagcagggaaatcattactgatgattccacgtgta

SEQ ID NO: 280814 - DNA, 120 bp, Artificial Sequence
  ENSG00000129473_0 (sequence is synthesized)
atcacccggcgccgggccctccctctgcccccccctttctcctccctccttccttccctcccttcctccctctctccctccctcccagctcctgcaccaggaaacggcccggatcccggc

SEQ ID NO: 280815 - DNA, 120 bp, Artificial Sequence
  ENSG00000129473_1 (sequence is synthesized)
agcggcctgacccggctccacgctggccaggaggatgaaaggccccagctgggggctccttgccaccagtgctgtgtcttaagagctgccatcccggctggccgcccggatggcgacccc

SEQ ID NO: 280816 - DNA, 120 bp, Artificial Sequence
  ENSG00000129473_2 (sequence is synthesized)
agcctcggccccagacacacgggctctggtggcagactttgtaggttataagctgaggcagaagggttatgtctgtggagctggccccggggagggcccagcagctgacccgctgcacca

SEQ ID NO: 280817 - DNA, 120 bp, Artificial Sequence
  ENSG00000129473_3 (sequence is synthesized)
agccatgcgggcagctggagatgagttcgagacccgcttccggcgcaccttctctgatctggcggctcagctgcatgtgaccccaggctcagcccaacaacgcttcacccaggtctccga

SEQ ID NO: 280818 - DNA, 120 bp, Artificial Sequence
  ENSG00000129473_4 (sequence is synthesized)
tgaactttttcaagggggccccaactggggccgccttgtagccttctttgtctttggggctgcactgtgtgctgagagtgtcaacaaggagatggaaccactggtgggacaagtgcagga

SEQ ID NO: 280819 - DNA, 120 bp, Artificial Sequence
  ENSG00000129473_5 (sequence is synthesized)
gtggatggtggcctacctggagacgcagctggctgactggatccacagcagtgggggctgggcggagttcacagctctatacggggacggggccctggaggaggcgcggcgtctgcggga

SEQ ID NO: 280820 - DNA, 120 bp, Artificial Sequence
  ENSG00000129473_6 (sequence is synthesized)
ggggaactgggcatcagtgaggacagtgctgacgggggccgtggcactgggggccctggtaactgtaggggccttttttgctagcaagtgaaagtccagggccaggtggggctaggtgtg

SEQ ID NO: 280821 - DNA, 120 bp, Artificial Sequence
  ENSG00000129473_7 (sequence is synthesized)
gctgggggccaggagagcaggaacagaacagagaaatgcccttggaagaagtggagttggtggatgggtgggcatggaacaggatgggcagagaaagggtagtgtgtgagggagctgagt

SEQ ID NO: 280822 - DNA, 120 bp, Artificial Sequence
  ENSG00000129473_8 (sequence is synthesized)
aggccaggtaggcgattggaagagtgagcaggacacagaggggaggggaatgttttggcaagtttaggggcacaggagatgtagtcgttccagggctgggggaggtgggagggatcacgc

SEQ ID NO: 280823 - DNA, 120 bp, Artificial Sequence
  ENSG00000129473_9 (sequence is synthesized)
ctataggtgtgggcacatgaaacgacctggaacttgcttcacagccctgaggaaggtggacttacataagcagctgtattccattagatgagtgggatttagggaacgcagaaggcacat

SEQ ID NO: 280824 - DNA, 120 bp, Artificial Sequence
  ENSG00000129473_10 (sequence is synthesized)
ccctttggaatggaagcttaggggttctcaggtgatagggagaggtggctgttaacagtgggctgcttggacacgcgtgtgcatgtgcacgcatgctggtgtgcatgctgggctgcctgg

SEQ ID NO: 280825 - DNA, 120 bp, Artificial Sequence
  ENSG00000129473_11 (sequence is synthesized)
caaatctggtggtgatgggattcctcaaggagaaaacattccctcttgcaatggcaagaactaggggcagttctctgtccctcctcccaacccctcctttcccctgcccttgtcctgatg

SEQ ID NO: 280826 - DNA, 120 bp, Artificial Sequence
  ENSG00000129473_12 (sequence is synthesized)
cctcaaggcttagagagaaacattgtatccagaccgagggctctgctgcttctttccagaaagtgattggcaaggctttggagagaagagcagttctgcagctggccttgttccttcatc

SEQ ID NO: 280827 - DNA, 120 bp, Artificial Sequence
  ENSG00000129473_13 (sequence is synthesized)
atcccccttccttgtgcattatgcacttgctgctgcctcctgggctctgatagaagggcagggctgttgagcctggatgggtggaggcttaggtagccggacctgcctgccaccctcctc

SEQ ID NO: 280828 - DNA, 120 bp, Artificial Sequence
  ENSG00000129473_14 (sequence is synthesized)
tcccactcaggcacaatggtgcctaaagtgtttccaatctctgggacctctgtacccaaactgaaactctaaattggggccctaactaattttccttttgaggttgtgggcataagtgct

SEQ ID NO: 280829 - DNA, 120 bp, Artificial Sequence
  ENSG00000129473_15 (sequence is synthesized)
agaatacagtctgggtcccacactgtgtctcagtgagactgttgatgccttgagatgaccatttcagatctgaatcccatgggtgtgagggtgatgggtactccaggactggcctatgct

SEQ ID NO: 280830 - DNA, 120 bp, Artificial Sequence
  ENSG00000129473_16 (sequence is synthesized)
gtgttgtgggctttggttcggctttatcaggggccaggcatatgggttctagagtacctaccatgacctagaagcatttatgatttatttgaagccacactgtttgcatgggtgttactt

SEQ ID NO: 280831 - DNA, 120 bp, Artificial Sequence
  ENSG00000129473_17 (sequence is synthesized)
gtctgtacctcagagtctgaggatgttaactttggaactcgcagtcctctagaacagcttcagattatggctttttcttttgaggaagaaattattcactccagatgcatgccctgagcc

SEQ ID NO: 280832 - DNA, 120 bp, Artificial Sequence
  ENSG00000129473_18 (sequence is synthesized)
agacctcactgctgcactttccaaggtgctaagattgctgctctccaatgctaactttctgacacagtgctctagaaccctgcctgtggtcctgagcactgatcaccttagctagaccat

SEQ ID NO: 280833 - DNA, 120 bp, Artificial Sequence
  ENSG00000129473_19 (sequence is synthesized)
ggttgactcttcttggagattttcacttggtcctagaatgtggcaacgtagttgtgctcgccagaacgtgggaccaaattggcctcaggtgttgagtccagacttctgcttttgagagag

SEQ ID NO: 280834 - DNA, 120 bp, Artificial Sequence
  ENSG00000129473_20 (sequence is synthesized)
ggctgcactttttcatggtatttctaggggaggtggtaggctgcatgtgccacttggtcttgttgtgagtatgctgacaccagaaactcagagccagcttgtggcaagcagttggggtgg

SEQ ID NO: 280835 - DNA, 120 bp, Artificial Sequence
  ENSG00000129473_21 (sequence is synthesized)
ggggtctctgacttgctcaggacaaactaggccagtggttttcaaactgcttggcagagccctgaagtttcctaggggttgcctcaggagtccttggggagatgaagggggtggggagct

SEQ ID NO: 280836 - DNA, 120 bp, Artificial Sequence
  ENSG00000129473_22 (sequence is synthesized)
gagcaggctgggcaatttgccctcaaacagaacagctccccttgtagctgtcttacatattggggttcagggtaagattttatttgcattaaggggtttgctgctgaaaaaaagttggaa

SEQ ID NO: 280837 - DNA, 120 bp, Artificial Sequence
  ENSG00000129473_23 (sequence is synthesized)
aaccactgactagaccatcggctccaaattggagtctgtgcttccttccccaggtatggagcacactcttcaccctaccctctaccacaggacacatatccctgttagcattccccggga

SEQ ID NO: 280838 - DNA, 120 bp, Artificial Sequence
  ENSG00000129473_24 (sequence is synthesized)
cctttagccaagaggagctgcagggaccatggccaggttaccaaaatgccctgctctgaagccttgacacctgggtggaaagagaggctgttttctgaaagggtaaagggcttggtctgg

SEQ ID NO: 280839 - DNA, 120 bp, Artificial Sequence
  ENSG00000129473_25 (sequence is synthesized)
attcccagaagcatagcttagatgggaccacagtgggcaattttgacctgtcctgcccttcttagcttgaagggaaaccccagagactcttctgtcagggaaaactagggactctcttct

SEQ ID NO: 280840 - DNA, 120 bp, Artificial Sequence
  ENSG00000129473_26 (sequence is synthesized)
agagccatatagttccttgggattagctcttggccaagaaggctgagtatggttcccaatttttaaatccatttcattttttaaaaaataagggaaataaatgtaattgccatttttcaa

SEQ ID NO: 280841 - DNA, 120 bp, Artificial Sequence
  ENSG00000129473_27 (sequence is synthesized)
agattaagtaggaggagaggggtttcttgctctccagagcccaaagggacaaatagggactttgtttaggccaaggaaggagcggaagtagggcaactcggtcctgcgattattaatccc

SEQ ID NO: 280842 - DNA, 120 bp, Artificial Sequence
  ENSG00000129473_28 (sequence is synthesized)
actccccacttattctagggcacacaaacactattttacttttttaaaatcataaaacggcagaacagatttggttagtttagaagaaaagaaagctctataaatataaatctatattcc

SEQ ID NO: 280843 - DNA, 120 bp, Artificial Sequence
  ENSG00000129473_29 (sequence is synthesized)
tgtatttttatttaataatttataaataccaagttcatttgacttttatttttgtgtaatatgtaatgatcgtattaaaaacaataaataaagcccagaagtttaatgagaaggactgaa

SEQ ID NO: 280844 - DNA, 120 bp, Artificial Sequence
  ENSG00000129473_30 (sequence is synthesized)
gatccacatggtacatgacattcttcctgttttcttcacaagacaaggatgatgtttaaatgggcatttgtttgcggaatgacttggagagttcctctctttcagccatcttttctcaaa

SEQ ID NO: 280845 - DNA, 120 bp, Artificial Sequence
  ENSG00000129473_31 (sequence is synthesized)
gactaaggctgtggacaggatgggcatgaagactgtcaaggagcccgagtgagggaagcagaccaaccatggtcttggagaaaagaaaatagggtttccatcccttctggagggagaagg

SEQ ID NO: 280846 - DNA, 120 bp, Artificial Sequence
  ENSG00000129473_32 (sequence is synthesized)
agctgggcctttgggctgcactagggggaaccgggaatagagatggtgtcggcaggaagcccttggccttgggtttcccgggaggacagtcattaaacatggattcggccacacagctgg

SEQ ID NO: 280847 - DNA, 120 bp, Artificial Sequence
  ENSG00000129473_33 (sequence is synthesized)
tagagcgttgggggcaggggcctaggcccagagctgcaaccctagcccttcccaggccagaacctgatccctggccttcccctcctggttctgatctccccctcccctttccagggctcc

SEQ ID NO: 280848 - DNA, 120 bp, Artificial Sequence
  ENSG00000129474_0 (sequence is synthesized)
agtcgggcgagtcgacgcgtgaacagatagacctgcggactggacagccgcggccagagaccctgctagccccgctcagccccagatgcgcggggggacgcagcccctcccgctggggga

SEQ ID NO: 280849 - DNA, 120 bp, Artificial Sequence
  ENSG00000129474_1 (sequence is synthesized)
tgctgtgggattcctggcgcagggcatccaggccgcccgctaagcccctgtgcctcccctgtgcccctggggaaccagagtccggctgcagggaaagagaaccggccgccgagacgccgc

SEQ ID NO: 280850 - DNA, 120 bp, Artificial Sequence
  ENSG00000129474_2 (sequence is synthesized)
agggtgccaggcggggagggggcgagaggccccaggcccgagggcatggagcggttaggagagaaagccagtcgcctgctggagaagttcggccgcagaaagggtgaatctagccggtct

SEQ ID NO: 280851 - DNA, 120 bp, Artificial Sequence
  ENSG00000129474_3 (sequence is synthesized)
gggtctgacgggacccccgggccgggcaaggggcgcctaagtgggttggggggacctaggaagtcagggccccgaggagctactgggggacctggggatgagccgttggagccggcccgg

SEQ ID NO: 280852 - DNA, 120 bp, Artificial Sequence
  ENSG00000129474_4 (sequence is synthesized)
gagcaaggttccctggacgctgagcgaaatcagcgcggctcctttgaggcgccgcgctacgaaggctcttttcccgcggggccgccgcccacccgggccttgcctctacctcagtcgttg

SEQ ID NO: 280853 - DNA, 120 bp, Artificial Sequence
  ENSG00000129474_5 (sequence is synthesized)
ccccccgattttcggctggagcccacggccccggccctcagcccccgctctagcttcgccagtagctcggccagcgacgcgagcaagccgtccagcccccggggcagcctgctgctggac

SEQ ID NO: 280854 - DNA, 120 bp, Artificial Sequence
  ENSG00000129474_6 (sequence is synthesized)
ggggcgggggctggcggagctggaggtagccggccctgcagcaatcgcaccagcggcatcagcatgggctacgaccagcgccacgggagccccttgccagcggggccgtgcctgtttggc

SEQ ID NO: 280855 - DNA, 120 bp, Artificial Sequence
  ENSG00000129474_7 (sequence is synthesized)
ccacccctggccggagcaccggcaggctattctcccggaggggtcccgtccgcctacccggagctccacgccgccctggaccgattgtacgctcagcggcccgcggggttcggctgccag

SEQ ID NO: 280856 - DNA, 120 bp, Artificial Sequence
  ENSG00000129474_8 (sequence is synthesized)
gaaagccgccactcgtatcccccggccctgggcagccctggagctctagccggggccggagtgggagcggcggggcccttggagagacggggggcgcaacccggacgacactctgtgacc

SEQ ID NO: 280857 - DNA, 120 bp, Artificial Sequence
  ENSG00000129474_9 (sequence is synthesized)
ggctacggggactgcgccgtgggcgcccggtaccaggacgagctaacagctttgcttcgcctgacggtgggcaccggtgggcgagaagccggagcccgcggagaaccctcggggattgag

SEQ ID NO: 280858 - DNA, 120 bp, Artificial Sequence
  ENSG00000129474_10 (sequence is synthesized)
ccgtcgggtctggaggagccaccaggtcctttcgttccggaggccgcccgggcccggatgcgggagccagaggccagggaggactacttcggcacctgtatcaagtgcaacaaaggcatc

SEQ ID NO: 280859 - DNA, 120 bp, Artificial Sequence
  ENSG00000129474_11 (sequence is synthesized)
tatgggcagagcaatgcctgccaggccctggacagcctctaccacacccagtgctttgtttgctgctcttgtgggcgaactttgcgttgcaaggctttctacagtgtcaatggctctgtg

SEQ ID NO: 280860 - DNA, 120 bp, Artificial Sequence
  ENSG00000129474_12 (sequence is synthesized)
tactgtgaggaagattatctgttttcagggtttcaggaggcagctgagaaatgctgtgtctgtggtcacttgattttggagaagatcctacaagcaatggggaagtcctatcatccaggc

SEQ ID NO: 280861 - DNA, 120 bp, Artificial Sequence
  ENSG00000129474_13 (sequence is synthesized)
tgtttccgatgcattgtttgcaacaagtgcctggatggcatccccttcacagtggacttctccaaccaagtatactgtgtcaccgactaccacaaaaattatgctcctaagtgtgcagcc

SEQ ID NO: 280862 - DNA, 120 bp, Artificial Sequence
  ENSG00000129474_14 (sequence is synthesized)
tgtggccaacccatcctcccctctgagggctgtgaggacatcgtgagggtgatatccatggaccgggattatcactttgagtgctaccactgtgaggactgccggatgcagctgagtgat

SEQ ID NO: 280863 - DNA, 120 bp, Artificial Sequence
  ENSG00000129474_15 (sequence is synthesized)
gaggaaggctgctgctgtttccctctggatgggcacttgctctgccatggttgccacatgcagcggctcaatgcccgacaaccccctgccaactatatctgagctgcaatcactgctgct

SEQ ID NO: 280864 - DNA, 120 bp, Artificial Sequence
  ENSG00000129474_16 (sequence is synthesized)
gctgtcaccctgcagacaaactgctgtggccagtgggcccctctgaggccagccaaggcaaagaatgcactctgcaggcctggcagaagagtcctctggggaggaccccaagggccggag

SEQ ID NO: 280865 - DNA, 120 bp, Artificial Sequence
  ENSG00000129474_17 (sequence is synthesized)
gcagtctgagcttaggcacacacaggagggttccaggactttctgaacatctgattctgtatcttcagtatatatattttgtttgttttagagatgggatctcaccatgttgcccaggct

SEQ ID NO: 280866 - DNA, 81 bp, Artificial Sequence
  ENSG00000129474_18 (sequence is synthesized)
tctggcctagtgtatgattatgcatgagtcacgcaatgttctggtcctggattccaggagtagaggacctagctttaaatc

SEQ ID NO: 280867 - DNA, 120 bp, Artificial Sequence
  ENSG00000129474_19 (sequence is synthesized)
tggtcctggattccaggagtagaggacctagctttaaatcaattagtttcagctaaactgactagaaccaaatcaaagtgtaattctccctccagctcccccaaaccccagagttttggg

SEQ ID NO: 280868 - DNA, 120 bp, Artificial Sequence
  ENSG00000129474_20 (sequence is synthesized)
gttgtggttgatgcagtgtgggatgtccctgagaggtagcaagtctagggtggtgagttcctgctaggcaaccaaatttaagctcctcactttttgtgacacatggtgtcagatatgggg

SEQ ID NO: 280869 - DNA, 120 bp, Artificial Sequence
  ENSG00000129474_21 (sequence is synthesized)
tcccgcacctatatctggatgaagaggtagaaactctggacctcattaatgagttatttcttggccttcttctaaggactaggagagctccttatctgtctgagaatggggaccagctct

SEQ ID NO: 280870 - DNA, 120 bp, Artificial Sequence
  ENSG00000129474_22 (sequence is synthesized)
gagtggggttgctgcctgtattccctgtttctcaggaacttacatgggtctggggaggctaggtaggtgattgtacgtggttgctcttctccttggctgggggaggtaatgagcagatct

SEQ ID NO: 280871 - DNA, 120 bp, Artificial Sequence
  ENSG00000129474_23 (sequence is synthesized)
ctgtgggtgtggagcttgttggggggatgtctaggaagcttcagcttagccacattcccaagtttaggtgcactgagccatatagcccagtgtatgcatgtgtgggtgtgttcatgcaca

SEQ ID NO: 280872 - DNA, 120 bp, Artificial Sequence
  ENSG00000129474_24 (sequence is synthesized)
cacacactctctctcttgtctctctgtctctctctcactctttcttactctcttctcaggtcacttgtacacttggtttcctagtagaagctcacttgccacctctcagaggggtcccgg

SEQ ID NO: 280873 - DNA, 120 bp, Artificial Sequence
  ENSG00000129474_25 (sequence is synthesized)
attgcatccatcacaatcccaaaactagagttggggggaactggagggagcaaaacactgatttgatactagtcagtttgcttgaaactagttcacctaaagctagatctcttaaaacca

SEQ ID NO: 280874 - DNA, 120 bp, Artificial Sequence
  ENSG00000129474_26 (sequence is synthesized)
atttactgaaaacttgtttgcttaaagttaatgacttaatgactaatttgccaaaagctcaattcctattttggtgtgtttatatccatttaggtgtcctattcttttttgtcatgcttt

SEQ ID NO: 280875 - DNA, 120 bp, Artificial Sequence
  ENSG00000129474_27 (sequence is synthesized)
ggatatttcaaggatttatatctattcatccaagagtacttctgagctattatcagcaacataaatttatcaaatttgcagcactttgtaaatgatgagattgcttcctacctttatgga

SEQ ID NO: 280876 - DNA, 120 bp, Artificial Sequence
  ENSG00000129474_28 (sequence is synthesized)
tgtctttttctatgttatctaccattcaaaaacttttttaaaaagtttaaagtttctagcaataaatacaattggtacagacattttgtgtatcatttttttgtttcttaatccaatatt

SEQ ID NO: 280877 - DNA, 120 bp, Artificial Sequence
  ENSG00000129474_29 (sequence is synthesized)
cctttacaaattaaatgccttgaaaaatataatggagttcaatgtgattttgatgctttggtctaacttctacattcctactgttaaaaaggccagtatatcttaaacaaatgaataggc

SEQ ID NO: 280878 - DNA, 120 bp, Artificial Sequence
  ENSG00000129474_30 (sequence is synthesized)
atgaggcatattcagttgacttacaatgaaaagttatacagacaacagtaataactaaaagggtgaatctgctaaatccttttgaaatgctgcagatttgataaatatttattttagact

SEQ ID NO: 280879 - DNA, 120 bp, Artificial Sequence
  ENSG00000129474_31 (sequence is synthesized)
aattggttttaggtgaattggttttaggcaaattaatttagtaatctttgatctttagtcttcattttctgtcactcagtgagtttcttactggaaatgatgactcctgacaacagaatt

SEQ ID NO: 280880 - DNA, 120 bp, Artificial Sequence
  ENSG00000129474_32 (sequence is synthesized)
tccacatttgggggctattctaaggtgactatgccagccaacctgggaaatacataaaagagatctctgagtgagagggaaagaggtcagatttatacaactgagcgccagaggggaaaa

SEQ ID NO: 280881 - DNA, 120 bp, Artificial Sequence
  ENSG00000129474_33 (sequence is synthesized)
tgcaccttgttggagtgagaaatgttctgaaactgaattacttcttgtacagctgagatagcttcttctgaactattattaaataagtgaatacaaaggccctatgatgggaaatccaga

SEQ ID NO: 280882 - DNA, 120 bp, Artificial Sequence
  ENSG00000129474_34 (sequence is synthesized)
ttggaagtctgcagtggagagaaatcattctataactgaacagctcgtttgactgatgggaaactgaagtcccagagacgatttctgggcctagcctgctttctctagaaagtattttca

SEQ ID NO: 280883 - DNA, 120 bp, Artificial Sequence
  ENSG00000129474_35 (sequence is synthesized)
agtctgctgctgagcacctgtggactggcatctttgaccgttcatcctacacactgcaacagagatcataccttgcctgtgtagtcttttctccccaacagaaactaagcatctgaatgc

SEQ ID NO: 280884 - DNA, 120 bp, Artificial Sequence
  ENSG00000129474_36 (sequence is synthesized)
cagggaccatatcttcgactttctccaggtttccttaggtagtggtgctgtgttaagcacaaaacagatgctcagaaaatatctgttgagtaattaaataaacaagaatggatctgctca

SEQ ID NO: 280885 - DNA, 120 bp, Artificial Sequence
  ENSG00000129474_37 (sequence is synthesized)
taactccagtcctgacctccatggagtctgtccctggaaggagacaggcatttgagagcaggatagatatgctcaggcaaagaggcttctaggttgaagggtcccagagggaaaggcctg

SEQ ID NO: 280886 - DNA, 120 bp, Artificial Sequence
  ENSG00000129474_38 (sequence is synthesized)
ttaacaatgtggttctctctatgcaaatcatatagcaccttattaagagctcacgtattccagcacgtagttggctttactctcccaggtggcttcctatgcactggagaggaaggcagt

SEQ ID NO: 280887 - DNA, 120 bp, Artificial Sequence
  ENSG00000129474_39 (sequence is synthesized)
ttgtttaggggaggggccctagaaaactgttaaggaggcaggagctggaggagcagcaagcagaggagaggggaagttggctggaatgaagccaaagcaaattggaattgcatcagatgg

SEQ ID NO: 280888 - DNA, 120 bp, Artificial Sequence
  ENSG00000129474_40 (sequence is synthesized)
aatttttgtgcggggaaggacagacagcagttaggaggaaaagcacaaagtccaggtttaaatatattatgcagcagcggggagcagtgaccccagaagtcttgcacctgggctgtggga

SEQ ID NO: 280889 - DNA, 120 bp, Artificial Sequence
  ENSG00000129474_41 (sequence is synthesized)
actgcttacccattctgattcctttgctaaacctttaatctcctatctctgcctgtctgacttcagcactcagcttttctcactcccccagtttctgcctggttctctttaggctcatct

SEQ ID NO: 280890 - DNA, 120 bp, Artificial Sequence
  ENSG00000129474_42 (sequence is synthesized)
gtctgtctatccttctgtttacagggcctcttctggctatatctctttccctatctttcctcccctgtgtctcatgagcttctaagtcagctttcctaacccactggacagagttggaag

SEQ ID NO: 280891 - DNA, 120 bp, Artificial Sequence
  ENSG00000129474_43 (sequence is synthesized)
tgaatgctctctcaggcacttttcagggtctccgcctccattttacgacttcttcaccgacattacatagcattgttctgggagtatagcagcgggttggatgaggttaatgggagtaat

SEQ ID NO: 280892 - DNA, 120 bp, Artificial Sequence
  ENSG00000129474_44 (sequence is synthesized)
catgctgcctggcctcctgccagaagtggtagtgccaaggaatgtactctgtgaagattcccgtgtgactctgcctcttggggtcaccaccctgaccctaatatccgggcctggacatgt

SEQ ID NO: 280893 - DNA, 120 bp, Artificial Sequence
  ENSG00000129480_0 (sequence is synthesized)
aatcggcgcaggcccttcgtcgtgccccgcctcgtctgccccgccagcgcgtcgagggaggggccagcgacacatggcctagtaactgtccggccgcggcgctggcttaagccatggctg

SEQ ID NO: 280894 - DNA, 120 bp, Artificial Sequence
  ENSG00000129480_1 (sequence is synthesized)
agggtagccggattcctcaggcccgggcgctcctacagcagtgcctgcacgcccggctgcaaattcgcccagccgatggggacgtcgcggcccagtgggtggaggtccaaagaggactgg

SEQ ID NO: 280895 - DNA, 120 bp, Artificial Sequence
  ENSG00000129480_2 (sequence is synthesized)
tgatctacgtgtgctttttcaagggagctgataaagaacttcttcccaaaatggttaatacactgttaaatgtgaaattaagtgagacagaaaatggcaagcatgtctctatattggatc

SEQ ID NO: 280896 - DNA, 120 bp, Artificial Sequence
  ENSG00000129480_3 (sequence is synthesized)
tacctggcaacattcttattatccctcaagctacccttggaggaagactaaaaggaagaaacatgcaatatcactctaactctggaaaagaagaagggtttgaactttactctcaatttg

SEQ ID NO: 280897 - DNA, 120 bp, Artificial Sequence
  ENSG00000129480_4 (sequence is synthesized)
tgactctatgtgaaaaagaagtagctgctaatagcaagtgtgctgaagctagggttgtagtggaacatggcacttatgggaacaggcaggtgttaaagctggacaccaacggaccattca

SEQ ID NO: 280898 - DNA, 120 bp, Artificial Sequence
  ENSG00000129480_5 (sequence is synthesized)
cacacttaattgagttttgaaaatgaaaaactagtttctatagctgttttctggtatgaaatgatctaaagtataattagattttcttccccttaatcttgaatatactaatcttcagca

SEQ ID NO: 280899 - DNA, 120 bp, Artificial Sequence
  ENSG00000129480_6 (sequence is synthesized)
tttttagacaggaaaatcttgggtttcatatataactctgcacctgctaattggatgactttgccaagtcacctaaactctggatctcagtcaccttttgtcctacattcctctaccctt

SEQ ID NO: 280900 - DNA, 120 bp, Artificial Sequence
  ENSG00000129480_7 (sequence is synthesized)
tctcagtcaccttttgtcctacattcctctacccttctacttgaaaatttgaaatatgctgtctattcacttcatagtcattaaggaaatgttcttaattgtttttttgtttttgttttt

SEQ ID NO: 280901 - DNA, 120 bp, Artificial Sequence
  ENSG00000129480_8 (sequence is synthesized)
gtgcccggcctcttagttgttttttaaaaattatgtacattttaagtattttgcaatgaagaaattcatgcaaacaagaaaaacacatttcttataccatcaaatttgtgtagcatgtaa

SEQ ID NO: 280902 - DNA, 120 bp, Artificial Sequence
  ENSG00000129480_9 (sequence is synthesized)
taattttgtttactatttcagttttctgtatttccatatgtaagtcaccatttcttttaataatatgcatgaaaatgtaatatagggccaaatgtggtggctcatgcctataatcccagc

SEQ ID NO: 280903 - DNA, 120 bp, Artificial Sequence
  ENSG00000129480_10 (sequence is synthesized)
gaggatcacttgagcccaggagtttgcgaccagcctgggcagaatagcaagacccagtctctaacatatacatatacatatagatatatatgtaatatagaagggttattgtgtgttata

SEQ ID NO: 280904 - DNA, 120 bp, Artificial Sequence
  ENSG00000129480_11 (sequence is synthesized)
gtgttatattactttccagggacattcaaatgttttacattactttaagaatctttacttgatataagaacaaagtataagggtttaaaagttgtttttattaaacatactatataaatg

SEQ ID NO: 280905 - DNA, 120 bp, Artificial Sequence
  ENSG00000129480_12 (sequence is synthesized)
ggttaatggtctatttttcagtttttaccaaaatcatgtgtctcactttttgtcttcgctttttaaagaactggttcatgaaattagtgttagttcataaattgtttaagaagttccttt

SEQ ID NO: 280906 - DNA, 120 bp, Artificial Sequence
  ENSG00000129480_13 (sequence is synthesized)
tccattgaattagattgctgtaaaagggagaaaaagggaagcttcccataagaatagtttgaaaacaaattgacttgttcatttccatattatctgcttgatgatatggagccagtgtca

SEQ ID NO: 280907 - DNA, 120 bp, Artificial Sequence
  ENSG00000129480_14 (sequence is synthesized)
atttttctgttagtgaatgttttggactagatgttcccgtccccaaaatttatatgttgaagcccttattaatgtgatggtatctggagatggggctcctccaaccatcccatcctggaa

SEQ ID NO: 280908 - DNA, 120 bp, Artificial Sequence
  ENSG00000129480_15 (sequence is synthesized)
catataagccagaaagaaagtagtctccagaaacagaccatgctgacaccttgagtttgaacttctaatcaccagaactgtgaggaaataaatttctggtgtttaaaccacccagtccta

SEQ ID NO: 280909 - DNA, 120 bp, Artificial Sequence
  ENSG00000129480_16 (sequence is synthesized)
tggtattttgttagggcagtctgagctacgacagtgatataagatagacagctagtaaggtaaacttttcaaaggcaagagaggaagatatacaagaaattgaaagaataattaagtcag

SEQ ID NO: 280910 - DNA, 120 bp, Artificial Sequence
  ENSG00000129480_17 (sequence is synthesized)
taagaggtaatattcagttttggcaaactcctctgacttgagttgaaaatactttttttttttaagagtaaaaaccaaataactaattctaattggcaaaaaaaggtaaataaataaaca

SEQ ID NO: 280911 - DNA, 120 bp, Artificial Sequence
  ENSG00000129480_18 (sequence is synthesized)
tcctaagtagctgctgaaatttccgttgtgtcttatagtttctttaggtctgtgttcctaagatgcttaaaatttttatcatgaaaaatcctattttctctatacccttcctgtactgtt

SEQ ID NO: 280912 - DNA, 120 bp, Artificial Sequence
  ENSG00000129480_19 (sequence is synthesized)
ctattttggaaccagagaatcaataactggcttggtaatgagctcattgtccttaacttttgctttattgattcacaatacacttactgaaatgtaataaactattcataaacttgcaaa

SEQ ID NO: 280913 - DNA, 120 bp, Artificial Sequence
  ENSG00000129480_20 (sequence is synthesized)
gcgtgcggggcggttttttccgcgttgtctcggtgactcgtccgctctgtgtctccctctgagaccggcggtccggccgcggggataccgggtcagcttgaagctggccgcggtggcctg

SEQ ID NO: 280914 - DNA, 120 bp, Artificial Sequence
  ENSG00000129484_0 (sequence is synthesized)
ggttgatgacgtcagcgttcgaattccatggcggcgcggcggcgacggagcaccggcggcggcagggcgagagcattaaatgaaagcaaaagagttaataatggcaacacggctccagaa

SEQ ID NO: 280915 - DNA, 120 bp, Artificial Sequence
  ENSG00000129484_1 (sequence is synthesized)
gactcttcccctgccaagaaaactcgtagatgccagagacaggagtcgaaaaagatgcctgtggctggaggaaaagctaataaggacaggacagaagacaagcaagatggtatgccagga

SEQ ID NO: 280916 - DNA, 120 bp, Artificial Sequence
  ENSG00000129484_2 (sequence is synthesized)
aggtcatgggccagcaaaagggtctctgaatctgtgaaggccttgctgttaaagggcaaagctcctgtggacccagagtgtacagccaaggtggggaaggctcatgtgtattgtgaagga

SEQ ID NO: 280917 - DNA, 120 bp, Artificial Sequence
  ENSG00000129484_3 (sequence is synthesized)
aatgatgtctatgatgtcatgctaaatcagaccaatctccagttcaacaacaacaagtactatctgattcagctattagaagatgatgcccagaggaacttcagtgtttggatgagatgg

SEQ ID NO: 280918 - DNA, 120 bp, Artificial Sequence
  ENSG00000129484_4 (sequence is synthesized)
ggccgagttgggaaaatgggacagcacagcctggtggcttgttcaggcaatctcaacaaggccaaggaaatctttcagaagaaattccttgacaaaacgaaaaacaattgggaagatcga

SEQ ID NO: 280919 - DNA, 120 bp, Artificial Sequence
  ENSG00000129484_5 (sequence is synthesized)
gaaaagtttgagaaggtgcctggaaaatatgatatgctacagatggactatgccaccaatactcaggatgaagaggaaacaaagaaagaggaatctcttaaatctcccttgaagccagag

SEQ ID NO: 280920 - DNA, 120 bp, Artificial Sequence
  ENSG00000129484_6 (sequence is synthesized)
tcacagctagatcttcgggtacaggagttaataaagttgatctgtaatgttcaggccatggaagaaatgatgatggaaatgaagtataataccaagaaagccccacttgggaagctgaca

SEQ ID NO: 280921 - DNA, 120 bp, Artificial Sequence
  ENSG00000129484_7 (sequence is synthesized)
agcatgcaatgaattctacaccaggattccgcatgactttggactccgtactcctccactaatccggacacagaaggaactgtcagaaaaaatacaattactagaggctttgggagacat

SEQ ID NO: 280922 - DNA, 120 bp, Artificial Sequence
  ENSG00000129484_8 (sequence is synthesized)
tgaaattgctattaagctggtgaaaacagagctacaaagcccagaacacccattggaccaacactatagaaacctacattgtgccttgcgcccccttgaccatgaaagttatgagttcaa

SEQ ID NO: 280923 - DNA, 120 bp, Artificial Sequence
  ENSG00000129484_9 (sequence is synthesized)
agtgatttcccagtacctacaatctacccatgctcccacacacagcgactataccatgaccttgctggatttgtttgaagtggagaaggatggtgagaaagaagccttcagagaggacct

SEQ ID NO: 280924 - DNA, 120 bp, Artificial Sequence
  ENSG00000129484_10 (sequence is synthesized)
tcataacaggatgcttctatggcatggttccaggatgagtaactgggtgggaatcttgagccatgggcttcgaattgccccacctgaagctcccatcacaggttacatgtttgggaaagg

SEQ ID NO: 280925 - DNA, 120 bp, Artificial Sequence
  ENSG00000129484_11 (sequence is synthesized)
aatctactttgctgacatgtcttccaagagtgccaattactgctttgcctctcgcctaaagaatacaggactgctgctcttatcagaggtagctctaggtcagtgtaatgaactactaga

SEQ ID NO: 280926 - DNA, 120 bp, Artificial Sequence
  ENSG00000129484_12 (sequence is synthesized)
ggccaatcctaaggccgaaggattgcttcaaggtaaacatagcaccaaggggctgggcaagatggctcccagttctgcccacttcgtcaccctgaatgggagtacagtgccattaggacc

SEQ ID NO: 280927 - DNA, 120 bp, Artificial Sequence
  ENSG00000129484_13 (sequence is synthesized)
agcaagtgacacaggaattctgaatccagatggttataccctcaactacaatgaatatattgtatataaccccaaccaggtccgtatgcggtaccttttaaaggttcagtttaatttcct

SEQ ID NO: 280928 - DNA, 120 bp, Artificial Sequence
  ENSG00000129484_14 (sequence is synthesized)
tcagctgtggtgaatgttgatattaaataaaccagagatctgatcttcaagcaagaaaataagcagtgttgtacttgtgaattttgtgatattttatgtaataaaaactgtacaggtcta

SEQ ID NO: 280929 - DNA, 120 bp, Artificial Sequence
  ENSG00000129484_15 (sequence is synthesized)
tctgggtttaaattgggtcagtagaggctctgaagtctgggagagccttaggaatcaagttgagcatcttgaaattggggaatggcaggcatcctccttagagttcccactggaaaaact

SEQ ID NO: 280930 - DNA, 120 bp, Artificial Sequence
  ENSG00000129484_16 (sequence is synthesized)
aagagcagcccattgagtctgaaaactcttctatagttgaactgctagtagtgctcatagactatggcagttagcaagtaacttgtatcaacatgattagttccctaaatcctttcacct

SEQ ID NO: 280931 - DNA, 120 bp, Artificial Sequence
  ENSG00000129484_17 (sequence is synthesized)
ccacttggcaggttaccagtctcttaagaagattgaggattgtattcgggctggccagcatggacgagctctcatggaagcatgcaatgaattctacaccaggattccgcatgactttgg

SEQ ID NO: 280932 - DNA, 120 bp, Artificial Sequence
  ENSG00000129484_18 (sequence is synthesized)
gtgagacaggagtatgtctgtgatctctagtttattaattccagtttttttccgatgagaaaagtttgaccccagaaccaagaggtttacctgggatagcttgagagaggaccaagtaca

SEQ ID NO: 280933 - DNA, 120 bp, Artificial Sequence
  ENSG00000129484_19 (sequence is synthesized)
atttctagtacattggattcctctgctggagtaggggaaaaaagtactgatgggattttctgtttggctttggagccatctaattcttagtaggatatgggaattcaaaggttttttgct

SEQ ID NO: 280934 - DNA, 120 bp, Artificial Sequence
  ENSG00000129484_20 (sequence is synthesized)
ttgcaggtagctctaggtcagtgtaatgaactactagaggccaatcctaaggccgaaggattgcttcaaggtaaacatagcaccaaggggctgggcaagatggctcccagttctgcccac

SEQ ID NO: 280935 - DNA, 72 bp, Artificial Sequence
  ENSG00000129484_21 (sequence is synthesized)
tcaggaactacaggcacgtgccactctgcccagctgattttttttcttttttttttgtaaagatgagtcctc

SEQ ID NO: 280936 - DNA, 120 bp, Artificial Sequence
  ENSG00000129484_22 (sequence is synthesized)
ttgtcttggcctcccaaagtcctgagattacaagcatgaggcaccacacctactcctgtttcttcttactcagggtaaagcagaatagcttagatcattcctggactgggacaggccagg

SEQ ID NO: 280937 - DNA, 120 bp, Artificial Sequence
  ENSG00000129484_23 (sequence is synthesized)
ttgtaatcccaaagggacagtaagaatgaggatagaatgtgcctttctagtcttggctctgttatttactaaggttcttttttttttttttgagctggagtttgattcttgttgcccagg

SEQ ID NO: 280938 - DNA, 84 bp, Artificial Sequence
  ENSG00000129484_24 (sequence is synthesized)
tttttttttttgagctggagtttgattcttgttgcccaggttggagtgcaatggctcagtctcagctcgctgcaacctccagca

SEQ ID NO: 280939 - DNA, 120 bp, Artificial Sequence
  ENSG00000129484_25 (sequence is synthesized)
ctagaagactccttttggccagataagactacgttctctattgcagcttctgaaccagagactgatgttgacacactttttttccatttggcaggaatgggagtacagtgccattaggac

SEQ ID NO: 280940 - DNA, 120 bp, Artificial Sequence
  ENSG00000129484_26 (sequence is synthesized)
gaggaaggtgttggcttttttatgcttatggcctatctgtgcagaacaacagagtacaataatattggcttttccttaggatgcttctatggcatggttccaggatgagtaactgggtgg

SEQ ID NO: 280941 - DNA, 120 bp, Artificial Sequence
  ENSG00000129484_27 (sequence is synthesized)
gaatcttgagccatgggcttcgaattgccccacctgaagctcccatcacaggttacatggtgagtgaaattgaactctgggaggagcacaggggaaagggatacagtaatgttctcagtg

SEQ ID NO: 280942 - DNA, 120 bp, Artificial Sequence
  ENSG00000129484_28 (sequence is synthesized)
ctgtgtttgtgccacggcactcagcctgggcaacaggagtgagaccccatcttaaaaacaggaaaaaaaaaagttgaaagatgaaagtcttttttagggaaggatgttaagtacagttca

SEQ ID NO: 280943 - DNA, 120 bp, Artificial Sequence
  ENSG00000129484_29 (sequence is synthesized)
aaagtggaagttaccaacccaagagagaatgggtctagctatccaaccacccaagtaaaacaccttcaggcatatcacccccttttcctatttgagtaactaaaaccacacaaacaccat

SEQ ID NO: 280944 - DNA, 120 bp, Artificial Sequence
  ENSG00000129484_30 (sequence is synthesized)
ttctgtgaactcaagtgatattagatagacaaaataacattttacatttgttgattctgttttctggtttacatccgatttctatttcttttatagctttatagagccccgtgacctaga

SEQ ID NO: 280945 - DNA, 120 bp, Artificial Sequence
  ENSG00000129484_31 (sequence is synthesized)
aataaccctgagtggtcaacaggtctacctgtgcttctagatagaactgtatccaactgttccctgttgatatcaatataacttatttttaaatgattttataaaaaataattttaactc

SEQ ID NO: 280946 - DNA, 120 bp, Artificial Sequence
  ENSG00000129484_32 (sequence is synthesized)
taccgagtatatatttaatattattttatatatttggaagttaagatctctttacagatctctttctctctcaaatggaaaacctgtttctcatacctgttttctaaaggacctatctgt

SEQ ID NO: 280947 - DNA, 120 bp, Artificial Sequence
  ENSG00000129493_0 (sequence is synthesized)
agactctgctagggttagcagagcagccggtaacgttgctggaccgggacgcacgctcagctgaggaggacccccaaagatttttattgttaggtatattgaccaaagtttaacgagaag

SEQ ID NO: 280948 - DNA, 120 bp, Artificial Sequence
  ENSG00000129493_1 (sequence is synthesized)
aactgtgatcagctgggaggattgctgcaaggaatggaattagctcatagcttactgctgaatgaagaagcatacaatcaactaggtgaagttcagaaggcagagtttatttttgagtgg

SEQ ID NO: 280949 - DNA, 120 bp, Artificial Sequence
  ENSG00000129493_2 (sequence is synthesized)
ttgagatacttggagaagctcttgttggcaaccagcaggaatgatgtaagggagaaacagaagactcttgttgaacagctcctgtctttgttgaacagctccccagggcctcctacccgc

SEQ ID NO: 280950 - DNA, 120 bp, Artificial Sequence
  ENSG00000129493_3 (sequence is synthesized)
aaactgcttgctaagaatctagccatactttatagtattggagacacattctccgttcatgaagcaatcgataaatgtaatgatcttattcgtagcaaagatgattctccaagttatctt

SEQ ID NO: 280951 - DNA, 120 bp, Artificial Sequence
  ENSG00000129493_4 (sequence is synthesized)
cccactaagcttgctgctgtggtatgtttgggttccttgtacaagaagttgggtagaatactgggtaacacctttactgatacagtggggaatattcttaaagctatgaagagtgcagag

SEQ ID NO: 280952 - DNA, 120 bp, Artificial Sequence
  ENSG00000129493_5 (sequence is synthesized)
tctcaaggccgatatgagattatgctaagtctgcaaaatatattgaatggactaggagctgccgctgcaccttgtcacagggatgtttataaagctgctagatcctgcttgacagataga

SEQ ID NO: 280953 - DNA, 120 bp, Artificial Sequence
  ENSG00000129493_6 (sequence is synthesized)
tccatggctgttcgttgtgctgctgcaaagtgtctccttgaacttcagaatgaagccatctttatgtggagtacggacctggacagtgtggccacactgtgttttaagtcctttgaaggt

SEQ ID NO: 280954 - DNA, 120 bp, Artificial Sequence
  ENSG00000129493_7 (sequence is synthesized)
tccaattatgatgtgcggatttctgtttcaaagttactaggcataatattagctaaagctgtaatttctaaacatccaggaacagcagcctcacgtcaaagcattcgcagagtatctttg

SEQ ID NO: 280955 - DNA, 120 bp, Artificial Sequence
  ENSG00000129493_8 (sequence is synthesized)
gaggaagttctggaattactaggaacagggtttctacgtgggagttcaggattccttcgagccagtggagatatgctgaaaggaaccagttcagtcagtagggatgttcgagttggagtt

SEQ ID NO: 280956 - DNA, 120 bp, Artificial Sequence
  ENSG00000129493_9 (sequence is synthesized)
actcaggcttatgtggtatttgtttcaacactaggaggagcttggctagagaaaaattttgctgcctttttttctcatatcctaagccttgcgtcaccgtcacaccctaaagccacccaa

SEQ ID NO: 280957 - DNA, 120 bp, Artificial Sequence
  ENSG00000129493_10 (sequence is synthesized)
actcagatcgatgccgtctgctgtcgccgttgtgtttcatttattcttcgaactactataggtggtcttcttggagaaaaggctcagcttgctgctgtaaaggatatttgccaggccatc

SEQ ID NO: 280958 - DNA, 120 bp, Artificial Sequence
  ENSG00000129493_11 (sequence is synthesized)
tggaagctaaagaaagttatggatgccgtaatgagtgatggtaatttggaaacccggcttggttccacagatgtagccgctagccaacatatgctggtttgtgctttacaagaacttgga

SEQ ID NO: 280959 - DNA, 120 bp, Artificial Sequence
  ENSG00000129493_12 (sequence is synthesized)
aatctcatacacaatcttggcaccacagcggcacctttgctacaggattcaagtacaggtctccttgacagtatcttgtcagttattcttcatcctagcatttctgttcgactagcagca

SEQ ID NO: 280960 - DNA, 120 bp, Artificial Sequence
  ENSG00000129493_13 (sequence is synthesized)
gcttggtgtttacactgcattgccgtggcattaccctcctacctaacaccactcttggatcgttgccttgaacggcttactggacataagtcttcacctgaagcagtgactggcttcagt

SEQ ID NO: 280961 - DNA, 120 bp, Artificial Sequence
  ENSG00000129493_14 (sequence is synthesized)
tttgctgtagcagctttgttgggagcagtaaaacattgtcctttaggaattcctcatggaaaaggcaagattattatgacattagcagaggatttgctgtgttctgctgctcaaaacagt

SEQ ID NO: 280962 - DNA, 120 bp, Artificial Sequence
  ENSG00000129493_15 (sequence is synthesized)
cgcctttcagctcagcgcacacaagctggatggttgctgatttctgctctgatgacattaggtcctgcagttgttagccatcaccttgctcgagttctgctgttgtggaagtgtgtcttt

SEQ ID NO: 280963 - DNA, 120 bp, Artificial Sequence
  ENSG00000129493_16 (sequence is synthesized)
ccagcatctcctaaagatctagaaacagaaaagagccgaggagattcgtttacatggcaggtgaccctggaaggacgagctggtgcactgtgtgctatcaagagctttgtttcccactgt

SEQ ID NO: 280964 - DNA, 120 bp, Artificial Sequence
  ENSG00000129493_17 (sequence is synthesized)
ggtgatcttcttactgaggaagtaactcagcgtcttcttccaccacttccttgtgctgtggatttgctaactcagctttcttcaatactaaaaatgtatggaagtcctttgaaaacaccg

SEQ ID NO: 280965 - DNA, 120 bp, Artificial Sequence
  ENSG00000129493_18 (sequence is synthesized)
tcagtggtttatagacaaagactttatgaactgttgattttattacctcctgagacctatgaaggaaacctctgtgctatcctcagagagctggctgctgacttgactgcccctgatatt

SEQ ID NO: 280966 - DNA, 120 bp, Artificial Sequence
  ENSG00000129493_19 (sequence is synthesized)
caggtggcagcatctacatttttacttccacccctctgtcatcaggatgatcttttgatactaagtcctttcctacaagagactgaccatagatttattgaagaacagctcctgcttggt

SEQ ID NO: 280967 - DNA, 120 bp, Artificial Sequence
  ENSG00000129493_20 (sequence is synthesized)
aatggtgttgcttgcggaagtcttgaatatgacccttattcgatttatgagaaagatgtagagggagattcagtgcctaagcccttacctccagcactatcagttattagttctgcatcc

SEQ ID NO: 280968 - DNA, 120 bp, Artificial Sequence
  ENSG00000129493_21 (sequence is synthesized)
aagctctttggggttgtatgcgctcatgtgggagaaactcaaaggcttcttatattggaacagcttttggacagtataaagcacacaaaaggagctcgtcagcaagtggttcagttacat

SEQ ID NO: 280969 - DNA, 120 bp, Artificial Sequence
  ENSG00000129493_22 (sequence is synthesized)
gttgtttcttcagtttctagtttcttgaagtacgtggctggctccaagggatgtttaggtccagaagaaatgaaaagatttgccttaacattagttatgggagccctagaaagccccaac

SEQ ID NO: 280970 - DNA, 120 bp, Artificial Sequence
  ENSG00000129493_23 (sequence is synthesized)
cccttgctgagatgtgcagctgcagagtcatgggctagattagcccaagtggtagatgatggagcttttactgctggattagctcaagttagctttgacaaattgaaatcagcaagggat

SEQ ID NO: 280971 - DNA, 120 bp, Artificial Sequence
  ENSG00000129493_24 (sequence is synthesized)
gtggttaccagaacaggacactcattggccttggggtccctacataggtatttaggaggaataagttcttctcaacacctaaattcttgtattggaatcctttatactttggcgcaggac

SEQ ID NO: 280972 - DNA, 120 bp, Artificial Sequence
  ENSG00000129493_25 (sequence is synthesized)
agcacttctcctgatgtgcagacctgggcattacattctctatcattgatcattgattctgctggcccactctattatgtgcatgtggaacctaccctttctcttattataatgttgttg

SEQ ID NO: 280973 - DNA, 120 bp, Artificial Sequence
  ENSG00000129493_26 (sequence is synthesized)
ttaaatgtgcctcctactcatgctgaagttcaccaaagccttggtcgctgtttgaatgcccttattaccacgttaggtccagagctacaaggtaacagtacttcaatttctaccttaagg

SEQ ID NO: 280974 - DNA, 120 bp, Artificial Sequence
  ENSG00000129493_27 (sequence is synthesized)
acttcctgtctactgggttgtgcagtaatgcaagataacccagactgccttgttcaagctcaggccatctcttgccttcagcagcttcatatgtttgctccacgacatgtcaacttgtct

SEQ ID NO: 280975 - DNA, 120 bp, Artificial Sequence
  ENSG00000129493_28 (sequence is synthesized)
agcctggttagctgcctctgtgtgaatctttgtagcccctacttgttactgagaagagcagtactggcttgcttacgtcagcttgtacaaagagaagcagctgaagtttcagaacatgct

SEQ ID NO: 280976 - DNA, 120 bp, Artificial Sequence
  ENSG00000129493_29 (sequence is synthesized)
gttatgcttgctaaggatagcagagaagagttgactccagatgctaacatcagagaagttggccttgagggggcattgttgatcttactagacaaggagacagatgagagattatgccat

SEQ ID NO: 280977 - DNA, 120 bp, Artificial Sequence
  ENSG00000129493_30 (sequence is synthesized)
gatatcaaagagactttaaattatatgcttacatctatggcagtggaaaaactctccctgtggttaaagctttgtaaagatgtacttgctgcatcagctgattttacagctgtaacttgt

SEQ ID NO: 280978 - DNA, 120 bp, Artificial Sequence
  ENSG00000129493_31 (sequence is synthesized)
gtggatacaatgcaagaagaagaaggagataaaggggatgatgcctcagtcctgaccaccagacgtgatgaaaaatcccatccttttaccaatccccgatgggctactagagtctttgct

SEQ ID NO: 280979 - DNA, 120 bp, Artificial Sequence
  ENSG00000129493_32 (sequence is synthesized)
ctgtaggataattaaccaatgtgagaatgctaacagtgcacattttgacattgctttagcacaagaaatgaaaaaaagagattcaagaaatgactttttggtactgcatcttgctgactt

SEQ ID NO: 280980 - DNA, 120 bp, Artificial Sequence
  ENSG00000129493_33 (sequence is synthesized)
aattcgcatggcttttatggctgccacagatcacagtgaccagctccgtctttctggccttgaaatgctgttagttgttattcggcgatttgcaactgttccagaaccagagtttccagg

SEQ ID NO: 280981 - DNA, 120 bp, Artificial Sequence
  ENSG00000129493_34 (sequence is synthesized)
tcatgtgattctggaacagtatcaagccaatgtaggagcagcgcttagaccagccttcacttcagagacaccacctgatgtcactgccaaagcatgtcaggtttgcagtgcctggatagc

SEQ ID NO: 280982 - DNA, 120 bp, Artificial Sequence
  ENSG00000129493_35 (sequence is synthesized)
aagtggagttgtaagtgaccttaatgatctccgaagagttcatcagttgcttgtttcatcgttaactaaaatacaggctggaaaagaagctctaagtcacttatataatgaaagtgcttc

SEQ ID NO: 280983 - DNA, 120 bp, Artificial Sequence
  ENSG00000129493_36 (sequence is synthesized)
taccatggagatcttagctgtgcttaaagcctgggcagaggtctacataattgctgtgcaaagacataaaaaccacagacaacctttgaagactaccacctgtttagaagacggtatcag

SEQ ID NO: 280984 - DNA, 120 bp, Artificial Sequence
  ENSG00000129493_37 (sequence is synthesized)
aaatggatcatgttcatcagatggactgcttgacttagtctatgcagatcttggcacactaagcagactctggcttgctgcacttcaggattttgctcttttaactttgccttcagaatt

SEQ ID NO: 280985 - DNA, 120 bp, Artificial Sequence
  ENSG00000129493_38 (sequence is synthesized)
tgcctcccaacttcctgctgaaggtggtgctttctacacagcagagactagtgaaaatgcaaaattgcattattacaactcctgggcacttatcctccatgctacagcattgtggcttac

SEQ ID NO: 280986 - DNA, 120 bp, Artificial Sequence
  ENSG00000129493_39 (sequence is synthesized)
aagcacgggttttgttgttgctgacccagatgaaggagcatctaatctctccaggcctgtaacaccaacttccatgtgtcagggttcatcatctggggctaccataaagtcccctgagga

SEQ ID NO: 280987 - DNA, 120 bp, Artificial Sequence
  ENSG00000129493_40 (sequence is synthesized)
tgtctacactgatagattccatcttattttaggaatcagcgtggaatttctatgttccttacgttcagatgcaaccatggaaagcataactgcttgtttacatgcattgcaagcacttct

SEQ ID NO: 280988 - DNA, 120 bp, Artificial Sequence
  ENSG00000129493_41 (sequence is synthesized)
agatgtaccttggcccagatcaaaaattggcagtgatcaggacttgggtatagaattgctgaatgttctacatcgagtaattttaaccagagaatcaccttccattcagttggcttcact

SEQ ID NO: 280989 - DNA, 120 bp, Artificial Sequence
  ENSG00000129493_42 (sequence is synthesized)
tgaagtggtaaggcagattatctgtgctgctcaagaacatgtgaaggaaaaaagacgaagtgcagaagttgatgatggggctgctgaaaaggaaactctgccagagtttggagagggaaa

SEQ ID NO: 280990 - DNA, 120 bp, Artificial Sequence
  ENSG00000129493_43 (sequence is synthesized)
ggacaccggaggacttgtgcctggaaagtctttggtctttgcaacactggaattgtgtgtatgcattctagttagacagctcccagaattaaaccctaaattgacaggtagcccaggagt

SEQ ID NO: 280991 - DNA, 120 bp, Artificial Sequence
  ENSG00000129493_44 (sequence is synthesized)
aaaagctacgaagccacagatactattagaagatggaagtagattggtttcagctgcattggttatcctttccgaacttcctgcagtgtgctctcctgaaggaagcatctcaattctccc

SEQ ID NO: 280992 - DNA, 120 bp, Artificial Sequence
  ENSG00000129493_45 (sequence is synthesized)
tactatattgtacctcacaatcggggtcctcagagagactgctgtgaagttacctgggggccagttatcttcgacagttgcagcttccctacaggctctaaaaggaatattatcttctcc

SEQ ID NO: 280993 - DNA, 120 bp, Artificial Sequence
  ENSG00000129493_46 (sequence is synthesized)
catggcccgggcagaaaagagccgtactgcttggactgaccttctccgaagtgccttaacaacaattcttgactgttgggatccagttgatgaaacacaccaagaacttgatgaagtcag

SEQ ID NO: 280994 - DNA, 120 bp, Artificial Sequence
  ENSG00000129493_47 (sequence is synthesized)
tctacttactgctatcacagtgtttattttgtctaccagtccagaagtaactaccatcccatgccttcagaagcgctgtattgataaatttaaagctactcttgagataaaagatcctgt

SEQ ID NO: 280995 - DNA, 120 bp, Artificial Sequence
  ENSG00000129493_48 (sequence is synthesized)
ggtacaaatcaagacctaccagctcctacattccatctttcagtatccaaatccagctgtttcctacccatacatttactctttagcatcctgtatcatggaaaaactgcaggaaataga

SEQ ID NO: 280996 - DNA, 120 bp, Artificial Sequence
  ENSG00000129493_49 (sequence is synthesized)
caagagaaaacctgaaaacactgctgagcttgagatcttccaagaaggcataaaggtcttagaaacactggttactgttgctgaagaacaccatcgcgctcagctggtggcctgtctttt

SEQ ID NO: 280997 - DNA, 120 bp, Artificial Sequence
  ENSG00000129493_50 (sequence is synthesized)
gcccatcctcatttccttccttttggatgaaaattctctgggatcagcaacttccataatgagaaatttacatgactttgctctacaaaatctcatgcaaattggacctcagtattcatc

SEQ ID NO: 280998 - DNA, 120 bp, Artificial Sequence
  ENSG00000129493_51 (sequence is synthesized)
tgtttttaaaagtttagtggcttcttctccagccctaaaagcccgccttgaggctgctataaagggcaatcaggaaagtgtcaaagtcaagataccaacatctaaatatactaagagtcc

SEQ ID NO: 280999 - DNA, 120 bp, Artificial Sequence
  ENSG00000129493_52 (sequence is synthesized)
tggaaaaaactcaagcatccaattaaagaccagtttcctctgattttttttttggaatagtaagcaccttaatataataaatacttgatcattgcctttggtgacaaaagggacattgta

SEQ ID NO: 281000 - DNA, 120 bp, Artificial Sequence
  ENSG00000129493_53 (sequence is synthesized)
gacacaagtgcccttagaggtctagttgattgttttaccttaaatagctgtgactcttcaaagtaacagcatacttaacatttttgtgtgtgtgcgtggggtttgtgttttgttttgttt

SEQ ID NO: 281001 - DNA, 120 bp, Artificial Sequence
  ENSG00000129493_54 (sequence is synthesized)
tgtttttctatttaaaaagacaatggagctaacttgccaggaattttaagaaagtgctaaagaactaaacttactaaacaatccactgctttaaaaatgaaatgaatttcttctaacagt

SEQ ID NO: 281002 - DNA, 120 bp, Artificial Sequence
  ENSG00000129493_55 (sequence is synthesized)
ccatacatatgtggtatacttaatactgtgacagatataaatatgactctagtgtaaattatctgcactaatattgtatcccaattgctgatttaaaattctgctttggcccggcacagt

SEQ ID NO: 281003 - DNA, 75 bp, Artificial Sequence
  ENSG00000129493_56 (sequence is synthesized)
ccaattgctgatttaaaattctgctttggcccggcacagtggctcatcagtcgggagtttgagaccagcctgacc

SEQ ID NO: 281004 - DNA, 120 bp, Artificial Sequence
  ENSG00000129493_57 (sequence is synthesized)
gactccatctaaaaaaaaaaaaaaaaaattctgccttattcagtaattgtattaaactttctctgatttctccaagaagataaaatgattggagagctatttaggaaacctggtctagga

SEQ ID NO: 281005 - DNA, 120 bp, Artificial Sequence
  ENSG00000129493_58 (sequence is synthesized)
gaaacctggtctaggattatccagtatacaatagtacaaattacttacagccttacagtgcaacataagatttggtgtctatatcatggttttccaccatcttttggtttagtttatatt

SEQ ID NO: 281006 - DNA, 120 bp, Artificial Sequence
  ENSG00000129493_59 (sequence is synthesized)
gggttcagaaattgagtcttactcattttaaatagaataagccatttccactatttttcaaatggatttttctgtttacctctgttcttaccaattttgttcattttcatttgtggcaaa

SEQ ID NO: 281007 - DNA, 120 bp, Artificial Sequence
  ENSG00000129493_60 (sequence is synthesized)
catttgtatcaatgagttttaacctaggttcatatctacattgtatttagatcaactatgggtttatataaatgccaaatttagtacaacaaatttaggtcatcaggtgaatacaagtat

SEQ ID NO: 281008 - DNA, 120 bp, Artificial Sequence
  ENSG00000129493_61 (sequence is synthesized)
tttttttaacaggaaacattttattatagaaaaaagattaatgataaagtcatattggttgaaaaatattttttaactgtgttcatgattgttgattctccttctacttcagtgttatac

SEQ ID NO: 281009 - DNA, 120 bp, Artificial Sequence
  ENSG00000129493_62 (sequence is synthesized)
tgtgtgaatcaagcactgtgtcaaaacagagcatttccctcttaaaaattacaaaccgaagtgatagaagcatgtcagaattgagaagacattttgaagcaagaacaatgtgatgtacct

SEQ ID NO: 281010 - DNA, 120 bp, Artificial Sequence
  ENSG00000129493_63 (sequence is synthesized)
tgtgatgtacctattttattatgtttgtatataaatactattgtaaattgttcagagtgaaaacatttgacaaactctaacactacaatcattttttctaaattacataaataaagctaa

SEQ ID NO: 281011 - DNA, 120 bp, Artificial Sequence
  ENSG00000129493_64 (sequence is synthesized)
gtttagatttgatagttgccctctgattatgtaatattccttaagtacattaataaggcaaatttctgtagttggtgaatgattttatggaggaaggcaatcagttagttatatgatttt

SEQ ID NO: 281012 - DNA, 120 bp, Artificial Sequence
  ENSG00000129493_65 (sequence is synthesized)
tttttaggctaggatcttgaaagaaattacatattaaaagggaaggaaaattttaggggaataatctaccttacatacaggcagatttaacaagaaattaactattaagcctcttaacct

SEQ ID NO: 281013 - DNA, 120 bp, Artificial Sequence
  ENSG00000129493_66 (sequence is synthesized)
actttacataaaattgtttaccactgagaattcatcagtcttgtctaactagctggattctgactgtctgattgttgcttttcttcaaatgaagattgtatttctagtgttttagaattc

SEQ ID NO: 281014 - DNA, 120 bp, Artificial Sequence
  ENSG00000129493_67 (sequence is synthesized)
tctgtaatttgaacaatataaatccaatacttaagcctgctctttttccctttggctgtcttagatgactttcctatataaaacaaattaaaaagtaaagttattgtttatgccctaaaa

SEQ ID NO: 281015 - DNA, 120 bp, Artificial Sequence
  ENSG00000129493_68 (sequence is synthesized)
cggtcgaggggctaggtgtcttgaccctaagggctggagtccgccgagaaggggctgactggggcacagggtcggctgataaacagcgtggtccgttcttcctcctggactacgggaaag

SEQ ID NO: 281016 - DNA, 120 bp, Artificial Sequence
  ENSG00000129493_69 (sequence is synthesized)
tataacagtgctacatgttaactttaaatattaactgtgtacttattttaccttaaaatcactcagatgtcttttataaaataaatcctattcatccataaaattttgctttcactgcta

SEQ ID NO: 281017 - DNA, 120 bp, Artificial Sequence
  ENSG00000129493_70 (sequence is synthesized)
ctgtgcctcttgagtatagtcagctcaggtattatctcctcaaggctttctctgatcacccaggataggctgtcctgagctactttgaatgttgtttgtttgtttgtttgtttgtttaaa

SEQ ID NO: 281018 - DNA, 120 bp, Artificial Sequence
  ENSG00000129493_71 (sequence is synthesized)
gagacagggacttgctgtgttacccaggctggagtgcagtgtctattcacaggcacgatcattgtgcactgcagccttgaactcctggactcaaccagtcctcccacctcagtgtctcaa

SEQ ID NO: 281019 - DNA, 90 bp, Artificial Sequence
  ENSG00000129493_72 (sequence is synthesized)
actcctggactcaaccagtcctcccacctcagtgtctcaagtagctgggactatagacacacaccactgctcctggtgtgatattgagac

SEQ ID NO: 281020 - DNA, 62 bp, Artificial Sequence
  ENSG00000129493_73 (sequence is synthesized)
atctggacaatttttgtatttttagtagagaccgggcttcaccatgttggccaggctggtct

SEQ ID NO: 281021 - DNA, 64 bp, Artificial Sequence
  ENSG00000129493_74 (sequence is synthesized)
ccaccgcacccagccagctttttaatatatttttatatgcttagaccttatcactagttgaaag

SEQ ID NO: 281022 - DNA, 120 bp, Artificial Sequence
  ENSG00000129493_75 (sequence is synthesized)
atatatttttatatgcttagaccttatcactagttgaaagtctttgcttctcagcttatagtgtatcttctctataagatgtattctctgtgcctaaaagagggctggcacacagtgttt

SEQ ID NO: 281023 - DNA, 120 bp, Artificial Sequence
  ENSG00000129493_76 (sequence is synthesized)
cttaagtcttgttgaatgaatgtgaccaaaactactacatatgtcatttcttcataagtatcaacccattcttaaacaatttaaatatttgaatttgctacatctttcttttttgaataa

SEQ ID NO: 281024 - DNA, 120 bp, Artificial Sequence
  ENSG00000129493_77 (sequence is synthesized)
cagtgattttttttccacagcagtttcattaaaattatttaatgagagtatgactagaaaataaaggtagattacttctaatagaaaattccttcaaatgattgtggcctacacagctgt

SEQ ID NO: 281025 - DNA, 120 bp, Artificial Sequence
  ENSG00000129493_78 (sequence is synthesized)
tttcaggtttttctctactcttgagaaatcatatttgtaaagtgctaacgtattttcacttgatacatgtattataaaaatactttaacaaagagaaaacaattgtgcaagcatttctgt

SEQ ID NO: 281026 - DNA, 120 bp, Artificial Sequence
  ENSG00000129493_79 (sequence is synthesized)
gttgcttcacagtaaaaataattaacatgataagtagcatatactgagcgtcatgtgtagcatactattctaaatgcttcacatggattaactcatttaatcttcacaaccctatcaatg

SEQ ID NO: 281027 - DNA, 120 bp, Artificial Sequence
  ENSG00000129493_80 (sequence is synthesized)
tgagtactgctgttattcccattttacagatgagaatactgaagatggagttagatgtccaaagtcacacaactaataaatatgtattcctagtaaatgtatgtatttatttactgatgt

SEQ ID NO: 281028 - DNA, 120 bp, Artificial Sequence
  ENSG00000129493_81 (sequence is synthesized)
tagctctagaattacttataatgcacatcttaaaatgtacctttgccagggttcttagtcagcgttcattgtgtgtatctgttgtgtacaccaaactgttactaccaaactgaagacagc

SEQ ID NO: 281029 - DNA, 120 bp, Artificial Sequence
  ENSG00000129514_0 (sequence is synthesized)
tcgcccgggtggcgttgggcccgcgcgggcgctcgggtgactgcagctgctcagctcccctcccccgccccgcgccgcgcggccgcccgtcgcttcgcacagggctggatggttgtattg

SEQ ID NO: 281030 - DNA, 120 bp, Artificial Sequence
  ENSG00000129514_1 (sequence is synthesized)
attgggcagggtggctccaggatgttaggaactgtgaagatggaagggcatgaaaccagcgactggaacagctactacgcagacacgcaggaggcctactcctccgtcccggtcagcaac

SEQ ID NO: 281031 - DNA, 120 bp, Artificial Sequence
  ENSG00000129514_2 (sequence is synthesized)
atgaactcaggcctgggctccatgaactccatgaacacctacatgaccatgaacaccatgactacgagcggcaacatgaccccggcgtccttcaacatgtcctatgccaacccgggccta

SEQ ID NO: 281032 - DNA, 120 bp, Artificial Sequence
  ENSG00000129514_3 (sequence is synthesized)
ggggccggcctgagtcccggcgcagtagccggcatgccggggggctcggcgggcgccatgaacagcatgactgcggccggcgtgacggccatgggtacggcgctgagcccgagcggcatg

SEQ ID NO: 281033 - DNA, 120 bp, Artificial Sequence
  ENSG00000129514_4 (sequence is synthesized)
ggcgccatgggtgcgcagcaggcggcctccatgaatggcctgggcccctacgcggccgccatgaacccgtgcatgagccccatggcgtacgcgccgtccaacctgggccgcagccgcgcg

SEQ ID NO: 281034 - DNA, 120 bp, Artificial Sequence
  ENSG00000129514_5 (sequence is synthesized)
ggcggcggcggcgacgccaagacgttcaagcgcagctacccgcacgccaagccgccctactcgtacatctcgctcatcaccatggccatccagcaggcgcccagcaagatgctcacgctg

SEQ ID NO: 281035 - DNA, 120 bp, Artificial Sequence
  ENSG00000129514_6 (sequence is synthesized)
agcgagatctaccagtggatcatggacctcttcccctattaccggcagaaccagcagcgctggcagaactccatccgccactcgctgtccttcaatgactgcttcgtcaaggtggcacgc

SEQ ID NO: 281036 - DNA, 120 bp, Artificial Sequence
  ENSG00000129514_7 (sequence is synthesized)
tccccggacaagccgggcaagggctcctactggacgctgcacccggactccggcaacatgttcgagaacggctgctacttgcgccgccagaagcgcttcaagtgcgagaagcagccgggg

SEQ ID NO: 281037 - DNA, 120 bp, Artificial Sequence
  ENSG00000129514_8 (sequence is synthesized)
gcggcgggggcgggagcggaagcgggggcagcggcgccaagggcggccctgagagccgcaaggacccctctggcgcctctaaccccagcgccgactcgcccctccatcggggtgtgcacg

SEQ ID NO: 281038 - DNA, 120 bp, Artificial Sequence
  ENSG00000129514_9 (sequence is synthesized)
cacgggaagaccggccagctagagggcgcgccggcccccgggcccgccgccagcccccagactctggaccacagtggggcgacggcgacagggggcgcctcggagttgaagactccagcc

SEQ ID NO: 281039 - DNA, 120 bp, Artificial Sequence
  ENSG00000129514_10 (sequence is synthesized)
tcctcaactgcgccccccataagctccgggcccggggcgctggcctctgtgcccgcctctcacccggcacacggcttggcaccccacgagtcccagctgcacctgaaaggggacccccac

SEQ ID NO: 281040 - DNA, 120 bp, Artificial Sequence
  ENSG00000129514_11 (sequence is synthesized)
tactccttcaaccacccgttctccatcaacaacctcatgtcctcctcggagcagcagcataagctggacttcaaggcatacgaacaggcactgcaatactcgccttacggctctacgttg

SEQ ID NO: 281041 - DNA, 120 bp, Artificial Sequence
  ENSG00000129514_12 (sequence is synthesized)
cccgccagcctgcctctaggcagcgcctcggtgaccaccaggagccccatcgagccctcagccctggagccggcgtactaccaaggtgtgtattccagacccgtcctaaacacttcctag

SEQ ID NO: 281042 - DNA, 120 bp, Artificial Sequence
  ENSG00000129514_13 (sequence is synthesized)
ctcccgggactggggggtttgtctggcatagccatgctggtagcaagagagaaaaaatcaacagcaaacaaaaccacacaaaccaaaccgtcaacagcataataaaatcccaacaactat

SEQ ID NO: 281043 - DNA, 120 bp, Artificial Sequence
  ENSG00000129514_14 (sequence is synthesized)
ttcatgcacaacctttcccccagtgcaaaagactgttactttattattgtattcaaaattcattgtgtatattactacaaagacaaccccaaaccaatttttttcctgcgaagtttaatg

SEQ ID NO: 281044 - DNA, 120 bp, Artificial Sequence
  ENSG00000129514_15 (sequence is synthesized)
atccacaagtgtatatatgaaattctcctccttccttgcccccctctctttcttccctctttcccctccagacattctagtttgtggagggttatttaaaaaaacaaaaaaggaagatgg

SEQ ID NO: 281045 - DNA, 120 bp, Artificial Sequence
  ENSG00000129514_16 (sequence is synthesized)
tcaagtttgtaaaatatttgtttgtgctttttccccctccttacctgaccccctacgagtttacaggtctgtggcaatactcttaaccataagaattgaaatggtgaagaaacaagtata

SEQ ID NO: 281046 - DNA, 120 bp, Artificial Sequence
  ENSG00000129514_17 (sequence is synthesized)
cactagaggctcttaaaagtattgaaagacaatactgctgttatatagcaagacataaacagattataaacatcagagccatttgcttctcagtttacatttctgatacatgcagatagc

SEQ ID NO: 281047 - DNA, 120 bp, Artificial Sequence
  ENSG00000129514_18 (sequence is synthesized)
agatgtctttaaatgaaatacatgtatattgtgtatggacttaattatgcacatgctcagatgtgtagacatcctccgtatatttacataacatatagaggtaatagataggtgatatac

SEQ ID NO: 281048 - DNA, 120 bp, Artificial Sequence
  ENSG00000129514_19 (sequence is synthesized)
atgatacattctcaagagttgcttgaccgaaagttacaaggaccccaacccctttgtcctctctacccacagatggccctgggaatcaattcctcaggaattgccctcaagaactctgct

SEQ ID NO: 281049 - DNA, 120 bp, Artificial Sequence
  ENSG00000129514_20 (sequence is synthesized)
tcttgctttgcagagtgccatggtcatgtcattctgaggtcacataacacataaaattagtttctatgagtgtataccatttaaagaatttttttttcagtaaaagggaatattacaatg

SEQ ID NO: 281050 - DNA, 120 bp, Artificial Sequence
  ENSG00000129514_21 (sequence is synthesized)
ttggaggagagataagttatagggagctggatttcaaaacgtggtccaagattcaaaaatcctattgatagtggccattttaatcattgccatcgtgtgcttgtttcatccagtgttatg

SEQ ID NO: 281051 - DNA, 120 bp, Artificial Sequence
  ENSG00000129514_22 (sequence is synthesized)
cactttccacagttggacatggtgttagtatagccagacgggtttcattattatttctctttgctttctcaatgttaatttattgcatggtttattctttttctttacagctgaaattgc

SEQ ID NO: 281052 - DNA, 120 bp, Artificial Sequence
  ENSG00000129514_23 (sequence is synthesized)
aatgatggttaaaattacaaattaaattgttaatttttatcaatgtgattgtaattaaaaatattttgatttaaataacaaaaataataccagattttaagccgtggaaaatgttcttga

SEQ ID NO: 281053 - DNA, 120 bp, Artificial Sequence
  ENSG00000129514_24 (sequence is synthesized)
ttgatcatttgcagttaaggactttaaataaatcaaatgttaacaaaagagcatttctgttattttttttcacttaactaaatccgaagtgaatatttctgaatacgatatttttcaaat

SEQ ID NO: 281054 - DNA, 120 bp, Artificial Sequence
  ENSG00000129514_25 (sequence is synthesized)
tctagaactgaatataaatgacaaaaatgaaaataaaattgttttgtctgttgttataatgaatgtgtagctagtaaaaaggagtgaaagaaattcaagtaaagtgtataagttgattta

SEQ ID NO: 281055 - DNA, 120 bp, Artificial Sequence
  ENSG00000129514_26 (sequence is synthesized)
atattccaagagttgagatttttaagattctttattcccagtgatgtttacttcatttttttttttttttttgacaccggcttaagccttctgtgtttcctttgagccttttcactacaa

SEQ ID NO: 281056 - DNA, 120 bp, Artificial Sequence
  ENSG00000129514_27 (sequence is synthesized)
aatcaaatattaatttaactacctttcctccttccccaatgtatcacttttctttatctgagaattcttccaatgaaaataaaatatcagctgtggctgatagaattaagttgtgtccaa

SEQ ID NO: 281057 - DNA, 120 bp, Artificial Sequence
  ENSG00000129514_28 (sequence is synthesized)
atttttacaatgtgcacaaaaggattacagggaaaaccagttacagggaggactaccacctattaaaagtatttttctggaaacagctggcgattaccctccaaaagtttaattaccatt

SEQ ID NO: 281058 - DNA, 120 bp, Artificial Sequence
  ENSG00000129514_29 (sequence is synthesized)
aagggcatgaaaccagcgactggaacagctactacgcagacacgcaggagcgagcgggagcaggagccgggcccggggtgcagcgggcgggcgagcgccggtgcgagttggaagcaactc

SEQ ID NO: 281059 - DNA, 120 bp, Artificial Sequence
  ENSG00000129514_30 (sequence is synthesized)
tgagaaagccggagcatacccacaaggcgacctcttcgtcccaccgtttaattcgcagacgtcttctgattaaagcgctctgccgccaagttgggtgtctcaataatgaaacgatttcta

SEQ ID NO: 281060 - DNA, 120 bp, Artificial Sequence
  ENSG00000129514_31 (sequence is synthesized)
aattttgtaaaacttgttcttcaaaagccctatttggggagaagtgtgctccttctctaaaaccgctgggtggcgctagtgcgaccaaaatcttcttcacaactctgggccgagaacctg

SEQ ID NO: 281061 - DNA, 120 bp, Artificial Sequence
  ENSG00000129514_32 (sequence is synthesized)
gataatcttgggaagagggaaagaaaataaagccccaaggtaaaaaatacttttaagacgtggacagaaaaatataggatcacgtaatattttgatggtaactgacttatttagatttat

SEQ ID NO: 281062 - DNA, 120 bp, Artificial Sequence
  ENSG00000129514_33 (sequence is synthesized)
gtattcacaagtttacctctgagtttatttgcataccatagtttactgggtgttcctatttaaatctatttgttctcatattttcaaattgagtcatacttgctgattaaaataaactta

SEQ ID NO: 281063 - DNA, 120 bp, Artificial Sequence
  ENSG00000129514_34 (sequence is synthesized)
acaaaaaaaaaaagttatgtcataaagatataaaccggtgctgtgactcacctgctcttagccgcaggtgcgagcgtctttgtgcggcggacaaatggggagaggacgaggaggtgggca

SEQ ID NO: 281064 - DNA, 120 bp, Artificial Sequence
  ENSG00000129514_35 (sequence is synthesized)
aagatccacatcagctcaactgcacttgcctcgcagaggcagcccgctcacttcccgcggaggcgctccccggcgccgcgctccgcggcagccgcctgcccccggcgctgcccccgcccg

SEQ ID NO: 281065 - DNA, 80 bp, Artificial Sequence
  ENSG00000129514_36 (sequence is synthesized)
cgcacgccgcgccccgcagctctgggcttcctcttcgcccgggtggcgttgggcccgcgcgggcgctcgggtgactgcag

SEQ ID NO: 281066 - DNA, 120 bp, Artificial Sequence
  ENSG00000129515_0 (sequence is synthesized)
gcgcctgcgccggccctcgcctcggagcagccatgatggaaggcctggacgacggcccggacttcctctcagaagaggaccgcggacttaaagcaataaatgtagatcttcaaagtgatg

SEQ ID NO: 281067 - DNA, 120 bp, Artificial Sequence
  ENSG00000129515_1 (sequence is synthesized)
ctgctctgcaggtggacatttctgatgctcttagtgagcgggataaagtaaaattcactgttcacacaaagagttcattgccaaattttaaacaaaacgagttttcagttgttcggcaac

SEQ ID NO: 281068 - DNA, 120 bp, Artificial Sequence
  ENSG00000129515_2 (sequence is synthesized)
atgaggaatttatctggcttcatgattcctttgttgaaaatgaagactatgcaggttatatcattccaccagcaccaccaagacctgattttgatgcttcaagggaaaaactacagaagc

SEQ ID NO: 281069 - DNA, 120 bp, Artificial Sequence
  ENSG00000129515_3 (sequence is synthesized)
ttggtgaaggagaagggtcaatgacgaaggaagaattcacaaagatgaaacaggaactggaagctgaatatttggcaatattcaagaagacagttgcgatgcatgaagtgttcctgtgtc

SEQ ID NO: 281070 - DNA, 120 bp, Artificial Sequence
  ENSG00000129515_4 (sequence is synthesized)
gtgtggcagcacatcctattttgagaagagatttaaatttccatgtcttcttggaatataatcaagatttgagtgtgcgaggaaaaaataaaaaagagaaacttgaagacttctttaaaa

SEQ ID NO: 281071 - DNA, 120 bp, Artificial Sequence
  ENSG00000129515_5 (sequence is synthesized)
acatggttaaatcagcagatggagtaatcgtttcaggagtaaaggatgtagatgatttctttgagcacgaacgaacatttcttttggagtatcataaccgagttaaggatgcatctgcta

SEQ ID NO: 281072 - DNA, 120 bp, Artificial Sequence
  ENSG00000129515_6 (sequence is synthesized)
aatctgatagaatgacaagatcccacaaaagtgctgcagatgattacaatagaattggttcttcattatatgctttaggaactcaggattctacagatatatgcaagttttttctcaaag

SEQ ID NO: 281073 - DNA, 120 bp, Artificial Sequence
  ENSG00000129515_7 (sequence is synthesized)
tttcagaactgttcgataaaacaagaaaaatagaagcacgagtgtctgctgatgaagacctcaaactttctgatcttttaaaatattacttaagagaatctcaagctgctaaggatctcc

SEQ ID NO: 281074 - DNA, 120 bp, Artificial Sequence
  ENSG00000129515_8 (sequence is synthesized)
tgtatcgaaggtctaggtcactagtggattatgaaaatgctaataaagcactggataaagcaagagcaaaaaataaagatgttctacaggccgaaacttcccaacaattatgttgtcaga

SEQ ID NO: 281075 - DNA, 120 bp, Artificial Sequence
  ENSG00000129515_9 (sequence is synthesized)
aatttgaaaaaatatctgagtctgcaaaacaagaacttatagattttaagacaagaagagttgctgcattcagaaaaaatttagtggaactggcagagttagaactgaagcatgcaaagg

SEQ ID NO: 281076 - DNA, 120 bp, Artificial Sequence
  ENSG00000129515_10 (sequence is synthesized)
gtaatctacagttgctgcagaactgcctggcagtgttaaatggagacacataagccacactccgccttcctgttaaaaagggctgccttccttcaaattttatttttgttttcttaatga

SEQ ID NO: 281077 - DNA, 120 bp, Artificial Sequence
  ENSG00000129515_11 (sequence is synthesized)
tgttaagcatttatgctcactggaaacaaacaaaaagcagctgaaaaagtgcatcaactcctctttttctgagaaacatggagcagcgcacgcccaggcgatgccagtctgtgtgccgtg

SEQ ID NO: 281078 - DNA, 120 bp, Artificial Sequence
  ENSG00000129515_12 (sequence is synthesized)
atgccgcactgtgttccccatgacagtggtccatcatcgtgcactcgtcatactcagaagtccaaagttcattcttctttaaagtagcctctataactctgtttattttataaatagtat

SEQ ID NO: 281079 - DNA, 120 bp, Artificial Sequence
  ENSG00000129515_13 (sequence is synthesized)
aaatttaaccttttcagaatgcattgttgaaacaagataaagattgccttttttgaattttttaaattttgtttttaaaagcatataccaccttagttcattcatgtatcctggtaaagc

SEQ ID NO: 281080 - DNA, 120 bp, Artificial Sequence
  ENSG00000129515_14 (sequence is synthesized)
atcttaatcagacttatttttaattactgaatatttcttagacgttttgggacagattttatgtaatctttataagtatgatttctgaagaaaagcaaatgcattagtatgtttgcctta

SEQ ID NO: 281081 - DNA, 120 bp, Artificial Sequence
  ENSG00000129515_15 (sequence is synthesized)
aacttgtagactaaaccaagtattgtaaaataaacagcgataacagtgatagtttttaactctatggtcattgtatcactctggaaaatgtggagtagctgtaataaatctactcctgta

SEQ ID NO: 281082 - DNA, 120 bp, Artificial Sequence
  ENSG00000129515_16 (sequence is synthesized)
ttatgctttacagtgcaggtcttagtttttcttttttctcatttcttttgaaatggcatctcgaacaaagtccaccaatccctttacaaaagaatgaactgctcctctgtgtgtacttca

SEQ ID NO: 281083 - DNA, 120 bp, Artificial Sequence
  ENSG00000129515_17 (sequence is synthesized)
tagaaggtggaatcggacagaggcaggttagtgacagttattcctgaaatacaggagcagagtacagtctgttgtggtttcccggattccgcgcctagctcagccaattaagcatgagac

SEQ ID NO: 281084 - DNA, 120 bp, Artificial Sequence
  ENSG00000129515_18 (sequence is synthesized)
ataggccattgagccacttagtagttatgcgagtggatagattggtatgtagagggaaagaggtctgctgtaaagaacaacacttgtttgtctgtggggaaagaaaagcagaatacttga

SEQ ID NO: 281085 - DNA, 120 bp, Artificial Sequence
  ENSG00000129515_19 (sequence is synthesized)
gatgaaagttggcatacaaataggatactatcgccagtagttatattacaaacattatcggcctttctagtgtgaatgaacattagacacattattgtcattcctagtttaaagttaagg

SEQ ID NO: 281086 - DNA, 120 bp, Artificial Sequence
  ENSG00000129515_20 (sequence is synthesized)
ttgcgtggttggatttttccactatctttttctaatttttctaccatttggagaccgtaggcatttgggcctgtcaccccttggatgggttcctagtttgtttacattttcctgaaccct

SEQ ID NO: 281087 - DNA, 120 bp, Artificial Sequence
  ENSG00000129515_21 (sequence is synthesized)
cctgagcgcccgttcttggtctaatccccagtcgtgatgattccacacttcctcagccgcatgttgtcttgcctcattcatgagctggtcagcgtttcgtctctttaactgacatgttcc

SEQ ID NO: 281088 - DNA, 120 bp, Artificial Sequence
  ENSG00000129515_22 (sequence is synthesized)
ccagtgctgtttgaactgttgagtttccgttgctggctgagtgcgttttgtccttcacgtaaccttcgctggtaaaaataagcccatgtgatgtccaccagtggatgaatgctggaccga

SEQ ID NO: 281089 - DNA, 120 bp, Artificial Sequence
  ENSG00000129515_23 (sequence is synthesized)
gagccctagcttctggatccaggtctaggcccttcatctgctgctctgtggcccagggcaggtttgcttgacctctgcctcagttctcgactctaaaggacatactgacctacctcacag

SEQ ID NO: 281090 - DNA, 120 bp, Artificial Sequence
  ENSG00000129515_24 (sequence is synthesized)
gggtgttgtgaggattaataaatgttggtactctgctttggaaatgtgaaaatgctgtgtaaatgttaagaaatactaagtatagggccagaagctatacagtgtttcacttaaccgttt

SEQ ID NO: 281091 - DNA, 120 bp, Artificial Sequence
  ENSG00000129515_25 (sequence is synthesized)
gccattctgtatttaccaaggtggtcttttctggggaaggaagtagagtggaaggtgcatcccttggcccctggtttacattattagggtgcttattgtaggaatgcactctaaaaagtg

SEQ ID NO: 281092 - DNA, 120 bp, Artificial Sequence
  ENSG00000129515_26 (sequence is synthesized)
ggcgtagaatgaaagcagccgtccagtggtcctcccttttctgtagtttcacttttcttgcttcaagttacagcagtcacctgaaatctgaaaatactaaatgaaaaactccagaaacaa

SEQ ID NO: 281093 - DNA, 120 bp, Artificial Sequence
  ENSG00000129515_27 (sequence is synthesized)
tgggtgttctccgcggcgccgagtcccgggagcgcggtgggggcagcgggcgcggggcgggcgcggggaccgcgccagcctgtcactaatgtctccctttgtgtctcccccatctcatcc

SEQ ID NO: 281094 - DNA, 78 bp, Artificial Sequence
  ENSG00000129515_28 (sequence is synthesized)
gaactggaagcgtaagcctttgttaattgtgcttgctttaatgccttttttggtgttttctgatatcccatcattaaa

SEQ ID NO: 281095 - DNA, 120 bp, Artificial Sequence
  ENSG00000129515_29 (sequence is synthesized)
aaggaagaattcacaaagatgaaacaggaactggaagcagatcaaacttctcccatcattggtcctgctggtttgctgtgaatatttggcaatattcaagaagacagttgcgatgcatga

SEQ ID NO: 281096 - DNA, 120 bp, Artificial Sequence
  ENSG00000129515_30 (sequence is synthesized)
gggccttctggtggacctccactcccacgcggggcggggtgcaggtggcgaagtggaaatggaggcgggagatggaacgcccccaccctccctcgacactttggggccatgaaaacccat

SEQ ID NO: 281097 - DNA, 120 bp, Artificial Sequence
  ENSG00000129515_31 (sequence is synthesized)
tttctccataggtgctgcagatgattacaatagaattggttcttcattatatgctttaggaactcaggattctacagatatatgcaaaaaatagaagcacgagtgtctgctgatgaagac

SEQ ID NO: 281098 - DNA, 120 bp, Artificial Sequence
  ENSG00000129515_32 (sequence is synthesized)
ccatttcttgagtttgttagacttcagattgttaatgatgatttatctcctttatatgattttaaattatattttcaaatatgaattctatttctccttttagaaattgtatatatgtgt

SEQ ID NO: 281099 - DNA, 120 bp, Artificial Sequence
  ENSG00000129515_33 (sequence is synthesized)
ggttggataacagagaaccttgggtttattctactgctacctccatcctctgcatccttcttttttgtcttcactgaatgactaccctcacagagatcaaacttctcccatcattggtcc

SEQ ID NO: 281100 - DNA, 120 bp, Artificial Sequence
  ENSG00000129518_0 (sequence is synthesized)
agggactggacttgcagtgtaaacagagacgctgcaaattgcttgtggacggtgtaggccgctgcaggccaccatgaaccggcttccggatgactacgacccctacgcggttgaagagcc

SEQ ID NO: 281101 - DNA, 120 bp, Artificial Sequence
  ENSG00000129518_1 (sequence is synthesized)
tagcgacgaggagccggctttgagcagctctgaggatgaagtggatgtgcttttacatggaactcctgaccaaaaacgaaaactcatcagagaatgtcttaccggagaaagtgaatcatc

SEQ ID NO: 281102 - DNA, 120 bp, Artificial Sequence
  ENSG00000129518_2 (sequence is synthesized)
tagtgaagatgaatttgaaaaggagatggaagctgaattaaattctaccatgaaaacaatggaggacaagttatcctctctgggaactggatcttcctcaggaaatggaaaagttgcaac

SEQ ID NO: 281103 - DNA, 120 bp, Artificial Sequence
  ENSG00000129518_3 (sequence is synthesized)
agctccgacaaggtactacgatgatatatattttgattctgattccgaggatgaagacagagcagtacaggtgaccaagaaaaaaaagaagaaacaacacaagattccaacaaatgacga

SEQ ID NO: 281104 - DNA, 120 bp, Artificial Sequence
  ENSG00000129518_4 (sequence is synthesized)
attactgtatgatcctgaaaaagataacagagatcaggcctgggttgatgcacagagaaggggttaccatggtttgggaccacagagatcacgtcaacaacagcctgttccaaatagtga

SEQ ID NO: 281105 - DNA, 120 bp, Artificial Sequence
  ENSG00000129518_5 (sequence is synthesized)
tctattaacaaagaggaggttctaagatataaagcctcagagaacaggaagaaaaggcgggtccataagaagatgaggtctaaccgggaagatgctgccgagaaggcagagacagatgtg

SEQ ID NO: 281106 - DNA, 120 bp, Artificial Sequence
  ENSG00000129518_6 (sequence is synthesized)
gaagaaatctatcacccagtcatgtgcactgaatgttccactgaagtggcagtctacgacaaggatgaagtctttcattttttcaatgttttagcaagccattcctaaacagcccaactg

SEQ ID NO: 281107 - DNA, 120 bp, Artificial Sequence
  ENSG00000129518_7 (sequence is synthesized)
gcatttaattacccaatactgtatataaggcaaatatggacagttactttcctcttgcctgttcatatccttcagtgacattgaggaagcagtgtttctctttttaaaggagaatagttg

SEQ ID NO: 281108 - DNA, 120 bp, Artificial Sequence
  ENSG00000129518_8 (sequence is synthesized)
tcaaccttcattcatctcttacatctctcaccctctccttttttttttctttgattttcccccttattgatgggactgatattcattctgtttttgatgaacatttggaaactgtcgggc

SEQ ID NO: 281109 - DNA, 120 bp, Artificial Sequence
  ENSG00000129518_9 (sequence is synthesized)
tttttattaaagctctgtagaattaaaatgttctggaattataagcaatctttgtttctgagtgttatttttattttggatatagctttgatgtaattaaactggaaactctttcctgaa

SEQ ID NO: 281110 - DNA, 120 bp, Artificial Sequence
  ENSG00000129518_10 (sequence is synthesized)
cgacgaggagccggctttgagcaggtgggctcccgccccaccctggcccccgaggatttgggtcgaggcctggctttggtcgcctccattcgttgcgcctgccgagcctacgcagaccct

SEQ ID NO: 281111 - DNA, 120 bp, Artificial Sequence
  ENSG00000129518_11 (sequence is synthesized)
agcggctcgggagcctgtcgtgcctgttacttgtgcgaagccaaagggctttcctgatggggtcgcgcagtcccggggggaggcggtgccgatgtcgcctgtaggaagagggatattccg

SEQ ID NO: 281112 - DNA, 120 bp, Artificial Sequence
  ENSG00000129518_12 (sequence is synthesized)
ctttgccttgattgccaaaggtatgaagcatgaatcatacaaaactcaatatagagcaatgtttgtaatgaattgttctattaacaaagaggaggttctaagatataaagcctcagagaa

SEQ ID NO: 281113 - DNA, 120 bp, Artificial Sequence
  ENSG00000129518_13 (sequence is synthesized)
ctgggaactggtaaacttttggttcaattttatatatatttttgtaagctctgtaagggcaggaaccttatttgtgctcttctatgttcccagcactttcagtaggtgctcaataaatat

SEQ ID NO: 281114 - DNA, 120 bp, Artificial Sequence
  ENSG00000129518_14 (sequence is synthesized)
ttattgaatgaaggagtgaatgtatttggcagtctgagctagagtcttccttttctcatttaaaaaagttatttatttattactttagattcaatgtctcattctgttacccaggctgga

SEQ ID NO: 281115 - DNA, 120 bp, Artificial Sequence
  ENSG00000129518_15 (sequence is synthesized)
gaaatatgcagaactggcttattaagtgagaatagctatatgtaatgtataagtacatcaaatgtaaccatgtaatacttaaaattgttgttggacagtgagatgctgggagtttaaaat

SEQ ID NO: 281116 - DNA, 120 bp, Artificial Sequence
  ENSG00000129521_0 (sequence is synthesized)
ctggccgcagtcgcggcagtggtggcttcccatccccaaaaggcgccctccgactccttgcgccgcactgctcgccgggccagtccggaaacgggtcgtggagctccgcaccactcccgc

SEQ ID NO: 281117 - DNA, 120 bp, Artificial Sequence
  ENSG00000129521_1 (sequence is synthesized)
tggttcccgaaggcagatcccttctcccgagagttgcgagaaactttcccttgtccccgacgctgcagcggctcgggtaccgtggcagccgcaggtttctgaaccccgggccacgctccc

SEQ ID NO: 281118 - DNA, 120 bp, Artificial Sequence
  ENSG00000129521_2 (sequence is synthesized)
cgcgcctcggcttcgcgctcgtgtagatcgttccctctctggttgcacgctggggatcccggacctcgattctgcgggcgagatgcccctgggacacatcatgaggctggacctggagaa

SEQ ID NO: 281119 - DNA, 120 bp, Artificial Sequence
  ENSG00000129521_3 (sequence is synthesized)
aattgccctggagtacatcgtgccctgtctgcacgaggtgggcttctgctacctggacaacttcctgggcgaggtggtgggcgactgcgtcctggagcgcgtcaagcagctgcactgcac

SEQ ID NO: 281120 - DNA, 120 bp, Artificial Sequence
  ENSG00000129521_4 (sequence is synthesized)
cggggccctgcgggacggccagctggcggggccgcgcgccggcgtctccaagcgacacctgcggggcgaccagatcacgtggatcgggggcaacgaggagggctgcgaggccatcagctt

SEQ ID NO: 281121 - DNA, 120 bp, Artificial Sequence
  ENSG00000129521_5 (sequence is synthesized)
cctcctgtccctcatcgacaggctggtcctctactgcgggagccggctgggcaaatactacgtcaaggagaggtctaaggcaatggtggcttgctatccgggaaatggaacaggttatgt

SEQ ID NO: 281122 - DNA, 120 bp, Artificial Sequence
  ENSG00000129521_6 (sequence is synthesized)
tcgccacgtggacaaccccaacggtgatggtcgctgcatcacctgcatctactatctgaacaagaattgggatgccaagctacatggtgggatcctgcggatatttccagaggggaaatc

SEQ ID NO: 281123 - DNA, 120 bp, Artificial Sequence
  ENSG00000129521_7 (sequence is synthesized)
attcatagcagatgtggagcccatttttgacagactcctgttcttctggtcagatcgtaggaacccacacgaagtgcagccctcttacgcaaccagatatgctatgactgtctggtactt

SEQ ID NO: 281124 - DNA, 120 bp, Artificial Sequence
  ENSG00000129521_8 (sequence is synthesized)
tgatgctgaagaaagggcagaagccaaaaagaaattcaggaatttaactaggaaaactgaatctgccctcactgaagactgaccgtgctctgaaatctgctggccttgttcattttagta

SEQ ID NO: 281125 - DNA, 120 bp, Artificial Sequence
  ENSG00000129521_9 (sequence is synthesized)
acggttcctgaattctcttaaattctttgagatccaaagatggcctcttcagtgacaacaatctccctgctacttcttgcatccttcacatccctgtcttgtgtgtggtacttcatgttt

SEQ ID NO: 281126 - DNA, 120 bp, Artificial Sequence
  ENSG00000129521_10 (sequence is synthesized)
tcttgccaagactgtgttgatcttcagatactctctttgccagatgaagttacttgctaactccagaaattcctgcagacatcctactcggccagcggtttacctgatagattcggtaat

SEQ ID NO: 281127 - DNA, 120 bp, Artificial Sequence
  ENSG00000129521_11 (sequence is synthesized)
cctgatttgaaaggaggaggtttgaaaagaaaaaaatggaggtggtagatgccacagagaggcatcacggaagccttaacagcaggaaacagagaaatttgtgtcatctgaacaatttcc

SEQ ID NO: 281128 - DNA, 120 bp, Artificial Sequence
  ENSG00000129521_12 (sequence is synthesized)
agatgttcttaatccagggctgttggggtttctggagaattatcacaacctaatgacattaatacctctagaaagggctgctgtcatagtgaacaatttataagtgtcccatggggcaga

SEQ ID NO: 281129 - DNA, 120 bp, Artificial Sequence
  ENSG00000129521_13 (sequence is synthesized)
cactccttttttcccagtcctgcaacctggattttctgcctcagccccattttgctgaaaataatgactttctgaataaagatggcaacacaattttttctccattttcagttcttacct

SEQ ID NO: 281130 - DNA, 120 bp, Artificial Sequence
  ENSG00000129521_14 (sequence is synthesized)
gggaacctaattccccagaagctaaaaaactagacattagttgttttggttgctttgttggaatggaatttaaatttaaatgaaaggaaaaatatatccctggtagttttgtgttaacca

SEQ ID NO: 281131 - DNA, 120 bp, Artificial Sequence
  ENSG00000129521_15 (sequence is synthesized)
ctgataactgtggaaagagctaggtctactgatatacaataaacatgtgtgcatcttgaacaatttgagaggggaggtggagttggaaatgtgggtgttcctgttttttttttttttttt

SEQ ID NO: 281132 - DNA, 120 bp, Artificial Sequence
  ENSG00000129521_16 (sequence is synthesized)
tttttagttttcctttttaatgagctcaccctttaacacaaaaaaagcaaggtgatgtattttaaaaaaggaagtggaaataaaaaaatctcaaagctatttgagttctcgtctgtccct

SEQ ID NO: 281133 - DNA, 120 bp, Artificial Sequence
  ENSG00000129521_17 (sequence is synthesized)
agcagtctttcttcagctcacttggctctctagatccactgtggttggcagtatgaccagaatcatggaatttgctagaactgtggaagcttctactcctgcagtaagcacagatcgcac

SEQ ID NO: 281134 - DNA, 120 bp, Artificial Sequence
  ENSG00000129521_18 (sequence is synthesized)
tgcctcaataacttggtattgagcacgtattttgcaaaagctacttttcctagttttcagtattactttcatgttttaaaaatccctttaatttcttgcttgaaaatcccatgaacatta

SEQ ID NO: 281135 - DNA, 120 bp, Artificial Sequence
  ENSG00000129521_19 (sequence is synthesized)
aagagccagaaatattttcctttgttatgtacggatatatatatatatagtcttccaagatagaagtttactttttcctcttctggttttggaaaatttccagataagacatgtcaccat

SEQ ID NO: 281136 - DNA, 120 bp, Artificial Sequence
  ENSG00000129521_20 (sequence is synthesized)
taattctcaacgactgctctattttgttgtacggtaatagttatcaccttctaaattactatgtaatttattcacttattatgtttattgtcttgtatcctttctctggagtgtaagcac

SEQ ID NO: 281137 - DNA, 120 bp, Artificial Sequence
  ENSG00000129521_21 (sequence is synthesized)
aatgaagacaggaattttgtatatttttaaccaatgcaacatactctcagcacctaaaatagtgccgggaacatagtaagggctcagtaaatacttgttgaataaactcagtctcctaca

SEQ ID NO: 281138 - DNA, 120 bp, Artificial Sequence
  ENSG00000129521_22 (sequence is synthesized)
tttgaagtacatgaattccctctgcatgtatactcccacctgaccattgaattaagcagctaccaggaggcagcctgaacgtgtcagggcctgggcacgacacttgcctttcttggagga

SEQ ID NO: 281139 - DNA, 120 bp, Artificial Sequence
  ENSG00000129521_23 (sequence is synthesized)
gtgatttgaagccatagtggaagactgagcctctataaaaaatgaacgaggacactcttaatggacagatacaaaacaagccccaggagaaaggtgtatcaaccattttaaatctgccct

SEQ ID NO: 281140 - DNA, 120 bp, Artificial Sequence
  ENSG00000129521_24 (sequence is synthesized)
tactcgttggagactatgatggacaacacaacatgaatttcttgccctcaggtggtttacaatctagagagggaggcagacaaatgaccagatgacatccgagagaccaagctttgcctg

SEQ ID NO: 281141 - DNA, 120 bp, Artificial Sequence
  ENSG00000129521_25 (sequence is synthesized)
ccctcctgtggccttggctgggggatcctcctgtggcccatggaaggggcatttctctgaactgaaggactccacctctcctatgctataactggccagggatgggcctgcagtggctga

SEQ ID NO: 281142 - DNA, 120 bp, Artificial Sequence
  ENSG00000129521_26 (sequence is synthesized)
ctgactaccaggttgctactcccagctcctgtcttcacatctgcataccaaccagtaagaagaggagaaggagcaaggagagcacataactttccttttaaggacacaactagatgccat

SEQ ID NO: 281143 - DNA, 120 bp, Artificial Sequence
  ENSG00000129521_27 (sequence is synthesized)
gttgtgagctgctctgtggagggggacctgtggcgaggaactgagggcagccagcaggcaacagccagctgccatgttgtgagtagccctatggaggggcccacatggcaaggaactgac

SEQ ID NO: 281144 - DNA, 120 bp, Artificial Sequence
  ENSG00000129521_28 (sequence is synthesized)
acaccctcaaagatcagccaggggaaactacttctggtttctgcagctttcatctaggaagaggtgggctggatacacccactcgtttcccaccatctccagaaggagcagctttaacta

SEQ ID NO: 281145 - DNA, 120 bp, Artificial Sequence
  ENSG00000129521_29 (sequence is synthesized)
tgactcagtgatgcagggcttctgaccacaacctaaaaatgaaaggccctatcaccaatcttatctgctcatcaaaaaacagacggtggtgatatgcagtcaagcttgctggtacttcca

SEQ ID NO: 281146 - DNA, 120 bp, Artificial Sequence
  ENSG00000129521_30 (sequence is synthesized)
atgcctgccctgagaaggttctgccatggagatgaagacacgctggagccacaggagtggttctggaacatctaaccttcttgtgcaaagtttctatcataacttgagattagacatgct

SEQ ID NO: 281147 - DNA, 120 bp, Artificial Sequence
  ENSG00000129521_31 (sequence is synthesized)
ccgcggggacgggaggcactcggagtccgttgtatgtcgacttcccagggccgtaagcgaactttgttttttaaccaagaagtcagcctggtttgtctctactcgctgcttccccccacc

SEQ ID NO: 281148 - DNA, 120 bp, Artificial Sequence
  ENSG00000129521_32 (sequence is synthesized)
cctcgccccagctcctctgagcgaaagtcaacgttaaggggctcaggtgaaccatgatgatgaccttctgttgactttgaaatattggctcttgtgggtgacaaaagccagacaagctgt

SEQ ID NO: 281149 - DNA, 120 bp, Artificial Sequence
  ENSG00000129521_33 (sequence is synthesized)
ggctgtggtccgattttaagacgaggttctcaaagatccaaaggagggaaagggtattggaaacactgtgtatcatctgagacacacgtgtcctcatgatcttaaatgcctactttaaag

SEQ ID NO: 281150 - DNA, 120 bp, Artificial Sequence
  ENSG00000129521_34 (sequence is synthesized)
ccacctaatactgcccttcattgtggtcagaagagatttctacaaaagcactcagaattctggaggcagttgtgattttgccatgtggcagttggtttgtggagttgggcaggtgtgaaa

SEQ ID NO: 281151 - DNA, 120 bp, Artificial Sequence
  ENSG00000129521_35 (sequence is synthesized)
gggtaaaactccacttctgaatgctgcttctgccccctgggacccagcacattgttagaccatcttcttgactgaaaattctctcctgatgctgagccctgcaccaccaccttccttttc

SEQ ID NO: 281152 - DNA, 120 bp, Artificial Sequence
  ENSG00000129521_36 (sequence is synthesized)
tttttgttcacatagcaggaagtgactccctgggtggtaatttatcttggaaacacaggtagattggcagaaaaacgggaacatgtaggtaccgcgatgttggtgcatgtccattacttt

SEQ ID NO: 281153 - DNA, 120 bp, Artificial Sequence
  ENSG00000129521_37 (sequence is synthesized)
gggataggctttctcagtctttcctcaaatgatagttgagccagttttccagtggcaattctgagtgacttgcgcttgtcttatggtgtggtcaagggacgttcagaactacggaaaact

SEQ ID NO: 281154 - DNA, 120 bp, Artificial Sequence
  ENSG00000129521_38 (sequence is synthesized)
tttactgaaacagcgaagcagagtataccggcatgagagggaagatgaacactcacctatgtaccactctttgacaataaatatagtatttctcaaatcagtctcaagactgatcctgtc

SEQ ID NO: 281155 - DNA, 120 bp, Artificial Sequence
  ENSG00000129521_39 (sequence is synthesized)
tcagaacagaccattgttctctcatttctctaatacgctgagaggaacactctgaataaaggctaagtggtgaggattggaaacgtgtgggagtgaaggggtggaggtggatgagtgcag

SEQ ID NO: 281156 - DNA, 120 bp, Artificial Sequence
  ENSG00000129521_40 (sequence is synthesized)
tggggagtcacagtttgccgtacaacttccaagccaagaggccatgaatagaatatctgaaagcatcgttattaatgcacccaagtaaagtaaatcttagaagatactgctttctaaatt

SEQ ID NO: 281157 - DNA, 120 bp, Artificial Sequence
  ENSG00000129521_41 (sequence is synthesized)
ttactttggggaaaaaaattccgcgtgagctgaactctgtaggagattgatgctaaagtgtttctttattcttcttccatcatgttggtggtggattagtcactcgtctttgactagttt

SEQ ID NO: 281158 - DNA, 120 bp, Artificial Sequence
  ENSG00000129521_42 (sequence is synthesized)
gatttttgcattaaatgaccttgctgtcttctgtggtggaggtgtgtcggggaggggaagggtcagcctcagtgttgctgagatgctggtagtttctacctggaagagcagacggcttct

SEQ ID NO: 281159 - DNA, 120 bp, Artificial Sequence
  ENSG00000129521_43 (sequence is synthesized)
tattgggtttttaaatgtttcttgtaaatttaggtgttaggagtttttcttcatcattctaggagcagaatttgctctgagggaggtcaggattaattggtatggaaagaggccactaac

SEQ ID NO: 281160 - DNA, 120 bp, Artificial Sequence
  ENSG00000129521_44 (sequence is synthesized)
attgaaagttaaatatttttatttagctttgacttaatggatagggatagggtttcagactagaatttaactcaaatggaaggaaaaacactgtgtaagttagggtaagggaaagaaaga

SEQ ID NO: 281161 - DNA, 120 bp, Artificial Sequence
  ENSG00000129521_45 (sequence is synthesized)
tcctgtagatatgattcatcaattttaggttatcttttgggtggaatgaaaaactttccaggtgaccctgtcagaaggtgatcgtgaattgaaaataaaatttatcctgtcccaccccca

SEQ ID NO: 281162 - DNA, 120 bp, Artificial Sequence
  ENSG00000129521_46 (sequence is synthesized)
gatttccaggtttactttggctggtttgtcacaaagctccctgccctttagataaatcacctttcgattggaatattccctggccaattagaaccaaatgcaaaccaggcttgagcaaac

SEQ ID NO: 281163 - DNA, 120 bp, Artificial Sequence
  ENSG00000129521_47 (sequence is synthesized)
aactagtgtagttaaattttttttaagtgtgctttgcttgtatacagaagtctccttagtgatgtcttgtggtcttgggtttcttgtttgaagttcattattaaagtcatggtagaaaca

SEQ ID NO: 281164 - DNA, 120 bp, Artificial Sequence
  ENSG00000129521_48 (sequence is synthesized)
caactacctgtaaatgtcacgtaacacccaaggagactgtgttacttatctgctcaccagtgggaggagaagattgtctgtctcagctttgttaaccagctttcttgggatttctccata

SEQ ID NO: 281165 - DNA, 120 bp, Artificial Sequence
  ENSG00000129521_49 (sequence is synthesized)
acaccttgattgttgccttctgggagaccttgaggtgggggacccagctaagctgcccagcttcctgaccggcagaaactgggagacaataaatgttggtgttttaagccactacatttt

SEQ ID NO: 281166 - DNA, 120 bp, Artificial Sequence
  ENSG00000129521_50 (sequence is synthesized)
agaagtcagcagatccaggctctgagccagctctgtcgggttactttctgtgttactgaatgtctctgctttcctcagttgaacaaagcaaagatctgtagcccaagaaaggccactggg

SEQ ID NO: 281167 - DNA, 120 bp, Artificial Sequence
  ENSG00000129521_51 (sequence is synthesized)
caattgtaatggctaggctagggcaacagaatgtgctgagggcagcgtggaaatggtggccaaggcactaaagaccagctttctctttcatgggagcctgaaatgaaccctctgccacct

SEQ ID NO: 281168 - DNA, 120 bp, Artificial Sequence
  ENSG00000129521_52 (sequence is synthesized)
ggactgggtttctgttttgtcaaactaacaggtttctgctgggaggagggcactggcggaagtagcataacttatctttggtttaggggtggaacttcggttgtttctccaggcacgtca

SEQ ID NO: 281169 - DNA, 120 bp, Artificial Sequence
  ENSG00000129521_53 (sequence is synthesized)
tgtcttggcttggaccatcccttgctaaagcactgtgcttcacatccttttacgggaagtacacgaccttccatctccccgcaggtgtgggctggacccacaggacccaggcaaagcctt

SEQ ID NO: 281170 - DNA, 120 bp, Artificial Sequence
  ENSG00000129521_54 (sequence is synthesized)
ttagggtgtatcaaccattttaaatctgccctcaaaagcacagaacaaatcagacagcattttgctcacagaggagagggtgtatgagaaccaaattccagcttcagcacatggccttgg

SEQ ID NO: 281171 - DNA, 120 bp, Artificial Sequence
  ENSG00000129521_55 (sequence is synthesized)
ttttgctcacagaggagagggtgtatgagaaccaaattccagcttcagcacatggccttgggtacagctacaagatggaggaagctatttgacctgcatcagactttacgtgaacaaaag

SEQ ID NO: 281172 - DNA, 120 bp, Artificial Sequence
  ENSG00000129521_56 (sequence is synthesized)
ataatgacatgatagctaatccatacccctgcatgattttatcttccacggaaggaggctggcaagtttaaaggggacaccctcaaagatcagccaggggaaactacttctggtttctca

SEQ ID NO: 281173 - DNA, 120 bp, Artificial Sequence
  ENSG00000129534_0 (sequence is synthesized)
gtgtgttagagaacgtcgcggaggaggtaagcgtcgcttggcgcctggccgccgcgggcaggatacaccgtgggcctgaggcgcgagcccggcggcgtgcggccctctctccgcgcggag

SEQ ID NO: 281174 - DNA, 120 bp, Artificial Sequence
  ENSG00000129534_1 (sequence is synthesized)
ccgagccggaactgcggcagtctctccctgccaggctcttcatccaaggtttctgtggatcccttctgaagttctatctgaaaattgcgcttaagtgaattttctgttagaagaacttgg

SEQ ID NO: 281175 - DNA, 120 bp, Artificial Sequence
  ENSG00000129534_2 (sequence is synthesized)
ttgctactttcttgtcaagatgattgcaacacctttgaaacattcaagaatttacttacctccagaggcatcttctcaaaggagaaatctacccatggatgcaatcttttttgacagcat

SEQ ID NO: 281176 - DNA, 120 bp, Artificial Sequence
  ENSG00000129534_3 (sequence is synthesized)
tccttcaggcacacttactcctgtaaaagatttggtgaaatatcagaactcctccttaaaattgaatgaccataaaaagaatcagttcctaaaaatgacaacttttaacaataaaaatat

SEQ ID NO: 281177 - DNA, 120 bp, Artificial Sequence
  ENSG00000129534_4 (sequence is synthesized)
atttcaatcaactatgctaacagaggctactacctctaacagttctcttgatatcagtgctataaagcccaacaaggatggattaaaaaataaagcaaactatgaatcaccaggaaaaat

SEQ ID NO: 281178 - DNA, 120 bp, Artificial Sequence
  ENSG00000129534_5 (sequence is synthesized)
atttctaagaatgaaagaaaaagtactgcgtgacaagcaagaacagccatcaagaaacagtagtttgttggaaccacagaaaagtggaaataatgaaaccttcactcctaacagagttga

SEQ ID NO: 281179 - DNA, 120 bp, Artificial Sequence
  ENSG00000129534_6 (sequence is synthesized)
aaaaaaaaaattgcagcatacctacctatgtgaagaaaaggaaaacaacaaatcattccagtcagatgacagttcactaagagcctcagtccaaggagttcctctagaatcatcaaataa

SEQ ID NO: 281180 - DNA, 120 bp, Artificial Sequence
  ENSG00000129534_7 (sequence is synthesized)
tgatattttcctcccggtcaaacaaaagattcagtgccagcaggaaaagaaagcaccactgcacaatttaacttacgaacttccaactctgaaccaagaacaggaaaattttttggctgt

SEQ ID NO: 281181 - DNA, 120 bp, Artificial Sequence
  ENSG00000129534_8 (sequence is synthesized)
agaagcccgaaacaagacattaactagagctcagttggctaaacaaatttttcactcaaaggagagtatagttgcaaccactaaatccaaaaaggacacgtttgttttagaaagcgttga

SEQ ID NO: 281182 - DNA, 120 bp, Artificial Sequence
  ENSG00000129534_9 (sequence is synthesized)
ttctgctgatgaacaatttcaaaatactaatgctgagactctcagtactaattgtattcctattaaaaatggcagcctgttaatggtttctgatagtgagaggacaacagaagggacttc

SEQ ID NO: 281183 - DNA, 120 bp, Artificial Sequence
  ENSG00000129534_10 (sequence is synthesized)
gcaacagaaagttaaggaaggaaatggaaaaacagtgcctggagagacaggtcttccaggttccatgaaagatacatgtaaaattgtacttgcaacaccaagacttcatataacaatacc

SEQ ID NO: 281184 - DNA, 120 bp, Artificial Sequence
  ENSG00000129534_11 (sequence is synthesized)
tcggaggtcaaaaagaaatatttcaaagctttctcctccaagaatatttcaaactgttacaaatggacttaaaaaaaatcaggtagttcagctacaggaatggatgattaaaagcatcaa

SEQ ID NO: 281185 - DNA, 120 bp, Artificial Sequence
  ENSG00000129534_12 (sequence is synthesized)
taataatactgctatatgtgtagaaggaaaattgatagacgtcactaacatatattggcacagtaatgtaattatagagcggattgagcacaacaaacttaggactatatcaggcaacgt

SEQ ID NO: 281186 - DNA, 120 bp, Artificial Sequence
  ENSG00000129534_13 (sequence is synthesized)
ttatatattaaaaggcatgatagaccaaatttccatgaaagaagcaggatatccaaattatctcataaggaaatttatgtttggatttccagaaaattggaaagagcacattgataattt

SEQ ID NO: 281187 - DNA, 120 bp, Artificial Sequence
  ENSG00000129534_14 (sequence is synthesized)
tctggaacaattaagggctggtgaaaagaacagggaaaagaccaaacaaaaacagaaaactggaagatctgtccgtgacataaggaaatcaatgaaaaatgatgcacgagaaaaccaaac

SEQ ID NO: 281188 - DNA, 120 bp, Artificial Sequence
  ENSG00000129534_15 (sequence is synthesized)
agatactgctcaaagagccaccaccacttacgattttgattgtgataatttggaactgaagagtaataagcacagtgagtcaccaggagctacagaattaaacatgtgccacagtaattg

SEQ ID NO: 281189 - DNA, 120 bp, Artificial Sequence
  ENSG00000129534_16 (sequence is synthesized)
ccaaaataaaccaacattaaggttcccagatgaccaagtaaataatactattcaaaatggaggaggagatgacttatctaatcaggaattaattggaaaaaaagaatataaaatgtcttc

SEQ ID NO: 281190 - DNA, 120 bp, Artificial Sequence
  ENSG00000129534_17 (sequence is synthesized)
aaagaaactaaaaattggtgaaagaacaaatgaaaggataataaaaagtcagaagcaagagacaactgaagaattggatgtatccattgatattctaacctcaagggaacagtttttctc

SEQ ID NO: 281191 - DNA, 120 bp, Artificial Sequence
  ENSG00000129534_18 (sequence is synthesized)
agatgaagaaagaaaatacatggccatcaatcagaagaaagcttatattttagtaacaccacttaaatctagaaaagtgatagagcaaagatgcatgaggtataatctgtccgctggcac

SEQ ID NO: 281192 - DNA, 120 bp, Artificial Sequence
  ENSG00000129534_19 (sequence is synthesized)
attttgtaataccagagtgtcaaaaaaaaagtcccatcagcaagtccatggggactttagaaaatacatttgaaggtcataaaagtaaaaacaaggaagattgcgatgaacgtgacttac

SEQ ID NO: 281193 - DNA, 120 bp, Artificial Sequence
  ENSG00000129534_20 (sequence is synthesized)
ttactgtcaaccggaaaataaaaatatctaaccttgaaaaggaacaaatgctcacctctgactttaagaaaaataccagactattaccaaaattgaagaaaatagaaaatcaggtagcta

SEQ ID NO: 281194 - DNA, 120 bp, Artificial Sequence
  ENSG00000129534_21 (sequence is synthesized)
tgtcattttataagcatcagtcctcaccagatttgtcaagtgaagaaagtgaaacagaaaaggaaattaaaaggaaagctgaagttaagaaaaccaaagcaggaaacaccaaagaagcag

SEQ ID NO: 281195 - DNA, 120 bp, Artificial Sequence
  ENSG00000129534_22 (sequence is synthesized)
tggttcacctgagaaagagcacaagaaacacaagtaatattccagtgattttggaacctgaaactgaagaaagtgaaaatgaattttatatcaaacaaaagaaagctagaccttccgtca

SEQ ID NO: 281196 - DNA, 120 bp, Artificial Sequence
  ENSG00000129534_23 (sequence is synthesized)
aagaaactcttcagaagtctggtgttaggaaagagtttccaattactgaggcagtaggatctgataagacaaataggcatcccttagaatgcttacctggtttaattcaggataaggaat

SEQ ID NO: 281197 - DNA, 120 bp, Artificial Sequence
  ENSG00000129534_24 (sequence is synthesized)
ggaatgagaaggagttacagaaacttcattgtgcttttgcatctcttccaaagcacaaacctggtttctggtcagaggtagctgcggctgtaggttctcgatctcctgaagaatgccaga

SEQ ID NO: 281198 - DNA, 120 bp, Artificial Sequence
  ENSG00000129534_25 (sequence is synthesized)
ggaaatacatggaaaatcccagaggaaaaggatcccagaaacatgtcactaagaagaagccagccaattccaaaggccaaaatggcaagagaggtgatgctgatcagaaacaaactatta

SEQ ID NO: 281199 - DNA, 120 bp, Artificial Sequence
  ENSG00000129534_26 (sequence is synthesized)
agataactgccaaagtgggaactcttaaaaggaagcaacagatgagggaatttctggaacagttgccaaaagatgaccatgatgattttttcagtacaacacctttacagcatcaaagaa

SEQ ID NO: 281200 - DNA, 120 bp, Artificial Sequence
  ENSG00000129534_27 (sequence is synthesized)
tactgttgccaagtttccaggacagtgaagatgatgatgatattctgccaaatatggacaaaaatccaacaactccatcatcagttatctttccattggtaaaaactcctcaatgtcagc

SEQ ID NO: 281201 - DNA, 120 bp, Artificial Sequence
  ENSG00000129534_28 (sequence is synthesized)
atgtcagtcctggcatgctaggttctataaataggaatgactgtgataaatatgtttttcgtatgcaaaaatatcataaaagtaatggtggtattgtctggggcaacatcaagaaaaaat

SEQ ID NO: 281202 - DNA, 120 bp, Artificial Sequence
  ENSG00000129534_29 (sequence is synthesized)
tagttgaaactgatttctcaactccaacaccaagaaggaaaaccccatttaacacagacttaggagaaaactctggtattggaaaacttttcactaatgctgtggaatctttagatgaag

SEQ ID NO: 281203 - DNA, 120 bp, Artificial Sequence
  ENSG00000129534_30 (sequence is synthesized)
aagagaaagattattatttttcgaactctgattctgcatagtaaaatgagaaaatatgattcctgggatttttaccataaagcagacagtgtttgtattttcaactggagtacatgtatt

SEQ ID NO: 281204 - DNA, 120 bp, Artificial Sequence
  ENSG00000129534_31 (sequence is synthesized)
ttctttgtaaagtagcttcctatgaaaatgtggacttttttgaaggtttcatatgtttgtgttcaaagtaaaatatcctcattgctgcagcttactaaaaatgtaaagaaaattgttttt

SEQ ID NO: 281205 - DNA, 120 bp, Artificial Sequence
  ENSG00000129534_32 (sequence is synthesized)
gctcgtgtagatatctgtaaatttgtttttgcatattaaaatatatatagataattttttaataagcatccaagtctgtttactttaagaaaaccatttcccaaacagatttttttttat

SEQ ID NO: 281206 - DNA, 120 bp, Artificial Sequence
  ENSG00000129534_33 (sequence is synthesized)
ttcaagaaaattttgctaccatttaagtaagagaaggtgagaaggatgacagaggttgtattggtagctattgaattcatgaaaacttttaagttagcatttgttagcagttattatcca

SEQ ID NO: 281207 - DNA, 120 bp, Artificial Sequence
  ENSG00000129534_34 (sequence is synthesized)
agccagagtaggatttgttaccagttgttatccaaacctaatgtttaaattacacattgttgaaattaaattacacattgttgacatgcttctctcctgattgtttttattttaaacttg

SEQ ID NO: 281208 - DNA, 120 bp, Artificial Sequence
  ENSG00000129534_35 (sequence is synthesized)
tgataggcatatctatgaaacctttgtaaatttagtttattgctttaccattattttactaggtaaaattagagaacagattttgttctctaatttttaagccttatttacatatgcaga

SEQ ID NO: 281209 - DNA, 120 bp, Artificial Sequence
  ENSG00000129534_36 (sequence is synthesized)
aacagcttaaatattttgactagattagacaaacagttaatagatccaccattaggaatcaatatattatgtcataataaacatcctttttctttcactgaaatttcttttagaaataaa

SEQ ID NO: 281210 - DNA, 120 bp, Artificial Sequence
  ENSG00000129534_37 (sequence is synthesized)
cttatttttgcttgttatgttttgaaacttgacataggatattttccctctggctacacattcacctacccttgttctctatttagattattcaaataaagttagtttgcttttatagta

SEQ ID NO: 281211 - DNA, 120 bp, Artificial Sequence
  ENSG00000129534_38 (sequence is synthesized)
acagagtgagaccctgtttcaaaaaaagaaatacatttgaaattaatttaggcaattgttgttcaacctgtggttaaaagtatgacagttaacttaaaattattaggttgacttaaaaat

SEQ ID NO: 281212 - DNA, 120 bp, Artificial Sequence
  ENSG00000129534_39 (sequence is synthesized)
agtagtgccggggcgtgctcgcggcccacggcgtcccacgtcgtcccacgtcagccttgtcccggcagagcttcacgagaggaaaggcgggattcagggtgggcgcgtgccctacgaaga

SEQ ID NO: 281213 - DNA, 120 bp, Artificial Sequence
  ENSG00000129534_40 (sequence is synthesized)
cgaaacgaactttgaagacaactagaggagctcgccccctgcctgtgacagcttagggtcgcctactttttgtggacacactgccgtccacggagtgcagaggccgcctgcagttttctt

SEQ ID NO: 281214 - DNA, 120 bp, Artificial Sequence
  ENSG00000129534_41 (sequence is synthesized)
tctctgcatcagagtagtgaggaacatttaaacatttcatgaggaccatagatgccagtaatgggaagaggcattatttaaaaaatcaagaatgtgtagtttctagaagttaaggatgga

SEQ ID NO: 281215 - DNA, 120 bp, Artificial Sequence
  ENSG00000129534_42 (sequence is synthesized)
caagttcatcaaatcggggtgctattcaataaacagcattgtgatataacccacatttacttctggatcaattcgaaatggatcaaggttttacttgtaaaaaactttaaaaaaaaaaaa

SEQ ID NO: 281216 - DNA, 120 bp, Artificial Sequence
  ENSG00000129534_43 (sequence is synthesized)
ccctgccaggctcttcatccaaggggcagggacattaggaaacagaaagctctgttttggttcttggagcctttcaacgtgaccacaattatctgactttaaatgaagacagttctgcat

SEQ ID NO: 281217 - DNA, 120 bp, Artificial Sequence
  ENSG00000129534_44 (sequence is synthesized)
ggattaataatgtaagattaaagataccctgcctgggtggaaagagctttatgtgaggggtttttatttatttatgaagattttttttgttttgtttttttgagaatcagtattaaggaa

SEQ ID NO: 281218 - DNA, 120 bp, Artificial Sequence
  ENSG00000129534_45 (sequence is synthesized)
aagacccacatgttaagtcttattttgctctattactagttgtgtagtcttcaataatttacttgttccttttggtgatgaacattgaattcattcctactcttttttttctgatactta

SEQ ID NO: 281219 - DNA, 120 bp, Artificial Sequence
  ENSG00000129534_46 (sequence is synthesized)
cagtactattaaaatagttagattaattaagatagaaaggaactgtagcatctgaagatttgagaatttttcccaaattaaatacagagtaatcaatgaaagactttagagcattaaact

SEQ ID NO: 281220 - DNA, 120 bp, Artificial Sequence
  ENSG00000129534_47 (sequence is synthesized)
gttacattaggacaaattctctgaaggaagtggaatggaaatacaagcttaaggaggaagatgcagtgtaaaatttccaattgttagaggtttgcccattaattaattaattatttttga

SEQ ID NO: 281221 - DNA, 120 bp, Artificial Sequence
  ENSG00000129535_0 (sequence is synthesized)
gcctcagagaataaataggagactaagaggacaggcagacaaacaggacgagcctgggggctccaggcctggacggaggaagaagccagctatacggggtttctccatgctggccaagct

SEQ ID NO: 281222 - DNA, 89 bp, Artificial Sequence
  ENSG00000129535_1 (sequence is synthesized)
tcccaaagtgctggaattcattctttctctccacaatccaatgaggaaactcatctgcccacccaactaccatcataaagtcctcaggt

SEQ ID NO: 281223 - DNA, 120 bp, Artificial Sequence
  ENSG00000129535_2 (sequence is synthesized)
ctcatctgcccacccaactaccatcataaagtcctcaggtgatttctcaagctatacctccattgggacatctctctccaacctgagaccactggatatcacccacaatgctatatagca

SEQ ID NO: 281224 - DNA, 120 bp, Artificial Sequence
  ENSG00000129535_3 (sequence is synthesized)
cctcaaactcagcatatctatgatgggtgtctgctcagcatccactcgccttttctggtgcactcctcccagcccagctccagaatggccctgccccccagccccctggccatggaatat

SEQ ID NO: 281225 - DNA, 120 bp, Artificial Sequence
  ENSG00000129535_4 (sequence is synthesized)
gtcaatgactttgacttgatgaagtttgaggtaaagcgggaaccctctgagggccgacctggcccccctacagcctcactgggctccacaccttacagctcagtgcctccttcacccacc

SEQ ID NO: 281226 - DNA, 120 bp, Artificial Sequence
  ENSG00000129535_5 (sequence is synthesized)
ttcagtgaaccaggcatggtgggggcaaccgagggcacccggccaggcctggaggagctgtactggctggctaccctgcagcagcagctgggggctggggaggcattggggctgagtcct

SEQ ID NO: 281227 - DNA, 120 bp, Artificial Sequence
  ENSG00000129535_6 (sequence is synthesized)
agaggagacaggagcccagcacgtccagctggcagagcggttttccgacgcggcgctggtctcgatgtctgtgcgggagctaaaccggcagctgcggggctgcgggcgcgacgaggcgct

SEQ ID NO: 281228 - DNA, 120 bp, Artificial Sequence
  ENSG00000129535_7 (sequence is synthesized)
gcggctgaagcagaggcgccgcacgctgaagaaccgcggctacgcgcaggcctgtcgctccaagcggctgcagcagcggcgcgggctggaggccgagcgcgcccgcctggccgcccagct

SEQ ID NO: 281229 - DNA, 120 bp, Artificial Sequence
  ENSG00000129535_8 (sequence is synthesized)
ggacgcgctgcgggccgaggtggcccgcctggcccgggagcgcgatctctacaaggctcgctgtgaccggctaacctcgagcggccccgggtccggggacccctcccacctcttcctctg

SEQ ID NO: 281230 - DNA, 120 bp, Artificial Sequence
  ENSG00000129535_9 (sequence is synthesized)
agccgttcagagcaccttgtggtgtagtgggggctgggtggggtggctccgcccaggaggcggctgcacggttctctgcatcgttaccagagcgccttctggtcctagccacgccctgta

SEQ ID NO: 281231 - DNA, 120 bp, Artificial Sequence
  ENSG00000129535_10 (sequence is synthesized)
tgaccgcgcaaatatccccaaagcttttgggtcctcaagtcatgcccgaatttagatgctggtcattttctggagaggggtcccctccccttacgaacacagaaacccagcccacatgac

SEQ ID NO: 281232 - DNA, 120 bp, Artificial Sequence
  ENSG00000129535_11 (sequence is synthesized)
tagcacgctgagctctgcagggaccagtgccaggcactggggggtggaagtgtggtgacacagtgaatgggaggtggaggagggttgcagctcccacctcagtttagtttttaattcagg

SEQ ID NO: 281233 - DNA, 120 bp, Artificial Sequence
  ENSG00000129535_12 (sequence is synthesized)
gagctgagcagaggcaccaggccctgctccatggagccttcagtctcctgggaagctgtgcctgtctggctctggcactgaccacatcctctcggccatttctgaagtgcactcctccca

SEQ ID NO: 281234 - DNA, 120 bp, Artificial Sequence
  ENSG00000129535_13 (sequence is synthesized)
ttcattctgaagcttgtaacctccccattttagcactacagaattttcaagatttcaatatccaacaactagatagattaggacctctatccgagatgctttttccctgcccaaccctgt

SEQ ID NO: 281235 - DNA, 120 bp, Artificial Sequence
  ENSG00000129535_14 (sequence is synthesized)
ggccttcagggctcagagcagcaaaggcctgaagagtgagctctgggggttgttggtgtgggttgggagagagctgtgtgcagaagtctggaaacctgggtcctagtcccagctcttcca

SEQ ID NO: 281236 - DNA, 120 bp, Artificial Sequence
  ENSG00000129535_15 (sequence is synthesized)
tgggatccccctgtcaccctgagcaaatcagttgcttcctggacttgtgttacttcatctaattctcatgtggattggacgacttctgctccctttccagttctggcatctccccagtat

SEQ ID NO: 281237 - DNA, 120 bp, Artificial Sequence
  ENSG00000129535_16 (sequence is synthesized)
ggaagtcccggtggtctccccaagaagtccccaagacaatctcgccaaaggcacctcctatcctgctgcagtttcccagctgcagcctaggcaggggatgcacagcccaggcgaggaagc

SEQ ID NO: 281238 - DNA, 120 bp, Artificial Sequence
  ENSG00000129535_17 (sequence is synthesized)
ctggcttctctgtgagcacatacgtgggtcctcggcagctccctccaggctgtctgggcctccagacctgcacagggtgctcctgccacctcccacctctctgagggctgaggtgagact

SEQ ID NO: 281239 - DNA, 120 bp, Artificial Sequence
  ENSG00000129535_18 (sequence is synthesized)
tctcctgggatgacaatttgctgagagagtgcagcttttgtgaattaaacttgaagtccaggcagaattctaatgcaataagctaaatgttcttgcaatttaagaagtgttcattcttta

SEQ ID NO: 281240 - DNA, 120 bp, Artificial Sequence
  ENSG00000129535_19 (sequence is synthesized)
cgccgggggtgtgtacgccatgagggggaggaagccgagaagcacctcccactgaagccggcggtaaccgccccacgcgagaccacccaccagccaggagcggtcgcaggacccgcagcg

SEQ ID NO: 281241 - DNA, 120 bp, Artificial Sequence
  ENSG00000129535_20 (sequence is synthesized)
gcgcgaggccttgtttacaccgactgccgccactgcgttggccaaccgctcctccgtcacgcgcttcgctcgtcacgcatctcgcggcttcctggccggcgggctgcaaacgtcacacga

SEQ ID NO: 281242 - DNA, 120 bp, Artificial Sequence
  ENSG00000129535_21 (sequence is synthesized)
ggagggttgggggctgtctgggtgcgggtccactggacacacccgggcctggagctggatgccggggatcccagagacgagcccggggtttaggtgcgcgacgggctcgcctgaccgtgg

SEQ ID NO: 281243 - DNA, 120 bp, Artificial Sequence
  ENSG00000129535_22 (sequence is synthesized)
ccggccctgcaccgtggggcgcccgcctgactggagcaacggtcagctggggggcccggggagcgtcggggcctggggcgggctctggaccgaaacagactgcgtggaagggcgagcctt

SEQ ID NO: 281244 - DNA, 120 bp, Artificial Sequence
  ENSG00000129535_23 (sequence is synthesized)
cccgcccccttggccagccaactggacagcggagcacgatgattgataggccaataagatatgcaaatgatctccttaccttattggttggaggcctcaggaccacagatgacctcagag

SEQ ID NO: 281245 - DNA, 120 bp, Artificial Sequence
  ENSG00000129538_0 (sequence is synthesized)
gctgagtgattgcagaaactggccttccatctctctcagacaccaagctgcagatccaggtcaccacctagaggggaggaagacctcgctttggagagtgggaataaaacgctcgtggaa

SEQ ID NO: 281246 - DNA, 120 bp, Artificial Sequence
  ENSG00000129538_1 (sequence is synthesized)
aagggtacacgcttttctgggaaagtgaggccaccatggctctggagaagtctcttgtccggctccttctgcttgtcctgatactgctggtgctgggctgggtccagccttccctgggca

SEQ ID NO: 281247 - DNA, 120 bp, Artificial Sequence
  ENSG00000129538_2 (sequence is synthesized)
aggaatcccgggccaagaaattccagcggcagcatatggactcagacagttcccccagcagcagctccacctactgtaaccaaatgatgaggcgccggaatatgacacaggggcggtgca

SEQ ID NO: 281248 - DNA, 120 bp, Artificial Sequence
  ENSG00000129538_3 (sequence is synthesized)
gtccagaatgtctgtttccaggaaaaggtcacctgcaagaacgggcagggcaactgctacaagagcaactccagcatgcacatcacagactgccgcctgacaaacggctccaggtacccc

SEQ ID NO: 281249 - DNA, 120 bp, Artificial Sequence
  ENSG00000129538_4 (sequence is synthesized)
aactgtgcataccggaccagcccgaaggagagacacatcattgtggcctgtgaagggagcccatatgtgccagtccactttgatgcttctgtggaggactctacctaaggtcagagcagc

SEQ ID NO: 281250 - DNA, 120 bp, Artificial Sequence
  ENSG00000129538_5 (sequence is synthesized)
gagataccccacctccctcaacctcatcctctccacagctgcctcttccctcttccttccctgctgtgaaagaagtaactacagttagggctcctattcaacacacacatgcttcccttt

SEQ ID NO: 281251 - DNA, 120 bp, Artificial Sequence
  ENSG00000129538_6 (sequence is synthesized)
cctgagtcccatccctgcgtgattttgggggtgaagagtgggttgtgaggtgggccccatgttaacccctccactctttctttcaataaaacgcagttgcaaacacctgatttctgaagc

SEQ ID NO: 281252 - DNA, 120 bp, Artificial Sequence
  ENSG00000129538_7 (sequence is synthesized)
ttgagcactgggtacaaatgtattttggatcaaagaaactccagtattcaaagataggaactgacaggattttaggtcactttgtaggtcaccacctagaggggaggaagacctcgcttt

SEQ ID NO: 281253 - DNA, 120 bp, Artificial Sequence
  ENSG00000129559_0 (sequence is synthesized)
agaagtggcccttgcaggcaagagtgctggagggcggcagcggcgaccggagcggtaggagcagcaatttatccgtgtgcagccccaaactggaaagaagatgctaattaaagtgaagac

SEQ ID NO: 281254 - DNA, 120 bp, Artificial Sequence
  ENSG00000129559_1 (sequence is synthesized)
gctgaccggaaaggagattgagattgacattgaacctacagacaaggtggagcgaatcaaggagcgtgtggaggagaaagagggaatccccccacaacagcagaggctcatctacagtgg

SEQ ID NO: 281255 - DNA, 120 bp, Artificial Sequence
  ENSG00000129559_2 (sequence is synthesized)
gagaagacagcagctgattacaagattttaggtggttcagtccttcacctggtgttggctctgagaggaggaggtggtcttaggcagtgatggaccctccattttacctctttaccctgt

SEQ ID NO: 281256 - DNA, 120 bp, Artificial Sequence
  ENSG00000129559_3 (sequence is synthesized)
cgctcataatgaggcatcatatatcctctcactctctgggacaccatagccactgccccctcccctggatgcccagtaatgtatgtctactggtgggagactgtgaggatcccaggattc

SEQ ID NO: 281257 - DNA, 120 bp, Artificial Sequence
  ENSG00000129559_4 (sequence is synthesized)
agtattcctggcccagagggcccttgctggctactgggtgttagtttgcagtcctgtgtgcttccctctcttatgactgtgtccctggttgtcaataaaatatttcctggcctcctggaa

SEQ ID NO: 281258 - DNA, 120 bp, Artificial Sequence
  ENSG00000129559_5 (sequence is synthesized)
tgcaggcaagagtgctggagggcggcagcggcgaccggagcggtaggagcagcaatttatccgtgtgcagccccaaactggaaagaagatgctaattaaagtgaaggaaccaaagcgggg

SEQ ID NO: 281259 - DNA, 120 bp, Artificial Sequence
  ENSG00000129559_6 (sequence is synthesized)
agtgtgttcagtcagtacctgcctttctgagcctggcatcctggaccagcctcacttccttggctgaggcaggttctcactctgtcgcccaggcttagggtgcagtggtgccatcacagc

SEQ ID NO: 281260 - DNA, 82 bp, Artificial Sequence
  ENSG00000129559_7 (sequence is synthesized)
tctgtcgcccaggcttagggtgcagtggtgccatcacagcttactgcagcctcgacctctcaggcccaagcaattctcccat

SEQ ID NO: 281261 - DNA, 120 bp, Artificial Sequence
  ENSG00000129559_8 (sequence is synthesized)
tgcggtctcatcgtgttgcccacgctagtctaaaacttctggggtcaagtgatcttcccacctcatcttcctaaagtgctgggattacagccgtgagctaccatatctgacccctttttg

SEQ ID NO: 281262 - DNA, 68 bp, Artificial Sequence
  ENSG00000129559_9 (sequence is synthesized)
gggattacagccgtgagctaccatatctgacccctttttgaattattattatttttgttttgttttgc

SEQ ID NO: 281263 - DNA, 70 bp, Artificial Sequence
  ENSG00000129559_10 (sequence is synthesized)
gctgggactacaagtgcccaccaccatacccggctaactgaacgcctgacctgaggtgatccacccacct

SEQ ID NO: 281264 - DNA, 120 bp, Artificial Sequence
  ENSG00000129559_11 (sequence is synthesized)
cattttcaactgctgtctctgtgtagctgacttcttccatatttttctataagattttacaattaaattcttcctgatttaaatcttgttaccttgtctctatggttctaaaattaaatg

SEQ ID NO: 281265 - DNA, 120 bp, Artificial Sequence
  ENSG00000129559_12 (sequence is synthesized)
catcatcttctgtcataagccatatcccaatacccatctcgtgtattaatcccatcaatcattcaggtgtctggaatacaattctttagagtcatttaaaattacgtggtccttttataa

SEQ ID NO: 281266 - DNA, 120 bp, Artificial Sequence
  ENSG00000129559_13 (sequence is synthesized)
gatctaatttttcacttaaaagctctttctgtttgatttttgtttccatctccattaccctcattctggtctcgggtcttactcatttatatgtttatgtctctgtaatacatccaacca

SEQ ID NO: 281267 - DNA, 120 bp, Artificial Sequence
  ENSG00000129559_14 (sequence is synthesized)
ggttttcctaccgtcatatcccctctaaagtgtagtctaaaccaagacatgacgtacaaaaccataatgtgcaggtcttcctttagcttctttttcattatattactccctaaccccaga

SEQ ID NO: 281268 - DNA, 120 bp, Artificial Sequence
  ENSG00000129559_15 (sequence is synthesized)
tccttcattgatttcctcattgcagattactttggcaactgtctttactgtgtgaatcagttttctcattcatgttttttaacatacagtaaaatgcacagttcttaagggtttagttca

SEQ ID NO: 281269 - DNA, 120 bp, Artificial Sequence
  ENSG00000129559_16 (sequence is synthesized)
gtgagtttttgacaatagcatacgttcatgtaattacaaaatctaaacatttgtattcctaccccctcaagagtttcataggttagttttgcttgttttagaactttatataaatggaat

SEQ ID NO: 281270 - DNA, 120 bp, Artificial Sequence
  ENSG00000129559_17 (sequence is synthesized)
tattgaatgtacaatttttgtatctggcttctttcattctgcataatgtctactgtaatctgtggtttattccttcttattactgaatagtattccattggatgaattatatcataattt

SEQ ID NO: 281271 - DNA, 120 bp, Artificial Sequence
  ENSG00000129559_18 (sequence is synthesized)
gtttatccattctcctgttgatgggtgtttgagttatctccagtttctggctattatgaaaaagtcttctatgaacattgttatacgagtgtttttgtaaacatatgtttttatttcctt

SEQ ID NO: 281272 - DNA, 120 bp, Artificial Sequence
  ENSG00000129559_19 (sequence is synthesized)
tggataaatacctaagaatgaaattactaggtcatgtggtagatatatgtaactttaaaaagaaactaagggtttgtaccattttatattcccacctgcagtgtatgagcattccagttg

SEQ ID NO: 281273 - DNA, 120 bp, Artificial Sequence
  ENSG00000129559_20 (sequence is synthesized)
ctctgtacccttactagacggtacccttgtagcaccataaaaatgctgatgtcagtcatttttattttggctattatagtgttataatgttatataaattaaaacactatatctagtgtt

SEQ ID NO: 281274 - DNA, 120 bp, Artificial Sequence
  ENSG00000129559_21 (sequence is synthesized)
ctaaaataatgccaatattctcactgattttgggggactgatgttggaagatgactcatggaattaagaggatcagatggttcaaagaatcttgccctatcaaagttgtttacagcctaa

SEQ ID NO: 281275 - DNA, 120 bp, Artificial Sequence
  ENSG00000129559_22 (sequence is synthesized)
aaatatttgataaatgaaggtatgttcaaagccttctcattctccaaagcagtgctgctgagaatatgcatcttttagaaggcagtagatcccaaagaccaacataggatgttttaccta

SEQ ID NO: 281276 - DNA, 120 bp, Artificial Sequence
  ENSG00000129559_23 (sequence is synthesized)
cccagaatggggtcgcttttgtcgggtctcactgtattcgaacccccgcagtcatagagaaggcctagcagcggcttgactcccccgtctctcagattcttggagtaagcgctgctctcc

SEQ ID NO: 281277 - DNA, 120 bp, Artificial Sequence
  ENSG00000129559_24 (sequence is synthesized)
attcttcattcccagggtacctgcttctcccagtccctaacgtaggtcgcctccgagcacagccctaaaatcggggcctcccaagggctagactatgagcctttactggtggttgccaag

SEQ ID NO: 281278 - DNA, 120 bp, Artificial Sequence
  ENSG00000129559_25 (sequence is synthesized)
agggggcacgtactgaggtggatcaggggtgcctcttgtttttggtgcctaagactctttggcaatctggtgaagcctctaagccccttctcagaataagattttttcaggcataaaaca

SEQ ID NO: 281279 - DNA, 120 bp, Artificial Sequence
  ENSG00000129559_26 (sequence is synthesized)
taatatgaccataattttgaaatattttcaagatacctataaatgatcatgatagaaaatagttaattgctattgttaacaagttacctatattgctaatactactgtggtttttgggct

SEQ ID NO: 281280 - DNA, 120 bp, Artificial Sequence
  ENSG00000129562_0 (sequence is synthesized)
acatccggtgtggtcgacgggtcctccaagagtttggggcgcggaccggagtaccttgcgtgcagttatgtcggcgtcggtagtgtctgtcatttcgcggttcttagaagagtacttgag

SEQ ID NO: 281281 - DNA, 120 bp, Artificial Sequence
  ENSG00000129562_1 (sequence is synthesized)
ctccactccgcagcgtctgaagttgctggacgcgtacctgctgtatatactgctgaccggggcgctgcagttcggttactgtctcctcgtggggaccttccccttcaactcttttctctc

SEQ ID NO: 281282 - DNA, 120 bp, Artificial Sequence
  ENSG00000129562_2 (sequence is synthesized)
aggcatctccccagagcgagcctttgctgattttctctttgccagcaccatcctgcaccttgttgtcatgaactttgttggctgaatcattctcatttacttaattgaggagtaggagac

SEQ ID NO: 281283 - DNA, 120 bp, Artificial Sequence
  ENSG00000129562_3 (sequence is synthesized)
taaaagaatgttcactctttgaatttcctggataagagttctggagatggcagcttattggacacatggattttcttcagatttgcacttactgctagctctgctttttatgcaggagaa

SEQ ID NO: 281284 - DNA, 120 bp, Artificial Sequence
  ENSG00000129562_4 (sequence is synthesized)
aagcccagagttcactgtgtgtcagaacaactttctaacaaacatttattaatccagcctctgcctttcattaaatgtaaccttttgccttccaaattaaagaactccatgccactcctc

SEQ ID NO: 281285 - DNA, 120 bp, Artificial Sequence
  ENSG00000129566_0 (sequence is synthesized)
agatccgcatccggctcctcccccggctgccacccttcccaccggcagaatccagagcgaagtttctgcttcctgctgcgggaatcggacgccccaggcatatacaagctgagtttcagc

SEQ ID NO: 281286 - DNA, 120 bp, Artificial Sequence
  ENSG00000129566_1 (sequence is synthesized)
catggaaaaactccatgggcatgtgtctgcccatccagacatcctctccttggagaaccggtgcctggctatgctccctgacttacagcccttggagaaactacatcagcatgtatctac

SEQ ID NO: 281287 - DNA, 120 bp, Artificial Sequence
  ENSG00000129566_2 (sequence is synthesized)
ccactcagatatcctctccttgaagaaccagtgcctagccacgcttcctgacctgaagaccatggaaaaaccacatggatatgtgtctgcccacccagacatcctctccttggagaacca

SEQ ID NO: 281288 - DNA, 120 bp, Artificial Sequence
  ENSG00000129566_3 (sequence is synthesized)
gtgcctggccacactttctgacctgaagaccatggagaaaccacatggacatgtttctgcccacccagacatcctctccttggagaaccggtgcctggccaccctctctagtctaaagag

SEQ ID NO: 281289 - DNA, 120 bp, Artificial Sequence
  ENSG00000129566_4 (sequence is synthesized)
cactgtgtctgccagccccttgttccagagtctacagatatctcacatgacgcaagctgatttgtaccgtgtgaacaacagcaattgcctgctctctgagcctccaagttggagggctca

SEQ ID NO: 281290 - DNA, 120 bp, Artificial Sequence
  ENSG00000129566_5 (sequence is synthesized)
gcatttctctaagggactagacctttcaacctgccctatagccctgaaatccatctctgccacagagacagctcaggaagcaactttgggtcgttggtttgattcagaagagaagaaagg

SEQ ID NO: 281291 - DNA, 120 bp, Artificial Sequence
  ENSG00000129566_6 (sequence is synthesized)
ggcagagacccaaatgccttcttatagtctgagcttgggagaggaggaggaggtggaggatctggccgtgaagctcacctctggagactctgaatctcatccagagcctactgaccatgt

SEQ ID NO: 281292 - DNA, 120 bp, Artificial Sequence
  ENSG00000129566_7 (sequence is synthesized)
ccttcaggaaaagaagatggctctactgagcttgctgtgctctactctggtctcagaagtaaacatgaacaatacatctgaccccaccctggctgccatttttgaaatctgtcgtgaact

SEQ ID NO: 281293 - DNA, 120 bp, Artificial Sequence
  ENSG00000129566_8 (sequence is synthesized)
tgccctcctggagcctgagtttatcctcaaggcatctttgtatgccaggcagcagctgaacgtccggaatgtggccaataacatcttggccattgctgctttcttgccggcgtgtcgccc

SEQ ID NO: 281294 - DNA, 120 bp, Artificial Sequence
  ENSG00000129566_9 (sequence is synthesized)
ccacctgcgacgatatttctgtgccattgtccagctgccttctgactggatccaggtggctgagctttaccagagcctggctgagggagataagaataagctggtgcccctgcccgcctg

SEQ ID NO: 281295 - DNA, 120 bp, Artificial Sequence
  ENSG00000129566_10 (sequence is synthesized)
tctccgtactgccatgacggacaaatttgcccagtttgacgagtaccagctggctaagtacaaccctcggaagcaccgggccaagagacacccccgccggccaccccgctctccagggat

SEQ ID NO: 281296 - DNA, 120 bp, Artificial Sequence
  ENSG00000129566_11 (sequence is synthesized)
ggagcctccattttctcacagatgttttccaaggtacatagggtttctcagagaagagcagagaaagtttgagaaggccggtgatacagtgtcagagaaaaagaatcctccaaggttcac

SEQ ID NO: 281297 - DNA, 120 bp, Artificial Sequence
  ENSG00000129566_12 (sequence is synthesized)
cctgaagaagctggttcagcgactgcacatccacaagcctgcccagcacgttcaagccctgctgggttacagatacccctccaacctacagctcttttctcgaagtcgccttcctgggcc

SEQ ID NO: 281298 - DNA, 120 bp, Artificial Sequence
  ENSG00000129566_13 (sequence is synthesized)
ttgggattctagcagagctgggaagaggatgaagctgtctaggccagagacctgggagcgggagctgagcctacgggggaacaaagcgtcggtctgggaggaactcattgaaaatgggaa

SEQ ID NO: 281299 - DNA, 120 bp, Artificial Sequence
  ENSG00000129566_14 (sequence is synthesized)
gcttcccttcatggccatgcttcggaacctgtgcaacctgctgcgggttggaatcagttcccgccaccatgagctcattctccagagactccagcatgcgaagtcggtgatccacagtcg

SEQ ID NO: 281300 - DNA, 120 bp, Artificial Sequence
  ENSG00000129566_15 (sequence is synthesized)
gcagtttccattcagatttcttaacgcccatgatgccattgatgccctcgaggctcaactcagaaatcaagcattgccctttccttcgaatataacactgatgaggcggatactaactag

SEQ ID NO: 281301 - DNA, 120 bp, Artificial Sequence
  ENSG00000129566_16 (sequence is synthesized)
aaatgaaaagaaccgtcccaggcggaggtttctttgccacctaagccgtcagcagcttcggatggcaatgaggatacctgtgttgtatgagcagctcaagagggagaagctgagagtaca

SEQ ID NO: 281302 - DNA, 120 bp, Artificial Sequence
  ENSG00000129566_17 (sequence is synthesized)
caaggccagacagtggaaatatgatggtgagatgctgaacaggtaccgacaggccctagagacagctgtgaacctctctgtgaagcacagcctgcccctgctgccaggccgcactgtctt

SEQ ID NO: 281303 - DNA, 120 bp, Artificial Sequence
  ENSG00000129566_18 (sequence is synthesized)
ggtctatctgacagatgctaatgcagacaggctctgtccaaagagcaacccacaagggcccccgctgaactatgcactgctgttgattgggatgatgatcacgagggcggagcaggtgga

SEQ ID NO: 281304 - DNA, 120 bp, Artificial Sequence
  ENSG00000129566_19 (sequence is synthesized)
cgtcgtgctgtgtggaggtgacactctgaagactgcagtgcttaaggcagaagaaggcatcctgaagactgccatcaagctccaggctcaagtccaggagtttgatgaaaatgatggatg

SEQ ID NO: 281305 - DNA, 120 bp, Artificial Sequence
  ENSG00000129566_20 (sequence is synthesized)
gtccctgaatacttttgggaaatacctgctgtctctggctggccaaagggttcctgtggacagggtcatcctccttggccaaagcatggatgatggaatgataaatgtggccaaacagct

SEQ ID NO: 281306 - DNA, 120 bp, Artificial Sequence
  ENSG00000129566_21 (sequence is synthesized)
ttactggcagcgtgtgaattccaagtgcctctttgttggtatcctcctaagaagggtacaatacctgtcaacagatttgaatcccaatgatgtgacactctcaggctgtactgatgcgat

SEQ ID NO: 281307 - DNA, 120 bp, Artificial Sequence
  ENSG00000129566_22 (sequence is synthesized)
actgaagttcattgcagagcatggggcctcccatcttctggaacatgtgggccaaatggacaaaatattcaagattccaccacccccaggaaagacaggggtccagtctctccggccact

SEQ ID NO: 281308 - DNA, 120 bp, Artificial Sequence
  ENSG00000129566_23 (sequence is synthesized)
ggaagaggacactccaagccccttggctcctgtttcccagcaaggatggcgcagcatccggcttttcatttcatccactttccgagacatgcatggggagcgggacctgctgctgaggtc

SEQ ID NO: 281309 - DNA, 120 bp, Artificial Sequence
  ENSG00000129566_24 (sequence is synthesized)
tgtgctgccagcactgcaggcccgagcggcccctcaccgtatcagccttcacggaatcgacctccgctggggcgtcactgaggaggagacccgtaggaacagacaactggaagtgtgcct

SEQ ID NO: 281310 - DNA, 120 bp, Artificial Sequence
  ENSG00000129566_25 (sequence is synthesized)
tggggaggtggagaacgcacagctgtttgtggggattctgggctcccgttatggatacattccccccagctacaaccttcctgaccatccacacttccactgggcccagcagtacccttc

SEQ ID NO: 281311 - DNA, 120 bp, Artificial Sequence
  ENSG00000129566_26 (sequence is synthesized)
agggcgctctgtgacagagatggaggtgatgcagttcctgaaccggaaccaacgtctgcagccctctgcccaagctctcatctacttccgggattccagcttcctcagctctgtgccaga

SEQ ID NO: 281312 - DNA, 120 bp, Artificial Sequence
  ENSG00000129566_27 (sequence is synthesized)
tgcctggaaatctgactttgtttctgagtctgaagaggccgcacgtcggatctcagaactgaagagctacctaagcagacagaaagggatcacctgccgcagatacccctgtgagtgggg

SEQ ID NO: 281313 - DNA, 120 bp, Artificial Sequence
  ENSG00000129566_28 (sequence is synthesized)
gggtgtggcagctggccggccctatgttggcgggctggaggagtttgggcagttggttctgcaggatgtatggaatatgatccagaagctctacctgcagcctggggccctgctggagca

SEQ ID NO: 281314 - DNA, 120 bp, Artificial Sequence
  ENSG00000129566_29 (sequence is synthesized)
gccagtgtccatcccagacgatgacttggtccaggccaccttccagcagctgcagaagccaccgagtcctgcccggccacgccttcttcaggacacagtgcaacggctgatgctgcccca

SEQ ID NO: 281315 - DNA, 120 bp, Artificial Sequence
  ENSG00000129566_30 (sequence is synthesized)
cggaaggctgagcctggtgacggggcagtcaggacagggcaagacagccttcctggcatctcttgtgtcagccctgcaggctcctgatggggccaaggtggcatcattagtcttcttcca

SEQ ID NO: 281316 - DNA, 120 bp, Artificial Sequence
  ENSG00000129566_31 (sequence is synthesized)
cttttctggggctcgtcctgaccagggtcttgccctcactctgctcagacgcctctgtacctatctgcgtggccaactaaaagagccaggtgccctccccagcacctaccgaagcctggt

SEQ ID NO: 281317 - DNA, 120 bp, Artificial Sequence
  ENSG00000129566_32 (sequence is synthesized)
gtgggagctgcagcagaggctgctgcccaagtctgctgagtccctgcatcctggccagacccaggtcctgatcatcgatggggctgataggttagtggaccagaatgggcagctgatttc

SEQ ID NO: 281318 - DNA, 120 bp, Artificial Sequence
  ENSG00000129566_33 (sequence is synthesized)
agactggatcccaaagaagcttccccggtgtgtacacctggtgctgagtgtgtctagtgatgcaggcctaggggagacccttgagcagagccagggtgcccacgtgctggccttggggcc

SEQ ID NO: 281319 - DNA, 120 bp, Artificial Sequence
  ENSG00000129566_34 (sequence is synthesized)
tctggaggcctctgctcgggcccggctggtgagagaggagctggccctgtacgggaagcggctggaggagtcaccatttaacaaccagatgcgactgctgctggtgaagcgggaatcagg

SEQ ID NO: 281320 - DNA, 120 bp, Artificial Sequence
  ENSG00000129566_35 (sequence is synthesized)
ccggccgctctacctgcgcttggtcaccgatcacctgaggctcttcacgctgtatgagcaggtgtctgagagactccggaccctgcctgccactgtccccctgctgctgcagcacatcct

SEQ ID NO: 281321 - DNA, 120 bp, Artificial Sequence
  ENSG00000129566_36 (sequence is synthesized)
gagcacactggagaaggagcacgggcctgatgtccttccccaggccttgactgccctagaagtcacacggagtggtttgactgtggaccagctgcacggagtgctgagtgtgtggcggac

SEQ ID NO: 281322 - DNA, 120 bp, Artificial Sequence
  ENSG00000129566_37 (sequence is synthesized)
actaccgaaggggactaagagctgggaagaagcagtggctgctggtaacagtggagacccctaccccatgggcccgtttgcctgcctcgtccagagtctgcgcagtttgctaggggaggg

SEQ ID NO: 281323 - DNA, 120 bp, Artificial Sequence
  ENSG00000129566_38 (sequence is synthesized)
ccctctggagcgccctggtgcccggctgtgcctccctgatgggcccctgagaacagcagctaaacgttgctatgggaagaggccagggctagaggacacggcacacatcctcattgcagc

SEQ ID NO: 281324 - DNA, 120 bp, Artificial Sequence
  ENSG00000129566_39 (sequence is synthesized)
tcagctctggaagacatgtgacgctgatgcctcaggcaccttccgaagttgccctcctgaggctctgggagacctgccttaccacctgctccagagcgggaaccgtggacttctttcgaa

SEQ ID NO: 281325 - DNA, 120 bp, Artificial Sequence
  ENSG00000129566_40 (sequence is synthesized)
gttccttaccaacctccatgtggtggctgcacacttggaattgggtctggtctctcggctcttggaggcccatgccctctatgcttcttcagtccccaaagaggaacaaaagctccccga

SEQ ID NO: 281326 - DNA, 120 bp, Artificial Sequence
  ENSG00000129566_41 (sequence is synthesized)
ggctgacgttgcagtgtttcgcaccttcctgaggcagcaggcttcaatcctcagccagtacccccggctcctgccccagcaggcagccaaccagcccctggactcacctctttgccacca

SEQ ID NO: 281327 - DNA, 120 bp, Artificial Sequence
  ENSG00000129566_42 (sequence is synthesized)
agcctcgctgctctcccggagatggcacctccaacacacactacgatggcttaataaaccccggaccatgaaaaatcagcaaagctccagcctgtctctggcagtttcctcatcccctac

SEQ ID NO: 281328 - DNA, 120 bp, Artificial Sequence
  ENSG00000129566_43 (sequence is synthesized)
tgctgtggccttctccaccaatgggcaaagagcagctgtgggcactgccaatgggacagtttacctgttggacctgagaacttggcaggaggagaagtctgtggtgagtggctgtgatgg

SEQ ID NO: 281329 - DNA, 120 bp, Artificial Sequence
  ENSG00000129566_44 (sequence is synthesized)
tgctgcagactaaggctcaccagtaccaaatcactggctgctgcctgagcccagactgccggctgctagccaccgtgtgcttgggaggatgcctaaagctgtgggacacagtccgtgggc

SEQ ID NO: 281330 - DNA, 120 bp, Artificial Sequence
  ENSG00000129566_45 (sequence is synthesized)
agctggccttccagcacacctaccccaagtccctgaactgtgttgccttccacccagaggggcaggtaatagccacaggcagctgggctggcagcatcagcttcttccaggtggatgggc

SEQ ID NO: 281331 - DNA, 120 bp, Artificial Sequence
  ENSG00000129566_46 (sequence is synthesized)
tcaaagtcaccaaggacctgggggcacccggagcctctatccgtaccttggccttcaatgtgcctgggggggttgtggctgtgggccggctggacagtatggtggagctgtgggcctggc

SEQ ID NO: 281332 - DNA, 120 bp, Artificial Sequence
  ENSG00000129566_47 (sequence is synthesized)
gagaaggggcacggctggctgccttccctgcccaccatggctttgttgctgctgcgcttttcctgcatgcgggttgccagttactgacggctggagaggatggcaaggttcaggtgtggt

SEQ ID NO: 281333 - DNA, 120 bp, Artificial Sequence
  ENSG00000129566_48 (sequence is synthesized)
cagggtctctgggtcggccccgtgggcacctgggttccctttctctctctcctgccctctctgtggcactcagcccagatggtgatcgggtggctgttggatatcgagcggatggcatta

SEQ ID NO: 281334 - DNA, 120 bp, Artificial Sequence
  ENSG00000129566_49 (sequence is synthesized)
ggatctacaaaatctcttcaggttcccagggggctcagggtcaggcactggatgtggcagtgtccgccctggcctggctaagccccaaggtattggtgagtggtgcagaagatgggtcct

SEQ ID NO: 281335 - DNA, 120 bp, Artificial Sequence
  ENSG00000129566_50 (sequence is synthesized)
tgcagggctgggcactcaaggaatgctcccttcagtccctctggctcctgtccagattccagaagcctgtgctaggactggccacttcccaggagctcttggcttctgcctcagaggatt

SEQ ID NO: 281336 - DNA, 120 bp, Artificial Sequence
  ENSG00000129566_51 (sequence is synthesized)
tcacagtgcagctgtggccaaggcagctgctgacgcggccacacaaggcagaagactttccctgtggcactgagctgcggggacatgagggccctgtgagctgctgtagtttcagcactg

SEQ ID NO: 281337 - DNA, 120 bp, Artificial Sequence
  ENSG00000129566_52 (sequence is synthesized)
atggaggcagcctggccaccgggggccgggatcggagtctcctctgctgggacgtgaggacacccaaaacccctgttttgatccactccttccctgcctgtcaccgtgactgggtcactg

SEQ ID NO: 281338 - DNA, 120 bp, Artificial Sequence
  ENSG00000129566_53 (sequence is synthesized)
gctgtgcctggaccaaagataacctactgatatcctgctccagtgatggctctgtggggctctgggacccagagtcaggacagcggcttggtcagttcctgggtcatcagagtgctgtga

SEQ ID NO: 281339 - DNA, 120 bp, Artificial Sequence
  ENSG00000129566_54 (sequence is synthesized)
gcgctgtggcagctgtggaggagcacgtggtgtctgtgagccgggatgggaccttgaaagtgtgggaccatcaaggcgtggagctgaccagcatccctgctcactcaggacccattagcc

SEQ ID NO: 281340 - DNA, 120 bp, Artificial Sequence
  ENSG00000129566_55 (sequence is synthesized)
actgtgcagctgccatggagccccgtgcagctggacagcctgggtcagagcttctggtggtaaccgtcgggctagatggggccacacggttatggcatccactcttggtgtgccaaaccc

SEQ ID NO: 281341 - DNA, 120 bp, Artificial Sequence
  ENSG00000129566_56 (sequence is synthesized)
acaccctcctgggacacagcggcccagtccgtgctgctgctgtttcagaaacctcaggcctcatgctgaccgcctctgaggatggttctgtacggctctggcaggttcctaaggaagcag

SEQ ID NO: 281342 - DNA, 120 bp, Artificial Sequence
  ENSG00000129566_57 (sequence is synthesized)
atgacacatgtataccaaggagttctgcagccgtcactgctgtggcttgggcaccagatggttccatggcagtatctggaaatcaagctggggaactaatcttgtggcaggaagctaagg

SEQ ID NO: 281343 - DNA, 120 bp, Artificial Sequence
  ENSG00000129566_58 (sequence is synthesized)
ctgtggccacagcacaggctccaggccacattggtgctctgatctggtcctcggcacacaccttttttgtcctcagtgctgatgagaaaatcagcgagtggcaagtgaaactgcggaagg

SEQ ID NO: 281344 - DNA, 120 bp, Artificial Sequence
  ENSG00000129566_59 (sequence is synthesized)
gttcggcacccggaaatttgagtcttcacctgaaccgaattctacaggaggacttaggggtgctgacaagtctggattgggctcctgatggtcactttctcatcttggccaaagcagatt

SEQ ID NO: 281345 - DNA, 120 bp, Artificial Sequence
  ENSG00000129566_60 (sequence is synthesized)
tgaagttactttgcatgaagccaggggatgctccatctgaaatctggagcagctatacagaaaatcctatgatattgtccacccacaaggagtatggcatatttgtcctgcagcccaagg

SEQ ID NO: 281346 - DNA, 120 bp, Artificial Sequence
  ENSG00000129566_61 (sequence is synthesized)
atcctggagttctttctttcttgaggcaaaaggaatcaggagagtttgaagagaggctgaactttgatataaacttagagaatcctagtaggaccctaatatcgataactcaagccaaac

SEQ ID NO: 281347 - DNA, 120 bp, Artificial Sequence
  ENSG00000129566_62 (sequence is synthesized)
ctgaatctgagtcctcatttttgtgtgccagctctgatgggatcctatggaacctggccaaatgcagcccagaaggagaatggaccacaggtaacatgtggcagaaaaaagcaaacactc

SEQ ID NO: 281348 - DNA, 120 bp, Artificial Sequence
  ENSG00000129566_63 (sequence is synthesized)
cagaaacccaaactccagggacagacccatctacctgcagggaatctgatgccagcatggatagtgatgccagcatggatagtgagccaacaccacatctaaagacacggcagcgtagaa

SEQ ID NO: 281349 - DNA, 120 bp, Artificial Sequence
  ENSG00000129566_64 (sequence is synthesized)
agattcactcgggctctgtcacagccctccatgtgctacctgagttgctggtgacagcttcgaaggacagagatgttaagctatgggagagacccagtatgcagctgctgggcctgttcc

SEQ ID NO: 281350 - DNA, 120 bp, Artificial Sequence
  ENSG00000129566_65 (sequence is synthesized)
gatgcgaagggtcagtgagctgcctggaaccttggctgggcgctaactccaccctgcagcttgccgtgggagacgtgcagggcaatgtgtactttctgaattgggaatgaagatgtgcca

SEQ ID NO: 281351 - DNA, 120 bp, Artificial Sequence
  ENSG00000129566_66 (sequence is synthesized)
ctcgggaataatgataccccttgtgctagagatgcaaagcctgaagacactggtagcttttaataattataaaattaataatttcttgataattataaaaatgaagtgtcaaaaaatctc

SEQ ID NO: 281352 - DNA, 120 bp, Artificial Sequence
  ENSG00000129566_67 (sequence is synthesized)
aagtgtaggcctgcctgtgttctcatgtggatttagaacaggaggatattctatgtgtatgtatatgtacattctaatgtgtgtctcttcttattcaacattaatccttactagaaccac

SEQ ID NO: 281353 - DNA, 120 bp, Artificial Sequence
  ENSG00000129566_68 (sequence is synthesized)
aagaaagtgaatgaaatctttagtaggtactcttttgaaactaggttttagaattcttgcatcactcgcgggccctaggaccctaggatgccattcttgccaggaggaggaatgagagtg

SEQ ID NO: 281354 - DNA, 120 bp, Artificial Sequence
  ENSG00000129566_69 (sequence is synthesized)
atgttggccaacattcaatttgaacagagcatggaagacctttcagttcatcgggaaagaatgagggagggagaataagtcagtcatgcatcagggcatttagaaagagctatgtttctg

SEQ ID NO: 281355 - DNA, 76 bp, Artificial Sequence
  ENSG00000129566_70 (sequence is synthesized)
cagtcatgcatcagggcatttagaaagagctatgtttctgtcacagagacagcccttttctcagaactacccagag

SEQ ID NO: 281356 - DNA, 69 bp, Artificial Sequence
  ENSG00000129566_71 (sequence is synthesized)
gaactacccagatgagaggtgaggagccaagccattgaaagcggaacaaaccttctggttttcccaact

SEQ ID NO: 281357 - DNA, 120 bp, Artificial Sequence
  ENSG00000129566_72 (sequence is synthesized)
agccattgaaagcggaacaaaccttctggttttcccaacttctgacacgactttcaactttagtcaatatggtaattggcattctcagaagagatcacgaaagtgtcttactctctctca

SEQ ID NO: 281358 - DNA, 120 bp, Artificial Sequence
  ENSG00000129566_73 (sequence is synthesized)
aattgaaattcacaaagattaaaactaattgagaggtggcacaatcatagccatgaactctgattttcttaagtaaaaaaccttttttttttttttttgtttttgagatagagtctggct

SEQ ID NO: 281359 - DNA, 120 bp, Artificial Sequence
  ENSG00000129566_74 (sequence is synthesized)
caggcgtgagccattgtgcccggcccataaaagaactttattatatttctaaaattcaatcatatggaagaatctattgagcaggttagcctttgcttaactttcctcctctgttactcc

SEQ ID NO: 281360 - DNA, 120 bp, Artificial Sequence
  ENSG00000129566_75 (sequence is synthesized)
agccttagctggggtgttttgtagaattttcagagcatgggagacagacaactagagcttcctcctgcccttggcccatgcttttaggagagcaaaaggcaaaagattgaaaccactgac

SEQ ID NO: 281361 - DNA, 120 bp, Artificial Sequence
  ENSG00000129566_76 (sequence is synthesized)
tttagtttcctcaggccctttctttctgagggttaaagaagaaggaaatgtcttctgtggccaagaattcaaggacttgtaggagataagtgaaggctattacagggattttgtcctggt

SEQ ID NO: 281362 - DNA, 120 bp, Artificial Sequence
  ENSG00000129566_77 (sequence is synthesized)
ttggtaggtttctcttggagaaataccactacaccctggtctagaaatgagttttgaagacttggggagttaaagggcactgagttttactctcactgtaccctgattccaggttttaca

SEQ ID NO: 281363 - DNA, 120 bp, Artificial Sequence
  ENSG00000129566_78 (sequence is synthesized)
tggagaaataacctgagggactttatttctatccaatgccctggtttccatcctgaccagaggatgatgacatccgctgataggccatgcttctgtcttctcttatgtgcctcatgccaa

SEQ ID NO: 281364 - DNA, 120 bp, Artificial Sequence
  ENSG00000129566_79 (sequence is synthesized)
gcctcgaaatataccttctggaccatcatttccacatctaccttgtgactagaagtcctagttatggtattttgaaatttatgatccataatccttgccagaaatcctgcagcgaactat

SEQ ID NO: 281365 - DNA, 120 bp, Artificial Sequence
  ENSG00000129566_80 (sequence is synthesized)
ggcatggcatcatcctagtcattgatttcaatcttttgccttttgctcccctaaaatcttgggccaattgcaggaggaagctctatttgtctctcttccatgctctgaaaattatataaa

SEQ ID NO: 281366 - DNA, 120 bp, Artificial Sequence
  ENSG00000129566_81 (sequence is synthesized)
agcatcccagctaaggctggagtgaaggggttggggaaagttaagcaaaggctaacttgaccaataggctcaatagattcagtcttgttggccaggcccacttgaagggttttttgtttc

SEQ ID NO: 281367 - DNA, 120 bp, Artificial Sequence
  ENSG00000129566_82 (sequence is synthesized)
atcttggagaaggacagtgaggtcatggtataattgttatgagtaaagtcaagaacagcttctaggtaaaagtaattatgtacccaaaaggagttgaagggaaaatcaatttaggtttac

SEQ ID NO: 281368 - DNA, 120 bp, Artificial Sequence
  ENSG00000129566_83 (sequence is synthesized)
attaaacatccttcaagttcttatctttaaatggagtttcagtgtctcccaaaggctggatgagttttacagttataaccactggattgtgagaccataggacatttgaacaatcttttc

SEQ ID NO: 281369 - DNA, 120 bp, Artificial Sequence
  ENSG00000129566_84 (sequence is synthesized)
ttctacccatctagaaaagcatcttttttatataccaaatttttacacatatatccacatctgtttttgaaatctagagcagaggtactcaaagtttggttcatggactagtgccagttc

SEQ ID NO: 281370 - DNA, 120 bp, Artificial Sequence
  ENSG00000129566_85 (sequence is synthesized)
acaaattgttaatgttttataatgagataagtacggaagttgagagtaaccatttagaaactgtgtaggaatttaaaaagtaatatctgacaaatttaataataaaaatggaggcttgta

SEQ ID NO: 281371 - DNA, 120 bp, Artificial Sequence
  ENSG00000129566_86 (sequence is synthesized)
cagagaaatgcaggggagctgggtagagctcatgggcatatggtgcagggcagtcttcttttctagttggcttcctttttggtagagatgcaccttcagggctattgactggatctcttc

SEQ ID NO: 281372 - DNA, 120 bp, Artificial Sequence
  ENSG00000129566_87 (sequence is synthesized)
atttctgtggaatgatgaagttattactttgcctggttgttgtatttgatttataaggtctgccattgactacaccaaagtaaacagtggtacctgctttgagtaatgttggcatcatag

SEQ ID NO: 281373 - DNA, 120 bp, Artificial Sequence
  ENSG00000129566_88 (sequence is synthesized)
atcattataccagatgtagttaggtgatgtacaagtttttatcaacatatgacaaaagtaccttctctctcattgtactcatatcgatatctctgtaactcattccaaaaaaggtaggac

SEQ ID NO: 281374 - DNA, 120 bp, Artificial Sequence
  ENSG00000129566_89 (sequence is synthesized)
cacagtcttcacctgaaccgaattctacaggaggacttaggggtgctgacaagtctggattgggctcctgatggtcactttctcatcttggccaaagcagatttgaagttactttgcatg

SEQ ID NO: 281375 - DNA, 120 bp, Artificial Sequence
  ENSG00000129595_0 (sequence is synthesized)
gcttccccggcggctcccgggcgctgactctcccgggcttttccgcctttctcgctcccgccccgccgggcggttcggcggccggtccccggaccccgccgggagctgctcgtctcaccc

SEQ ID NO: 281376 - DNA, 120 bp, Artificial Sequence
  ENSG00000129595_1 (sequence is synthesized)
ctcgtctcaccctcgccacggcgcggacaataaattaatgcatcgcgcttgagtggagggggcggctgggcgcctcggtggtagctttctctcctggctggagacgaccacaaccgacat

SEQ ID NO: 281377 - DNA, 120 bp, Artificial Sequence
  ENSG00000129595_2 (sequence is synthesized)
gggctgtttctgcgctgttccggaagaattttactgcgaagttttgctcctggatgaatccaagttaacccttaccacccagcagcagggcatcaagaagtcaacgaaaggttccgttgt

SEQ ID NO: 281378 - DNA, 120 bp, Artificial Sequence
  ENSG00000129595_3 (sequence is synthesized)
ccttgaccacgtattccatcacgtaaaccttgtggagatagattattttgggctacgttactgtgacagaagccatcagacgtattggctggatcctgcaaaaacccttgctgaacacaa

SEQ ID NO: 281379 - DNA, 120 bp, Artificial Sequence
  ENSG00000129595_4 (sequence is synthesized)
agaactgatcaacactggacctccatatactttgtattttggtattaaattctatgctgaagatccatgtaaacttaaagaagaaataaccagatatcagtttttcttgcaggtgaagca

SEQ ID NO: 281380 - DNA, 120 bp, Artificial Sequence
  ENSG00000129595_5 (sequence is synthesized)
agatgtccttcagggccgtctgccctgtcccgtcaacactgctgctcagctgggagcgtatgccatccagtcggagcttggagattatgacccatataaacatactgcaggatatgtatc

SEQ ID NO: 281381 - DNA, 120 bp, Artificial Sequence
  ENSG00000129595_6 (sequence is synthesized)
tgagtaccggtttgttcctgatcagaaggaagaacttgaagaagccatagaaaggattcataaaactctaatgggtcagattccttctgaggctgagctgaattacttgaggactgccaa

SEQ ID NO: 281382 - DNA, 120 bp, Artificial Sequence
  ENSG00000129595_7 (sequence is synthesized)
atccctggagatgtatggcgttgacctccatcccgtctatggagaaaacaagtctgagtatttcttaggattaactccggttggtgttgttgtgtacaagaataaaaagcaagtggggaa

SEQ ID NO: 281383 - DNA, 120 bp, Artificial Sequence
  ENSG00000129595_8 (sequence is synthesized)
gtatttctggcctcggattacaaaggttcacttcaaggagactcaatttgaactcagagtactgggaaaagattgtaacgaaacctcattcttttttgaagctcggagtaaaactgcttg

SEQ ID NO: 281384 - DNA, 120 bp, Artificial Sequence
  ENSG00000129595_9 (sequence is synthesized)
caagcacctctggaagtgcagtgtggaacatcatacattttttagaatgccagaaaatgaatccaattcactgtcaagaaaactcagcaagtttggatccatacgttataagcaccgcta

SEQ ID NO: 281385 - DNA, 120 bp, Artificial Sequence
  ENSG00000129595_10 (sequence is synthesized)
cagtggcaggacagctttgcaaatgagccgagatctttctattcagcttccccggcctgatcagaatgtgacaagaagtcgaagcaagacttaccctaagcgaatagcacaaacacagcc

SEQ ID NO: 281386 - DNA, 120 bp, Artificial Sequence
  ENSG00000129595_11 (sequence is synthesized)
agctgaatcaaacagcatcagtaggataactgcaaacatggaaaatggagaaaatgaaggaacaattaaaattattgcaccttcaccagtaaaaagctttaagaaagcaaagaatgaaaa

SEQ ID NO: 281387 - DNA, 120 bp, Artificial Sequence
  ENSG00000129595_12 (sequence is synthesized)
tagccctgatacccaaagaagcaaatctcatgcaccgtgggaagaaaatggcccccagagtggactctacaattctcccagtgatcgcactaagtcgccaaagttcccttacacgcgtcg

SEQ ID NO: 281388 - DNA, 120 bp, Artificial Sequence
  ENSG00000129595_13 (sequence is synthesized)
ccgaaacccctcctgtggaagtgacaatgattctgtacagcctgtgaggaggaggaaagcccataacagtggtgaagattcagatcttaagcaaaggaggaggtcacgttcacgctgtaa

SEQ ID NO: 281389 - DNA, 120 bp, Artificial Sequence
  ENSG00000129595_14 (sequence is synthesized)
caccagcagtggtagtgaatcagaaaattctaatagagaataccggaaaaagagaaacagaatacggcaggagaatgatatggttgattcagcgcctcagtgggaagctgtattaaggag

SEQ ID NO: 281390 - DNA, 120 bp, Artificial Sequence
  ENSG00000129595_15 (sequence is synthesized)
acaaaaggaaaaaaaccaagccgaccccaacaacaggcgatccagacacagatctcgttcgagaagccccgatatccaagcaaaagaagagttatggaagcacattcaaaaagaacttgt

SEQ ID NO: 281391 - DNA, 120 bp, Artificial Sequence
  ENSG00000129595_16 (sequence is synthesized)
ggatccatccggattgtccgaagaacaattaaaagagattccatacactaaaatagagacacaaggtgacccaatccgcatcaggcattctcattcgccacgaagttaccgccagtatcg

SEQ ID NO: 281392 - DNA, 120 bp, Artificial Sequence
  ENSG00000129595_17 (sequence is synthesized)
caggtcccagtgttcagatggggagcgatcagttctctcggaagtgaattcaaaaacagatcttgtaccaccacttccggtgacccgttcttcggatgctcagggttctggggatgctac

SEQ ID NO: 281393 - DNA, 120 bp, Artificial Sequence
  ENSG00000129595_18 (sequence is synthesized)
agttcatcagagaagaaatgggtctaaagatagcctgatggaagaaaaacctcagacatctacaaacaacctggctggaaaacacacagcaaaaacaataaaaactatacaagcttcccg

SEQ ID NO: 281394 - DNA, 89 bp, Artificial Sequence
  ENSG00000129595_19 (sequence is synthesized)
acttttgaaactgtgaaataggtatcttaattcaaatctcagacctgcaagtatttcttcagcatgagaaaatacagagatgttatcac

SEQ ID NO: 281395 - DNA, 120 bp, Artificial Sequence
  ENSG00000129595_20 (sequence is synthesized)
agctcaccgcagcctccacttactgggttaagcgattctcctgtctcaggctcccgagcagctgggattacaggcgtgcaccacaacacccggctaattctttttgtatttttagtagag

SEQ ID NO: 281396 - DNA, 72 bp, Artificial Sequence
  ENSG00000129595_21 (sequence is synthesized)
atggtttaactacagcacagttgtgctgaaggacctttttgttttaactggaagaataagtattttgtaaaa

SEQ ID NO: 281397 - DNA, 120 bp, Artificial Sequence
  ENSG00000129595_22 (sequence is synthesized)
acctttttgttttaactggaagaataagtattttgtaaaaattcacttgataccacattttcatttctggaacaggatagcaatcattcatttctatcttgtgtctgtgtccaccacaac

SEQ ID NO: 281398 - DNA, 120 bp, Artificial Sequence
  ENSG00000129595_23 (sequence is synthesized)
caagaccagatgcatctgatgaacattctggaattctgaactgcagctagcctgctgtgcaatagtacaagtgggaggacgtcttcccagggctgggctggttctcaactagtgcccaga

SEQ ID NO: 281399 - DNA, 120 bp, Artificial Sequence
  ENSG00000129595_24 (sequence is synthesized)
tgcaaaaggactgaggcatcactttcagactgcatatatttttattcatataaagttctttataatactttattttgtggtgttaagttccaccagttatttacaaatgatgtaaaaagc

SEQ ID NO: 281400 - DNA, 120 bp, Artificial Sequence
  ENSG00000129595_25 (sequence is synthesized)
tttaagtgttgttaatttctaaagtgttcttgcgttttcagaagtgtaagtggatctcagttgatctgtcaccccaaacctcaaatgatccatccaccctgcttggccatctaattcacc

SEQ ID NO: 281401 - DNA, 120 bp, Artificial Sequence
  ENSG00000129595_26 (sequence is synthesized)
tgctctccccagtgactattttgtacctttcctctccatagatgactttgcaatctacagggaaaatacttatgcaggacatcttatatctcccccttaccacgtacagttctctccaca

SEQ ID NO: 281402 - DNA, 120 bp, Artificial Sequence
  ENSG00000129595_27 (sequence is synthesized)
gctgccagcagccctaacctttttgtctctccacctgtgctttggatgctcttctcccagccttttcaggatctttgtctgtcctcctatattaatgtattcaattattctctcagctag

SEQ ID NO: 281403 - DNA, 120 bp, Artificial Sequence
  ENSG00000129595_28 (sequence is synthesized)
atccttgctacttggttttaaatttaagactaagattaaacaaaactatctttcacaaccacaaaccccctcccgccaagcaactaagattttcctctcattctcagccagttttcttgc

SEQ ID NO: 281404 - DNA, 120 bp, Artificial Sequence
  ENSG00000129595_29 (sequence is synthesized)
aagcagtatctttagtcattgccctcaattcatctaatccctatcttaagctatctctaacatggatctttccctctactccactaatatcaatcactgtgttacttaatcccagggaga

SEQ ID NO: 281405 - DNA, 120 bp, Artificial Sequence
  ENSG00000129595_30 (sequence is synthesized)
atttttaggacattcttttgcttctttaatataatcctattttgctcctaccactgaccatcctttctggcttatcatgctttaccttgccattaattagtggagtttctcaaacttcag

SEQ ID NO: 281406 - DNA, 120 bp, Artificial Sequence
  ENSG00000129595_31 (sequence is synthesized)
accctaggccctcttcctctaccaccagcagatctcatttatacccatggccttaaggtttatttctgtagtttagactactgagtaatgtgctactgcaaaaagaccatttgggtttct

SEQ ID NO: 281407 - DNA, 120 bp, Artificial Sequence
  ENSG00000129595_32 (sequence is synthesized)
caaaggtaatttaaaaattcagctgtttaaatgctgctccccagctgaatctagggtcattatgctcatcagtgtgcaagctggacacctagcagttatggacacctccactattaccac

SEQ ID NO: 281408 - DNA, 120 bp, Artificial Sequence
  ENSG00000129595_33 (sequence is synthesized)
gtctagttggctctgtcatccaactataaacgatcttatttcactaattttactagtccaagctggtctcttgtctagacaacaataagcaacctagttcaactaccttttcttgcaaat

SEQ ID NO: 281409 - DNA, 120 bp, Artificial Sequence
  ENSG00000129595_34 (sequence is synthesized)
ctgattttccaccatggatttatcttgctttaataaagccagagggagcctgaagtggtctggcttctttacctacctcttcagcctcattttgtaacactctcacctcccataatagcc

SEQ ID NO: 281410 - DNA, 120 bp, Artificial Sequence
  ENSG00000129595_35 (sequence is synthesized)
atcttacaagcctcagtaaggactcagttctaaaacagggcactgaagagggaaagcagccaaaactgtctcaaaagtaagtggactaacggtatcttttttctagcccaagcctctgta

SEQ ID NO: 281411 - DNA, 120 bp, Artificial Sequence
  ENSG00000129595_36 (sequence is synthesized)
tatgtcattcccccagttttgccttgtgaaaaatatgacacatacctttagtctcaactctttctcaggtttccctaagaaaatcctatcacggaactcatctcatagtgaagttttaca

SEQ ID NO: 281412 - DNA, 120 bp, Artificial Sequence
  ENSG00000129595_37 (sequence is synthesized)
tttgtgatgacattccctccacttatctatgtttccaaagggaagaactgtgttgtgctcatcatcgtgttctcagctcctagtacagtgctttcaataaattttttgaatacctctata

SEQ ID NO: 281413 - DNA, 120 bp, Artificial Sequence
  ENSG00000129595_38 (sequence is synthesized)
atccattctaattcttcaattgtgttccagacagtgctttaatttgtctttacattttaaacaaaactaggtgacagtagcgaaagaggaagaaaagtgtgcattaaagctacttattct

SEQ ID NO: 281414 - DNA, 120 bp, Artificial Sequence
  ENSG00000129595_39 (sequence is synthesized)
acactataatcactatcatctcttattagccacctctttgtacttggtaggtacaagggggcttttcctgattaatgtcagttttaaaataaattcttttctgagattctcactgataaa

SEQ ID NO: 281415 - DNA, 120 bp, Artificial Sequence
  ENSG00000129595_40 (sequence is synthesized)
ccaccattgtgagcctgagtttcctcatttaaagggtgtccagacctccagacctagaaagggcagagaacttggaaatctgagtttgaacaaggcacttcagaaggtctctcataatac

SEQ ID NO: 281416 - DNA, 120 bp, Artificial Sequence
  ENSG00000129595_41 (sequence is synthesized)
acttctggatgaagtgatattggggctgggattgcagactctgctttctccctgtttatacagggtcagcacatgaagtgatgtggacagagagccccacctccttggctgctgtggttg

SEQ ID NO: 281417 - DNA, 120 bp, Artificial Sequence
  ENSG00000129595_42 (sequence is synthesized)
caattggagcccttgtctgggacttttctatattggagtcaatagggaaaattgctgttgcttctatgttcctggcactagaagaatagctgaggatggctgactttatctcttgtagag

SEQ ID NO: 281418 - DNA, 120 bp, Artificial Sequence
  ENSG00000129595_43 (sequence is synthesized)
aaagcctgtctgcaatagtaagaatgaggccaacacaaagagagacagggaagataggggagaaatggtgatattgaggtctggatctcagtctgtctgacatcagtgctaatgaaccac

SEQ ID NO: 281419 - DNA, 120 bp, Artificial Sequence
  ENSG00000129595_44 (sequence is synthesized)
tccttttaaaatttaagttgatttgtatttgtcatttatatcctgactaatacagccttcagaaagaaatattagaaaaagcactgtcatgaactattacttcattaacataaaaacaga

SEQ ID NO: 281420 - DNA, 120 bp, Artificial Sequence
  ENSG00000129595_45 (sequence is synthesized)
tcattttggtatgatgataataaaagtagcaacaatccattaagaatctactatatgttaggcactgcagtaagtgcattacatatttttttcatttaatcttcacaacaacctatgtag

SEQ ID NO: 281421 - DNA, 120 bp, Artificial Sequence
  ENSG00000129595_46 (sequence is synthesized)
tacctgtatcagtttgctataactgtatgactaactgccctgaaactgagtggcttgaaacaataatttgtttaactcacaagtctttgtcttggttgggtaactgtggtctggaccagg

SEQ ID NO: 281422 - DNA, 120 bp, Artificial Sequence
  ENSG00000129595_47 (sequence is synthesized)
ctcaggtgatcataaatgggcttgctaacgagtctgcggtaagttggcagatttctaggacttactagtctagggtggcctcattcataggtgtagagtttggtcacctgggcacacaag

SEQ ID NO: 281423 - DNA, 120 bp, Artificial Sequence
  ENSG00000129595_48 (sequence is synthesized)
agtggatattgcctctccagcaggctaaccctagctagtttcaagcaggtgccaaatgagtgagtggaggcatgtgaatcctctcatggctcactcttggcactggcacgcaactacttc

SEQ ID NO: 281424 - DNA, 120 bp, Artificial Sequence
  ENSG00000129595_49 (sequence is synthesized)
tgaagcattttcttggcccagtttcaaggaatgaggaaatagtctctattcttaatgagaggaactgaaaagtcaaggagagtggatatagaaaggcatggaaacaatgggaacacaact

SEQ ID NO: 281425 - DNA, 120 bp, Artificial Sequence
  ENSG00000129595_50 (sequence is synthesized)
attctattatgaaaggtattatgtgcatacacttcaaaagttaagaaacttactcaaggtcataaagctagaaagcagcagagacaggatttgggccttaatcttctgaccgaaaatctc

SEQ ID NO: 281426 - DNA, 120 bp, Artificial Sequence
  ENSG00000129595_51 (sequence is synthesized)
attctctttcaacacttctttctaatattgctgattgatctgtgcagtccagatgtcacagtgtaattagtttctaaaataaatctgttcttagattacttttgaatgacttctaagtta

SEQ ID NO: 281427 - DNA, 120 bp, Artificial Sequence
  ENSG00000129595_52 (sequence is synthesized)
ttataaaaaagttctttgttgtaataaaggtattaactttccatgagtatattcttgacccacacccataagcatttttgctcatatttgtatccacaataaaatgaagttcatattttc

SEQ ID NO: 281428 - DNA, 120 bp, Artificial Sequence
  ENSG00000129595_53 (sequence is synthesized)
acaccatgtcttattgcatcatccatcagtcatcatcttctgatattcacaagaaaagtttctagaatgataaattcttcacctgtgcatttaatattctaatactcctctttgtatagt

SEQ ID NO: 281429 - DNA, 120 bp, Artificial Sequence
  ENSG00000129595_54 (sequence is synthesized)
ttaactgattttaactctaaaatgctcatcgaaaacttcagtaatttaaaaagtgtaaaggagaaagtaatttcaatatgtaaagttaccattttttggtcaatggcctttcagacatct

SEQ ID NO: 281430 - DNA, 120 bp, Artificial Sequence
  ENSG00000129595_55 (sequence is synthesized)
acataggttcatgtatttatgatattacatagtggaatcattctgtaaatactagattttgcagtctttttttttttcagtcaccagtatcttgtgaaattaatctttcagctataaata

SEQ ID NO: 281431 - DNA, 120 bp, Artificial Sequence
  ENSG00000129595_56 (sequence is synthesized)
tgtttaatcacaacaatttttaaccataaatgcattaatatattcttcaatgtttcctctgtctgaagtatcccagttcttcacggttataagccaagtcctattcaggccatagcaacg

SEQ ID NO: 281432 - DNA, 120 bp, Artificial Sequence
  ENSG00000129595_57 (sequence is synthesized)
agtctggaaatagtgatgatgccagtgtgaaacctttgagggtatggtgataacactgcatgcatttctgagagtagacacgctcccctagtaggattttcaattcatggcctatagcac

SEQ ID NO: 281433 - DNA, 120 bp, Artificial Sequence
  ENSG00000129595_58 (sequence is synthesized)
tgaagttttaatttcattatagttattttggttaaattctttacaccggttaacattgctttattccctgttatgtaacacttcctcttgaatatacttggtttcagatctattatagtt

SEQ ID NO: 281434 - DNA, 82 bp, Artificial Sequence
  ENSG00000129595_59 (sequence is synthesized)
atgtagaattaatctggtcacaaaaaaatgtttgcctaaaggatccgtttcagtgagtgtagaagcagaagtcagctgctga

SEQ ID NO: 281435 - DNA, 120 bp, Artificial Sequence
  ENSG00000129595_60 (sequence is synthesized)
atccgtttcagtgagtgtagaagcagaagtcagctgctgaattgcagtcagagaaagaggccctctatgttgtattagcatgcactagaaggctctccaacctgattgtagagtccttca

SEQ ID NO: 281436 - DNA, 120 bp, Artificial Sequence
  ENSG00000129595_61 (sequence is synthesized)
ttttcagattctgctgaagtagatggtcagagagtgcttgttataacattaggaagggcaatgtgtttggcacattatgagagtactgattctactagggatttcaaagcacaattatat

SEQ ID NO: 281437 - DNA, 120 bp, Artificial Sequence
  ENSG00000129595_62 (sequence is synthesized)
attgaaattatcaaggagctttgggtaaaggctctcatgtgttttagatgatagtgttgacattgtgactgttatttctaagaataaagcttgatcaaagtgtggtgtgtctaatttgat

SEQ ID NO: 281438 - DNA, 120 bp, Artificial Sequence
  ENSG00000129595_63 (sequence is synthesized)
agattccatacactaaaatagagtgagtgcctttcagaatcttctcaccaaagctttattagtgcttgacacaaggtgacccaatccgcatcaggcattctcattcgccacgaagttacc

SEQ ID NO: 281439 - DNA, 120 bp, Artificial Sequence
  ENSG00000129596_0 (sequence is synthesized)
acagatctgaacctgatttgtgtgtgcaccgcgtctccagcgatcccggatccactgcgctgccaggggcctgggggtgggtctcttgctgtctctgcgacgacatccttacgtttcggc

SEQ ID NO: 281440 - DNA, 120 bp, Artificial Sequence
  ENSG00000129596_1 (sequence is synthesized)
actctaatgctgggtttgtgcgtgtgtgtctgcttagcggtctagcgggctgttaggctccctcgcccccagctccttggctcgctcagctcctccaccgcagcccagcagtgagacgcg

SEQ ID NO: 281441 - DNA, 120 bp, Artificial Sequence
  ENSG00000129596_2 (sequence is synthesized)
cgcgcagccagctccccacgagatggaacagaccgaagtgctgaagccacggaccctggctgatctgatccgcatcctgcaccagctctttgccggcgatgaggtcaatgtagaggaggt

SEQ ID NO: 281442 - DNA, 120 bp, Artificial Sequence
  ENSG00000129596_3 (sequence is synthesized)
gcaggccatcatggaagcctacgagagcgaccccaccgagtgggcaatgtacgccaagttcgaccagtacaggtatacccgaaatcttgtggatcaaggaaatggaaaatttaatctgat

SEQ ID NO: 281443 - DNA, 120 bp, Artificial Sequence
  ENSG00000129596_4 (sequence is synthesized)
gattctctgttggggtgaaggacatggcagcagtattcatgatcataccaactcccactgctttctgaagatgctacagggaaatctaaaggagacattatttgcctggcctgacaaaaa

SEQ ID NO: 281444 - DNA, 120 bp, Artificial Sequence
  ENSG00000129596_5 (sequence is synthesized)
atccaatgagatggtcaagaagtctgaaagagtcttgagggaaaaccagtgtgcctacatcaatgattccattggcttacatcgagtagagaacatcagccatacggaacctgctgtgag

SEQ ID NO: 281445 - DNA, 120 bp, Artificial Sequence
  ENSG00000129596_6 (sequence is synthesized)
acttgtacagtccaccttttgatacatgccatgcctttgatcaaagaacaggacataaaaacaaagtcacaatgacattccatagtaaatttggaatcagaactccaaatgcaacttcgg

SEQ ID NO: 281446 - DNA, 120 bp, Artificial Sequence
  ENSG00000129596_7 (sequence is synthesized)
gctcgctggagaacaactaaggggcaccaaaccctctgaggttttactttaaggttcgctgtatgtttgccttggacaaaaaggctacctaccacgtgctatccagtaatatacttaaat

SEQ ID NO: 281447 - DNA, 120 bp, Artificial Sequence
  ENSG00000129596_8 (sequence is synthesized)
aagccaatacttagatctactgtaaggcagatgctaattataaggcattaagtaagcaaatagtgccctcagctactgcagaagaaaagtcccactgaggaaaagaaagtcttgtgattt

SEQ ID NO: 281448 - DNA, 120 bp, Artificial Sequence
  ENSG00000129596_9 (sequence is synthesized)
ttaaaggcaagttttcaagtgctctcatagttctatcctctaattccattaaatccatactaggagcgtcagtgagggttttcatagcttttggaaatactttggtctctgaactgtaat

SEQ ID NO: 281449 - DNA, 120 bp, Artificial Sequence
  ENSG00000129596_10 (sequence is synthesized)
tagcaagaagtaaaaacagaaacgtcaaacgtcaaatgtttgctttgttacctggaggactaaatgtagatgtctttagtatactttgtatgttcttaatattggaagataattttgtga

SEQ ID NO: 281450 - DNA, 120 bp, Artificial Sequence
  ENSG00000129596_11 (sequence is synthesized)
atctgtagattttattttttcagtcttaccttacaaatttcttttctatgaataatagaggaacttacggcactctgccatttgttaatgaaaggaagtgcagaggatttagaaaagtac

SEQ ID NO: 281451 - DNA, 120 bp, Artificial Sequence
  ENSG00000129596_12 (sequence is synthesized)
atgatccccagaccacaacaaaccaaaacataaactcatgtctgtgtcccatggtcatagtcaaagattttgtactgctaaaattaccaaataatttaaataaagtggatttgaacacaa

SEQ ID NO: 281452 - DNA, 120 bp, Artificial Sequence
  ENSG00000129596_13 (sequence is synthesized)
cgtggtttgcagtttgttgttggtggtggcagtggtggtggttggttgtggtatacccgaaatcttgtggatcaaggaaatggaaaatttaatctgatgattctctgttggggtgaagga

SEQ ID NO: 281453 - DNA, 120 bp, Artificial Sequence
  ENSG00000129596_14 (sequence is synthesized)
agatctgaacctgatttgtgtgtgcaccgcgtctccagcgatcccggatccactgcgctgccaggggcctgggggtatacccgaaatcttgtggatcaaggaaatggaaaatttaatctg

SEQ ID NO: 281454 - DNA, 120 bp, Artificial Sequence
  ENSG00000129596_15 (sequence is synthesized)
cctagcgctgtgaaggattctgttctctgactttgggagggccagtgcagaagaatcaagacagaatatgctcccgtgtgggccaggctgtgaattctttgaaagaagctgcagagaagc

SEQ ID NO: 281455 - DNA, 120 bp, Artificial Sequence
  ENSG00000129596_16 (sequence is synthesized)
attaggatccttctgcaggaactcagtttactgtgaattgaaggtatacccgaaatcttgtggatcaaggaaatggaaaatttaatctgatgattctctgttggggtgaaggacatggca

SEQ ID NO: 281456 - DNA, 120 bp, Artificial Sequence
  ENSG00000129625_0 (sequence is synthesized)
actaggaacagccccgagcggcgagacggtccccgccatgtctgcggccatgagggagaggttcgaccggttcctgcacgagaagaactgcatgactgaccttctggccaagctcgaggc

SEQ ID NO: 281457 - DNA, 120 bp, Artificial Sequence
  ENSG00000129625_1 (sequence is synthesized)
caaaaccggcgtgaacaggagcttcatcgctcttggtgtcatcggactggtggccttgtacctggtgttcggttatggagcctctctcctctgcaacctgataggatttggctacccagc

SEQ ID NO: 281458 - DNA, 120 bp, Artificial Sequence
  ENSG00000129625_2 (sequence is synthesized)
ctacatctcaattaaagctatagagagtcccaacaaagaagatgatacccagtggctgacctactgggtagtgtatggtgtgttcagcattgctgaattcttctctgatatcttcctgtc

SEQ ID NO: 281459 - DNA, 120 bp, Artificial Sequence
  ENSG00000129625_3 (sequence is synthesized)
atggttccccttctactacatgctgaagtgtggcttcctgttgtggtgcatggccccgagcccttctaatggggctgaactgctctacaagcgcatcatccgtcctttcttcctgaagca

SEQ ID NO: 281460 - DNA, 120 bp, Artificial Sequence
  ENSG00000129625_4 (sequence is synthesized)
cgagtcccagatggacagtgtggtcaaggaccttaaagacaaggccaaagagactgcagatgccatcactaaagaagcgaagaaagctaccgtgaatttactgggtgaagaaaagaagag

SEQ ID NO: 281461 - DNA, 120 bp, Artificial Sequence
  ENSG00000129625_5 (sequence is synthesized)
cacctaaaccagactggatggaaacttcctgccctctctgtaccttcctactggagcttgatgttatattagggactgtggtataattattttaataatgttgccttggaaacatttttg

SEQ ID NO: 281462 - DNA, 120 bp, Artificial Sequence
  ENSG00000129625_6 (sequence is synthesized)
agatattaaagattggaatgtgttgtaagtttctttgcttacttttactgtctatatatatagggagcactttaaacttaatgcagtgggcagtgtccacgtttttggaaaatgtatttt

SEQ ID NO: 281463 - DNA, 120 bp, Artificial Sequence
  ENSG00000129625_7 (sequence is synthesized)
gcctctgggtaggaaaagatgtatgttgctatcctgcaggaaatataaacttaaaataaaattatataccccacaggctgtgtactttactgggctctccctgcacgcattttctctgta

SEQ ID NO: 281464 - DNA, 120 bp, Artificial Sequence
  ENSG00000129625_8 (sequence is synthesized)
gttacatttaggataatctttatggttctacttcctgtaatgtacaattttatataattctgaaatgtttttaatgtatttgtgcacatgtacatatggaaatgttactgtctgactaca

SEQ ID NO: 281465 - DNA, 120 bp, Artificial Sequence
  ENSG00000129625_9 (sequence is synthesized)
acatgcatcatgctcatggggagggagcaggggaaggttgtatgtgtcatttataacttctgtacagtaagaccacctgccaaaagctggaggaaccattgtgctggtgtggtctactaa

SEQ ID NO: 281466 - DNA, 120 bp, Artificial Sequence
  ENSG00000129625_10 (sequence is synthesized)
ataatactttaggaaatacgtgattaatatgcaagtgaacaaagtgagaaatgaaatcgaatggagattggcctggttgtttccgtagtatatggcatatgaataccaggatagctttat

SEQ ID NO: 281467 - DNA, 84 bp, Artificial Sequence
  ENSG00000129625_11 (sequence is synthesized)
ttccgtagtatatggcatatgaataccaggatagctttataaagcagttagttagttagttactcactctagtgataaatcggg

SEQ ID NO: 281468 - DNA, 120 bp, Artificial Sequence
  ENSG00000129625_12 (sequence is synthesized)
aatactgtcttatctgctataaactttacatatttgtctattgtcaagatgctacaatggaaaccatttctggttttatcttcaaagcggagaaacatgttgatttagtcttctttccca

SEQ ID NO: 281469 - DNA, 120 bp, Artificial Sequence
  ENSG00000129625_13 (sequence is synthesized)
atcttcttttttaaaccagtttaaggaacttctgaagatttgtccacctctgattacatgtatgttcttgtttgtatcattagcaacaacatgctaatgacgacacctagctctaagagc

SEQ ID NO: 281470 - DNA, 120 bp, Artificial Sequence
  ENSG00000129625_14 (sequence is synthesized)
aattctgggagaatgaaaggaagtataaagtaacccataatctgcttggcaatagttaagtcaatctatcttcagtttttctctggcctttaaggtcaaacacaagaggcttccctagtt

SEQ ID NO: 281471 - DNA, 120 bp, Artificial Sequence
  ENSG00000129625_15 (sequence is synthesized)
tacaagtcagagtcacttgtagtccatttaaatgccctcatccgtattctttgtgttgataagctgcacatgactacatagtaagtacagaacagtaaagttaaaacggatgtctccatt

SEQ ID NO: 281472 - DNA, 120 bp, Artificial Sequence
  ENSG00000129625_16 (sequence is synthesized)
gatctgccaaatcgttatagagagcaatttgtctggactagaaaatctgagttttacaccatactgttaagagtccttttgaattaaactcgactaaaacaagtgtataactaaactaac

SEQ ID NO: 281473 - DNA, 120 bp, Artificial Sequence
  ENSG00000129625_17 (sequence is synthesized)
aagattaaatatccagccagtacagtattttttaaggcaaataaagatgattagctcaccttgagataacaatcaggtaagatcataacaatgtctcatgatgtaaaaaatattaaagat

SEQ ID NO: 281474 - DNA, 120 bp, Artificial Sequence
  ENSG00000129625_18 (sequence is synthesized)
atcaatactaagtgacagtatcactctaatataatatggatcagagcatttattttggggaggaaaacagtggtgattaccggcattttattaaacttaaaactttgtagaaagcaaaca

SEQ ID NO: 281475 - DNA, 120 bp, Artificial Sequence
  ENSG00000129625_19 (sequence is synthesized)
aaattgttcttgggagaaaatcaacttttagattaaaaaaattttaagtatctaggagtatttaaatccttttcccataaataaaagtacagttttcttggtggcagaatgaaaatcagc

SEQ ID NO: 281476 - DNA, 120 bp, Artificial Sequence
  ENSG00000129625_20 (sequence is synthesized)
aacttctagcatatagactatataatcagattgacagcatatagaatatattatcagacaagatgaggaggtacaaaagttactattgctcataatgacttacaggctaaaattagtttt

SEQ ID NO: 281477 - DNA, 120 bp, Artificial Sequence
  ENSG00000129625_21 (sequence is synthesized)
aaaatactatattaaattctgaatgcaatttttttttgttcccttgagaccaaaatttaagttaactgttgctggcagtctaagtgtaaatgttaacagcaggagaagttaagaattgag

SEQ ID NO: 281478 - DNA, 120 bp, Artificial Sequence
  ENSG00000129625_22 (sequence is synthesized)
cagttctgttgcatgatttcccaaatgaaatactgccttggctagagtttgaaaaactaattgagcctgtgcctggctagaaaacaagcgtttatttgaatgtgaatagtgtttcaaagg

SEQ ID NO: 281479 - DNA, 120 bp, Artificial Sequence
  ENSG00000129625_23 (sequence is synthesized)
tatgtagttacagaattcctaccaaacagcttaaattcttcaagaaagaattcctgcagcagttattcccttacctgaaggcttcaatcatttggatcaacaactgctactctcgggaag

SEQ ID NO: 281480 - DNA, 120 bp, Artificial Sequence
  ENSG00000129625_24 (sequence is synthesized)
actcctctactcacagctgaagaaaatgagcacacccttcacactgttatcacctatcctgaagatgtgatacactgaatggaaataaatagatgtaaataaaattgagttctcatttaa

SEQ ID NO: 281481 - DNA, 120 bp, Artificial Sequence
  ENSG00000129625_25 (sequence is synthesized)
ctcttggacattgttgtatttcaaataaaccacaaatcgccattttccaccgggtcactgggcagaattcacattgcagctgtcgtcctgcataccatcgtccgttaaacagagaaaggg

SEQ ID NO: 281482 - DNA, 120 bp, Artificial Sequence
  ENSG00000129625_26 (sequence is synthesized)
gttgctgcgcaaagcgccggggccccctgcgggaggtaggagaggcacaatggtggggctgcctggtatccccagacttcaaggcatagcccagcggacgcgcaggcccagctttcgtgt

SEQ ID NO: 281483 - DNA, 120 bp, Artificial Sequence
  ENSG00000129625_27 (sequence is synthesized)
ggtttgtttttctcgctcctttaatcgagtcgagaggaaaactcctacaacaggcccagcctcgcggtgtgggcggcggctgtcccgcgtgaacggctctcatgctgcccgacccacttc

SEQ ID NO: 281484 - DNA, 120 bp, Artificial Sequence
  ENSG00000129625_28 (sequence is synthesized)
acatgctgaaggtgtggtctggactagggtttctccttccccgctgcctgctgtagtagtggtcgtggtggcccatcttctccctcctctcggagttcttgccaaaggaggagccagtct

SEQ ID NO: 281485 - DNA, 120 bp, Artificial Sequence
  ENSG00000129625_29 (sequence is synthesized)
gggagaggactcgggaaaggtggagtcggagacagacgggacaagcagcatattcagggatcaggctggcctcccggaaagcgtgggcatcggaggaccccgcgggggctgcccaggctg

SEQ ID NO: 281486 - DNA, 120 bp, Artificial Sequence
  ENSG00000129625_30 (sequence is synthesized)
agggtcgcggggctggagggcagctgcggcgccgggcgctggcagctggaagggccagcgctgacgtatgtctgccccgcggcccggcgccctattcctgctgtcctgcgcggtgggcgc

SEQ ID NO: 281487 - DNA, 120 bp, Artificial Sequence
  ENSG00000129636_0 (sequence is synthesized)
gggggctgaggggctgccatggcggcggcgggccggctcccgagctcctgggccctcttctcgccgctcctcgcagggcttgcactactgggagtcgggccggtcccagcgcgggcgctg

SEQ ID NO: 281488 - DNA, 120 bp, Artificial Sequence
  ENSG00000129636_1 (sequence is synthesized)
cacaacgtcacggccgagctctttggggccgaggcctggggcacccttgcggctttcggggacctcaactccgacaagcagacggatctcttcgtgctgcgggaaagaaatgacttaatc

SEQ ID NO: 281489 - DNA, 120 bp, Artificial Sequence
  ENSG00000129636_2 (sequence is synthesized)
gtctttttggcagaccagaatgcaccctattttaaacccaaagtaaaggtatctttcaagaatcacagtgcattgataacaagtgtagtccctggggattatgatggagattctcaaatg

SEQ ID NO: 281490 - DNA, 120 bp, Artificial Sequence
  ENSG00000129636_3 (sequence is synthesized)
gatgtccttctgacatatcttcccaaaaattatgccaagagtgaattaggagctgttatcttctggggacaaaatcaaacattagatcctaacaatatgaccatactcaataggactttt

SEQ ID NO: 281491 - DNA, 120 bp, Artificial Sequence
  ENSG00000129636_4 (sequence is synthesized)
caagatgagccactaattatggatttcaatggtgatctaattcctgatatttttggtatcacaaatgaatccaaccagccacagatactattaggagggaatttatcatggcatccagca

SEQ ID NO: 281492 - DNA, 120 bp, Artificial Sequence
  ENSG00000129636_5 (sequence is synthesized)
ttgaccactacaagtaaaatgcgaattccacattctcatgcatttattgatctgactgaagattttacagcagatttattcctgacgacattgaatgccaccactagtaccttccagttt

SEQ ID NO: 281493 - DNA, 120 bp, Artificial Sequence
  ENSG00000129636_6 (sequence is synthesized)
gaaatatgggaaaatttggatggaaacttctctgtcagtactatattggaaaaacctcaaaatatgatggtggttggacagtcagcatttgcagactttgatggagatggacacatggat

SEQ ID NO: 281494 - DNA, 120 bp, Artificial Sequence
  ENSG00000129636_7 (sequence is synthesized)
catttactgccaggctgtgaagataaaaattgccaaaagagtaccatctacttagtgagatctgggatgaagcagtgggttccagtcctacaagatttcagcaataagggcacactctgg

SEQ ID NO: 281495 - DNA, 120 bp, Artificial Sequence
  ENSG00000129636_8 (sequence is synthesized)
ggctttgtgccatttgtggatgaacagcaaccaactgaaataccaattccaattacccttcatattggagactacaatatggatggctatccagacgctctggtcatactaaagaacaca

SEQ ID NO: 281496 - DNA, 120 bp, Artificial Sequence
  ENSG00000129636_9 (sequence is synthesized)
tctggaagcaaccagcaggcctttttactggagaacgtcccttgtaataatgcaagctgtgaagaggcgcgtcgaatgtttaaagtctactgggagctgacagacctaaatcaaattaag

SEQ ID NO: 281497 - DNA, 120 bp, Artificial Sequence
  ENSG00000129636_10 (sequence is synthesized)
gatgccatggttgccaccttctttgacatttacgaagatggaatcttggacattgtagtgctaagtaaaggatatacaaagaatgattttgccattcatacactaaaaaataactttgaa

SEQ ID NO: 281498 - DNA, 120 bp, Artificial Sequence
  ENSG00000129636_11 (sequence is synthesized)
gcagatgcttattttgttaaagttattgttcttagtggtctgtgttctaatgactgtcctcgtaagataacaccctttggagtgaatcaacctggaccttatatcatgtatacaactgta

SEQ ID NO: 281499 - DNA, 120 bp, Artificial Sequence
  ENSG00000129636_12 (sequence is synthesized)
gatgcaaatgggtatctgaaaaatggatcagctggccaactcagccaatccgcacatttagctctccaactaccatacaacgtgcttggtttaggtcggagcgcaaattttcttgaccat

SEQ ID NO: 281500 - DNA, 120 bp, Artificial Sequence
  ENSG00000129636_13 (sequence is synthesized)
cattccaaattcccagctaattgtcattccataccctcacaatgtccctcgaagttggagtgccaaactgtatcttacaccaagtaatattgttctgcttactgctatagctctcatcgg

SEQ ID NO: 281501 - DNA, 120 bp, Artificial Sequence
  ENSG00000129636_14 (sequence is synthesized)
tgtctgtgttttcatcttggcaataattggcattttacattggcaggaaaagaaagcagatgatagagaaaaacgacaagaagcccaccggtttcattttgatgctatgtgacttgcctt

SEQ ID NO: 281502 - DNA, 120 bp, Artificial Sequence
  ENSG00000129636_15 (sequence is synthesized)
taatattacataatggaatggctgttcacttgattagttgaaacacaaattctggcttgaaaaaataggggagattaaatattatttataaatgatgtatcccatggtaattattggaaa

SEQ ID NO: 281503 - DNA, 120 bp, Artificial Sequence
  ENSG00000129636_16 (sequence is synthesized)
gtattcaaataaatatggtttgaatatgtcacaaggtctttttttttaaagcactttgtatataaaaatttgggttctctattctgtagtgctgtacatttttgttcctttgtggaatgt

SEQ ID NO: 281504 - DNA, 120 bp, Artificial Sequence
  ENSG00000129636_17 (sequence is synthesized)
gttgcatgtactccagtgtttgtgtatttataatcttatttgcatcatgatgatggaaaaagttgtgtaaataaaaataattaaatgagcaggaatttttgtgtccacttgacttggtct

SEQ ID NO: 281505 - DNA, 120 bp, Artificial Sequence
  ENSG00000129636_18 (sequence is synthesized)
tgcttcttattctaatgatgcaaattatacttttgtgaatatatcacggagtcattaggcattcagcttcatcacagcaggtcaggggtctcactgatggcatacaatatagtgatcggg

SEQ ID NO: 281506 - DNA, 120 bp, Artificial Sequence
  ENSG00000129636_19 (sequence is synthesized)
tactctgacttggtagcacagtaagacagacttgccttaaactcctaattcaaccacttacaaagtcattgtttgaacttggctcttgtttaacctctgtaaacctcagttttcttgttt

SEQ ID NO: 281507 - DNA, 120 bp, Artificial Sequence
  ENSG00000129636_20 (sequence is synthesized)
attcagtggggctaatacttgagttactgtaaacattaaatgggatgatgtatgtgaagtgcttagcttggtgcctagcacagagtaagtggtcaatatgtggtagttgtcattattaat

SEQ ID NO: 281508 - DNA, 120 bp, Artificial Sequence
  ENSG00000129636_21 (sequence is synthesized)
attttagatgatcttattagacttatacatctaattatagaaatacatagacttgatagaattttattttcaggcatgaagaaatattctttggaaaagctaaatttttggtgattgaca

SEQ ID NO: 281509 - DNA, 120 bp, Artificial Sequence
  ENSG00000129636_22 (sequence is synthesized)
taaagatttacttgctcatattaactaaaaattatagtactctccaagaattaatgtgccctaaaaattttcctccaaaaacttatccttatcatgtgataatgaagaacatttgatttc

SEQ ID NO: 281510 - DNA, 120 bp, Artificial Sequence
  ENSG00000129636_23 (sequence is synthesized)
ttgaaaggaaactgctgtaggcagcatctgggaatgcaaatcttcaatcacatttctattctcaaacacttggagaagtctataatttacattcagacttcaatgcaaattttgtattgt

SEQ ID NO: 281511 - DNA, 120 bp, Artificial Sequence
  ENSG00000129636_24 (sequence is synthesized)
gaacttcacatttccaaaaagttactttaaaaagactttaagactgaaaaaaaaaagtttatcaatgctaataattttctagtatgcaaatggacatgtgatgcctataaaacacaaaaa

SEQ ID NO: 281512 - DNA, 120 bp, Artificial Sequence
  ENSG00000129636_25 (sequence is synthesized)
tttctctgaaaacaattttgttcttatttttttctttatagttcactgagattggcatgtgtttttactttgtatctaagcatgttaacatgtcttcttaataaatattccttattgaaa

SEQ ID NO: 281513 - DNA, 120 bp, Artificial Sequence
  ENSG00000129636_26 (sequence is synthesized)
acaatgcaaagttaaacaaaacaccagccgggtactcaggcctgggcccaccaaagaagaaataaagacataatgatatcttatagtgaaatcaaccttcagaaacaaaggtatttaaaa

SEQ ID NO: 281514 - DNA, 120 bp, Artificial Sequence
  ENSG00000129636_27 (sequence is synthesized)
ctccagggtcttcagagctattatagcttcaaaagatgcctattccataatagtattgtatgtgacatgtcaattccttaatgaaataaggagaaatttatgatgtgtttaaaaaatagt

SEQ ID NO: 281515 - DNA, 120 bp, Artificial Sequence
  ENSG00000129636_28 (sequence is synthesized)
gcttctgctcagacatcttcaggttatgtggcagcattcatatgcagcaaattgtgggcacaactataactttaatggcatgatttccgctcttcaaatttctagttattaaaaagtgaa

SEQ ID NO: 281516 - DNA, 120 bp, Artificial Sequence
  ENSG00000129636_29 (sequence is synthesized)
gatttatgttaatctgaagagaaagggattcccaaagctcattttcaaatgagctttctgttctctttctgttctcttcatggccattaatatagaaataaaggaatttactaaaaatgt

SEQ ID NO: 281517 - DNA, 120 bp, Artificial Sequence
  ENSG00000129636_30 (sequence is synthesized)
agcttccggccgttttagtgacagagctcagtcttcttggctgagaagtgcctgtcagttactgatgaagcctgtcaggcctggtgttgtttggaaagactcaggagctgctcggctgga

SEQ ID NO: 281518 - DNA, 120 bp, Artificial Sequence
  ENSG00000129636_31 (sequence is synthesized)
aagtaagccgccaccagggctactgctacccatctgcacaagcaaagtgaatgaagaagaaataagtctttcctagacatgcaaaagctgagggaattcattaccactggaatggcccta

SEQ ID NO: 281519 - DNA, 120 bp, Artificial Sequence
  ENSG00000129636_32 (sequence is synthesized)
catgaaattcttaagcgagtcctgcatttggaagcataaagacagtatctaccatcatgagatcacacaaagtataaaactcactggtagctcagacacacaaataaaaaagagaaagga

SEQ ID NO: 281520 - DNA, 120 bp, Artificial Sequence
  ENSG00000129636_33 (sequence is synthesized)
ctcaaatgttaccagtaaatgttaccagtacagaaaaccaccatatctcattgataaacaataagagataaagaaaggacaaaggatacgtatgcaaaacaaccagaaaacgattcataa

SEQ ID NO: 281521 - DNA, 120 bp, Artificial Sequence
  ENSG00000129636_34 (sequence is synthesized)
aatgaaaggaataggccaggtgcagtgactcactcctgtaatcccatcattttgggagattgaggcaagcagattacttgagcttaggagtttgagaccaatctacgcaacatggtgaaa

SEQ ID NO: 281522 - DNA, 120 bp, Artificial Sequence
  ENSG00000129636_35 (sequence is synthesized)
agccatgatggcttcgggtaggggttgatctctgtcaccttctttaccatctggaggcaatgtaagcacccactgcagccctatagtctgctgcaactatgactccatgccagaacttga

SEQ ID NO: 281523 - DNA, 120 bp, Artificial Sequence
  ENSG00000129636_36 (sequence is synthesized)
tctgagactccccagctgggcatggccagcctcagcccatcagtgggactccctggacccagatccagcagatctgcataaactcaaccagcaggcctttttactggagaacgtcccttg

SEQ ID NO: 281524 - DNA, 120 bp, Artificial Sequence
  ENSG00000129636_37 (sequence is synthesized)
actgtcgggaggcgcgcctgccggaagtgagcgtgagggcggctttcaccctagctccactgcttttttagcgtcggaagggcagccctagtgggagagagaaaaaggagccggcagcgg

SEQ ID NO: 281525 - DNA, 120 bp, Artificial Sequence
  ENSG00000129636_38 (sequence is synthesized)
ccaacaggttctattttaggtatggtatgatataatcataatttatctcacctatatagttcacaaaatagtagcatcttgacagtttaataaaggcttttgaaatattggtataaagtg

SEQ ID NO: 281526 - DNA, 120 bp, Artificial Sequence
  ENSG00000129636_39 (sequence is synthesized)
aacaacagaactttaatttgctcagatctaaagaaattgaattggtttctgcttgtgattatgaatcaatagagtatattaatggatcttagggagaaaattagagctcactttaaatat

SEQ ID NO: 281527 - DNA, 120 bp, Artificial Sequence
  ENSG00000129636_40 (sequence is synthesized)
tcagacctggttagtgcttggatgggagatcacctattactttttctgtaggtttttaataaagaatatgggtgctttgatgctagtaatagtgaactttgaaataattattgtgaatcc

SEQ ID NO: 281528 - DNA, 120 bp, Artificial Sequence
  ENSG00000129636_41 (sequence is synthesized)
tgaatgagaaacctgtttttttctccaaaatttgaaaaatatcttgaagagagtcttgctttagagacaaattggaaggagatcctgatttgcttttgtggccgtatccaagaggaattg

SEQ ID NO: 281529 - DNA, 120 bp, Artificial Sequence
  ENSG00000129636_42 (sequence is synthesized)
agtgcaggtggggtgcagggaaaacacagtccactccccaccaccactccgctccttccacagcaaatggggactgctcagaaaaccctgtcctttcttttcctctcttcaaaggcaggc

SEQ ID NO: 281530 - DNA, 120 bp, Artificial Sequence
  ENSG00000129636_43 (sequence is synthesized)
atgtgattgaggatgtgatggtgacttctggcctgttttattttgtggtaacttcactttagtcagggaaataattggaatatctttaatctgatgtagtttgacctttagaaattgaaa

SEQ ID NO: 281531 - DNA, 120 bp, Artificial Sequence
  ENSG00000129636_44 (sequence is synthesized)
gtgaaacagctattgttgataattcacaaagtattaataaaacttctattacctgtacagattttttacttaatctgcgagaaaactatttagaatattatggaattgtgccatagcttc

SEQ ID NO: 281532 - DNA, 120 bp, Artificial Sequence
  ENSG00000129636_45 (sequence is synthesized)
tttatttgttcttaattctatattagatttttttttctctgcttcatgaacaagttcagattttaaaacatcatgcctgaagacatgtccaactttattttttatatgttatattctggt

SEQ ID NO: 281533 - DNA, 120 bp, Artificial Sequence
  ENSG00000129636_46 (sequence is synthesized)
ccaatatactagagtaataatactctggtattttaggatatctgtcatttgaacctcagttacaaattaaacaatagtagctaaccatatctaagtgataagtttgcatctaagatttgt

SEQ ID NO: 281534 - DNA, 120 bp, Artificial Sequence
  ENSG00000129636_47 (sequence is synthesized)
cctgatgccagtttgaagatatataagctgacagaaatttgcattgtttagaatgactgtagtctaacaatatcatggttcagacaacagaaagctgaatatgcccctgtggcagcaaat

SEQ ID NO: 281535 - DNA, 120 bp, Artificial Sequence
  ENSG00000129636_48 (sequence is synthesized)
aaactacgtttaagcaatgtcagttttataaacaacagataagatatgtacataggtgagtaagtgaaaaagtcatcagcattgacattttgggttattcacgtgaccttgattggcagc

SEQ ID NO: 281536 - DNA, 120 bp, Artificial Sequence
  ENSG00000129636_49 (sequence is synthesized)
ctaatcttttatttatcaagaaatctaccttttacaacttaaatattatgctttatggatatgccaaacccaagattatctttaattgaatttgaccagcgctttggtttgggaagcatg

SEQ ID NO: 281537 - DNA, 120 bp, Artificial Sequence
  ENSG00000129636_50 (sequence is synthesized)
caatgatctttaaattcagtgtgaaatgcttctgtagaattatagcagaaagcccttgctataacctggcttagtgcagacatgcaaatctgagatagcacaaccagtttggctggacta

SEQ ID NO: 281538 - DNA, 120 bp, Artificial Sequence
  ENSG00000129636_51 (sequence is synthesized)
aaggtgcagatgatcagtctaaacagcagtggtgataagcagaagaattccttataattggtacagtggggttatctaacagggacaggaagggcactcactgcatctaatgaggttcag

SEQ ID NO: 281539 - DNA, 120 bp, Artificial Sequence
  ENSG00000129636_52 (sequence is synthesized)
gaggtaattgaagtgtgttaaatggtcaaaggtgagacttcagtttgagcttcaacttcacttataatgacttgaaataatgtaataatgtgccatattacttagaaataacacctagct

SEQ ID NO: 281540 - DNA, 120 bp, Artificial Sequence
  ENSG00000129636_53 (sequence is synthesized)
gttaagtgtcacagcagcttctgcagtgatgtgacgttattgataatgagcattttctataagaggacattggaaactgatgttgcatactcattcagaatattgtttttaatgttgaag

SEQ ID NO: 281541 - DNA, 120 bp, Artificial Sequence
  ENSG00000129636_54 (sequence is synthesized)
tgaaaacacttgtacctgtaattttagtcaaaaccaaatataatgttggtctgttaaaattttctgactcaaaaaaaaaaaaaaaaaaaaaaattttctgactcacgtactgagttcaaa

SEQ ID NO: 281542 - DNA, 120 bp, Artificial Sequence
  ENSG00000129636_55 (sequence is synthesized)
tacgttctgggtcaggcccaagttgtatacttggagatattaatgtaggtatgtgacagatatatactttgccgtacactgtttacatcacaagtgatcgcatgaaaatattgaatgtgg

SEQ ID NO: 281543 - DNA, 120 bp, Artificial Sequence
  ENSG00000129636_56 (sequence is synthesized)
tataagtagcactgaaagcaatcatttttaactgttgtgtgggtagattttgcccctccattatcaaaaaaactgtattctctatttaaatgtagtcagctactatcaatccagaagaaa

SEQ ID NO: 281544 - DNA, 120 bp, Artificial Sequence
  ENSG00000129636_57 (sequence is synthesized)
taaatctgcatttttccatttagcctttcatattttctcacattataaccaatgactgatttattaaatcacccttcagttttactgttgattttgtttgtttgctgatacattacagaa

SEQ ID NO: 281545 - DNA, 120 bp, Artificial Sequence
  ENSG00000129636_58 (sequence is synthesized)
tttgctgatacattacagaaaatattataaatatttgttttaatgaagtgtgacattgtatcacttaaatctattgtttagtaagaatatgaaaattatgatgaggtttataacacaaaa

SEQ ID NO: 281546 - DNA, 120 bp, Artificial Sequence
  ENSG00000129636_59 (sequence is synthesized)
aacaatgtatttgctctgagttgcagccgattaacttttcttcagaggcaaatgtagacttatctctccttctcctgaccacccaccacactatacttaagaaaatggaaagggatagat

SEQ ID NO: 281547 - DNA, 120 bp, Artificial Sequence
  ENSG00000129646_0 (sequence is synthesized)
ggcggccaggtggaggacctgagcaagcagctcaagcgtgtggacggccaggtgcagggcatcgccacgcacgtgcagcacttctcccaggccagcgggcttgacctggccgcgctagag

SEQ ID NO: 281548 - DNA, 120 bp, Artificial Sequence
  ENSG00000129646_1 (sequence is synthesized)
tggccggaggagcaggaggtgggcgtgcgggcgttcgatagggtgcggactgggagtatcatgaaggacgccgccgaggagctcagctttgccagggtacttttacagcgggttgatgaa

SEQ ID NO: 281549 - DNA, 120 bp, Artificial Sequence
  ENSG00000129646_2 (sequence is synthesized)
ctagagaagctattcaaagatcgggagcaattcctggaactagtcagccggaagctgagtttggttcctggtgcagaagaagtcaccatggtcacctgggaagagctggagcaggcgatt

SEQ ID NO: 281550 - DNA, 120 bp, Artificial Sequence
  ENSG00000129646_3 (sequence is synthesized)
acggacggctggagagcctcacaagcgggctcagaaacacttatgggattttctaagcacggagggttcacttccttaacatcacctgaagggactctaagcggagactctaccaagcaa

SEQ ID NO: 281551 - DNA, 120 bp, Artificial Sequence
  ENSG00000129646_4 (sequence is synthesized)
ccaagtattgagcaggctctggattctgccagtggtcttggcccggatcggactgcatcaggatctggtggcacagcacacccctctgatggggtttccagtagggaacaaagcaaggtc

SEQ ID NO: 281552 - DNA, 120 bp, Artificial Sequence
  ENSG00000129646_5 (sequence is synthesized)
ccctctggtactgggagacagcagcagccgagggcccgtgatgaagctggcgtgccacgactccatcagtcttctacattccaattcaaatcagactcagatcgtcacaggagtagagag

SEQ ID NO: 281553 - DNA, 120 bp, Artificial Sequence
  ENSG00000129646_6 (sequence is synthesized)
aagcttacctcgacacaaccaagaagaaatgcacgtcctggtccagttcaacaggacttacccttggccagagaccagcccagtagtgtgcccgctagccagagtcaggtccatctaagg

SEQ ID NO: 281554 - DNA, 120 bp, Artificial Sequence
  ENSG00000129646_7 (sequence is synthesized)
ccagatcgtcgtgggttagaaccaactggcatgaatcagcctggattagtgcctgctagcacttacccacatggtgtggtacccctcagcatgggtcagcttggtgtgccaccacctgaa

SEQ ID NO: 281555 - DNA, 120 bp, Artificial Sequence
  ENSG00000129646_8 (sequence is synthesized)
atggatgatcgggaattgataccatttgtcgtggatgagcaacgtatgttgccaccatcagtacctggcagagaccagcaaggattggaactacctagcacagaccaacatggtctggtt

SEQ ID NO: 281556 - DNA, 120 bp, Artificial Sequence
  ENSG00000129646_9 (sequence is synthesized)
tcagtcagtgcatatcagcatggtatgacatttcctggcacagaccaacgcagtatggaaccacttggcatggatcagcgtggatgtgtaatatcaggcatgggtcagcaaggactagta

SEQ ID NO: 281557 - DNA, 120 bp, Artificial Sequence
  ENSG00000129646_10 (sequence is synthesized)
ccccctggtatagaccagcaaggattgacattgcctgtcgtcgatcaacatggcctggttctaccttttacagaccagcatggtttggtatcacctggtttgatgccaattagtgcagat

SEQ ID NO: 281558 - DNA, 120 bp, Artificial Sequence
  ENSG00000129646_11 (sequence is synthesized)
cagcaaggttttgtgcagcccagtttggaagcaactggcttcatacaacctggcacagagcagcatgatttgatccagtctggcagatttcagcgtgctttggtgcagcgtggtgcatat

SEQ ID NO: 281559 - DNA, 120 bp, Artificial Sequence
  ENSG00000129646_12 (sequence is synthesized)
cagcctggcttggtccaacctggtgcagatcagcgtggtttggtccggcctggaatggatcagtctggtttggcccaacctggtgcagatcagcgtggtttggtctggcctggaatggat

SEQ ID NO: 281560 - DNA, 120 bp, Artificial Sequence
  ENSG00000129646_13 (sequence is synthesized)
cagtctggtttggcccaacctggtagagatcagcatggtttgatccagcctggcacaggtcagcatgatttggtccaatctggcacaggtcagggtgtcttggtacagcctggtgtagat

SEQ ID NO: 281561 - DNA, 120 bp, Artificial Sequence
  ENSG00000129646_14 (sequence is synthesized)
cagcctggcatggtccaacctggcagatttcagcgtgctttggtgcagcctggtgcatatcagcctggcttggtccaacctggtgcagatcagattgatgtggtgcaacctggtgcagat

SEQ ID NO: 281562 - DNA, 120 bp, Artificial Sequence
  ENSG00000129646_15 (sequence is synthesized)
cagcatggtttggtacaatctggtgcagatcagagtgatttggctcaacctggtgcagttcagcatggtttggtccaacctggagtagatcagcgtggtttggcacaacctcgtgcagat

SEQ ID NO: 281563 - DNA, 120 bp, Artificial Sequence
  ENSG00000129646_16 (sequence is synthesized)
catcagcgtggtttggtcccacctggtgcagatcagcgtggtttggtccaacctggtgcagatcagcatggtttggtccaacctggagtggatcagcatggtttggcacaacctggtgaa

SEQ ID NO: 281564 - DNA, 120 bp, Artificial Sequence
  ENSG00000129646_17 (sequence is synthesized)
gttcagcgtagtttggtgcaacctggtatagttcagcgtggtttggtgcaacctggtgcagttcagcgtggtttggtgcaacctggtgcagttcagcgtggtttggtccaacctggagtg

SEQ ID NO: 281565 - DNA, 120 bp, Artificial Sequence
  ENSG00000129646_18 (sequence is synthesized)
gatcagcgtggtttggttcaacctggtgcagttcagcgtggtttggtccaacctggtgcagttcagcatggtttggtccaacctggtgcagatcagcgtggtttggtccaacctggagtg

SEQ ID NO: 281566 - DNA, 120 bp, Artificial Sequence
  ENSG00000129646_19 (sequence is synthesized)
gatcagcgtggtttggtgcaacctggagtggatcagcgtggtttggtccaacctggaatggaccagcgtggtttgatccaacctggtgcagatcagcctggtttggtccagcctggtgca

SEQ ID NO: 281567 - DNA, 120 bp, Artificial Sequence
  ENSG00000129646_20 (sequence is synthesized)
ggtcagctgggtatggtgcagcctggaataggtcagcaaggtatggtgcaacctcaggcagatccacatggcctggtacaacctggtgcctatcctcttggtttggtacaacctggtgca

SEQ ID NO: 281568 - DNA, 120 bp, Artificial Sequence
  ENSG00000129646_21 (sequence is synthesized)
tatttgcatgatttatctcaatctgggacatatccacgtggtctggtgcagccaggaatggatcagtatggtttgagacaacctggtgcatatcagccaggcttgatagcaccaggcaca

SEQ ID NO: 281569 - DNA, 120 bp, Artificial Sequence
  ENSG00000129646_22 (sequence is synthesized)
acctcctggcagagaacaatacggccaggtgtcaccactcctagccagtcaaggtttggcatcacctggtatagatcgaaggagtttggtaccaccagaaacttatcagcaaggtttgat

SEQ ID NO: 281570 - DNA, 120 bp, Artificial Sequence
  ENSG00000129646_23 (sequence is synthesized)
gcatcctggcacagaccagcacagcccaataccactgagtacaggtttgggatctacacacccagatcaacagcatgtggcatcacctggcccaggtgagcatgaccaggtatacccaga

SEQ ID NO: 281571 - DNA, 120 bp, Artificial Sequence
  ENSG00000129646_24 (sequence is synthesized)
tgcagctcagcatggccatgctttctctctctttgacagtcatgattcaatgtatcctggttatcgtggcccagggtatctaagtgctgatcagcatggccaggaaggtttggatccaaa

SEQ ID NO: 281572 - DNA, 120 bp, Artificial Sequence
  ENSG00000129646_25 (sequence is synthesized)
tagaacacgagcctcggaccgacatggaattcctgcccagaaggccccaggccaagatgtcactcttttcaggagtccagactccgtcgaccgagtcttatcagaagggagcgaagtctc

SEQ ID NO: 281573 - DNA, 120 bp, Artificial Sequence
  ENSG00000129646_26 (sequence is synthesized)
gagtgaagtcctgagtgagcgacgcaattcactgcgtagaatgagttctagtttccccacggcagtggagacatttcatctgatgggagagctcagtagcctctatgtggggctaaagga

SEQ ID NO: 281574 - DNA, 120 bp, Artificial Sequence
  ENSG00000129646_27 (sequence is synthesized)
gagtatgaaggatctggatgaggagcaggccggccaaaccgacttggagaagatccagttcctgctggcacagatggtcaaaaggaccatacctcctgaactgcaggagcagctgaagac

SEQ ID NO: 281575 - DNA, 120 bp, Artificial Sequence
  ENSG00000129646_28 (sequence is synthesized)
cgtaaagacgctagccaaagaagtttggcaggagaaagcaaaagtggaaaggctgcagaggatcctggaaggggaagggaatcaagaagcagggaaggaactgaaagctggagagctgag

SEQ ID NO: 281576 - DNA, 120 bp, Artificial Sequence
  ENSG00000129646_29 (sequence is synthesized)
attgcagctgggtgtcctcagagtcaccgtggctgacatagaaaaggagctggccgagttgagggagagccaagacaggggcaaggctgccatggaaaattctgtctctgaagcctccct

SEQ ID NO: 281577 - DNA, 120 bp, Artificial Sequence
  ENSG00000129646_30 (sequence is synthesized)
ttacctgcaggaccagttggacaagctcaggatgatcattgagagcatgctgacctcctcctccacgctcctgtccatgagcatggccccgcacaaggcccacaccttggctcctggcca

SEQ ID NO: 281578 - DNA, 120 bp, Artificial Sequence
  ENSG00000129646_31 (sequence is synthesized)
gatcgaccctgaggccacctgtccagcctgcagcctggatgtgagccatcaggtcagcacgctggtgcggcgctatgagcaactccaagacatggtcaacagcctggccgtctcccgacc

SEQ ID NO: 281579 - DNA, 120 bp, Artificial Sequence
  ENSG00000129646_32 (sequence is synthesized)
ctccaagaaggccaagctccagagacaggacgaggagctgctgggccgtgtgcagagtgccatcctgcaggtgcagggtgactgcgagaagctcaacatcaccaccagcaacctcatcga

SEQ ID NO: 281580 - DNA, 120 bp, Artificial Sequence
  ENSG00000129646_33 (sequence is synthesized)
ggaccatcggcagaaacagaaggacattgctatgctgtaccagggtctggagaagctcgaaaaggaaaaggccaacagggagcacctggagatggagatcgatgtgaaagccgacaagag

SEQ ID NO: 281581 - DNA, 120 bp, Artificial Sequence
  ENSG00000129646_34 (sequence is synthesized)
tgctctggccaccaaagtgagccgtgtccagtttgatgccaccacggagcagctgaaccacatgatgcaggagctggtggccaagatgagcgggcaggagcaggactggcagaagatgct

SEQ ID NO: 281582 - DNA, 120 bp, Artificial Sequence
  ENSG00000129646_35 (sequence is synthesized)
ggacaggctgctcacagagatggacaacaagctggaccgcctggagctggacccagtgaagcagttgctggaggatcggtggaaatcgctgcgacagcagctcagggagcgccccccact

SEQ ID NO: 281583 - DNA, 120 bp, Artificial Sequence
  ENSG00000129646_36 (sequence is synthesized)
ctaccaggcagacgaggcggctgccatgcggaggcagctcctggcacatttccactgcctctcatgtgaccggcccttggagacacctgtgactggacatgccatccccgtgacccccgc

SEQ ID NO: 281584 - DNA, 120 bp, Artificial Sequence
  ENSG00000129646_37 (sequence is synthesized)
gggtccaggcctacctgggcaccattccatccgcccctacacggtgtttgaactggagcaggtccggcagcatagccgcaacctcaagctgggcagcgccttccctcggggtgacctggc

SEQ ID NO: 281585 - DNA, 120 bp, Artificial Sequence
  ENSG00000129646_38 (sequence is synthesized)
gcagatggagcagagcgtggggcgcctgcgctccatgcactccaagatgctgatgaacattgagaaggtgcagatccacttcgggggctccaccaaggccagcagccagataatccgcga

SEQ ID NO: 281586 - DNA, 120 bp, Artificial Sequence
  ENSG00000129646_39 (sequence is synthesized)
gctgctgcacgcccagtgcctgggctccccctgctacaaacgggtgacagatatggctgattacacctactcaactgtgccccggcgctgcgggggcagccacaccctcacctaccccta

SEQ ID NO: 281587 - DNA, 120 bp, Artificial Sequence
  ENSG00000129646_40 (sequence is synthesized)
ccaccgcagccgcccgcagcaccttccccggggcctgtatcctactgaagagatccagattgccatgaagcatgatgaggtggacatcttgggcctggatggccacatttacaagggacg

SEQ ID NO: 281588 - DNA, 120 bp, Artificial Sequence
  ENSG00000129646_41 (sequence is synthesized)
gatggacacaaggctgccaggcatcctccgaaaagacagctcagggacctcaaagcgcaagtcccagcagcccaggccccacgtgcacaggccgccatccctcagcagcaatggccagct

SEQ ID NO: 281589 - DNA, 120 bp, Artificial Sequence
  ENSG00000129646_42 (sequence is synthesized)
gccctctcggccacagagcgcccagatttcggctggcaacacctcagaaagatagaccttcctccgagggccgtctctcccagccgaacacagcccacccgcccagctccgccgcggtgg

SEQ ID NO: 281590 - DNA, 120 bp, Artificial Sequence
  ENSG00000129646_43 (sequence is synthesized)
caaacagggggctggagaggcacgtggacatgcctcctggggaggggctcgaggagcccacgcgggggccgcggtccagcaccgctcagtgagcggaggtgtaaataaacattcaggagg

SEQ ID NO: 281591 - DNA, 120 bp, Artificial Sequence
  ENSG00000129646_44 (sequence is synthesized)
atgccgcccgcgaccacggtctccctccgggagctggcggacctctccatcggcacgccagaggtgggcgccgtcaacttcacggccctgcacacgctcatcgtggccatgctcaagaac

SEQ ID NO: 281592 - DNA, 120 bp, Artificial Sequence
  ENSG00000129646_45 (sequence is synthesized)
ctcgacctccaaaatacccggatcgacttccagccctcgtcgcccgagcccagccgctcgctgcagtccgtccggagctcgttcagcatcccgcacctgcccgcgcccaaggaggtgccc

SEQ ID NO: 281593 - DNA, 120 bp, Artificial Sequence
  ENSG00000129654_0 (sequence is synthesized)
agagaagcgccgtcgggcgggggggcggcaagaggcgctggcagggcccccgagctgggggcagagagccgcagggggtgggagcaacttcttccagaaccttcctctggcccgggctgc

SEQ ID NO: 281594 - DNA, 120 bp, Artificial Sequence
  ENSG00000129654_1 (sequence is synthesized)
gctctgagccaggcaccacatacttattcggaggaggcgcccccggggtcgcgagatggaagcgcgcgtccgggaggccgtgtaacgggagctgcgggactcagcgggccagagagcgcg

SEQ ID NO: 281595 - DNA, 120 bp, Artificial Sequence
  ENSG00000129654_2 (sequence is synthesized)
gccacccccggctcagcccgtggatgctgaccgccccctcggagagtccccgcagacatggcggagagctggctgcgcctctcgggagccgggccggcggaggaggccgggccggagggc

SEQ ID NO: 281596 - DNA, 120 bp, Artificial Sequence
  ENSG00000129654_3 (sequence is synthesized)
gggcggcctggaggagcccgacgccctggatgacagcctgaccagcctgcagtggctgcaggaattctccattctcaacgccaaggcccccgccctgcccccggggggcaccgaccccca

SEQ ID NO: 281597 - DNA, 120 bp, Artificial Sequence
  ENSG00000129654_4 (sequence is synthesized)
cggctaccaccaggtgccaggttcagcggcgcccgggtcccccctggcggccgaccccgcctgcctggggcagccacacacgccgggcaagcccacgtcgtcgtgcacgtcgcggagcgc

SEQ ID NO: 281598 - DNA, 120 bp, Artificial Sequence
  ENSG00000129654_5 (sequence is synthesized)
gcccccggggctgcaggccccaccccccgacgacgtggactacgccaccaatccgcacgtgaagcctccctactcgtatgccacgctcatctgcatggccatgcaggccagcaaggccac

SEQ ID NO: 281599 - DNA, 120 bp, Artificial Sequence
  ENSG00000129654_6 (sequence is synthesized)
caagatcaccctgtcggccatctacaagtggatcacggacaacttctgctacttccgccacgcagatcccacctggcagaattcaatccgccacaacctgtctctgaacaagtgcttcat

SEQ ID NO: 281600 - DNA, 120 bp, Artificial Sequence
  ENSG00000129654_7 (sequence is synthesized)
caaagtgcctcgggagaaggacgaaccaggcaaggggggcttctggcgcattgacccccagtacgcggagcggctactgagcggcgctttcaagaagcggcgactgccccctgtccacat

SEQ ID NO: 281601 - DNA, 120 bp, Artificial Sequence
  ENSG00000129654_8 (sequence is synthesized)
ccacccagcctttgcccgccaggccgcgcaggagcccagcgctgtcccccgggccgggccgctgacggtgaataccgaggcccagcagctgctgcgggagttcgaggaggccaccgggga

SEQ ID NO: 281602 - DNA, 120 bp, Artificial Sequence
  ENSG00000129654_9 (sequence is synthesized)
ggcgggctggggtgcaggcgagggcaggctggggcataagcgcaaacagccgctgcccaagcgggtggccaaggtcccgcggccccccagcaccctgctgcccaccccggaggagcaggg

SEQ ID NO: 281603 - DNA, 120 bp, Artificial Sequence
  ENSG00000129654_10 (sequence is synthesized)
gagctgggtgcactggaggccctggagctgagcccgcctctgagccccgcctcacacgtggacgtggacctcaccatccacggccgccacatcgactgccctgccacctgggggccttcg

SEQ ID NO: 281604 - DNA, 120 bp, Artificial Sequence
  ENSG00000129654_11 (sequence is synthesized)
gtggagcaggctgccgacagcctggacttcgatgagaccttcctggccacatccttcctgcagcacccctgggacgagagcggcagtggctgcctgcccccggagcccctctttgaggct

SEQ ID NO: 281605 - DNA, 120 bp, Artificial Sequence
  ENSG00000129654_12 (sequence is synthesized)
ggggatgccaccctggcctccgacctgcaggactgggccagcgtgggggccttcttgtaagaggccaggccctgccccacctctggacagtgcccaagtcagggtccagaactgcccccc

SEQ ID NO: 281606 - DNA, 120 bp, Artificial Sequence
  ENSG00000129654_13 (sequence is synthesized)
aacacaggtccacagacaccccaccacctaggcaggggctgggccagggctccaaggcttgccccagaggccacatggccaccagccccagctgccatcagattcaagcccaggaggctg

SEQ ID NO: 281607 - DNA, 120 bp, Artificial Sequence
  ENSG00000129654_14 (sequence is synthesized)
aaaacgagggcccaggaccagaatcgctgcctcctctccccagccccaccttgtacacacagtgtttcattgctccgcgtcttcccagccccagaaaccggctaaaggaccctgcaccat

SEQ ID NO: 281608 - DNA, 120 bp, Artificial Sequence
  ENSG00000129654_15 (sequence is synthesized)
gagagccgaggcctggaggagcccgggtcaggctggggaggaacagaactgggccctcccagagcacctccgcttcccccctgcttccccaggtctctatccagagagagtccccaggta

SEQ ID NO: 281609 - DNA, 120 bp, Artificial Sequence
  ENSG00000129654_16 (sequence is synthesized)
caacaaatgctaattagatgacagcaaattaaccccctggaggcttctcctggcagagcctccctggggccggggcaggctgtggatggggcggagcagggcagaagatggactggggga

SEQ ID NO: 281610 - DNA, 120 bp, Artificial Sequence
  ENSG00000129654_17 (sequence is synthesized)
gggggcagagagaggagaccaaaatgaggtggtggcacagggtggggcaaggagatcctctctaaggcctctggggtctttgcctggccccatccctagggggcggggaggggacgtaaa

SEQ ID NO: 281611 - DNA, 120 bp, Artificial Sequence
  ENSG00000129654_18 (sequence is synthesized)
tccctaatctttaagcccgacttgaggctgagagcagctggaagtttgggtttggtggtttgggggccggggcagccaagctgtatggggcaggacagacagactaatgtagtgagtgta

SEQ ID NO: 281612 - DNA, 120 bp, Artificial Sequence
  ENSG00000129654_19 (sequence is synthesized)
gctgtagctgaggcttaactgggagggatgccgagcttgctggaactactgggaccaagaagcggggtaccccacgcccctgcctgcactcctcgggggcgtggggcgtgccttgctcca

SEQ ID NO: 281613 - DNA, 120 bp, Artificial Sequence
  ENSG00000129654_20 (sequence is synthesized)
cccggactccctgggctgcgtcccacatccaccctcctgccccgtggggcaatttaacctttttcatgaaagttatttacaatgaaaagtttttaaaaataaaatttttaaaaatctaaa

SEQ ID NO: 281614 - DNA, 120 bp, Artificial Sequence
  ENSG00000129657_0 (sequence is synthesized)
actcgcagtccgcaggatgactcagggcagccctgaccacagttccgccgccatcggccctagcctgcggaattgggctcgccccgggacgataacagagctctgccgggggctggaggc

SEQ ID NO: 281615 - DNA, 120 bp, Artificial Sequence
  ENSG00000129657_1 (sequence is synthesized)
actgaccgggtgaccagagacccagagaccagaccccctccacggcgcccgggatttcggggacggcttctcccatcgcaagtttcaacagaaaatgagaaatatcccccgacgattggc

SEQ ID NO: 281616 - DNA, 120 bp, Artificial Sequence
  ENSG00000129657_2 (sequence is synthesized)
tgaaaacatgcagcaaccactattttcttcctgcccctcgttgatgagagcattcgaagtgacctcagcagggcatccaggtcagtttctggaagacttgtgtgtgtgatgaatgaatat

SEQ ID NO: 281617 - DNA, 120 bp, Artificial Sequence
  ENSG00000129657_3 (sequence is synthesized)
ctggttttgtctctgctgggcctgtgtgcctggaaaggaattgttttggcctaggatcatccagctagacttcgggctccttgaggatattcagttttgtatgtttgaatatcctctcac

SEQ ID NO: 281618 - DNA, 120 bp, Artificial Sequence
  ENSG00000129657_4 (sequence is synthesized)
catgttcagcataaagtaccattcttaatgattatcctcaacaagacaggtgtgagagggttgctgttgtattgcaatcatggtgcagaaataccagtccccagtgagggtgtacaaata

SEQ ID NO: 281619 - DNA, 120 bp, Artificial Sequence
  ENSG00000129657_5 (sequence is synthesized)
cccctttgaattaattatggctgcctatgaaaggaggttccctacatgtcctttgattccgatgttcgtgggcagtgacactgtgaatgaattcaagagcgaagatggggctattcatgt

SEQ ID NO: 281620 - DNA, 120 bp, Artificial Sequence
  ENSG00000129657_6 (sequence is synthesized)
cattgaaaggcgctgcaagctggatgtagatgcacccagactgctgaagaagattgcaggagttgattatgtttattttgtccagaaaaactcactgaattctcgggaacgtactttgca

SEQ ID NO: 281621 - DNA, 120 bp, Artificial Sequence
  ENSG00000129657_7 (sequence is synthesized)
cattgaggcttataatgaaacgttttccaatcgggtcatcattaatgagcattgctgctacaccgttcaccctgaaaatgaagattggacctgttttgaacagtctgcaagtttagatat

SEQ ID NO: 281622 - DNA, 120 bp, Artificial Sequence
  ENSG00000129657_8 (sequence is synthesized)
taaatctttctttggttttgaaagtacagtggaaaaaattgcaatgaaacaatataccagcaacattaaaaaaggaaaggaaatcatcgaatactaccttcgccaattagaagaagaagg

SEQ ID NO: 281623 - DNA, 120 bp, Artificial Sequence
  ENSG00000129657_9 (sequence is synthesized)
cataacctttgtgccccgttggagtccgccttccatcacgacctcttcagagacatcttcatcatcctccaagaaacaagcagcgtccatggccgtcgtcatcccagaagctgccctcaa

SEQ ID NO: 281624 - DNA, 120 bp, Artificial Sequence
  ENSG00000129657_10 (sequence is synthesized)
ggaggggctgagtggtgatgccctcagcagccccagcgcacctgagcccgtggtgggcacccctgacgacaaactagatgccgactacatcaagagatacctgggcgatttgactccgct

SEQ ID NO: 281625 - DNA, 120 bp, Artificial Sequence
  ENSG00000129657_11 (sequence is synthesized)
gcaggagagctgcctcattagacttcgccagtggctccaggagacccacaagggcaaaattccaaaagatgagcatattcttcggttcctccgtgcacgggattttaatattgacaaagc

SEQ ID NO: 281626 - DNA, 120 bp, Artificial Sequence
  ENSG00000129657_12 (sequence is synthesized)
ctcaggtccttcaggattactacgcgggaggctggcatcatcacgacaaagatgggcggcccctctacgtgctcaggctggggcagatggacaccaaaggcttggtgagagcgctcgggg

SEQ ID NO: 281627 - DNA, 120 bp, Artificial Sequence
  ENSG00000129657_13 (sequence is synthesized)
aggaagccctgctgagatacgttctctccataaatgaagaagggctaaggcgatgcgaagagaatacaaaagtctttggtcggcctatcagctcatggacctgcctggtggacttggaag

SEQ ID NO: 281628 - DNA, 120 bp, Artificial Sequence
  ENSG00000129657_14 (sequence is synthesized)
ggctgaacatgcgccacttgtggagacctggtgtgaaagcgctgctgcggatcatcgaggtggtggaggccaactaccctgagacactgggccgccttctcatcctgcgggcgcccaggg

SEQ ID NO: 281629 - DNA, 120 bp, Artificial Sequence
  ENSG00000129657_15 (sequence is synthesized)
tatttcctgtgctctggacgctggttagtccgttcattgatgacaacaccagaaggaagttcctcatttatgcaggaaatgactaccagggtcctggaggcctgctggattacatcgaca

SEQ ID NO: 281630 - DNA, 120 bp, Artificial Sequence
  ENSG00000129657_16 (sequence is synthesized)
aagagattattccagatttcctgagtggggagtgcatgtgcgaagtgccagagggtggactggtccccaaatctctgtaccggactgcagaggagctggagaacgaagacctgaagctct

SEQ ID NO: 281631 - DNA, 120 bp, Artificial Sequence
  ENSG00000129657_17 (sequence is synthesized)
ggactgagaccatctaccagtctgcaagcgtcttcaaaggagccccacatgagattctcattcagattgtggatgcctcgtcagtcatcacttgggatttcgacgtgtgcaaaggggaca

SEQ ID NO: 281632 - DNA, 120 bp, Artificial Sequence
  ENSG00000129657_18 (sequence is synthesized)
ttgtgtttaacatctatcactccaagaggtcgccacaaccacccaaaaaggactccctgggagcccacagcatcacctctccgggtgggaacaatgtgcagctcatagacaaagtctggc

SEQ ID NO: 281633 - DNA, 120 bp, Artificial Sequence
  ENSG00000129657_19 (sequence is synthesized)
agctgggccgcgactacagcatggtggagtcgcctctgatctgcaaagaaggagaaagcgtgcagggttcccatgtgaccaggtggccgggcttctacatcctgcagtggaaattccaca

SEQ ID NO: 281634 - DNA, 120 bp, Artificial Sequence
  ENSG00000129657_20 (sequence is synthesized)
gcatgcctgcgtgcgccgccagcagccttccccgggtggacgacgtgcttgcgtccctgcaggtctcttcgcacaagtgtaaagtgatgtactacaccgaggtgatcggctcggaggatt

SEQ ID NO: 281635 - DNA, 120 bp, Artificial Sequence
  ENSG00000129657_21 (sequence is synthesized)
tcagaggttccatgacgagcctggagtccagccacagcggcttctcccagctgagtgccgccaccacctcctccagccagtcccactccagctccatgatctccagatggcgattttgct

SEQ ID NO: 281636 - DNA, 120 bp, Artificial Sequence
  ENSG00000129657_22 (sequence is synthesized)
gacagctgccaagaaaatgcttcactcaacagtcctcatgtgcccagagatgtttatagaactgtttgaattgcagccatcccctgccccctcccaggctgaagatctgttctttttaag

SEQ ID NO: 281637 - DNA, 120 bp, Artificial Sequence
  ENSG00000129657_23 (sequence is synthesized)
ttgattcgggagtggcattcttttatacccaaagactgtagtgcatcttgaagagctcaaagcacatgaccgcacaaatgcttacagggtttcctcccgagtaatccaatctcactcccc

SEQ ID NO: 281638 - DNA, 120 bp, Artificial Sequence
  ENSG00000129657_24 (sequence is synthesized)
gagactgccccgcggagccgccggtatgagcgcccctcgccaccccgtgtcccaggcccggcctttctgacaagagctagacttcgggctccttgaggatattcagttttgtatgtttga

SEQ ID NO: 281639 - DNA, 120 bp, Artificial Sequence
  ENSG00000129657_25 (sequence is synthesized)
ctttagtaccttgccactcttttaaaacgctgctgtcatttcccatttcttagtactaatgattctttgattctccctctattatgtcttaattcactttccttcctaaatttgttattt

SEQ ID NO: 281640 - DNA, 120 bp, Artificial Sequence
  ENSG00000129657_26 (sequence is synthesized)
gcatatcaaattctgtaaatgttttgtaaacatattacctcacttggtaatacaatactgatagtctttaaaagatttttttattgttatcaataataaatgtgaactatttaaagaaaa

SEQ ID NO: 281641 - DNA, 88 bp, Artificial Sequence
  ENSG00000129657_27 (sequence is synthesized)
ttttttgagacggagttttgctctcgttactgcagcctctgcctcctgagttcaagcgattctgcatcagcctcccgaatagctgcga

SEQ ID NO: 281642 - DNA, 120 bp, Artificial Sequence
  ENSG00000129657_28 (sequence is synthesized)
ctctcacctctagatagcaaatagctctcagatggtaaacgtagtcgtttgatcccaaaactaccttggcaggtagttttaactctgatcctaacttaactcaatagccatagattttgt

SEQ ID NO: 281643 - DNA, 120 bp, Artificial Sequence
  ENSG00000129657_29 (sequence is synthesized)
atacgttgtgcacaaaatccaaccagagcgcaagggctctcttgaaagaaaagtagtttctgtaccaattaaaggattgacgtggtctcagatattgatgcaaaaaatttttccaacgaa

SEQ ID NO: 281644 - DNA, 120 bp, Artificial Sequence
  ENSG00000129657_30 (sequence is synthesized)
cacagagcttggtgcatgacatgtagcaggatccagcggttgaatggatggtggtgtgtgactctggggaaagagatccgtccatacgcattcagcgtttccctccccagcttcagcacc

SEQ ID NO: 281645 - DNA, 120 bp, Artificial Sequence
  ENSG00000129657_31 (sequence is synthesized)
tgcaccctggatcccctggagagcacgatgcgctcgcagcatgccggcctggtgctcgtggatcgtggctgcctaacgctgcctctttttcagattctcattcagattgtggatgcctcg

SEQ ID NO: 281646 - DNA, 120 bp, Artificial Sequence
  ENSG00000129657_32 (sequence is synthesized)
cagctgggcatggttggagggagcctgcagtcccacgccgtgtgcaggatcagcagtggcggcgggtgtcaggaatgcttggagggccaggagggagtggctttggggtcatttgttggc

SEQ ID NO: 281647 - DNA, 120 bp, Artificial Sequence
  ENSG00000129657_33 (sequence is synthesized)
acggtgactccctgcctgtctgcagagggagagtgtcggagacagagccgactgactgcctttgctttagctcacactgccgtctgcgtgcaggctgtgggaagccggtccccctggtgg

SEQ ID NO: 281648 - DNA, 120 bp, Artificial Sequence
  ENSG00000129657_34 (sequence is synthesized)
ttgttcgtctccatggcatcacttgaacttactctgtttttatgcttatgaaccgtatctagagtgtgtaaaatgtttttaaaatacaagcctctgaaaataaaaatctgcttattaaaa

SEQ ID NO: 281649 - DNA, 120 bp, Artificial Sequence
  ENSG00000129657_35 (sequence is synthesized)
acacaagggagaaggtggaagtggagactagcgagaggtggccgcaagccaaggaacacccagggcaaccagcagccggaagaagccagaacagaccttcccagagctgcaggagggagc

SEQ ID NO: 281650 - DNA, 120 bp, Artificial Sequence
  ENSG00000129657_36 (sequence is synthesized)
acagctctgccgacactttgatttcacctccagagcttacggcctccagaacagtgagagaatgagtttctgttgccctcagccaccagttcgtggtaatttcttggaacaacttcgggc

SEQ ID NO: 281651 - DNA, 120 bp, Artificial Sequence
  ENSG00000129657_37 (sequence is synthesized)
gcgacggggccggcgccttctccgagctcctcccacgctcgcgggtcggagctcgcgcctgcgcagttcgggccccgggtgtcctcccccctcccctttcttagcaaccatcgcccgctc

SEQ ID NO: 281652 - DNA, 120 bp, Artificial Sequence
  ENSG00000129657_38 (sequence is synthesized)
tttcttagcaaccatcgcccgctcccgcccccgctccctcggccgcggccgcgcacgcgcgcccctcccggcgcccggccccgcccaccccgtcacccgtaacaaccacaagtgccgtcg

SEQ ID NO: 281653 - DNA, 120 bp, Artificial Sequence
  ENSG00000129657_39 (sequence is synthesized)
ttcgatgtttatttgcttggagtttcagcagcagaccgcggtgcttgaagctgttcatggaatgaccgcttgtgtctgagccagcgtctgaggaaactgatgttctataagcctatgaaa

SEQ ID NO: 281654 - DNA, 120 bp, Artificial Sequence
  ENSG00000129657_40 (sequence is synthesized)
acaggtgtgagccactgtacctggcccgtttgctactttttcttggctgggttttggttatttatagatatcttggggattttccgatttctgtaagtctaatggagcaaggagggtgtt

SEQ ID NO: 281655 - DNA, 120 bp, Artificial Sequence
  ENSG00000129657_41 (sequence is synthesized)
gagcaaggagggtgttcctgtattccttttttgctgtcacttttggtagagaagcaagggcgttccgtgttcctgtgcatgccatatgtctgtcctgtagcatcacgagtgacctgaagc

SEQ ID NO: 281656 - DNA, 120 bp, Artificial Sequence
  ENSG00000129657_42 (sequence is synthesized)
aggaggggcctgcagcggaatctcccttctcagctaggacaaggttcgtggcccagagttgttggagaggatggtggcactctgtgcagagcaggtgtcagtgaggatgtggtgctggct

SEQ ID NO: 281657 - DNA, 120 bp, Artificial Sequence
  ENSG00000129657_43 (sequence is synthesized)
tgggcaatggtgctggccgggagctgactgcggcctgcttcctgccgtggtggcacctgggtcagccatctgccagtggcttctgctggggtgtcttcctgagtggctcacctggtgctt

SEQ ID NO: 281658 - DNA, 120 bp, Artificial Sequence
  ENSG00000129657_44 (sequence is synthesized)
gcagggcaggtggataagggaatgctgttgccatggtttgaacaagcagagacagatttggtgtgccttacttgtagatacatacatagaggaatctcagatttcataacgtcttgagga

SEQ ID NO: 281659 - DNA, 120 bp, Artificial Sequence
  ENSG00000129657_45 (sequence is synthesized)
ttgtctgtattcatttcttaccgggagggcaggctccagggaccgagtccttgttccttgtttgttaggcactatcgctcttgtccatgtttcaagaacttggggtgcagtgtgtttcgt

SEQ ID NO: 281660 - DNA, 120 bp, Artificial Sequence
  ENSG00000129657_46 (sequence is synthesized)
gtgaatcgggggcatctgtagacatccacatggtaaaaacctccgttctgctttgggtattaaataaagcacagatccgagatggcaacaaactgaaaggaaggctgaagcggaggcccc

SEQ ID NO: 281661 - DNA, 120 bp, Artificial Sequence
  ENSG00000129657_47 (sequence is synthesized)
cactgtgaatgcaggaaagaggttccgtcagcacagggggccgaggcctcaggatggagctgcctggggagccactttgctgaagagggggccgtgccacgtggtgccgcctgctgttct

SEQ ID NO: 281662 - DNA, 120 bp, Artificial Sequence
  ENSG00000129657_48 (sequence is synthesized)
tagacaggacccttgtacctcactgaatctgctgtggaaggacattctgaagtggcgtttcagtggtgaggtggcagtggtgggattaaaggggcccggctcgtagagcagccacgcgct

SEQ ID NO: 281663 - DNA, 120 bp, Artificial Sequence
  ENSG00000129657_49 (sequence is synthesized)
gaagggcacagcagacagcgtgcatgggctgagaggggccgtgggcctggctctgctgcttccttaggtggagttttcagtgactgcagaactctgcacagctgcttttcattctcacgt

SEQ ID NO: 281664 - DNA, 120 bp, Artificial Sequence
  ENSG00000129657_50 (sequence is synthesized)
tgtcggtgctgtgtaagtttggttttcaattggttctcagcacccagggggtgaccacctcaaccccatctctactatgccaggggctcatcccgctcacccagcctcgccactgttctc

SEQ ID NO: 281665 - DNA, 120 bp, Artificial Sequence
  ENSG00000129657_51 (sequence is synthesized)
tcgtgtgagcctcacacggcaggcccggttccatgcccctgcttcccccttgctgggaacgctgtcctcaggctcccctgcctgctctttctttagctttcaccttctccagggccttct

SEQ ID NO: 281666 - DNA, 120 bp, Artificial Sequence
  ENSG00000129657_52 (sequence is synthesized)
gttctgtccagcccagggcagtcctctgaaccactcatgtacgagctcacagtgtttggtgtttctaagacctggcctcttagagtgtgtgtgaagatggtgtatgggagatcttggacc

SEQ ID NO: 281667 - DNA, 120 bp, Artificial Sequence
  ENSG00000129657_53 (sequence is synthesized)
agtgcatttggtggcagagtgacaggcttggaagagaatgtggagggagtaagggaggcgcttgctaactgcccctgacgctgacagagctctggagaggtcagtgcagcttctgagtta

SEQ ID NO: 281668 - DNA, 120 bp, Artificial Sequence
  ENSG00000129657_54 (sequence is synthesized)
cagagatggcccctcctcacctgggacggaagctgccagctcgcttcccccaagctgcctcatggcccgcacgccgcctcacggcccccatgcttcccgccagtcaagatggtctgtgga

SEQ ID NO: 281669 - DNA, 120 bp, Artificial Sequence
  ENSG00000129657_55 (sequence is synthesized)
cttagggccagcccttgaggtccttatcctctgaggattcagaggttgcctgcggagtaccttgtcccagggccagacacacccacaccacccactgtcctgcagtggggccgggggctc

SEQ ID NO: 281670 - DNA, 120 bp, Artificial Sequence
  ENSG00000129657_56 (sequence is synthesized)
aggaggggctctcagggactcctggtgactccaggaaaatgctgccatcgttaaacattactttctctttcctccttttcaaatctttttgatactttttagagcaggatttttctgtat

SEQ ID NO: 281671 - DNA, 120 bp, Artificial Sequence
  ENSG00000129657_57 (sequence is synthesized)
gtgaacttgggtgggggggttcttcccgtttccttccgtgcgtcgcccctctcacctgcagtcagctcccagcccagtgtaggccatctcctctgtgccctctggtggctcattgtcctc

SEQ ID NO: 281672 - DNA, 120 bp, Artificial Sequence
  ENSG00000129657_58 (sequence is synthesized)
agagcccagacagttccagccactaggaggccgtcttggaaccagcaagtcgcatttgccacttgacactgtccatggggttttattagtagctaagcagcagctctcgcatccacttca

SEQ ID NO: 281673 - DNA, 120 bp, Artificial Sequence
  ENSG00000129657_59 (sequence is synthesized)
gggtggcgtgtggcatgtaggagtcctgcttctttgtacatgggaattgtggactcatgcgtgtgtgtgtgtgcatgtgctgtgtgtgtgcatgtgtgcatgacggtgggggtgctgggg

SEQ ID NO: 281674 - DNA, 120 bp, Artificial Sequence
  ENSG00000129657_60 (sequence is synthesized)
ggacggggtgagtggaaacttagtttgagtaatgaaggaatcttcacagaagcaaatcagaatatgggatttgtttgccttttacattttgtttaattcctgattttaaagcctgctcta

SEQ ID NO: 281675 - DNA, 120 bp, Artificial Sequence
  ENSG00000129657_61 (sequence is synthesized)
tctggtacaggcccttattttttcagctttttatgggaaaagcaggttatttgagaatctgtccagaagttgcataggggatggcctccacgataaggacatgcaacacgtgtttctgtg

SEQ ID NO: 281676 - DNA, 120 bp, Artificial Sequence
  ENSG00000129657_62 (sequence is synthesized)
tgcagcagaggccgtgtttttcatgccaaaccccacgcggctgtcaactgtgtgcgtggtaggcatggagatcctggttgtgccgtctcagctccgctctgaaggcactgtgtgggtgct

SEQ ID NO: 281677 - DNA, 120 bp, Artificial Sequence
  ENSG00000129657_63 (sequence is synthesized)
gcgtgactggagagctgtgtggaggccatgtgtgccccgtgcagggatcaggagggcgggggagggaccgagcagccctcttgcccggtcgggtcagccctagtggctgcctgcacactg

SEQ ID NO: 281678 - DNA, 120 bp, Artificial Sequence
  ENSG00000129657_64 (sequence is synthesized)
tagacgtcccagggcctgtgctgtgatcacctgcctttggaccacatttgtgtttgctcttagagatcgagctcctcagtggtacctgaagcctttgcttccggaaagcgcggtagggtt

SEQ ID NO: 281679 - DNA, 120 bp, Artificial Sequence
  ENSG00000129657_65 (sequence is synthesized)
gggttagtagcgcgtctgtgctgcttccacctggtgcttcctgttcccaaatcacaagggcctgaaggtggtccctgctttctctttctctttctctgtgtctcagatggcgattttgct

SEQ ID NO: 281680 - DNA, 120 bp, Artificial Sequence
  ENSG00000129657_66 (sequence is synthesized)
gtgggtctggcaggggcttcatcccgagagcaaggctagggaagtcggcgttgccgttttctctctgtttgctctgcctgttcccgcttccttggaacattagataactcagaaaggaaa

SEQ ID NO: 281681 - DNA, 120 bp, Artificial Sequence
  ENSG00000129657_67 (sequence is synthesized)
tttttgctgagagcggagtttcgggtccggagccagtgcccgcccctctctcccgtcggtcggggctttggccccgtggggctcagccgcgcgggacccctgctgagcagccccgggcgc

SEQ ID NO: 281682 - DNA, 120 bp, Artificial Sequence
  ENSG00000129657_68 (sequence is synthesized)
cggccgcccctcgagcctgctcgggatgcgttcagtgggtctggcctttggctcctgtttaaacagcgattgtcatgcaatggaggccgtccggctcctggatgccacttggtcgttgtc

SEQ ID NO: 281683 - DNA, 120 bp, Artificial Sequence
  ENSG00000129657_69 (sequence is synthesized)
aaatctcatcagatgcaggctgtgctttctgctacagaaactcaccacctaagccaggccgcttccctggacttgatgtcctcgcctggtgacacgagctagacttcgggctccttgagg

SEQ ID NO: 281684 - DNA, 120 bp, Artificial Sequence
  ENSG00000129667_0 (sequence is synthesized)
gccgctcgcaggcgccgcacggagttgcgtcccggggacttggggccgcagggagctgtgagtacccaggaagctgcaccgtgtggcctggagctgtctatctgtccttccagccacctg

SEQ ID NO: 281685 - DNA, 120 bp, Artificial Sequence
  ENSG00000129667_1 (sequence is synthesized)
tctgtccagccacccttccacagactgaggcttgacaccggagcatctgtacagagcaaggagaagacaagaacatgctctaaagcccttcacagcaagacccaggaagccgcgggcaaa

SEQ ID NO: 281686 - DNA, 120 bp, Artificial Sequence
  ENSG00000129667_2 (sequence is synthesized)
ctcagactcgaagccctcccgcctcctgcccacaatggcctctgctgacaagaatggcgggagcgtgtcctctgtgtccagcagccgcctgcagagccggaagccacccaacctctccat

SEQ ID NO: 281687 - DNA, 120 bp, Artificial Sequence
  ENSG00000129667_3 (sequence is synthesized)
caccatcccgccacccgagaaagagacccaggcccctggcgagcaggacagcatgctgcctgagggttttcagaataggaggctaaagaaaagccagcccaggacctgggctgcacacac

SEQ ID NO: 281688 - DNA, 120 bp, Artificial Sequence
  ENSG00000129667_4 (sequence is synthesized)
caccgcctgccctccctccttcctccccaagaggaagaacccagcctacttgaagagcgtcagcctccaggagccacgcagccgatggcaggagagttcagagaagcgccctggcttccg

SEQ ID NO: 281689 - DNA, 120 bp, Artificial Sequence
  ENSG00000129667_5 (sequence is synthesized)
ccgccaggcctcactgtcccagagcatccgcaagggcgcagcccagtggtttggagtcagcggcgactgggaggggcagcggcagcagtggcagcgccgcagcctgcaccactgcagcat

SEQ ID NO: 281690 - DNA, 120 bp, Artificial Sequence
  ENSG00000129667_6 (sequence is synthesized)
gcgctacggccgcctgaaggcctcgtgccagcgtgacctggagctccccagccaggaggcaccgtccttccagggcactgagtccccaaagccctgcaagatgcccaagattgtggatcc

SEQ ID NO: 281691 - DNA, 120 bp, Artificial Sequence
  ENSG00000129667_7 (sequence is synthesized)
gctggcccggggccgggccttccgccacccggaggagatggacaggccccacgccccgcacccaccgctgacccccggagtcctgtccctcacctccttcaccagtgtccgttctggcta

SEQ ID NO: 281692 - DNA, 120 bp, Artificial Sequence
  ENSG00000129667_8 (sequence is synthesized)
ctcccacctgccacgccgcaagagaatgtctgtggcccacatgagcttgcaagctgccgctgccctcctcaaggggcgctcggtgctggatgccaccggacagcggtgccgggtggtcaa

SEQ ID NO: 281693 - DNA, 120 bp, Artificial Sequence
  ENSG00000129667_9 (sequence is synthesized)
gcgcagctttgccttcccgagcttcctggaggaggatgtggtcgatggggcagacacgtttgactcctccttttttagtaaggaagaaatgagctccatgcctgatgatgtctttgagtc

SEQ ID NO: 281694 - DNA, 120 bp, Artificial Sequence
  ENSG00000129667_10 (sequence is synthesized)
ccccccactctctgccagctacttccgagggatcccacactcagcctcccctgtctcccccgatggggtgcaaatccctctgaaggagtatggccgagccccagtccccgggccccggcg

SEQ ID NO: 281695 - DNA, 120 bp, Artificial Sequence
  ENSG00000129667_11 (sequence is synthesized)
cggcaagcgcatcgcctccaaggtgaagcactttgcctttgatcggaagaagcggcactacggcctcggcgtggtgggcaactggctgaaccgcagctaccgccgcagcatcagcagcac

SEQ ID NO: 281696 - DNA, 120 bp, Artificial Sequence
  ENSG00000129667_12 (sequence is synthesized)
tgtgcagcggcagctggagagcttcgacagccaccggccctacttcacctactggctgaccttcgtccatgtcatcatcacgctgctggtgatttgcacgtatggcatcgcacccgtggg

SEQ ID NO: 281697 - DNA, 120 bp, Artificial Sequence
  ENSG00000129667_13 (sequence is synthesized)
ctttgcccagcacgtcaccacccagctggtgctgcggaacaaaggtgtgtacgagagcgtgaagtacatccagcaggagaacttctgggttggccccagctcgattgacctgatccacct

SEQ ID NO: 281698 - DNA, 120 bp, Artificial Sequence
  ENSG00000129667_14 (sequence is synthesized)
tgaccactccggatgcatccagacccagcggaaggactgctcggagactttggccacttttgtcaagtggcaggatgacactgggccccccatggacaagtctgatctgggccagaagcg

SEQ ID NO: 281699 - DNA, 120 bp, Artificial Sequence
  ENSG00000129667_15 (sequence is synthesized)
gacttcgggggctgtctgccaccaggaccccaggacctgcgaggagccagcctccagcggtgcccacatctggcccgatgacatcactaagtggccgatctgcacagagcaggccaggag

SEQ ID NO: 281700 - DNA, 120 bp, Artificial Sequence
  ENSG00000129667_16 (sequence is synthesized)
caaccacacaggcttcctgcacatggactgcgagatcaagggccgcccctgctgcatcggcaccaagggcagctgtgagatcaccacccgggaatactgtgagttcatgcacggctattt

SEQ ID NO: 281701 - DNA, 120 bp, Artificial Sequence
  ENSG00000129667_17 (sequence is synthesized)
ccatgaggaagcaacactctgctcccaggtgcactgcttggacaaggtgtgtgggctgctgcccttcctcaaccctgaggtcccagatcagttctacaggctctggctgtctctcttcct

SEQ ID NO: 281702 - DNA, 120 bp, Artificial Sequence
  ENSG00000129667_18 (sequence is synthesized)
acatgctggcgtggtgcactgcctcgtgtctgtggtctttcaaatgaccatcctgagggacctggagaagctggccggctggcaccgtatcgccatcatcttcatcctcagtggcatcac

SEQ ID NO: 281703 - DNA, 120 bp, Artificial Sequence
  ENSG00000129667_19 (sequence is synthesized)
aggcaacctcgccagtgccatctttctcccataccgggcagaggtgggcccggccggctcacagttcggcctcctcgcctgcctcttcgtggagctcttccagagctggccgctgctgga

SEQ ID NO: 281704 - DNA, 120 bp, Artificial Sequence
  ENSG00000129667_20 (sequence is synthesized)
gaggccctggaaggccttcctcaacctctcggccatcgtgctcttcctgttcatctgtggcctcctgccctggatcgacaacatcgcccacatcttcggcttcctcagtggcctgctgct

SEQ ID NO: 281705 - DNA, 120 bp, Artificial Sequence
  ENSG00000129667_21 (sequence is synthesized)
ggccttcgccttcctgccctacatcaccttcggcaccagcgacaagtaccgcaagcgggcactcatcctggtgtcactgctggcctttgccggcctcttcgccgccctcgtgctgtggct

SEQ ID NO: 281706 - DNA, 120 bp, Artificial Sequence
  ENSG00000129667_22 (sequence is synthesized)
gtacatctaccccattaactggccctggatcgagcacctcacctgcttccccttcaccagccgcttctgcgagaagtatgagctggaccaggtgctgcactgaccgctgggccacacggc

SEQ ID NO: 281707 - DNA, 120 bp, Artificial Sequence
  ENSG00000129667_23 (sequence is synthesized)
tgcccctcagccctgctggaacagggtctgcctgcgagggctgccctctgcagagcgctctctgtgtgccagagagccagagacccaagacagggcccgggctctggacctgggtgcccc

SEQ ID NO: 281708 - DNA, 120 bp, Artificial Sequence
  ENSG00000129667_24 (sequence is synthesized)
cctgccaggcgaggctgactccgcgtgagatggttggttaaggcggggtttttctggggcgtgaggcctgtgagatcctgacccaagctcaggcacacccaaggcacctgcctctctgag

SEQ ID NO: 281709 - DNA, 120 bp, Artificial Sequence
  ENSG00000129667_25 (sequence is synthesized)
tcttgggtctcagttcctaatatcccgctccttgctgagaccatctcctggggcagggtccttttcttcccaggtcctcagcgctgcctctgctggtgccttctcccccactactactgg

SEQ ID NO: 281710 - DNA, 120 bp, Artificial Sequence
  ENSG00000129667_26 (sequence is synthesized)
agcgtgcccttgctggggacgtggctgtgccctcagttgcccccagggctgggtgcccaccatgccccttcctctttctcctcctacctctgccctgtgagcccatccataaggctctca

SEQ ID NO: 281711 - DNA, 120 bp, Artificial Sequence
  ENSG00000129667_27 (sequence is synthesized)
gatgggacattgtgggaaaggctttggccatggtctgggggcagagaacaaggggggagacacaagtagacctcaggtagaacgacactgggcggagccaccccagggcctgctcccagg

SEQ ID NO: 281712 - DNA, 120 bp, Artificial Sequence
  ENSG00000129667_28 (sequence is synthesized)
gagtgctcgaggcgcatcaggcccgttttttaccagtttatatcacggtcttcatttttaaaagtaacgctaactttgtacggacgatgtctcatggattaaataatattctttatggca

SEQ ID NO: 281713 - DNA, 120 bp, Artificial Sequence
  ENSG00000129667_29 (sequence is synthesized)
acttggcctgaggatgagggcgctggaagaaggggatgggagattgggtgctttttcttgatggggaggggcgacttgaagacggcaatcaagacctagatgacgtgtttggtctggggt

SEQ ID NO: 281714 - DNA, 120 bp, Artificial Sequence
  ENSG00000129667_30 (sequence is synthesized)
ggagtgaggacgccaagagggaaaggacggcgccctgaagagaccagctcaggcgaaaacagggctctgcccaggcggggacccagctgggtggagggcggaggcaggaacccaggaagc

SEQ ID NO: 281715 - DNA, 120 bp, Artificial Sequence
  ENSG00000129667_31 (sequence is synthesized)
cgactgagcaaagactgcgtccaggccccgcccccatgagcccggccacgccccctggagcccagccccgcctcccggccgcccgcgcgcagctgtgagtacccaggaagctgcaccgtg

SEQ ID NO: 281716 - DNA, 120 bp, Artificial Sequence
  ENSG00000129667_32 (sequence is synthesized)
cctgtgccctgtcactcccagctgggcagattgacctgatccacctgggggccaagttctcaccctgcatccggaaggacgggcagatcgagcagctggtgctgcgcgagcgagacctgg

SEQ ID NO: 281717 - DNA, 120 bp, Artificial Sequence
  ENSG00000129667_33 (sequence is synthesized)
agcgggactcaggctgctgtgtccagaatgaccactccggatgcatccagacccagcggaaggactgctcggtgggggcaggccctccctcctacccctgccagaccctggtcccggact

SEQ ID NO: 281718 - DNA, 120 bp, Artificial Sequence
  ENSG00000129667_34 (sequence is synthesized)
agctccacttgccctgtccttcaagggcagtgaccacgttccctcctccccgccccacctttcccagacccccatagatgagactgagccctggggagatgggaaaagcctctgtccttg

SEQ ID NO: 281719 - DNA, 120 bp, Artificial Sequence
  ENSG00000129667_35 (sequence is synthesized)
gtggcaagggagctggggagagaagcagtttccttgtccccagccctcaccctagcatcctgtgattcagccgcgaagacgtggccccaagcctcccaccgccctccttctgtcctgact

SEQ ID NO: 281720 - DNA, 120 bp, Artificial Sequence
  ENSG00000129667_36 (sequence is synthesized)
gcgcccccttactcattcagcaagtgtttcatgagcatcttctgcggatcaggagtgtagtgacaagctcgaaggcgcaccctgtcccaagggttgtgcacatgacctgggaagggccag

SEQ ID NO: 281721 - DNA, 120 bp, Artificial Sequence
  ENSG00000129667_37 (sequence is synthesized)
gggtgcttgctgcctctcttccaccccatgctttctgagcctggtccccagccttgctcccagacagcagtcagtcaacaaatgttcattgagtgtcactgcctgcaggccctaaaatgg

SEQ ID NO: 281722 - DNA, 120 bp, Artificial Sequence
  ENSG00000129667_38 (sequence is synthesized)
aacccccagagggtggagcagggagggcagggtcggtcagaggacagttagaagctggggccagggctgggcgccgtggctcacacttgtaattatagcactttgggaggctgagtcaga

SEQ ID NO: 281723 - DNA, 120 bp, Artificial Sequence
  ENSG00000129667_39 (sequence is synthesized)
ccagcctgggcaacatagtgagaccctacctctactttaaaagaagaagctggggctgggagggaggggactctgggagaggctatgcagagcccttggggaagaacagggcatctgatt

SEQ ID NO: 281724 - DNA, 120 bp, Artificial Sequence
  ENSG00000129667_40 (sequence is synthesized)
ggctatgcagagcccttggggaagaacagggcatctgatttgcagcagcccaataaacactgggcccaaattagaaaataacaagcaggcagggcgcggtggctcacgcctgtaattcca

SEQ ID NO: 281725 - DNA, 120 bp, Artificial Sequence
  ENSG00000129667_41 (sequence is synthesized)
accctagcatcctgtgattcagccgcgaagacgtggccccaagcctcccaccgccctccttctgtcctgactgcccactcccagggacaccaggttcccagaccagaggactgttgttag

SEQ ID NO: 281726 - DNA, 120 bp, Artificial Sequence
  ENSG00000129667_42 (sequence is synthesized)
gtgattggctgtgaacaccctgaggccagtgcccctcgctgcttggcactcggagatgcctgattagcacctttaatcccttaccagtgaggcaggtggaattggccccattttacagat

SEQ ID NO: 281727 - DNA, 120 bp, Artificial Sequence
  ENSG00000129667_43 (sequence is synthesized)
tgcccccgaacccgacccctgtgatggccacccagccggacccctggggaaaggttcctgggccagggcatggccggcccaacctgccgaagcctactgctcctgaagtgcctggctgaa

SEQ ID NO: 281728 - DNA, 120 bp, Artificial Sequence
  ENSG00000129667_44 (sequence is synthesized)
gacttggggccgcagggaggtgagcgcggggcgacgagcggggcaggactcacggccgcccagccgcaggcgccggaagggtcccgaggttgtgcccgagcctgccctggagcggtggtg

SEQ ID NO: 281729 - DNA, 120 bp, Artificial Sequence
  ENSG00000129667_45 (sequence is synthesized)
gtcccgaggttgtgcccgagcctgccctggagcggtggtgcgcggccaggaagggtgcccagtgcccggtgcccgccctgcggagcgcctgggtcccacgtgggctcggctggaggcccg

SEQ ID NO: 281730 - DNA, 120 bp, Artificial Sequence
  ENSG00000129667_46 (sequence is synthesized)
ctgctggcccctagggctcggctcggacaggacgcctaaggggtccctgggcgacggggcgccagatgtaggggcaagacgattgggcagagatttaaacctccggaggaagagaggaga

SEQ ID NO: 281731 - DNA, 120 bp, Artificial Sequence
  ENSG00000129667_47 (sequence is synthesized)
atacctcctgcggggcccacgctctctgtctgaacagcggtggacagtgaatgaagaaagtcaattcagggagcgagagggaggaataagggcagggaagggacgggcgcggtggctcac

SEQ ID NO: 281732 - DNA, 120 bp, Artificial Sequence
  ENSG00000129673_0 (sequence is synthesized)
tacaaacctctaacagcaccacaggctgcccggggaacatctgctactacagccttgcagcccggagtcccggattttactggttcccgtgcctgcggacaggcccccagggctagcggc

SEQ ID NO: 281733 - DNA, 120 bp, Artificial Sequence
  ENSG00000129673_1 (sequence is synthesized)
tttgtggagggaacactgggtatcctctccacagtccaggtgctgggaggccctccttggcttaggaggacacttccaaagctggggcgccccaaggaggcaccagtggccagaatgtcc

SEQ ID NO: 281734 - DNA, 120 bp, Artificial Sequence
  ENSG00000129673_2 (sequence is synthesized)
acgcagagcacccaccccctgaaacctgaggccccacgtctgccacctgggatccccgagtccccgagctgtcagcggcgccacacactccctgccagtgagtttcgctgcctcaccccg

SEQ ID NO: 281735 - DNA, 120 bp, Artificial Sequence
  ENSG00000129673_3 (sequence is synthesized)
gaggacgctgtcagcgcctttgagatcgagcgtgaagccttcatctccgtcttgggcgtctgccccctgtacctggatgagatccggcacttcctgaccctatgtccagagctgtccctg

SEQ ID NO: 281736 - DNA, 120 bp, Artificial Sequence
  ENSG00000129673_4 (sequence is synthesized)
ctctgggacaaggagagactcatgcaggagtcactgacgctgcacaggtctgggggccacatagcccacctgcatgtgctggccgtgcaccgcgccttccggcagcagggcaggggcccc

SEQ ID NO: 281737 - DNA, 120 bp, Artificial Sequence
  ENSG00000129673_5 (sequence is synthesized)
atcctgctgtggcgctacctgcaccacctgggcagccagccggccgtgcgccgggccgcgctcatgtgcgaggacgcgctggtacccttctatgagaggttcagcttccacgccgtgggc

SEQ ID NO: 281738 - DNA, 120 bp, Artificial Sequence
  ENSG00000129673_6 (sequence is synthesized)
ccctgcgccatcaccgtgggctccctcaccttcatggagctccactgctccctgcggggccaccccttcctgcgcaggaacagcggctgctgaactgggctgcccacctggctgccaaca

SEQ ID NO: 281739 - DNA, 120 bp, Artificial Sequence
  ENSG00000129673_7 (sequence is synthesized)
tgatccccgtctctgccctgggctcctcttagctcagctgagcatggagacagcagtttccagagagtggagagagcagggctaaataaagaggagataaggtggcttctcacggcctga

SEQ ID NO: 281740 - DNA, 120 bp, Artificial Sequence
  ENSG00000129673_8 (sequence is synthesized)
atggaatccactaagaaggggcgagaccagtgaggattcaactaaagggagcgagaaggggcggggacccgggaggaggaagtggagtggccaccgaggaagaggggagtggtcggggtg

SEQ ID NO: 281741 - DNA, 120 bp, Artificial Sequence
  ENSG00000129673_9 (sequence is synthesized)
gggcacaggatggtggagagactgtcaacaacttttaatgagctcccttggcgtcctagcctagcccccaggcactgggagcattgcagaaagagaaagatactgtccctgtcctctagg

SEQ ID NO: 281742 - DNA, 120 bp, Artificial Sequence
  ENSG00000129673_10 (sequence is synthesized)
tgtttccagtctagttggggagacaaaacaaatacacattaaatagataacaaacaactccaacttgtaaggctataatagatacgtgtagagcatatgtataatgcactgtattcagga

SEQ ID NO: 281743 - DNA, 120 bp, Artificial Sequence
  ENSG00000129673_11 (sequence is synthesized)
attccaagcagttcgaacgtcatgacccctcagaagttgacccagaagctggtgaaggaggcccagagaaagatacagggtgaggcacagtgaatctgctggaccagcttcaagaacaat

SEQ ID NO: 281744 - DNA, 120 bp, Artificial Sequence
  ENSG00000129673_12 (sequence is synthesized)
atgtcagcctatccactgccacctcccacagctccagactcgtgggtgcttcctggatgtgaccagccatagaatttatcaccctggcaaggaccctggtacttggaagcttggagaaag

SEQ ID NO: 281745 - DNA, 120 bp, Artificial Sequence
  ENSG00000129673_13 (sequence is synthesized)
tgattcagggctcttacccgcagtgggcaggactgctgacggctcccagctggattttcctgcaactgccctcaatgaagcaagctgttccacccaaggttgatgcaggacaaagagggt

SEQ ID NO: 281746 - DNA, 120 bp, Artificial Sequence
  ENSG00000129673_14 (sequence is synthesized)
gtcgcccaggctggagtgcagtggcgagtcactacagcctcgacctctccggctcaagccatcctcccgtctctgtctcccaaagtgctgggattacagcggtgagccactgtgcctggc

SEQ ID NO: 281747 - DNA, 120 bp, Artificial Sequence
  ENSG00000129673_15 (sequence is synthesized)
gctcttctcaggcatcgccaagtgactgattaggattggccaccagggggtgccatggagccacagtctatgaagggacagaagaggccttttgggggaccctggaggttgaaggtgctg

SEQ ID NO: 281748 - DNA, 120 bp, Artificial Sequence
  ENSG00000129675_0 (sequence is synthesized)
agtccttgcagctgccccagagtgctgtttggagtgtaccgtcctcagtaatgaatccagaagaacaaatcgtgacatggcttatatctttgggagttttagagtcccctaaaaagacca

SEQ ID NO: 281749 - DNA, 120 bp, Artificial Sequence
  ENSG00000129675_1 (sequence is synthesized)
tctgtgatccggaggagtttttaaagtcctcgctgaaaaatggggtagttctgtgcaaactgatcaacagactcatgcctggctctgtggaaaagttttgtctggatccccaaactgaag

SEQ ID NO: 281750 - DNA, 120 bp, Artificial Sequence
  ENSG00000129675_2 (sequence is synthesized)
ctgactgcatcaacaacatcaatgacttcctgaaaggatgtgcaaccctccaagtggaaatatttgatcctgatgacctttattcaggggtcaatttctccaaggtactgagtactcttt

SEQ ID NO: 281751 - DNA, 120 bp, Artificial Sequence
  ENSG00000129675_3 (sequence is synthesized)
tagctgtcaacaaagcaacagaagatcagctatcagaaagaccatgtggacgttcctcttctcttagtgctgctaatacttctcagacaaacccacagggagcagtttctagcacagttt

SEQ ID NO: 281752 - DNA, 120 bp, Artificial Sequence
  ENSG00000129675_4 (sequence is synthesized)
cagggctgcaaaggcagtcaaagacagtggagatgacggaaaatggaagtcatcagttgatagtaaaagcaagattcaactttaagcagactaatgaggatgaactgtcagtttgtaagg

SEQ ID NO: 281753 - DNA, 120 bp, Artificial Sequence
  ENSG00000129675_5 (sequence is synthesized)
gggacatcatttacgtcacacgagttgaagaaggaggctggtgggaaggcacattaaatgggagaacaggctggttccccagtaattatgtccgtgaaattaaatccagtgagagacctc

SEQ ID NO: 281754 - DNA, 120 bp, Artificial Sequence
  ENSG00000129675_6 (sequence is synthesized)
tctccccaaaagccgtcaaaggatttgaaactgctccacttaccaagaattattatactgtggtgttacagaacatcctggacactgaaaaagaatatgctaaagaacttcagtctcttc

SEQ ID NO: 281755 - DNA, 120 bp, Artificial Sequence
  ENSG00000129675_7 (sequence is synthesized)
ttgttacttacttaagacccctgcagtccaataacaatctgagtactgtggaggttacatctttactgggaaacttcgaggaagtatgcacatttcaacagacactctgccaagccttgg

SEQ ID NO: 281756 - DNA, 120 bp, Artificial Sequence
  ENSG00000129675_8 (sequence is synthesized)
aagaatgttcaaagtttccagaaaaccagcacaaagtaggaggttgtctactgagtctcatgcctcattttaaatctatgtatctggcttactgtgcaaaccatccttcagctgtaaatg

SEQ ID NO: 281757 - DNA, 120 bp, Artificial Sequence
  ENSG00000129675_9 (sequence is synthesized)
tgctcactcagcacagtgatgagttggaacaattcatggaaaatcaaggtgcatcgagcccaggtatcctcattttaacaacaaacctcagcaaaccattcatgcgactggagaaatatg

SEQ ID NO: 281758 - DNA, 120 bp, Artificial Sequence
  ENSG00000129675_10 (sequence is synthesized)
ttactctcttgcaagagttagaacggcatatggaggatactcatccagatcatcaggatattctgaaagcaatcgtagcattcaaaactctcatggggcaatgtcaagatctgaggaaga

SEQ ID NO: 281759 - DNA, 120 bp, Artificial Sequence
  ENSG00000129675_11 (sequence is synthesized)
gaaaacagctggagttacagatactgtccgaacctattcaggcatgggaaggagaagatattaaaaacttgggaaatgtgatttttatgtcacaagtaatggtgcagtatggagcatgtg

SEQ ID NO: 281760 - DNA, 120 bp, Artificial Sequence
  ENSG00000129675_12 (sequence is synthesized)
aggaaaaagaggagcggtaccttatgttattttcaaatgtcctgataatgttatctgcaagtcctcggatgagtggctttatctatcagggaaaaataccaatagcaggaacggtggtga

SEQ ID NO: 281761 - DNA, 120 bp, Artificial Sequence
  ENSG00000129675_13 (sequence is synthesized)
ctagattagatgaaattgaagggaatgactgcacatttgaaatcactggtaacacagtggagagaattgtggtccattgtaacaacaaccaggacttccaggaatggttggagcagctga

SEQ ID NO: 281762 - DNA, 120 bp, Artificial Sequence
  ENSG00000129675_14 (sequence is synthesized)
acagactgatcagaggacctgcctcttgcagttcattatccaaaacctcatcgtcatcatgtagtgctcattcttcttttagctctaccggacagccccgaggacccttggagcctcctc

SEQ ID NO: 281763 - DNA, 120 bp, Artificial Sequence
  ENSG00000129675_15 (sequence is synthesized)
aaattataaaaccgtggagtttaagttgtctacgacctgcacctccacttagaccatcagcagcactaggttataaagagaggatgtcttatatcttaaaggagtctagtaaaagcccta

SEQ ID NO: 281764 - DNA, 120 bp, Artificial Sequence
  ENSG00000129675_16 (sequence is synthesized)
aaacgatgaagaaatttcttcataaaaggaagactgagagaaaaccatcggaggaggaatatgtgattaggaaaagtacagctgctctggaagaggatgctcaaatccttaaagtgatcg

SEQ ID NO: 281765 - DNA, 120 bp, Artificial Sequence
  ENSG00000129675_17 (sequence is synthesized)
aagcctactgcaccagcgcaaattttcaacaaggccatggctcaagtactcgaaaagattccattccacaagtcctactccctgaggaagagaaactcatcattgaagaaaccagaagca

SEQ ID NO: 281766 - DNA, 120 bp, Artificial Sequence
  ENSG00000129675_18 (sequence is synthesized)
acggccagaccatcatggaagaaaagagccttgttgatactgtttacgccttgaaggacgaggtcagagaactgaagcaggaaaataaaagaatgaagcaatgcctggaagaagaactga

SEQ ID NO: 281767 - DNA, 120 bp, Artificial Sequence
  ENSG00000129675_19 (sequence is synthesized)
aatcaagaagggacctagaaaagctggtgcggaggcttttgaagcaaacagatgagtgtattcgaggcgagtccagtagcaagacctcaattcttccataaccatcactgtgccactggg

SEQ ID NO: 281768 - DNA, 120 bp, Artificial Sequence
  ENSG00000129675_20 (sequence is synthesized)
acttctttggcttttgttttgtgtttgagtctctctctctctctccctctctcttctctttctctccccgctgtgtgcatatgtgtgtgcgtgcacgtgcgcgcttgggcatttgctgtt

SEQ ID NO: 281769 - DNA, 120 bp, Artificial Sequence
  ENSG00000129675_21 (sequence is synthesized)
gtttggttattggttggttgttcattttttttttcaacaggtgaaaaagcaggaagtggtggtagagatggcctcagagtcttttccattcagtaagaaagagaaagggaatgcaggcca

SEQ ID NO: 281770 - DNA, 120 bp, Artificial Sequence
  ENSG00000129675_22 (sequence is synthesized)
gttacttaaaaggtcttcagattgccttcagttcacagtgcctctgcaacagccattgccctcaggtcacattctttgggctggctgcccttgcaaagcagctggccaaggcttattaaa

SEQ ID NO: 281771 - DNA, 120 bp, Artificial Sequence
  ENSG00000129675_23 (sequence is synthesized)
tgtgaacccaacttttccccagggctttcctgtacctgcaagcctcttagtacttaatttaccgaaggcaaatcttccagactatggcttgagtaggatgaaagacaaacacatctgccc

SEQ ID NO: 281772 - DNA, 120 bp, Artificial Sequence
  ENSG00000129675_24 (sequence is synthesized)
aatgatccagctgcccttccttagaccatcacatgcctcccctcaatcacaggttttaaaattactgccctatgttgtctataagaccaagaaaactgtagtacccttattccttttgtg

SEQ ID NO: 281773 - DNA, 120 bp, Artificial Sequence
  ENSG00000129675_25 (sequence is synthesized)
tcatgtaaattgtaactcaggggggcagaagctctggtcacccacaccaacaccaaatccatcagcaaattctactggacaatcctcccttttagtagcagagttgaccgccttttccca

SEQ ID NO: 281774 - DNA, 120 bp, Artificial Sequence
  ENSG00000129675_26 (sequence is synthesized)
ttgcatgataggtttctttccctcattctgcctagtgtgtaagttttctatttccccagtacttttagccaaccttaccaagtggtgtgtaaactagtatgtatgtgctttgcttacttt

SEQ ID NO: 281775 - DNA, 120 bp, Artificial Sequence
  ENSG00000129675_27 (sequence is synthesized)
ttaaaaaaatgtagttagactgtgaggagttactttatgtacgttgcatattcaaactgtgatgttttatccttcaaaacaatctgcattaagaagatattgtgccctactagacagctt

SEQ ID NO: 281776 - DNA, 120 bp, Artificial Sequence
  ENSG00000129675_28 (sequence is synthesized)
tcattcactttattactctctcatatatgctgtgagaagttgtaatattaattggcctctttgggtgggactctaagcagtatttgcagaaatatgcttctggtccaacttgtacatcca

SEQ ID NO: 281777 - DNA, 120 bp, Artificial Sequence
  ENSG00000129675_29 (sequence is synthesized)
gaacaaaagggcccctctagtagctgtgtgctggattattcaggactgattaactcaagttgctcattgaatcacatcatccactttatcccagaaactagaactgtgagaaaccaggtt

SEQ ID NO: 281778 - DNA, 120 bp, Artificial Sequence
  ENSG00000129675_30 (sequence is synthesized)
tagaagacagtcacagaacagcacacatccaaattcagcgccattgaaagttggcctaaggctcagtgccactcacccctccctccccaaaagacaagagaaatttggccagatggggaa

SEQ ID NO: 281779 - DNA, 120 bp, Artificial Sequence
  ENSG00000129675_31 (sequence is synthesized)
ggtcactggaaattgaggccaaagggctgatcagaattgcctttataatatatttgatggatgcctataaatgtgggttttgcaaatattgtttaaaaaccaaacttgaagccaggcatg

SEQ ID NO: 281780 - DNA, 69 bp, Artificial Sequence
  ENSG00000129675_32 (sequence is synthesized)
acaccactgcactccaacctaggtaacagagagacacctctgtctctgaaaaaacaaaacttgaagttt

SEQ ID NO: 281781 - DNA, 120 bp, Artificial Sequence
  ENSG00000129675_33 (sequence is synthesized)
agagacacctctgtctctgaaaaaacaaaacttgaagtttgaaacccccagcttgctgaggagccctttttatttttggtactgagagtctcaaggtcccatagctacatggtacagggc

SEQ ID NO: 281782 - DNA, 120 bp, Artificial Sequence
  ENSG00000129675_34 (sequence is synthesized)
tgttgtctgcttgctgcacagcagaaattacaccatccacaggaaatggactatttttgcagtccaacatcagccaaccacacacagccgtgtttggaagctgaagagtaaagaaatttc

SEQ ID NO: 281783 - DNA, 120 bp, Artificial Sequence
  ENSG00000129675_35 (sequence is synthesized)
taggaatggctgttgttctgttttttagcacagccatttagatataacatccttcacttaaaaattaaaaacatcagtactaccaccaccaccaacaacatcaacacagatcttcacatc

SEQ ID NO: 281784 - DNA, 120 bp, Artificial Sequence
  ENSG00000129675_36 (sequence is synthesized)
tgcccattctgtggttagtcaatggcttgcaataaatgtgcaaactgcatctataggaaacatttttgtgattacggaatactttagttgattgctgaaaatattgaaaggtcttcattt

SEQ ID NO: 281785 - DNA, 120 bp, Artificial Sequence
  ENSG00000129675_37 (sequence is synthesized)
tacagtgatgagtacatatgcatgtttcggggacttggcccttctgatgaggggccctcggtactctggataacgaagcttgtgcagagtggtaaccatgcttacacactaaactataat

SEQ ID NO: 281786 - DNA, 120 bp, Artificial Sequence
  ENSG00000129675_38 (sequence is synthesized)
ataaaggaaatgaagccatgttaatctgagagcagtgtcgccatagttgtgttgtttacaatactctataaatgggttcctgttgccctgtaattaaactgctgcccgtagaggcctttc

SEQ ID NO: 281787 - DNA, 120 bp, Artificial Sequence
  ENSG00000129675_39 (sequence is synthesized)
agttccttttctgtccttccccttcttaacacaagctcaaattttctaacttgtttttattttgaagacttttaaaatggacattttcaatacataaaaataaacagtgctttataaaaa

SEQ ID NO: 281788 - DNA, 120 bp, Artificial Sequence
  ENSG00000129675_40 (sequence is synthesized)
agtttcgccctggtggcggccgcgctcagggcagggtcccagctccggctgggttgatctgttcccgcagccttggcacaggcttgcccgcccgctcgccggccccgtgactcgggaggg

SEQ ID NO: 281789 - DNA, 120 bp, Artificial Sequence
  ENSG00000129675_41 (sequence is synthesized)
cgaacggcttccaggaggcggcggcggcgcggctggagtgagggagcagctggaggacaggcgggcagcggccgagccagatatttgatcctgatgacctttattcaggggtcaatttct

SEQ ID NO: 281790 - DNA, 120 bp, Artificial Sequence
  ENSG00000129675_42 (sequence is synthesized)
gccctgaccctgccacttgtgtgaagtcaggatctcctttcccaggcctcagttgagtcatctgtaaaatgaggagactagagtaggggttgggtaatgtctaatggttgtaatgtctgt

SEQ ID NO: 281791 - DNA, 120 bp, Artificial Sequence
  ENSG00000129675_43 (sequence is synthesized)
ttttaacttgcccatttccatcagtttccgctaggcaaagctttgcatatttagctgctcagttggaactagtaggaagaccaaagaggattttgatatttgatcctgatgacctttatt

SEQ ID NO: 281792 - DNA, 120 bp, Artificial Sequence
  ENSG00000129680_0 (sequence is synthesized)
aatgtatgcggagagccaccaccgcctccggtcccgactccgatgatggcggacggcgccgcagctggcgctggcggcagcccatccttgagagagctgcgggcacggatggttgctgca

SEQ ID NO: 281793 - DNA, 120 bp, Artificial Sequence
  ENSG00000129680_1 (sequence is synthesized)
gcaaacgagattgctaaggaaaggaggaagcaagatgtggttaatcgtgttgcaacccattcctcaaatataagatcgacatttaaaccagtaatcgatggatccatgcttaaaaatgac

SEQ ID NO: 281794 - DNA, 120 bp, Artificial Sequence
  ENSG00000129680_2 (sequence is synthesized)
ataaaacaaagattagcaagagagcgcagagaggagaaaaggagacagcaagacgccaataaagaaacacaactacttgaaaaagaaagaaagaccaagctccaatatgaaaaacagatg

SEQ ID NO: 281795 - DNA, 120 bp, Artificial Sequence
  ENSG00000129680_3 (sequence is synthesized)
gaggaaagacagagaaagctgaaggagcgaaaagagaaagaagaacaacggagaatagctgcagaagaaaaaagacaccagaaggatgaagcacaaaaggaaaaatttacagccattctt

SEQ ID NO: 281796 - DNA, 120 bp, Artificial Sequence
  ENSG00000129680_4 (sequence is synthesized)
tatcgtactttggaacggaggagacttgctgatgattatcagcaaaaaagatggtcatggggaggctctgcaatggcgaattctgagagcaaaactgccaataaacgatctgcatctact

SEQ ID NO: 281797 - DNA, 120 bp, Artificial Sequence
  ENSG00000129680_5 (sequence is synthesized)
gaaaaacttgaacagggtacttctgctttaatcagacaaatgcctttgtcatctgcaggccttcaaaattccgttgccaaaaggaaaacagacaaggagagaagctcatctttaaataga

SEQ ID NO: 281798 - DNA, 120 bp, Artificial Sequence
  ENSG00000129680_6 (sequence is synthesized)
agagatagtaacctacattcgtctactgataaagaacaagccgaaaggaagccacgtgttacaggcgtcaccaattatgtaatgcagtatgtcactgtacccttgcgtaaatgtactagc

SEQ ID NO: 281799 - DNA, 120 bp, Artificial Sequence
  ENSG00000129680_7 (sequence is synthesized)
gacgaattgagggctgttatgtttcccatgtcgacaatgaaaatacctcctcaaacaaaagtagaagagtctcccttggagaaagtagagacacctcccaaggcaagtgtggatgcaccc

SEQ ID NO: 281800 - DNA, 120 bp, Artificial Sequence
  ENSG00000129680_8 (sequence is synthesized)
ccccaggtgaatgtggaagtattctgcaacacaagcatggaagcgtcccccaaggcaggtgtgggcatggcccctgaggtgagcacggactcattccctgtggtgagcgtggacgtgtcg

SEQ ID NO: 281801 - DNA, 120 bp, Artificial Sequence
  ENSG00000129680_9 (sequence is synthesized)
cctgtggtgagcacatatgattctgagatgagcatggacgcatcccccgagttgagcatagaagcactcccgaaggtggacctggaaacagttcccaaggtgagcatagtagcatccccg

SEQ ID NO: 281802 - DNA, 120 bp, Artificial Sequence
  ENSG00000129680_10 (sequence is synthesized)
gaggcgagcctggaagcacccccggaagtgagtctggaagcactgccagaggtgagcgtggaagcagccccagaggggagcctggaagcacctcccaaggggagcgcagaagtagccccc

SEQ ID NO: 281803 - DNA, 120 bp, Artificial Sequence
  ENSG00000129680_11 (sequence is synthesized)
aaggagagtgtgaaagggtcacccaaggagagcatggaggcatctcctgaggcgatggtgaaagcatcccccaagacatcccttgaagcaagcatggaagcatctcccaaggcaaaagcg

SEQ ID NO: 281804 - DNA, 120 bp, Artificial Sequence
  ENSG00000129680_12 (sequence is synthesized)
agagacgctccaaagaaatcagaaatggacaaacaggccttaatccctattgccaagaagcgtctatcatcatacactgagtgttataaatggtcatcatctcctgaaaatgcttgtggt

SEQ ID NO: 281805 - DNA, 120 bp, Artificial Sequence
  ENSG00000129680_13 (sequence is synthesized)
ctgccgtctcccatcagcactaacaggcaaatccaaaagaactgccctccatcaccattaccacttatttcaaaacagtcaccacagacttcttttccttataaaataatgcctattcaa

SEQ ID NO: 281806 - DNA, 120 bp, Artificial Sequence
  ENSG00000129680_14 (sequence is synthesized)
cacaccctgtctgtgcaaagtgcatcaagtactgtcaaaaagaaaaaagaaacagtttctaaaaccactaacagatgtgaggctttgagccaaaggcatatgatctatgaagagtctggt

SEQ ID NO: 281807 - DNA, 120 bp, Artificial Sequence
  ENSG00000129680_15 (sequence is synthesized)
aataagagtactgcaggtattatgaatgccgaggcggcaacaaaaattttgacagaattgcgccgccttgctcgtgaacaaagagaaaaagaggaagaagaaagacaacgggaagaaatg

SEQ ID NO: 281808 - DNA, 120 bp, Artificial Sequence
  ENSG00000129680_16 (sequence is synthesized)
cagcaaagggtcattaagaaatcaaaagacatggcaaaggaagcagttggaggccaagcagaagaccacttgaaactcaaagatgggcagcaacaaaatgagactaaaaagaagaaagga

SEQ ID NO: 281809 - DNA, 120 bp, Artificial Sequence
  ENSG00000129680_17 (sequence is synthesized)
tggctggatcaggaagaccaggaagcaccactgcagaaaggggacgccaaaataaaagctcaagaggaagctgacaaacgcaagaaagaacacgagagaattatgttacaaaatttacaa

SEQ ID NO: 281810 - DNA, 120 bp, Artificial Sequence
  ENSG00000129680_18 (sequence is synthesized)
tgcctcaaaggtcacagaaacatccagccatgacatatatgaagaggctgaggctgacaacgaagaaagcgacaaggactcattgaatgaaatgtttccatcagccattctaaatggcac

SEQ ID NO: 281811 - DNA, 120 bp, Artificial Sequence
  ENSG00000129680_19 (sequence is synthesized)
aggctcacctaccaaatttaaaatgccgttcaacaatgccaagaaaatgacacacaagctggtatttctagaagatggtaccagccaggtccgtaaagagccaaaaacatattttaatgg

SEQ ID NO: 281812 - DNA, 120 bp, Artificial Sequence
  ENSG00000129680_20 (sequence is synthesized)
cgatttgaaaaacttcagacaaaaaagcatgaaagacacttcaatacaggaagtagtttcaagaccatcttccaaaagaatgaccagtcacacaacgaaaaccagaaaggcggatgaaac

SEQ ID NO: 281813 - DNA, 120 bp, Artificial Sequence
  ENSG00000129680_21 (sequence is synthesized)
caacaccaccagcagatcctctgcacaaacaaaatctgaaggattccatgacatcttgccaaagtcctcagacacctttagacaataagagaagaagcaaacctgtttctcctcatttgg

SEQ ID NO: 281814 - DNA, 120 bp, Artificial Sequence
  ENSG00000129680_22 (sequence is synthesized)
atatgtaaaccttactcagcctgggagatgaatacatcttccactctggataactcaactcctgggcccatcagtcctcaaatttttctgcttctgacttgaacctggtaaaggaagtga

SEQ ID NO: 281815 - DNA, 120 bp, Artificial Sequence
  ENSG00000129680_23 (sequence is synthesized)
caccgaaaaattgaaagaaactgtcaaaaggccactttgatgtatatctcagatgttaaagtcatcttattctcttgtgtctaagcaagagttctaagtaaagagtggtttttgttttct

SEQ ID NO: 281816 - DNA, 120 bp, Artificial Sequence
  ENSG00000129680_24 (sequence is synthesized)
ttggaaaatcatcattgtctctcattcttgtgttgtcccaccaatgtgtttgctggagtgagtgcatcaaggatgctttcctgaaactgtaactgtggagtttctagaagaatctgattg

SEQ ID NO: 281817 - DNA, 84 bp, Artificial Sequence
  ENSG00000129680_25 (sequence is synthesized)
ctgaaactgtaactgtggagtttctagaagaatctgattgcagaactaattctctttcagtatatatttgaaatcttaaagtaa

SEQ ID NO: 281818 - DNA, 77 bp, Artificial Sequence
  ENSG00000129680_26 (sequence is synthesized)
agggttttaccatgttcaccaggctagtctcgaaatcctggcctcaagagatccacccgtcttggcctcccaaagtg

SEQ ID NO: 281819 - DNA, 120 bp, Artificial Sequence
  ENSG00000129680_27 (sequence is synthesized)
ccaagtaatgctttttctgtgtaccagtgacaattttgacagctaaaaactcacagttgatcttgtagagaacagaatagattatgcaagggccgcaggatcgctcacaagagctgtcag

SEQ ID NO: 281820 - DNA, 120 bp, Artificial Sequence
  ENSG00000129680_28 (sequence is synthesized)
attgtttctaatataaaaataccaaaggttgcaaaatccagcaaattgtattttactgtgatatatgtatatttttaactctacccatctgtgccagtgagtacacaggcactaataacc

SEQ ID NO: 281821 - DNA, 120 bp, Artificial Sequence
  ENSG00000129680_29 (sequence is synthesized)
tgaaatgctgggagtcctgtaaagccccatcttggaacagtcagcacctttcatgctcttgtcagtgtttccttttgaaggacatattggtgtttatctacagaaacatatattattttt

SEQ ID NO: 281822 - DNA, 120 bp, Artificial Sequence
  ENSG00000129680_30 (sequence is synthesized)
attgtgtacataaaggagtatatggctgttgtcccgtggggtatgtttaattcctctaaatgtttaaagtacttttctgcctgtactctccagttctgtcgttgagtatacactcaggct

SEQ ID NO: 281823 - DNA, 120 bp, Artificial Sequence
  ENSG00000129680_31 (sequence is synthesized)
tgagatacaaccaaaatttgcttgcctttctctagccactggctgccagtgagttcgtgtgatgggcacacagaaatgcacacagatgtacatacacgtatgtatgcacacacagtatat

SEQ ID NO: 281824 - DNA, 120 bp, Artificial Sequence
  ENSG00000129680_32 (sequence is synthesized)
gattccataaaattcaaatgcagattaattctcctaatgagttttcagtgttgaatcgtaaatagtctgaagcaggccagtgttccttttggctgccagtcttggattagtaaaaggagg

SEQ ID NO: 281825 - DNA, 120 bp, Artificial Sequence
  ENSG00000129680_33 (sequence is synthesized)
taattctttcagattccctggttctttgccactcagagtattgtacttttgatatagaatagagaaggttacctttggtttaaaaactatttttatatactagctctttcatgtataaaa

SEQ ID NO: 281826 - DNA, 120 bp, Artificial Sequence
  ENSG00000129680_34 (sequence is synthesized)
cagagacaatcatcctaacaaaagagttcctgttatttttctgcacaaatgtcttgtgttgaaacactgttacagttccatataaatgtgtgctatataaaataaactttggagataaaa

SEQ ID NO: 281827 - DNA, 120 bp, Artificial Sequence
  ENSG00000129680_35 (sequence is synthesized)
aaggccaaggtgatggacactgacctagctttcccctcacgcattgctgcctcgcatttcccttcctggtatcctctacccggagggacagacccctggcctctaccagcagattctgca

SEQ ID NO: 281828 - DNA, 120 bp, Artificial Sequence
  ENSG00000129680_36 (sequence is synthesized)
gatcagcgcattttctacgcctgtgtcattgtggacactgcatgtggaatgaagttttttaacagctccaatccctaaaaaccacaagaatgcagtgtgaaataccataaagaatgccag

SEQ ID NO: 281829 - DNA, 120 bp, Artificial Sequence
  ENSG00000129680_37 (sequence is synthesized)
acaggcccctgaagacctgaacccagctgagagggctgctagctcacgtgtgacattgtgcacgttgttgctcttctctgatccctgttccttgtctgtcaaatgagggggctgtgctac

SEQ ID NO: 281830 - DNA, 120 bp, Artificial Sequence
  ENSG00000129680_38 (sequence is synthesized)
aatctctgcagccttttcagttttgagactccactgttctcaaacacctctaactccttggagccagagcaagagggatcaggaggcataaaacagcagcgatggccaaggagccagagc

SEQ ID NO: 281831 - DNA, 120 bp, Artificial Sequence
  ENSG00000129680_39 (sequence is synthesized)
gtggaggcggactgtgcatgacattttatcatgtcagggggcaattccctgtcattttcagtgaccccacccctccagtgcctggccggcctggttggtcaaaacaggccccgaaacagc

SEQ ID NO: 281832 - DNA, 120 bp, Artificial Sequence
  ENSG00000129680_40 (sequence is synthesized)
ctccttgcctttggtctccttaccagtccagttacagtgtttccagatgggtcctaggcacccatctgattctaatttccccaactgtattgtaatcattgcagttaggtttacatgtgc

SEQ ID NO: 281833 - DNA, 68 bp, Artificial Sequence
  ENSG00000129680_41 (sequence is synthesized)
ccaactgtattgtaatcattgcagttaggtttacatgtgcaatatgcaaggtacttgataggcatttt

SEQ ID NO: 281834 - DNA, 73 bp, Artificial Sequence
  ENSG00000129680_42 (sequence is synthesized)
cattttcaatgctcacaacaactctatgaggtgtgggtattcatttatgcctatgaggacactgaaatttgtg

SEQ ID NO: 281835 - DNA, 120 bp, Artificial Sequence
  ENSG00000129680_43 (sequence is synthesized)
tgggtattcatttatgcctatgaggacactgaaatttgtggagagcagcatttgttccaggtcacacagctggaaagagacagagctgatattcaaacccaagtttgtccctcaaactaa

SEQ ID NO: 281836 - DNA, 120 bp, Artificial Sequence
  ENSG00000129680_44 (sequence is synthesized)
caccccacactgctttgggagtggacatagtgtcttgaggcttgcagggtatgtcacagacaccagagcagtgtctttggtgctgggaatgaaatgtttgttggcatttagtgtgtttac

SEQ ID NO: 281837 - DNA, 120 bp, Artificial Sequence
  ENSG00000129680_45 (sequence is synthesized)
tgggtgccagtcccctcactaagcacctgcattatgtctcccacatgggattctgcaaagtagaaattttacgtctcacaggtgaaggatcaagctcagagaggttaacttgcccacagt

SEQ ID NO: 281838 - DNA, 120 bp, Artificial Sequence
  ENSG00000129680_46 (sequence is synthesized)
ctcatgactacaaagtggcagagcagccaggatttgaaccctggtagcctggtgccagagcccaccctgttaaccacaagcagagaggttcttgatattctgatcccattaattatgagg

SEQ ID NO: 281839 - DNA, 120 bp, Artificial Sequence
  ENSG00000129680_47 (sequence is synthesized)
gagaaaatgtttctctgctgacaaattgttaaggggaaatttaccctcatttctcctgagccttaggggtgtcactcttaaaatcgcatattcaacaaacaaatgccttctaagtactga

SEQ ID NO: 281840 - DNA, 120 bp, Artificial Sequence
  ENSG00000129680_48 (sequence is synthesized)
aaaaggaaatggtacagagcagcctgttgaaattagacagcagggtcaccctggtcctctgtgccacaggaaggaggggtactgaagtgtcagttgttggtgggggagcagtgctgcagt

SEQ ID NO: 281841 - DNA, 120 bp, Artificial Sequence
  ENSG00000129680_49 (sequence is synthesized)
taatgtaaattgttagtccagaagcaaatatcaatgtcctgattctcatactctaaaagaaaattgcagtttaaagaattctaattgtgttttattcagaatgtttttctcttcaaaaaa

SEQ ID NO: 281842 - DNA, 120 bp, Artificial Sequence
  ENSG00000129680_50 (sequence is synthesized)
acattatttcattttggaacaagtaggtgttaaaaagaaacaaaatgcttctgctgttgttgggggtgcagtttgaacaaaatctgttagataatcacctatagtttgcttgtgatttat

SEQ ID NO: 281843 - DNA, 120 bp, Artificial Sequence
  ENSG00000129680_51 (sequence is synthesized)
aaattttggactacgcacatatatatatattttaatgttttggattgtgttgcacttctttgttggagtgagagttgattagctctcttaactgttgcacatatttatttaaactagagt

SEQ ID NO: 281844 - DNA, 120 bp, Artificial Sequence
  ENSG00000129682_0 (sequence is synthesized)
gtcgcgctgttccggagggtgcctgcggcggctgaattcctgtgctgcgactgtgccgcgcccagagcagcagcaacagcgaagatgcgaggccattacctgtttgatccctgtcggaaa

SEQ ID NO: 281845 - DNA, 120 bp, Artificial Sequence
  ENSG00000129682_1 (sequence is synthesized)
cctggcacgggccaacttttcccgattatcacgccaagaagttgcaaggactagtcgaagactcggaggggccagggcgagggcgcgctcccccgcgcgctgcctcgtccctcctccgtc

SEQ ID NO: 281846 - DNA, 120 bp, Artificial Sequence
  ENSG00000129682_2 (sequence is synthesized)
cggccgcccgagctcccggcctctctcccgcccgcgctcactccctccgcccgcctccctcctctggcccccatcagaagggcaacagggcgagggggtccggcgaaattcggaccggag

SEQ ID NO: 281847 - DNA, 120 bp, Artificial Sequence
  ENSG00000129682_3 (sequence is synthesized)
cagctggacatgcacggtgtccgccgggcgcaggggccgaccacacgcagtcgcgcagttcagcatccgcgtgccagtctcgcccgcgatcccgggcccggggctgtggcgtcgactccg

SEQ ID NO: 281848 - DNA, 120 bp, Artificial Sequence
  ENSG00000129682_4 (sequence is synthesized)
acccaggcagccagcagcccgcgcgggagccggaccgccgccggaggagctcggacggcatgctgagccccctccttggctgaagcccgagtgcggagaagcccgggcaaacgcaggcta

SEQ ID NO: 281849 - DNA, 120 bp, Artificial Sequence
  ENSG00000129682_5 (sequence is synthesized)
aggagaccaaagcggcgaagtcgcgagacagcggacaagcagcggaggagaaggaggaggaggcgaacccagagaggggcagcaaaagaagcggtggtggtgggcgtcgtggccatggcg

SEQ ID NO: 281850 - DNA, 120 bp, Artificial Sequence
  ENSG00000129682_6 (sequence is synthesized)
gcggctatcgccagctcgctcatccgtcagaagaggcaagcccgcgagcgcgagaaatccaacgcctgcaagtgtgtcagcagccccagcaaaggcaagaccagctgcgacaaaaacaag

SEQ ID NO: 281851 - DNA, 120 bp, Artificial Sequence
  ENSG00000129682_7 (sequence is synthesized)
ttaaatgtcttttcccgggtcaaactcttcggctccaagaagaggcgcagaagaagaccagagcctcagcttaagggtatagttaccaagctatacagccgacaaggctaccacttgcag

SEQ ID NO: 281852 - DNA, 120 bp, Artificial Sequence
  ENSG00000129682_8 (sequence is synthesized)
ctgcaggcggatggaaccattgatggcaccaaagatgaggacagcacttacactctgtttaacctcatccctgtgggtctgcgagtggtggctatccaaggagttcaaaccaagctgtac

SEQ ID NO: 281853 - DNA, 120 bp, Artificial Sequence
  ENSG00000129682_9 (sequence is synthesized)
ttggcaatgaacagtgagggatacttgtacacctcggaacttttcacacctgagtgcaaattcaaagaatcagtgtttgaaaattattatgtgacatattcatcaatgatataccgtcag

SEQ ID NO: 281854 - DNA, 120 bp, Artificial Sequence
  ENSG00000129682_10 (sequence is synthesized)
cagcagtcaggccgagggtggtatctgggtctgaacaaagaaggagagatcatgaaaggcaaccatgtgaagaagaacaagcctgcagctcattttctgcctaaaccactgaaagtggcc

SEQ ID NO: 281855 - DNA, 120 bp, Artificial Sequence
  ENSG00000129682_11 (sequence is synthesized)
atgtacaaggagccatcactgcacgatctcacggagttctcccgatctggaagcgggaccccaaccaagagcagaagtgtctctggcgtgctgaacggaggcaaatccatgagccacaat

SEQ ID NO: 281856 - DNA, 120 bp, Artificial Sequence
  ENSG00000129682_12 (sequence is synthesized)
gaatcaacgtagccagtgagggcaaaagaagggctctgtaacagaaccttacctccaggtgctgttgaattcttctagcagtccttcacccaaaagttcaaatttgtcagtgacatttac

SEQ ID NO: 281857 - DNA, 120 bp, Artificial Sequence
  ENSG00000129682_13 (sequence is synthesized)
caaacaaacaggcagagttcactattctatctgccattagaccttcttatcatccatactaaagccccattatttagattgagcttgtgcataagaatgccaagcattttagtgaactaa

SEQ ID NO: 281858 - DNA, 120 bp, Artificial Sequence
  ENSG00000129682_14 (sequence is synthesized)
atctgagagaaggactgccaaattttctcatgatctcacctatactttggggatgataatccaaaagtatttcacagcactaatgctgatcaaaatttgctctcccaccaagaaaatgta

SEQ ID NO: 281859 - DNA, 120 bp, Artificial Sequence
  ENSG00000129682_15 (sequence is synthesized)
aaagaccacaattgttcttcaaaaacaaacaaaacaaaacaaaacaaaattaactgcttaaatgttttgtcggggcaaacaaaattatgtgaattgtgttgttttcttggcttgatgttt

SEQ ID NO: 281860 - DNA, 120 bp, Artificial Sequence
  ENSG00000129682_16 (sequence is synthesized)
tctatctacgcttgattcacatgtactcttttctttggcatagtgcaactttatgatttctgaaattcaatggttctattgactttttgcgtcacttaatccaaatcaaccaaattcagg

SEQ ID NO: 281861 - DNA, 120 bp, Artificial Sequence
  ENSG00000129682_17 (sequence is synthesized)
ttttgcgtcacttaatccaaatcaaccaaattcagggttgaatctgaattggcttctcaggctcaaggtaacagtgttcttgtggtttgaccaattgtttttctttcttttttttttttt

SEQ ID NO: 281862 - DNA, 120 bp, Artificial Sequence
  ENSG00000129682_18 (sequence is synthesized)
tactttgtgcgtagaaattgagttgtattgtcaaccccagtcagtaaagagaacttcaaaaaattatcctcaagtgtagatttctcttaattccatttgtgtatcatgttaaactattgt

SEQ ID NO: 281863 - DNA, 120 bp, Artificial Sequence
  ENSG00000129682_19 (sequence is synthesized)
tgtggcttcttgtgtaaagacaggaactgtggaactgtgatgttgtcttttgtgttgttaaaataagaaatgtcttatctgtatatgtatgagtcttcctgtcattgtatttggcacatg

SEQ ID NO: 281864 - DNA, 120 bp, Artificial Sequence
  ENSG00000129682_20 (sequence is synthesized)
aatattgtgtacaaggaattgttaagactggttttccctcaacaacatatattatacttgctactggaaaagtgtttaagacttagctaggtttccatttagatcttcatatctgttgca

SEQ ID NO: 281865 - DNA, 120 bp, Artificial Sequence
  ENSG00000129682_21 (sequence is synthesized)
tggaagaaagttgggttcttggcatagagttgcatgatatgtaagattttgtgcattcataattgttaaaaatctgtgttccaaaagtggacatagcatgtacaggcagttttctgtcct

SEQ ID NO: 281866 - DNA, 120 bp, Artificial Sequence
  ENSG00000129682_22 (sequence is synthesized)
gtgcacaaaaagtttaaaaaagttgtttaatatttgttgttgtatacccaaatacgcaccgaataaactctttatattcattcaaagaataatcttccaacatgtatttattgagcgtcc

SEQ ID NO: 281867 - DNA, 120 bp, Artificial Sequence
  ENSG00000129682_23 (sequence is synthesized)
attatgtgccagtaactgaagtagcaactggaagtaaacattgtataatgcagataaggtcactgtcctcagatagtctacagtctagagagtcatattaacatgaacactttaaagtgt

SEQ ID NO: 281868 - DNA, 120 bp, Artificial Sequence
  ENSG00000129682_24 (sequence is synthesized)
gtttattttactagttactgtacttgcacttcagattggtacaaaggaattcacattcccgttcagtagtcaaattatacaaatgaggcgtttgtgctagtattttctctgccactcaca

SEQ ID NO: 281869 - DNA, 120 bp, Artificial Sequence
  ENSG00000129682_25 (sequence is synthesized)
gtgtcatttcccctctctgttgcttatttctctcctctctagagggaatacacaggactaaatagtgtcctttctacctttgagaactgaaggaaaatgtaaatttttttaaatgttgat

SEQ ID NO: 281870 - DNA, 120 bp, Artificial Sequence
  ENSG00000129682_26 (sequence is synthesized)
gacttttctctagctccccaaagctgcattgtctggcaatgaacactttgagaacagtcaatacagatggtctctgacttacagtagttcaacttacattttttcgggggctttacagtg

SEQ ID NO: 281871 - DNA, 120 bp, Artificial Sequence
  ENSG00000129682_27 (sequence is synthesized)
gtacagaagcaataggcatttagtagaactcatactttaccatacaaccattttgctttttatttccagtacactattcaataaatgacatgagctattcaacactttttaattacaaaa

SEQ ID NO: 281872 - DNA, 120 bp, Artificial Sequence
  ENSG00000129682_28 (sequence is synthesized)
tttgctttgtagtacatgattttgtccaactgtaagctaatataagcgttctaagcacatttaaagtaggctaggctaagctatgatgtttgctaggttaggtgtattaaatgcattttc

SEQ ID NO: 281873 - DNA, 120 bp, Artificial Sequence
  ENSG00000129682_29 (sequence is synthesized)
aacttaagatgggtttattggtatgtgacccccatcgtaagtgaaggatcatctgtatatggagggaagaattgtgaaatacataaaacgtagttgactagtgcttttcagagcatctgc

SEQ ID NO: 281874 - DNA, 120 bp, Artificial Sequence
  ENSG00000129682_30 (sequence is synthesized)
aaataaaattactggggccccaaacagcctgcttttgcaaggaggggagactcctcatttctaagatgtttggaccagattcagcatgagctcctatccctgcccaccccagcccagtct

SEQ ID NO: 281875 - DNA, 120 bp, Artificial Sequence
  ENSG00000129682_31 (sequence is synthesized)
aagtcaccttgtaatttcatgagataagtcctcctcatcctgcttcatcctgcctgagctctaaacacacctacatgaggtacgctcacctgcctagctatcttggatgcaggatccttt

SEQ ID NO: 281876 - DNA, 120 bp, Artificial Sequence
  ENSG00000129682_32 (sequence is synthesized)
gtaccatgttttaaaaatcaggagatgctcactcaaccacctctccctattaactcttactaattttcaatcagtagggaaaagtagtgcattgtctccctctttctctaagaactttaa

SEQ ID NO: 281877 - DNA, 120 bp, Artificial Sequence
  ENSG00000129682_33 (sequence is synthesized)
agtttggtcactgactacttcagttgctggtcttgctttttctgttgttcagaaatagtgtaggtctgctggtagtaagcaaattagcactatgtgggtctcagggatgcctgcgttaat

SEQ ID NO: 281878 - DNA, 120 bp, Artificial Sequence
  ENSG00000129682_34 (sequence is synthesized)
aggatggagtcaaaatgcccaggaagaatcctttacccccagcattctttttgagctgccttaaagttgctttaaacagacagtggtgttaaaataaattaataagtaaataaatagtcc

SEQ ID NO: 281879 - DNA, 120 bp, Artificial Sequence
  ENSG00000129682_35 (sequence is synthesized)
tcaaaccttcctacaagtgatgatatcaatactttcacacatcttcattacacacacacatacacacacaccctttcccaccccatcccctcatgcacatcctttagtagcattcctcct

SEQ ID NO: 281880 - DNA, 120 bp, Artificial Sequence
  ENSG00000129682_36 (sequence is synthesized)
ggcagaaaatactagtcctgccacataactgatgaaagaaaaaaagactctagtcaaatagttgtgggaaacacttcaaatactattgggtctcagatattagctcacatcagaatcacc

SEQ ID NO: 281881 - DNA, 120 bp, Artificial Sequence
  ENSG00000129682_37 (sequence is synthesized)
tggaaggcttgtaagactcagatcactggacttcaccttcagagtttctgattgagtgagtcttgtgtgggcccaaaacttggcatttctaacaagtttccaggtgatgctgaggctgtt

SEQ ID NO: 281882 - DNA, 84 bp, Artificial Sequence
  ENSG00000129682_38 (sequence is synthesized)
tggcatttctaacaagtttccaggtgatgctgaggctgttgatcctcgggactttgagaaccactggtattagttcattctcac

SEQ ID NO: 281883 - DNA, 120 bp, Artificial Sequence
  ENSG00000129682_39 (sequence is synthesized)
ctggggaggcctcaggaaacttaccatcatggcagaagatgaaggggaagcaaggaccttttccacgtggcagcaggagagagaatgggaaagcgccacttatcaaacagatttagtgag

SEQ ID NO: 281884 - DNA, 83 bp, Artificial Sequence
  ENSG00000129682_40 (sequence is synthesized)
gagaatgggaaagcgccacttatcaaacagatttagtgagaacttcctcactatatgagacagcatggggaaaccgccccgag

SEQ ID NO: 281885 - DNA, 120 bp, Artificial Sequence
  ENSG00000129682_41 (sequence is synthesized)
agagccaaaccatatcacactggcatacactattcctttcttcaggattagcgtgcattagcaaattaatttctgaaaagtcttgtgttaaagaaatctgtttaacttttacaaatgctg

SEQ ID NO: 281886 - DNA, 120 bp, Artificial Sequence
  ENSG00000129682_42 (sequence is synthesized)
agacaaacttattgggccacaaagccacattttcatggagcgtctattaacattgcagtagagtggtagtcctcaagctttttatgtgtacctgaatcacctgtggtgttttatatgctt

SEQ ID NO: 281887 - DNA, 120 bp, Artificial Sequence
  ENSG00000129682_43 (sequence is synthesized)
cttttgttttaagcttggcctgggaatctcctgaatctgatacctactgttctatgccacagcacttaatgtcagtgttctatggcatggcacttaatgtcagttttccaccccatctgt

SEQ ID NO: 281888 - DNA, 120 bp, Artificial Sequence
  ENSG00000129682_44 (sequence is synthesized)
gaacgtgtattcaatcattatactgtatttagcctgagaatgaatatggaaaagaaaacaacactttcttcaggctttttgcaactttttaaaagcaaaacaggctccaattccccctcc

SEQ ID NO: 281889 - DNA, 120 bp, Artificial Sequence
  ENSG00000129682_45 (sequence is synthesized)
caggagttttgtttgtatccaaagagaggacatgctcattgccatggaatccttaaaggactgagagggaagtgatctgtggcactcctcccctccctaaccagtacatttgttccagtt

SEQ ID NO: 281890 - DNA, 120 bp, Artificial Sequence
  ENSG00000129682_46 (sequence is synthesized)
ttaagccagtcaagctcaccgaagagtttttcaaagaccttagctacatggatttaactttaccaagcatccattgtccaaatgaacatatgagggaaaatgaatatctcttcatctaca

SEQ ID NO: 281891 - DNA, 120 bp, Artificial Sequence
  ENSG00000129682_47 (sequence is synthesized)
tcagctgaccataactatgctgtggataaggggtggtgggatcagaactgataaccattttcaacaaatttcatacgaatgtgtcttagaagcctcatttagatgcgatgtcattcatgg

SEQ ID NO: 281892 - DNA, 120 bp, Artificial Sequence
  ENSG00000129682_48 (sequence is synthesized)
gtaaaattgaaatgtgccttcactggcagagtctttaacaatctctgcaagacaatctacgcttttttctattgtttctgaaaatcctttcaacctctattcaaagccattttctcactt

SEQ ID NO: 281893 - DNA, 120 bp, Artificial Sequence
  ENSG00000129682_49 (sequence is synthesized)
tagaaattgattacagcagggctgtgattgtcagtacaaaaatctgtacagggatatggcagtggtataatagatgaccatttccaattataaaacaattagcaaagtatagctaggtca

SEQ ID NO: 281894 - DNA, 120 bp, Artificial Sequence
  ENSG00000129682_50 (sequence is synthesized)
ggccactagtacccttcaaattcttaaccatatttacaaagacagcttttcataacttttattgctctgtccacaaagatgtggtctcatggtttcacacgattgagaatgctacaagta

SEQ ID NO: 281895 - DNA, 120 bp, Artificial Sequence
  ENSG00000129682_51 (sequence is synthesized)
atagtatactgaaaagaacatgtctctaattctggactgctctttatctccaagaaacagagagagagagaatgaaaaaaaatcccagcttagaggaattttggaagttactctttcatg

SEQ ID NO: 281896 - DNA, 120 bp, Artificial Sequence
  ENSG00000129682_52 (sequence is synthesized)
aaccatcacattttctgggcctttgtaatctttaaacactgttactctttagaggttggtttgaatttgttgcacagagaacaataatctatgacaaattaatgaacccttttgctaata

SEQ ID NO: 281897 - DNA, 120 bp, Artificial Sequence
  ENSG00000129682_53 (sequence is synthesized)
tcacatgagtacaagtatcttgtatttctcatcacatttaccgtaataaagaatgcagacaagtataatacatggcatcattttggggattttccaatttctatgtgggcatactggaag

SEQ ID NO: 281898 - DNA, 120 bp, Artificial Sequence
  ENSG00000129682_54 (sequence is synthesized)
aagtttgtaacagttgcaattctgtcacaatgcaggaagtctttctagaacacacaatgtggatgattttcagttttagaattgtaaactaaccaaatgtcaattcagtttctcatttta

SEQ ID NO: 281899 - DNA, 89 bp, Artificial Sequence
  ENSG00000129682_55 (sequence is synthesized)
attgtaaactaaccaaatgtcaattcagtttctcattttatattagtttttgttacaaacactgcctatttctcttttgtacaaacact

SEQ ID NO: 281900 - DNA, 120 bp, Artificial Sequence
  ENSG00000129682_56 (sequence is synthesized)
atgggcctccaaaagaactcagagctgctgtcttcctctgggaggttgatcatatgtctattcagttgggagaatggagcagtcaagttcaaaatccatgtggctctctggcttcagaag

SEQ ID NO: 281901 - DNA, 120 bp, Artificial Sequence
  ENSG00000129682_57 (sequence is synthesized)
ctatcctttcagctatgacacacacactaaatagtattgcccaggtttgccctacaacatgttagcatatctacatattttgtactgtaataatgtgtacgctcttaataatttgttttt

SEQ ID NO: 281902 - DNA, 120 bp, Artificial Sequence
  ENSG00000129682_58 (sequence is synthesized)
aatgctgtgtaaagttagcaattagagtaagagaaacgtatgggataatgattgagtaaaatctcagctccttttgagtcaatcactcagcttgttggcacagtagatatttatgacctt

SEQ ID NO: 281903 - DNA, 120 bp, Artificial Sequence
  ENSG00000129682_59 (sequence is synthesized)
aaatactgtcagcgcttcacagcacattactgaggcctggataaagcattcacacaaagataaatggattgaaactgtgtcaattttgtagaaaaagatattctggggtttagtaacaga

SEQ ID NO: 281904 - DNA, 120 bp, Artificial Sequence
  ENSG00000129682_60 (sequence is synthesized)
gaatttttctttccttactgcgattaataaagtggaactccaattgcaagtaactattcagttttatgttcttcacatatggaaacctctctgtcactaataccctgggacaaactggat

SEQ ID NO: 281905 - DNA, 120 bp, Artificial Sequence
  ENSG00000129682_61 (sequence is synthesized)
gattaccatccaagtgttattttcttcctcgaaaatttcaaaaccagaatgaattagttctccaagtctggctatactatagttttcttcttaatgtaaaacagctgaataaaacagctt

SEQ ID NO: 281906 - DNA, 120 bp, Artificial Sequence
  ENSG00000129682_62 (sequence is synthesized)
gaacaatatttgactttcatgggtcttaagaacgtttcaaaatacaccaccaatatatttaccaacatatttagtgccagatatacacagaacaaacactaccctattgtttctgtgtgc

SEQ ID NO: 281907 - DNA, 120 bp, Artificial Sequence
  ENSG00000129682_63 (sequence is synthesized)
gtgtgtgtgtgtctgtgtctgtgtgtgtgtgtagcaggacactaaataaacaagtcatgttgctgttcttagggaagttttggtaaagagagcttcaaagttccttggagtcacctgcaa

SEQ ID NO: 281908 - DNA, 120 bp, Artificial Sequence
  ENSG00000129682_64 (sequence is synthesized)
ggctaactgtactaaaagcggaatttgcatgatctttctacaaactctcagtgtaaagtggtagatagacatgcaagcatcacacttagattgcaataaatgctgtgatgtaaaaaatac

SEQ ID NO: 281909 - DNA, 120 bp, Artificial Sequence
  ENSG00000129682_65 (sequence is synthesized)
aatggaggaaaaatttttgattagggaaatttaaacattttcaaagaagagttaatgtttcagtggagtcttaaaagatgagtaggaattcaacagccagaagggaagtgtagacgctct

SEQ ID NO: 281910 - DNA, 120 bp, Artificial Sequence
  ENSG00000129682_66 (sequence is synthesized)
gtgtcacataaaacaaaacagaacagaatagtataagtgaaggcatagagcttcacatgaaaggcacatgaaatagcactgggtatctctaaaatattaattagcctagtgtagctggac

SEQ ID NO: 281911 - DNA, 120 bp, Artificial Sequence
  ENSG00000129682_67 (sequence is synthesized)
aatgaggggcagagcccctggtatgcaagtgatgtctgggaaaggagcaatctttctacagtgcctcattccatcatacctcattaccagaaaaacattatgagccacttaggcctgtat

SEQ ID NO: 281912 - DNA, 120 bp, Artificial Sequence
  ENSG00000129682_68 (sequence is synthesized)
tatttgagcatctctgaaatggagttgctctacatgttttgtagaaacctaatgagtaatttattctcatcagtagacaaaatgaaagaaagaaaatagactctgagcaaagtatgattc

SEQ ID NO: 281913 - DNA, 120 bp, Artificial Sequence
  ENSG00000129682_69 (sequence is synthesized)
acaaccttgcctattaggctatagaagattgccctactaattcctccttttcgtctgttgaacaatctgtattttgcctgctcaaaaaggaattcctcaagttataggggcagtttgacc

SEQ ID NO: 281914 - DNA, 120 bp, Artificial Sequence
  ENSG00000129682_70 (sequence is synthesized)
agtacaatcatatcagaaaaaaatcagcaaaattatgttctaacaacatcttcccatctaaagtgcacattttatttttttaaggtaacataattactacgaacaaccgaaatggtatat

SEQ ID NO: 281915 - DNA, 120 bp, Artificial Sequence
  ENSG00000129682_71 (sequence is synthesized)
aaaggtgaaaaattaaaataattttttttacagctccacgttacctcaccccctagaccctggtaaccaccattcaactctctgtttccattagttcaactttttaagattctttttata

SEQ ID NO: 281916 - DNA, 120 bp, Artificial Sequence
  ENSG00000129682_72 (sequence is synthesized)
caaaggatgtcatgtagcatttttttcttttttcatctggcttatttcacttagtttgcttatttcaacgtgctctgaagtttcatccatgtttatgtaaatggaaggagctccctcttt

SEQ ID NO: 281917 - DNA, 120 bp, Artificial Sequence
  ENSG00000129682_73 (sequence is synthesized)
tatgtatatatatatattatatatatatatgtatatatatataattttctttcttcattcatctgtccgtgggcacttaggttgttccataacttatctattgtgaataatggtgcaatg

SEQ ID NO: 281918 - DNA, 120 bp, Artificial Sequence
  ENSG00000129682_74 (sequence is synthesized)
gttgttccataacttatctattgtgaataatggtgcaatgggaatgaatgggagtgcagatgtctgtttggcatactgatttaatttcctttggatatataaccagaagtgggaatgctg

SEQ ID NO: 281919 - DNA, 120 bp, Artificial Sequence
  ENSG00000129682_75 (sequence is synthesized)
gatcatacagtagttctatttttacttttatgaggatctccatactgttttacataatggcttactaatttacattcccataaacagtgtacaagaatacctccttgccaacacattatc

SEQ ID NO: 281920 - DNA, 120 bp, Artificial Sequence
  ENSG00000129682_76 (sequence is synthesized)
ttttaagttttggataatattattcctattaataacatgtgtgatattacattgtggttttgatttgcatttcccttatgattaatgatgttaagtaccttttcagatatatgttggcca

SEQ ID NO: 281921 - DNA, 120 bp, Artificial Sequence
  ENSG00000129682_77 (sequence is synthesized)
tttgtatgtcttccttggagagatgtctattcagctccttggtccatttttcaaaatacagtttacttgtatttttgctattgacttgtatgagttccttatatattttggatattaacc

SEQ ID NO: 281922 - DNA, 120 bp, Artificial Sequence
  ENSG00000129682_78 (sequence is synthesized)
ccttatgagaaatatggtttgcaaatattttctcctattctgcaggttgccttttcgttttgtcgattatttcctttgctgggcagataatttttttattttattttttgaaacagtgtc

SEQ ID NO: 281923 - DNA, 79 bp, Artificial Sequence
  ENSG00000129682_79 (sequence is synthesized)
ccaggctggagtgcagtggtgtgatcatgtctcaccacagccttgacctccccaggatcaggtgatcctcccacctccc

SEQ ID NO: 281924 - DNA, 120 bp, Artificial Sequence
  ENSG00000129682_80 (sequence is synthesized)
caccctgttgcccaggctggtctaaaactcctgggctcaagccatcttgcccaccttgggacctcccaaagtgttaggattagaggcatgggccaccatgcctggctttgaaacttttta

SEQ ID NO: 281925 - DNA, 120 bp, Artificial Sequence
  ENSG00000129682_81 (sequence is synthesized)
acttgtttatttttactttgttgcatgtgcttttggtgttacagccaaaaaagttattgccaagaccaatgccatagacattatttcttattctagtaattttacaattttaggtcttat

SEQ ID NO: 281926 - DNA, 120 bp, Artificial Sequence
  ENSG00000129682_82 (sequence is synthesized)
gtttaagtttttaatcgattttgagttgatttttgtgtatggtataggataaaggtccaatttcattattttgtatttggatattcaatgtttaaaatacgatttattgaatggactata

SEQ ID NO: 281927 - DNA, 120 bp, Artificial Sequence
  ENSG00000129682_83 (sequence is synthesized)
tattgaatggactatatttccccatgatgtgtttttagtgcctttgttgaagatttgttgatcatatatgtgtggatttgtttcttggctttctattctgttccattggtctatgtgtct

SEQ ID NO: 281928 - DNA, 120 bp, Artificial Sequence
  ENSG00000129682_84 (sequence is synthesized)
catactgttttgattactatagctttacaatataatttgaaatcaggaaatgttctaaacttctttctcaagattgttttagatctttggggacttaggtggttccataaggttttaaga

SEQ ID NO: 281929 - DNA, 120 bp, Artificial Sequence
  ENSG00000129682_85 (sequence is synthesized)
attttttttctatttctgtaaaaaattatattaagattttgatagtgcttgcattgactctgtagatcactttggttagtatcaacatttttgcaaaattaattcttccaaactatgaac

SEQ ID NO: 281930 - DNA, 120 bp, Artificial Sequence
  ENSG00000129682_86 (sequence is synthesized)
acaggatactgttgcacttatttctcttcttcaattcctttcatcagtatcttatagtttttaatgtacagatttttcacctccttggttaaacttattcctaagtacattttccttttt

SEQ ID NO: 281931 - DNA, 79 bp, Artificial Sequence
  ENSG00000129682_87 (sequence is synthesized)
ctccttggttaaacttattcctaagtacattttcctttttgatgcaattgcaaatgggattgtttttctaatttatttt

SEQ ID NO: 281932 - DNA, 120 bp, Artificial Sequence
  ENSG00000129682_88 (sequence is synthesized)
atttattttttggatagttcattgttagtgtacagaaacaactgattttttatgttgattttgtatcaacattggtgaattccacccaacatttgaggaaaaactaataccaatccttct

SEQ ID NO: 281933 - DNA, 120 bp, Artificial Sequence
  ENSG00000129682_89 (sequence is synthesized)
caaaatcttccaaaaaaatgaagaggaaggagcacttccaaactcattttatgaagccagcattattctcataccattccagacaaggacactacaagaaaaaaaattacaggcccaaat

SEQ ID NO: 281934 - DNA, 120 bp, Artificial Sequence
  ENSG00000129682_90 (sequence is synthesized)
ccctgttgaacatagatgcaaaaatccacaacaaaatactagctaaaagaacttaacatcacatttaaaggatcattcaccataatcaagtgggatttcaccaatttcacttgggtagaa

SEQ ID NO: 281935 - DNA, 120 bp, Artificial Sequence
  ENSG00000129682_91 (sequence is synthesized)
ttcaccaatgttgataaaaaaatcaacataaaaatcagttgtttcttcacacgaacaatgaactatccaaaaaataaagaacacaatcccatttgcaattgcaaaaaaatacttagaaat

SEQ ID NO: 281936 - DNA, 120 bp, Artificial Sequence
  ENSG00000129682_92 (sequence is synthesized)
aaatttagcaaaggaggtgaaagatctttatattaaaaactataaaatattgatgaaagtaattgaagaagacaaatggaacagatccctttgttcatagattggaagaattaatattac

SEQ ID NO: 281937 - DNA, 120 bp, Artificial Sequence
  ENSG00000129682_93 (sequence is synthesized)
agaaatgttaatactaactaaagtgatctacagagtcaatgcaagccctatcaaaatcttaatcgaatcttttacagaaataaaaaaaaattctaaaattcatatggcaccacataagtc

SEQ ID NO: 281938 - DNA, 120 bp, Artificial Sequence
  ENSG00000129682_94 (sequence is synthesized)
cccaaaaatctttacaacttcactgaatttatttatcacttctaacatttttctgttggagtcattgggtttctgtattgaagagcatgtgatttgaaacagaccattttacttcttccg

SEQ ID NO: 281939 - DNA, 120 bp, Artificial Sequence
  ENSG00000129682_95 (sequence is synthesized)
tcctgatttgcatgcattttatttctttttctcgacttattgctctaagcagaacttcaagtaccatgtggaatagaagtggcaagagtgagcattctcttcttcatcctgatttcagaa

SEQ ID NO: 281940 - DNA, 120 bp, Artificial Sequence
  ENSG00000129682_96 (sequence is synthesized)
gaaaagctttcagcatttcactactgactatcacgttagatgtgagtttgtcatatatatggcctttgttatatttagggatattccttctctacctaatgttttgaatgttttcatcat

SEQ ID NO: 281941 - DNA, 120 bp, Artificial Sequence
  ENSG00000129682_97 (sequence is synthesized)
gaaagggtgttgattttttttcaaatgccttttctgtatctgttaaaatgatcatatgattattatccttcattgtcttattgttcatatttattgatttgagtatgttgagccatcctt

SEQ ID NO: 281942 - DNA, 120 bp, Artificial Sequence
  ENSG00000129682_98 (sequence is synthesized)
ttatcccagggataactctcacttgattatggtgaatgatctttttaatgtgatgttaagttcttttagctagtattttgttgtggatttttgcatctatgttcaacagggatttgggac

SEQ ID NO: 281943 - DNA, 120 bp, Artificial Sequence
  ENSG00000129682_99 (sequence is synthesized)
tgtattccttttttttcttgtagtgtccttgcctggctttggtaggagaataatgctggtttcatagaaaaatgagtttagaagtgttcctcactcttcttttttttttggaagatttga

SEQ ID NO: 281944 - DNA, 120 bp, Artificial Sequence
  ENSG00000129682_100 (sequence is synthesized)
gaaggattgatattagattttctttaaatgttgggtagaattcaccactgaagccatctggttctgggctttactttgttgggaagttcttttttaaaaaattgctgattcaatattctt

SEQ ID NO: 281945 - DNA, 120 bp, Artificial Sequence
  ENSG00000129682_101 (sequence is synthesized)
tttcattattgctctctacagattctctattcatgattcagtcttgctaggttgtggtatgtttctagaaatttatctgtttcttctagattacccaacttgtgtataattgttcataat

SEQ ID NO: 281946 - DNA, 120 bp, Artificial Sequence
  ENSG00000129682_102 (sequence is synthesized)
agtctctaatgatcatttatatttctatggtatcagttgtaatgtcttctctttcatttctgattttatttgtttatgtcttttctctttcactctcagttactctagctaaaggcttgt

SEQ ID NO: 281947 - DNA, 120 bp, Artificial Sequence
  ENSG00000129682_103 (sequence is synthesized)
ctgttttttaatcttttcaaaaaacaactcagttttattgctcttttttatttttctagtttctatttcacttttttctgttctgatatttacttcattccttcttccgactttgggatt

SEQ ID NO: 281948 - DNA, 120 bp, Artificial Sequence
  ENSG00000129682_104 (sequence is synthesized)
agtttatggttcttttatagttccttgaggtgtaaagttaggtcgtttatttgattttttttttcttaatgtaggcatttatcactataaacttccttcttagaaatgccttttgctgca

SEQ ID NO: 281949 - DNA, 120 bp, Artificial Sequence
  ENSG00000129682_105 (sequence is synthesized)
tcccatatattttggtatgttgtttttccacttttgtttgtctcaagttttttaaatttttcttttgatttgctctttgattctttggctatttaggagtgtattgtttaattttacagt

SEQ ID NO: 281950 - DNA, 120 bp, Artificial Sequence
  ENSG00000129682_106 (sequence is synthesized)
tttcctccctttactgatttccagtttcttagcattgtggtcagaaaagatatttggtatgatttcaatcttcttagttttgttaacacttgttttgtggcctaacagttgatgtatctt

SEQ ID NO: 281951 - DNA, 120 bp, Artificial Sequence
  ENSG00000129682_107 (sequence is synthesized)
caaaatgtacctgcgcaattacttgggacgaatgtacattctattgcttttggagggaatgttttgtatctgttaggtccatttggtctaaagtgtagttcaagtcaattccctattgat

SEQ ID NO: 281952 - DNA, 120 bp, Artificial Sequence
  ENSG00000129682_108 (sequence is synthesized)
tttctgtctgggtgatctgtccattgttgaaagctgggtatcaaagtcttctactactatactattacagtctatatttcctgttcatatctattaatacctgctttatatatttaggtg

SEQ ID NO: 281953 - DNA, 120 bp, Artificial Sequence
  ENSG00000129682_109 (sequence is synthesized)
atccaatgttgggtgtgtatatattcaaaattgcatcttgttgatgaattgactcatttatttttatataatggcattctttgtctcttgttacagtttgtgactttaagtctgttttgt

SEQ ID NO: 281954 - DNA, 120 bp, Artificial Sequence
  ENSG00000129682_110 (sequence is synthesized)
ctgatatagtataggtgtctctgcttctttctggtttctatttacatgcaatatctttttaatctcttcactttcagtttatacgtgtccttgcagctaaagtgactatcttatagatag

SEQ ID NO: 281955 - DNA, 120 bp, Artificial Sequence
  ENSG00000129682_111 (sequence is synthesized)
caagtacttagttcttcctttttcatccattcagccactcactgtcttttgattagagaatttaatctacttacattaaaattaattatttataggtaaagacatactattgctactttg

SEQ ID NO: 281956 - DNA, 120 bp, Artificial Sequence
  ENSG00000129682_112 (sequence is synthesized)
ttaaatgtttttcagctgttttgtaagtttttttgtttctttcttcctctcttgctgtctttctttgtgattgatgattttcctgtagtactatggtttgatttctttttttttaataat

SEQ ID NO: 281957 - DNA, 69 bp, Artificial Sequence
  ENSG00000129682_113 (sequence is synthesized)
tcaacccatcactgaggtgttcagccaagcatgcattagctatttttcctaatagtatctctccccaca

SEQ ID NO: 281958 - DNA, 120 bp, Artificial Sequence
  ENSG00000129682_114 (sequence is synthesized)
ttgctgcaccttcaacccatcactgaggtgttcagccaagcatgcattagctatttttcctaatagtatctctccccacaccccaccccccttgacaggccccagtgtgtattgttcccc

SEQ ID NO: 281959 - DNA, 120 bp, Artificial Sequence
  ENSG00000129682_115 (sequence is synthesized)
ttataagtgagaatacgcagtgtttggttttctgttcctgcaatagcttgctaagaataatggcttccagcgccatgtgtgtccctgaaaatgacatgatctcattcctttttatggctg

SEQ ID NO: 281960 - DNA, 90 bp, Artificial Sequence
  ENSG00000129682_116 (sequence is synthesized)
gccacattttctttatccactgcatctttgctcttttgaacagtgctgcagtgaacatatgcgtgcatgtatctttgtaatagaatgatt

SEQ ID NO: 281961 - DNA, 120 bp, Artificial Sequence
  ENSG00000129682_117 (sequence is synthesized)
gcagtgtaaaagtgttcctatttctctgcaaccttgccagcatctgtcattttttgactttttaataatcaccattgtgactggcatgagatggtatctccttgtggttctgatttgcat

SEQ ID NO: 281962 - DNA, 120 bp, Artificial Sequence
  ENSG00000129682_118 (sequence is synthesized)
ctggcatgagatggtatctccttgtggttctgatttgcatttctttaatgatcagtgatgttgaacttttttcatatgttcgttggcctcatgaatgtctttttttgagaagtgtctgtt

SEQ ID NO: 281963 - DNA, 86 bp, Artificial Sequence
  ENSG00000129682_119 (sequence is synthesized)
ggttttttttttcttgtatatttgcttaaattccttgtagattctggatattagaccgttgtcagatggatagattgcaaaaattt

SEQ ID NO: 281964 - DNA, 76 bp, Artificial Sequence
  ENSG00000129682_120 (sequence is synthesized)
aaaaattttctcccactctgtaggttgcatgttcactgtgatagtttctgtctttctttctttttatattatactt

SEQ ID NO: 281965 - DNA, 120 bp, Artificial Sequence
  ENSG00000129682_121 (sequence is synthesized)
catcaacccgtcatctatattaagtgtttctcctaatgctttgacttcattatttctttcatttgattgagtatgctgtggatgttttctgttacttttttaattttattcattgtattc

SEQ ID NO: 281966 - DNA, 120 bp, Artificial Sequence
  ENSG00000129682_122 (sequence is synthesized)
ttcagcttcagaatttgtttgtttgtttgtttgtttgtttttcacagtttctatctctttgttgaacttattattttggtcatacattgttttcctgattctactgacttctttgtctgt

SEQ ID NO: 281967 - DNA, 120 bp, Artificial Sequence
  ENSG00000129682_123 (sequence is synthesized)
gttctcatgtagcaacccaagcttatttaaaacaattatttttaatattttgtcaggaaatttgtagatctccatttttttttgttggcaactggaaaattactgagtttcttcggtggt

SEQ ID NO: 281968 - DNA, 120 bp, Artificial Sequence
  ENSG00000129682_124 (sequence is synthesized)
attatttttgtgttgtttttggcaggtgttccttgaaatctcgtgttgccatgttcacatttgaagaagtagtctcctccttcagcctatactgactggcttcagaagagaaacagttat

SEQ ID NO: 281969 - DNA, 120 bp, Artificial Sequence
  ENSG00000129682_125 (sequence is synthesized)
accagttagcctgactggggatactaagactcttgcacatcttttctgtagatgtgtcactcaagctctttttgagaaattttaagatcatctgtattttcttaatttcataaaaccaaa

SEQ ID NO: 281970 - DNA, 120 bp, Artificial Sequence
  ENSG00000129682_126 (sequence is synthesized)
ccaaattctgagagtttcccatttgttttctctaacgtggtgccctgaagtgctcaagtttttgtgccttctcccattcccacagagtcaagctgcctgcttctgcatgcacacaagttc

SEQ ID NO: 281971 - DNA, 120 bp, Artificial Sequence
  ENSG00000129682_127 (sequence is synthesized)
acactcgctgtcagggtttgggccgtgtgcagggagcaagccaaggtagaggagagagggagacatgcaaagttttgggagcacccatgtgtcagcttcgggggtttacagttcaggcat

SEQ ID NO: 281972 - DNA, 120 bp, Artificial Sequence
  ENSG00000129682_128 (sequence is synthesized)
cccaagccactagtgggtgggcctcctgatggagtctgtgaagttgttagtagtatatgtgtccttttgttgaatttccagtctctggttgctgtgagcccctaccgctgttccctgctc

SEQ ID NO: 281973 - DNA, 120 bp, Artificial Sequence
  ENSG00000129682_129 (sequence is synthesized)
acagcctctcagtcactcagacatgatgatcccctcagtattctgagtggggatagaaagaagtaggcctcttggtcagtgtcccacgtggctaggaaagccaggcattcatttactaca

SEQ ID NO: 281974 - DNA, 120 bp, Artificial Sequence
  ENSG00000129682_130 (sequence is synthesized)
ctctccctttcacccaatggagaaatcatgagtcaaagttgtatctcttggtgttgagttctgctagcttgagagacggttgacataagtagtgaaactattttctggttcttttcaatg

SEQ ID NO: 281975 - DNA, 120 bp, Artificial Sequence
  ENSG00000129682_131 (sequence is synthesized)
tgcctattctcgtaattgttttgctccatctgtgagctggactaccagactcccacaaaggtactctcatacttgagtggttgtcaaaattgtagatagtggggaaatgacaggagaaaa

SEQ ID NO: 281976 - DNA, 120 bp, Artificial Sequence
  ENSG00000129682_132 (sequence is synthesized)
ttcctgttctgccatcttgctgacatcaccccaatatctaaaatgcatattttaattatttttttccttgaataaagtttattttggaattgttgagttttacaaaataatttaaaatat

SEQ ID NO: 281977 - DNA, 120 bp, Artificial Sequence
  ENSG00000129682_133 (sequence is synthesized)
tctctctctctctctctctctctggggttgaggtctcactctgtcacccaggatggattacagtggcacaatcgcagctcactgcagcctcgaatttcttgggtcaagtgatcctcccac

SEQ ID NO: 281978 - DNA, 80 bp, Artificial Sequence
  ENSG00000129682_134 (sequence is synthesized)
ttcagcctcccaagtagctgggactacaaggcgtgtgccaccatgcccagctaatatttttagggtcttgaactcctggc

SEQ ID NO: 281979 - DNA, 120 bp, Artificial Sequence
  ENSG00000129682_135 (sequence is synthesized)
atcatgtggtcctcccacctccacctcccaagtcctgaggataccaattgtgagtcactgtgcccagctatccccttctcactctctttttctctcacacacatgtgtgcatgcacagac

SEQ ID NO: 281980 - DNA, 120 bp, Artificial Sequence
  ENSG00000129682_136 (sequence is synthesized)
acacacacctcatgttcattctctttaccatgatgatccttggttcttttacacagcttctttcagtttaccttacaatttagctcaacacaaattttaaaaaacttatagttacaattt

SEQ ID NO: 281981 - DNA, 120 bp, Artificial Sequence
  ENSG00000129682_137 (sequence is synthesized)
aatttggcttggtccacacctctaacaaatttgatacaatctccaacttacggttgcaagttagttgattatattcacttccaagtatttcccccaacatttcattatgaaaatatatcc

SEQ ID NO: 281982 - DNA, 120 bp, Artificial Sequence
  ENSG00000129682_138 (sequence is synthesized)
atcaattaatgctcttatctataaaataattatttttttgcatttcaaaataagttacagacatcaatgcacttcatctttaaaccctttatcatgcatatcaggaagtagagtttaata

SEQ ID NO: 281983 - DNA, 120 bp, Artificial Sequence
  ENSG00000129682_139 (sequence is synthesized)
tttctatatttcttgggggagaaatggagctaaaattatatactgtatcatatacaaacctgttaggtatatcaattcatgtgtattgacaaatgcgtgcaccatgtaacagaaactcct

SEQ ID NO: 281984 - DNA, 120 bp, Artificial Sequence
  ENSG00000129682_140 (sequence is synthesized)
ttcaagatatagaatattcctatcactacaaatattaatcaccaaaacaatggggagaatgtctctagggcatgtcagagaccttcactgcagcctctcccattataggccaggaggcct

SEQ ID NO: 281985 - DNA, 120 bp, Artificial Sequence
  ENSG00000129682_141 (sequence is synthesized)
tgaaggaaaaaaatggtttagtgggccaggcctcaggcacccccccttgctctttgcagccttgaaacatggtaccctgcgtccccagctgcttcagcttcagctgtggctaaaaggggc

SEQ ID NO: 281986 - DNA, 120 bp, Artificial Sequence
  ENSG00000129682_142 (sequence is synthesized)
gctaaaaggggccaacatacagctcaggccattgtttcagagagtgcaatccccaagctttggcagcttacacatggtgttgggcttgcaggagcacagaagtcaagaattgaggtttgg

SEQ ID NO: 281987 - DNA, 71 bp, Artificial Sequence
  ENSG00000129682_143 (sequence is synthesized)
aaatgcctggatgtccagacagaagtctgctgcaggggtagagctctcagcccccacagagtcttcactgg

SEQ ID NO: 281988 - DNA, 87 bp, Artificial Sequence
  ENSG00000129682_144 (sequence is synthesized)
gcagaagggaaatgtggggttggagctcccccacagagtcttcactggggcactgtatagtggagctctgagaagagggccatatag

SEQ ID NO: 281989 - DNA, 120 bp, Artificial Sequence
  ENSG00000129682_145 (sequence is synthesized)
ggcactcaacaccagcccatgaaaagagctgtgagggtggctgcatcctgcaaagccacaggggaagagctgcccaaggctgtgggagcccaccccttgcatcattgtgacctggataga

SEQ ID NO: 281990 - DNA, 120 bp, Artificial Sequence
  ENSG00000129682_146 (sequence is synthesized)
tgtgagacatggagcctaaggagatcattttggaactttaagctttaacgactgccctattggattttggacttgcatgggcctatagcccctttgttttggccaacttctcccatttgg

SEQ ID NO: 281991 - DNA, 120 bp, Artificial Sequence
  ENSG00000129682_147 (sequence is synthesized)
aacttctcccatttggaatgggtatttttactcaattcctgtacccccattgtatcttggaaataactaacttgctttagattttacaggcttataggtggaagggacttgctttgtctc

SEQ ID NO: 281992 - DNA, 69 bp, Artificial Sequence
  ENSG00000129682_148 (sequence is synthesized)
tctcagatgagactttggacttggacttctgggttaatgtttgaatgagttaatactttgggggactaa

SEQ ID NO: 281993 - DNA, 120 bp, Artificial Sequence
  ENSG00000129682_149 (sequence is synthesized)
gtttggttttgtgttcccacccaaatctctccttgaattgtaataatccccatgtgtcaggggtgggaccaggtggaggactgaatcatgggggtggtttccctcatgctattctcatga

SEQ ID NO: 281994 - DNA, 70 bp, Artificial Sequence
  ENSG00000129682_150 (sequence is synthesized)
ggccttccaccatgattgtaagtctcctgaggcctccgaagccatgcggaactgtgagtcagttaaaact

SEQ ID NO: 281995 - DNA, 120 bp, Artificial Sequence
  ENSG00000129682_151 (sequence is synthesized)
ggcctccgaagccatgcggaactgtgagtcagttaaaactctttcctttataaattacctagtcttgggtatttctttatggaagcatgagaatgaactaatgcacagggtaaaaattta

SEQ ID NO: 281996 - DNA, 120 bp, Artificial Sequence
  ENSG00000129682_152 (sequence is synthesized)
aaaacaaacatacaaatgcaagtaaacaagccaatatttcaactgttcccattgcattatccttattctttatctatggtaccagaaaataatacatctgaaacaatttttttttcctgc

SEQ ID NO: 281997 - DNA, 120 bp, Artificial Sequence
  ENSG00000129682_153 (sequence is synthesized)
catgatgtacactcaagtgggtccactggggtttctttcagtttcccaaatactagatatgactcttccctataccttatcttcatatgaagaaagctatgagaatatattaataactga

SEQ ID NO: 281998 - DNA, 120 bp, Artificial Sequence
  ENSG00000129682_154 (sequence is synthesized)
atatagtaacactactataggaataagcatgtgtatattccaactgatcttttaaaacttttattttgaaatatttatagattcaaaggaagatgcaaagagtatagggaagtgctatat

SEQ ID NO: 281999 - DNA, 120 bp, Artificial Sequence
  ENSG00000129682_155 (sequence is synthesized)
gccctttatctagttcctctagtggtatcaacttacataactgcagtatcatatataaaccaagaaattggcatctgtataatccacagacattactcagacttctctagttttacatac

SEQ ID NO: 282000 - DNA, 120 bp, Artificial Sequence
  ENSG00000129682_156 (sequence is synthesized)
actaatttgtatgtgtgtgtgtgtgtgcgtgcacgtttatgtgtgtaggtctatgcaattttaccacatgtgtatatttgggtaaccactacaatgatcaagatatggaactgttccgtc

SEQ ID NO: 282001 - DNA, 120 bp, Artificial Sequence
  ENSG00000129682_157 (sequence is synthesized)
accactaagatcccttgtgctattcctttataaacatctccctgtcatcctttttcacccataaaagctagtaaacactaatctgttcttcatccttataattttattatttcagaattg

SEQ ID NO: 282002 - DNA, 120 bp, Artificial Sequence
  ENSG00000129682_158 (sequence is synthesized)
ttatataaatgtcatcatacagtatataacacatagagattggcttttgtcactcagcacaattcccttgagatgcatccaaactgttgtgtatatcagtaatgcaatatgtttaatttc

SEQ ID NO: 282003 - DNA, 120 bp, Artificial Sequence
  ENSG00000129682_159 (sequence is synthesized)
tgtgtagtattccatggtagagatgtgccatagtttaactattcacctgttgaacaacatttgtgttctttctacttttgggctattacaaataaagttgctatgaacattcatgtataa

SEQ ID NO: 282004 - DNA, 120 bp, Artificial Sequence
  ENSG00000129682_160 (sequence is synthesized)
gagagttctttggaaggagagcgcgagcgagggagcgggcgagctccgagggggtgtgggtgtagggagagagagaaagagagcaggcagcggcggcggcggcagcggtggggaaaagcg

SEQ ID NO: 282005 - DNA, 120 bp, Artificial Sequence
  ENSG00000129682_161 (sequence is synthesized)
gattccgccccgaaccacaccgaggggagctcgtggtcgagacttgccgccctaagcactctcccaagtccgacccgctcggcgaggacttccgtcttctgagcgaaccttgtcaagcaa

SEQ ID NO: 282006 - DNA, 120 bp, Artificial Sequence
  ENSG00000129682_162 (sequence is synthesized)
gctgggatctatgagtggaaaggtgaccaagcccaaagaggagaaagatgcttctaaggttctggatgacgccccccctggcacacaggaatacattatgttacgacaagattccatcca

SEQ ID NO: 282007 - DNA, 120 bp, Artificial Sequence
  ENSG00000129682_163 (sequence is synthesized)
atctgcggaattaaagaaaaaagagtccccctttcgtgctaagtgtcacgaaatcttctgctgcccgctgaagcaagtacaccacaaagagaacacagagccggaagagcctcagcttaa

SEQ ID NO: 282008 - DNA, 120 bp, Artificial Sequence
  ENSG00000129682_164 (sequence is synthesized)
acctccttccccccccccgccacccgacacctcctaatcctaaactccttatccaccccaaccctccgggaaggcaggagtttgcacccttcgacacgccgcgtgcaaagcagggggatc

SEQ ID NO: 282009 - DNA, 120 bp, Artificial Sequence
  ENSG00000129682_165 (sequence is synthesized)
aaactttctctgatctcctctctctctgtgtctgctccaaatgtagacagcaattgtctgggtaggaccagcttataaagaagcatggctttgttaaggaagtcgtattcagagcctcag

SEQ ID NO: 282010 - DNA, 120 bp, Artificial Sequence
  ENSG00000129682_166 (sequence is synthesized)
gtgctttggctcagatgcagactattgcaaaccgcagaaactcacagtgacgacatgaccaagaagcttcctacccctggcctgggagcaagtgaccgtgggcgctaataacaacagggc

SEQ ID NO: 282011 - DNA, 120 bp, Artificial Sequence
  ENSG00000129682_167 (sequence is synthesized)
tgtgaggcctccccagccacgtggaactaggtgtcatgaggacaagcatgaaaaaagtagggatgcatcatttgagttcttcaggaggaagctactacctaattctggatgacgcccccc

SEQ ID NO: 282012 - DNA, 88 bp, Artificial Sequence
  ENSG00000129682_168 (sequence is synthesized)
gaaagatgcttctaagggagtttctctgcacaagctctctgtttgcctgctgtcgtccacataagatgtgacttgctcctgcttgcct

SEQ ID NO: 282013 - DNA, 120 bp, Artificial Sequence
  ENSG00000129691_0 (sequence is synthesized)
gagaagtccaggggtggccgtgatggcggcggcaggagcaggacctggccaggaagcgggtgccgggcctggcccaggagcggtcgcaaatgcaacaggggcagaagagggggagatgaa

SEQ ID NO: 282014 - DNA, 120 bp, Artificial Sequence
  ENSG00000129691_1 (sequence is synthesized)
gccggtggcagcgggagcagccgctcctcctggagaggggatctctgctgctccgacagttgagcccagttccggggaggctgaaggcggggaggcaaacttggtcgatgtaagcggtgg

SEQ ID NO: 282015 - DNA, 120 bp, Artificial Sequence
  ENSG00000129691_2 (sequence is synthesized)
cttggagacagaatcatctaatggaaaagatacactagaaggtgctggggatacatcagaggtgatggatactcaggcgggctccgtggatgaagagaatggccgacagttgggtgaggt

SEQ ID NO: 282016 - DNA, 120 bp, Artificial Sequence
  ENSG00000129691_3 (sequence is synthesized)
agagctgcaatgtgggatttgtacaaaatggttcacggctgacacatttggcatagatacctcatcctgtctacctttcatgaccaactacagttttcattgcaacgtctgccatcacag

SEQ ID NO: 282017 - DNA, 120 bp, Artificial Sequence
  ENSG00000129691_4 (sequence is synthesized)
tgggaatacctatttcctccggaagcaagcaaacttgaaggaaatgtgccttagtgctttggccaacctgacatggcagtcccgaacacaggatgaacatccgaagacaatgttctccaa

SEQ ID NO: 282018 - DNA, 120 bp, Artificial Sequence
  ENSG00000129691_5 (sequence is synthesized)
agataaggatattataccatttattgataaatactgggagtgcatgacaaccagacagagacctgggaaaatgacttggccaaataacattgttaaaacaatgagtaaagaaagagatgt

SEQ ID NO: 282019 - DNA, 120 bp, Artificial Sequence
  ENSG00000129691_6 (sequence is synthesized)
attcttggtaaaggaacacccagatccaggcagtaaagatccagaagaagattaccccaaatttggacttttggatcaggaccttagtaacattggtcctgcttatgacaaccaaaaaca

SEQ ID NO: 282020 - DNA, 120 bp, Artificial Sequence
  ENSG00000129691_7 (sequence is synthesized)
gagcagtgctgtgtctactagtgggaatttaaatgggggaattgcagcaggaagcagcggaaaaggacgaggagccaagcgcaaacagcaggatggagggaccacagggaccaccaagaa

SEQ ID NO: 282021 - DNA, 120 bp, Artificial Sequence
  ENSG00000129691_8 (sequence is synthesized)
ggcccggagtgaccctttgttttctgctcagcgccttccccctcatggctacccattggaacacccgtttaacaaagatggctatcggtatattctagctgagcctgatccgcacgcccc

SEQ ID NO: 282022 - DNA, 120 bp, Artificial Sequence
  ENSG00000129691_9 (sequence is synthesized)
tgaccccgagaagctggaacttgactgctgggcaggaaaacctattcctggagacctctacagagcctgcttgtatgaacgggttttgttagccctacatgatcgagctccccagttaaa

SEQ ID NO: 282023 - DNA, 120 bp, Artificial Sequence
  ENSG00000129691_10 (sequence is synthesized)
gatctcagatgaccggctgactgtggttggagagaagggctactctatggtgagggcctctcatggagtacggaaaggtgcctggtattttgaaatcactgtggatgagatgccaccaga

SEQ ID NO: 282024 - DNA, 120 bp, Artificial Sequence
  ENSG00000129691_11 (sequence is synthesized)
taccgctgccagactgggttggtcccagcccctaggaaaccttcaagctcctttaggttatgataaatttagctattcttggcggagcaaaaagggaaccaagttccaccagtccattgg

SEQ ID NO: 282025 - DNA, 120 bp, Artificial Sequence
  ENSG00000129691_12 (sequence is synthesized)
tgggattttatattaatcttcctgaagacacagagacagccaagtcattgccagacacatacaaagataaggctttgataaaattcaagagttatttgtattttgaggaaaaagactttg

SEQ ID NO: 282026 - DNA, 120 bp, Artificial Sequence
  ENSG00000129691_13 (sequence is synthesized)
tggataaagcagagaagagcctgaagcagactccccatagtgagataatattttataaaaatggtgtcaatcaaggtgtggcttacaaagatatttttgagggggtttacttcccagcca

SEQ ID NO: 282027 - DNA, 120 bp, Artificial Sequence
  ENSG00000129691_14 (sequence is synthesized)
tctcactgtacaagagctgcacggtttccattaactttggaccatgcttcaagtatcctccgaaggatctcacttaccgccctatgagtgacatgggctggggcgccgtggtagagcaca

SEQ ID NO: 282028 - DNA, 120 bp, Artificial Sequence
  ENSG00000129691_15 (sequence is synthesized)
ccctggctgacgtcttgtatcacgtggagacagaagtggatgggaggcgcagtcccccatgggaaccctgaccaggtccctcttttctgtcaaggactttctgggaataatactgggggt

SEQ ID NO: 282029 - DNA, 120 bp, Artificial Sequence
  ENSG00000129691_16 (sequence is synthesized)
tttgtttttgtttttgaactgtctcaaatgttctcccaaagatgctaaaaacacagcctctccttttagcaagttaaaaggctgggtaggactgcgggagactgcctgcctttcaccatt

SEQ ID NO: 282030 - DNA, 120 bp, Artificial Sequence
  ENSG00000129691_17 (sequence is synthesized)
ttctccccacttccagtgactgctcttattttgtgtaccataagccaacaaccgctgactccaggattgcataagccccctgtgaaatcggtgctgtactgcataccctgccagctgtga

SEQ ID NO: 282031 - DNA, 120 bp, Artificial Sequence
  ENSG00000129691_18 (sequence is synthesized)
cttgttatcctactatattttctaaggagtgaataatattgtccgagtaactaacttatttaaaagacatttccttctgtgggcattgactgtatcccacctgttttccaaggaaatggt

SEQ ID NO: 282032 - DNA, 120 bp, Artificial Sequence
  ENSG00000129691_19 (sequence is synthesized)
aacctgtttctgagaacacctgaaatcaatggctatacattccaaaccaatctaaacgctatttccttttggtgtgggtttggttttgttcattttgaaatacacttttgaacactgaga

SEQ ID NO: 282033 - DNA, 120 bp, Artificial Sequence
  ENSG00000129691_20 (sequence is synthesized)
tccgtaaaactactagatctctggaagtgtaattgtgaaagaaacttgcttgcagctttaacaaaatgagaaacttcccaaataaaacttgttttgaagtttatgtgacactttgcttcc

SEQ ID NO: 282034 - DNA, 120 bp, Artificial Sequence
  ENSG00000129691_21 (sequence is synthesized)
cttcagattgggtgcctcttggtgacagtgttcagaaatgtaagcagcacgaggaagggagctggcactgggaggaagagccgggtttctgagttgtgttttggctgctttcctattgct

SEQ ID NO: 282035 - DNA, 120 bp, Artificial Sequence
  ENSG00000129691_22 (sequence is synthesized)
cccattcttgccaatcagccaccccctttcctgtgaaaatctgccaccttgaggagaggaacaagagtttaaaagggctaatgatctccctcccggtcttcccttggaacatggatgttg

SEQ ID NO: 282036 - DNA, 120 bp, Artificial Sequence
  ENSG00000129691_23 (sequence is synthesized)
atatatgtgcgggtggtttcctgtcttgcttatcttcctttgccctgagctgatggctaaagggcagttttcggactattaaagactgaaatgtaagaatgagccttctaggctgggcgc

SEQ ID NO: 282037 - DNA, 120 bp, Artificial Sequence
  ENSG00000129691_24 (sequence is synthesized)
gagatgctcagtagattctttgaaaactagggtgaaatccaatatgcctttggaaggaaatcctcctgtggtgttacacaaatgcacattgggtgtgttggtccctatggaatttcagta

SEQ ID NO: 282038 - DNA, 120 bp, Artificial Sequence
  ENSG00000129691_25 (sequence is synthesized)
aagaaaaagttaatgcatgaagatttccatgtacttttagtctgtcagtaggcaccattgaagcaggtaaaaaaaaaaaaggaaatctttaaacagtgtaaaccaaaactatctgagaca

SEQ ID NO: 282039 - DNA, 120 bp, Artificial Sequence
  ENSG00000129691_26 (sequence is synthesized)
gatctcaatcaatttagaagtttattttgccaaagttaaggacctgcctgtaagaaaaaaacagaatcacagaaacagtctgtggtctgtgcctttctccaaggatgaatttgagggctt

SEQ ID NO: 282040 - DNA, 120 bp, Artificial Sequence
  ENSG00000129691_27 (sequence is synthesized)
aaaagttttaaaaagaaaaagggctggacggagtggctcacggcagtaatcccaacactttgggaggccaatataagagaatcagttgagcccaggacctcgagaccagcctgggcaaca

SEQ ID NO: 282041 - DNA, 84 bp, Artificial Sequence
  ENSG00000129691_28 (sequence is synthesized)
ccaggcgtggtggtacatgcctgcccctgagcccaggaggtcaagggtgcagtgagccgtgatcgcattgttgcgctgcagcct

SEQ ID NO: 282042 - DNA, 120 bp, Artificial Sequence
  ENSG00000129691_29 (sequence is synthesized)
gggtgcagtgagccgtgatcgcattgttgcgctgcagcctggacaacagagtcagagcctgtctcaaaaaaaataaaaagtaaaataaaggggaaatgcgggctggaggggaaagtagga

SEQ ID NO: 282043 - DNA, 120 bp, Artificial Sequence
  ENSG00000129691_30 (sequence is synthesized)
gggtatggtcatccacatgttgcaagagaaaaggagcagataggggaaagtcaattatgtattcatctcatgcccggtaaatcggcacttcacataaggtaaggtgaacataaagtagct

SEQ ID NO: 282044 - DNA, 120 bp, Artificial Sequence
  ENSG00000129691_31 (sequence is synthesized)
ctttcagcttaattttttccttttgacagagcaaattgggatcctgaatttttatttttctttgacaacagaaatcaacacagatctcttttagttacctaattcttgatggacatcagg

SEQ ID NO: 282045 - DNA, 120 bp, Artificial Sequence
  ENSG00000129691_32 (sequence is synthesized)
atgttgaccacttttagtaatatttaatatatatcttatttgttccatttatcccccgagtattgtagccacatttaaagtgaaaatttcctgtgtcaaattaacttttccaatattttt

SEQ ID NO: 282046 - DNA, 120 bp, Artificial Sequence
  ENSG00000129691_33 (sequence is synthesized)
cccccatgggaaccctgaccagagaaagcttggactatatttctggaaggcacccactgtggggtgctgcttgttctgtggtgttgctgtgcagcggccgggaggagcagagggctgcag

SEQ ID NO: 282047 - DNA, 120 bp, Artificial Sequence
  ENSG00000129691_34 (sequence is synthesized)
gagaccctctgagattctgctttgtgcacatgtactgccagcgcatggcattcttgagcccataaagcaagacttctcaggccctgtggttagcatcccccacacccatatcagccacta

SEQ ID NO: 282048 - DNA, 120 bp, Artificial Sequence
  ENSG00000129691_35 (sequence is synthesized)
gcattttaaagatggttttaggtgggtacataagggcccagaaaaaaagttttacaattattttaggggcctgaaccctcatgtcatagctaatcagtgaatgaagttaccttttaatcc

SEQ ID NO: 282049 - DNA, 120 bp, Artificial Sequence
  ENSG00000129691_36 (sequence is synthesized)
atcccgcggctcctggagccctgccgcccgccccctgcgaacccaggccccgccgccaatggctcgccctgcctctgcgccgcttggcccgtcccctctcaagcatatctcggataacgc

SEQ ID NO: 282050 - DNA, 120 bp, Artificial Sequence
  ENSG00000129691_37 (sequence is synthesized)
cccttccgcacctttcacgggcggtgggagctgaggctcctgtcgttatctctgatccttgcaccctggcaggaagctggtagctcacactttaacgggaggccttcacatattccagaa

SEQ ID NO: 282051 - DNA, 120 bp, Artificial Sequence
  ENSG00000129691_38 (sequence is synthesized)
aagaaaccactttgcagtgccagactggaagaagtaacggtcactctgaaaacagggtgggagagctgcctctctttgaacctctcccaggaccaactctaacccagggaggcaaacttg

SEQ ID NO: 282052 - DNA, 120 bp, Artificial Sequence
  ENSG00000129691_39 (sequence is synthesized)
cactgattatttcttagaaggaaaaacgatactatcttttttggacactgcacctaggaattgacttttagagttagtggttgattattaattccatacttttaagtataaaatgttcat

SEQ ID NO: 282053 - DNA, 120 bp, Artificial Sequence
  ENSG00000129691_40 (sequence is synthesized)
tggagccacttttggaggtgaattcctccactgtcttctttcagcctctcagacttaagtattttgtggtttggaaaatgctttttgctgagctatggtagaagctaaaaactacataat

SEQ ID NO: 282054 - DNA, 120 bp, Artificial Sequence
  ENSG00000129691_41 (sequence is synthesized)
ttgaagcattatgaaaatggcggcaatagcacttaatatgaaacagtagttgagtttaatgttagtatttaagagcttgtatgttgtcatattctgcctaacatggccagccaccccact

SEQ ID NO: 282055 - DNA, 120 bp, Artificial Sequence
  ENSG00000129691_42 (sequence is synthesized)
tctgtactgtttgctctgttctggttggatctgaaacttcttaaaataatcaaaatgcaaatgacaattaaaaatgtaattgtggccacgcgaggtggctcatgcatgtaatcccagcac

SEQ ID NO: 282056 - DNA, 120 bp, Artificial Sequence
  ENSG00000129696_0 (sequence is synthesized)
agacaccggcgggcgcgagccgttgcaggtacctgggggtggttaagttggtgacatggctcagaagtttatttctttaaatttttaagttttttttctttttagtcttcagaaaggcaa

SEQ ID NO: 282057 - DNA, 120 bp, Artificial Sequence
  ENSG00000129696_1 (sequence is synthesized)
gtcttcagaaaggcaacagtagtcttttaacgtcactgttaaaagtgtaagactcttttactccctgagagtcccctttccctttcttgcgtcctttcctctttattctttttttttttt

SEQ ID NO: 282058 - DNA, 82 bp, Artificial Sequence
  ENSG00000129696_2 (sequence is synthesized)
cctttctctttattcttatcccggtcagactcgccccctcctccaagacatctctctgttttattttatttgattttagttc

SEQ ID NO: 282059 - DNA, 120 bp, Artificial Sequence
  ENSG00000129696_3 (sequence is synthesized)
ccaagacatctctctgttttattttatttgattttagttctctttgggtgatcgctccttccctcttcaacggatccctccccgcctccatcctcgttctgtgggagagaccagccttct

SEQ ID NO: 282060 - DNA, 120 bp, Artificial Sequence
  ENSG00000129696_4 (sequence is synthesized)
ggtgctgcagtcaggaatggagcttgacagcgctctggaagccccatcgcaggaagactctaatttgtccgaggagttgtctcactccgcctttggacaggccttctccaagattttaca

SEQ ID NO: 282061 - DNA, 120 bp, Artificial Sequence
  ENSG00000129696_5 (sequence is synthesized)
ctgtcttgcccgcccggaggcacgacgaggcaatgtaaaagatgcagttcttaaagacctcggtgatctaatagaagccacagaatttgataggttatttgaggggactggtgcacggct

SEQ ID NO: 282062 - DNA, 120 bp, Artificial Sequence
  ENSG00000129696_6 (sequence is synthesized)
ccgcggaatgccggagacactggggcaggtagcaaaagccctggagaagtatgcagccccctccaaggaggaggaaggtggaggtgatgggcactccgaagcggccgagaaagcagccca

SEQ ID NO: 282063 - DNA, 120 bp, Artificial Sequence
  ENSG00000129696_7 (sequence is synthesized)
agttgggttactgtttcttaaactgttagggaaagttgagactgctaagaattccctggtcggccctgcatggcagacgggcctgcatcacttggcaggacccgtttatatttttgccat

SEQ ID NO: 282064 - DNA, 120 bp, Artificial Sequence
  ENSG00000129696_8 (sequence is synthesized)
cacacacagcttggagcaaccatggaccactccgagatctcgggaagttgctagggaggtgctcacctcactgcttcaagttactgaatgcggttctgtggcaggattcctacatggaga

SEQ ID NO: 282065 - DNA, 120 bp, Artificial Sequence
  ENSG00000129696_9 (sequence is synthesized)
cctgccatcaaacatgttttctcatggactctgcaacaggtcactcggccctggctgagccagcatctggaaagggtacttcccgcatcattggtcatttcagatgactatcagactgag

SEQ ID NO: 282066 - DNA, 120 bp, Artificial Sequence
  ENSG00000129696_10 (sequence is synthesized)
aacaaaatcctgggtgtacactgtctccatcacattgtgcttaatgtgccagctgctgatttgctccagtataacagagcccaggtcctataccatgccatttccaaccacctgtacaca

SEQ ID NO: 282067 - DNA, 120 bp, Artificial Sequence
  ENSG00000129696_11 (sequence is synthesized)
ccagagcaccacctcattcaggctgtgctcctgtgtctgctggatttattccccatcctggagaaaaccctgcactggaaaggagatggagctcgacccaccacccattgtgatgaggtc

SEQ ID NO: 282068 - DNA, 120 bp, Artificial Sequence
  ENSG00000129696_12 (sequence is synthesized)
ctgcggctgatcctgacccacatggagccagagcaccgccttcttttacgcaggacctacgcaagaaacctgccggctttcgtgaacaggttggggatcctaactgtccggcacttaaag

SEQ ID NO: 282069 - DNA, 120 bp, Artificial Sequence
  ENSG00000129696_13 (sequence is synthesized)
aggctggagagagtcatcattggttatctggaggtttatgatggacctgaggaggaagctagactgaagatattggaaaccctaaaacttctcatgcaacatacttggcccagagtttcc

SEQ ID NO: 282070 - DNA, 120 bp, Artificial Sequence
  ENSG00000129696_14 (sequence is synthesized)
tgcagacttgtggtcttactgaaggccctcttgaaactgatttgtgatgtagcaagggatccaaaccttacacctgagtctgttaagagcgccctgctacaggaggccacagactgcctg

SEQ ID NO: 282071 - DNA, 120 bp, Artificial Sequence
  ENSG00000129696_15 (sequence is synthesized)
attctcctggaccgctgttctcaaggacgggtaaagggtctcctggccaaaattccccaaagctgtgaagacagaaaagtggtgaactatatcagaaaagtgcagcaggtttctgaaggc

SEQ ID NO: 282072 - DNA, 120 bp, Artificial Sequence
  ENSG00000129696_16 (sequence is synthesized)
gcaccctacaatggaacttaagacttgtattactttcccaagaggaaaggattttcttcccatcccaatttgtatgaatggagttatttaagaaaaaaagatatttttacacgaaacttt

SEQ ID NO: 282073 - DNA, 120 bp, Artificial Sequence
  ENSG00000129696_17 (sequence is synthesized)
gtaagtgaaagctgctttttccttccttcctttccttttacctccataagaatagggaaagtagaacaagaaaaaattgaactccttccatttctaaataaagtttgggagaaaaaagga

SEQ ID NO: 282074 - DNA, 120 bp, Artificial Sequence
  ENSG00000129696_18 (sequence is synthesized)
gttaaatcgatccttgaagttcaggtcagacgggtaatgtgcccacgtcgtaacaaggttcaagggtggcacatctcacacaagcgtatgaacacccaatcatcacgctcatgaactaca

SEQ ID NO: 282075 - DNA, 120 bp, Artificial Sequence
  ENSG00000129696_19 (sequence is synthesized)
aaaggatcatcttatagttgacattaaggagtgccaagtatgtgccactaatttacacatagggtgactaccgtaatgcgatacatccattcttcacgtataaaatcctggatattttca

SEQ ID NO: 282076 - DNA, 120 bp, Artificial Sequence
  ENSG00000129696_20 (sequence is synthesized)
aagtcccactgagattctgtgattattcttttgtttctaccttagcaaaggaaaacagaaacacaattagcgagcggattattatatatgcaaatttattctctatagttccacctctcc

SEQ ID NO: 282077 - DNA, 120 bp, Artificial Sequence
  ENSG00000129696_21 (sequence is synthesized)
gtcattttcccgagcctggatctttattgctttacgaccatacgtcgtgaaataagaaggtgttgcggcagtactggcggaagctagccttgcgttttgcggcagcaatatgagctaggt

SEQ ID NO: 282078 - DNA, 120 bp, Artificial Sequence
  ENSG00000129696_22 (sequence is synthesized)
cgggcacaagctgttacttcaacacatatgctataaaaacactcttgttcacaacttagctttcttcactcactccagatttcttgccccactgacgtggcataaataataaaaacacaa

SEQ ID NO: 282079 - DNA, 120 bp, Artificial Sequence
  ENSG00000129696_23 (sequence is synthesized)
atattgtgttcagtacaacacaaaagagcaaaaactggaggtgtgtatgtgtttaagataaaaaaaaaaaaaaaacagttctgcatgttcagtcctgggtataaatgctgaaagggaaat

SEQ ID NO: 282080 - DNA, 120 bp, Artificial Sequence
  ENSG00000129696_24 (sequence is synthesized)
cacgtggttttggctttggccacgggctctgtctcctgctcgtattctatttccacataggctcgttttctctgcagtggtcctctcaagggcattttgcctttgtgtttcgcactaagg

SEQ ID NO: 282081 - DNA, 120 bp, Artificial Sequence
  ENSG00000129696_25 (sequence is synthesized)
ggatcctgttagacaccggcgggcgcgagccgttgcagtcttcagaaaggcaacagtagtcttttaacgtcactgttaaaagtttctctttgggtgatcgctccttccctcttcaacgga

SEQ ID NO: 282082 - DNA, 120 bp, Artificial Sequence
  ENSG00000129696_26 (sequence is synthesized)
ggaccgctgttctcaaggacgggtaaagatgtggacaccattattatcaacctgttttcatagaaaagttgagtttcttggcaccagagctccgcagggtcgggaccagagggaggcagg

SEQ ID NO: 282083 - DNA, 120 bp, Artificial Sequence
  ENSG00000129696_27 (sequence is synthesized)
tagacccacccctcccaaaatgctgaattacctccttaggtttattacctcctagactagggcacaataattttatttgagtttttggatttggaactcagtagcttgaagtcaattagc

SEQ ID NO: 282084 - DNA, 120 bp, Artificial Sequence
  ENSG00000129696_28 (sequence is synthesized)
tttcctttaccagtgtctagtccgtttgggctactatcacaacacaccttagtttgggtaatgcatgaacaacggaactccactgctcccagtctggatgatgggaagtccaagatcaac

SEQ ID NO: 282085 - DNA, 120 bp, Artificial Sequence
  ENSG00000129696_29 (sequence is synthesized)
aaacacgctggcagattcctcatctgttagcgtctgtgcctcatacaagagaccctctatgtgtcctcacatggcagaagcttgctctggtctctttcataaagacacagtacatttgta

SEQ ID NO: 282086 - DNA, 120 bp, Artificial Sequence
  ENSG00000129696_30 (sequence is synthesized)
aatttatatagactataaaggcacgaaattcacatatgaatttggggcagggtacaaacattcacaccatagcaaccagtacaatcttttcttgaataaatgactttgaccttttttttt

SEQ ID NO: 282087 - DNA, 69 bp, Artificial Sequence
  ENSG00000129696_31 (sequence is synthesized)
ttattttatttatttttgttaactgcagcctttacctcctggactcaagagatcctcccacctcagcct

SEQ ID NO: 282088 - DNA, 88 bp, Artificial Sequence
  ENSG00000129696_32 (sequence is synthesized)
caagagatcctcccacctcagcctcccagtaggtgggactacaggcatgggccaccacactctcccgctatgttgctcaggctggtat

SEQ ID NO: 282089 - DNA, 67 bp, Artificial Sequence
  ENSG00000129696_33 (sequence is synthesized)
cacgcctggcctgaataggtgactgcatgcgctccagtcctagtccagttggagaagcggagagttt

SEQ ID NO: 282090 - DNA, 120 bp, Artificial Sequence
  ENSG00000129744_0 (sequence is synthesized)
ggtggccatggtggagatcagcagcagcttccccacccaggacaaggcctagatgaggaaactgagacccaaaaagagacagcaactggcccagggtcaccagcatgcagatgcctgcta

SEQ ID NO: 282091 - DNA, 120 bp, Artificial Sequence
  ENSG00000129744_1 (sequence is synthesized)
tgatgtctctgcttcttgtgtctgtgggcctcatggaagcacttcaggcccagagccaccccatcacacgacgagacctcttctctcaagagattcagctggacatggccctggcctcct

SEQ ID NO: 282092 - DNA, 120 bp, Artificial Sequence
  ENSG00000129744_2 (sequence is synthesized)
ttgatgaccagtacgctggctgtgctgctgccatgacagctgctctcccggatctcaaccacacggagttccaggccaaccaggtgtatgcagacagctggacactggcaagcagccaat

SEQ ID NO: 282093 - DNA, 120 bp, Artificial Sequence
  ENSG00000129744_3 (sequence is synthesized)
ggcaggagcgtcaggccaggtggccagagtggagtctcagccccacccgtccatccccgccacccctgggcttccgcgatgagcatggggtggccctcctggcctacacagccaacagcc

SEQ ID NO: 282094 - DNA, 120 bp, Artificial Sequence
  ENSG00000129744_4 (sequence is synthesized)
ccctgcacaaggagttcaatgcagccgtgcgtgaggcgggccgctcccgggcccactacctccaccacttctccttcaagacactccatttcctgctgactgaggccctgcagctcctgg

SEQ ID NO: 282095 - DNA, 120 bp, Artificial Sequence
  ENSG00000129744_5 (sequence is synthesized)
cctgaagcatgttgcagcccagcagtttggtgaggacaccttcttcggcatctggacctgccttggggcccctatcaagggctactccttcttccctggagaggaagaggtgctgatccc

SEQ ID NO: 282096 - DNA, 120 bp, Artificial Sequence
  ENSG00000129744_6 (sequence is synthesized)
cccctttgagaccttccaagtgatcaatgccagcagactggcccagggccccgcccgcatctacctccgagccctgggcaagcacagcacctacaactgcgagtacatcaaagacaagaa

SEQ ID NO: 282097 - DNA, 120 bp, Artificial Sequence
  ENSG00000129744_7 (sequence is synthesized)
gtgcaagtctgggccttgccatctggataattcagccatgggtcagagccccctctctgcagtctggtctttgctgctgctgctctggttcctcgtggtgagggcctttccagatggtcc

SEQ ID NO: 282098 - DNA, 120 bp, Artificial Sequence
  ENSG00000129744_8 (sequence is synthesized)
aggcctcctttgatgcatgagacacgggacagcctcgcctgctgcctctgcccatcctgaggatgttggccatgtgtgctttcagtgtaaccaagattcctgtcaatcccatctgcaggg

SEQ ID NO: 282099 - DNA, 120 bp, Artificial Sequence
  ENSG00000129744_9 (sequence is synthesized)
aactctgggaccttctctggtagctgccagaccggctggtggagaaacaggagacaatctggggactgaaccttacccagggctgtaggagtgagactctgaataaagggttgggccggc

SEQ ID NO: 282100 - DNA, 120 bp, Artificial Sequence
  ENSG00000129744_10 (sequence is synthesized)
ggtggccatggtggagatcagcagcagcttccccacccaggacaaggcctaggctcccagggtgatggagaatgcttcagagacagaaaaatgtgagccctagaagtgggaggctgacag

SEQ ID NO: 282101 - DNA, 120 bp, Artificial Sequence
  ENSG00000129749_0 (sequence is synthesized)
taattttgccctaggtctggccaggaggcctcacatccagagacctgcccccgctcttgcagtgccagggccatggggctccggagccaccacctcagcctgggccttctgcttctgttt

SEQ ID NO: 282102 - DNA, 120 bp, Artificial Sequence
  ENSG00000129749_1 (sequence is synthesized)
ctactccctgcagagtgcctgggagctgagggccggctggctctcaagctgttccgtgacctctttgccaactacacaagtgccctgagacctgtggcagacacagaccagactctgaat

SEQ ID NO: 282103 - DNA, 120 bp, Artificial Sequence
  ENSG00000129749_2 (sequence is synthesized)
gtgaccctggaggtgacactgtcccagatcatcgacatggatgaacggaaccaggtgctgaccctgtatctgtggatacggcaggagtggacagatgcctacctacgatgggaccccaat

SEQ ID NO: 282104 - DNA, 120 bp, Artificial Sequence
  ENSG00000129749_3 (sequence is synthesized)
gcctatggtggcctggatgccatccgcatccccagcagtcttgtgtggcggccagacatcgtactctataacaaagccgacgcgcagcctccaggttccgccagcaccaacgtggtcctg

SEQ ID NO: 282105 - DNA, 120 bp, Artificial Sequence
  ENSG00000129749_4 (sequence is synthesized)
cgccacgatggcgccgtgcgctgggacgcgccggccatcacgcgcagctcgtgccgcgtggatgtagcagccttcccgttcgacgcccagcactgcggcctgacgttcggctcctggact

SEQ ID NO: 282106 - DNA, 120 bp, Artificial Sequence
  ENSG00000129749_5 (sequence is synthesized)
cacggcgggcaccaactggatgtgcggccgcgcggcgctgcagccagcctggcggacttcgtggagaacgtggagtggcgcgtgctgggcatgccggcgcggcggcgcgtgctcacctac

SEQ ID NO: 282107 - DNA, 120 bp, Artificial Sequence
  ENSG00000129749_6 (sequence is synthesized)
ggctgctgctccgagccctaccccgacgtcaccttcacgctgctgctgcgccgccgcgccgccgcctacgtgtgcaacctgctgctgccctgcgtgctcatctcgctgcttgcgccgctc

SEQ ID NO: 282108 - DNA, 120 bp, Artificial Sequence
  ENSG00000129749_7 (sequence is synthesized)
gccttccacctgcctgccgactcaggcgagaaggtgtcgctgggcgtcaccgtgctgctggcgctcaccgtcttccagttgctgctggccgagagcatgccaccggccgagagcgtgccg

SEQ ID NO: 282109 - DNA, 120 bp, Artificial Sequence
  ENSG00000129749_8 (sequence is synthesized)
ctatgaccatggtcacattctcaacagcactcaccatccttatcatgaacctgcattactgtggtcccagtgtccgcccagtgccagcctgggctagggccctcctgctgggacacctgg

SEQ ID NO: 282110 - DNA, 120 bp, Artificial Sequence
  ENSG00000129749_9 (sequence is synthesized)
cacggggcctgtgcgtgcgggaaagaggggagccctgtgggcagtccaggccacctgagttatctcctagcccccagtcgcctgaaggaggggctggccccccagcgggcccttgccacg

SEQ ID NO: 282111 - DNA, 120 bp, Artificial Sequence
  ENSG00000129749_10 (sequence is synthesized)
agccacgatgtctgtgccgccaggaagccctactgcaccacgtagccaccattgccaataccttccgcagccaccgagctgcccagcgctgccatgaggactggaagcgcctggcccgtg

SEQ ID NO: 282112 - DNA, 120 bp, Artificial Sequence
  ENSG00000129749_11 (sequence is synthesized)
tgatggaccgcttcttcctggccatcttcttctccatggccctggtcatgagcctcctggtgctggtgcaggccctgtgagggctgggactaagtcacagggatctgctgcagccacagc

SEQ ID NO: 282113 - DNA, 120 bp, Artificial Sequence
  ENSG00000129749_12 (sequence is synthesized)
tcctccagaaagggacagccacggccaagtggttgctggtctttgggccagccagtctctccccactgctcctaagatcctgagacacttgacttcacaatccacaagggagcactcatt

SEQ ID NO: 282114 - DNA, 120 bp, Artificial Sequence
  ENSG00000129749_13 (sequence is synthesized)
gtctacacaccctaactaaaggaagtccagagcctgccactcccctaattccaaaaaaaagaggaactctacaaaggccaagatcacagagtacagtcttggagggacagaattgtttgt

SEQ ID NO: 282115 - DNA, 120 bp, Artificial Sequence
  ENSG00000129749_14 (sequence is synthesized)
gctgggtattggagctctcagtggggagcacatgggttataatgagaaactgaactgtactgctgcatttcctgtcttccttcctaggtggctgctttgcagggctttggctgttacctt

SEQ ID NO: 282116 - DNA, 120 bp, Artificial Sequence
  ENSG00000129749_15 (sequence is synthesized)
tccctgctgaggggctcagggaaaagggtcggggattctcagtcgagtttccagagcaggaggccctacagacatttggccccaaatccctgactcaataaagtaagcgtgtacctagca

SEQ ID NO: 282117 - DNA, 120 bp, Artificial Sequence
  ENSG00000129749_16 (sequence is synthesized)
actgtcccagatcatcgacatggtgcgttgtggtggtggtacagctgtggagtcttacctgtcacagtgtcaagaaatgaaggggatgaacggaaccaggtgctgaccctgtatctgtgg

SEQ ID NO: 282118 - DNA, 120 bp, Artificial Sequence
  ENSG00000129749_17 (sequence is synthesized)
tggccaggaggcctcacatccagagacctgcccccgctcttgcagtgccagggccatggggctccggagccaccacctcagcctgggccttctgcttctgtttctactccctgcagtgcc

SEQ ID NO: 282119 - DNA, 120 bp, Artificial Sequence
  ENSG00000129749_18 (sequence is synthesized)
ttagctgtgggggtgtagtgatcccctctccctaccacataacctggttgccacgctgccctggaagcttttccccaggacccttctaagctgccaggcactcagcccctccatggcacc

SEQ ID NO: 282120 - DNA, 120 bp, Artificial Sequence
  ENSG00000129749_19 (sequence is synthesized)
ggaacctactgtgtggtccagggcagttgtctgaatcacaagggcctctctagggcacacttttagctctaagtctctcagggctccccgaagagcctgtgtaagggtctctttcctcca

SEQ ID NO: 282121 - DNA, 120 bp, Artificial Sequence
  ENSG00000129749_20 (sequence is synthesized)
ggacatagccctctggaacactgctttatgtctccttgaccagttccgtgtctcccagccagcacatagctctgcatattttctctggggcccttctacaagttttgcagatgtccccca

SEQ ID NO: 282122 - DNA, 120 bp, Artificial Sequence
  ENSG00000129749_21 (sequence is synthesized)
agggaagtcactgtgtgtcccggagctacctctgggttctgcagaggcctttttatacatcctctggctacgtctgtgtcccttctgggcccttcaggcaccaccccttccaggcctcga

SEQ ID NO: 282123 - DNA, 120 bp, Artificial Sequence
  ENSG00000129749_22 (sequence is synthesized)
aaggcagcgggtctctctaggtgcactccaccctctgtgttgctttgttctgaaaacaagaatcaaattaacgaaaaaaaaacaagcacaagtttatttatttatttgagacacagtctc

SEQ ID NO: 282124 - DNA, 120 bp, Artificial Sequence
  ENSG00000129757_0 (sequence is synthesized)
aggccaagtgcgctgtgctcgaggggtgccggccaggcctgagcgagcgagctagccagcaggcatcgagggggcgcggctgccgtccggacgagacaggcgaacccgacgcagaagagt

SEQ ID NO: 282125 - DNA, 120 bp, Artificial Sequence
  ENSG00000129757_1 (sequence is synthesized)
ccaccaccggacagccaggtagccgccgcgtccctcgcacacgcagagtcgggcggcgcggggtctcccttgcgcccggcctccgccctctcctcctctcctttccccttcttctcgctg

SEQ ID NO: 282126 - DNA, 120 bp, Artificial Sequence
  ENSG00000129757_2 (sequence is synthesized)
tcctctcctctctcgctgcccgcgtttgcgcagccccgggccatgtccgacgcgtccctccgcagcacatccacgatggagcgtcttgtcgcccgtgggaccttcccagtactagtgcgc

SEQ ID NO: 282127 - DNA, 120 bp, Artificial Sequence
  ENSG00000129757_3 (sequence is synthesized)
accagcgcctgccgcagcctcttcgggccggtggaccacgaggagctgagccgcgagctgcaggcccgcctggccgagctgaacgccgaggaccagaaccgctgggattacgacttccag

SEQ ID NO: 282128 - DNA, 120 bp, Artificial Sequence
  ENSG00000129757_4 (sequence is synthesized)
caggacatgccgctgcggggccctggacgcctgcagtggaccgaagtggacagcgactcggtgcccgcgttctaccgcgagacggtgcaggtggggcgctgccgcctgctgctggcgccg

SEQ ID NO: 282129 - DNA, 120 bp, Artificial Sequence
  ENSG00000129757_5 (sequence is synthesized)
cggcccgtcgcggtcgcggtggctgtcagcccgcccctcgagccggccgctgagtccctcgacggcctcgaggaggcgccggagcagctgcctagtgtcccggtcccggccccggcgtcc

SEQ ID NO: 282130 - DNA, 80 bp, Artificial Sequence
  ENSG00000129757_6 (sequence is synthesized)
gtccaccccgcccccagtcccggtcctggctccagccccggccccggctccggctccggtcgcggctccggtcgcggctc

SEQ ID NO: 282131 - DNA, 80 bp, Artificial Sequence
  ENSG00000129757_7 (sequence is synthesized)
cggccccggccccggacgcggcgcctcaagagagcgccgagcagggcgcgaaccaggggcagcgcggccaggagcctctc

SEQ ID NO: 282132 - DNA, 120 bp, Artificial Sequence
  ENSG00000129757_8 (sequence is synthesized)
agcgcggccaggagcctctcgctgaccagctgcactcggggatttcgggacgtcccgcggccggcaccgcggccgccagcgccaacggcgcggcgatcaagaagctgtccgggcctctga

SEQ ID NO: 282133 - DNA, 120 bp, Artificial Sequence
  ENSG00000129757_9 (sequence is synthesized)
tctccgatttcttcgccaagcgcaagagatcagcgcctgagaagtcgtcgggcgatgtccccgcgccgtgtccctctccaagcgccgcccctggcgtgggctcggtggagcagaccccgc

SEQ ID NO: 282134 - DNA, 120 bp, Artificial Sequence
  ENSG00000129757_10 (sequence is synthesized)
gcaagaggctgcggtgagccaaagcccaaagagccccgagggaacctgccggggcagcggacgttggaagggcgctgggcctcggctgggaccgttcatgtagcagcaaccggcggcggc

SEQ ID NO: 282135 - DNA, 120 bp, Artificial Sequence
  ENSG00000129757_11 (sequence is synthesized)
tgccgcagagcagcgttcggttttgtttttaaattttgaaaactgtgcaatgtattaataacgtctttttatatctaaatgtattctgcacgagaaggtacactggtcccaaggtgtaaa

SEQ ID NO: 282136 - DNA, 90 bp, Artificial Sequence
  ENSG00000129757_12 (sequence is synthesized)
gtattctgcacgagaaggtacactggtcccaaggtgtaaagctttaagagtcatttatataaaatgtttaatctctgctgaaactcagtg

SEQ ID NO: 282137 - DNA, 120 bp, Artificial Sequence
  ENSG00000129757_13 (sequence is synthesized)
aaagttatactaacttatattttctatttatgtccaggcgtggaccgctctgccacgcactagctcggttattggttatgccaaaggcactctccatctcccacatctggttattgacaa

SEQ ID NO: 282138 - DNA, 120 bp, Artificial Sequence
  ENSG00000129757_14 (sequence is synthesized)
gtgtaactttattttcatcgcggactctggggaagggggtcactcacaagctgtagctgccatacatgcccatctagcttgcagtctcttcgcgctttcgctgtctctcttattatgact

SEQ ID NO: 282139 - DNA, 120 bp, Artificial Sequence
  ENSG00000129757_15 (sequence is synthesized)
gtgtttatctgaaacttgaagacaagtctgttaaaatggttcctgagccgtctgtaccactgccccggcccctcgtccgccgggttctaaataaagaggccgaaaaatgctgcaactcca

SEQ ID NO: 282140 - DNA, 80 bp, Artificial Sequence
  ENSG00000129757_16 (sequence is synthesized)
gatcaagaagctgtccgggcctctgatctccggtgagccccgcacggccccgccccggcccggcccggccccgctttgtc

SEQ ID NO: 282141 - DNA, 120 bp, Artificial Sequence
  ENSG00000129757_17 (sequence is synthesized)
ttcccgcctcctcccgtggcattaaagggcccgcagcgctcagggcgcggctgcgcccttacccccctccccgccccgttgttgtgccctccagcggcttcgcgcgggcggggtgggagg

SEQ ID NO: 282142 - DNA, 80 bp, Artificial Sequence
  ENSG00000129757_18 (sequence is synthesized)
gtgggaggctgaatcccggccgcgaccccccgggagcgcagttttcgcccccggccgcgggagcccctccccgggcgcgg

SEQ ID NO: 282143 - DNA, 120 bp, Artificial Sequence
  ENSG00000129810_0 (sequence is synthesized)
agttccaggcgacggcggacggtggtacggtcctggagggcccagtgcgcggggctagccgtggctggagagcttcgaagagccttgaaatgtgaggaggaggaagatagctgttgcaga

SEQ ID NO: 282144 - DNA, 120 bp, Artificial Sequence
  ENSG00000129810_1 (sequence is synthesized)
agtagtggccaaggcaaaagatggccaaggaaagatgcctgaaaaagtcctttcaagatagtcttgaagacataaagaagcgaatgaaagagaaaaggaataaaaacttggcagagattg

SEQ ID NO: 282145 - DNA, 120 bp, Artificial Sequence
  ENSG00000129810_2 (sequence is synthesized)
gcaaacgcaggtcttttatagctgcaccatgccaaataatcaccaacacttctacactgctgaaaaattaccaagacaacaacaaaatgttagttttagctttggaaaatgaaaaatcca

SEQ ID NO: 282146 - DNA, 120 bp, Artificial Sequence
  ENSG00000129810_3 (sequence is synthesized)
aagtgaaagaagcccaagatatcatcctacagctgagaaaagaatgttactatctcacatgtcagctatatgcattgaaaggaaaacttacatcacaacaaacagtagaacctgctcaga

SEQ ID NO: 282147 - DNA, 120 bp, Artificial Sequence
  ENSG00000129810_4 (sequence is synthesized)
accaggaaatatgttcctctggaatggaccccaatagtgatgacagctccagaaatttatttgtgaaggatttaccgcaaattcctcttgaagaaactgaacttccaggacaaggagaat

SEQ ID NO: 282148 - DNA, 120 bp, Artificial Sequence
  ENSG00000129810_5 (sequence is synthesized)
catttcaaatagaagctacaccacctgaaactcagcagtcacctcatcttagcctgaaggatatcaccaatgtctccttgtatcctgttgtgaaaatcagaagactttctctttctccaa

SEQ ID NO: 282149 - DNA, 120 bp, Artificial Sequence
  ENSG00000129810_6 (sequence is synthesized)
gagaagaggggacccttttacagatttgtgttttttgaattctcctattttcaagcagaaaaaggatttgagacgttctaaaaaaagagccctggaggtatcacctgccaaagaagcaat

SEQ ID NO: 282150 - DNA, 120 bp, Artificial Sequence
  ENSG00000129810_7 (sequence is synthesized)
ttttattttatattatgttcgagaatttgtttcgagattcccagactgtaggaaatgtaaacttgaaacccacatctgcttgaggtaaagtccacgggcttcacatccttagaaaacttt

SEQ ID NO: 282151 - DNA, 120 bp, Artificial Sequence
  ENSG00000129810_8 (sequence is synthesized)
tttagtccatgcattcactaatgtatgcagacctttaatagattctagctttatgtgttgggggagagatggaggggtgttgacagtctgtttcactcagcctacatacataataaaatc

SEQ ID NO: 282152 - DNA, 120 bp, Artificial Sequence
  ENSG00000129810_9 (sequence is synthesized)
taagccctttaattagagatagcaactttcccagggtgaccgaggaatcagtacgtgttgaacccctcttttaagtttccttttggttgtgtcacttggagattgccttttctttcttgt

SEQ ID NO: 282153 - DNA, 120 bp, Artificial Sequence
  ENSG00000129810_10 (sequence is synthesized)
aagctcagctgtgtcctcaaatatattgcattttacccagcatttccaggtgttttcaggggtcaaagtttttaagttatcttagtctttgatattgtgtaagcgaaattctccaatccc

SEQ ID NO: 282154 - DNA, 120 bp, Artificial Sequence
  ENSG00000129810_11 (sequence is synthesized)
atctcctagatgatttttttttaaatcacaaaatgtgattatgcttaacagctgtttcctgtttctcttaaaataaaatccatttcctatttctcttaaaataaaatccattattcttaa

SEQ ID NO: 282155 - DNA, 120 bp, Artificial Sequence
  ENSG00000129810_12 (sequence is synthesized)
catttcaaatagaagatcagatacctactattcctcaagacacactgggagttgattttgattcaggtgaagctaagtctactgataatgtcttacctagaactgtatctgttcgtagca

SEQ ID NO: 282156 - DNA, 120 bp, Artificial Sequence
  ENSG00000129810_13 (sequence is synthesized)
gtttaaagaaacattgtaacagtatatgtcagtttgatagcttggatgattttgaaaccagtcatttggcagggaagtcttttgaattcgaaagagttggatttttagacccactagtaa

SEQ ID NO: 282157 - DNA, 120 bp, Artificial Sequence
  ENSG00000129810_14 (sequence is synthesized)
acatgcacatacctgaaaatgtacaacacaatgcttgtcaatggagcaaggaccaagttaacttatcaccaaagctgattcagccaggaacgtttactaaaacaaaagaagacattttag

SEQ ID NO: 282158 - DNA, 120 bp, Artificial Sequence
  ENSG00000129810_15 (sequence is synthesized)
aatctaaatctgaacaaactaaaagtaagcaaagagatacacaagaaagaaaaagagaagagaaaagaaaagctaacaggagaaaatcaaaacgtatgtcaaaatataaagagaataaaa

SEQ ID NO: 282159 - DNA, 120 bp, Artificial Sequence
  ENSG00000129810_16 (sequence is synthesized)
tgcttacaattttaatttggaagagggtgttcatcttactcctttccgacaaaaagtgagcaatgactctaatagagaagaaaacaacgagtctgaagtgagcctctgtgaatcaagtgg

SEQ ID NO: 282160 - DNA, 120 bp, Artificial Sequence
  ENSG00000129810_17 (sequence is synthesized)
ttcaggagatgattccgatgacctctatttgcccacttgcaagtacattcagaatcccacgagcaattcagatagaccagtcaccaggcctctagctaaaagagcactgaaatacacaga

SEQ ID NO: 282161 - DNA, 120 bp, Artificial Sequence
  ENSG00000129810_18 (sequence is synthesized)
taaattcaatctacacctctttctgttgcttcaggagaggatctgtaagagtacacaaacagagtgagccattgccatagaatattctcttgacaggaccctagctcataaacatttctt

SEQ ID NO: 282162 - DNA, 120 bp, Artificial Sequence
  ENSG00000129810_19 (sequence is synthesized)
cagaactatacttcaaatgggatgctttgtattaaaactttaataaatttaatttattttttcttttgaatataaataactgagcttaagcattatcatcatatcgatttcttatgctgc

SEQ ID NO: 282163 - DNA, 120 bp, Artificial Sequence
  ENSG00000129810_20 (sequence is synthesized)
tgagcttaagcattatcatcatatcgatttcttatgctgcctaaacctcttaattttagtcgaaatatatctttttttttttttggaggcggaatttcattcttgttgcccaggctggag

SEQ ID NO: 282164 - DNA, 120 bp, Artificial Sequence
  ENSG00000129810_21 (sequence is synthesized)
ctcggcctcccaaagtgctgggattactgagccactgtgcccagcccaaaatgtatcttatacaaacattgtagaaatgaataatgattactcaaataagatcttttaattataagcttc

SEQ ID NO: 282165 - DNA, 120 bp, Artificial Sequence
  ENSG00000129810_22 (sequence is synthesized)
tgattactcaaataagatcttttaattataagcttctggcatctctatttttcccttaagtaggggatactaaagtgaatgattttctaagaggatcttttgaaactctttagtacaata

SEQ ID NO: 282166 - DNA, 120 bp, Artificial Sequence
  ENSG00000129810_23 (sequence is synthesized)
tttgagtaaaataaattattgtggatcttttgaaactctgtgtagtattcgagtaaaataaatatttgacatttacagtagggtacaccctaagttgtttatgaattccttataccactg

SEQ ID NO: 282167 - DNA, 120 bp, Artificial Sequence
  ENSG00000129810_24 (sequence is synthesized)
ttatatttaatttttcagataaaatatgtatgggaaaatgactagagaaattgattcttttttaggctcagggacaagataagtgactaattgtgaaccccaagctctaattgtatgttc

SEQ ID NO: 282168 - DNA, 120 bp, Artificial Sequence
  ENSG00000129810_25 (sequence is synthesized)
agagtgatgtctccataaaattacaaatgtcatgtactttcagggtagctccttatttagtcagaaatctcagagattaaatgtgtgaatatttagggtttttgcatatttttgaccaac

SEQ ID NO: 282169 - DNA, 120 bp, Artificial Sequence
  ENSG00000129810_26 (sequence is synthesized)
caatgaaagcgaattagttcagtttagaaagtttgatgtctatacttgtatatacctctttaaattttagaactttgtaggttattcatttttaaagagcaataaagtttgtataagata

SEQ ID NO: 282170 - DNA, 120 bp, Artificial Sequence
  ENSG00000129824_0 (sequence is synthesized)
ctcttccgtcgcagagtttcgccatggcccggggccccaagaagcacttaaagcgtgttgcagcgccgaagcattggatgcttgacaaactaacgggtgtatttgcacctcgtccatcga

SEQ ID NO: 282171 - DNA, 120 bp, Artificial Sequence
  ENSG00000129824_1 (sequence is synthesized)
caggtccccacaagctgagggaatgtcttcctctgatcgtcttcctcaggaatagactcaagtatgcgttgactggagatgaggtaaagaagatatgtatgcaacgtttcatcaaaattg

SEQ ID NO: 282172 - DNA, 120 bp, Artificial Sequence
  ENSG00000129824_2 (sequence is synthesized)
atggcaaggttcgagtggatgtcacataccctgctggattcatggatgtcatcagcatcgagaagacaggtgaacatttccgcctggtctatgacaccaagggccgttttgctgttcacc

SEQ ID NO: 282173 - DNA, 120 bp, Artificial Sequence
  ENSG00000129824_3 (sequence is synthesized)
gcatcacagtggaagaggcaaagtacaagttgtgcaaagtgaggaagattactgtgggagtgaagggaatccctcacctggtgactcatgatgctcgaaccatccgctacccagatcctg

SEQ ID NO: 282174 - DNA, 120 bp, Artificial Sequence
  ENSG00000129824_4 (sequence is synthesized)
cggtcgtgttggtgtgatcaccaacagggaaagacatcctggttcttttgatgtggtgcatgtgaaggatgccaatggcaacagctttgccacgaggctttccaacatttttgtcattgg

SEQ ID NO: 282175 - DNA, 120 bp, Artificial Sequence
  ENSG00000129824_5 (sequence is synthesized)
caatggcaataaaccttggatttccctgcccaggggaaagggcattcgacttactgttgctgaagagagagataagaggctggccaccaaacagagcagtggctaaattgcagtagcagc

SEQ ID NO: 282176 - DNA, 120 bp, Artificial Sequence
  ENSG00000129824_6 (sequence is synthesized)
atatctttttttctttgcacaaataaacagtgaattctcgtttcttaatgtgttttttcccccttgtggataatagtagggtttgaatttgctcatgattttggcactgtcttaagatct

SEQ ID NO: 282177 - DNA, 120 bp, Artificial Sequence
  ENSG00000129824_7 (sequence is synthesized)
ctaggaataccacctatacttcctctgaccctccagtaaataaacctttgcttccctcatacatgttacccacaccatctctgtgggcagagtgatggagtagcattccaaaacgaagta

SEQ ID NO: 282178 - DNA, 120 bp, Artificial Sequence
  ENSG00000129824_8 (sequence is synthesized)
caaaaaacgtatgacatttcagaaaggacggcattcttttgtggaagctatgggagatggtcttagttttcttgcttgttcacattattggtagaaattaaatcctgtggctgtaggaaa

SEQ ID NO: 282179 - DNA, 120 bp, Artificial Sequence
  ENSG00000129824_9 (sequence is synthesized)
tacaggcatgagccaccgcacccggcaaaagccacatgttcttagcagttcttagtagtggtagagttaagtttgtctctggggctctttgttaccaccgctccagagttgcccattgag

SEQ ID NO: 282180 - DNA, 120 bp, Artificial Sequence
  ENSG00000129824_10 (sequence is synthesized)
ccattgaggactatcaattggaaatatgtccctgaggaaaaaatgatataccagttgattgtgtgttaccactcagatacacaggcaacaggcttttagcctgtgataaaggaccagagg

SEQ ID NO: 282181 - DNA, 120 bp, Artificial Sequence
  ENSG00000129824_11 (sequence is synthesized)
ttagttcagctgagcactcttccagcagccaccagagggttctgaaacagattcccccttggcaaggtttcccaaatgtctaaattactaaatcagtatgggagatcatcagctctgtga

SEQ ID NO: 282182 - DNA, 120 bp, Artificial Sequence
  ENSG00000129824_12 (sequence is synthesized)
ctggttaatatagtttttcccaagagcactccttctctgaccgaggaaatgctggaaatcgatgggataagtaatgtctgggtgactgctttaggctggctttgtgtttacatattgaat

SEQ ID NO: 282183 - DNA, 120 bp, Artificial Sequence
  ENSG00000129824_13 (sequence is synthesized)
tagggactggcaagataatcaactttatcaaatttgatacaggctgtaaaaacaaaaacaagccaaacaagccagcaagcaaacaagaagaagaaaacaacaacaacacaaaccttgaaa

SEQ ID NO: 282184 - DNA, 120 bp, Artificial Sequence
  ENSG00000129824_14 (sequence is synthesized)
actgaaaaagggaatacatctataaagagaaaattgctatcactgtttttggttgggaaaaacatttgtatgagataaacatgttattcttttcataatcagacattcttctcacaagtg

SEQ ID NO: 282185 - DNA, 120 bp, Artificial Sequence
  ENSG00000129824_15 (sequence is synthesized)
ttggttctctaccattcctcaaaggtgataattttttgaaatatgttattgtggattcatgattttggatatatccaatgggtttaagtgcattgcaataaaatggtattttgatactca

SEQ ID NO: 282186 - DNA, 120 bp, Artificial Sequence
  ENSG00000129862_0 (sequence is synthesized)
atacacagggaggccaggcagcctggagttagtcgaccgttgcgagacgttgagctgcggcagatgagtccaaagccgagagcctcgggacctccggccaaggccaaggagacaggaaag

SEQ ID NO: 282187 - DNA, 120 bp, Artificial Sequence
  ENSG00000129862_1 (sequence is synthesized)
aggaagtcctcctctcagccgagccccagtggcccgaagaagaagactaccaaggtggccgagaagggagaagcagttcgtggagggagacgcgggaagaaaggggctgcgacaaagatg

SEQ ID NO: 282188 - DNA, 120 bp, Artificial Sequence
  ENSG00000129862_2 (sequence is synthesized)
cccagccaggagctccctcagcacgagctgccgccggaggagccagtgagcgaggggacccagcacgaccccctgagtcaggagagcgagctggaggaaccactgagtaaggggcgccca

SEQ ID NO: 282189 - DNA, 120 bp, Artificial Sequence
  ENSG00000129862_3 (sequence is synthesized)
tctactcccctatctccctgagcagcaactaagtttaggcccagctgccagacctcagagatctcaccagcagggtgcttcccatgttgatgacaataaaatgaatgtgttgcaaaccga

SEQ ID NO: 282190 - DNA, 120 bp, Artificial Sequence
  ENSG00000129864_0 (sequence is synthesized)
cgagaggggtatacacagggaggccaggcagcctggagttagtcgaccgttgcgagacgttgagctgcggcagatgagtccaaagccgagagcctcgggacctccggccaaggccaagga

SEQ ID NO: 282191 - DNA, 120 bp, Artificial Sequence
  ENSG00000129864_1 (sequence is synthesized)
gacaggaaagaggaagtcctcctctcagccgagccccagtggcccgaagaagaagactaccaaggtggccgagaagggagaagcagttcgtggagggagacgcgggaagaaaggggctgc

SEQ ID NO: 282192 - DNA, 120 bp, Artificial Sequence; identical to SEQ ID NO: 282188
  ENSG00000129864_2 (sequence is synthesized)

SEQ ID NO: 282193 - DNA, 120 bp, Artificial Sequence; identical to SEQ ID NO: 282189
  ENSG00000129864_3 (sequence is synthesized)

SEQ ID NO: 282194 - DNA, 120 bp, Artificial Sequence
  ENSG00000129873_0 (sequence is synthesized)
aacaggcaggaagaaagctttctgtactacaccagagggttggggctgtggatttagctactctcacctgaggctactgagcaagctgtcatgcaccacgagacaaagcccaagctgtcc

SEQ ID NO: 282195 - DNA, 120 bp, Artificial Sequence
  ENSG00000129873_1 (sequence is synthesized)
caccaggcagtaagtgtggagaggttcaggcacatggcatagctgctatttcgcacaattttcactacaccagtggtgaccaaatagaagaggttcatccatacacagaacctggtgaag

SEQ ID NO: 282196 - DNA, 120 bp, Artificial Sequence
  ENSG00000129873_2 (sequence is synthesized)
agctggaggcagaaagaagtgtctatgtggagacgcaactgaaacaaaggtggcacagcaactgttccaatcccgtgtctttcctcatggcttcccaggagtttgaggttgaagctattg

SEQ ID NO: 282197 - DNA, 120 bp, Artificial Sequence
  ENSG00000129873_3 (sequence is synthesized)
ttgacaaaagacaggataaaaatgggaatacacagtatttggttcggtggaaaggttatgacaaacaggatgacacttgggaaccagagcagcacctcatgaactgtgaaaaatgtgtac

SEQ ID NO: 282198 - DNA, 120 bp, Artificial Sequence
  ENSG00000129873_4 (sequence is synthesized)
atgattttaatagacgacagactgaaaaacagaaaaaactgacatggactacaaccagtagaattttttcaaacaatgccagaagaagaacttccagatctacaaaagcaaactattcta

SEQ ID NO: 282199 - DNA, 120 bp, Artificial Sequence
  ENSG00000129873_5 (sequence is synthesized)
agaactctcctaaaactccagtgactgataaacaccacaggtccaaaaactgcaagttatttgctgccagcaagaacgttaggagaaaggcagcttcaactctctccgacacaaagaata

SEQ ID NO: 282200 - DNA, 120 bp, Artificial Sequence
  ENSG00000129873_6 (sequence is synthesized)
tggagataataaattcaactattgagacccttgcacctgacagcccctttgaccacaagaaaactgtgagtggctttcagaaacttgagaaactggaccctattgcagcagatcagcagg

SEQ ID NO: 282201 - DNA, 120 bp, Artificial Sequence
  ENSG00000129873_7 (sequence is synthesized)
acacggtggtcttcaaggtgacagaagggaaactcctccgggaccctttgtcacatcctggtgcagaacagactggaatacagaacaagactcagatgcacccactaatgtcgcagatgt

SEQ ID NO: 282202 - DNA, 120 bp, Artificial Sequence
  ENSG00000129873_8 (sequence is synthesized)
ctggctcagttactgcttctatggccacaggttcagctacccgaaagggtatagtggtattaatagacccattagcagccaatgggacaacagacatgcatacctcagttccaagagtga

SEQ ID NO: 282203 - DNA, 120 bp, Artificial Sequence
  ENSG00000129873_9 (sequence is synthesized)
atcacatacagagacattgtagtgaagaaagaggatggattcacccagatagtgctatcaactagatcgacagaaaaaaatgcactgaatacagaagtaattaaagaaatggttaatgct

SEQ ID NO: 282204 - DNA, 120 bp, Artificial Sequence
  ENSG00000129873_10 (sequence is synthesized)
ctgaatagcgctgctgcagatgacagcaagctcgtgctgttcagtgcagctggaagtgtcttttgctgcggtcttgattttgggtactttgtgaggcacttaaggaatgacagaaacaca

SEQ ID NO: 282205 - DNA, 120 bp, Artificial Sequence
  ENSG00000129873_11 (sequence is synthesized)
gcaagccttgaaatggtggacaccatcaagaactttgtgaatacttttattcaatttaaaaagcctattgttgtatcagtcaatggccctgccattggactaggtgcatccatcctgcct

SEQ ID NO: 282206 - DNA, 120 bp, Artificial Sequence
  ENSG00000129873_12 (sequence is synthesized)
ctttgtgatctcgtgtgggctaatgaaaaggcttggttccaaaccccttatacgacctttggacagagtccagatggctgttcttctattacattccccaaaatgatgggtaaagcatct

SEQ ID NO: 282207 - DNA, 120 bp, Artificial Sequence
  ENSG00000129873_13 (sequence is synthesized)
gccaatgaaatgttaattgctgggcgaaagctgacagcacgggaggcatgcgccaaaggcctggtctctcaggtatttttgactggaactttcacccaagaggttatgattcaaattaag

SEQ ID NO: 282208 - DNA, 120 bp, Artificial Sequence
  ENSG00000129873_14 (sequence is synthesized)
gagcttgcctcatacaatgcaattgtactggaagaatgtaaggccctcgttcgctgtaatattaagttggagttggaacaggccaatgagagagagtgtgaggtgctgaggaagatctgg

SEQ ID NO: 282209 - DNA, 120 bp, Artificial Sequence
  ENSG00000129873_15 (sequence is synthesized)
agctcagcccaagggatagaatccatgttaaaaatacctctattgggatataaagcagccttccctcccagaaagacacagaacgatcagagatggtgcccttgactttatagtggcaca

SEQ ID NO: 282210 - DNA, 120 bp, Artificial Sequence
  ENSG00000129873_16 (sequence is synthesized)
aacacttcagagacacacaattataagagacttatcttttagcataaatacttatggcacaaaatccactgacgatcattctcctaaactgaacacatgactagaattggtggtgagata

SEQ ID NO: 282211 - DNA, 120 bp, Artificial Sequence
  ENSG00000129873_17 (sequence is synthesized)
tcgcttgattttcttttcctttataaatgtctagttcttacccagttaacaaaagaaaactttatcgctctaaagtaaaacttgttacaccacattagtgaattatggaatcattttggt

SEQ ID NO: 282212 - DNA, 120 bp, Artificial Sequence
  ENSG00000129873_18 (sequence is synthesized)
ggaaatatccaggttctaatgtgtggaatgtgcagatttaggttactttagtgtatgttctagttaataagttaaaattctggacacattattaaaggcagaaacttctttcaaaacaaa

SEQ ID NO: 282213 - DNA, 120 bp, Artificial Sequence
  ENSG00000129910_0 (sequence is synthesized)
cccgcgcacttgcgctgtcactcagcctggacgcgcttcttcgggtcgcgggtgcactccggcccggctcccgcctcggccccgatggacgccgcgttcctcctcgtcctcgggctgttg

SEQ ID NO: 282214 - DNA, 120 bp, Artificial Sequence
  ENSG00000129910_1 (sequence is synthesized)
gcccagagcctctgcctgtctttgggggttcctggatggaggaggcccaccaccctgtacccctggcgccgggcgcctgccctgagccgcgtgcggagggcctgggtcatccccccgatc

SEQ ID NO: 282215 - DNA, 120 bp, Artificial Sequence
  ENSG00000129910_2 (sequence is synthesized)
agcgtatccgagaaccacaagcgtctcccctaccccctggttcagatcaagtcggacaagcagcagctgggcagcgtcatctacagcatccagggacccggcgtggatgaggagccccgg

SEQ ID NO: 282216 - DNA, 120 bp, Artificial Sequence
  ENSG00000129910_3 (sequence is synthesized)
ggcgtcttctctatcgacaagttcacagggaaggtcttcctcaatgccatgctggaccgcgagaagactgatcgcttcaggctaagagcgtttgccctggacctgggaggatccaccctg

SEQ ID NO: 282217 - DNA, 120 bp, Artificial Sequence
  ENSG00000129910_4 (sequence is synthesized)
gaggaccccacggacctggagattgtagttgtggatcagaatgacaaccggccagccttcctgcaggaggcgttcactggccgcgtgctggagggtgcagtcccaggcacctatgtgacc

SEQ ID NO: 282218 - DNA, 120 bp, Artificial Sequence
  ENSG00000129910_5 (sequence is synthesized)
agggcagaggccacagatgccgacgaccccgagacggacaacgcagcgctgcggttctccatcctgcagcagggcagccccgagctcttcagcatcgacgagctcacaggagagatccgc

SEQ ID NO: 282219 - DNA, 120 bp, Artificial Sequence
  ENSG00000129910_6 (sequence is synthesized)
acagtgcaagtggggctggaccgcgaggtggtcgcggtgtacaatctgaccctgcaggtggcggacatgtctggagacggcctcacagccactgcctcagccatcatcacccttgatgac

SEQ ID NO: 282220 - DNA, 120 bp, Artificial Sequence
  ENSG00000129910_7 (sequence is synthesized)
atcaatgacaatgcccccgagttcaccagggatgagttcttcatggaggccatagaggccgtcagcggagtggatgtgggacgcctggaagtggaggacagggacctgccaggctcccca

SEQ ID NO: 282221 - DNA, 120 bp, Artificial Sequence
  ENSG00000129910_8 (sequence is synthesized)
aactgggtggccaggttcaccatcctggaaggcgaccccgatgggcagttcaccatccgcacggaccccaagaccaacgagggtgttctgtccattgtgaaggccctggactatgagagc

SEQ ID NO: 282222 - DNA, 120 bp, Artificial Sequence
  ENSG00000129910_9 (sequence is synthesized)
tgtgaacactacgaactcaaagtgtcggtgcagaatgaggccccgctgcaggcggctgcccttagggctgagcggggccaggccaaggtccgcgtgcatgtgcaggacaccaacgagccc

SEQ ID NO: 282223 - DNA, 120 bp, Artificial Sequence
  ENSG00000129910_10 (sequence is synthesized)
cccgtgttccaggagaacccacttcggaccagcctagcagagggggcacccccaggcactctggtggccaccttctctgcccgggaccctgacacagagcagctgcagaggctcagctac

SEQ ID NO: 282224 - DNA, 120 bp, Artificial Sequence
  ENSG00000129910_11 (sequence is synthesized)
ggtacagagccatcgtcctggcccaggatgacgcctcccagccccgcaccgccaccggcaccctgtccatcgagatcctggaggtgaacgaccatgcacctgtgctggccccgccgccgc

SEQ ID NO: 282225 - DNA, 120 bp, Artificial Sequence
  ENSG00000129910_12 (sequence is synthesized)
cgggcagcctgtgcagcgagccacaccaaggcccaggcctcctcctgggcgccacggatgaggacctgcccccccacggggcccccttccacttccagctgagccccaggctcccagagc

SEQ ID NO: 282226 - DNA, 120 bp, Artificial Sequence
  ENSG00000129910_13 (sequence is synthesized)
tcggccggaactggagcctcagccaggtcaacgtgagccacgcgcgcctgcggccgcgacaccaggtccccgaaggcctgcaccgcctcagcctgctgctccgggactcggggcagccgc

SEQ ID NO: 282227 - DNA, 120 bp, Artificial Sequence
  ENSG00000129910_14 (sequence is synthesized)
cccagcagcgcgagcagcctctgaacgtgaccgtgtgccgctgcggcaaggacggcgtctgcctgccgggggccgcagcgctgctggcggggggcacaggcctcagcctgggcgcactgg

SEQ ID NO: 282228 - DNA, 120 bp, Artificial Sequence
  ENSG00000129910_15 (sequence is synthesized)
tcatcgtgctggccagcgccctcctgctgctggtgctggtcctgctcgtggcactccgggcgcggttctggaagcagtctcggggcaaggggctgctgcacggcccccaggacgaccttc

SEQ ID NO: 282229 - DNA, 120 bp, Artificial Sequence
  ENSG00000129910_16 (sequence is synthesized)
gagacaatgtcctcaactacgatgagcaaggaggcggggaggaggaccaggacgcctacgacatcagccagctgcgtcacccgacagcgctgagcctgcctctgggaccgccgccacttc

SEQ ID NO: 282230 - DNA, 120 bp, Artificial Sequence
  ENSG00000129910_17 (sequence is synthesized)
gcagagatgccccgcagggccgcctgcacccccagccaccccgagtgctgcccaccagccccctggacatcgccgacttcatcaatgatggcttggaggctgcagatagtgaccccagtg

SEQ ID NO: 282231 - DNA, 120 bp, Artificial Sequence
  ENSG00000129910_18 (sequence is synthesized)
tgccgccttacgacacagccctcatctatgactacgagggtgacggctcggtggcggggacgctgagctccatcctgtccagccagggcgatgaggaccaggactacgactacctcagag

SEQ ID NO: 282232 - DNA, 120 bp, Artificial Sequence
  ENSG00000129910_19 (sequence is synthesized)
actgggggccccgcttcgcccggctggcagacatgtatgggcacccgtgcgggttggagtacggggccagatgggaccaccaggccagggagggtctttctcctggggcactgctaccca

SEQ ID NO: 282233 - DNA, 120 bp, Artificial Sequence
  ENSG00000129910_20 (sequence is synthesized)
gacacagaggccggacagcctgaccctggggcgcaactggacatgccactccccggcctcgtggcagtgatggcccctgcagaggcagcctgaggtcaccgggcccgacccccctgggcc

SEQ ID NO: 282234 - DNA, 120 bp, Artificial Sequence
  ENSG00000129910_21 (sequence is synthesized)
tggggcagcctccttcctgtaggcgagggcccaagtctgggggcagaacctgagtgtggatggggcggccaggaagaggccccttcctgccggggtgggaagagtttctctccatcggcc

SEQ ID NO: 282235 - DNA, 120 bp, Artificial Sequence
  ENSG00000129910_22 (sequence is synthesized)
ccatgcgggtcacctccctagtcccacctttgcctcctaccagtgaacctcatctttgtatgaaagacagcaacctcctgggtaaatctgaatgaaaaacgtgctagtctctttcatgca

SEQ ID NO: 282236 - DNA, 120 bp, Artificial Sequence
  ENSG00000129910_23 (sequence is synthesized)
gctccacacccgcacggccagggcagcccatctcctgcgggtccctctgcccccagcctgcccaccccagacgctcctgtccctgccgtcactgcagagcttgcagtggccctggctcct

SEQ ID NO: 282237 - DNA, 120 bp, Artificial Sequence
  ENSG00000129910_24 (sequence is synthesized)
gaggagatggcatggggtgaacccactgatgcgcagacaggagccgcgctggcccgggtgggaggggtctggtgcaagtagggcgtgaggggcccggcacagggcagggctccccaagca

SEQ ID NO: 282238 - DNA, 120 bp, Artificial Sequence
  ENSG00000129910_25 (sequence is synthesized)
gccccgcccctctcagcctcatggcaacggctccccgctggtaagtaactaactccttctgtcagggcccctgttgccccttgctgtcggacttcggtgctcccggaagaccccccttga

SEQ ID NO: 282239 - DNA, 120 bp, Artificial Sequence
  ENSG00000129910_26 (sequence is synthesized)
gtcagctcctctaggaagccctcctggttacactgttacgtggtctttgtccatttctgttcctgccactaaccacggttccccagggcagggacccaagctcactggtgtgctaggtgc

SEQ ID NO: 282240 - DNA, 88 bp, Artificial Sequence
  ENSG00000129910_27 (sequence is synthesized)
cccagcgcacagtaggtgctctgtaaacacccagcgcacagtggtgctctgtaaacgcttatccagcagcagagtaggtgctctgtaa

SEQ ID NO: 282241 - DNA, 88 bp, Artificial Sequence
  ENSG00000129910_28 (sequence is synthesized)
agcagcagagtaggtgctctgtaaaggcttacccagcgcagagtaggtgctctgtaaatgcttacccagcgcacagtaggtgctctgt

SEQ ID NO: 282242 - DNA, 120 bp, Artificial Sequence
  ENSG00000129910_29 (sequence is synthesized)
agcgtctcccctaccccctggttcagagcgagatgccatctcaaaaggtaaaaaaaaagaaaagtaactttgtacttgatgtggggaaaggacgcttcctgcctttgcctctgcaggaag

SEQ ID NO: 282243 - DNA, 120 bp, Artificial Sequence
  ENSG00000129910_30 (sequence is synthesized)
caaaatttccttttatttgccccaaatcctcctttagactttgagaaccagtccttgtatcccttacatcaaaagttattagagagtatttctcacttggaaactgtaattgtgcccatt

SEQ ID NO: 282244 - DNA, 120 bp, Artificial Sequence
  ENSG00000129910_31 (sequence is synthesized)
tttctcacttggaaactgtaattgtgcccattctccgaaaggatgggaggcagtttaaaatgtcatgtgcacaggggaattaaacttcaggaggaggccaggcgcagtggctcacccctg

SEQ ID NO: 282245 - DNA, 89 bp, Artificial Sequence
  ENSG00000129910_32 (sequence is synthesized)
gagtgaaactctatctttcaggaggaacaaagaccacagagagacagggagagagattaggaaccctctgagagccttactttagtcac

SEQ ID NO: 282246 - DNA, 120 bp, Artificial Sequence
  ENSG00000129910_33 (sequence is synthesized)
agagagattaggaaccctctgagagccttactttagtcacacgtgaagctgtgagcttcctggctgccaaggcaagcagggaaagtggcacctgccctgtctgctaagggaaggtggctc

SEQ ID NO: 282247 - DNA, 120 bp, Artificial Sequence
  ENSG00000129910_34 (sequence is synthesized)
ccgttcagggacgtcctcagtcactgtgacagatgccccaccctgtgctgtttctcgcctgtttaagctggtgtttccagctggagacaaagtctgaacgtgctgtctctttcgcatggc

SEQ ID NO: 282248 - DNA, 120 bp, Artificial Sequence
  ENSG00000129910_35 (sequence is synthesized)
cctaacgggagccacagaaatttgggggccacagagccagcccttgctctatgtttgaacagctaagagcgtttgccctggacctgggaggatccaccctggaggaccccacggacctgg

SEQ ID NO: 282249 - DNA, 120 bp, Artificial Sequence
  ENSG00000129911_0 (sequence is synthesized)
ccggacggacgccgctcccgccgcctccgctccgcccgccgcgccgcgcgcccttgctcggcatgtcggcggccgtggcgtgcgtggattacttcgccgccgacgtgctcatggccatct

SEQ ID NO: 282250 - DNA, 120 bp, Artificial Sequence
  ENSG00000129911_1 (sequence is synthesized)
ccgtggcgtgcgtggattacttcgccgccgacgtgctcatggccatctcttcgggcgccgtggtgcaccgcgggcggcccggccccgagggcgcgggccccgccgccggcctggatgtgc

SEQ ID NO: 282251 - DNA, 120 bp, Artificial Sequence
  ENSG00000129911_2 (sequence is synthesized)
ccgcctcctcctcctcagccgcctcgtccccgtcctcgggccgcgcccccggcgccgcgccctccgccgccgccaagagccaccgctgtcccttcccggactgcgccaaagcctactaca

SEQ ID NO: 282252 - DNA, 120 bp, Artificial Sequence
  ENSG00000129911_3 (sequence is synthesized)
ctgcgccaaagcctactacaagtcctcgcacctaaagtcgcacctgcggacgcacacaggggaacgcccttttgcttgtgactggcagggctgcgacaagaagttcgcccgctccgacga

SEQ ID NO: 282253 - DNA, 120 bp, Artificial Sequence
  ENSG00000129911_4 (sequence is synthesized)
gctggcccgccaccaccggacgcacacgggcgagaagcgcttctcctgccctctgtgctccaagcgcttcacccgcagtgaccacctggccaagcacgcccgccgccaccccggcttcca

SEQ ID NO: 282254 - DNA, 80 bp, Artificial Sequence
  ENSG00000129911_5 (sequence is synthesized)
cccggacctgctccggcgccctggtgcccgcagtacctcccccagcgactcgctgccctgcagcctggccgggagccctg

SEQ ID NO: 282255 - DNA, 120 bp, Artificial Sequence
  ENSG00000129911_6 (sequence is synthesized)
gggccctcgtgcagcccaccctgaccgccaggatgcttctgccatccaggggtgtagtgaggacccacggggagcctgggccccttccagccgtgggcaaaccctgaagacacccctgcc

SEQ ID NO: 282256 - DNA, 120 bp, Artificial Sequence
  ENSG00000129911_7 (sequence is synthesized)
cccctccagagagtgaggagggggcctgagactggacctgggtctgcctgacctcagaggtggctctcaggatgggtgacgggggcttgtgtctgtaaatagccatgatactaactttct

SEQ ID NO: 282257 - DNA, 120 bp, Artificial Sequence
  ENSG00000129911_8 (sequence is synthesized)
tcccatctgtgcaacggggcccccccagggcagctaggaggtcctcccctctcctctccaccaccccctgctgcccccctcccggggtggggtttgggggggtggagtggacttctggga

SEQ ID NO: 282258 - DNA, 120 bp, Artificial Sequence
  ENSG00000129911_9 (sequence is synthesized)
gccggcccggggaaagcaccccctgccccatccctgcagattgggatgaagtgttcagacagccatagaggagtcgggggttgacacggcccctgcctctccccaccccacccccacccc

SEQ ID NO: 282259 - DNA, 120 bp, Artificial Sequence
  ENSG00000129911_10 (sequence is synthesized)
accgaaagccatgggagtagttcagggaaatgggggtgcagcccagccaccccccattcgggtactcaatctcaggtgtccacaagttctgcccacggtaggggctgcctggccccccag

SEQ ID NO: 282260 - DNA, 120 bp, Artificial Sequence
  ENSG00000129911_11 (sequence is synthesized)
gtggggcagcgttaggatgcccggaggggctccaggtgttgcttctgagacctgggatggggagggaggggacctctgggttcttccaaagaacatttgactcagtggggtcgggaggga

SEQ ID NO: 282261 - DNA, 120 bp, Artificial Sequence
  ENSG00000129911_12 (sequence is synthesized)
atcctggcttatttattttcctctgtcctcgggtgtgggggccctagctcgccctctctgggtgggtgggtgagagaggctgcaggggaggctggcaccgggcttgggcctccagtccct

SEQ ID NO: 282262 - DNA, 120 bp, Artificial Sequence
  ENSG00000129911_13 (sequence is synthesized)
gccttgctgactttggccgttgcggtatcacgtgacaatcaactctcccttaacgacgactgcggctgttgggctgcgctgccctccctggcctgcaggtggggccgtggagcccatgcc

SEQ ID NO: 282263 - DNA, 120 bp, Artificial Sequence
  ENSG00000129911_14 (sequence is synthesized)
cgccggggttgcaggctcttccgggcctgggctgcagcctggcccggccctgcttccctggcctcccctccttctcctgggtgcttggaagaggtgggtcctggcccgtggttgaggtct

SEQ ID NO: 282264 - DNA, 120 bp, Artificial Sequence
  ENSG00000129911_15 (sequence is synthesized)
tgcctcgtggactggaagcagagggctggctgtgcagcctcctggggtagctcgttttttttgcaccgggtagaatattttttcaggcacggattcctttttttctgggcccccatgggt

SEQ ID NO: 282265 - DNA, 120 bp, Artificial Sequence
  ENSG00000129911_16 (sequence is synthesized)
ggtccggcatcctcagggggtgtgagtgtgtgtggggggtctctgagctgaacttgggtggggtggggacttgttcctcgggggccacctttgtgtccttgtcagcggtcgtcctgctgt

SEQ ID NO: 282266 - DNA, 120 bp, Artificial Sequence
  ENSG00000129911_17 (sequence is synthesized)
ggcctgggttgcatttcctcttggggggggtattgaggacccccagcctggaatgagaagggtccccggttccatgtcagacccagaaaggtggatccccccactgttggctgcaggagg

SEQ ID NO: 282267 - DNA, 120 bp, Artificial Sequence
  ENSG00000129911_18 (sequence is synthesized)
tttttggtacccccttttgttccagaaccgtcctgcctctcgcttggggacaggggggctttggatggcactggtgtgcacctggacccagccccggcctggcaggatccagggatgggt

SEQ ID NO: 282268 - DNA, 120 bp, Artificial Sequence
  ENSG00000129911_19 (sequence is synthesized)
gcctgggatcctggggggagggaggcaggggacgcccttctggagctgggctcggagggtcctgccccatccagccctcggctctctgtgttctctgtccctagcctcaaaccctcttct

SEQ ID NO: 282269 - DNA, 120 bp, Artificial Sequence
  ENSG00000129911_20 (sequence is synthesized)
ggcagcgctagtgagatgccttagtctgtgggggtgggtgggggactggggccccgttttcctttgtgagtcttggttggccccagccctggcaggggcctgtctggagcaggggtaggt

SEQ ID NO: 282270 - DNA, 120 bp, Artificial Sequence
  ENSG00000129911_21 (sequence is synthesized)
agggctgtgggttccagaactctataactgggcccctctccagtgtccaggggcttggagagacctgcgcccacccctccactctcccaggagtcgctgatcactgggacctggttccag

SEQ ID NO: 282271 - DNA, 120 bp, Artificial Sequence
  ENSG00000129911_22 (sequence is synthesized)
ccgtttgcaggggaggcggctccgagaggcgtgtgctttccgtgggtggcgcccctcccccgccctgcctggcctcatccttgtatttaattaattaaacaagcccctttttaaacccta

SEQ ID NO: 282272 - DNA, 120 bp, Artificial Sequence
  ENSG00000129911_23 (sequence is synthesized)
gcggtcgggcggcgagcggatggccgccccggcggcagtggcgggggctccgggggcccagcgaggggaacgcccttttgcttgtgactggcagggctgcgacaagaagttcgcccgctc

SEQ ID NO: 282273 - DNA, 80 bp, Artificial Sequence
  ENSG00000129925_0 (sequence is synthesized)
catgggccgggctggcaccgggaccgggggcgaggcggtggccgcggtggtggcggggccgctgctgctgctgctgcttg

SEQ ID NO: 282274 - DNA, 120 bp, Artificial Sequence
  ENSG00000129925_1 (sequence is synthesized)
gcccccgcctgcctccgccggctacagcgggaagagcgaggtggggctggtgtccgagcacttctcgcaggccccgcagaggctgtccttctacagctggtacggcagtgccaggctctt

SEQ ID NO: 282275 - DNA, 120 bp, Artificial Sequence
  ENSG00000129925_2 (sequence is synthesized)
ccgcttccgcgtgcccccagatgctgtgcttctacgctggctcctgcaggtctcccgggagagcggcgctgcctgcaccgacgcggagatcaccgtgcacttccgttccggcgcccctcc

SEQ ID NO: 282276 - DNA, 120 bp, Artificial Sequence
  ENSG00000129925_3 (sequence is synthesized)
ggtcatcaacccgctgggcaccagcttcccggacgacaccgcggtacagccctccttccaggtcggggtgccgctgagcaccacaccgagaagcaatgcctccgtcaacgtttcccaccc

SEQ ID NO: 282277 - DNA, 120 bp, Artificial Sequence
  ENSG00000129925_4 (sequence is synthesized)
ggcccccggggactggttcgtggccgcccacctgcccccctcatcccagaagatcgagttgaagggcttggctcccacctgtgcctacgtcttccagcctgaactgctggtcacgcgggt

SEQ ID NO: 282278 - DNA, 120 bp, Artificial Sequence
  ENSG00000129925_5 (sequence is synthesized)
ggtcgagatttccatcatggagccggacgtgccccttcctcagaccctcctctcccatcccagctacctcaaggtctttgtccccgattacacgcgggagcttctgctggagctgcggga

SEQ ID NO: 282279 - DNA, 120 bp, Artificial Sequence
  ENSG00000129925_6 (sequence is synthesized)
ctgcgtgtccaatgggagcctgggctgccccgtgcgtctcaccgtgggcccggtcaccctgcctagcaacttccagaaggtgctcacctgcaccggtgccccctggccctgccgcctgct

SEQ ID NO: 282280 - DNA, 120 bp, Artificial Sequence
  ENSG00000129925_7 (sequence is synthesized)
gctgccctcaccgccctgggaccggtggctgcaagtgacagctgagagcctggtggggcccctcgggacagtggctttcagtgctgtagctgccctcacagcttgcaggccacggagcgt

SEQ ID NO: 282281 - DNA, 120 bp, Artificial Sequence
  ENSG00000129925_8 (sequence is synthesized)
gaccatccagccccttctgcagagcagccaaaaccagagcttcaatgcctcctctggtctgctgtccccgagccccgaccaccaggacctgggcaggagtggcagggtggaccgcagccc

SEQ ID NO: 282282 - DNA, 120 bp, Artificial Sequence
  ENSG00000129925_9 (sequence is synthesized)
cttctgcctcacaaactacccagtcacgcgggaggacatggacgtggtgtcggtgcacttccagcccctggacagggtctcggtgagggtgtgttcggacacgccctccgtgatgcggct

SEQ ID NO: 282283 - DNA, 120 bp, Artificial Sequence
  ENSG00000129925_10 (sequence is synthesized)
gcgcctgaacaccggcatggacagcgggggttccctcaccatctccctgcgggccaacaagacagagatgcggaacgagaccgtcgtagtggcctgcgtgaatgctgcctcgcccttcct

SEQ ID NO: 282284 - DNA, 120 bp, Artificial Sequence
  ENSG00000129925_11 (sequence is synthesized)
tggcttcaatacttcgctcaactgcaccacagccttcttccagggctaccctttgtctctgagcgcctggtctcgcagggccaacctcatcatcccctacccagagacagacaactggta

SEQ ID NO: 282285 - DNA, 120 bp, Artificial Sequence
  ENSG00000129925_12 (sequence is synthesized)
cctctccctgcagctcatgtgccctgagaatgctgaggactgtgagcaggctgtggtccacgtggagaccaccttgtacctggtgccctgtttgaacgattgtggaccctatggccagtg

SEQ ID NO: 282286 - DNA, 120 bp, Artificial Sequence
  ENSG00000129925_13 (sequence is synthesized)
cctcctgctccgcagacacagctacctgtatgccagctgcagctgcaaggcaggctggcgtgggtggagctgcacggacaacagcacagcccagacggtggcccagcagagggcggccac

SEQ ID NO: 282287 - DNA, 120 bp, Artificial Sequence
  ENSG00000129925_14 (sequence is synthesized)
ggaggcctccgtctacgcctacaccatgttcttctccacgttctaccacgcctgcgaccagcccggggaggcggtgctgtgcatcctcagctacgacacgctgcagtactgcgacttctt

SEQ ID NO: 282288 - DNA, 120 bp, Artificial Sequence
  ENSG00000129925_15 (sequence is synthesized)
gggctccggggcggccatctgggtcaccatcctgtgcatggcacggctcaagacagtcctgaaatacgtgctgtttcttctgggtacactggtcatcgccatgtccttgcagctggaccg

SEQ ID NO: 282289 - DNA, 120 bp, Artificial Sequence
  ENSG00000129925_16 (sequence is synthesized)
caggggcatgtggaacatgctggggccctgcctctttgccttcgtgatcatggcctccatgtgggcttaccgctgcgggcaccggcgccagtgctaccccacctcgtggcagcgctgggc

SEQ ID NO: 282290 - DNA, 120 bp, Artificial Sequence
  ENSG00000129925_17 (sequence is synthesized)
cttctacctcctgcccggcgtctctatggcctctgtgggcatcgccatctacacctccatgatgactagcgacaactactactacacccacagcatctggcacatcctgctggccgggag

SEQ ID NO: 282291 - DNA, 120 bp, Artificial Sequence
  ENSG00000129925_18 (sequence is synthesized)
cgcagccttgctgctgccgccacctgaccagcccgccgagccctgggcctgctcgcagaaattcccctgccactatcagatctgcaagaacgatcgggaggaactgtacgcagtgacgtg

SEQ ID NO: 282292 - DNA, 120 bp, Artificial Sequence
  ENSG00000129925_19 (sequence is synthesized)
acactggcctggggacagctgctgctctgatgacctcttcagccaggagctgtatcgagggggaggcgcctggtccagccctggacagattgatttccagctgaataaattggcctagat

SEQ ID NO: 282293 - DNA, 120 bp, Artificial Sequence
  ENSG00000129925_20 (sequence is synthesized)
accctcttacttcctcctactgaggagagggccacccctccctcacacgcacctctcctcgccagctgcctgctcgctgctgagatccctctgcagatcccagctgctgtctgcagtggc

SEQ ID NO: 282294 - DNA, 120 bp, Artificial Sequence
  ENSG00000129925_21 (sequence is synthesized)
ccctggggcctgggcttggttacttggagaccacaggtgcctgtgcgagggtggggctgtgtgctctgctggcctgtgggtggctagagatggggagaaggactccctatggtcctgttc

SEQ ID NO: 282295 - DNA, 120 bp, Artificial Sequence
  ENSG00000129925_22 (sequence is synthesized)
cctggcgaggctgtggtgagacccatggcgcccaggagccctgagcccaccactggggccgggagctgtggactccgagacccctgctcctggcccctgtgtggccctgatgccagcctg

SEQ ID NO: 282296 - DNA, 120 bp, Artificial Sequence
  ENSG00000129925_23 (sequence is synthesized)
cctggggcatggaggatccccctctgctgctgtggtcaccatagggacgggagacggaggtttcccccagagctgatgggcactggggatgcaggctcccgccccgcccctccctttttc

SEQ ID NO: 282297 - DNA, 120 bp, Artificial Sequence
  ENSG00000129925_24 (sequence is synthesized)
ctggctctggagccttgggtccctgagaagagcttccttggactggggtgctctgctgctctgggggtttggcccagaaggaacccctacccagccctgtccacccaccccagcgttcct

SEQ ID NO: 282298 - DNA, 120 bp, Artificial Sequence
  ENSG00000129925_25 (sequence is synthesized)
gggcccccctctgggagcttcctcttggtcccaggagctgcggtggtgtctgccccctgcactgggctctgtgccctgtgggtgttcaggagactggactgtctctgctcctcatgcaaa

SEQ ID NO: 282299 - DNA, 120 bp, Artificial Sequence
  ENSG00000129925_26 (sequence is synthesized)
ccttgtgggggaagcaatgaccaggagcagcacctggcccctccctgaggcctgtgagtgtctcggatccgccctggagaagtgagtggctgagacccgggtggggccctcctacccttg

SEQ ID NO: 282300 - DNA, 120 bp, Artificial Sequence
  ENSG00000129925_27 (sequence is synthesized)
gctctgggggcttcccttctgggtcttgtccgggatatggccttcctgaaggtcttacctcccccagccgccctgcacttgaccaccaaagcaatctctaagcttataaaggagaaacat

SEQ ID NO: 282301 - DNA, 120 bp, Artificial Sequence
  ENSG00000129925_28 (sequence is synthesized)
atatatatggggttttttggagtaaaggaaaattctaagatattaagacatatttttatgtagatctgatctatctgtgtttggtgaatttaatattctacattgatttttcaaactaaa

SEQ ID NO: 282302 - DNA, 120 bp, Artificial Sequence
  ENSG00000129925_29 (sequence is synthesized)
acaggccgggctgcctgaggttggcgttcggagtgacccagctagaggggtgcttcctccagggctgctgaaagctgggggccctaatgctgcgttctcatgtctgtcagcctgttggga

SEQ ID NO: 282303 - DNA, 89 bp, Artificial Sequence
  ENSG00000129925_30 (sequence is synthesized)
aagcgtgttgttttcttctgtcctcttcacggccgactccgtggtcagcggaaacttgatgacagcatagtggccaagcttgtttctcc

SEQ ID NO: 282304 - DNA, 120 bp, Artificial Sequence
  ENSG00000129925_31 (sequence is synthesized)
gcttgtttctcctgggggtgctcttccaaggatattcaggccgcctccggcgtcgcagtgtcttgggccgctggaagaagagtctctccattgccaacactctgtgacttagcagacgtc

SEQ ID NO: 282305 - DNA, 120 bp, Artificial Sequence
  ENSG00000129925_32 (sequence is synthesized)
tctgtgacttagcagacgtctctggacttccgtctggggattcttacccaccttcaagttcaccagccctcagctggagcactggaagtgggggctctgccgcttctctccctctccgag

SEQ ID NO: 282306 - DNA, 120 bp, Artificial Sequence
  ENSG00000129925_33 (sequence is synthesized)
ctggggccctgcctctttgccttcgtgatcatggcctccatgtgggtaaggagccgggctggctggcactgctgcccaggtgctcggagaagagagcctggccccttgctctagccacgt

SEQ ID NO: 282307 - DNA, 120 bp, Artificial Sequence
  ENSG00000129925_34 (sequence is synthesized)
tcctggtcctgctccaaccagtgaatgcccatatctgctgggggttgccatggcacccacagaggcccagcatggctgtgtccctgaggcctgggcctgaggaccagtggccttgagccc

SEQ ID NO: 282308 - DNA, 120 bp, Artificial Sequence
  ENSG00000129932_0 (sequence is synthesized)
agccagcccaggcagggcgctgaatcggcacaaaccagtctcacttcttgtaccgcagtggggaggttggagagaattttttcccatgaaagggcatacgttgcccgtccccttccccga

SEQ ID NO: 282309 - DNA, 120 bp, Artificial Sequence
  ENSG00000129932_1 (sequence is synthesized)
agaacgcactaggaatactgttcctgcgtttgcatgagctgtggcaccagcaccgactcagccttccgggcctccctcatgcacggagcctctcactaggtctcacccgcggctgcgttg

SEQ ID NO: 282310 - DNA, 120 bp, Artificial Sequence
  ENSG00000129932_2 (sequence is synthesized)
gtgccgtccggcacggtcacgtgggcgagaaaatggcggcccccagaccgcactgcgggcgtcgcggcaggtgaagcggtggtggcagaggcgcctgcggttactggccgggccgacggg

SEQ ID NO: 282311 - DNA, 120 bp, Artificial Sequence
  ENSG00000129932_3 (sequence is synthesized)
tcctgagtctccagagctcggttcttacatccccgcgtccccaggtttagcctgagcagggttgtggaaggccgggacccattgacagcacgatggtgacggagcaggaggtggatgcca

SEQ ID NO: 282312 - DNA, 120 bp, Artificial Sequence
  ENSG00000129932_4 (sequence is synthesized)
tcgggcagacgctggtggaccccaagcagcccctgcaggcccgcttccgggcgctgttcacgctgcgtgggctcggcggcccaggcgccattgcatggatcagccaggccttcgatgacg

SEQ ID NO: 282313 - DNA, 120 bp, Artificial Sequence
  ENSG00000129932_5 (sequence is synthesized)
attccgccctgctcaagcacgagctggcctactgcctgggccagatgcaggatgcccgcgccatccccatgctggtggacgtgctgcaagacacccgtcaggagcccatggtgcgccatg

SEQ ID NO: 282314 - DNA, 120 bp, Artificial Sequence
  ENSG00000129932_6 (sequence is synthesized)
aggcaggggaggccctgggggccatcggggacccggaagttctggagatcctgaagcagtattcctcggaccccgtcatcgaggtggccgagacctgccagctggccgtgcgcaggctgg

SEQ ID NO: 282315 - DNA, 120 bp, Artificial Sequence
  ENSG00000129932_7 (sequence is synthesized)
agtggctgcagcagcacggcggggagccggcggcgggaccctacctctccgtggaccctgccccgccggctgaggagcgtgacgtggggcgcctgcgggaggcgctgctggatgagtccc

SEQ ID NO: 282316 - DNA, 120 bp, Artificial Sequence
  ENSG00000129932_8 (sequence is synthesized)
acgaggtcggctacgtcctgggacagctgcagcacgaggcggcggtgccccagctggcggccgccctggcccgatgcaccgagaaccccatggtgcggcacgagtgcgcggaggccctgg

SEQ ID NO: 282317 - DNA, 120 bp, Artificial Sequence
  ENSG00000129932_9 (sequence is synthesized)
gcgccattgcccggcccgcctgcctggccgcgctgcaggctcacgcggacgacccagagcgcgtggtgcgtgagagctgcgaggtggctctggacatgtatgagcacgagaccgggcggg

SEQ ID NO: 282318 - DNA, 120 bp, Artificial Sequence
  ENSG00000129932_10 (sequence is synthesized)
ccttccagtacgcggacggcctggagcagctgcgcggggccccctcctagggccccaccctcacccggagctcccggaggactcttgagggccgctcctcccccgcagagctttggcgtc

SEQ ID NO: 282319 - DNA, 120 bp, Artificial Sequence
  ENSG00000129932_11 (sequence is synthesized)
taaaccgggtgtgtgtaaatcggtgtcatcgcttgtgtcttgctgggcgcatggttgctgtccccctcctccgtctgggaccgaggagctgccgttgtgctgtgactccctgagtcccct

SEQ ID NO: 282320 - DNA, 120 bp, Artificial Sequence
  ENSG00000129932_12 (sequence is synthesized)
gactgctcctcggggcctggcgcagggctgtagcgtggaagtttccaggcttggggtgggactctgcgggaggctctgggatgcccggctcaggacaggggaggattgcgagggaagcca

SEQ ID NO: 282321 - DNA, 120 bp, Artificial Sequence
  ENSG00000129932_13 (sequence is synthesized)
ggggaggatcgcgagggaagccaggggaggatcgcgagggaagccaggggaggatcgcgagggaagccaggggaggatcgcgagggaagccaagggaggatcgcgaggggagccagggga

SEQ ID NO: 282322 - DNA, 120 bp, Artificial Sequence
  ENSG00000129932_14 (sequence is synthesized)
ggatcgcgagggaagccaggggcagagctggggctctgggaagaggctgacgttatggtggcttcagcttcactaggaatgggacacagggtctgggggcctctgactcccccaccccga

SEQ ID NO: 282323 - DNA, 120 bp, Artificial Sequence
  ENSG00000129932_15 (sequence is synthesized)
ggcctgggtagggacagggtggtggtccctgagtgggtcaggtagggcacaggggccagggagggacaagcagacctcagagcgctgcccagatggaatattaaattatttttgccaagc

SEQ ID NO: 282324 - DNA, 120 bp, Artificial Sequence
  ENSG00000129932_16 (sequence is synthesized)
tggggtcctgggcagtgcctcgctgtgaggttcagtgatggcatctgtgcagtggggccgcggcctgcccccgggaacggcatcccgggcctggccccaagcatttcccatggggcctct

SEQ ID NO: 282325 - DNA, 120 bp, Artificial Sequence
  ENSG00000129932_17 (sequence is synthesized)
taagaacccgtgcaagcgtccctcttggtccccatagctcccagcttttcccgcccccatagctgcggtcagttcccccgggcatccctaatcactggggctgggggcaggggtgtcttc

SEQ ID NO: 282326 - DNA, 120 bp, Artificial Sequence
  ENSG00000129932_18 (sequence is synthesized)
gcggcaggtgaagcggtggtggcagaggcgcctgcggttactggccgggccgacgggtcctgagtctccagagctcggtgaggcgtcccggaggcggcgatcacggttcttacatccccg

SEQ ID NO: 282327 - DNA, 120 bp, Artificial Sequence
  ENSG00000129933_0 (sequence is synthesized)
gtggcggcggcttgttgttgtggaggccaaaatggcggctcaggcggcggcagcggcccaggcggcggcggcccaggctgcgcaggccgaggcggccgactcgtggtacctggcgcttct

SEQ ID NO: 282328 - DNA, 120 bp, Artificial Sequence
  ENSG00000129933_1 (sequence is synthesized)
gggcttcgctgagcacttccgcacttccagcccgcccaaaatccgcctgtgcgtgcactgcctgcaggccgtgttccccttcaagccgccgcagcgcatcgaggcccgtacacacctgca

SEQ ID NO: 282329 - DNA, 120 bp, Artificial Sequence
  ENSG00000129933_2 (sequence is synthesized)
gctgggctccgttctctatcaccacaccaagaacagcgagcaggcgcgcagccacctggagaaggcgtggttgatatcacagcaaatcccgcagttcgaagatgttaaatttgaagcagc

SEQ ID NO: 282330 - DNA, 120 bp, Artificial Sequence
  ENSG00000129933_3 (sequence is synthesized)
aagtctgttgtctgaattgtactgtcaagagaattccgttgatgcagcaaagccgctgctgcggaaggcgatccagatctcacagcagaccccatattggcactgccgcctgctcttcca

SEQ ID NO: 282331 - DNA, 120 bp, Artificial Sequence
  ENSG00000129933_4 (sequence is synthesized)
gctcgctcaactgcacacgcttgagaaggacctggtgtcggcctgtgacctcctgggtgtaggggccgagtacgcccgggtggtgggatctgaatacacacgggcgctgttcctcctcag

SEQ ID NO: 282332 - DNA, 120 bp, Artificial Sequence
  ENSG00000129933_5 (sequence is synthesized)
caaggggatgctgctgctgatggagcgaaagctgcaggaggtgcacccgctgctgaccctctgcgggcagatcgtggagaactggcaggggaaccccatccagaaggagtcgctgcgtgt

SEQ ID NO: 282333 - DNA, 120 bp, Artificial Sequence
  ENSG00000129933_6 (sequence is synthesized)
cttcttcctggtgctccaggtcacccactatctggatgccgggcaggtgaagagcgtgaagccgtgtctgaagcagctgcagcagtgcatccagaccatctccacactgcacgatgatga

SEQ ID NO: 282334 - DNA, 120 bp, Artificial Sequence
  ENSG00000129933_7 (sequence is synthesized)
gatcctgcccagcaaccccgctgacctcttccactggctgcccaaggagcacatgtgtgtgcttgtctacctggtgactgtgatgcactccatgcaggccggctacctggagaaggcgca

SEQ ID NO: 282335 - DNA, 120 bp, Artificial Sequence
  ENSG00000129933_8 (sequence is synthesized)
gaagtacacggacaaggccctcatgcagctggagaagctcaagatgctggactgcagccccatcctgtcatccttccaagtgatcctgctggagcacatcatcatgtgccgccttgtcac

SEQ ID NO: 282336 - DNA, 120 bp, Artificial Sequence
  ENSG00000129933_9 (sequence is synthesized)
gggtcacaaggccacggcgctgcaggagatctcccaggtctgccagctgtgccagcagtccccccggctcttctccaaccatgcagcacagctgcacacattgctgggcctgtactgtgt

SEQ ID NO: 282337 - DNA, 120 bp, Artificial Sequence
  ENSG00000129933_10 (sequence is synthesized)
ctctgtcaactgcatggacaacgcggaagcccagttcaccacggccctgcggctcaccaaccaccaggagctgtgggccttcatcgtcaccaacctggcgagtgtgtatatacgggaagg

SEQ ID NO: 282338 - DNA, 120 bp, Artificial Sequence
  ENSG00000129933_11 (sequence is synthesized)
aaatagacaccaagaggtactctacagtctgctggagaggatcaacccggaccacagcttccctgtcagctcgcactgcctccgagcagccgccttctatgtgcgtgggctcttctcctt

SEQ ID NO: 282339 - DNA, 120 bp, Artificial Sequence
  ENSG00000129933_12 (sequence is synthesized)
cttccagggacgctacaacgaggccaagcgatttctgcgggaaactctgaagatgtccaatgctgaggacctgaaccggctcacagcctgctccctcgtgcttctgggccacatcttcta

SEQ ID NO: 282340 - DNA, 120 bp, Artificial Sequence
  ENSG00000129933_13 (sequence is synthesized)
tgtgctgggaaaccacagggagagtaacaacatggtggtgcctgccatgcagctcgccagcaagatcccggacatgtcggtacagctgtggtcgtcagcactgctgagagacctgaataa

SEQ ID NO: 282341 - DNA, 120 bp, Artificial Sequence
  ENSG00000129933_14 (sequence is synthesized)
agcctgtgggaacgccatggatgcccatgaagccgcccagatgcaccagaacttctcgcagcagctgctccaggaccacattgaggcctgcagcctccccgaacacaacctcatcacgtg

SEQ ID NO: 282342 - DNA, 120 bp, Artificial Sequence
  ENSG00000129933_15 (sequence is synthesized)
gacagacggtccaccccccgtgcagttccaagctcagaatggacccaacaccagcctggccagcctcctgtgaggccttgatggggccatccagctccgcagggcctgcgcgtctccggc

SEQ ID NO: 282343 - DNA, 120 bp, Artificial Sequence
  ENSG00000129933_16 (sequence is synthesized)
ttccacccagacggcactcaagcctgcccccgaggcgtgcttccttcctgattgtctctagagcttccaagtcctgggaatgtgcggggccagtccctgccctcccaggaggggtggtag

SEQ ID NO: 282344 - DNA, 120 bp, Artificial Sequence
  ENSG00000129933_17 (sequence is synthesized)
ccgttcccacctcgcagcaggacccccagtgcagaggctcacaggtggcacacaggcgctgtctctccagagccatccttcagagtggacctcagtgccagtcctgcctcagcatctggg

SEQ ID NO: 282345 - DNA, 120 bp, Artificial Sequence
  ENSG00000129933_18 (sequence is synthesized)
tcacgtcggccaggagtagggtgcaggcctccagcaggtcctaatcctgtgtgccagggcaggcagtgccccaggggcaccacgcctgactctccatcacccaggccttgatgccgagcg

SEQ ID NO: 282346 - DNA, 120 bp, Artificial Sequence
  ENSG00000129933_19 (sequence is synthesized)
ggagtagagtgtttcctctgctcaaggcaatttccagagcccggatgccagtttctggcctgaatttggagggaagaagtaatggcgctagtgtgggacgaagcacagatcccagcactt

SEQ ID NO: 282347 - DNA, 120 bp, Artificial Sequence
  ENSG00000129933_20 (sequence is synthesized)
tctggtcaggaaccctcagggacccaggaactcagcttccaaacatctgcaccttgaccggactcgccatcccgccgtgggggtgcaggtgattgtaaacacgggtgtgcatgtggatgc

SEQ ID NO: 282348 - DNA, 120 bp, Artificial Sequence
  ENSG00000129933_21 (sequence is synthesized)
acacgggtgtgcggtgaagatctgtggagatggagctgggagctgaggctcctgttgcaccagccaccttcccccatcttgtggctgctgaggggcaggaagcgggggagtgggctcgtc

SEQ ID NO: 282349 - DNA, 120 bp, Artificial Sequence
  ENSG00000129933_22 (sequence is synthesized)
tcctaaatttaagatcacctcctcagctagcttagagtgcgtggcacgggccccccgcccccgagatctggagcccagggactttcttcctggcagatctgtggccttccctgctcagcc

SEQ ID NO: 282350 - DNA, 120 bp, Artificial Sequence
  ENSG00000129933_23 (sequence is synthesized)
tcttggtccccccactccctccaccgcctcaccttccctgctgggtctctggggcacagtgtgaaacccgcaccctagccaggccccagggagcctccgctgggcccagacagcagcgtt

SEQ ID NO: 282351 - DNA, 120 bp, Artificial Sequence
  ENSG00000129933_24 (sequence is synthesized)
tggttttatccacttttcttggataatcaggaggtgccccagtggtcacagtgtggcattccgagttggggcgggtggtcgggtcaagatagcagcagcaggtgtcagggctcaagacac

SEQ ID NO: 282352 - DNA, 120 bp, Artificial Sequence
  ENSG00000129933_25 (sequence is synthesized)
caccccctccagcttctggggcccaggagcctctccctgctacagggggtgggggtcctgctcagcagggtaggtggtggttttaggtcttgtcaccctcactcagtggaactgcctctg

SEQ ID NO: 282353 - DNA, 120 bp, Artificial Sequence
  ENSG00000129933_26 (sequence is synthesized)
ggagctttggcgtctgtgactaaagggacgctggattgctcaggtcagctgcttggggctcccaggctgggtgtgccttagccacaggcagggctgtcaataacccccttcctcactggc

SEQ ID NO: 282354 - DNA, 120 bp, Artificial Sequence
  ENSG00000129933_27 (sequence is synthesized)
caccacctgacatcagcaccagtgacaggctggtcagagggcggggctggtgagggtttgtcctaagaggaccaccgccatctctgggtctccagggggagagcctggccctgtcctttg

SEQ ID NO: 282355 - DNA, 120 bp, Artificial Sequence
  ENSG00000129933_28 (sequence is synthesized)
ctacccagggctgcccccaggcccatgaagccaataggagagcgtgtggcactggcccacaaactgtccctgtcctgtcttcctcccgagccatggcctctgctagctccaccttgaagg

SEQ ID NO: 282356 - DNA, 120 bp, Artificial Sequence
  ENSG00000129933_29 (sequence is synthesized)
agccccccacatcctcccctacatcccagagatgccaccacttgtgtctccacaatgtgctcctgcccacccgggttccgcactgtccgacccctgcacaccactcatgtcaccacggcg

SEQ ID NO: 282357 - DNA, 120 bp, Artificial Sequence
  ENSG00000129933_30 (sequence is synthesized)
tgcatcatgttcatccccatctatttatttaagcctttctttgcttgtagggcattttgtatgtagagcagttgaaaacagaacctcagaacttaacatctgtcctgatgttaaagtgct

SEQ ID NO: 282358 - DNA, 120 bp, Artificial Sequence
  ENSG00000129933_31 (sequence is synthesized)
tttcatgaccaccctgttatctatgtatatgtaaagttaaggatgagatcttaagtttacaattaaaaactcagtactcaatatttaatattctactcgagctttatggaagccaaatca

SEQ ID NO: 282359 - DNA, 120 bp, Artificial Sequence
  ENSG00000129933_32 (sequence is synthesized)
tgtgcatgtgtgtgtgtgcgtgtgtgcaagctttgaacctccttccacagccgcatcttctcatgacacaaagcttttgataagtactttcctgtgggtcgctcagcgcctcatagcatc

SEQ ID NO: 282360 - DNA, 120 bp, Artificial Sequence
  ENSG00000129933_33 (sequence is synthesized)
tactttcctgtgggtcgctcagcgcctcatagcatctcattcaattgcaagaatagaggccagacacggtggcgcatgcctgtagtcccagctaactgggaggctgaggcaggaggatca

SEQ ID NO: 282361 - DNA, 120 bp, Artificial Sequence
  ENSG00000129933_34 (sequence is synthesized)
ctttgtctcaaaaaaaaaaaaaaaaacaatggaaggcagacagcaagtccctgaggacacatcacacagtgtcctgtagctaagtgtctaggaaaaaacaaaaactccaaacccttcagt

SEQ ID NO: 282362 - DNA, 120 bp, Artificial Sequence
  ENSG00000129933_35 (sequence is synthesized)
tgtctaggaaaaaacaaaaactccaaacccttcagtggatgaggacaaggtcgcagaaaggcattctgttgacagatgaacagccgaaagctggccagaccctcctgtatgcctctgccc

SEQ ID NO: 282363 - DNA, 120 bp, Artificial Sequence
  ENSG00000129933_36 (sequence is synthesized)
ttgtcctgtgggttgagggggtctgaccaggaggccacctacagcaggaagtgaggctgccatgtttccttgagacacagctgcctctccccagctctgtccctgtagtcacctgccggt

SEQ ID NO: 282364 - DNA, 120 bp, Artificial Sequence
  ENSG00000129933_37 (sequence is synthesized)
gggcgaggatcctctccctgggataagcactcccagccccgtttatcagaaacacaggcaaggaaattggaactgccacccagcccagcatggtggctcaattggttggttgcgttgtca

SEQ ID NO: 282365 - DNA, 120 bp, Artificial Sequence
  ENSG00000129933_38 (sequence is synthesized)
gttgtctcttcgttttgttaaggtttttaataagtacgtttggcataatgtcttttaatgggtttgtaatatttgtaacggttttagcagcctataacttttcagctggtgcttttactt

SEQ ID NO: 282366 - DNA, 120 bp, Artificial Sequence
  ENSG00000129933_39 (sequence is synthesized)
agggaaaaaaacaatttgtaaatacagaacattgtttaaaagacataaccatagaacatagcttcctgtttgtggattttgtttcctatatattcaaagtaaaatgacttacaggagcca

SEQ ID NO: 282367 - DNA, 120 bp, Artificial Sequence
  ENSG00000129933_40 (sequence is synthesized)
ccgggagaatccagaatgttctcagtaagtaagtacctaaccagatccagaacattcccagtgaaggaccccctgacagcaccctaatcagaatccggaatgttcccataggtaatcata

SEQ ID NO: 282368 - DNA, 120 bp, Artificial Sequence
  ENSG00000129933_41 (sequence is synthesized)
taaccttcccaggcacgatccggaatgctcccagtgagcatcttgtcccaccccacattggcttgggtctgaaaggtggggacagtgagcatattacctgccttgcagctggctcggtag

SEQ ID NO: 282369 - DNA, 120 bp, Artificial Sequence
  ENSG00000129933_42 (sequence is synthesized)
agccattgtcatactcctccagggcagccgtgcaggccccgggcacaccacgtgtctctgatctgagccccctccccaggggccggccctgatgacaacaccaccttcttccagggcctg

SEQ ID NO: 282370 - DNA, 120 bp, Artificial Sequence
  ENSG00000129933_43 (sequence is synthesized)
atgttctgagggtaggattggggtggctggttttcctcttctgtgttctctaactgccccgtaacgcagatgatggttttataatgagaagaagtaatagctgtgttatccttgagctta

SEQ ID NO: 282371 - DNA, 120 bp, Artificial Sequence
  ENSG00000129933_44 (sequence is synthesized)
ggaggcaaaacaagtgtgtttgaaatgaaaagaacaagtcttttccaaagtagtctccgtggagattgtgggtgctctgacactgccacatgggtcacagcacccgacccagccccctaa

SEQ ID NO: 282372 - DNA, 120 bp, Artificial Sequence
  ENSG00000129933_45 (sequence is synthesized)
cccaagctgtctgctctaggatgtcggccaggcattgaggctcagtcctaaggggcagcagccagagcaccttgtccccaggttgtgctgatgcccctgcaggatcaggggcactcactg

SEQ ID NO: 282373 - DNA, 120 bp, Artificial Sequence
  ENSG00000129933_46 (sequence is synthesized)
gctgcagtgttgggtggggatgcccagggttgccctcacgtggcgcttctgaaccaatgcttgcataagagttaggttccctcttctgtcccttttagccctgggatccccactcagccc

SEQ ID NO: 282374 - DNA, 120 bp, Artificial Sequence
  ENSG00000129933_47 (sequence is synthesized)
tgggatccccctcagccccgggatcccctcctcagccccgggatcccctcctcagccctgggatccccctcagctctgggattccctcctcagccctgggatgcccactcagccctggga

SEQ ID NO: 282375 - DNA, 120 bp, Artificial Sequence
  ENSG00000129933_48 (sequence is synthesized)
ccctgggatccccctcagccctaggatgtccctcagttctagtatctccttcacctctgggggtctacctccaaagtgtatcaggccaggtgcttggctcacacctgtaatcccagcact

SEQ ID NO: 282376 - DNA, 90 bp, Artificial Sequence
  ENSG00000129933_49 (sequence is synthesized)
gcctgggcaacatagggagacccccatttctacaaaaaaattttttaaaaacttggtggggtgcaggcctgtggtcccaactactctagg

SEQ ID NO: 282377 - DNA, 90 bp, Artificial Sequence
  ENSG00000129933_50 (sequence is synthesized)
tggggtgcaggcctgtggtcccaactactctagggagattgagggctgcagtgagccatgatccagccactgcactccagcctgggcgac

SEQ ID NO: 282378 - DNA, 120 bp, Artificial Sequence
  ENSG00000129933_51 (sequence is synthesized)
aaaagaaagcccagccccggcttagtcatccgatgccatacgtgggctcgcagtgttgaggaggagtttggctcccctgtgcctctgcagctagagggcagctaaattatcagtcagatc

SEQ ID NO: 282379 - DNA, 120 bp, Artificial Sequence
  ENSG00000129933_52 (sequence is synthesized)
acgcccccatcagagcctcccggggtccctgcacctccagagaaatcccacccactcacccccacagcccacagggctcacgggccccagcctgccaacctacccactgccaggccagcc

SEQ ID NO: 282380 - DNA, 120 bp, Artificial Sequence
  ENSG00000129933_53 (sequence is synthesized)
cctcagcaccactctgaccatacaaaggccttctggacgcccaggcccctgtcacctactgcaggacagggtggcacaggcagggctggctgagggtgtggaaatcttgcccccggccct

SEQ ID NO: 282381 - DNA, 120 bp, Artificial Sequence
  ENSG00000129933_54 (sequence is synthesized)
tctcaccagaggctgctcttgctggtcagtcaccaggctcagcctggaggccacagtcccgacgggggtgtagagaaattcccatgcactgcagtgtgtcttggggacctttctcctgtg

SEQ ID NO: 282382 - DNA, 120 bp, Artificial Sequence
  ENSG00000129933_55 (sequence is synthesized)
aagcctttgcagaggccagcgaatgggccctgcagctcaggccctggtgggccttggcctcagcactggggatgccactaccccgtcaaaacctgtagctggctccttctagaatgtgct

SEQ ID NO: 282383 - DNA, 120 bp, Artificial Sequence
  ENSG00000129933_56 (sequence is synthesized)
atcaccctgccctcagcctctgagcacagtgagggctgtatgtccccactggacagtgcaagtggcctgggggtgtgtcagatggggaggttaaagtcacacagccccagaccgcagaat

SEQ ID NO: 282384 - DNA, 120 bp, Artificial Sequence
  ENSG00000129933_57 (sequence is synthesized)
caggactggaacccagacctcactggctctgatttgtgtagaaacccctggaagctgcctggagcagggcaaggagggttgagcagctggttcactgctgctcctggcccatgttttagg

SEQ ID NO: 282385 - DNA, 120 bp, Artificial Sequence
  ENSG00000129933_58 (sequence is synthesized)
tgttgtgggggcatcttacagagctcttttgggaatccccctctgctccctgtgtccctgggcccttgtcgggtgacaagcggcgcccaagaactctcagaccaaggtcctggccttaag

SEQ ID NO: 282386 - DNA, 120 bp, Artificial Sequence
  ENSG00000129933_59 (sequence is synthesized)
tgactccagatctcggggagacacagccagacacagccaagccagtcctgtgaggtcaggctggggacatccagaaaggtggcagccttgggggccgggatagtgttggtgcaggcaggg

SEQ ID NO: 282387 - DNA, 120 bp, Artificial Sequence
  ENSG00000129933_60 (sequence is synthesized)
caaggttggctaggcaggggctgccacagagatgggcaccacagcagtcagagcacaagtgccggagcagacggctgaatggccacaatgggctcaggtgagggtccaggggcccagaag

SEQ ID NO: 282388 - DNA, 120 bp, Artificial Sequence
  ENSG00000129933_61 (sequence is synthesized)
agcttgggatgccctgtcctgagcctgttaggctagagtgtccacaagagcgggacaccccccaggatcactcaagtcttcaaaaccagattctgtggggtaccccaagctggcattggg

SEQ ID NO: 282389 - DNA, 120 bp, Artificial Sequence
  ENSG00000129933_62 (sequence is synthesized)
ggaacctacccaggagcgctgaaggaggactctccttccccaggctgctttcagacagaggtccttggctttctacagggagcccagccaggctcacaataagccaggcctagcggaaga

SEQ ID NO: 282390 - DNA, 120 bp, Artificial Sequence
  ENSG00000129933_63 (sequence is synthesized)
gagcagtttttcttgctctgaggtttcaaaagggcttggtgaattttaaaaagctccaagacccacctggagctcactttcaaggtgcagctacagggcagtgtagagttgttgggcttt

SEQ ID NO: 282391 - DNA, 120 bp, Artificial Sequence
  ENSG00000129933_64 (sequence is synthesized)
gtgtctcaggaggagcatctctgcactctggagaagtatctggtggcgtcaaagccaggtctcaggagttggttttggggatgtgtccatcttggcttcccaagtgctccctgggctgcc

SEQ ID NO: 282392 - DNA, 120 bp, Artificial Sequence
  ENSG00000129933_65 (sequence is synthesized)
aggagccatcatctagggaattttccaggtcttacctgaaccccacatccaggcttacagggctttgagtcctcggtccagacagggtcagtccagcactgctggtcgcctgtgtagcac

SEQ ID NO: 282393 - DNA, 120 bp, Artificial Sequence
  ENSG00000129933_66 (sequence is synthesized)
aggctcctgtctgccgtctccaggcccttgccatagcaacagggatgggcatttatgggccctgatggctcttactgagctcttcctgccacatcctgaggatgctagggctgcaactgg

SEQ ID NO: 282394 - DNA, 120 bp, Artificial Sequence
  ENSG00000129933_67 (sequence is synthesized)
ggtggccctgtgcagtcacaaagcagggagtccggattggaggattcttacatgctggtgcccccagagcccctgcgtgtctgcgggggcctcccatgagagccaactcaattgtggaag

SEQ ID NO: 282395 - DNA, 120 bp, Artificial Sequence
  ENSG00000129933_68 (sequence is synthesized)
acaaaccggaggggctgctgcccttctcagaacctgaaacctggaaccctatatgaatctgcatttctgatcagcccccattgtgggtctagggctaacggccatcagtgctttttctct

SEQ ID NO: 282396 - DNA, 120 bp, Artificial Sequence
  ENSG00000129933_69 (sequence is synthesized)
gcttgaacaggtagaagcccccaaagttgtccattggccatgcccctgtgagggcatgagccagaagtgagggcagtttgtttttcagtgatacttcagagagggccatttgagatgggc

SEQ ID NO: 282397 - DNA, 120 bp, Artificial Sequence
  ENSG00000129933_70 (sequence is synthesized)
aaggccacggcgctgcaggaggtaaggctggaagcaggaggggcgggaaggcccaggagtttgttgggtctcagcagtgtcagacaagagactgaattcgccaagtgcatactggcaggc

SEQ ID NO: 282398 - DNA, 120 bp, Artificial Sequence
  ENSG00000129933_71 (sequence is synthesized)
tggcaggccagcccatcctgctgtctcgctgtcggccagcgttttacagccctgcatgggcaccactgatcagagaatctcatacaaaaaccagtggaggccgggcgcagtggctcacgc

SEQ ID NO: 282399 - DNA, 120 bp, Artificial Sequence
  ENSG00000129933_72 (sequence is synthesized)
gaagagtgacccccgcctaggaccagcatatgccttgatggcagtggacacctgggtcccacaggttgctggctgtggcctggaggaagggtccaccaggtctcagtcctgagagacagt

SEQ ID NO: 282400 - DNA, 120 bp, Artificial Sequence
  ENSG00000129933_73 (sequence is synthesized)
ctgctggagaggatcaacccggaccacagcttccctgtcaggtgagccgctccaggcaccactccacgcacggcctaggctccccgtgctctttggttggggcccctgactgccccttgc

SEQ ID NO: 282401 - DNA, 120 bp, Artificial Sequence
  ENSG00000129933_74 (sequence is synthesized)
accctgacaccccatacccctcctcacagacagtctgcagtgggggctctcagaaatagcccccagctgcccactgccgttttgtaaacctgcttctcaaaatcaccaccccatgtgata

SEQ ID NO: 282402 - DNA, 120 bp, Artificial Sequence
  ENSG00000129933_75 (sequence is synthesized)
aggcacccagagatccaccagtgcagctgggacttgaccttagggctccatctgcaccgagtgggagggcctgggcagtgacagggcaaggcgggcccccatgctcatgtcccactctca

SEQ ID NO: 282403 - DNA, 120 bp, Artificial Sequence
  ENSG00000129933_76 (sequence is synthesized)
agcctctagctgaggagcctcacctctggggccacacttctgacggcaggtgctggccccgccactctgaggaccccgagcccctcctgtccgtgccacaagaggggaccacaggaggca

SEQ ID NO: 282404 - DNA, 120 bp, Artificial Sequence
  ENSG00000129933_77 (sequence is synthesized)
gacgcttgggctggcagagggcctgtggtctgggctcctgcgtgtgggtgcatgtgtgtcaggggctcgggctctctcccacagctgtcctcctggccccctgtgtcttggcagtagctg

SEQ ID NO: 282405 - DNA, 120 bp, Artificial Sequence
  ENSG00000129933_78 (sequence is synthesized)
ccccaaggctgcccccagccgtggatctccaggcctcactggctcctccgcactcccttcgtgaatactctctgctgcatccaggatggtctgaaaactcccatctgggcagtggttgat

SEQ ID NO: 282406 - DNA, 120 bp, Artificial Sequence
  ENSG00000129933_79 (sequence is synthesized)
atcagccccaaacgcttccacctaaagtgacttggggtaggggttggcgaaggcgagacccctggcattctcccgggaatctgaagtctggtctctcaggaacctggaagggcatgattc

SEQ ID NO: 282407 - DNA, 120 bp, Artificial Sequence
  ENSG00000129933_80 (sequence is synthesized)
tccttggacacagaagtttggtaatcgtggtttttggagggtcttgtgcccccatcaataatgcctggtgtcgtacgagggaagctgagacccggagtctggagttggtcatttgaggcc

SEQ ID NO: 282408 - DNA, 120 bp, Artificial Sequence
  ENSG00000129933_81 (sequence is synthesized)
agtgagactccatctcaaaaaaaaaaacccaaaaaactaatgggccatggcccaaaagcttgcacaccaaggggatagcgcacatggtctctggggatttggggggtcctttgacagtga

SEQ ID NO: 282409 - DNA, 120 bp, Artificial Sequence
  ENSG00000129933_82 (sequence is synthesized)
atttggggggtcctttgacagtgattgttataccccaccctgccattaggaacactctacccccagtacccaccctcctgagagggcatgggggccctcagtaggctggaggtcctttac

SEQ ID NO: 282410 - DNA, 120 bp, Artificial Sequence
  ENSG00000129933_83 (sequence is synthesized)
aacccagacacctgttggacagagtggaagagacgagtaacagacaagggtccctgtccacgatgggatctgggctgccctttgccctcatggtggacgtgtctgctggggctttgtacc

SEQ ID NO: 282411 - DNA, 120 bp, Artificial Sequence
  ENSG00000129933_84 (sequence is synthesized)
ccagtttggtcagacaggacatgggctcacccaccagctatggggtctctccattgctgctcagacgccaggtcccaggttgcagtcctgtgatggcagtacactctctcccggcagatc

SEQ ID NO: 282412 - DNA, 120 bp, Artificial Sequence
  ENSG00000129933_85 (sequence is synthesized)
acagggacagataaagcaagatgtgtgtcttggcctgtaaagtttcacgtgatctgagggctccctcagcatggatgctgttaacaaacgtggtgcccgcccaccgcaacacacagacac

SEQ ID NO: 282413 - DNA, 120 bp, Artificial Sequence
  ENSG00000129933_86 (sequence is synthesized)
ccccagagatcaaggctgctgggcatgtcctgctcagccttagctcggactaggcctccgtgggccgcagccccagttctagcatgggtagggggtgctcctcaggagaccctggttgag

SEQ ID NO: 282414 - DNA, 80 bp, Artificial Sequence
  ENSG00000129946_0 (sequence is synthesized)
ccgcgccccccgagcccgaggcgcccaccaccttctgcgcgttgctgccccgaatgccgcagtggaagttcgcggccccg

SEQ ID NO: 282415 - DNA, 120 bp, Artificial Sequence
  ENSG00000129946_1 (sequence is synthesized)
gccgccgccgagtggatccggaagggcagcttcatccacaaacccgcgcacggctggctacaccccgacgccagggtcctggggcccggggtctcctacgtcgtgcggtacatgggctgc

SEQ ID NO: 282416 - DNA, 120 bp, Artificial Sequence
  ENSG00000129946_2 (sequence is synthesized)
atcgaggttctccgctctatgcgctccctggactttaacacgcgcacgcaggtgaccagggaagccatcaaccggctccatgaggccgtgcctggcgtccggggatcctggaagaaaaag

SEQ ID NO: 282417 - DNA, 120 bp, Artificial Sequence
  ENSG00000129946_3 (sequence is synthesized)
gcccccaacaaggccctggcgtccgtcctgggcaagagcaaccttcgctttgccggcatgagcatctccatccacatctccactgatggcctcagcctctccgtgcctgccacgcgccag

SEQ ID NO: 282418 - DNA, 120 bp, Artificial Sequence
  ENSG00000129946_4 (sequence is synthesized)
gtcatcgccaaccaccacatgccgtccatctccttcgcgtcaggcggagacacggacatgacggattacgtggcctacgtcgccaaggaccccatcaaccagagagcctgccacatcctg

SEQ ID NO: 282419 - DNA, 120 bp, Artificial Sequence
  ENSG00000129946_5 (sequence is synthesized)
gagtgctgtgagggcctggcacagagcatcatcagcaccgtgggccaagctttcgagctgcgcttcaagcagtacctgcacagcccgcccaaggtggcgctgcccccagaaaggctggca

SEQ ID NO: 282420 - DNA, 120 bp, Artificial Sequence
  ENSG00000129946_6 (sequence is synthesized)
gggccggaggagtcggcctggggggacgaggaggactctttggagcacaattactacaacagcatcccggggaaggagccgccgctgggcgggctagtggactccaggctggccctgaca

SEQ ID NO: 282421 - DNA, 120 bp, Artificial Sequence
  ENSG00000129946_7 (sequence is synthesized)
cagccctgcgccctcacggccctcgaccagggcccatctccttctctaagagatgcctgcagcctgccatgggacgtggggtccaccggtacagctccaccgggggacggctacgtgcag

SEQ ID NO: 282422 - DNA, 120 bp, Artificial Sequence
  ENSG00000129946_8 (sequence is synthesized)
atctgtttgacatgcgaccctttgaggatgccctgaagttgcatgagtgctcagtggcggcaggcgtgacagcagcccctcttcccttggaggaccagtggcccagcccccctacccgcc

SEQ ID NO: 282423 - DNA, 120 bp, Artificial Sequence
  ENSG00000129946_9 (sequence is synthesized)
gggcccctgtggcccccacggaggaacagctgcgtcaggagccctggtaccacggccggatgagccgccgggcggcagagaggatgcttcgagctgacggggacttccttgtgcgagaca

SEQ ID NO: 282424 - DNA, 120 bp, Artificial Sequence
  ENSG00000129946_10 (sequence is synthesized)
gcgtcaccaaccccgggcagtatgtcctcaccggcatgcacgccgggcagcccaagcacctgctgctcgtggaccccgagggcgtggtacggacgaaggacgtgctgtttgagagcatca

SEQ ID NO: 282425 - DNA, 120 bp, Artificial Sequence
  ENSG00000129946_11 (sequence is synthesized)
gccacctgatcgaccaccacctgcagaacgggcagcccatcgtggccgccgagagtgagctgcacctgcgtggcgtggtctcacgggagccctgagccaggtgaccgttctcagccctgg

SEQ ID NO: 282426 - DNA, 120 bp, Artificial Sequence
  ENSG00000129946_12 (sequence is synthesized)
ctcctgcctgttctcagccccggctcctgcctgtcatggccttggggctctcagccctcctcctggatcctggtcaggccgaaccaccgctgcctctccttcctccgcatgagcctctgg

SEQ ID NO: 282427 - DNA, 120 bp, Artificial Sequence
  ENSG00000129946_13 (sequence is synthesized)
catggtccttcctccagctggccccgggctgggcagagcctcctcctgccggggcccctgcccaccccctcctttgcctggagtgagggtgttcataccaaagacggaaccatttcgcct

SEQ ID NO: 282428 - DNA, 120 bp, Artificial Sequence
  ENSG00000129946_14 (sequence is synthesized)
ttaaagaaaatatatccagaagcagccgctgcctcggagccctggcccttgggtccccctctcgcctggctggttcggtctaacgccccggagagtcagggctcccaggaccctggggag

SEQ ID NO: 282429 - DNA, 120 bp, Artificial Sequence
  ENSG00000129946_15 (sequence is synthesized)
gaggcggattccgggcctggctgggcttcctcttcccacctgaggactgggtgcacagttgtctttgaggggggacgcttaaggtgctttggggttctcaggccaggatacatgctggcg

SEQ ID NO: 282430 - DNA, 120 bp, Artificial Sequence
  ENSG00000129946_16 (sequence is synthesized)
ctgaagtgcaggcagccttgaggtcacctgggatctcggggtagccaggctgctccaagacagtggatatcgaggcagtcgtgaggcccctactccacctgggagcaggggaaggacgtg

SEQ ID NO: 282431 - DNA, 120 bp, Artificial Sequence
  ENSG00000129946_17 (sequence is synthesized)
gttgcctggcctgggctgcgcccagcagcttccccccagtcctgccctcccagctgtcgacccagatgggatgttcggatcggtttgtaattaaacctgggaatggccacaagagcacaa

SEQ ID NO: 282432 - DNA, 120 bp, Artificial Sequence
  ENSG00000129946_18 (sequence is synthesized)
cgacgccagggtcctggggcccggggtctcctacgtcgtgcggtacatgggctgcatcgaggttctccgctctatgcgctccctggactttaacacgcgcacgcaggtgaccagctcctg

SEQ ID NO: 282433 - DNA, 120 bp, Artificial Sequence
  ENSG00000129946_19 (sequence is synthesized)
ccaccactcaggctgcagacaggatctcgacacggaccccgcgtcaggctcagggcctcctgctcgctgctccaacccccacatctgatgccgagccttccttgtgggccgaggccaggg

SEQ ID NO: 282434 - DNA, 120 bp, Artificial Sequence
  ENSG00000129946_20 (sequence is synthesized)
acacactggtccctgggaaagagggtggtagaggggccagagctgggggccgggcctctgccggatgcaaggacgcacgtggagtgggctggtgcccaagctgcacctgtcctgtggggc

SEQ ID NO: 282435 - DNA, 120 bp, Artificial Sequence
  ENSG00000129946_21 (sequence is synthesized)
aaccaatatccctcctccagacgcgcggccggctcccgcaatgggcagaaaacggcctccgtctcaccgcagaacatgtgtaaagggggggacgtgtctgtgtgctggtaacacgttttt

SEQ ID NO: 282436 - DNA, 120 bp, Artificial Sequence
  ENSG00000129946_22 (sequence is synthesized)
gccccgcggccaatgcagtaagaccagacaaggaaacgagaggcgtacgctttgggaaggaagcccacctgacaaggcaggaaaaagaaataggagttaacctctgaaagaaagagctgc

SEQ ID NO: 282437 - DNA, 120 bp, Artificial Sequence
  ENSG00000129946_23 (sequence is synthesized)
tgttaccctttgtacatgcttagtacgtgcctagaaaacccaacctggggagtccaggttgctacacatgtgagcccaccgcacgcacggggctgggcagagtgcgagtctgatacgctg

SEQ ID NO: 282438 - DNA, 120 bp, Artificial Sequence
  ENSG00000129946_24 (sequence is synthesized)
tgggcgctcggtcagcgcaggccgacgggtgcacgagggactccccggggaacccgtttctcccagctctggtcccggcaggagtagctgcttgccccctgcctgcccagcactcctgtc

SEQ ID NO: 282439 - DNA, 120 bp, Artificial Sequence
  ENSG00000129946_25 (sequence is synthesized)
gcctcactcaggagctgctcggcagccgtgggacacagggtctcttggttttgcatccagttccagcgctcggtagcgctaagagggtctcgttcaaaaatgcagctggattttgatttg

SEQ ID NO: 282440 - DNA, 120 bp, Artificial Sequence
  ENSG00000129946_26 (sequence is synthesized)
gcgattcagattttcaggcctgtgtctccaggatttcaggggtgtgtttcctggagctgcaaaccaaatgaccacacacgaagtggcttaaagcagcagaggttcattctcacagctctg

SEQ ID NO: 282441 - DNA, 120 bp, Artificial Sequence
  ENSG00000129946_27 (sequence is synthesized)
gaggccagaagtccgaactcaaggtgtggccggggctggttccttccggaggctctgagggagcctcggtcccaggcccctcccggcgcccgctggtggccgggctcccgggtgctgcca

SEQ ID NO: 282442 - DNA, 120 bp, Artificial Sequence
  ENSG00000129946_28 (sequence is synthesized)
gcctcgtggacacacggctccaatctctgctctctcctgcccatctgcatgttttccttttcctgtcaggaaagcagctagtggacttagggcccccctggctcatcctggatgcattcg

SEQ ID NO: 282443 - DNA, 120 bp, Artificial Sequence
  ENSG00000129946_29 (sequence is synthesized)
tcccaggacccttgacctgtttatctaccaagacctttttccaaatgaggtcacgttcacaggctctgagggctgggacctggccgcatcttcccgcggtcacctttcagctcccgacag

SEQ ID NO: 282444 - DNA, 120 bp, Artificial Sequence
  ENSG00000129946_30 (sequence is synthesized)
gaagcgtggccccagaaccctgggggtttcagagcccgtgcccatgggtggttctggaattctgaggccgatcctttggctggtgtcccggaattccctggtccggcccctcgtccatgc

SEQ ID NO: 282445 - DNA, 120 bp, Artificial Sequence
  ENSG00000129946_31 (sequence is synthesized)
aggcaccctaggggctccccggcaggaccccagaacgccaatatcctactccacgggtccaggcgggctcccgggagctgatgccgaggtctctgtcccgcaggtacggacgaaggacgt

SEQ ID NO: 282446 - DNA, 120 bp, Artificial Sequence
  ENSG00000129951_0 (sequence is synthesized)
gaggagacgcgctttgtgctgggcgccggccgcgccagccacggcctgcggcgcccgcggcaccatgatctccaccaaggagaagaacaagatcccgaaggacagcatgacgcttctgcc

SEQ ID NO: 282447 - DNA, 120 bp, Artificial Sequence
  ENSG00000129951_1 (sequence is synthesized)
ctgcttctacttcgtggagctgcccatagtggcttcttccatcgtatccttgtacttcctggagctgaccgacctcttcaagccggccaaggtgggcttccagtgctatgaccgcactct

SEQ ID NO: 282448 - DNA, 120 bp, Artificial Sequence
  ENSG00000129951_2 (sequence is synthesized)
ctccatgccctacgtggagaccaacgaggagctcatcccgctgctgatgctgctcagcttggccttcgcggcccctgccgcctcgatcatggtggccgagggcatgttgtactgtctgca

SEQ ID NO: 282449 - DNA, 120 bp, Artificial Sequence
  ENSG00000129951_3 (sequence is synthesized)
gtcccggctgtggggccgtgccggggggcccgccggggcggagggcagcatcaacgccggcggctgcaacttcaactccttcctgcggcgtacggtgcggtttgtgggtgtccacgtgtt

SEQ ID NO: 282450 - DNA, 120 bp, Artificial Sequence
  ENSG00000129951_4 (sequence is synthesized)
cggcctgtgtgccacagccctggtgacggacgtgatccagctggccacgggttaccacactcccttcttcctcaccgtctgcaagcccaactacactctcctgggcacgtcctgcgaggt

SEQ ID NO: 282451 - DNA, 120 bp, Artificial Sequence
  ENSG00000129951_5 (sequence is synthesized)
caacccctacatcacgcaggacatctgctccggccacgacatccacgccatcctgtctgcacggaagaccttcccgtcccagcacgccacgctgtcagccttcgccgcggtctatgtgtc

SEQ ID NO: 282452 - DNA, 120 bp, Artificial Sequence
  ENSG00000129951_6 (sequence is synthesized)
ggtgagtccggcccctcactgcccttcccaggccctcttgctgacccgtggggagccctccctgaccccaacccccatgccccagatgtacttcaactcggtcatctcggacaccaccaa

SEQ ID NO: 282453 - DNA, 120 bp, Artificial Sequence
  ENSG00000129951_7 (sequence is synthesized)
gctgctgaagcccatcctggtcttcgcctttgccatcgccgcgggcgtatgcgggctcacgcagatcacgcagtaccgcagccaccctgtggacgtgtatgccggcttcctcatcggggc

SEQ ID NO: 282454 - DNA, 120 bp, Artificial Sequence
  ENSG00000129951_8 (sequence is synthesized)
atcgctgcctacctggcctgccacgcggtgggcaacttccaggccccacctgcagagaagcccgcggccccggcccccgccaaggacgcgctgcgggccctgacgcagcggggccacgac

SEQ ID NO: 282455 - DNA, 120 bp, Artificial Sequence
  ENSG00000129951_9 (sequence is synthesized)
gcagcctgaagcgcgccagcgtggacgtggacctgctggccccgcgcagccccatggccaaggagaacatggtgaccttcagccacacgctgcccagggccagcgcgccctcgctggacg

SEQ ID NO: 282456 - DNA, 120 bp, Artificial Sequence
  ENSG00000129951_10 (sequence is synthesized)
accccgcgcgccgccacatgaccatccacgtgccgctggacgcctcgcgctccaagcagctcatcagcgagtggaagcagaagagcctggagggccgcggcctggggctgcccgacgacg

SEQ ID NO: 282457 - DNA, 120 bp, Artificial Sequence
  ENSG00000129951_11 (sequence is synthesized)
gcggcctggggctgcccgacgacgccagccccgggcacctgcgcgcgcccgccgaacccatggcggaggaggaggaagaggaggaggacgaagaggaagaggaggaggaggaagaggagg

SEQ ID NO: 282458 - DNA, 80 bp, Artificial Sequence
  ENSG00000129951_12 (sequence is synthesized)
ggcctcgggtcatcctcccaccgcgcgcggggccgccgccgctggtgcacatcccggaggagggcgcgcagacgggggcc

SEQ ID NO: 282459 - DNA, 120 bp, Artificial Sequence
  ENSG00000129951_13 (sequence is synthesized)
tgtcccccaaaagcggcgccggggtgcgcgccaagtggctcatgatggccgagaagagcggggcggcagtggccaaccctccgcggctgctgcaggtcatcgccatgtccaaggctccgg

SEQ ID NO: 282460 - DNA, 120 bp, Artificial Sequence
  ENSG00000129951_14 (sequence is synthesized)
gcgcgccgggccccaaggcggccgagacggcgtcgtcgtccagcgccagctccgactcctcgcagtaccggtcgccgtcggaccgcgactccgccagcatcgtgaccatcgacgcgcacg

SEQ ID NO: 282461 - DNA, 80 bp, Artificial Sequence
  ENSG00000129951_15 (sequence is synthesized)
gccctgggagtggaaggcggcgggcggcggggccaaggcggaggccgacggcggctacgagctgggggacctggcgcgcg

SEQ ID NO: 282462 - DNA, 120 bp, Artificial Sequence
  ENSG00000129951_16 (sequence is synthesized)
cgcggcttccgcggcggggccaagcccccgggcgtgtcccccggctcgtcggtcagcgacgtggaccaggaggagccgcggttcggggccgtggccaccgtcaacctggccacgggcgag

SEQ ID NO: 282463 - DNA, 120 bp, Artificial Sequence
  ENSG00000129951_17 (sequence is synthesized)
cagccgggagtccacgctgcggcgccacgcgggcggcctggggctggcggagcgcgaggcggaggcggaggccgagggctacttccgcaagatgcaggcgcgccgcttccccgactagcg

SEQ ID NO: 282464 - DNA, 120 bp, Artificial Sequence
  ENSG00000129951_18 (sequence is synthesized)
ggctacttccgcaagatgcaggcgcgccgcttccccgactagcgcggcggggccgggggcgggcggggggcgggccgagggcgcgggcggccgcgcggatgctcaataaagcggcagaaa

SEQ ID NO: 282465 - DNA, 120 bp, Artificial Sequence
  ENSG00000129951_19 (sequence is synthesized)
acggaggagacgcgctttgtgctgggcgccggccgcgccaggtgaggggctgtggggctgggggcgcggacccagtctcctccgccgcccggaaccccagttctcccggatgccccccac

SEQ ID NO: 282466 - DNA, 120 bp, Artificial Sequence
  ENSG00000129951_20 (sequence is synthesized)
ccagttctcccggatgccccccaccaccacgcggggactggctcccgcccggagaccccccgccctcctcggcgatcccggccccgaccccccgatcccgggtgtaggggcgcccggaag

SEQ ID NO: 282467 - DNA, 80 bp, Artificial Sequence
  ENSG00000129951_21 (sequence is synthesized)
gaggccacgcggacgccgctctctgcagcctcagtttccccgaccgcccctcccccgccggcgccggccaccgtgtctcc

SEQ ID NO: 282468 - DNA, 120 bp, Artificial Sequence
  ENSG00000129968_0 (sequence is synthesized)
gacccccgccccgcgcgctcctcgcgtcacttccggggcggtggtgagaacgaggctcacttccgtccgtggggggagctgcggcggtggcggtgcaggaggccgggcaggggtgcggag

SEQ ID NO: 282469 - DNA, 120 bp, Artificial Sequence
  ENSG00000129968_1 (sequence is synthesized)
gggagccatggagcgcggccctggggcccgggggcgcgggccggggtgggcttcccacggcacgacatggagacctgtggttgcgaggctccctggggctcggcttggaccgcgatgggg

SEQ ID NO: 282470 - DNA, 120 bp, Artificial Sequence
  ENSG00000129968_2 (sequence is synthesized)
ctggggctcggcttggaccgcgatggggctgggccctggcctcctaacggggctgctgtctggggcggtagctgggggggcgctctcccccctgcccgcgactcggagcacccccacccc

SEQ ID NO: 282471 - DNA, 120 bp, Artificial Sequence
  ENSG00000129968_3 (sequence is synthesized)
tcccctgccgggccaggccgggcggcgttgttggcgggggccccggtggaggcccggcctgggcggcgcccgccatgaatgggctgtcgctgagtgagctctgctgcctcttctgctgcc

SEQ ID NO: 282472 - DNA, 120 bp, Artificial Sequence
  ENSG00000129968_4 (sequence is synthesized)
gccgcatcgctgccaagctcgccttcctgccgccggaggccacctactccctggtgcctgagcccgagccggggcctggtggggccggggccgcccccttggggaccctgagagcctcct

SEQ ID NO: 282473 - DNA, 120 bp, Artificial Sequence
  ENSG00000129968_5 (sequence is synthesized)
tgagagcctcctcgggcgcacccgggcgctggaagctgcacctgacggagcgtgccgacttccagtacagccagcgcgagctggacaccatcgaggtcttccccaccaagagcgcccgcg

SEQ ID NO: 282474 - DNA, 120 bp, Artificial Sequence
  ENSG00000129968_6 (sequence is synthesized)
gcaaccgcgtctcctgcatgtatgttcgctgcgtgcctggtgccaggtacacggtcctcttctcgcacggcaatgccgtggacctgggccagatgagcagcttctacattggcctgggct

SEQ ID NO: 282475 - DNA, 120 bp, Artificial Sequence
  ENSG00000129968_7 (sequence is synthesized)
tccgagaggaacctctatgccgacatcgacgccgcctggcaggccctgcgcaccaggtacggcatcagcccggacagcatcatcctgtacgggcagagcatcggcacggtgcccaccgtg

SEQ ID NO: 282476 - DNA, 120 bp, Artificial Sequence
  ENSG00000129968_8 (sequence is synthesized)
cgctacgagtgtgccgcggtggtgctgcactcgccgctcacctcgggcatgcgcgtcgccttccccgacaccaagaagacctactgcttcgacgccttccctaacatcgagaaggtgtcc

SEQ ID NO: 282477 - DNA, 120 bp, Artificial Sequence
  ENSG00000129968_9 (sequence is synthesized)
aagatcacgtctcccgtgctcatcatccacggcacggaggacgaggtgatcgacttctcgcacgggctggcgctctacgagcgctgccccaaggcggtggagccgctgtgggtggagggc

SEQ ID NO: 282478 - DNA, 120 bp, Artificial Sequence
  ENSG00000129968_10 (sequence is synthesized)
gccgggcacaacgacatcgagctctacagccagtacctggagcgcctgcgtcgcttcatctcccaggagctgcccagccagcgcgcctagcggcggccccaaccggccggacctcagcaa

SEQ ID NO: 282479 - DNA, 120 bp, Artificial Sequence
  ENSG00000129968_11 (sequence is synthesized)
ctcagcaataaggcggcccccggacctcaccccgcgccggcccccacccaggggctgcatgtggaccccccgggcggcccaggggaccccgccccgacccaggggctgtggacgatgtac

SEQ ID NO: 282480 - DNA, 120 bp, Artificial Sequence
  ENSG00000129968_12 (sequence is synthesized)
gagctacgcactcctttccttttggaagcaagaagaaaatacgtgaaaacggaaattaaagatttaaaattttagggctgctctccttcctttcatggctctgctcactctctcgagcgc

SEQ ID NO: 282481 - DNA, 120 bp, Artificial Sequence
  ENSG00000129968_13 (sequence is synthesized)
tcagcgagctcgaaagggggccggggttcccaggtttcgtccctgagtccctaggagagatcggcacggacccccttataggttttactctgcggaagtggggtgggtctctgtctagtc

SEQ ID NO: 282482 - DNA, 120 bp, Artificial Sequence
  ENSG00000129968_14 (sequence is synthesized)
gtcgtgaaagattgtttggctgctgggggagaatgtcctggagcaggtgatcagcaaggagggaggctgttgctgtggctctggtgaaaggtgatggaggcagggaccgggcggtggctg

SEQ ID NO: 282483 - DNA, 120 bp, Artificial Sequence
  ENSG00000129968_15 (sequence is synthesized)
atgggagacaggcagagccaccgggctggtgatggaccggctcagatccagtgggtggaaggaggtgtcaaggataacatctttgtttctggcctggatagtggggccctggccacctcg

SEQ ID NO: 282484 - DNA, 120 bp, Artificial Sequence
  ENSG00000129968_16 (sequence is synthesized)
gtgtgccccttcgtctccggggtctccaggggcctgctgctgtccactgggctctcaggacccagctgcatgatgccacctaaactgcagggccctccaagtccccagcaccagcggggc

SEQ ID NO: 282485 - DNA, 120 bp, Artificial Sequence
  ENSG00000129968_17 (sequence is synthesized)
agcaccggtagggcctggacctctttgagaatatgttgaaaagctgacatcaacctcgacgctgtggatgttgggcctgatcattctttggggtgggtctgtcctgggcactgcagggtg

SEQ ID NO: 282486 - DNA, 120 bp, Artificial Sequence
  ENSG00000129968_18 (sequence is synthesized)
ctaagcagcctccacccagtccccagtggtgacacccaaaactgtgtccagacattgacaggtgtctccaggagggagactcgcctccatctgagaagcagaaccagcctgacagtccac

SEQ ID NO: 282487 - DNA, 120 bp, Artificial Sequence
  ENSG00000129968_19 (sequence is synthesized)
ctcccggctgaaaagtgcttgcatgtgcgatttgccttccgcctgggagtctgggggcactgggatgccatccttgccccaccctggctttcagagctctctcctctcctcctcgtgtgc

SEQ ID NO: 282488 - DNA, 120 bp, Artificial Sequence
  ENSG00000129968_20 (sequence is synthesized)
ccatgagtccggctcacaggaacgtgggtctcacatcaggtcctgagggagcaggtgtgtttctgggcctgaggctgctccttggtagtgagggtgtccccacgagccgtgtctgtggcg

SEQ ID NO: 282489 - DNA, 120 bp, Artificial Sequence
  ENSG00000129968_21 (sequence is synthesized)
cctgcagctgcctgcatgtccatctgtgtccacatctgcctttgagcctcatcttcctggccccacggttttctcatgctgtgacccaaaagccaagcattccagggtgttctgctgaaa

SEQ ID NO: 282490 - DNA, 120 bp, Artificial Sequence
  ENSG00000129968_22 (sequence is synthesized)
ttgagttgtgagcgtgtctctctcctcgctccagtctgaaggagaagcgtggtcggtagatagacgtctcagaccttcgtgttttcttcacgtctgtctgttggcaggtccttacactat

SEQ ID NO: 282491 - DNA, 120 bp, Artificial Sequence
  ENSG00000129968_23 (sequence is synthesized)
tgtggttgctttagcaacttagctgttgtcgacttaatgtgtttcatgacgttctgcagcaaggaagaaggtccgagtttccactctcaatcaggcaccttcgttcccctcccccctcac

SEQ ID NO: 282492 - DNA, 120 bp, Artificial Sequence
  ENSG00000129968_24 (sequence is synthesized)
ttgacttcctgtggggtgtgtggtgtctgcacttatagatgagaatgctgaggcctcaggagggcaagggactcgcccacggtcacggaaccctaagtcaggggtggagaaggaccccct

SEQ ID NO: 282493 - DNA, 120 bp, Artificial Sequence
  ENSG00000129968_25 (sequence is synthesized)
gacgccagcccacctcccctgcccctcagcaggcctggctccagcacagagaagagccattgttgctgctctgggggccctaggagcctgggatgtatcctgcctttgtttctagagcct

SEQ ID NO: 282494 - DNA, 120 bp, Artificial Sequence
  ENSG00000129968_26 (sequence is synthesized)
ttgtttgttgtatttcctctgtctccagacatcgcaggccggtgggacccggcgcctgtgcacgctcacgtagcggggcctgttcgggtccctcgtgggtcccttcagttcgagctctgt

SEQ ID NO: 282495 - DNA, 120 bp, Artificial Sequence
  ENSG00000129968_27 (sequence is synthesized)
ccttgcctcagcggcccgtcacccatagggtggcagagatgggccgggggagggagtgggcagcagtgcggaccgagtcctggcgcatggggtttccctggtgctggagccgggcgtttc

SEQ ID NO: 282496 - DNA, 120 bp, Artificial Sequence
  ENSG00000129968_28 (sequence is synthesized)
gggggtgtgggcggggctggggtcatatcccctgcatgccccgcatgccatggctgtactcacatggcaagaggtggtgatcgccagctcagggaaggtgggggttccttcatcctgtgg

SEQ ID NO: 282497 - DNA, 120 bp, Artificial Sequence
  ENSG00000129968_29 (sequence is synthesized)
agagggggctgaattggggtcccctgagctgtagggtgcagtgcctgacaggccgtggggagggccgaggggatggggactgacaggccccgggcccatgccgccccctggcacgggtgg

SEQ ID NO: 282498 - DNA, 120 bp, Artificial Sequence
  ENSG00000129968_30 (sequence is synthesized)
atgccccgcctcccgggggtgcccagctggactgtggcacccccaaaggaccccacatgtcactgttcccccgcagggcttcccacggcacgacatggagacctgtggttgcgaggctcc

SEQ ID NO: 282499 - DNA, 120 bp, Artificial Sequence
  ENSG00000129968_31 (sequence is synthesized)
ctatgccgacatcgacgccgcctggcaggccctgcgcaccaggtgagggcgaccctgggggcagctcagcctgggcacacccaagaggggaccaggcggggggccggggggcgggcttcc

SEQ ID NO: 282500 - DNA, 120 bp, Artificial Sequence
  ENSG00000129968_32 (sequence is synthesized)
aaggtgggcggccctgcaggaggggagccacagtggatgcacagggccagagagccggacaggcgagcttgggtgtgcaggtgccgcctccacatggctgaggtgtggccaggcggtcct

SEQ ID NO: 282501 - DNA, 120 bp, Artificial Sequence
  ENSG00000129968_33 (sequence is synthesized)
cccacaccctggcctgtggagccaggttccctgggaacccctggcctgaggatgggaaggggctgagcttgtcacaggggtgtggatgccacccggcgggagggagtgggtggtggtctg

SEQ ID NO: 282502 - DNA, 120 bp, Artificial Sequence
  ENSG00000129968_34 (sequence is synthesized)
ggggtctgtgcacgtgtggctgggagcccatcggccgaggcagcacttggggccaagtgaggcgaggctgctgcatccaggtccggaggactggcccatgaggccctgtggctgcggagc

SEQ ID NO: 282503 - DNA, 120 bp, Artificial Sequence
  ENSG00000129968_35 (sequence is synthesized)
ttggccatcctggggcagggcctacagggtaaggtgcagacccgcagcacacatccgaggtctgggccagcctcgattccagatccagccctcctagtcatccacgtccccagccctgcg

SEQ ID NO: 282504 - DNA, 120 bp, Artificial Sequence
  ENSG00000129968_36 (sequence is synthesized)
cttgcctgggcccttcaccggtgtttgagcaccgcccgggccagtgctgctttggacgaggagacccgggtgggcctctggtggcttttcctgctcaccatccactgggcctgtctcgtc

SEQ ID NO: 282505 - DNA, 120 bp, Artificial Sequence
  ENSG00000129968_37 (sequence is synthesized)
ctggccctgcccagcccactggtctgacctgctcccacagggaccaggcacagctctgagaagtcagaggccctagggaggtggggtcgtcgttgccttggtgatatgcaggcagtccct

SEQ ID NO: 282506 - DNA, 120 bp, Artificial Sequence
  ENSG00000129968_38 (sequence is synthesized)
gcagtgggcctgggagctggtcccctggcaccaccctggctctgggggcctcccagcagtgtgggacgctgacaccaatcaccacttcatgcgacttcctcggcccctcctgtctctact

SEQ ID NO: 282507 - DNA, 120 bp, Artificial Sequence
  ENSG00000129968_39 (sequence is synthesized)
gcctgggccactggcagagtcacacctgccatggccagctctgagctctgtctgctcggccatctgtcctgctgccactttgtcctgcaggaacctaggcccagagctgtgagggggagg

SEQ ID NO: 282508 - DNA, 120 bp, Artificial Sequence
  ENSG00000129968_40 (sequence is synthesized)
ccagagcgtgcccagggcctccaccggggatgtgtcctgttcgtttgagtggtgacatccaggtggcagctcggggctcctgcctgtagcaggtggcagggctgggctggctcagcacac

SEQ ID NO: 282509 - DNA, 120 bp, Artificial Sequence
  ENSG00000129968_41 (sequence is synthesized)
tactgaccatggctgccagggagcaggccagggaggccgaggcagagctggagccacaggcaccagccaggcagcatcctttggggcatgggtacggcatcagcccggacagcatcatcc

SEQ ID NO: 282510 - DNA, 120 bp, Artificial Sequence
  ENSG00000129968_42 (sequence is synthesized)
cctacgactactccggctacggtgccagctcgggcaggccttccgagaggaacctctatgccgacatcgacgccgcctggcaggccctgcgcaccaggaacctaggcccagagctgtgag

SEQ ID NO: 282511 - DNA, 120 bp, Artificial Sequence
  ENSG00000129968_43 (sequence is synthesized)
gccagggacggggacagccctgctggtggagatgccaggcagaggggacgcacacctgcccatgctcctgccttgcaagagggcgtctgcctgggatcagagcctagagcgtgtgggagg

SEQ ID NO: 282512 - DNA, 120 bp, Artificial Sequence
  ENSG00000129968_44 (sequence is synthesized)
agagttgtggggtcccggcatgggcagggtggcaggtgggtcccgtgtgcttgggactgggcacgaggaggccttgtaactggtgctggatcagctgggtcaggggccgcacaccaatga

SEQ ID NO: 282513 - DNA, 120 bp, Artificial Sequence
  ENSG00000129968_45 (sequence is synthesized)
cctgggggtgagggtgcccctgggtgggagctggtggtgctgaggtggccgaggacttgtccactcccaagggaaggtgctggtgggagggggtgccacctccgcagccaccaccctcga

SEQ ID NO: 282514 - DNA, 120 bp, Artificial Sequence
  ENSG00000129968_46 (sequence is synthesized)
tccgcagccaccaccctcgatgctgacctgggttgcactggcatctcattgggcgtggggactccgagagtccaaaattgggtggagacatttggggacacagctgcctgaattcctcat

SEQ ID NO: 282515 - DNA, 120 bp, Artificial Sequence
  ENSG00000129968_47 (sequence is synthesized)
gctgcagggaggaatagtgtccgctgtcctggccagtgcaccaggaacggttttctaaccctggcaggaaggtgtgaagcattcaggatgtgggggccacacagttcccagtgtgcacct

SEQ ID NO: 282516 - DNA, 120 bp, Artificial Sequence
  ENSG00000129968_48 (sequence is synthesized)
aggggtgaccaggaggaggagaggcgccagggcctcccttacccccgccccaggggcactccgtaggcaggatccctgcagatcctagctaggaaacgccagtgaacggcagcgcaggga

SEQ ID NO: 282517 - DNA, 120 bp, Artificial Sequence
  ENSG00000129968_49 (sequence is synthesized)
acggggcggggccgctggcttcgcccaccgccacggtgttgggggctgggggtggccctcgggactggtgtggagcctgagcctgacccactgacttggctgagtggggagactggaggg

SEQ ID NO: 282518 - DNA, 120 bp, Artificial Sequence
  ENSG00000129968_50 (sequence is synthesized)
tcgcatccggagctgggcccggggacgcccgctggtgggaagggtgcgcgcgcgtcggaggccgcggctgaccctgctccggcgccgccaggtacggcatcagcccggacagcatcatcc

SEQ ID NO: 282519 - DNA, 120 bp, Artificial Sequence
  ENSG00000129988_0 (sequence is synthesized)
gggacagtcctggcccactgcactgggaatctaggatgggggccttggccagagccctgccgtccatactgctggcattgctgcttacgtccaccccagaggctctgggtgccaaccccg

SEQ ID NO: 282520 - DNA, 120 bp, Artificial Sequence
  ENSG00000129988_1 (sequence is synthesized)
gcttggtcgccaggatcaccgacaagggactgcagtatgcggcccaggaggggctattagctctgcagagtgagctgctcaggatcacgctgcctgacttcaccggggacttgaggatcc

SEQ ID NO: 282521 - DNA, 120 bp, Artificial Sequence
  ENSG00000129988_2 (sequence is synthesized)
cccacgtcggccgtgggcgctatgagttccacagcctgaacatccacagctgtgagctgcttcactctgcgctgaggcctgtccctggccagggcctgagtctcagcatctccgactcct

SEQ ID NO: 282522 - DNA, 120 bp, Artificial Sequence
  ENSG00000129988_3 (sequence is synthesized)
ccatccgggtccagggcaggtggaaggtgcgcaagtcattcttcaaactacagggctcctttgatgtcagtgtcaagggcatcagcatttcggtcaacctcctgttgggcagcgagtcct

SEQ ID NO: 282523 - DNA, 120 bp, Artificial Sequence
  ENSG00000129988_4 (sequence is synthesized)
ccgggaggcccacagttactgcctccagctgcagcagtgacatcgctgacgtggaggtggacatgtcgggagacttggggtggctgttgaacctcttccacaaccagattgagtccaagt

SEQ ID NO: 282524 - DNA, 120 bp, Artificial Sequence
  ENSG00000129988_5 (sequence is synthesized)
tccagaaagtactggagagcaggatttgcgaaatgatccagaaatcagtgtcctccgatctacagccttatctccaaactctgccagttacaacagagattgacagtttcgccgacattg

SEQ ID NO: 282525 - DNA, 120 bp, Artificial Sequence
  ENSG00000129988_6 (sequence is synthesized)
attatagcttagtggaagcccctcgggcaacagcccagatgctggaggtgatgtttaagggtgaaatctttcatcgtaaccaccgttctccagttaccctccttgctgcagtcatgagcc

SEQ ID NO: 282526 - DNA, 120 bp, Artificial Sequence
  ENSG00000129988_7 (sequence is synthesized)
ctactttgccatctcggattatgtcttcaacacggccagcctggtttatcatgaggaaggatatctgaacttctccatcacagatgacatgataccgcctgactctaatatccgactgac

SEQ ID NO: 282527 - DNA, 120 bp, Artificial Sequence
  ENSG00000129988_8 (sequence is synthesized)
caccaagtccttccgacccttcgtcccacggttagccaggctctaccccaacatgaacctggaactccagggatcagtgccctctgctccgctcctgaacttcagccctgggaatctgtc

SEQ ID NO: 282528 - DNA, 120 bp, Artificial Sequence
  ENSG00000129988_9 (sequence is synthesized)
tgtggacccctatatggagatagatgcctttgtgctcctgcccagctccagcaaggagcctgtcttccggctcagtgtggccactaatgtgtccgccaccttgaccttcaataccagcaa

SEQ ID NO: 282529 - DNA, 120 bp, Artificial Sequence
  ENSG00000129988_10 (sequence is synthesized)
gatcactgggttcctgaagccaggaaaggtaaaagtggaactgaaagaatccaaagttggactattcaatgcagagctgttggaagcgctcctcaactattacatccttaacaccttcta

SEQ ID NO: 282530 - DNA, 120 bp, Artificial Sequence
  ENSG00000129988_11 (sequence is synthesized)
ccccaagttcaatgataagttggccgaaggcttcccccttcctctgctgaagcgtgttcagctctacgaccttgggctgcagatccataaggacttcctgttcttgggtgccaatgtcca

SEQ ID NO: 282531 - DNA, 120 bp, Artificial Sequence
  ENSG00000129988_12 (sequence is synthesized)
atacatgagagtttgaggacaagaaagatgaagcttggaggtcacagctggatctgcttgttgcatttccagctgtgcagcacgtctcagagattcttgaagaatgaagacatttctgct

SEQ ID NO: 282532 - DNA, 120 bp, Artificial Sequence
  ENSG00000129988_13 (sequence is synthesized)
ctcagctccgggggtgaggtgtgcctggcctctgcctccaccctcctcctcttcaccaggtgcatgcatgccctctctgagtctggactttgcttcccctccaggagggaccaccctccc

SEQ ID NO: 282533 - DNA, 120 bp, Artificial Sequence
  ENSG00000129988_14 (sequence is synthesized)
cgactggcctgggatatctttacaagcaggcactgtatttttttattcgccatctgatccccatgcctagcagagtgctggcacttagtaggtcctcaataaatatttattaaatgatga

SEQ ID NO: 282534 - DNA, 120 bp, Artificial Sequence
  ENSG00000129990_0 (sequence is synthesized)
acacgggcacacacgcgcgcacgggatcctgctccgctccgcggctcccccgccccggagagctccgcgatcagcacccgggacagcgccaccgcccacgtgcagggggtggggtccggg

SEQ ID NO: 282535 - DNA, 120 bp, Artificial Sequence
  ENSG00000129990_1 (sequence is synthesized)
cggggctggcgcctcggcgtctcccgggagtgtcccgtccagccgccgagcagggtgcttgagtgtctctgcagaaaagactccaggaccccgccaccatgttcccggagcccccaaccc

SEQ ID NO: 282536 - DNA, 120 bp, Artificial Sequence
  ENSG00000129990_2 (sequence is synthesized)
cggggcctccatcgcccgacacgcctcccgactccagtcgcatcagccacggcccagtgcccccctgggccctggccaccatcgtgctggtctcaggcctcctcatcttcagctgctgtt

SEQ ID NO: 282537 - DNA, 120 bp, Artificial Sequence
  ENSG00000129990_3 (sequence is synthesized)
tctgtctctaccggaagagctgtcggaggcggacaggcaagaagagccaggcccaagcccaggtccaccttcaggaagtgaaggggctgggccagagttacatagacaaggtgcagccag

SEQ ID NO: 282538 - DNA, 120 bp, Artificial Sequence
  ENSG00000129990_4 (sequence is synthesized)
aagtagaggagctggagccagcaccatccgggccagggcagcaggtggcagacaagcatgagctaggacgactgcagtactccctggattatgacttccagagtggccagctgctggtgg

SEQ ID NO: 282539 - DNA, 120 bp, Artificial Sequence
  ENSG00000129990_5 (sequence is synthesized)
gcattctgcaagcaatgggattggcagccttggatcttggtggctcctcggacccctatgtgcgggtctacctgctgccggacaaacggaggcggtacgagaccaaggtgcatcggcaga

SEQ ID NO: 282540 - DNA, 120 bp, Artificial Sequence
  ENSG00000129990_6 (sequence is synthesized)
cgctgaaccctcactttggggagaccttcgccttcaaggtcccctacgtggagctggggggcagggtgctggtcatggcggtgtacgacttcgaccgcttctctcgcaatgacgccatcg

SEQ ID NO: 282541 - DNA, 120 bp, Artificial Sequence
  ENSG00000129990_7 (sequence is synthesized)
gggaggtgcgggtccctatgagctccgtggacctggggcggccagtgcaggcctggcgggagctgcaggcggctccgcgggaggagcaggagaagcttggggacatctgcttctccctcc

SEQ ID NO: 282542 - DNA, 120 bp, Artificial Sequence
  ENSG00000129990_8 (sequence is synthesized)
gctatgtccccacggccgggaagctcaccgtcatcgtcctggaggctaaaaacctgaagaagatggacgtaggaggactgtcagatccatacgtcaaggtccacctgctgcagggcggca

SEQ ID NO: 282543 - DNA, 120 bp, Artificial Sequence
  ENSG00000129990_9 (sequence is synthesized)
aaaaggtgcggaagaagaaaaccaccatcaagaagaacactctgaacccctattacaacgaagctttcagcttcgaggtgccctgtgaccaagtccagaaggtgcaggtggagctgaccg

SEQ ID NO: 282544 - DNA, 120 bp, Artificial Sequence
  ENSG00000129990_10 (sequence is synthesized)
tgctggactacgacaagctgggcaagaacgaggccatcgggagggtggccgtgggggcggccgccggcggggctggcctgcggcactgggcggacatgctggccaacccgcggcggccca

SEQ ID NO: 282545 - DNA, 120 bp, Artificial Sequence
  ENSG00000129990_11 (sequence is synthesized)
ttgcccagtggcactcgctgcggcccccggaccgagtgaggctgctgcctgcgccctgactcccaccccaagcccccggccaagcctggactctagcccctgaccccagactcccgagac

SEQ ID NO: 282546 - DNA, 120 bp, Artificial Sequence
  ENSG00000129990_12 (sequence is synthesized)
cggccaaagccaagccagccccacccttaagcttcctctgacggttaccctccccccaccttccaccccaaccatctgaaccattcctgtcttctcacccccaacgatgccaatcacgac

SEQ ID NO: 282547 - DNA, 120 bp, Artificial Sequence
  ENSG00000129990_13 (sequence is synthesized)
aactttccagcacactcccccgaccctcgcggacacacccagatgccccagggaccccgggaagggaaggcagcctggtttctcctgcccccgggtcctgccccctgctttgacaatcag

SEQ ID NO: 282548 - DNA, 120 bp, Artificial Sequence
  ENSG00000129990_14 (sequence is synthesized)
ccatcctcgtctgctctcctctctcttccaacacagcccatccctgcactgctcctggggccaaataaatattcagcagctccggtggcctgggcccatgctccttgatgggggtgggca

SEQ ID NO: 282549 - DNA, 120 bp, Artificial Sequence
  ENSG00000129990_15 (sequence is synthesized)
tcgtcctgaaagcctctgagagactggcctgaccccatggactccctcacactctcacccgttcattcctcactcaccactctgagcctgggtttcctcctctggagaatgttgggataa

SEQ ID NO: 282550 - DNA, 120 bp, Artificial Sequence
  ENSG00000129990_16 (sequence is synthesized)
taataattcctgccacacgctggctgtgaggagtccgcgagaactcccttgcttgtccatgaatttatccactcgcttgctcacccatgactcacatcgattttcatacccatttctgca

SEQ ID NO: 282551 - DNA, 120 bp, Artificial Sequence
  ENSG00000129990_17 (sequence is synthesized)
tccctccctccctctcttttttttcttccttccattccatattccctgaggtcttctgttgagtgctggggccccagaatatccaaacacagacctgaccccccaagcgacttactgcca

SEQ ID NO: 282552 - DNA, 120 bp, Artificial Sequence
  ENSG00000129990_18 (sequence is synthesized)
tcaaaacaaaggagaggcgcggagccagggaatacaatctccagagcctgcgagagaggttggagttcagcaaggaaagccaatgatttcaacttcacctctttcttttttcttttcttt

SEQ ID NO: 282553 - DNA, 88 bp, Artificial Sequence
  ENSG00000129990_19 (sequence is synthesized)
caggcgtgagccaccgcgcccggcccttcttcttttcttttcttttctatttcttttcttctcttcttcttttttttaaaatggaggg

SEQ ID NO: 282554 - DNA, 81 bp, Artificial Sequence
  ENSG00000129990_20 (sequence is synthesized)
ctttcttctttttttgacagggtttctctgtgtaccctggctggagtgcggtggggcaatcatagctcactgcagcctcaa

SEQ ID NO: 282555 - DNA, 76 bp, Artificial Sequence
  ENSG00000129990_21 (sequence is synthesized)
gctcaggggatcaaccatgcctagctaattttttcttttcttttcttttcttttttagagatggggtcttgctatg

SEQ ID NO: 282556 - DNA, 120 bp, Artificial Sequence
  ENSG00000129990_22 (sequence is synthesized)
ttttagagatggggtcttgctatgttgcacaggctggtttcaaactcctgcaatcctcctgtgtgagtagctgggactgtagacatgagccgccgcatctgacctcattgttctttcaac

SEQ ID NO: 282557 - DNA, 120 bp, Artificial Sequence
  ENSG00000129990_23 (sequence is synthesized)
ctttcaacgaatgctgcctcctactctgtttctagcaaagatgatagttccattggcttctaccttatctcatcccatacagaattttgggtggtgaacaaagacctataagatttggcc

SEQ ID NO: 282558 - DNA, 120 bp, Artificial Sequence
  ENSG00000129990_24 (sequence is synthesized)
agagaactctctgagcagcagattaagtggagaatgaggcaaaaattacccccacgtaccaaaaaaggaggcagcaaacaaacttacttgctcctaagcttcctggtagccaatcgggaa

SEQ ID NO: 282559 - DNA, 120 bp, Artificial Sequence
  ENSG00000129990_25 (sequence is synthesized)
ggtagccaatcgggaaagtgaaaatagaacagctacacagattataatatccatgagatttttaatttttctccaaaggaattcagtaacttttcatgtgtgtgagtgtgtgtgtgtgtg

SEQ ID NO: 282560 - DNA, 120 bp, Artificial Sequence
  ENSG00000129990_26 (sequence is synthesized)
tgtgtgtgtggctgtagagcatgtctttatgaagacagccctttatgttactactattactgccaataataatcctcacagcaaactcatgaaataaacatgatcattattcccagttga

SEQ ID NO: 282561 - DNA, 120 bp, Artificial Sequence
  ENSG00000129990_27 (sequence is synthesized)
gggacccccgccctcagcccatccgcatccgcatccctagaggaaaggggtgtgcgagtgggggctggggcactggggagacaaccagagggagggcagcagcctgaagcggagagacag

SEQ ID NO: 282562 - DNA, 120 bp, Artificial Sequence
  ENSG00000129990_28 (sequence is synthesized)
ggatctggggacgcgagacaggtatggagaagacaaagagccgagggcggggagtggggcgcaggcggaggggagagggagagaccctggagacagaggccaggcgatagggaagagaga

SEQ ID NO: 282563 - DNA, 120 bp, Artificial Sequence
  ENSG00000129990_29 (sequence is synthesized)
caggcgggttggggaggcagacacagggaagacgcctatgtggggtcaagaggcagcgtggagaccgaggcggtcacgagagcagcacggatgcgtggagagaccaacaggccaagaagg

SEQ ID NO: 282564 - DNA, 120 bp, Artificial Sequence
  ENSG00000129990_30 (sequence is synthesized)
atgagggggctcagcacaggcaccgggcagcccccgacccgccctccagcaaaattggggagagggaagagggaacctgcgtctcagctcccaggaccaggtgcggagggagcagtcggc

SEQ ID NO: 282565 - DNA, 120 bp, Artificial Sequence
  ENSG00000129990_31 (sequence is synthesized)
tgtgggcgctcggaccacaggctgcccgctccccacctcgcgggacctcaggatcccagtcgggctattggggggttcccaggcaccggtgggccccggagcgagcctgccccgccggga

SEQ ID NO: 282566 - DNA, 120 bp, Artificial Sequence
  ENSG00000129990_32 (sequence is synthesized)
ctccgcgtctgtgcgtcagccccgcccgttgtcctggcaacaacccgttgcccgggcaaccagctttgctctcaccccgcttgagaggagcccggctgttgctctgggcaacgcggtctg

SEQ ID NO: 282567 - DNA, 120 bp, Artificial Sequence
  ENSG00000129990_33 (sequence is synthesized)
ctggttcccacgtctgccttcgcccgcttccggttcagaccctgcggaggggcgaggacgaggcagaagtcagcgggatgcctgtggggccgtggaggaagagggtatccctttaggatg

SEQ ID NO: 282568 - DNA, 120 bp, Artificial Sequence
  ENSG00000129990_34 (sequence is synthesized)
gaactaggtcctggacaccccctctcaagtgcggggaggctgatactacaactcccagcatgactcgcggtggctgtccggtttctgcgcggctgttcgcgcaaaggcctcatgggagtt

SEQ ID NO: 282569 - DNA, 120 bp, Artificial Sequence
  ENSG00000129990_35 (sequence is synthesized)
aatactgaatctgcttagcctgtgagagctcaggtatagcccaagggacctgtgagcctcccttggcttctgagcctgatggatactgctatcaggggaagacttcacccacccttaccc

SEQ ID NO: 282570 - DNA, 120 bp, Artificial Sequence
  ENSG00000129990_36 (sequence is synthesized)
acaatctccagagcctgcgagagagagatggggtcttgctatgttgcacaggctggtttcaaactcctgcaatcctcctgtgtgagtagctgggactgtagacatgagccgccgcatctg

SEQ ID NO: 282571 - DNA, 120 bp, Artificial Sequence
  ENSG00000129990_37 (sequence is synthesized)
cctattacaacgaagctttcagcttcgaggtgccctgtgaccaagtccagggacggcgcctaccctagcccggcccctgttaaagttctgcagctttgcggctcttaggaggctgctccc

SEQ ID NO: 282572 - DNA, 120 bp, Artificial Sequence
  ENSG00000129990_38 (sequence is synthesized)
aaaggcgccagagcctcctcctcgccgcaggctccgtccctctcgtctcccaccccctcccccgtcccgagctccggggccccgagccctcgggtggcagcgagaggtaccctcagccgt

SEQ ID NO: 282573 - DNA, 120 bp, Artificial Sequence
  ENSG00000129990_39 (sequence is synthesized)
gaaaacggacaccgccccttccggggcctcctcccctcacgctcctctctcctcttcctcccgcgcccaccccagaaggtgcaggtggagctgaccgtgctggactacgacaagctgggc

SEQ ID NO: 282574 - DNA, 120 bp, Artificial Sequence
  ENSG00000129991_0 (sequence is synthesized)
agtgtcctcggggagtctcaagcagcccggaggagactgacggtccctgggaccctgaaggtcacccgggcggccccctcactgaccctccaaacgcccctgtcctcgccctgcctcctg

SEQ ID NO: 282575 - DNA, 120 bp, Artificial Sequence
  ENSG00000129991_1 (sequence is synthesized)
ccattcccggcctgagtctcagcatggcggatgggagcagcgatgcggctagggaacctcgccctgcaccagccccaatcagacgccgctcctccaactaccgcgcttatgccacggagc

SEQ ID NO: 282576 - DNA, 120 bp, Artificial Sequence
  ENSG00000129991_2 (sequence is synthesized)
cgcacgccaagaaaaaatctaagatctccgcctcgagaaaattgcagctgaagactctgctgctgcagattgcaaagcaagagctggagcgagaggcggaggagcggcgcggagagaagg

SEQ ID NO: 282577 - DNA, 120 bp, Artificial Sequence
  ENSG00000129991_3 (sequence is synthesized)
gcgctctgagcacccgctgccagccgctggagttggccgggctgggcttcgcggagctgcaggacttgtgccgacagctccacgcccgtgtggacaaggtggatgaagagagatacgaca

SEQ ID NO: 282578 - DNA, 120 bp, Artificial Sequence
  ENSG00000129991_4 (sequence is synthesized)
tagaggcaaaagtcaccaagaacatcacggagattgcagatctgactcagaagatctttgaccttcgaggcaagtttaagcggcccaccctgcggagagtgaggatctctgcagatgcca

SEQ ID NO: 282579 - DNA, 120 bp, Artificial Sequence
  ENSG00000129991_5 (sequence is synthesized)
tgatgcaggcgctgctgggggcccgggctaaggagtccctggacctgcgggcccacctcaagcaggtgaagaaggaggacaccgagaaggaaaaccgggaggtgggagactggcgcaaga

SEQ ID NO: 282580 - DNA, 120 bp, Artificial Sequence
  ENSG00000129991_6 (sequence is synthesized)
acatcgatgcactgagtggaatggagggccgcaagaaaaagtttgagagctgagccttcctgcctactgcccctgccctgaggagggccctgaggaataaagcttctctctgagctgaaa

SEQ ID NO: 282581 - DNA, 120 bp, Artificial Sequence
  ENSG00000129991_7 (sequence is synthesized)
cagctgcttttggctgcacatcccaggagacccaggacaactgtgagcctggcagggctggggcagaaggatgagtacaatatagtcaaggaaagctgttctaggcagagggaacagcac

SEQ ID NO: 282582 - DNA, 120 bp, Artificial Sequence
  ENSG00000129991_8 (sequence is synthesized)
atgcaaggccatgggttgggaaacagaaaataagttagtgaacatgctcagggcatcacatgttggtaaattagctcaggcactggccagggaattgtgatttgcatgtagctggaccag

SEQ ID NO: 282583 - DNA, 120 bp, Artificial Sequence
  ENSG00000129991_9 (sequence is synthesized)
gttatgccagtggttttgagaggtgaggctggagcatatgaggagggggattcagttccaggattagaagcctagactgggagcctaagccgggaagagactggtaaggcctcggtactg

SEQ ID NO: 282584 - DNA, 120 bp, Artificial Sequence
  ENSG00000129991_10 (sequence is synthesized)
gcgtggcctcccgtagactcagggctcaagttggacgtgggcccaaatctggaccggctgggtttgctgggggtgtcttgaggtcccctccaccgtcgtctccgaatccccctccatgat

SEQ ID NO: 282585 - DNA, 120 bp, Artificial Sequence
  ENSG00000129991_11 (sequence is synthesized)
gcctcgagaaaattgcagctgaagccccgggtgggctgcgcttccctcccacccctctgcagactctgctgctgcagattgcaaagcaagagctggagcgagaggcggaggagcggcgcg

SEQ ID NO: 282586 - DNA, 120 bp, Artificial Sequence
  ENSG00000129991_12 (sequence is synthesized)
tctcagcatggcggatgggagcagcgatgcggtgagagcagcgggctaaggcgtggctgggacccccagggccagggctagggaacctcgccctgcaccagccccaatcagacgccgctc

SEQ ID NO: 282587 - DNA, 120 bp, Artificial Sequence
  ENSG00000129991_13 (sequence is synthesized)
agaggtgaggctggagcatatgaggagggggattcagttccaggattagaagcctagactgggagcctaagccgggaagagactggtaaggcctcggtactggaagacgagataaggaga

SEQ ID NO: 282588 - DNA, 120 bp, Artificial Sequence
  ENSG00000129991_14 (sequence is synthesized)
ccattcccggcctgagtctcagcatggcggatgggtgagtgatgccccaagggaacctcgccctgcaccagccccaatcagacgccgctcctccaactaccgcgcttatgccacggagcc

SEQ ID NO: 282589 - DNA, 120 bp, Artificial Sequence
  ENSG00000129991_15 (sequence is synthesized)
cgaagggggcggggactacgcggaggggcttcaggggcggagttttgcagagggtcatgctcggattggtgacagcagcctgcgggcggaactccgttgccctcggacttgcttagggat

SEQ ID NO: 282590 - DNA, 120 bp, Artificial Sequence
  ENSG00000129991_16 (sequence is synthesized)
agatgggaagtgcctatccaaaggaagagacccagattggtggatgggaatgaggggcgtggcctcccgtagactcagggctcaagttggacgtgggcccaaatctggaccggctgggtt

SEQ ID NO: 282591 - DNA, 120 bp, Artificial Sequence
  ENSG00000129991_17 (sequence is synthesized)
tttagcggggagtactgctcggggtgggacggggccttggaacagtggagaccaaactggagggtttagaagggcagaggcggttccccacgcctggtctttatcctgaagccccgggtg

SEQ ID NO: 282592 - DNA, 120 bp, Artificial Sequence
  ENSG00000129993_0 (sequence is synthesized)
aaaccggaatggcccgagggaaggccgcgcagggcagggccccagatggttcctgtcagggaagtggcgggcgcagctgcaggcctccggccccggcattatcacggggacacagctggc

SEQ ID NO: 282593 - DNA, 120 bp, Artificial Sequence
  ENSG00000129993_1 (sequence is synthesized)
tgcctcacccgcaggctgcagggagaccttccccagcctgcagccccaggcccgccccgcgtcacatgagccccagggctcccaccccctccccagggcagaggacacccagttggtggc

SEQ ID NO: 282594 - DNA, 120 bp, Artificial Sequence
  ENSG00000129993_2 (sequence is synthesized)
cgggagggcctcggctttccagggacagaggcccaactccaggacgccccagctggcccagcccctcctctttccctcaaggctgcaggaggtcgggaaaggcagtcctggtagaggcct

SEQ ID NO: 282595 - DNA, 120 bp, Artificial Sequence
  ENSG00000129993_3 (sequence is synthesized)
gtcctgggctccaggttggcccctgagggtggccctcctcatgccggcttcaagactgagggacagggcagccagttcagcctcgggatccacctgtggctccatgtcccagacgcaccc

SEQ ID NO: 282596 - DNA, 120 bp, Artificial Sequence
  ENSG00000129993_4 (sequence is synthesized)
tgtgctggagagcggcctcctggcatctgccggctgctccgcaccccggggtcccaggaagggcggcccagccccagtggacaggaaagctaaggcctcagcgatgccggactccccagc

SEQ ID NO: 282597 - DNA, 120 bp, Artificial Sequence
  ENSG00000129993_5 (sequence is synthesized)
ggaggtgaagacgcagccccggtccacaccccccagcatgccgcccccaccgcctgccgcatcccagggggccacacgccccccctccttcacgccacacacacatcgagaggacgggcc

SEQ ID NO: 282598 - DNA, 120 bp, Artificial Sequence
  ENSG00000129993_6 (sequence is synthesized)
tgcgacgctgccccacggccgttttcatggctgcttaaaatggtctatggtctgtctcttgatgaacggcagcagccactcaccaacagccatcaatggtgcaccgtgcacacccaacgg

SEQ ID NO: 282599 - DNA, 120 bp, Artificial Sequence
  ENSG00000129993_7 (sequence is synthesized)
cttcagcaatggcccggccacctcgtccacagcctccttgtccacacagcacctgcccccagcctgcggggcccggcagctcagcaagctcaagcgcttcctcaccacactgcagcagtt

SEQ ID NO: 282600 - DNA, 120 bp, Artificial Sequence
  ENSG00000129993_8 (sequence is synthesized)
tggcagcgacatctccccagagattggggagcgcgtgcgcacactggtgctgggcctggtgaactcgacattgacgatcgaggagtttcattccaagcttcaggaggccaccaacttccc

SEQ ID NO: 282601 - DNA, 120 bp, Artificial Sequence
  ENSG00000129993_9 (sequence is synthesized)
tctgcggccgtttgtcattcccttcctgaaggcaaacctgcccttgctgcagcgggagctcctgcactgtgcacgcctggccaagcagacgcccgcccagtacttggcccagcatgagca

SEQ ID NO: 282602 - DNA, 120 bp, Artificial Sequence
  ENSG00000129993_10 (sequence is synthesized)
gctcctgctggacgccagcgcctcctcccccatcgactcctcagagctgctactggaagtcaacgagaacggcaagaggaggacgcccgacaggaccaaagagaacgggtcagaccgcga

SEQ ID NO: 282603 - DNA, 120 bp, Artificial Sequence
  ENSG00000129993_11 (sequence is synthesized)
cccgctgcaccccgagcacctcagcaaacggccatgcaccctgaaccctgcccagcgctacagccccagcaacgggccaccgcagcccacaccgccgccgcactaccgcctggaggacat

SEQ ID NO: 282604 - DNA, 120 bp, Artificial Sequence
  ENSG00000129993_12 (sequence is synthesized)
agccatggcccaccacttccgagatgcctaccgccacccagacccccgggagctacgagagcgccatcggccgcttgtggtgcctgggtcccggcaggaagaagtgatcgaccacaagct

SEQ ID NO: 282605 - DNA, 120 bp, Artificial Sequence
  ENSG00000129993_13 (sequence is synthesized)
cacagagcgtgagtgggcagaagagtggaagcacctcaacaacctcctgaactgcatcatggacatggtggagaagacgcggcgctcgctcacggtgctgcgcaggtgccaggaggccga

SEQ ID NO: 282606 - DNA, 120 bp, Artificial Sequence
  ENSG00000129993_14 (sequence is synthesized)
ccgcgaggagctcaaccactgggcgcggcgctacagcgacgccgaggacacaaagaagggccccgctcccgccgcggcccggccccgcagcagctccgccggtcccgaagggcctcagct

SEQ ID NO: 282607 - DNA, 120 bp, Artificial Sequence
  ENSG00000129993_15 (sequence is synthesized)
agacgtgcctcgcgagttcctgccgaggaccctcaccggctacgtgcctgaggacatctggaggaaggctgaagaggccgtgaatgaggtgaagcggcaggccatgtcggagctgcagaa

SEQ ID NO: 282608 - DNA, 120 bp, Artificial Sequence
  ENSG00000129993_16 (sequence is synthesized)
agccgtgtcggacgcggagcgcaaagcgcacgagctcatcaccacggagcgtgccaagatggagcgggccctggccgaggcgaagcggcaggcctccgaggacgccctgacggtcatcaa

SEQ ID NO: 282609 - DNA, 120 bp, Artificial Sequence
  ENSG00000129993_17 (sequence is synthesized)
ccagcaggaggactccagcgagagctgctggaactgcgggcggaaagccagtgagacgtgcagcggctgcaacgcggcacgctactgcgggtccttctgccagcatcgggactgggagaa

SEQ ID NO: 282610 - DNA, 120 bp, Artificial Sequence
  ENSG00000129993_18 (sequence is synthesized)
cacagccgtggtggccgacccggtgcctggaccgcccgaagccgcccacagcctgggcccctccctgcctgtgggtgctgccagccccagcgaagccggctctgcggggccttctcgccc

SEQ ID NO: 282611 - DNA, 120 bp, Artificial Sequence
  ENSG00000129993_19 (sequence is synthesized)
tcccccagcccacctggcccactggacaccgtgccccgctgaccccactggcccctggcctgccggacacagcaccgtgccaaccccacccagctccaggcccaccggatgctgtgcctg

SEQ ID NO: 282612 - DNA, 120 bp, Artificial Sequence
  ENSG00000129993_20 (sequence is synthesized)
gcctccgatgcctggcctgccagacactgcgccccgcctgacctgggggagccgaccaattagtcactgctgctactgcccctctccgaaagaagacacagaaccaacaaaaccgcattc

SEQ ID NO: 282613 - DNA, 120 bp, Artificial Sequence
  ENSG00000129993_21 (sequence is synthesized)
agtgcacctgcctcagctacctaatgattccgcgcggagacctcctgacaacgtctcttcaagcatcctcagaagcctcgactgagctttagacagcagagcagatgccgcaggcgcggc

SEQ ID NO: 282614 - DNA, 120 bp, Artificial Sequence
  ENSG00000129993_22 (sequence is synthesized)
ggctctgcccacctctcttttcctctctgtctgtctctccccctctgtcttctctatcctctctctctctatgactatcacacactttctcttcaatgaaaaaatcgaattggtggctta

SEQ ID NO: 282615 - DNA, 120 bp, Artificial Sequence
  ENSG00000129993_23 (sequence is synthesized)
tattttcagcaaagaattttggggggttttgtgtgttggcaaaagagctactcagaaatggacaaagaaaacgggggggttctccccctcctgattaaaaagggagaaagaaaactgcga

SEQ ID NO: 282616 - DNA, 120 bp, Artificial Sequence
  ENSG00000129993_24 (sequence is synthesized)
ttttatagctggagatctgaacccagctgtgcccctcccccaggggcgtgaggctgatcagcgaagacgggaggaaagatttcgatttctgactcaagatgcatttttggtttcagattt

SEQ ID NO: 282617 - DNA, 120 bp, Artificial Sequence
  ENSG00000129993_25 (sequence is synthesized)
ttttttcctgtaatgttaaactctttggctttaagtaaaaatccaaaaagtttttttaaaaaagcaaaggaagcatacttgtgaactaccttgctagctagccagccaaggataccggac

SEQ ID NO: 282618 - DNA, 120 bp, Artificial Sequence
  ENSG00000129993_26 (sequence is synthesized)
acacctctgctccaaaggaaatccaaaaaagcaaacacaagaaatcaaaatccaaaatttgtttgtcactgccaaagtatttttttcactgtttcacttgctcttgggtttgtttggatg

SEQ ID NO: 282619 - DNA, 120 bp, Artificial Sequence
  ENSG00000129993_27 (sequence is synthesized)
tgggtctttttctcttctgttctgattttgtttgtgggtgtcgggatatttgggtgcagagggtttgtgcccagttagaagcgacttttgttctcttctgcgtaggcgttggtgcgtccg

SEQ ID NO: 282620 - DNA, 120 bp, Artificial Sequence
  ENSG00000129993_28 (sequence is synthesized)
ccgcgtgtgcgtggtccgtgtgccgttgctccggcctgcgtctccatatgtgtaggaaaggacacgccgtctgtcctcacgccccctgtgacttttcatatttccgttttccacttgtgg

SEQ ID NO: 282621 - DNA, 120 bp, Artificial Sequence
  ENSG00000129993_29 (sequence is synthesized)
aaaaaaagtgctaaagttttcttcccagagagagcataattccgaaacaaaactgtgacaatcttttgggttgattctcgactgcttttcgagcatgcggagccagcaggcctccctgaa

SEQ ID NO: 282622 - DNA, 120 bp, Artificial Sequence
  ENSG00000129993_30 (sequence is synthesized)
acactgcttctcggccagcccgtcctcctctacctctctcctctccgcgccctccgacctctctcggccccctcaccccagctccgacctctctcagccccatcgccccaactccaacct

SEQ ID NO: 282623 - DNA, 120 bp, Artificial Sequence
  ENSG00000129993_31 (sequence is synthesized)
ctcggccccatcgccccaccgcagctactcccctttcttccaaacttttgcagaaaaaacaaaaaaactacaaacaaaagcagccctctgcctcctccccagggaagaccctgaccgtgt

SEQ ID NO: 282624 - DNA, 120 bp, Artificial Sequence
  ENSG00000129993_32 (sequence is synthesized)
acatagccctggtgctcctgcccagccacccctcagatgcgttcgcctctggccctggggtgtgtctcggtgacgttttctatcagacgtgctccctcccatcctccagccctgcccacc

SEQ ID NO: 282625 - DNA, 120 bp, Artificial Sequence
  ENSG00000129993_33 (sequence is synthesized)
ctccctccactcctctcaactgcctcagcgatttcaagaaggaaataaagggataaagaaattcatgcttgcaccgagtacaaggacagacagcaggcacggcccgcagcctggcatctg

SEQ ID NO: 282626 - DNA, 120 bp, Artificial Sequence
  ENSG00000129993_34 (sequence is synthesized)
tgcgtgtggcgtggcccgtggcttggcatctgtgtgcgtggtgtggcccgtggcctggcatctgtgtgcgtggcgtggcccgtggcctggcatctgtgtgtgtggcgtggcccgtggcct

SEQ ID NO: 282627 - DNA, 120 bp, Artificial Sequence
  ENSG00000129993_35 (sequence is synthesized)
ggcatctgtgcgcgtggcgtggcccgtggcctggcatctgtgtgcgtggctatcaggagttctaggaactcagtgcaatacgggagtgacccagctactgaaccagccacgaacagcccg

SEQ ID NO: 282628 - DNA, 120 bp, Artificial Sequence
  ENSG00000129993_36 (sequence is synthesized)
ccagaggcctgaagctgagcgtgtacgttaatgtgaatgtatatagtctttgcagaggtccaaatgatattcatgatggtaataaacgagatgtttgccaaataaaaaacagaaaccgca

SEQ ID NO: 282629 - DNA, 120 bp, Artificial Sequence
  ENSG00000129993_37 (sequence is synthesized)
cgcgcgccccagccccgccgcgcgcctgagcccggtgcggcgccagaagacagcgcgcagccgcccctgagtcgtggaggcggggaccaagctggaaggagcagcgactcccggaccgag

SEQ ID NO: 282630 - DNA, 120 bp, Artificial Sequence
  ENSG00000129993_38 (sequence is synthesized)
gcgggatcctgtgtccagctcttccactcgcccgtgttttctgggtccatccccactggagcgtgtgtcggacctgccttccttcttatgtctgaataagtgtgcactgcatctgctttt

SEQ ID NO: 282631 - DNA, 120 bp, Artificial Sequence
  ENSG00000129993_39 (sequence is synthesized)
caccacagctgtgtgtctcagccccagtggacaggaaagctaaggcctcagcgatgccggactccccagcggaggtgaagacgcagccccggtccacaccccccagcatgccgcccccac

SEQ ID NO: 282632 - DNA, 120 bp, Artificial Sequence
  ENSG00000129993_40 (sequence is synthesized)
cggtcccgaagggcctcagctaggaaaacacgggctggtctgccaggaagcctggagctcagagcgtctggtgggccagaggctcggagctgggaggccctgagggtctctgcttctccg

SEQ ID NO: 282633 - DNA, 120 bp, Artificial Sequence
  ENSG00000129993_41 (sequence is synthesized)
ggctcccagccgagtccaagacgtgcctcgcgagttcctgccgaggaccctcaccggctacgtgcctgaggacatctggaggaaggctgaagaggccgtgaatgaggtgaagcggcaggc

SEQ ID NO: 282634 - DNA, 120 bp, Artificial Sequence
  ENSG00000129993_42 (sequence is synthesized)
gttcagcctcccgcgcggccgccagaagccgcggttctaaagctgcgaggcccgcggccgccgactgctgcgagccccagtggacaggaaagctaaggcctcagcgatgccggactcccc

SEQ ID NO: 282635 - DNA, 120 bp, Artificial Sequence
  ENSG00000129993_43 (sequence is synthesized)
gttaaaggatggcaagtgcggtgaggataacagcagggtctggggtgacagcacagagccctggacgagggggcttcctgggctgcgtctgggtggggccagaggtgaaggcggaacggc

SEQ ID NO: 282636 - DNA, 120 bp, Artificial Sequence
  ENSG00000129993_44 (sequence is synthesized)
agagttatccaagtgcttcaggtcagcagcagctcccccggctcgcgttaggaatgcagattccgggtgcgcccctggctgaccaggccctggggtgggcctcgcccttgccctgcaggg

SEQ ID NO: 282637 - DNA, 120 bp, Artificial Sequence
  ENSG00000129993_45 (sequence is synthesized)
gtgcagtgcctggggagccgctgcggtagagtgcaagctttgacttgtgacaccacgtgacccagctttgcacacacatgcctgggatgcctgtgtttatttgcatgcacttgtctgcac

SEQ ID NO: 282638 - DNA, 120 bp, Artificial Sequence
  ENSG00000129993_46 (sequence is synthesized)
aggcatgagggccatcaacgtgtgtctgtgtgtgcacagatgctacgtgtgttcagctgcctacagccccatcaacatgtgcctttgtgtgcacagatggtacgtgtgttcagctgcaca

SEQ ID NO: 282639 - DNA, 120 bp, Artificial Sequence
  ENSG00000129993_47 (sequence is synthesized)
cagcccctgtccccaggttgtggccacgcgtaggaagtccagagacccatctgggatggcccatgtgaccgccagccctgcccatgtcctttgcagaagaggccgtgaatgaggtgaagc

SEQ ID NO: 282640 - DNA, 120 bp, Artificial Sequence
  ENSG00000129993_48 (sequence is synthesized)
caccagcgccttgagcgttttcctgccgtctccggacacagctggccctgggtggagcttctcagacttcagggagcctcagaccacgagggaatcttgttcagctgcagccccagtgga

SEQ ID NO: 282641 - DNA, 120 bp, Artificial Sequence
  ENSG00000129993_49 (sequence is synthesized)
gctgacacaggagaggcccaggacacacacggctcccagccgagtccaaggtccacagctccaatgccccccgtgcccgggcactgccctgggtgcctgagccagaccttgtccgagggc

SEQ ID NO: 282642 - DNA, 120 bp, Artificial Sequence
  ENSG00000129993_50 (sequence is synthesized)
acctgggcctccccccagggacgcacacactcacgccctgcactcagggcccagccagggtggggagggccccagcgtgggaggggcagccgcgtggcccatcctgtgtgacgccggccc

SEQ ID NO: 282643 - DNA, 120 bp, Artificial Sequence
  ENSG00000130005_0 (sequence is synthesized)
aagcccctgcagggagcgggcccgggcggcgcgcgatcgaggtcgggtcgccgtccagcctgcagcatgagcgcccccagcgcgacccccatcttcgcgcccggcgagaactgcagcccc

SEQ ID NO: 282644 - DNA, 120 bp, Artificial Sequence
  ENSG00000130005_1 (sequence is synthesized)
gcgtggggggcggcgcccgcggcctacgacgcagcggacacgcacctgcgcatcctgggcaagccggtgatggagcgctgggagaccccctatatgcacgcgctggccgccgccgcctcc

SEQ ID NO: 282645 - DNA, 120 bp, Artificial Sequence
  ENSG00000130005_2 (sequence is synthesized)
tccaaagggggccgggtcctggaggtgggctttggcatggccatcgcagcgtcaaaggtgcaggaggcgcccattgatgagcattggatcatcgagtgcaatgacggcgtcttccagcgg

SEQ ID NO: 282646 - DNA, 120 bp, Artificial Sequence
  ENSG00000130005_3 (sequence is synthesized)
ctccgggactgggccccacggcagacacacaaggtcatccccttgaaaggcctgtgggaggatgtggcacccaccctgcctgacggtcactttgatgggatcctgtacgacacgtaccca

SEQ ID NO: 282647 - DNA, 120 bp, Artificial Sequence
  ENSG00000130005_4 (sequence is synthesized)
ttcaacttcatcaagaaccacgcctttcgcctgctgaagccggggggcgtcctcacctactgcaacctcacctcctggggggagctgatgaagtccaagtactcagacatcaccatcatg

SEQ ID NO: 282648 - DNA, 120 bp, Artificial Sequence
  ENSG00000130005_5 (sequence is synthesized)
tttgaggagacgcaggtgcccgcgctgctggaggccggcttccggagggagaacatccgtacggaggtgatggcgctggtcccaccggccgactgccgctactacgccttcccacagatg

SEQ ID NO: 282649 - DNA, 120 bp, Artificial Sequence
  ENSG00000130005_6 (sequence is synthesized)
atcacgcccctggtgaccaaaggctgagcccccaccccggcccggccacacccatgccctcctccgtgccttcctggccgggagtccagggtgtcgcaccagccctgggctgatcccagc

SEQ ID NO: 282650 - DNA, 120 bp, Artificial Sequence
  ENSG00000130005_7 (sequence is synthesized)
tgtgtgtcaccagaagctttcccggcttctctgtgaggggtcccaccagcccagggctgatcccagctgtgtgtcaccagcagctttcccagcttctctgtgagggtcactgctgcccac

SEQ ID NO: 282651 - DNA, 120 bp, Artificial Sequence
  ENSG00000130005_8 (sequence is synthesized)
tgcagggtccctgaggtgaagtaaacgccggcgctgggcttggccagtcggcagtgagcgtgcgactgttacttccagcggctgctccctcacctcccgcccatcccatggacacaggaa

SEQ ID NO: 282652 - DNA, 78 bp, Artificial Sequence
  ENSG00000130005_9 (sequence is synthesized)
atcatgtttgagtggctgccaggagcagtggctcaggtctataatcccagcactgtggaaggccgaggtgacagagca

SEQ ID NO: 282653 - DNA, 120 bp, Artificial Sequence
  ENSG00000130005_10 (sequence is synthesized)
tgagggcactgcttcctgggggttgggggcctggggctgtcagaggtggaggaggtggtcttctctctcgggagtccccctggccgctccctttctgcaggtggggagatcctggggacc

SEQ ID NO: 282654 - DNA, 120 bp, Artificial Sequence
  ENSG00000130005_11 (sequence is synthesized)
ggaaggggctgctggagccaccttgctacctggggagggtcccttcctgaccccctgggtgggctggactgtgctggttcatttagaaatcaaagtcctttgcctggcgcagtggctgcc

SEQ ID NO: 282655 - DNA, 90 bp, Artificial Sequence
  ENSG00000130005_12 (sequence is synthesized)
ttgggaggctgaggtaggaggattgcttgggccccaggggcagaggttgcagtgagcccagatcgacagaccctgtctcaagaaaaaaga

SEQ ID NO: 282656 - DNA, 120 bp, Artificial Sequence
  ENSG00000130005_13 (sequence is synthesized)
aagaaagaaagaaagaaagaaagaaaatttaaaaaaaaaatggaaatcaggctgggcgtggtggctcacacctgtgatcccggcacttcggaaggccaaggcgggtggatcacttgagcc

SEQ ID NO: 282657 - DNA, 120 bp, Artificial Sequence
  ENSG00000130005_14 (sequence is synthesized)
ctgggcaacagaccgagactccatctcaacaaaacaaaaacaaaaaaaatggaaatcaaagtccctcaccagctcaacaacctcccatggctccccagtgccctgtggttcagcctaagc

SEQ ID NO: 282658 - DNA, 120 bp, Artificial Sequence
  ENSG00000130005_15 (sequence is synthesized)
ccccagtgccctgtggttcagcctaagccctgcgtgttcccctccctccagctgcctccacctggctgtctttgctggttcagcagtgcttgtctcgctgttccctctgcctggtggagg

SEQ ID NO: 282659 - DNA, 120 bp, Artificial Sequence
  ENSG00000130005_16 (sequence is synthesized)
cggcctatctgagaagggctctatgtggttgccctgggctgctgttgtgagagccggctgggtgcctgtggcccctggggcagcttttcttccaaaatgggaactagtggcctgtgttct

SEQ ID NO: 282660 - DNA, 120 bp, Artificial Sequence
  ENSG00000130021_0 (sequence is synthesized)
cgcgcacttcctcctcgcccccacccagacccagaaggcgccaccatggcggcgcccccgcagcccgtcacccacctcatctttgacatggacggacttcttctgggttatacaggaagc

SEQ ID NO: 282661 - DNA, 120 bp, Artificial Sequence
  ENSG00000130021_1 (sequence is synthesized)
atagtggcagctgcttcgggggagtcctcaagaggcttacaatcacggtggacggatactgaacggctgtattcagtggtgtttcaagaaatatgtaatcgctatgacaagaaatacagc

SEQ ID NO: 282662 - DNA, 120 bp, Artificial Sequence
  ENSG00000130021_2 (sequence is synthesized)
tgggatgtaaagtccctggttatgggtaagaaggcattagaggcggcacagattataatagacgtcttgcagctcccgatgtccaaagaggagctggtggaagaaagccaaacgaagtta

SEQ ID NO: 282663 - DNA, 120 bp, Artificial Sequence
  ENSG00000130021_3 (sequence is synthesized)
aaggaagtgttccccacggctgcgctcatgccaggggcggagaaactcatcatccacctgcggaaacatggcatcccctttgcactggccaccagctcggggtccgcgtcgttcgatatg

SEQ ID NO: 282664 - DNA, 120 bp, Artificial Sequence
  ENSG00000130021_4 (sequence is synthesized)
aagacaagccgccacaaggagttcttcagcttgttttcccacattgtgctgggagatgaccccgaagtgcagcatggcaagccagacccggacatcttcctagcttgtgccaagaggttc

SEQ ID NO: 282665 - DNA, 120 bp, Artificial Sequence
  ENSG00000130021_5 (sequence is synthesized)
tatggagaagtgccttgtctttgaagatgctcccaatggggtggaggcggccctggcagctgggatgcaggtggtcatggttcctgacggaaacttgagccgagatctgacaacaaaggc

SEQ ID NO: 282666 - DNA, 120 bp, Artificial Sequence
  ENSG00000130021_6 (sequence is synthesized)
caccctggtgctgaattccctgcaggacttccagcccgagctgtttggtttgccctcctatgagtgagagggagggcctcagtcttccgcccccagcccactctcatggtccacactgct

SEQ ID NO: 282667 - DNA, 120 bp, Artificial Sequence
  ENSG00000130021_7 (sequence is synthesized)
gggggaaagggaaaggaaatcagcaactcttcaatcccaacctgcgctgtgattttagcctcctgagattggagtttccatcccatgttggtttgtcccagtctaacgtgttgataaaat

SEQ ID NO: 282668 - DNA, 120 bp, Artificial Sequence
  ENSG00000130021_8 (sequence is synthesized)
gtgacttgacggttgagacaaaaaatacagtagagacagaaacgaagcccagaacaaagatgaaacttgaattaccatctcagaagtcaagctgatggagtatgtgataaagtgaatgta

SEQ ID NO: 282669 - DNA, 120 bp, Artificial Sequence
  ENSG00000130021_9 (sequence is synthesized)
catgtatatacacacacacctccatatatacatgtgtgtatcagtttggtaatatgcaggtaggcattacatgcatatgtatgtagacatatgcatgcatgtatatgtaaaatatatact

SEQ ID NO: 282670 - DNA, 120 bp, Artificial Sequence
  ENSG00000130021_10 (sequence is synthesized)
tttccaagacaaaatggaacatcacttctctcttctagtttttctgaacactggctgggaaatgtaaactgtgtatgcatataagtatatgctttatgtatgcatatgtatgtagatatg

SEQ ID NO: 282671 - DNA, 120 bp, Artificial Sequence
  ENSG00000130021_11 (sequence is synthesized)
ctcagtgcgcgtgcgcggggcgggcgggtgcgcgcgcacttcctcctcgcccccacccagacccagaaggcgccaccatggcggcgcccccgcagcccgtcacccacctcatctttgaca

SEQ ID NO: 282672 - DNA, 120 bp, Artificial Sequence
  ENSG00000130021_12 (sequence is synthesized)
atatctatcgtctgcatcactctcctcagtgttgatgtcaacatgcaatgacaactgataaagcgagatggtagttctgcctggtttgcagtctgagtgggaaagtcctgtttttgatga

SEQ ID NO: 282673 - DNA, 120 bp, Artificial Sequence
  ENSG00000130021_13 (sequence is synthesized)
gcactccttgttagctaacatttaaattctttttgtgacctcagaatgtctctggatctttcctcattgactgactctgtgccacgtcatccatagtttattgttagtatgaacacaact

SEQ ID NO: 282674 - DNA, 120 bp, Artificial Sequence
  ENSG00000130021_14 (sequence is synthesized)
gtaacatttacctggtatctacatccttacctgcattggaaaatgtttgctacctcacaacaaccatttgcctcctttaagaacactgatgggctgcactttttggatagaaatagaatt

SEQ ID NO: 282675 - DNA, 120 bp, Artificial Sequence
  ENSG00000130021_15 (sequence is synthesized)
tgatttcagaatgtatgcttggtgagtctcagtgcccaggaacacttttggaataatttatcagacattgaacttctgtgattaatcgcttttatagatttactcagtctttaaaattcg

SEQ ID NO: 282676 - DNA, 120 bp, Artificial Sequence
  ENSG00000130021_16 (sequence is synthesized)
tctctgatttgccagagaaaaacggtggtagccatggaaatcgggagtgaaggagcactgcttcattgtggctcagcccttcctaggggcctctgccctttgatgtccttgagctactct

SEQ ID NO: 282677 - DNA, 120 bp, Artificial Sequence
  ENSG00000130021_17 (sequence is synthesized)
tcagctctggaagttgtggacaaaccgtaggaatgtatgtgtgcgtgtggtggagtgattgtctgtgaatgacaggccctggctattgattgatgttgcatcaatttagcaaattcattt

SEQ ID NO: 282678 - DNA, 120 bp, Artificial Sequence
  ENSG00000130021_18 (sequence is synthesized)
cctcattcttgatggcctgaatatatgtctgcacttttaatgctcctcttaaccagttgtaacatcttaccatttccctaacaaattgaattagtttaataaaatcttttgacacatgtt

SEQ ID NO: 282679 - DNA, 120 bp, Artificial Sequence
  ENSG00000130021_19 (sequence is synthesized)
aaccacaacatttggagattaccaacatggttttcagccctcagctttggcgagacttcttccttttcattcttttctgggcaaatctaaacctttggagaagtagatgagtgaagtcaa

SEQ ID NO: 282680 - DNA, 90 bp, Artificial Sequence
  ENSG00000130021_20 (sequence is synthesized)
tcttgaactcctggcctcaagagatcttcctgcctcagcctcctgaatggttgcgactacagggacaggggaataaaaatgtgatgcatt

SEQ ID NO: 282681 - DNA, 120 bp, Artificial Sequence
  ENSG00000130021_21 (sequence is synthesized)
attggaggagaatcacaggactcaacaaataaaccttgagatgtcattgtcacctgtgtgtactttatgagaatacacgtagagattaaccctttcctggaaaatgaacgtctattgctt

SEQ ID NO: 282682 - DNA, 120 bp, Artificial Sequence
  ENSG00000130021_22 (sequence is synthesized)
cttttggggacagcatgctttatagttaggacattcttctttatatccagcctgacttcttcatgctgtactagccttccaatccttaactaaaaattttttaaaaatgaataaacactg

SEQ ID NO: 282683 - DNA, 120 bp, Artificial Sequence
  ENSG00000130021_23 (sequence is synthesized)
aagagctccatccatagacctcgtctgctcaccgcacagaaatgccagggctgccgggatcccttctcagcgctcctccttctgtgtaatcaactgcttctctgctctgatgacacctga

SEQ ID NO: 282684 - DNA, 120 bp, Artificial Sequence
  ENSG00000130021_24 (sequence is synthesized)
ccctgactgtccattgatgaccgaaggctcgtggacttgccaagttgcccacgtaaaacccagggttcagagagcgagacaagtccttgcattgtgaagtgccaacaattctagtattcc

SEQ ID NO: 282685 - DNA, 120 bp, Artificial Sequence
  ENSG00000130021_25 (sequence is synthesized)
ttaggaagcctcgcaacagtaagtgctttcagctcgctcaaggaacttcaagtaggcaagaaataagaatggaaaccctgcattactccatcagatcttgaaagttttctcttggataaa

SEQ ID NO: 282686 - DNA, 120 bp, Artificial Sequence
  ENSG00000130021_26 (sequence is synthesized)
tgtgcctgtcaatcacatcgaatcttatcccctgcctccatgtgctataccacaacagcgacgtctgctggaccgtgtgtgctctctgggtacacattttccaggaggcagcatcttatt

SEQ ID NO: 282687 - DNA, 120 bp, Artificial Sequence
  ENSG00000130021_27 (sequence is synthesized)
agagagtaacaggtctgtcttgtgtaaaggagaatgctaaccgcttcatgagaaggctccccaccatgaactcggataaccggatgctatttttttaacttatttattttttaattgaca

SEQ ID NO: 282688 - DNA, 120 bp, Artificial Sequence
  ENSG00000130021_28 (sequence is synthesized)
aatagaaatcgtatatagttatcacacacaacgtgttttgaagtatgtatacattgtggagtggctgcgtcaaggtaatgaacacatgcatcatctcactttctcatcatgttttgtggg

SEQ ID NO: 282689 - DNA, 120 bp, Artificial Sequence
  ENSG00000130021_29 (sequence is synthesized)
tcatggattccatcaaagagatcattaatgtctcaaaacgtctccaaggatacatgatctacaaaggaccacagagtgccctgcagaattgggttgaaaaactaaagaaggcaaacagag

SEQ ID NO: 282690 - DNA, 120 bp, Artificial Sequence
  ENSG00000130021_30 (sequence is synthesized)
tttatggtaaggcggcagtctctggtccccgttgtgagattgggttcttcctgcctgttcctggagtggcatggagaaaagagcatggatttgcagaagagacacttgagagagagggac

SEQ ID NO: 282691 - DNA, 120 bp, Artificial Sequence
  ENSG00000130023_0 (sequence is synthesized)
gtcattcacgcgcgccgcagcggggcaccggaagttatggaggtattaataggggaccctattaccacatgtctttctccctcagtgtatgatataatttgtaatcttgggtttcaactc

SEQ ID NO: 282692 - DNA, 120 bp, Artificial Sequence
  ENSG00000130023_1 (sequence is synthesized)
agagaaaattgtgatatcaatagcattgtaactcagaatggtgaagtatgctggaaaacaatcacagactgtgtgagctacacagagtcagagcagggtctggattactggggaagcgtg

SEQ ID NO: 282693 - DNA, 120 bp, Artificial Sequence
  ENSG00000130023_2 (sequence is synthesized)
aggctgctgggccctgtgtgtgaggctgtccattcacatttcttatctctgaccaaggggcaatttgaaattcgatatgcaccgtggttccagtggacaagttttccagagttatttcct

SEQ ID NO: 282694 - DNA, 120 bp, Artificial Sequence
  ENSG00000130023_3 (sequence is synthesized)
gaaatatttgatgccttggaaagtctacaatctcctgctatttctcttagcttaatgaaactgacatcgtgtctagaacgagccttgggtgatgtatttttactgattgggaaggaatgc

SEQ ID NO: 282695 - DNA, 120 bp, Artificial Sequence
  ENSG00000130023_4 (sequence is synthesized)
ccctttcttttaagagatctgctttcatctgaggagcttgctcaagtcttcagtcagtctgtgatgaatgtgctaaaagtcttcgttggctctccgtgtggtctcaacctgcgtaacgtc

SEQ ID NO: 282696 - DNA, 120 bp, Artificial Sequence
  ENSG00000130023_5 (sequence is synthesized)
ttatggcatgggtttgcgtcacctgaagaaattcctccaaaatactgttcaatgatgatactgttgacggcaggattgggtcagttactgaagagttaccttcaaaacactaaacttaca

SEQ ID NO: 282697 - DNA, 120 bp, Artificial Sequence
  ENSG00000130023_6 (sequence is synthesized)
ttggcacatcgctctttcatatctcttacaaacctcgaggatttgattgtttttcctgatgttacttatgaggtgctttcagtattagaagaagtgatgatgaaatctgcttttatatta

SEQ ID NO: 282698 - DNA, 120 bp, Artificial Sequence
  ENSG00000130023_7 (sequence is synthesized)
aaaatcatgttaccatattgggaagttgcactggtcaagttcaagtcacacaggtttgctgactgcgccatattgttgctgacacaactggagactggacttaggaatgtttttgccaca

SEQ ID NO: 282699 - DNA, 120 bp, Artificial Sequence
  ENSG00000130023_8 (sequence is synthesized)
cttaacagatgtccaaaaagactcctgactgctgagtcaacagctctttataccacctttgatcaaatattggcaaaacacttgaatgatggtaaaatcaatcagcttcctcttttcctt

SEQ ID NO: 282700 - DNA, 120 bp, Artificial Sequence
  ENSG00000130023_9 (sequence is synthesized)
ggagagcctgctatggaatttctctgggatttcctgaaccatcaggagggtccccgcataagagatcatttaagccacggggagatcaacttacatgaattttcaaaagaaacaactaat

SEQ ID NO: 282701 - DNA, 120 bp, Artificial Sequence
  ENSG00000130023_10 (sequence is synthesized)
cagttgcttgcattttctcttgtactgctactcagattcgttgatgactgtctgctatcagtttttaaggaaaaatcagccgtagaattgttgattagtcttgcagaaggctatagttct

SEQ ID NO: 282702 - DNA, 120 bp, Artificial Sequence
  ENSG00000130023_11 (sequence is synthesized)
cgctgtcatccggtttttcagcttaaaaaacaggtgctgagctgtgaggagagcatcagggtttgggctctgctgcctttccccgaagaactcactcggcaagccgtcagattagaagat

SEQ ID NO: 282703 - DNA, 120 bp, Artificial Sequence
  ENSG00000130023_12 (sequence is synthesized)
aattctgaaacaaatgcctgccactctttgattacaaaaatgacggatgagctgtatcaccatatgcctgagaatcgttgtgtgttaaaggacttggatcgtcttcctactgagacgtgg

SEQ ID NO: 282704 - DNA, 120 bp, Artificial Sequence
  ENSG00000130023_13 (sequence is synthesized)
ccccagcttctccgtgagctctgcagcacacctgttcccaccctgttctgccccaggattgtgctggaagtgctggttgtgctccgaagcatcagcgaacagtgccgccgtgtgtccagc

SEQ ID NO: 282705 - DNA, 120 bp, Artificial Sequence
  ENSG00000130023_14 (sequence is synthesized)
caggtcaccgttgcctcagagctgagacacaggcagtgggtggaaaggacgctgcggtctcgccagcggcagaactacctgcgtatgtggagtagtatcagactactgtcccctgtgctc

SEQ ID NO: 282706 - DNA, 120 bp, Artificial Sequence
  ENSG00000130023_15 (sequence is synthesized)
agcctgatactgttactcattgcgctggagttggtcaacattcatgctgtttgtgggaagaatgcgcatgagtatcagcagtacctaaagtttgtaaagtcgatcttgcagtacacggag

SEQ ID NO: 282707 - DNA, 120 bp, Artificial Sequence
  ENSG00000130023_16 (sequence is synthesized)
aacctggtggcttacaccagttacgaaaagaacaagtggaatgaaactatcaatcttacacatacagctttgttgaaaatgtggacttttagtgagaagaaacaaatgttaatacattta

SEQ ID NO: 282708 - DNA, 120 bp, Artificial Sequence
  ENSG00000130023_17 (sequence is synthesized)
gccaagaaatccacaagtaaagtactcttatgaaaacttgtaagtcaggatgcttttaattttaacagattttaacagcgtgtaaattaaaaacccaaagacagggtggagttgagggtc

SEQ ID NO: 282709 - DNA, 120 bp, Artificial Sequence
  ENSG00000130023_18 (sequence is synthesized)
gctggcgacgtcgcggccctggcctctgtggcggtatcggacgctcggccctgcaagacgcctggcgggccctgccggcctccctgggccaggctcggtttctccgtcgcctcctggccc

SEQ ID NO: 282710 - DNA, 120 bp, Artificial Sequence
  ENSG00000130023_19 (sequence is synthesized)
accggaagttatggagaactgtagatttgcagagaagtgacaggacacaggagagcagttttaggcttcaaagggcaggaaattgggaaggtagatacatattcggaaactaatggagta

SEQ ID NO: 282711 - DNA, 120 bp, Artificial Sequence
  ENSG00000130023_20 (sequence is synthesized)
attgattcatttaatctgcatgttggcggtgtgaatagtagaaaactcacagttgaaaatgcctcttgtcagccacggagcgcacaggcatttgtgtgcgtaaccccgggtagcgttcat

SEQ ID NO: 282712 - DNA, 120 bp, Artificial Sequence
  ENSG00000130023_21 (sequence is synthesized)
gtgcacctaaagtgtgacgacagcctatgggaaaccaagggaagggtcacctgtagaggtccggacattcggttttgcctttaagacaactattagatcctaagcgactgtgttgtggct

SEQ ID NO: 282713 - DNA, 120 bp, Artificial Sequence
  ENSG00000130023_22 (sequence is synthesized)
gagttaaaaatgtgcctgtttacttgcagagcttcttccattaggtgaacaatctgttgtgattttaatgtgtaagacctttggtaatgtgaggaattgattagatagtgcagcccagtc

SEQ ID NO: 282714 - DNA, 120 bp, Artificial Sequence
  ENSG00000130023_23 (sequence is synthesized)
tctagaggatcagatctgtgggattggttggggtggttgggcaaagtccatggtgagttaagaaatgactttggaagtgactctaatgtgtacacaaacaacacacatgcacacaccaca

SEQ ID NO: 282715 - DNA, 120 bp, Artificial Sequence
  ENSG00000130023_24 (sequence is synthesized)
catacatacacacacgaacacatacctccatgctgcatatacacacacaggcatacacacactctaatgtgtacacaaacacacatgcacataccacacatacacacacacacatgaaca

SEQ ID NO: 282716 - DNA, 120 bp, Artificial Sequence
  ENSG00000130023_25 (sequence is synthesized)
catacctccatgccacacagacacacacaggcatacacatactctaatgtgtacacaacacacatgcacacaccacacacgaactcacacatccatgccacatatacacacacaggcata

SEQ ID NO: 282717 - DNA, 120 bp, Artificial Sequence
  ENSG00000130023_26 (sequence is synthesized)
acacacacacacacacacacacaggcacagttgcatataaacacacaaatgtacacacccccacaccacatatgcacatacacatatacacaccacacatattcatagtcacatacacaa

SEQ ID NO: 282718 - DNA, 120 bp, Artificial Sequence
  ENSG00000130023_27 (sequence is synthesized)
acatattcatagtcacatacacaaacacacatgtgtatacaattattaatatagtcttaaagtcattctgttggttaagaaaatatttcctgaacacctgtttgctgaattttaaagact

SEQ ID NO: 282719 - DNA, 120 bp, Artificial Sequence
  ENSG00000130023_28 (sequence is synthesized)
gtccatttaatttgcttagaccttagataacaagttaggctaaaagtactatatccatcaactctgaaagttctgtatgtttatgtatggggaccagttaaccaatgtatttatttttga

SEQ ID NO: 282720 - DNA, 120 bp, Artificial Sequence
  ENSG00000130023_29 (sequence is synthesized)
ttttttttcttattcatctccagttttgtgcacagagggtgggtgtggcatttgtgatctattattgttaatggcctccatttaaaatcattttattggctgtcatttgcctgccatgtc

SEQ ID NO: 282721 - DNA, 120 bp, Artificial Sequence
  ENSG00000130023_30 (sequence is synthesized)
aagcctattttaatgaagcacttgcttttctagctgcatagaattatttgaagaaagataatgagaaatggggactctaagtggcctacagttcaatagaagaaagctaaaagcccaccc

SEQ ID NO: 282722 - DNA, 120 bp, Artificial Sequence
  ENSG00000130023_31 (sequence is synthesized)
tccagaggtttggcttttgaacaacctttagaaataaaagactgtgcgaatactacttagaggacgtactatttgccaattttaaaggggcctccttcatccccaggccctccagcggtg

SEQ ID NO: 282723 - DNA, 120 bp, Artificial Sequence
  ENSG00000130023_32 (sequence is synthesized)
aagtgttgagggttgtaagagaaccctgggctattatgcagggtctccaaagcctgagctgagaaacatgccccttggaacacaggaaggttttgaattcattatcacaggattaggggt

SEQ ID NO: 282724 - DNA, 120 bp, Artificial Sequence
  ENSG00000130023_33 (sequence is synthesized)
attcacgcgcgccgcagcggggcaccggaagttatggagaggcatgttttgggatgacattgtggttttcttcaacaccgtttaggtagtcagaggtattaataggggaccctattacca

SEQ ID NO: 282725 - DNA, 80 bp, Artificial Sequence
  ENSG00000130024_0 (sequence is synthesized)
ctgaggcgagcggcggggctgaggcgagcggcggggctgaggcggccgcggggctgaggcgagcgagcggcggggctgag

SEQ ID NO: 282726 - DNA, 120 bp, Artificial Sequence
  ENSG00000130024_1 (sequence is synthesized)
tgaggcgagcgagtggcggggctgaagggagtcgcggcggcgctgaggccagcggcggagctgtggggggcaacggtgctgaggcggtggccgcggccgggcgggttgggctgacgtgag

SEQ ID NO: 282727 - DNA, 80 bp, Artificial Sequence
  ENSG00000130024_2 (sequence is synthesized)
ggccgcggccgggcgggttgggctgacgtgagaagcgccgccgccgctgggcctcctccattccggcccgcagccccgcg

SEQ ID NO: 282728 - DNA, 120 bp, Artificial Sequence
  ENSG00000130024_3 (sequence is synthesized)
tgtccccgcggccgtgcgacagcgacccagccacccccggagcgcagtccccgaaggatgataatgaagataattcaaatgatgggacccagccatccaaaaggaggcgaatgggctcag

SEQ ID NO: 282729 - DNA, 120 bp, Artificial Sequence
  ENSG00000130024_4 (sequence is synthesized)
gagatagttctaggagttgtgaaacttcaagtcaagatcttggttttagttactatccagcagaaaacttgatagagtacaaatggccacctgatgaaacaggagaatactatatgcttc

SEQ ID NO: 282730 - DNA, 120 bp, Artificial Sequence
  ENSG00000130024_5 (sequence is synthesized)
aagaacaagtcagtgaatatttgggtgtgacctcctttaaaaggaaatatccagatttagagcgacgagatttgtctcacaaggagaaactctacctgagagagctaaatgtcattactg

SEQ ID NO: 282731 - DNA, 120 bp, Artificial Sequence
  ENSG00000130024_6 (sequence is synthesized)
aaactcagtgcactctaggcttaacagcattgcgcagtgatgaagtgattgatttaatgataaaagaatatccagccaaacatgctgagtattctgttattctacaagaaaaagaacgtc

SEQ ID NO: 282732 - DNA, 120 bp, Artificial Sequence
  ENSG00000130024_7 (sequence is synthesized)
tacagaccattataaagagtattcccaaatgcaacaacagaatactcagaaagttgaagccagtaaagtgcctgagtatattaagaaagctgccaaaaaagcagcagaatttaatagcaa

SEQ ID NO: 282733 - DNA, 120 bp, Artificial Sequence
  ENSG00000130024_8 (sequence is synthesized)
cttaaaccgggaacgcatggaagaaagaagagcttattttgacttgcagacacatgttatccaggtacctcaagggaagtacaaagttttgccaacagagcgaacaaaggtcagttctta

SEQ ID NO: 282734 - DNA, 120 bp, Artificial Sequence
  ENSG00000130024_9 (sequence is synthesized)
cccagtggctctcatccccggacagttccaggaatattataagaggtactcaccagatgagctgcggtatctgccattaaacacagccctgtatgagccccctctggatcctgagctccc

SEQ ID NO: 282735 - DNA, 120 bp, Artificial Sequence
  ENSG00000130024_10 (sequence is synthesized)
tgctctagacagtgatggtgattcagatgatggcgaagatggtcgaggtgatgagaaacggaaaaataaaggcacttcggacagctcctctggcaatgtatctgaaggggaaagccctcc

SEQ ID NO: 282736 - DNA, 120 bp, Artificial Sequence
  ENSG00000130024_11 (sequence is synthesized)
tgacagccaggaggactctttccagggaagacagaaatcaaaagacaaagctgccactccaagaaaagatggtcccaaacgttctgtactgtccaagtcagttcctgggtacaagccaaa

SEQ ID NO: 282737 - DNA, 120 bp, Artificial Sequence
  ENSG00000130024_12 (sequence is synthesized)
ggtcattccaaatgctatatgtggaatttgtctgaagggtaaggagtccaacaagaaaggaaaggctgaatcacttatacactgctcccaatgtgagaatagtggccatccttcttgcct

SEQ ID NO: 282738 - DNA, 120 bp, Artificial Sequence
  ENSG00000130024_13 (sequence is synthesized)
ggatatgacaatggagcttgtttctatgattaagacctacccatggcagtgtatggaatgtaaaacatgcattatatgtggacaaccccaccatgaagaagaaatgatgttctgtgatat

SEQ ID NO: 282739 - DNA, 120 bp, Artificial Sequence
  ENSG00000130024_14 (sequence is synthesized)
gtgtgacagaggttatcatactttttgtgtgggccttggtgctattccatcaggtcgctggatttgtgactgttgtcagcgggcccccccaacacccaggaaagtgggcagaagggggaa

SEQ ID NO: 282740 - DNA, 120 bp, Artificial Sequence
  ENSG00000130024_15 (sequence is synthesized)
aaacagcaaagagggataaaatagtttttgactctaatactgtatatgcatttaagtggaatatttggtgccatttacaacattattttcatgccaataaaagattttttttgcaaatta

SEQ ID NO: 282741 - DNA, 120 bp, Artificial Sequence
  ENSG00000130024_16 (sequence is synthesized)
cagacaagaagtgcggcggaagcttacacctgcacgtggtgggacagaggcaagaacggatggtctggctgaggctgagagaaccaagctggattaggatcggcttgagggcccggcgtc

SEQ ID NO: 282742 - DNA, 120 bp, Artificial Sequence
  ENSG00000130024_17 (sequence is synthesized)
tgattattctttgggtggatgaaatactggctatgcattttaagcccaagagaaagaagtcagagctgataccatcatcaccttgctttgccctcataggtcctttaaactaaaaatgcc

SEQ ID NO: 282743 - DNA, 120 bp, Artificial Sequence
  ENSG00000130024_18 (sequence is synthesized)
ttcgttcttagcaattgtgattctacgttcttcccagtgtataaaagatgttattttcacatacctttttgacttggtagaccagataattatttctattccttgtacctgttttgtaat

SEQ ID NO: 282744 - DNA, 120 bp, Artificial Sequence
  ENSG00000130024_19 (sequence is synthesized)
gcccctgactcagcttctttactgaccagcctctccctgaaatattttaacttgactttcacgattgtggagcttctgcctgctgtacctcactagctgttcttctatggtgtgcccttt

SEQ ID NO: 282745 - DNA, 120 bp, Artificial Sequence
  ENSG00000130024_20 (sequence is synthesized)
gtccgctgctttcttttttgctttatttccttggtggcttttctgtcacttttggctatggtttaccttctgttttctgtatatgtacaatttataagtctttttttttctttgaaagaa

SEQ ID NO: 282746 - DNA, 120 bp, Artificial Sequence
  ENSG00000130024_21 (sequence is synthesized)
taaccaggcaagtatgggtttttaaaacattatttcataggcagaagtttatattttctttccttggagtaaagatcataattatttggcattttaaatgccccagcatttagtgtagct

SEQ ID NO: 282747 - DNA, 120 bp, Artificial Sequence
  ENSG00000130024_22 (sequence is synthesized)
aaagctgctgagctataaagtatgagtggatatactgttagactaagttgcattttttttagtgcctttcattaagaaagatctgggtttaatctaaggattatttgatccatatgctaa

SEQ ID NO: 282748 - DNA, 120 bp, Artificial Sequence
  ENSG00000130024_23 (sequence is synthesized)
atttagctaactctgggatagaaaataataaaacctgttacttacattgtagtgatttttagcataaccttggtaaagagcctatatgattctatggcaagaattaaaacatacttgtta

SEQ ID NO: 282749 - DNA, 120 bp, Artificial Sequence
  ENSG00000130024_24 (sequence is synthesized)
acttgttgatctgattatcctcagagtaaaggagtaggttgtcagcaactattattatattttgaacttttcctccctctgtctgcccctcccttttcttctgaagaaaaggtgaggtga

SEQ ID NO: 282750 - DNA, 120 bp, Artificial Sequence
  ENSG00000130024_25 (sequence is synthesized)
gagatgagtagccttatttgcatatagggatttaagaatatcataaaaggaagaattagctgtacagtttcatatttgggatggtggtagtaaaatagactaccttttgattcttttggt

SEQ ID NO: 282751 - DNA, 120 bp, Artificial Sequence
  ENSG00000130024_26 (sequence is synthesized)
ctgaaatgtattagaacatgcttttattgcacttatgaaggtgtattgaaggaaaattttagagtaagctgatgagaaagttttgccaagtgaaattgttaaacaccttgtatgtcagaa

SEQ ID NO: 282752 - DNA, 120 bp, Artificial Sequence
  ENSG00000130024_27 (sequence is synthesized)
ctaacatgttcatttacctttcttcaagtaaaaaaagcgacattaagttagtgtatttcatattttattaggaaatgcttttatgtaattaacttaaaaattcttttttttttttgtagc

SEQ ID NO: 282753 - DNA, 120 bp, Artificial Sequence
  ENSG00000130024_28 (sequence is synthesized)
ctatagcaagcaaattttaagcttaattcagcaagggttggcttccaagggtggctgcaataggctgcagctatgtgatttttgtacttgtttttacatatatagcttatgtaatttctt

SEQ ID NO: 282754 - DNA, 120 bp, Artificial Sequence
  ENSG00000130024_29 (sequence is synthesized)
tatataaattaatgcttaataactgaaagcaagtgagctccaaagatgaaatttcagaagcagtatacatgaatgagtgtgttctactggtctgctaagagctttaaatggaagtggccg

SEQ ID NO: 282755 - DNA, 120 bp, Artificial Sequence
  ENSG00000130024_30 (sequence is synthesized)
ctcaaagcacagtgtcctgttaactcttgagtgctaagtagatctttgcaacagtaagcttgattgatcatgggttaaaaagagagaatattgaaatagatgttttaatacaggctggaa

SEQ ID NO: 282756 - DNA, 120 bp, Artificial Sequence
  ENSG00000130024_31 (sequence is synthesized)
atcagctattcaacactatcattgatttagtatacaagaaatcatatggattaactgaacttaatagtactcaagtaggatatgcaaaatttatattttacataatctgtgaacattttt

SEQ ID NO: 282757 - DNA, 120 bp, Artificial Sequence
  ENSG00000130024_32 (sequence is synthesized)
agtacctaaaaatgtttcaggtatttcaaagatgggaacaaccagtatctagtcatcatacattaatgtgaacatgcttattaaaagttaacctctttataaaaagtattaataaaccaa

SEQ ID NO: 282758 - DNA, 120 bp, Artificial Sequence
  ENSG00000130024_33 (sequence is synthesized)
gatgtgcctaaatattagggtacttcaagctaaaggtcatagtttatatataaaaagtacgagattcaaggaagtaatgtatctgatgctttgcttaataagattcactagtgcttgccc

SEQ ID NO: 282759 - DNA, 120 bp, Artificial Sequence
  ENSG00000130024_34 (sequence is synthesized)
ttaattcatagaacagtattgtttaggttacattaacctgaaatttaaagcataattattaggattccggcctataaatacaataattaaaatctatactatattattgctaccatgaaa

SEQ ID NO: 282760 - DNA, 120 bp, Artificial Sequence
  ENSG00000130024_35 (sequence is synthesized)
gtcttatctttggctgtttttcaagtagaaaagtaagtgtactgtgagccttttatttgagatgctgagagctattaggatgagtatttcagttttcttgtcaatagtgatactctgatg

SEQ ID NO: 282761 - DNA, 120 bp, Artificial Sequence
  ENSG00000130024_36 (sequence is synthesized)
atgttgcagttatttgaagtagaactgattgtctaaaccagacacacataggagtgtgctccattggtcttgtggagagtgctgcacattaacccctccctcaactgtgcaatccacttg

SEQ ID NO: 282762 - DNA, 120 bp, Artificial Sequence
  ENSG00000130024_37 (sequence is synthesized)
agactggcttctctaagccacagttgttatctgctgtgtaaagtcctggatgccagcactgtggcttcttagagagggcagatgctttgtatatcgagctgcagcattcatcgtagaaaa

SEQ ID NO: 282763 - DNA, 120 bp, Artificial Sequence
  ENSG00000130024_38 (sequence is synthesized)
tgctacaaagctgtctctcttccccttctctcatgtttccctcttttcatcaagatgaaggctgttgggtaagaaaaactaagtgatttaacaaatcattatgatttaaacttagaaata

SEQ ID NO: 282764 - DNA, 120 bp, Artificial Sequence
  ENSG00000130024_39 (sequence is synthesized)
aacctagaattttttggtgtcccttttatcataggtgtttaatgtatattttaatgattgtagaacttgaattgctctagaatgtgaatgactacccttgtgttttactccttttggctt

SEQ ID NO: 282765 - DNA, 120 bp, Artificial Sequence
  ENSG00000130024_40 (sequence is synthesized)
ttgttttgtaaagaatctcctgtgaggagttctgtttttagaatttaatattgtttggttacttccctgactttagtgaaagatattagagtatttactatgccagtatctaacttaaac

SEQ ID NO: 282766 - DNA, 120 bp, Artificial Sequence
  ENSG00000130024_41 (sequence is synthesized)
tattagtattaaataagtatatcttttacatttagtacaggtaccataaccaagagatttcttagttttgatggattaagagagagcattctgctgtatattatggcaggtacagatatg

SEQ ID NO: 282767 - DNA, 120 bp, Artificial Sequence
  ENSG00000130024_42 (sequence is synthesized)
atcataactgaaccagaatttggattatagaagtgcacttcctagctgttttttatttaggtataggaacacacaatgagaaccttatgtttagaatgtagcagtaacaacagagggtaa

SEQ ID NO: 282768 - DNA, 120 bp, Artificial Sequence
  ENSG00000130024_43 (sequence is synthesized)
ctacactgcaagacttaaatggtttgagcatgtgacactatccttttgttggggggagcagggtataaaaatatacatacaggagattagtttaatagtaaagttttatatgtatgttta

SEQ ID NO: 282769 - DNA, 120 bp, Artificial Sequence
  ENSG00000130024_44 (sequence is synthesized)
acttccatgatatttattattttgtagagacatttgtgattgtttagagttcttgtttttattctatttatgtataaggttgactttttttaaataaataagccaaaaattctttttgaa

SEQ ID NO: 282770 - DNA, 120 bp, Artificial Sequence
  ENSG00000130032_0 (sequence is synthesized)
tagttgtgaattctggtcctgccactgtcactgttgatttgcttaaccttgtctgagcccgtctctctgggctgtatctcctcatctatctctgaggtcctttccaattggaagttgcaa

SEQ ID NO: 282771 - DNA, 120 bp, Artificial Sequence
  ENSG00000130032_1 (sequence is synthesized)
agattcattgaggggagcaaggaaggaggagcctcagcctttaggagctttcctttttaaaagaaaaaggtcaacccttggttcttatagatgctcagaacatgttcttgggggaaaacg

SEQ ID NO: 282772 - DNA, 120 bp, Artificial Sequence
  ENSG00000130032_2 (sequence is synthesized)
ctgaaaggtttgctttgggccctactgggcctggggaggtctctggagaagagcttggggcagaatgagaagcagcggaagccatgggtggctgcatggaggacgacgcaccccacaaga

SEQ ID NO: 282773 - DNA, 120 bp, Artificial Sequence
  ENSG00000130032_3 (sequence is synthesized)
gaagtgagaccctgcagctgagggagcatcatggcagtgtttctggaggccaaggatgcccattcggtcctgaaacgattccctcgtgccaatgagttcctggaggagctgcgccagggc

SEQ ID NO: 282774 - DNA, 120 bp, Artificial Sequence
  ENSG00000130032_4 (sequence is synthesized)
accatcgagcgagagtgcatggaggagatctgcagctacgaggaggtcaaggaagtgtttgagaacaaagagaaaacgatggagttctggaaagggtacccaaatgcagtctactctgtc

SEQ ID NO: 282775 - DNA, 120 bp, Artificial Sequence
  ENSG00000130032_5 (sequence is synthesized)
cgagacccctcgcagagctcagatgccatgtatgtggtggtaccccttctgggggtggcactgctgattgtcatcgccttgttcatcatctggaggtgccagctgcagaaagcgacccgt

SEQ ID NO: 282776 - DNA, 120 bp, Artificial Sequence
  ENSG00000130032_6 (sequence is synthesized)
caccacccctcctatgctcagaaccggtacctagccagtcgcgccgggcacaccctcccccgggtcatggtgtaccggggtactgtgcatagccaaggggagccttctgggcaccgagag

SEQ ID NO: 282777 - DNA, 120 bp, Artificial Sequence
  ENSG00000130032_7 (sequence is synthesized)
gcagcgaacagcccccaggtggtgctggggcccagtcgggggggcaggaccacagtccggctagagagcaccctctacctccctgagctctctctctccagactgtccagcaccacccct

SEQ ID NO: 282778 - DNA, 120 bp, Artificial Sequence
  ENSG00000130032_8 (sequence is synthesized)
cccccctcctacgaggaggtgactgcgccccaagagagcagcagtgaggaggccagcgtgtcttacagtgacccacccccaaagtacgaggagatagtggccgccaaccctggcgctgac

SEQ ID NO: 282779 - DNA, 120 bp, Artificial Sequence
  ENSG00000130032_9 (sequence is synthesized)
aagtagtgggacgtttgtgccctgtcctggatgaacgcctctttccgaggtctcctattttctttttaactttttaaagactgtgccaccacaaaacagccttagcctccttgttgccaa

SEQ ID NO: 282780 - DNA, 120 bp, Artificial Sequence
  ENSG00000130032_10 (sequence is synthesized)
ataattccctaactgtggagttttaggaagtcagttgtcagagacaggtggggagggtgggggtagggaccacgcatgagtcgaagcccccgggaagagccaaaggccaaagtgcccaac

SEQ ID NO: 282781 - DNA, 120 bp, Artificial Sequence
  ENSG00000130032_11 (sequence is synthesized)
tctttgggatgacccccaagcctccaacatcctgtctttccatcaggaactggcttctcttatgccaaaggaataaccccattgagttgattgtggccagaatgtccacaggcctggcct

SEQ ID NO: 282782 - DNA, 120 bp, Artificial Sequence
  ENSG00000130032_12 (sequence is synthesized)
gggggctgtgggactggctggaggcctgcctgtgtctagagctctgggcctcaggggtaagggaaggaagccagcctttcagcaccccttaccctccacagttctgtgatttctgtcctt

SEQ ID NO: 282783 - DNA, 120 bp, Artificial Sequence
  ENSG00000130032_13 (sequence is synthesized)
gcttacatttggaggacagggacaaggactgagcaaaaacaaaatgaaaaaatcatgacaaataaataattaacacaatagaacaaaactctagcacccgggccgttcataggaggccaa

SEQ ID NO: 282784 - DNA, 120 bp, Artificial Sequence
  ENSG00000130032_14 (sequence is synthesized)
gggaaatttatcacatggatctgtgatgtccgcctcccctaaaacctgtccccacactcctggaaggaggacagggtgtgtgaaggatgagggccagagggctgggtggcagagtttcct

SEQ ID NO: 282785 - DNA, 120 bp, Artificial Sequence
  ENSG00000130032_15 (sequence is synthesized)
cttccacattgaccaaggggcccacgtggactctgccattcagtttctagtgtgcttgtctctccagacatgtggaccagctgtgttcaaaccactacccactggcatgagcctactttt

SEQ ID NO: 282786 - DNA, 120 bp, Artificial Sequence
  ENSG00000130032_16 (sequence is synthesized)
tgcgaatggtgcattgaaattgaacttcagattgaggatttctccttaacgatggtgcgcatctcaggagaagatcctaaagtgtcccttttaaaacatttatttgtggagaagcccgtg

SEQ ID NO: 282787 - DNA, 120 bp, Artificial Sequence
  ENSG00000130032_17 (sequence is synthesized)
gcctggggttgaaggcccatatggggtttgctctgctgttgccaggtgccagtctgttttcagtgaggctttggacagcagtggggcagaaggcacctgccctttaactgtcagtgacca

SEQ ID NO: 282788 - DNA, 120 bp, Artificial Sequence
  ENSG00000130032_18 (sequence is synthesized)
tgctagacactgttgataccacctccccctacttccgtctccatcctcctgacctcaacaccaaaccatttctcctctgtggtgctttaaaaattgtagcaaatttttgtgtggtgcaag

SEQ ID NO: 282789 - DNA, 120 bp, Artificial Sequence
  ENSG00000130032_19 (sequence is synthesized)
aatgcatggcctgcgtctattggcaaccacagcaatttaaaatccactgagctgacaagcttttttctgtcaaaatatctctctaaggcagacattgggactcatttccttgaatgcagc

SEQ ID NO: 282790 - DNA, 120 bp, Artificial Sequence
  ENSG00000130032_20 (sequence is synthesized)
cctgccttcaggccacagaggacttctggaggctgctctagccctgaggacttgccctgggacgtgcttccagttagaaggcttgtgtccctaccccagtgaggccaccagcttggacca

SEQ ID NO: 282791 - DNA, 120 bp, Artificial Sequence
  ENSG00000130032_21 (sequence is synthesized)
ctccaccctgtggctggggttttccatccttccccctacctcacaggcccgttggaggctgactgagcaaatgcctgcgaagtgcttgaattgccggggagccagcgaggtttgccttag

SEQ ID NO: 282792 - DNA, 120 bp, Artificial Sequence
  ENSG00000130032_22 (sequence is synthesized)
gaagagtcttctagaaaggtgtaggttataagggagcagtcttagctgaggccctcatatgcctctgatgttgagtctccacttggagagtcaatctcccgtcagttgaccctttccatc

SEQ ID NO: 282793 - DNA, 120 bp, Artificial Sequence
  ENSG00000130032_23 (sequence is synthesized)
ctctcgtcctccctttccagagctccctgatgccagagatgctggtgaatgcaggtgacattctacctttcgtttccttgtctttccctcccctgggccttcagcattgcactcctgccc

SEQ ID NO: 282794 - DNA, 120 bp, Artificial Sequence
  ENSG00000130032_24 (sequence is synthesized)
agtatttcttcaagtaggtgccagagtgtgacctgggagcaggtgagaagaaacttatcccaatatgtctactcagttagcacagagccaggcatgagctccactgatcagagccaaagg

SEQ ID NO: 282795 - DNA, 120 bp, Artificial Sequence
  ENSG00000130032_25 (sequence is synthesized)
gagtttgccaagaaatgcccgctgcctttggcatctgagttgcagctgggtggtaatgggagagagcaggaagaggcccaaggcctggcccatggagggcaacatgtgtccttcaggggc

SEQ ID NO: 282796 - DNA, 120 bp, Artificial Sequence
  ENSG00000130032_26 (sequence is synthesized)
tgaggacaggccgtgggaagagtcacaggaggttgcttaaggcctgtgatgttcggttcagatgcttcatggtgttctgccaggtggggttgcaccacggtctctgggatggtttctgca

SEQ ID NO: 282797 - DNA, 120 bp, Artificial Sequence
  ENSG00000130032_27 (sequence is synthesized)
gcacattgtagaaaaaagactgtacagcacacagcaggcatcactccttgcgatgcacacttggattttatgaatgccctgtacatatcttttcaaactctgtgtttgtatggaggtgga

SEQ ID NO: 282798 - DNA, 120 bp, Artificial Sequence
  ENSG00000130032_28 (sequence is synthesized)
gtacatatcttttcaaactctgtgtttgtatggaggtggatttgatacaatgctgactctttcgtggctacatttttgctgtttttggacttctatgtgtgtgtgtgtgtgtgtgtgtgt

SEQ ID NO: 282799 - DNA, 120 bp, Artificial Sequence
  ENSG00000130032_29 (sequence is synthesized)
ctgaaacaatagccggtgtgcagctatatttgtaccaggagggatccggtctgaaaagaggaatgtcacctcccctcgcagggctgagtagcctgatgacagggccctgagcaaggaaac

SEQ ID NO: 282800 - DNA, 120 bp, Artificial Sequence
  ENSG00000130032_30 (sequence is synthesized)
gtggcattaactatattggacacccaacccccaaagttgtcactgtttgcctccttgaaaaaggctttggaagaagacaaagcagctccattctgcaggtctccaccctatgcaaccccc

SEQ ID NO: 282801 - DNA, 120 bp, Artificial Sequence
  ENSG00000130032_31 (sequence is synthesized)
ccccgctcacacgcccttttggcatggtgcccctggcccaggcttctgttctgtgggtgtcagcagctgaaagaaatctgagtactcctgggcatggttttttttttttttttttttttt

SEQ ID NO: 282802 - DNA, 85 bp, Artificial Sequence
  ENSG00000130032_32 (sequence is synthesized)
agatgtgtgactattgactttgggtatcgcgggactagttaattagatgtttttcatttttcaaaaagaaaaggttttaaaaatt

SEQ ID NO: 282803 - DNA, 120 bp, Artificial Sequence
  ENSG00000130032_33 (sequence is synthesized)
gatgtttttcatttttcaaaaagaaaaggttttaaaaattttcttgaaatgtgactgtcacttgttttcaaccaaaaactttttaagattttttaaaagaaaaatcgaaatcctgtccct

SEQ ID NO: 282804 - DNA, 120 bp, Artificial Sequence
  ENSG00000130032_34 (sequence is synthesized)
cccccgcttcccatcgcctccggttttcaaaatgaaagcacaagtgcaagagtggggtgcacaggtgcctggcgtgtacacaccacccacacagctgcgtccagccctggctgagggaga

SEQ ID NO: 282805 - DNA, 120 bp, Artificial Sequence
  ENSG00000130032_35 (sequence is synthesized)
cgcagtgctgagcagtcagccccgggaggcctctttttcaacttccaatcccactgccatgaatgtgaattccttagggtgcttccaaaaacaggagtctgcctgatctgttggacattg

SEQ ID NO: 282806 - DNA, 120 bp, Artificial Sequence
  ENSG00000130032_36 (sequence is synthesized)
cctttttggtagcccgaatatgaggaattcaggacaggaaagtgtctttttgtcaagtagtcagagccggatgcttcccctctcccagtgggtggagcatcgcaacccccagccagagtt

SEQ ID NO: 282807 - DNA, 120 bp, Artificial Sequence
  ENSG00000130032_37 (sequence is synthesized)
gatcttttgacaacccagtgacatcccatgagaaggaagaaaaaaaattcaacactgcctctagattgttattttgtccaagagagagatcatggagagagtctctctcgctcacggagg

SEQ ID NO: 282808 - DNA, 120 bp, Artificial Sequence
  ENSG00000130032_38 (sequence is synthesized)
ctctgtctttctaggagtatgtgtgtgtgctgtctcatgtgtggacactcacagttgaggctgagatggatatcttggcagcagagctgctggtctaggtggcttttcagcttgacaagt

SEQ ID NO: 282809 - DNA, 120 bp, Artificial Sequence
  ENSG00000130032_39 (sequence is synthesized)
aatgaagctccatttcaggacttcatcgattccgaaacaagcacagccccccaccccccgccacggaactctactaatactaatcactataattagctaatttaaaagtacggtaatcag

SEQ ID NO: 282810 - DNA, 120 bp, Artificial Sequence
  ENSG00000130032_40 (sequence is synthesized)
actgcttgcaactattttaaaagcccattaatttgaagcccactacttcagaacttcgagaaaatcacaacttaagacaattcacagtagctgtgattctggctacataaaaatatttga

SEQ ID NO: 282811 - DNA, 120 bp, Artificial Sequence
  ENSG00000130032_41 (sequence is synthesized)
aatattcttccctttagtcaatgttcagggtcttttgtgtaagagaaatccagtttaaaatgagtacccttttcaaagaaaaggctcaagatattaaggatcccttcaccgtgccttcag

SEQ ID NO: 282812 - DNA, 120 bp, Artificial Sequence
  ENSG00000130032_42 (sequence is synthesized)
ctttgcagttcagcacttctcgtatgtacagggtgatctcttgttctctctccatcacagggatgttggatattgcagcctttcactctactccgttatttatcctgtgaataacatagt

SEQ ID NO: 282813 - DNA, 120 bp, Artificial Sequence
  ENSG00000130032_43 (sequence is synthesized)
ttgtgaactagactgcaatttaaactaatacacatgatgtatctttctaaatattctgtaaagcagatgcttcgctgtcagactggccgctccatcattcgcctccaaatattcaaacgt

SEQ ID NO: 282814 - DNA, 120 bp, Artificial Sequence
  ENSG00000130032_44 (sequence is synthesized)
gggagcttttcctttcagactgtgggcagcgagtctctctctagcaagaatttatctgacaaacatacccaaatagcacaccctctcaagctcaatgcctcaacagttgtttcactgtac

SEQ ID NO: 282815 - DNA, 120 bp, Artificial Sequence
  ENSG00000130032_45 (sequence is synthesized)
tgatatctgactgctgaacagtgcctgcccttcacccacccccagcccgagcattaacacagatcttcaggattgggacaaatcccccagctgcttttgcctctcaatccatctcccctc

SEQ ID NO: 282816 - DNA, 120 bp, Artificial Sequence
  ENSG00000130032_46 (sequence is synthesized)
atcgataccaatttcccaggcctgaacacatctgttattttgctctgacattgtgaatttgtgacagtggaaaccctgatatgtgcaactgagcttatagaaataattactgtgaaatgg

SEQ ID NO: 282817 - DNA, 120 bp, Artificial Sequence
  ENSG00000130032_47 (sequence is synthesized)
attaattttgataccactttaaactgtgcttgtattcatgtgttgacccttgtcagctgggaaatctgtacattcagtatatgtcagcatttcattggagcctgggggcaacagacaaac

SEQ ID NO: 282818 - DNA, 120 bp, Artificial Sequence
  ENSG00000130032_48 (sequence is synthesized)
ttgcttctgatttctctctctctctctttctttttataattgttgaatttggctgttacattttgtctccttctttacaagaaaacaataataataaagagcaaatggcatccacttgaa

SEQ ID NO: 282819 - DNA, 120 bp, Artificial Sequence
  ENSG00000130032_49 (sequence is synthesized)
ggcgcagcagcgaggtggcgggctgcgtgcgcaaacagggcggccgccttctgggcccggagaacgagaagtgagaccctgcagctgagggagcatcatggcaggcctcagtagggctct

SEQ ID NO: 282820 - DNA, 120 bp, Artificial Sequence
  ENSG00000130032_50 (sequence is synthesized)
catgtaccaccctggggctggttctgggagtaggagtagcctcaggaatagcaagaacaggccctggtaatgcagaccaatcagaagcaaggaaagacacccagcctaaggcatagccac

SEQ ID NO: 282821 - DNA, 80 bp, Artificial Sequence
  ENSG00000130032_51 (sequence is synthesized)
gcagcgcgacgattgcggcctggcgatcggggcactgcggtcgtggcgcgcgaggcgcggggcgcgaggccagccctgga

SEQ ID NO: 282822 - DNA, 120 bp, Artificial Sequence
  ENSG00000130035_0 (sequence is synthesized)
gttatctccctgagcaacctgtggaaagccgctgagcaacctgtggaaagccgctgagcggttatcctctcggggcataaagacaaagaaggcaataaggagactttgctcctcagaggc

SEQ ID NO: 282823 - DNA, 120 bp, Artificial Sequence
  ENSG00000130035_1 (sequence is synthesized)
acaggggagaccaactcaactggcacctagaactctctttcccacaaaagctaggctggttctgattcttaacctgctccagcagtgacacactcagtcccacagggagtggacgacccc

SEQ ID NO: 282824 - DNA, 120 bp, Artificial Sequence
  ENSG00000130035_2 (sequence is synthesized)
ctcagtcccacagggagtggacgacccccaggaagaagatgatgttttggaggaaactccccaaagccctcttcattgggctgactctggccattgctgtcaatctccttctggtatttt

SEQ ID NO: 282825 - DNA, 120 bp, Artificial Sequence
  ENSG00000130035_3 (sequence is synthesized)
ctagcaaggggactttacaaaacctgtttacgggtggtctccacagggagcttcctttacatctgaataaacgctacggggcagtgataaagagactctcccacttggaggtggaattgc

SEQ ID NO: 282826 - DNA, 120 bp, Artificial Sequence
  ENSG00000130035_4 (sequence is synthesized)
aggatctgaaagaaagtatgaaattagctctgaggcaacaagaaaatgtgaacagcacactgaagagggcgaaagatgaagtacgccctcttctaaaggcaatggaaaccaaggtgaatg

SEQ ID NO: 282827 - DNA, 120 bp, Artificial Sequence
  ENSG00000130035_5 (sequence is synthesized)
agacaaagaagcacaaaacccaaatgaaactcttcccacactcacagcttttcaggcaatggggcgaggatctttctgaggcccagcagaaggcggcccaggacctcttccggaagtttg

SEQ ID NO: 282828 - DNA, 120 bp, Artificial Sequence
  ENSG00000130035_6 (sequence is synthesized)
gttacaacgcgtacctcagcaaccagctgcctctcaatcgcaccatccccgacacgcgagactacagatgtcttcggaagacatatccttcccaactcccatccctcagtgtcattctca

SEQ ID NO: 282829 - DNA, 120 bp, Artificial Sequence
  ENSG00000130035_7 (sequence is synthesized)
tattcgtgaatgaagctctgtccattatacaacgggccatcaccagtatcatcaaccggacgccctctcgattgttgaaggaaatcatcttggtggatgatttcagctcaaatggagaac

SEQ ID NO: 282830 - DNA, 120 bp, Artificial Sequence
  ENSG00000130035_8 (sequence is synthesized)
taaaggtacacttggatgagaagattaagctttacaaccagaagtatccaggactactgaaaataatacggcatcctgaaaggaaaggtcttgctcaagcccgcaacactggctgggaag

SEQ ID NO: 282831 - DNA, 120 bp, Artificial Sequence
  ENSG00000130035_9 (sequence is synthesized)
gaagtcaatgttgggtgggcagagccaatcttggctcggattcaggaggaccgcactgtgattgtgtctcctgtgtttgacaacattcgttttgacaccttcaaactggataagtatgaa

SEQ ID NO: 282832 - DNA, 120 bp, Artificial Sequence
  ENSG00000130035_10 (sequence is synthesized)
ctggcagttgatgggtttaactgggaactctggtgccgctacgatgcactgccacaagcctggattgatctgcatgatgtcactgccccagtgaagagtccttcaatcatgggcatcctg

SEQ ID NO: 282833 - DNA, 120 bp, Artificial Sequence
  ENSG00000130035_11 (sequence is synthesized)
gctgctaacaggcacttcctgggagagatcgggtctctggatggtggaatgctcatctatggaggagagaacgtggagcttagcctgagggtgtggcagtgtggagggaaggtcgagatt

SEQ ID NO: 282834 - DNA, 120 bp, Artificial Sequence
  ENSG00000130035_12 (sequence is synthesized)
ttgccctgttcccggattgcccacctagagagacaccacaagccctacgccttggatctcaccgctgccttgaagcgcaatgctctgcgagtggccgaaatctggatggatgagcacaaa

SEQ ID NO: 282835 - DNA, 120 bp, Artificial Sequence
  ENSG00000130035_13 (sequence is synthesized)
cacatggtctacttggcctggaacatacctctccagaactctggaatagattttggagacgtttcttccagaatggcactccgggaaaaactgaaatgtaaaacttttgactggtacctg

SEQ ID NO: 282836 - DNA, 120 bp, Artificial Sequence
  ENSG00000130035_14 (sequence is synthesized)
aaaaatgtttatccactcttgaagccactccacaccatcgtgggctatggaagaatgaaaaacctattggatgaaaatgtctgcttggatcagggacccgttccaggcaacacccccatc

SEQ ID NO: 282837 - DNA, 120 bp, Artificial Sequence
  ENSG00000130035_15 (sequence is synthesized)
atgtattactgccatgaattcagctcacagaatgtctactatcacctaactggggagctctatgtgggacaactgattgcagaggccagtgctagtgatcgctgcctgacagaccctggc

SEQ ID NO: 282838 - DNA, 120 bp, Artificial Sequence
  ENSG00000130035_16 (sequence is synthesized)
aaggcggagaagcccaccttagaaccatgctccaaggcagctaagaatagactgcatatatattgggattttaaaccgggaggagctgtcataaacagagataccaagcggtgtctggag

SEQ ID NO: 282839 - DNA, 120 bp, Artificial Sequence
  ENSG00000130035_17 (sequence is synthesized)
atgaagaaggatcttttgggtagccacgtgcttgtgctccagacctgtagcacgcaagtgtgggaaatccagcacactgtcagagactggggtcagaccaacagccagtgatcctcagat

SEQ ID NO: 282840 - DNA, 120 bp, Artificial Sequence
  ENSG00000130035_18 (sequence is synthesized)
ggtgctggatctgggtcatcaattcttgcaagtggaatggcttctactcctaacactcccagcttctttctcaatgagaaagaaagcatgtgtatgtctgtttatggcgacttcaggtgg

SEQ ID NO: 282841 - DNA, 120 bp, Artificial Sequence
  ENSG00000130035_19 (sequence is synthesized)
cttaggtatcatggagttcccatctccgcagaggcaggctcttcccagctccacgagaggcggagaattgcaacttcttcctctctgggaacggcctatctagctcctgggaggaatctc

SEQ ID NO: 282842 - DNA, 120 bp, Artificial Sequence
  ENSG00000130035_20 (sequence is synthesized)
aaagatctttcttcttaagacatcgaagaaaaactgagaggctgtagctcgacctagtttctgtgaagaattttgtcaagtgatccctctcggaccctgagcctctttatttggattttg

SEQ ID NO: 282843 - DNA, 120 bp, Artificial Sequence
  ENSG00000130035_21 (sequence is synthesized)
tgccttgagcaccaagagaatatgcactctgggttgcctggacagctggggtggtgattcacaggaagggtccaagccatcactacacctgactcaagccggaaagagctcccagaggac

SEQ ID NO: 282844 - DNA, 120 bp, Artificial Sequence
  ENSG00000130035_22 (sequence is synthesized)
ttcctggagctgccagcctcagcctgagatgcgggatattcgtccccaaggagcgaggagggacagctcgccttctttgcaggaaaaatgctggcaggtggtgcaagcaaggacatctat

SEQ ID NO: 282845 - DNA, 120 bp, Artificial Sequence
  ENSG00000130035_23 (sequence is synthesized)
gcatagaattctgacagcagctggaccctcaacttcttcagaagacgagaaccctgcctggcaccgctggcaggcatctggcctgacaccgctctggaggcctcccacaagcagcaacca

SEQ ID NO: 282846 - DNA, 120 bp, Artificial Sequence
  ENSG00000130035_24 (sequence is synthesized)
agccagaaaaagttgagaccagacccgttgtccctaaagatggggcccagaatgttggggtgaagctgtaggaacagggtgaaagctggtggtgtgagcaaagagaccagctatggggtg

SEQ ID NO: 282847 - DNA, 120 bp, Artificial Sequence
  ENSG00000130035_25 (sequence is synthesized)
caaataaacacaaggcaaagtctcagaggctgtgcattatgccatgagaaaacgtcgacggccaagttaggcagacaagccaagcggtctccacaagagtaggcagggatccaaaattca

SEQ ID NO: 282848 - DNA, 120 bp, Artificial Sequence
  ENSG00000130035_26 (sequence is synthesized)
gagcacctgcagcttgctgggcatcctcactacacaggaggatgtgatggccacacatagatcaccaggaagagggcttgatcaccctctgccatgagccggcccacagataggggacat

SEQ ID NO: 282849 - DNA, 120 bp, Artificial Sequence
  ENSG00000130035_27 (sequence is synthesized)
tctgcaagaaagtaagatgcgtaacccatgatctaagagttatctgcctctgatagacacacgagtgggcaaatatcaagggcagagttatttttttacatggacttcccagaggccaga

SEQ ID NO: 282850 - DNA, 120 bp, Artificial Sequence
  ENSG00000130035_28 (sequence is synthesized)
tgatgctgtgtgcggggtctcccaggtaacagtaaggatgttctttctagtcacccgcattgttcttgcaactgacagctgttctctcttggcctgtcctcagtggaagggggtaatgct

SEQ ID NO: 282851 - DNA, 120 bp, Artificial Sequence
  ENSG00000130035_29 (sequence is synthesized)
acttcttaacaatcaaacaagcccttgcactcttctaggatctctggtgggggacattcccactgctagtcactcattcacgtatcttttccacttcctgacaaaatgaaggactaggat

SEQ ID NO: 282852 - DNA, 120 bp, Artificial Sequence
  ENSG00000130035_30 (sequence is synthesized)
gattttcttgtgtggaattttgtttcctaatgaggtgttgctgaggctccaggttgctttaatgcccacaccctcccagattgtcctgagtgctggggcttcatgacgttgctgcagaag

SEQ ID NO: 282853 - DNA, 120 bp, Artificial Sequence
  ENSG00000130035_31 (sequence is synthesized)
tctggacagcagggaccgtagccttcgccatgtgtctagcagagcacctgatacagaattgtcactcatacaatgtgtggtgaatgaatgagtgaggaaataaatgaaggaagtgctgga

SEQ ID NO: 282854 - DNA, 120 bp, Artificial Sequence
  ENSG00000130035_32 (sequence is synthesized)
aagcttactggtgaggcaagtgtgcgtctatttccatggcgccctggctcgcggcagcccctggctgggcgaggggtgtgatgtgggagtggggtgggagggggcagcaggcggggcctg

SEQ ID NO: 282855 - DNA, 120 bp, Artificial Sequence
  ENSG00000130035_33 (sequence is synthesized)
ccacgtcacttggagagtgtgtgttgggaaggaagggcagagcggagagccgagccgctgcagctgcggcggcggcagcgaagccttgagccgtggggaggtgggtccccgcgctcgggc

SEQ ID NO: 282856 - DNA, 120 bp, Artificial Sequence
  ENSG00000130035_34 (sequence is synthesized)
gcctgcggcgcggctcctagggaggaggtggcggctgtggcggccggaaccgcgaccttggccggacccagccccgcggtggacgcagggcggaggccgagccccgccaggagtctttgc

SEQ ID NO: 282857 - DNA, 120 bp, Artificial Sequence
  ENSG00000130035_35 (sequence is synthesized)
gaggccgagccccgccaggagtctttgccgagccggagggaggcgcatctggcgcttcggtaccagcggcagccgggggtccggagcggctggaggagcgcagtgggaactgggaagagc

SEQ ID NO: 282858 - DNA, 120 bp, Artificial Sequence
  ENSG00000130035_36 (sequence is synthesized)
tagcccggctggagggcggacctctgcgtccgggagccgggtctcaggcaccgctgggggcgaagccacgcgtcttttcgggcagccaatttcacacgcgcctgtgtgcggttccgggca

SEQ ID NO: 282859 - DNA, 120 bp, Artificial Sequence
  ENSG00000130035_37 (sequence is synthesized)
tcccagtaagctctagcacccgggcgcgggtaacgggaagcgcagaaccaaatccccagcgcccaggtcacctccccagacccagccttgcagggaccagggctttagggctcacggacc

SEQ ID NO: 282860 - DNA, 120 bp, Artificial Sequence
  ENSG00000130035_38 (sequence is synthesized)
caacggccaggtcagaccgcgaaccgggaggagcgcgggccccaccctaaagagggcgcagccgggagctggggagcgggtgccgcgctccagagattgtgtcgtgggcgccgtcctagt

SEQ ID NO: 282861 - DNA, 120 bp, Artificial Sequence
  ENSG00000130035_39 (sequence is synthesized)
ggcggggagcgcacctccgagggggcatgagatcggagaaatcccttacgctggcggcgccgggggaggtccgtgggccggagggagagcaacaggatgcgggagacttcccggaggccg

SEQ ID NO: 282862 - DNA, 120 bp, Artificial Sequence
  ENSG00000130035_40 (sequence is synthesized)
gcgggggcgggggctgctgtagtagcgagcggctggtgatcaatatctccgggctgcgctttgagacacaattgcgcaccctgtcgctgtttccggacacgctgctcggagaccctggcc

SEQ ID NO: 282863 - DNA, 120 bp, Artificial Sequence
  ENSG00000130035_41 (sequence is synthesized)
ggcgagtccgcttcttcgaccccctgaggaacgagtacttcttcgaccgcaaccggcccagcttcgacgccatcctctactactaccagtctgggggccgcctgcggaggccggtcaacg

SEQ ID NO: 282864 - DNA, 120 bp, Artificial Sequence
  ENSG00000130035_42 (sequence is synthesized)
tgcccctggacattttcctggaggagatccgcttctaccagctgggggacgaggccctggcggccttccgggaggacgagggctgcctgcccgaaggtggcgaggacgagaagccgctgc

SEQ ID NO: 282865 - DNA, 120 bp, Artificial Sequence
  ENSG00000130035_43 (sequence is synthesized)
cctcccagcccttccagcgccaggtgtggctgctctttgagtacccagagagctctgggccggccaggggcatcgccatcgtctccgtgttggtcattctcatctccatagtcatctttt

SEQ ID NO: 282866 - DNA, 120 bp, Artificial Sequence
  ENSG00000130035_44 (sequence is synthesized)
gcctggagaccttaccccagttccgtgtagatggtcgaggtggaaacaatggtggtgtgagtcgagtctccccagtttccagggggagtcaggaggaagaggaggatgaagacgattcct

SEQ ID NO: 282867 - DNA, 120 bp, Artificial Sequence
  ENSG00000130035_45 (sequence is synthesized)
acacatttcatcatggcatcacccctggggaaatggggaccgggggctcctcctcactcagtactcttgggggctccttctttacagaccccttctttctggtggagacgctgtgcattg

SEQ ID NO: 282868 - DNA, 120 bp, Artificial Sequence
  ENSG00000130035_46 (sequence is synthesized)
tctggttcacttttgagctcctggtgcgcttctccgcctgccctagcaagccggccttcttccggaacatcatgaacatcattgacttggtggctatcttcccctacttcatcaccctgg

SEQ ID NO: 282869 - DNA, 120 bp, Artificial Sequence
  ENSG00000130035_47 (sequence is synthesized)
gcactgagctggtgcagcagcaggagcagcaaccagccagtggaggaggcggccagaatgggcagcaggccatgtccctggccatcctccgagtcatccgcctggtccgggtgttccgca

SEQ ID NO: 282870 - DNA, 120 bp, Artificial Sequence
  ENSG00000130035_48 (sequence is synthesized)
tcttcaagctctcccgccactccaaggggctgcagatcctgggcaagaccttgcaggcctccatgagggagctggggctgctcatcttcttcctcttcatcggggtcatcctcttctcca

SEQ ID NO: 282871 - DNA, 120 bp, Artificial Sequence
  ENSG00000130035_49 (sequence is synthesized)
gtgccgtctacttcgcagaggctgacgatgacgattcgctttttcccagcatcccggatgccttctggtgggcagtggttacaatgaccacggtaggttacggggacatgtaccccatga

SEQ ID NO: 282872 - DNA, 120 bp, Artificial Sequence
  ENSG00000130035_50 (sequence is synthesized)
ctgtggggggaaagatcgtgggctcgctgtgtgccatcgctggggtcctcaccattgccctgcctgtgcccgtcatcgtctccaacttcaactacttctaccaccgggagacggagcagg

SEQ ID NO: 282873 - DNA, 120 bp, Artificial Sequence
  ENSG00000130035_51 (sequence is synthesized)
aggagcaaggccagtatacccacgtcacttgtgggcagcctgcgccggacctgagggcaactgacaacggacttggcaagcctgacttccccgaggctaaccgggaacggagacccagct

SEQ ID NO: 282874 - DNA, 120 bp, Artificial Sequence
  ENSG00000130035_52 (sequence is synthesized)
accttcctacaccacatcgggcctatgcagagaaaagaatgctcacggaggtctgacccatgcaggcagggcctgcaggaggggagcactgagctaacagtctcttaggcttccttctca

SEQ ID NO: 282875 - DNA, 120 bp, Artificial Sequence
  ENSG00000130035_53 (sequence is synthesized)
tttccactactcactctagcttcagttgacttcttgactctctcccctacacccactacctggcatccaggaccaaatacctggactatcaaccttgttgcttaatccctgcagcattca

SEQ ID NO: 282876 - DNA, 120 bp, Artificial Sequence
  ENSG00000130035_54 (sequence is synthesized)
aggttaatccatctaagtgacatttttgaaattccagcggtgccacccaatcatgcccagcttctgtcatatgaatgagatatacatttatgtctgaccttccctcaagactgatttttc

SEQ ID NO: 282877 - DNA, 120 bp, Artificial Sequence
  ENSG00000130035_55 (sequence is synthesized)
atgtctgggacttacaatatctcaaggaacagcaatgtcaacaggatggaaaccagccctatctgagtcttcgctccctccttagtgttctttgctttgggtcatgtgcgtttcctagct

SEQ ID NO: 282878 - DNA, 120 bp, Artificial Sequence
  ENSG00000130035_56 (sequence is synthesized)
atgacccttggtagagtctttatttgcatagcctcaaaataggttattcgtttctaaacttggatggaattagagaatacaatcaaactttaccacttggaggacacggggttagtccag

SEQ ID NO: 282879 - DNA, 120 bp, Artificial Sequence
  ENSG00000130035_57 (sequence is synthesized)
gaccaaagaggccaatggatttttcaaagtgtgccccagcacaagaggcactggtgttcggtctacatttagttctccccactctgatcccctgactctccagcttccaggaaggttcct

SEQ ID NO: 282880 - DNA, 120 bp, Artificial Sequence
  ENSG00000130035_58 (sequence is synthesized)
tctcagagccaaatactctttgtgcaagtgccttcctgagcagaagaactggagaaagggaaccacagagccaggaggaatgtctgagcagagtcaagcaactggcttgaccacagtctg

SEQ ID NO: 282881 - DNA, 120 bp, Artificial Sequence
  ENSG00000130035_59 (sequence is synthesized)
aagcaaggtgccacttaaacagatactgttttctcaaaggggcagaggaatcgtgttgcagatggcagccttttctccttcattttccccacattttctctggccctctaccttgcttcc

SEQ ID NO: 282882 - DNA, 120 bp, Artificial Sequence
  ENSG00000130035_60 (sequence is synthesized)
tgggagtttgatttaggattgctgttgaaggcttcctcaggcaaactccagcttaaagccctagacaggtaaaagcacacattggatggcagcatgggtttcttcccattttatgggcat

SEQ ID NO: 282883 - DNA, 120 bp, Artificial Sequence
  ENSG00000130035_61 (sequence is synthesized)
gaaatatgtggtttagaataaggaacaagcattattcctttgccaacagcctcactctaagaggcttttttgctgagtcaagcaaacacttgcctgctctgccccttggagctgcatttg

SEQ ID NO: 282884 - DNA, 120 bp, Artificial Sequence
  ENSG00000130035_62 (sequence is synthesized)
acctgctctcactggtaaggtgacttggtggcgttcccacttgatttagccattttcttccattgtgagaccactgccatctatccacctgcccacctccccttttgtttctcagtaaca

SEQ ID NO: 282885 - DNA, 120 bp, Artificial Sequence
  ENSG00000130035_63 (sequence is synthesized)
ttgccatttgttttttgcctttgataaactgtgatgtactgttctgagatcttttgggtgcagttctgaaactgaaaggactgttaacatgtttttaattttatatctatgctttcagac

SEQ ID NO: 282886 - DNA, 120 bp, Artificial Sequence
  ENSG00000130035_64 (sequence is synthesized)
tctttgatgataattttttttttaaaaattattctctcgaagagcaacttacgagaggacagccttatgagggtttgcttgagaggcagtgtggcttctgtgactgccagctctaaatct

SEQ ID NO: 282887 - DNA, 120 bp, Artificial Sequence
  ENSG00000130035_65 (sequence is synthesized)
cgatcttgccataactttacagggtaacttgggtccacagtcactctttgtgcctcagtttacccacccattaaatgggaacattactgtcttcccctccctacctcatggggaatgtct

SEQ ID NO: 282888 - DNA, 120 bp, Artificial Sequence
  ENSG00000130035_66 (sequence is synthesized)
gggaagctggggacattgctatgcaaatgtgtgaatcttagtcatggatttgatttttagttatccccatacccccataggcaaggccttcccccagagttcctgctttggatccaaagc

SEQ ID NO: 282889 - DNA, 120 bp, Artificial Sequence
  ENSG00000130035_67 (sequence is synthesized)
ctgagaataggccattatggaccattggctccctaaatccctccttggcctcttggactgagcccctcagcctttcttcttacccttcagaaaggagagttctctttagatatgttcagg

SEQ ID NO: 282890 - DNA, 120 bp, Artificial Sequence
  ENSG00000130035_68 (sequence is synthesized)
gggatccttccatggctggaggtcaccttgactgggggcttggcttctccaaacctgaaacacagtagaagatagagatgtttatgatgcaaaaacctgctctgaggtcagaaagtgcta

SEQ ID NO: 282891 - DNA, 120 bp, Artificial Sequence
  ENSG00000130035_69 (sequence is synthesized)
gttttccaaatctctcccattgctgctggctatctggggaaagaagagaaaagcccattccagaggcagaagggaagctcccagccgagggtaaaagttgagacctgtatgcatgtatct

SEQ ID NO: 282892 - DNA, 120 bp, Artificial Sequence
  ENSG00000130035_70 (sequence is synthesized)
ctgtatatgtgtatgtaatcaccctcatcaccatccctgagaaaacattttcttttcaagtcagagcacgcctgaaagggtttgtggagagcccagctcaccagggactctggttgccgt

SEQ ID NO: 282893 - DNA, 120 bp, Artificial Sequence
  ENSG00000130035_71 (sequence is synthesized)
agcaaccttccagactgttctctctatcttctgctttgggcatcaagggagaccaggggactacatcttcccagcttctcaaatgggagcacctcccacatcgtggcttaggggctggga

SEQ ID NO: 282894 - DNA, 120 bp, Artificial Sequence
  ENSG00000130035_72 (sequence is synthesized)
gtgccagggcacggatgtgggacttttggaaaatgtggaggaagcagggcctcaaagcttcctgtctggacttttcttcctagtttccccacccagtcattgaagctgcctcatcttact

SEQ ID NO: 282895 - DNA, 120 bp, Artificial Sequence
  ENSG00000130035_73 (sequence is synthesized)
cctgattcttcagaaatttgaatgttaagcaaccagttaaaccaacgtcagtattaattttttcaagctgtcgaggggagcccttagaggggacaacttcttggagtggcggccaagctg

SEQ ID NO: 282896 - DNA, 120 bp, Artificial Sequence
  ENSG00000130035_74 (sequence is synthesized)
cgtccccagcttccctgggaaggtcgtgatatatatcaaatgccattcttggaaactccttgaaataaccagcatcttttggctgttacgtggggagagaaggaggaggttggaagttta

SEQ ID NO: 282897 - DNA, 120 bp, Artificial Sequence
  ENSG00000130035_75 (sequence is synthesized)
tctttgacttctgcccacgatgtttagccttccttcccgacagctactgtcgccatctgccccacacctcctccccagctcatctgcttggggactccccaggctgccgggggccattcc

SEQ ID NO: 282898 - DNA, 120 bp, Artificial Sequence
  ENSG00000130035_76 (sequence is synthesized)
acgtgagaggctgggccctcctcaggccggcagcatgacacctcttcaggtagcactaattctccctcctgcctggactgtcctgagagatgcagaaaatagataagtgacttttaaaca

SEQ ID NO: 282899 - DNA, 120 bp, Artificial Sequence
  ENSG00000130037_0 (sequence is synthesized)
agagaggggcggctgaaggttgcatctgctggaaggaggcttttcggctgcttggtaacgggctgccagaagagagagaggcagagagcagggcagcggcttcttgacgtcagggccaag

SEQ ID NO: 282900 - DNA, 120 bp, Artificial Sequence
  ENSG00000130037_1 (sequence is synthesized)
cgaggggatcgcgccagcaaccccagctctccccagagaggggccggccgaccgctggagcggagcctgacgccaggcgcccgcggagcgtgagtagggggcgcgggagccggtcagctg

SEQ ID NO: 282901 - DNA, 120 bp, Artificial Sequence
  ENSG00000130037_2 (sequence is synthesized)
gggcgcagcatgccctctgctcccgcgccatggagatcgccctggtgcccctggagaacggcggtgccatgaccgtcagaggaggcgatgaggcccgggcaggctgcggccaggccacag

SEQ ID NO: 282902 - DNA, 120 bp, Artificial Sequence
  ENSG00000130037_3 (sequence is synthesized)
ggggagagctccagtgtcccccgacggctgggctcagcgatgggcccaaggagccggcgccaaaggggcgcggcgcgcagagagacgcggactcgggagtgcggcccttgcctccgctgc

SEQ ID NO: 282903 - DNA, 120 bp, Artificial Sequence
  ENSG00000130037_4 (sequence is synthesized)
cggacccgggagtgcggcccttgcctccgctgccagaggagctgccacggcctcgacggccgcctcccgaggacgaggaggaagaaggcgatcccggcctgggcacggtggaggaccagg

SEQ ID NO: 282904 - DNA, 120 bp, Artificial Sequence
  ENSG00000130037_5 (sequence is synthesized)
ctctgggcacggcgtccctgcaccaccagcgcgtccacatcaacatctccgggctgcgctttgagacgcagctgggcaccctggcgcagttccccaacacactcctgggggaccccgcca

SEQ ID NO: 282905 - DNA, 120 bp, Artificial Sequence
  ENSG00000130037_6 (sequence is synthesized)
agcgcctgcgctacttcgaccccctgaggaacgagtacttcttcgaccgcaaccggcccagcttcgacggtatcctctactactaccagtccgggggccgcctgcggaggccggtcaacg

SEQ ID NO: 282906 - DNA, 120 bp, Artificial Sequence
  ENSG00000130037_7 (sequence is synthesized)
tctccctggacgtgttcgcggacgagatacgcttctaccagctgggggacgaggccatggagcgcttccgcgaggatgagggcttcattaaagaagaggagaagcccctgccccgcaacg

SEQ ID NO: 282907 - DNA, 120 bp, Artificial Sequence
  ENSG00000130037_8 (sequence is synthesized)
agttccagcgccaggtgtggcttatcttcgagtatccggagagctctgggtccgcgcgggccatcgccatcgtctcggtcttggttatcctcatctccatcatcaccttctgcttggaga

SEQ ID NO: 282908 - DNA, 120 bp, Artificial Sequence
  ENSG00000130037_9 (sequence is synthesized)
ccctgcctgagttcagggatgaacgtgagctgctccgccaccctccggcgccccaccagcctcccgcgcccgcccctggggccaacggcagcggggtcatggccccgccctctggcccta

SEQ ID NO: 282909 - DNA, 120 bp, Artificial Sequence
  ENSG00000130037_10 (sequence is synthesized)
cggtggcaccgctcctgcccaggaccctggccgaccccttcttcatcgtggagaccacgtgcgtcatctggttcaccttcgagctgctcgtgcgcttcttcgcctgccccagcaaggcag

SEQ ID NO: 282910 - DNA, 120 bp, Artificial Sequence
  ENSG00000130037_11 (sequence is synthesized)
ggttctcccggaacatcatgaacatcatcgatgtggtggccatcttcccctacttcatcaccctgggcaccgaactggcagagcagcagccagggggtggaggaggcggccagaatgggc

SEQ ID NO: 282911 - DNA, 120 bp, Artificial Sequence
  ENSG00000130037_12 (sequence is synthesized)
tcatccgcctggtccgggtgttccgcatcttcaagctctcccgccactccaaggggctgcagatcctgggcaagaccttgcaggcctccatgagggagctggggctgctcatcttcttcc

SEQ ID NO: 282912 - DNA, 120 bp, Artificial Sequence
  ENSG00000130037_13 (sequence is synthesized)
tcttcatcggggtcatcctcttctccagtgccgtctacttcgcagaggctgacaaccagggaacccatttctctagcatccctgacgccttctggtgggcagtggtcaccatgaccactg

SEQ ID NO: 282913 - DNA, 120 bp, Artificial Sequence
  ENSG00000130037_14 (sequence is synthesized)
tgggctacggggacatgaggcccatcactgttgggggcaagatcgtgggctcgctgtgtgccatcgccggggtcctcaccattgccctgcctgtgcccgtcatcgtctccaacttcaact

SEQ ID NO: 282914 - DNA, 120 bp, Artificial Sequence
  ENSG00000130037_15 (sequence is synthesized)
acttctaccaccgggaaacggatcacgaggagccggcagtccttaaggaagagcagggcactcagagccaggggccggggctggacagaggagtccagcggaaggtcagcgggagcaggg

SEQ ID NO: 282915 - DNA, 120 bp, Artificial Sequence
  ENSG00000130037_16 (sequence is synthesized)
gatccttctgcaaggctggggggaccctggagaatgcagacagtgcccgaaggggcagctgccccctagagaagtgtaacgtcaaggccaagagcaacgtggacttgcggaggtcccttt

SEQ ID NO: 282916 - DNA, 120 bp, Artificial Sequence
  ENSG00000130037_17 (sequence is synthesized)
atgccctctgcctggacaccagccgggaaacagatttgtgaaaggagattcaggcagactggtggcagtggagtagggaatgggaggcttgctgaacatggatatctacattataccgca

SEQ ID NO: 282917 - DNA, 120 bp, Artificial Sequence
  ENSG00000130037_18 (sequence is synthesized)
gagtatttgaagtcacactgtaacctcagtctacccctctcctttcactcctttcctccctccctcgatccccccattttctctattctttccatgacacccaagggtcgcctattttta

SEQ ID NO: 282918 - DNA, 120 bp, Artificial Sequence
  ENSG00000130037_19 (sequence is synthesized)
aaaagtaccacattccatgacgcaggagctgtggaaatggtgagcgctgtgagatggatgtatttgtagccagtctcctatacccagcagagggataacccaaacaaaaatgactctaaa

SEQ ID NO: 282919 - DNA, 120 bp, Artificial Sequence
  ENSG00000130037_20 (sequence is synthesized)
tagcccagatcccaagagattatgtaactcctccatccatgtgttccaaatttgctttacatatgattgtatttgtgtataggggaaaatattatttttatgcctggtaagtggcttttt

SEQ ID NO: 282920 - DNA, 120 bp, Artificial Sequence
  ENSG00000130037_21 (sequence is synthesized)
gtactgtagttcagatagagatattttgggtatattttcaagatacatgttgtatttatggaagaaagagttgtcctgatgtttttctgtgttacttatattagagtcagagatcttggt

SEQ ID NO: 282921 - DNA, 120 bp, Artificial Sequence
  ENSG00000130037_22 (sequence is synthesized)
atgggctgttctgtttcctgtgtctccaagcctctgtcttttctgggatgtggtattggtgctttgtgtctagggcagagtatgttcttgaagaaaggcaaatctgactttttctgtgcg

SEQ ID NO: 282922 - DNA, 120 bp, Artificial Sequence
  ENSG00000130037_23 (sequence is synthesized)
ccttaaacaattcttgtaactttcttcaaaaagcattttaatgatattggaggaatacttctgataatttattgtctttatttttatcccaggaaataaaaggttaccttgttgaggcaa

SEQ ID NO: 282923 - DNA, 120 bp, Artificial Sequence
  ENSG00000130038_0 (sequence is synthesized)
ggagcggaaagagtcgggcggagcaggcggctgcttgacagctgagagccgagcgggcggcgcgggcaggtccacgggaagcctacacgcccaaggtcatgccctgaccacagctgccct

SEQ ID NO: 282924 - DNA, 120 bp, Artificial Sequence
  ENSG00000130038_1 (sequence is synthesized)
tcaggaggctggcacggagccacctggggccattgggctgtttgtcaagggtggggcagcagcaacttgccactcttcctccatgagcccagccagagcctccactgggcacttagcaca

SEQ ID NO: 282925 - DNA, 120 bp, Artificial Sequence
  ENSG00000130038_2 (sequence is synthesized)
agaaaaaccctgcaggagccggatccagagcgctgggattcagcaggagtgccaggagaattcaacacaggtgtgctgcctcctctcctgccaggtgtgtggctgcacaggagtcttgct

SEQ ID NO: 282926 - DNA, 120 bp, Artificial Sequence
  ENSG00000130038_3 (sequence is synthesized)
gatggtggaattcaagtcaccagtggccaaagtaccctccaggtgtgaagagttgcaggtcctccgaggagccgggagctgcaaggttctgaaaaagacttcaagaaactgactaatcgc

SEQ ID NO: 282927 - DNA, 120 bp, Artificial Sequence
  ENSG00000130038_4 (sequence is synthesized)
gatggctgcccctgacgggagggtagtctccagaccccagagacttggtcaggggtctggccaggggccaaaggggagtggagcctgcctgcatcccctggacagcctggagcagaagga

SEQ ID NO: 282928 - DNA, 120 bp, Artificial Sequence
  ENSG00000130038_5 (sequence is synthesized)
gactcaggagcaaacgtcgggccagctagtcatgctgaggaaggcacaggagttctttcagacctgtgatgctgaaggcaagggcttcatcgccaggaaggatatgcagaggctgcataa

SEQ ID NO: 282929 - DNA, 120 bp, Artificial Sequence
  ENSG00000130038_6 (sequence is synthesized)
ggagctaccgctcagcctggaggaactggaggatgtgtttgatgccctggatgctgatggcaatggctatctgaccccacaggagttcactactggatttagtcacttcttcttcagcca

SEQ ID NO: 282930 - DNA, 120 bp, Artificial Sequence
  ENSG00000130038_7 (sequence is synthesized)
gaataacccaagtcaggaagatgcaggtgaacaggtggcccagcgccatgaagagaaggtgtatctgtccagaggggatgaggatctgggcgacatgggcgaagatgaggaagcccagtt

SEQ ID NO: 282931 - DNA, 120 bp, Artificial Sequence
  ENSG00000130038_8 (sequence is synthesized)
ccggatgctgatggacagacttggagcccaaaaggtgttggaagatgaaagtgatgtcaagcagctctggttgcagctgaagaaggaggaacctcatttactgtccaactttgaagactt

SEQ ID NO: 282932 - DNA, 120 bp, Artificial Sequence
  ENSG00000130038_9 (sequence is synthesized)
cctgaccagaatcatctcccagctccaagaagcccatgaggagaagaatgaactggagtgtgccctaaaaaggaaaattgctgcttatgatgaagaaatccagcatctctatgaggagat

SEQ ID NO: 282933 - DNA, 120 bp, Artificial Sequence
  ENSG00000130038_10 (sequence is synthesized)
ggaacaacaaatcaaaagtgagaaggagcagtttctcctgaaggacacagagaggtttcaagcccgcagtcaagagctggagcagaaactgttatgtaaggagcaggagctggagcagct

SEQ ID NO: 282934 - DNA, 120 bp, Artificial Sequence
  ENSG00000130038_11 (sequence is synthesized)
aaggctgagaataccaagctgaaactcactaaccaggagctggcccgggagctggagcggacttcctgggagctccaggatgctcagcagcagttggaaagcctccagcaagaggcctgc

SEQ ID NO: 282935 - DNA, 120 bp, Artificial Sequence
  ENSG00000130038_12 (sequence is synthesized)
aaactccaccaagagaaggagatggaagtgtaccgtgtgacggagagtctacagcgtgagaaggccgggctcctcaagcagctggatttcctaagggaaaggaacaagcaccttcgggat

SEQ ID NO: 282936 - DNA, 120 bp, Artificial Sequence
  ENSG00000130038_13 (sequence is synthesized)
gaacgggacatatgttttcagaaaaataaggcagccaaggcaaacacagctgcttccagggcaagttggaaaaagagatctggctctgtgataggcaaatatgtggacagcagagggatt

SEQ ID NO: 282937 - DNA, 120 bp, Artificial Sequence
  ENSG00000130038_14 (sequence is synthesized)
cttaggagccagtcagaggaggaggaggaggtgtttggcatcccaaggagaagctccctgggcctgagtggatatcccctaacagaagaggagccaggaaccggggagccagggcctggg

SEQ ID NO: 282938 - DNA, 120 bp, Artificial Sequence
  ENSG00000130038_15 (sequence is synthesized)
ggtccgtacccccggccgctccgcagaatcatctccgttgaagaagaccccctgccccagctcctggatggtggctttgagcaacccctgagcaaatgctcagaagaggaagaggtctct

SEQ ID NO: 282939 - DNA, 120 bp, Artificial Sequence
  ENSG00000130038_16 (sequence is synthesized)
gaccagggggtacagggacaaatcccggaggccccacccttgaaactcacccccacatccccccgagggcagcctgttggaaaagaagccctgtgtaaggaggaaagctctccctctgcc

SEQ ID NO: 282940 - DNA, 120 bp, Artificial Sequence
  ENSG00000130038_17 (sequence is synthesized)
cctgaccggctcttcaagattgtgttcgtgggcaattccgcggtggggaagacatccttcctgaggagattctgtgaggaccggttctccccaggcatggcggccactgtgggcattgat

SEQ ID NO: 282941 - DNA, 120 bp, Artificial Sequence
  ENSG00000130038_18 (sequence is synthesized)
taccgtgtgaagacgttgaatgtggacaactctcaggtggccctgcagctgtgggacacggctgggcaggagaggtaccggtgcatcacccagcagttcttcagaaaggcagatggtgtc

SEQ ID NO: 282942 - DNA, 120 bp, Artificial Sequence
  ENSG00000130038_19 (sequence is synthesized)
atcgtcatgtacgatctcacagacaagcagtcgttcctgtcggtccggcggtggctgagcagcgtggaggaagctgtgggagaccgggtgcctgttcttctgctgggtaataagcttgac

SEQ ID NO: 282943 - DNA, 120 bp, Artificial Sequence
  ENSG00000130038_20 (sequence is synthesized)
aacgagaaggagcgggaagtcccccggggcctcggagagcagcttgccacggagaacaatctgatcttctatgaatgcagcgcctactctggtcacaacaccaaagagtccctgctccat

SEQ ID NO: 282944 - DNA, 120 bp, Artificial Sequence
  ENSG00000130038_21 (sequence is synthesized)
ctggccaggttcctcaaggagcaagaagacacagtgagagaggacaccattcaggtcggccaccctgctaagaagaaatcctgctgtggctgatagggtcctacaaggactgcccccagc

SEQ ID NO: 282945 - DNA, 120 bp, Artificial Sequence
  ENSG00000130038_22 (sequence is synthesized)
gggggtactgggagcagccgcctgtgagaaggctgggccaaacaaacaaatgttctgaatgaggataagaaaacagcatttctcctgagggtctctgattttctgtagcctgcccctggc

SEQ ID NO: 282946 - DNA, 120 bp, Artificial Sequence
  ENSG00000130038_23 (sequence is synthesized)
ttgaaaactgtcagcttagcaaagtggactctcaaaccacctggatctcatgttttttgcttgtcagattcattgattgctgcagaataggctcaacatcccacagggtctgcttctctg

SEQ ID NO: 282947 - DNA, 120 bp, Artificial Sequence
  ENSG00000130038_24 (sequence is synthesized)
actgggacaaaagcgctcataagaaactgatgggagcggcttcaccaggggtggcagacaattctggccaggagtgggtgtccgcagtgggcaagaagtgtgggctccatgccaggagca

SEQ ID NO: 282948 - DNA, 120 bp, Artificial Sequence
  ENSG00000130038_25 (sequence is synthesized)
gtggcgacagcttctagaaattgtctagtagcctgacatcctaaagaatgtcctggagagctggaaaagcggttcttccagacacatgcagggagcagcgaaatgagatgcagtagaagg

SEQ ID NO: 282949 - DNA, 120 bp, Artificial Sequence
  ENSG00000130038_26 (sequence is synthesized)
ttgaatccagctgggagcacagtgcaatttagttaagagtgacttctgtggcatctgctggtcgtgggtgagggctgggggaagataatactaatttggccattattacacatgtctttc

SEQ ID NO: 282950 - DNA, 120 bp, Artificial Sequence
  ENSG00000130038_27 (sequence is synthesized)
ttgaatcttcaatcagattgtcaactccttgagggtagtaatggaatattttatgtcttttgcattcttcacaaggtcgggtactcagccattgtttattggttgactatttgatgcatt

SEQ ID NO: 282951 - DNA, 120 bp, Artificial Sequence
  ENSG00000130038_28 (sequence is synthesized)
tgccacccgagttggcctgaggttgctgagtgtatgagtttcctagggctgccttaacaaagtgccaccaactgggtgattaacagaaatgtcaggtctcccagttctagaggcgagagg

SEQ ID NO: 282952 - DNA, 120 bp, Artificial Sequence
  ENSG00000130038_29 (sequence is synthesized)
tctgcaaccaaggtatcagcagggcctgacccctctgtggtgtataggaggcccctccttgcctcgccctggcttctgacgatttgccggccgactgtggtcttccttggcttgcagctg

SEQ ID NO: 282953 - DNA, 120 bp, Artificial Sequence
  ENSG00000130038_30 (sequence is synthesized)
cgtcactccaatccctgcctttatcatcacatggcattctccctgtgtgtgtgtgtttccaaattttcccatttttataaggacaccagccatattaggaaccgccctactccagtatga

SEQ ID NO: 282954 - DNA, 120 bp, Artificial Sequence
  ENSG00000130038_31 (sequence is synthesized)
cctcatcttaactcattacatcttcagcaaccccgtttccaaagaaggtcacattctgaggtactaggggttaggacttcaatgtggagatcacagttcaagctgccacactaagtgagc

SEQ ID NO: 282955 - DNA, 120 bp, Artificial Sequence
  ENSG00000130038_32 (sequence is synthesized)
tcattcacagtgacaagactagggacatacaaagggccggggtgaatatgaatggtgttccatggtgctgcctgaaagtgactggcagcagtgtcagcaggggagcatgtcctctgttct

SEQ ID NO: 282956 - DNA, 120 bp, Artificial Sequence
  ENSG00000130038_33 (sequence is synthesized)
cagcattcactagagaggtgtgctgagctggggcccagctggacacattggatgctgtgctccagaggaggaactgcactcacctatcgctctcctttgtatgggacaagtgggacagag

SEQ ID NO: 282957 - DNA, 120 bp, Artificial Sequence
  ENSG00000130038_34 (sequence is synthesized)
ccttgatggggggaacacaccactggggttccaggcagccttaactatcgaggaatggcaggaaattctgtctgcccagcacctggtgaccctggagctcctcagtttcccgggaagttg

SEQ ID NO: 282958 - DNA, 120 bp, Artificial Sequence
  ENSG00000130038_35 (sequence is synthesized)
agttttggagcagtctcttccagagaggctgggagtgcatcactttccccctggaggtggcggaggctgctgggcccaactagctcattgccaggcaatccagagagagttccagacacc

SEQ ID NO: 282959 - DNA, 120 bp, Artificial Sequence
  ENSG00000130038_36 (sequence is synthesized)
agatactgaacaacctacttgtctccacacctagtaaagcttggatccaatgctgccaacttttctgcctctccagttttggagcccttaatgtgaaggtgcaacccagaagcctgcagg

SEQ ID NO: 282960 - DNA, 120 bp, Artificial Sequence
  ENSG00000130038_37 (sequence is synthesized)
ctgttcgtagcctgtagatgtgttttcttcccagtagctggtgtatacagtgtttttgtattatttttcaaataagcaatacatttgtgtggttcaaaaattaaagcgctatagaaaggt

SEQ ID NO: 282961 - DNA, 120 bp, Artificial Sequence
  ENSG00000130038_38 (sequence is synthesized)
catccttgcctacgtgctggaaaaacgtgcctgctgagagagtgccctcaattcccttggtccccagtgcagtgtttggaccaccaagtagccactctattatgtttgggaaaggaacaa

SEQ ID NO: 282962 - DNA, 120 bp, Artificial Sequence
  ENSG00000130038_39 (sequence is synthesized)
cccagtccttttctttgtcagtcactcacctcccccaaaaggaagggaagcacatcccatcaggagagctgctcttggagcatctcagagtcttttctctcctttctctttctagacccc

SEQ ID NO: 282963 - DNA, 120 bp, Artificial Sequence
  ENSG00000130038_40 (sequence is synthesized)
agatgcctgtccctgctttgttgttgttgttgttttccccgacttagtttcctaggggaaagaaacagatgggcttttccagaaaagccaccacgtgccttctccacgcccccttctcct

SEQ ID NO: 282964 - DNA, 120 bp, Artificial Sequence
  ENSG00000130038_41 (sequence is synthesized)
ccccttgcccttaggagcctcagcactgctgttgccgtgacaactatgcagggctcgacttgcggcttcctgcaggccaaagacagtgtggtgcccaacaaagcatccgtctcaacaccc

SEQ ID NO: 282965 - DNA, 120 bp, Artificial Sequence
  ENSG00000130038_42 (sequence is synthesized)
cgcggcctccccagctgccactagtagcaatccattacccacaggcagctcaacaactcaatgtgacttgggctccacgcctctacacaaaagatgcttccctgccctgttctcctcctt

SEQ ID NO: 282966 - DNA, 120 bp, Artificial Sequence
  ENSG00000130038_43 (sequence is synthesized)
cctgttgtgaaagcagcctcccttgcccttacccagctgtggctctctcagcggcttcctctagccccaaaggcctgctcagaataaggacctgcacacaagttgtgtggccctgggcaa

SEQ ID NO: 282967 - DNA, 120 bp, Artificial Sequence
  ENSG00000130038_44 (sequence is synthesized)
aacctggagctgcttgatgttctgagcctgctttcaaatctgcaaaatagtgctctctgccttactccctcgcaggctcgtgtgaaggtcaaaagagaactcctgggaaagagcttagtc

SEQ ID NO: 282968 - DNA, 120 bp, Artificial Sequence
  ENSG00000130038_45 (sequence is synthesized)
agctgaaaggctctaaacaaatgatagttattacatcgtcctctgtctccccatgcaagagaccagaacaaaacaatatacaaaagagagagaaaatcccacacctcttggtaactggaa

SEQ ID NO: 282969 - DNA, 120 bp, Artificial Sequence
  ENSG00000130038_46 (sequence is synthesized)
aggctgaggccatgggtgagagcacctcccatttccctgggaaaggagaataagtaaaacttgaattccttcaattagagactcatctaagaatcctttctatcttcccactctgttttg

SEQ ID NO: 282970 - DNA, 120 bp, Artificial Sequence
  ENSG00000130038_47 (sequence is synthesized)
aagtaggacagggggcccagcatcacagacgacaaggttcttaccttgtagttctggtctcatttgtttctgtatttatcaagcctggtacataaacacagtaggtaggtggatggatga

SEQ ID NO: 282971 - DNA, 120 bp, Artificial Sequence
  ENSG00000130038_48 (sequence is synthesized)
atttgctgtccggtcaagacttcagctagcacattcctaattgacctgcctttacatatatggtttctaaaacactttcacactgggatgatgacagagttctggagatggatggtggtg

SEQ ID NO: 282972 - DNA, 120 bp, Artificial Sequence
  ENSG00000130038_49 (sequence is synthesized)
atggttgcacacactattgggaatatacttaatgacgttgaattgtacatttttaaatggttaaaattgtaaattttatggtatgtatattttaccacaataaaaaattttaagaagaaa

SEQ ID NO: 282973 - DNA, 120 bp, Artificial Sequence
  ENSG00000130038_50 (sequence is synthesized)
tttctcccgtgctggatgcttcctgccctggaacagcggactctaaattcctcagcttttggactcttggacctccaccagtggtttgccaggggttcttgggcctttggccacaaactg

SEQ ID NO: 282974 - DNA, 120 bp, Artificial Sequence
  ENSG00000130038_51 (sequence is synthesized)
gggttcttgggcctttggccacaaactgaagactgccctgtcgcgttctctatttttgaggttttgggattcagactggcttccttgctccctagcttccagacggtctattgtgggact

SEQ ID NO: 282975 - DNA, 120 bp, Artificial Sequence
  ENSG00000130038_52 (sequence is synthesized)
ccacttttattagtttcctatacaaccttccaggatttctttttgcagataaaagtcagtacaaatatatatctgcctcatccctctacttcttacataattataacagactctacacac

SEQ ID NO: 282976 - DNA, 120 bp, Artificial Sequence
  ENSG00000130038_53 (sequence is synthesized)
tatttttaaccttgcctttttcactcgatttatcttggtgatctttccctctcagtatgtggagagcttcctcattctttttttacaggggcatagtatcccattgtatggatttaccat

SEQ ID NO: 282977 - DNA, 120 bp, Artificial Sequence
  ENSG00000130038_54 (sequence is synthesized)
aatttagcaatcccctactgatgaacacaggttgtttttagtcatttgctgttaatattacaagaaacactgcacggaataaacctgccatttcatgttgaccctgaacgtgtgtaacat

SEQ ID NO: 282978 - DNA, 120 bp, Artificial Sequence
  ENSG00000130038_55 (sequence is synthesized)
ttaaaaattctgaaaaatctttgaataatcaacagaactggaaacactcagttctagtatgtggacaactggttgggttgggtagcagctgtccttttaaagagacctccctgccccgct

SEQ ID NO: 282979 - DNA, 120 bp, Artificial Sequence
  ENSG00000130038_56 (sequence is synthesized)
ctggcatcttccccaccacctcttgctgaccctcttgcgttcagcctgagcgttgactgccatctagcaacattgtgctgtttctctcatagagtattaaggaggaagggaaatcactca

SEQ ID NO: 282980 - DNA, 120 bp, Artificial Sequence
  ENSG00000130038_57 (sequence is synthesized)
tgtactcatgtctcttcaagggggaaactgaaaaccaaggaggctgtctttttccagcagagggaggagggcagacttaatatgaaagcgattcttcttcatcggcccctgcccactcgg

SEQ ID NO: 282981 - DNA, 120 bp, Artificial Sequence
  ENSG00000130038_58 (sequence is synthesized)
cccatttctgttaatcttctgtatgcttgagattgcagcccctgccttgccatgtccaggctttcatctcgggagctgaaaagtggaagggaaagaactctgctctcttcttgcttttgt

SEQ ID NO: 282982 - DNA, 120 bp, Artificial Sequence
  ENSG00000130038_59 (sequence is synthesized)
gcactatctgagtaattgcatggagaccagcaataaaaatgaaatacaagacagtcagaagtgttgctccattacatggattctctcagcagaccccccaaggcagtggtagcactagct

SEQ ID NO: 282983 - DNA, 120 bp, Artificial Sequence
  ENSG00000130038_60 (sequence is synthesized)
cacttttccagacaaggaaacagtagcagagtgaagtggcttcaccaagactcataactcgcacacagaagaactaggatcagaacccaggtttttctgtcactagaacctgacatttta

SEQ ID NO: 282984 - DNA, 120 bp, Artificial Sequence
  ENSG00000130038_61 (sequence is synthesized)
aggatggtcttgatctcttgacctcatgacctgcctgcctcgtcctcccaaagtgctggaattacatgcatgagccagcttacccggccccaaagtctttttaaataaggagtggtttac

SEQ ID NO: 282985 - DNA, 120 bp, Artificial Sequence
  ENSG00000130038_62 (sequence is synthesized)
agttaagcctctcaccttctaagtctgtcattactgatgctgtggagatgatagtcgtgacaaagataagagcagctctgaaaatgggccagatggctacatactgcaaaaaaggtgggt

SEQ ID NO: 282986 - DNA, 120 bp, Artificial Sequence
  ENSG00000130038_63 (sequence is synthesized)
gacaatgcgtctgtggtctcataactaacgtgacggctgttccttgacagcttttcccatttcatagagtggaattggctcccctgcccttttgctctttcaatccaagaacatgtattg

SEQ ID NO: 282987 - DNA, 120 bp, Artificial Sequence
  ENSG00000130038_64 (sequence is synthesized)
agcaccttctgaatgccaggcactgcgctcggtgtgagtgacaagcctggtgcctggaggctagttcaggcaggtcaacagaaagctgcagtgccaccagctacatgtggtattggtgac

SEQ ID NO: 282988 - DNA, 120 bp, Artificial Sequence
  ENSG00000130038_65 (sequence is synthesized)
atggatgcgttgggttgtgtccagaatgtgacaaaagagacaaatacgccatggagcaaccatggacaacaaggcgagtggcttccagctgtcttgggtcctcgtcattttacactactt

SEQ ID NO: 282989 - DNA, 120 bp, Artificial Sequence
  ENSG00000130038_66 (sequence is synthesized)
gatgaaggaaggaagtgggacccagaagtggtggctatgagctaaggtattgagccatccttctgcccgcagcccaggatgaacatgaccacaactggcagctctctggaggccactcgg

SEQ ID NO: 282990 - DNA, 120 bp, Artificial Sequence
  ENSG00000130038_67 (sequence is synthesized)
ggttgaaaggtgggccaaaggaaccctccctccctttgctgctccacctcagcttttctcattcctggccatttgtttatcctgtaagctgggggctgggggtctcccaaagtatcactc

SEQ ID NO: 282991 - DNA, 120 bp, Artificial Sequence
  ENSG00000130038_68 (sequence is synthesized)
atcctgagagttagcattcttccagcggggcaaaatcctcttccctactgaagaaattctaaacccagccagctgaaagaggaagagtgcaggggtgaggggaggatgggaccaagaggg

SEQ ID NO: 282992 - DNA, 120 bp, Artificial Sequence
  ENSG00000130038_69 (sequence is synthesized)
cacattccacttgatctctgaagtcacacctcagcaacgggacttgcccgccaaggcttctcgtcaccatgctttgttggatttgtaatgtgctgtttatctctcttctcccgcaagttt

SEQ ID NO: 282993 - DNA, 120 bp, Artificial Sequence
  ENSG00000130038_70 (sequence is synthesized)
gcatgcaacagcatctgtcatctctgtggttatcttagaacaactggggcttttgctttttatttattctttctctgagtgcagtgctaaccacagcagcctacgggcagaggggttggg

SEQ ID NO: 282994 - DNA, 120 bp, Artificial Sequence
  ENSG00000130038_71 (sequence is synthesized)
gagggagtcagttgcttttcattgaagtgctatggtcttcagctgcagctggtgtgagtgctgaaactgtgtgaaacaaaagtgttgaaactcagtcccaagtgacttctggggatccgt

SEQ ID NO: 282995 - DNA, 120 bp, Artificial Sequence
  ENSG00000130038_72 (sequence is synthesized)
tgcctgtgtttcctatggatgagtaattagaaacgagtggttttcaggttgaaaaggagactccagagtcctgatggaatacagacagcaggcacgtctagggccacagacaggtatgtg

SEQ ID NO: 282996 - DNA, 120 bp, Artificial Sequence
  ENSG00000130038_73 (sequence is synthesized)
tgctgctctgtgctggcagctgtgtgcagatacaaaagaagtatcccataccctccttgccctcaaggaacttagtgacaggaaggagagcaaaatttacagttggcctaccctcttggg

SEQ ID NO: 282997 - DNA, 120 bp, Artificial Sequence
  ENSG00000130038_74 (sequence is synthesized)
cctgtttcctcattacagaaatgaatgaggttacacttgatcagtattccttattttattttattttttttttagattcaggaggtacacctgcaagtctgttacatggagatattgcat

SEQ ID NO: 282998 - DNA, 120 bp, Artificial Sequence
  ENSG00000130038_75 (sequence is synthesized)
aatgccgaggtttggggttctaattaacccatcacccaaataacgaacatagtatgcaataggtagtttttcagcccttgtttggcgagtgtttctaatggggtcaggctgtcccctaga

SEQ ID NO: 282999 - DNA, 120 bp, Artificial Sequence
  ENSG00000130038_76 (sequence is synthesized)
gtaatgcctctcacactttcaaagaagttaagccaaaagcccggtatttaggaaatggttgttttaggaagagaagcctaaatggaataaagacaaaacctcgaaatgacgagatgatct

SEQ ID NO: 283000 - DNA, 120 bp, Artificial Sequence
  ENSG00000130038_77 (sequence is synthesized)
ccctgcttcatgcattctgtctagatcagagcatttccaaatatacactgaactgaaaagggcacagtacaatatgcagtgaccgcaaagcaaggaacccatgcgcaggtctgtaacagg

SEQ ID NO: 283001 - DNA, 120 bp, Artificial Sequence
  ENSG00000130038_78 (sequence is synthesized)
aaatctgagacttcatccagccgatgtagaattagatactagtttaaattagcagaggcgcctcaaacttgtttataaaagctgttttaaaaataatattcttatcacatatatttatat

SEQ ID NO: 283002 - DNA, 120 bp, Artificial Sequence
  ENSG00000130038_79 (sequence is synthesized)
ttgtagtacaatgataagaaatctcttgcaaaaattagctatcatggttacttctttggggttgccttttgttcttccttcttactctgatattctccttcaagatttacccaacaactt

SEQ ID NO: 283003 - DNA, 120 bp, Artificial Sequence
  ENSG00000130038_80 (sequence is synthesized)
ctctgatattctccttcaagatttacccaacaacttttcccaatccatcctcttcttctcaccgcccatactataaggatgtcattttaaaagcttttttttttttttttttttgagaca

SEQ ID NO: 283004 - DNA, 120 bp, Artificial Sequence
  ENSG00000130038_81 (sequence is synthesized)
ctttcttttctttcttttttttttctttactgctaaagaccgaatatatgcctcaacacagtgggtgggatttccagactggaaacatgttttctgtgacactttgtcactatcctgccc

SEQ ID NO: 283005 - DNA, 120 bp, Artificial Sequence
  ENSG00000130038_82 (sequence is synthesized)
actatcctgccccatatcacagcgtaataaattatcatgacgctacacttatacgtaagactgagctcacgagacaggatcctgtgcttccttgtttcctctgcttgcacatttgtaatt

SEQ ID NO: 283006 - DNA, 120 bp, Artificial Sequence
  ENSG00000130038_83 (sequence is synthesized)
tgatttggcttgttatctgtacctcagtgaaggttatttccttcttcctgttatcatatacggccaggaaaggggggtaactcattgtaacacttctttattctattgtcctcctatatc

SEQ ID NO: 283007 - DNA, 120 bp, Artificial Sequence
  ENSG00000130038_84 (sequence is synthesized)
cctctgatcttttatttccttgtacttcttatatgaagtggcttctatttgtcttctgttaaatctaaacttaaccattataggtaggtggaagtgttgactacttcattatgtgttcca

SEQ ID NO: 283008 - DNA, 120 bp, Artificial Sequence
  ENSG00000130038_85 (sequence is synthesized)
gtgcaggcatgcatgagcacgtacatattgacagacatattattttattaagaatcacatttctgtgctcactttggcagcacgtatactaaaattggaatgatacaaagaagattagca

SEQ ID NO: 283009 - DNA, 120 bp, Artificial Sequence
  ENSG00000130038_86 (sequence is synthesized)
tggctcctgcacaagatgacatgccaagtgtgtgctcgctctctctctctctgtgtatatacgtatatatataaaatatacatatagtatgtatttatatatattaatcacatttccttt

SEQ ID NO: 283010 - DNA, 120 bp, Artificial Sequence
  ENSG00000130038_87 (sequence is synthesized)
ttatccttttattaaaattagggctactttatgcgtttgggtcgaccgacttttctaggaattgtatttcaggtggtaaagatggtgtttctaaatatttgttacaaaaatagggcattg

SEQ ID NO: 283011 - DNA, 120 bp, Artificial Sequence
  ENSG00000130038_88 (sequence is synthesized)
attggatagggtggagcaccactgggttaaatgatctccaaggtctctgacattctttgtgcaacatttacaaaacaatggatgacagcctgattcatgactcagtcagaaaaaaaaaaa

SEQ ID NO: 283012 - DNA, 120 bp, Artificial Sequence
  ENSG00000130038_89 (sequence is synthesized)
tcagtatcagacccagagagaccttgaagactgcaagcatgaaatgaaaaagatatgcaaagcggaagtgactctggagatgtaaatcagctcatcagtaaaacctttgggcctgatcat

SEQ ID NO: 283013 - DNA, 120 bp, Artificial Sequence
  ENSG00000130038_90 (sequence is synthesized)
catgaattcttgttctaaatagctgaataatgagatacaatttgggagccaaatctctgcaatagtggttggcctgttggttcctcagaatggaatggattgattgattgattcagcaga

SEQ ID NO: 283014 - DNA, 120 bp, Artificial Sequence
  ENSG00000130038_91 (sequence is synthesized)
cgtttactgattacctactgtgtaccagacattcttttgagttctgtaaagcctccaaaaataaattagacatgaggtcctaccattaatctccattattaaatgctcacttaataaata

SEQ ID NO: 283015 - DNA, 120 bp, Artificial Sequence
  ENSG00000130038_92 (sequence is synthesized)
ccactcctctgagtccctcacaggactgtgcttggtacttgatctcatgcgagcagagctgggtttaatgagcatttaatctatgctagaaatattatctcgttcattgtcagcaaaact

SEQ ID NO: 283016 - DNA, 120 bp, Artificial Sequence
  ENSG00000130038_93 (sequence is synthesized)
gttaggtgagtagggcagttcattcacaggaatttactgatgggaagttgatattagaggaaagaagtaatttaccacaggcgacacagctactctctgatggggccagaatggaaatcc

SEQ ID NO: 283017 - DNA, 120 bp, Artificial Sequence
  ENSG00000130038_94 (sequence is synthesized)
gtaactcggctgtgttctgttcatgtttgttgaatgagtaaatgaatcacaaacagagcaccaagaaaaagctttctcagccttcaaagacccccagcaataaactcaaagtttactggt

SEQ ID NO: 283018 - DNA, 120 bp, Artificial Sequence
  ENSG00000130045_0 (sequence is synthesized)
aggagtgtgggcggggcgcagttgggggagggtgcagagacctgagggcttgaggttgcctggctggccccgctcccagaggcgggtgccgcgctgtcgcccaggtatctggggtctctg

SEQ ID NO: 283019 - DNA, 120 bp, Artificial Sequence
  ENSG00000130045_1 (sequence is synthesized)
gtgtctgagtgtctcattgtcggcgcgaacacaattgctccagccacaggcgaggcctggccaaggtgtgggcgcatctggggcaggtcttgagaggtccagcgcccggtggtgcggaca

SEQ ID NO: 283020 - DNA, 120 bp, Artificial Sequence
  ENSG00000130045_2 (sequence is synthesized)
gaggcggggcaccgcggcgctcgccgccgcctccccgcaggtgatcatcctcctgcaggtgtcctcgggtctcaggtggctgcgtgtctgcgccatggttgacattctgggcgagcggca

SEQ ID NO: 283021 - DNA, 120 bp, Artificial Sequence
  ENSG00000130045_3 (sequence is synthesized)
tgcgcgccgagccgcgacttcacgccgctgctctgcgacttctatacggcgctggtggccgaggcgcggcggcccgcgcccttcgaagtggtcttcgtgtcagccgacggcagctcccag

SEQ ID NO: 283022 - DNA, 120 bp, Artificial Sequence
  ENSG00000130045_4 (sequence is synthesized)
gagatgctggacttcatgcgcgagctgcatggcgcctggctggcgctgcccttccacgacccctaccggcatgagctgaggaagaggtacaacgtcacagccatccccaagcttgtgatt

SEQ ID NO: 283023 - DNA, 120 bp, Artificial Sequence
  ENSG00000130045_5 (sequence is synthesized)
gtgaaacaaaatggggaggtcatcaccaacaaagggcggaagcagatccgggaacgggggttggcctgcttccaggactgggtggaggcggccgatatcttccagaatttctccgtttga

SEQ ID NO: 283024 - DNA, 120 bp, Artificial Sequence
  ENSG00000130045_6 (sequence is synthesized)
ttgggttccttcctctgttggtgtgatttcattgtatttcagagcagaagcactaagctgtggtcaaaaagcaactattgctcaggaaataatacactccatattttgatcatgcaggct

SEQ ID NO: 283025 - DNA, 120 bp, Artificial Sequence
  ENSG00000130045_7 (sequence is synthesized)
gtttgtattatagttatttttgttattctttgcatacctttatccacctgtgcttaaggaaggatcctcatatgttcatactgagctgttggaaatctatgcaagacatttatttgtaca

SEQ ID NO: 283026 - DNA, 120 bp, Artificial Sequence
  ENSG00000130045_8 (sequence is synthesized)
agtctcttcaggtaaaataatatatttattgataacattttctggcgatctgtttattttaatggtatgctttcacaactatcttaataaagtttgcaagctgtgtactttaataaacaa

SEQ ID NO: 283027 - DNA, 120 bp, Artificial Sequence
  ENSG00000130045_9 (sequence is synthesized)
tccatgcctgcactttctgttccaagccatctggtggaagcaatccaattgcctgcagaatcatccgaaagcatcactgggaagaagctggtggaactaagaagcaattctttagcctga

SEQ ID NO: 283028 - DNA, 120 bp, Artificial Sequence
  ENSG00000130045_10 (sequence is synthesized)
cagccagtctgtttttagtatttctaaacatgaaatcatctcagaagaagccaagggctgtcgaggtgatttgcctgaggtcctacaactcatcactgactgtgtttggaggaaggaagt

SEQ ID NO: 283029 - DNA, 79 bp, Artificial Sequence
  ENSG00000130045_11 (sequence is synthesized)
catgcgcgagctgcatggcgcctggctggcgctgcccttccacgacccctaccggcataggctcagctcactgcaacct

SEQ ID NO: 283030 - DNA, 70 bp, Artificial Sequence
  ENSG00000130045_12 (sequence is synthesized)
ggagatgctggacttcatgcgcgagctgcatggcgcctggctggcgctgcccttccacgacccctaccgg

SEQ ID NO: 283031 - DNA, 120 bp, Artificial Sequence
  ENSG00000130045_13 (sequence is synthesized)
agcatctgggactacagccattgctgtgaattacgtgagggaaagatattgaagaggagttggacactccgagagtgcagctgttctccccccgcaccatccgtgtcctgcattctgcga

SEQ ID NO: 283032 - DNA, 120 bp, Artificial Sequence
  ENSG00000130045_14 (sequence is synthesized)
gtctgtgctcattaacaatgtgctgtgaccatgtgactcagcaatcctgctgctgggtatatacccgaaagaaaggaaaaggaagccagtatattgaagaggtatctgcacccccatgtt

SEQ ID NO: 283033 - DNA, 82 bp, Artificial Sequence
  ENSG00000130045_15 (sequence is synthesized)
gtggtacatatacacaatggagtactcttcagccattaaaaaaatgagattctgtcatttgcaataatatagatggaaaagg

SEQ ID NO: 283034 - DNA, 120 bp, Artificial Sequence
  ENSG00000130045_16 (sequence is synthesized)
ggtacatatacacaatggagtactcttcagccattaaaaaaatgagattctgtcatttgcaataatatagatggaaaaggaggcccttatgtgaagtgaaataagccaggcacagaaaga

SEQ ID NO: 283035 - DNA, 120 bp, Artificial Sequence
  ENSG00000130045_17 (sequence is synthesized)
tcaaaacaattgaactcttggacatagagagtagaaggttggttaccagaagctggaaaggaaagtggggttgggaggaaggtgggaatggttaataggtacaaaaaaatacaaagaata

SEQ ID NO: 283036 - DNA, 120 bp, Artificial Sequence
  ENSG00000130045_18 (sequence is synthesized)
aataagacctaatatttgatagcacaacagtgtgactactgtcaataatcatttaattgtacatttaaaaataactataattgcattgtttgtaacacaaaagataaatgcttgagggga

SEQ ID NO: 283037 - DNA, 120 bp, Artificial Sequence
  ENSG00000130052_0 (sequence is synthesized)
agggaccgggctggctctcgccgagccccgggcctcttttagcctcgtccccagagagggaggagccggtgcccggcacagccccgccggccctagaagctccccacgcgccaccatgcc

SEQ ID NO: 283038 - DNA, 120 bp, Artificial Sequence
  ENSG00000130052_1 (sequence is synthesized)
tctgctggacgttttctggtcttgcttcaggaaggtgaagtgcttcccattgctgcaggtgaagaagaacgctgaagccgaggccaaaagagcatgtgagtggcttcaagcaacaggatt

SEQ ID NO: 283039 - DNA, 120 bp, Artificial Sequence
  ENSG00000130052_2 (sequence is synthesized)
ccctcagtatgtgcagctttttgaagaaggttcgtttcccctggatattggctctgtgaagaaaaaccacggttttctggacgaggactctttgggggccctgtgtaggaggctgatgac

SEQ ID NO: 283040 - DNA, 120 bp, Artificial Sequence
  ENSG00000130052_3 (sequence is synthesized)
cttgaataattgtgcctcgatgaaactggaggttcattttcaaagcaagcagaatgaagactcagaagaggaagagcagtgtaccatcagtagccactgggccttccagcaggaaagtaa

SEQ ID NO: 283041 - DNA, 120 bp, Artificial Sequence
  ENSG00000130052_4 (sequence is synthesized)
gtgctggtctcctatggggtcctctgatctgttggccccaccgagccctggcctgccagcgacctcaagctgtgagagcgtcctcaccgagcttagtgccacctctctgccagtcatcac

SEQ ID NO: 283042 - DNA, 120 bp, Artificial Sequence
  ENSG00000130052_5 (sequence is synthesized)
cgtgagcctaccacccgagccagcagacttgcccttgccaggccgtgcccccagctcgagtgaccggcccctcctcagccccacccagggccaggagggtccccaggacaaagccaagaa

SEQ ID NO: 283043 - DNA, 120 bp, Artificial Sequence
  ENSG00000130052_6 (sequence is synthesized)
gcgccatcgtaaccgtagcttcctcaagcaccttgaatctctgaggcggaaggaaaagagtggcagccagcaagcagagcccaagcatagtccagccacctcagagaaggtctccaaagc

SEQ ID NO: 283044 - DNA, 120 bp, Artificial Sequence
  ENSG00000130052_7 (sequence is synthesized)
ctcatctttccgcagttgtcgtggcttcctctcagctggattttacagggccaagaactgggccgccacctcagccggtggcagtggtgccaatactcggaaggcctgggaggcctggcc

SEQ ID NO: 283045 - DNA, 120 bp, Artificial Sequence
  ENSG00000130052_8 (sequence is synthesized)
tgtggcctcgttccggcatcctcagtggacacaccggggtgattgcctggtgcacgttcctggggaccacaaaccaggcacattccctcgctccctgtccattgagagcctgtgtcctga

SEQ ID NO: 283046 - DNA, 120 bp, Artificial Sequence
  ENSG00000130052_9 (sequence is synthesized)
ggatggacaccgcctggcagactggcagccaggtaggcggtggggctgtgaggggcgccggggctcctgtggctcaacgggcagccatgccagcacgtatgacaacttgcctgagctgta

SEQ ID NO: 283047 - DNA, 120 bp, Artificial Sequence
  ENSG00000130052_10 (sequence is synthesized)
cccagctgagcctgtaatggttggggctgaggctgaagatgaagatgatgaggagagtgggggcagctatgctcacctagacgacatcctccagcacgtgtgggggctacagcaacgagt

SEQ ID NO: 283048 - DNA, 120 bp, Artificial Sequence
  ENSG00000130052_11 (sequence is synthesized)
agagctgtggtctcgggccatgtacccagacctggggcctggagatgaggaagaggaggaggccacttcatcagtagaaatagccacagttgaggtcaaatgccaagctgaggctctcag

SEQ ID NO: 283049 - DNA, 120 bp, Artificial Sequence
  ENSG00000130052_12 (sequence is synthesized)
ccagatggaggttccggcccatggagagtccccagcctgggcccaggctgaagtccagccagcagtcctggctccggctcaggctccagctgaggctgaaccagtggcacaggaagaggc

SEQ ID NO: 283050 - DNA, 120 bp, Artificial Sequence
  ENSG00000130052_13 (sequence is synthesized)
tgaggccccggccccagccccggccccggccccagcccaggacagtgagcaggaggcacattcaggcggggaacccacctttgcctctagcctgtctgtggaagaaggacactccatttc

SEQ ID NO: 283051 - DNA, 120 bp, Artificial Sequence
  ENSG00000130052_14 (sequence is synthesized)
tgacactgtggcctcctccagcgaacttgacagtagtgggaactccatgaatgaggctgaggctgcggggcccctggctggactccaggcatcaatgccccgtgaacggcgcgattcagg

SEQ ID NO: 283052 - DNA, 120 bp, Artificial Sequence
  ENSG00000130052_15 (sequence is synthesized)
tgttggggcctcacttaccagaccctgcaggaagctccgttggcatagcttccagaactcccatcgtcccagcctcaactcagagtcgctggagatcaaccggcagtttgcaggccagat

SEQ ID NO: 283053 - DNA, 120 bp, Artificial Sequence
  ENSG00000130052_16 (sequence is synthesized)
caacctcctgcacaagggctcactgctgcggcttaccgcgttcatggagaagtacactgtgccccacaagcagggctgggtctggtcaatgcccaagttcatgaggaggaacaagacccc

SEQ ID NO: 283054 - DNA, 120 bp, Artificial Sequence
  ENSG00000130052_17 (sequence is synthesized)
agattaccggggacagcacgtatttggggtgccacccctcatccacgtgcagcgcacgggccagccactgccacagagcattcagcaagccatgcgctacttgcgcagccagtgcctgga

SEQ ID NO: 283055 - DNA, 120 bp, Artificial Sequence
  ENSG00000130052_18 (sequence is synthesized)
ccaagtaggcatcttccgcaagtctggggtcaagtccaggatccagaacctgcgtcaaatgaatgagacctcgcctgacaatgtctgctacgagggccagtcagcctacgacgtggctga

SEQ ID NO: 283056 - DNA, 120 bp, Artificial Sequence
  ENSG00000130052_19 (sequence is synthesized)
cctgctaaagcagtatttccgggacctgcctgagcccatcttcaccagcaagctcaccaccactttcctccagatctaccagctcctccccaaggatcagtggttggcagcagcacaagc

SEQ ID NO: 283057 - DNA, 120 bp, Artificial Sequence
  ENSG00000130052_20 (sequence is synthesized)
agaccctgctctacttcttaagtgacattgcctctgccgaggaaaaccagatgacagcaggcaacctggcagtgtgcctggcgccctccatcttccacctcaatgtctctaagaaggata

SEQ ID NO: 283058 - DNA, 120 bp, Artificial Sequence
  ENSG00000130052_21 (sequence is synthesized)
gcccctctcccaggatcaagagcaaacgcagcctcattggcaggccaggccctagggacctgagtgacaacatggcagccacccagggcctgtcgcacatgatcagtgactgcaagaaac

SEQ ID NO: 283059 - DNA, 120 bp, Artificial Sequence
  ENSG00000130052_22 (sequence is synthesized)
ttttccaggtgccccaggacatggtgctgcagctgtgcagctcctacagcgcagctgagctcagccctcccggcccagccctggctgagctgcgtcaggcccaagctgcaggggtaagcc

SEQ ID NO: 283060 - DNA, 120 bp, Artificial Sequence
  ENSG00000130052_23 (sequence is synthesized)
tgagcctctacatggaagagaatatccaggacctgctgcgtgatgctgctgagcgcttcaagggctggatgagcgtgccagggccccagcacacggagctggcttgcaggaaggcaccgg

SEQ ID NO: 283061 - DNA, 120 bp, Artificial Sequence
  ENSG00000130052_24 (sequence is synthesized)
atgggcaccccctgcggctatggaaggcatccacagaggtggcagcccccccagctgtggtgctgcatcgtgttctccgggagcgggccctctgggatgaggatctgctgcgggcccagg

SEQ ID NO: 283062 - DNA, 120 bp, Artificial Sequence
  ENSG00000130052_25 (sequence is synthesized)
tgctggaagccctgatgccgggtgtggagctgtaccactatgtcaccgacagcatggcaccccatccctgccgcgactttgtggtgcttcggatgtggcgctctgacctgcctcgtgggg

SEQ ID NO: 283063 - DNA, 120 bp, Artificial Sequence
  ENSG00000130052_26 (sequence is synthesized)
gttgcctgcttgtctcccagtccctggatccggaacaacctgtgccagagtcgggtgtgcgagccctcatgctcacatcccagtacctcatggagccttgcggcttgggccgctctcggc

SEQ ID NO: 283064 - DNA, 120 bp, Artificial Sequence
  ENSG00000130052_27 (sequence is synthesized)
tcacacacatctgccgggctgacctcaggggccgttctcctgactggtacaacaaagtctttggacacctgtgtgccatggaagtggcaaagatccgggactccttccccaccctgcagg

SEQ ID NO: 283065 - DNA, 120 bp, Artificial Sequence
  ENSG00000130052_28 (sequence is synthesized)
cagcgggccctgagacaaagctgtgagccttgggctggtcccagggtggcaccacccaggccccctgggcaccaagggagcgagggggaataagagcagggcagccccctgggtgccgct

SEQ ID NO: 283066 - DNA, 120 bp, Artificial Sequence
  ENSG00000130052_29 (sequence is synthesized)
gtcaggagcagagccaggcccaggtggctccagctgcctgtcctgtcccctttcctaaagctcctctgcacatagaggggagaaaaagagaatttaggcaactccactcccccttcaccc

SEQ ID NO: 283067 - DNA, 120 bp, Artificial Sequence
  ENSG00000130052_30 (sequence is synthesized)
ccaaccctgtattctactctcccgaaaagagaagagaatcgcatgagtagcaagactgctgccaccagccacctgcttgtgaggccgccacttggcatgaagcctccacagctccccgcc

SEQ ID NO: 283068 - DNA, 120 bp, Artificial Sequence
  ENSG00000130052_31 (sequence is synthesized)
tgcaggggcaaagaggtcgacagcaatgtgtgatcccagctctctgccagactgagagggcaagccgtcttgtttgctgcaaggatgcttttgaggttggacaggaggttctggtcctgc

SEQ ID NO: 283069 - DNA, 120 bp, Artificial Sequence
  ENSG00000130052_32 (sequence is synthesized)
ctttggggccaacgctggctctgaagtgtctttttcagaggaattggactggagtgaatgggcacaggggtggagcgcagggcagccccagtcaccacgagctgtttcatttgtgtaaat

SEQ ID NO: 283070 - DNA, 120 bp, Artificial Sequence
  ENSG00000130052_33 (sequence is synthesized)
acgatgctgaattttatgaggctgagttaagagtgggcactgacgggcccctaatatgtgacatgacgatttggcatagatagggatgtgagagtggagtaccttcctttctcaagtctc

SEQ ID NO: 283071 - DNA, 120 bp, Artificial Sequence
  ENSG00000130052_34 (sequence is synthesized)
gagatgccagtgaaaccagtattccctgacttgggtttcacactttatcgaccaccccatggggtcctgtgtagcctttggccacgcactgacactgcccaggccaagcaaaagcagagt

SEQ ID NO: 283072 - DNA, 120 bp, Artificial Sequence
  ENSG00000130052_35 (sequence is synthesized)
gtggttaagagacaagggtctatgtcatcatcccttttgcttatggtagtgggctaacataacagcccctttctcaagcagagacctggcccctgggccagccagatggaagggcctatc

SEQ ID NO: 283073 - DNA, 120 bp, Artificial Sequence
  ENSG00000130052_36 (sequence is synthesized)
ttagccagctggagcttaagccaaacctgttctgtcccactggccagccatctttgctcacatggaaattcaaatgccattcaaaggccactggtgctttatttttctatctgctgagta

SEQ ID NO: 283074 - DNA, 120 bp, Artificial Sequence
  ENSG00000130052_37 (sequence is synthesized)
atctgctgagtaaactgaaatgagatgggtcccaaccaccactgtaattttcaagcctattttatttgtacctgtaaatactgtacagctaatatatatatatatatatatatatgtgtg

SEQ ID NO: 283075 - DNA, 120 bp, Artificial Sequence
  ENSG00000130052_38 (sequence is synthesized)
tgtatatgtgtttatagagatacacacacatatatatgtgtgtatatatatacacatacatatatatacacacacgcatttgcacagacacacacatatatcaattctcatgagtgtatt

SEQ ID NO: 283076 - DNA, 120 bp, Artificial Sequence
  ENSG00000130052_39 (sequence is synthesized)
ataatctctggtgggggcaagtgtctggaaggcctgaggggcacttcagatgagaatggagaggtagggagccaggtgcagcaggatccctcaaatcaataaagcattaccagagatgca

SEQ ID NO: 283077 - DNA, 120 bp, Artificial Sequence
  ENSG00000130052_40 (sequence is synthesized)
ctcgggttgacaacggctaagcagccgcggcagctgctcttctggctggcaccgtcacccctgcccgaccccaggccccgcgtgtgtcccggacggagcagtccctcctgggctcgcctc

SEQ ID NO: 283078 - DNA, 84 bp, Artificial Sequence
  ENSG00000130052_41 (sequence is synthesized)
ccttcacctatctgagccacaacttgctagctgtgttgaccatgagaaagttacttcgcctttctcaaaagaagacatttatgc

SEQ ID NO: 283079 - DNA, 120 bp, Artificial Sequence
  ENSG00000130054_0 (sequence is synthesized)
ctcgcgcctgcctgttccctccagcccggacccccctgaaatatgttcaggggcgcttggatgtggcccgggaaagacgccgccgcgctgactatctgctgctgctgctgctgctgggct

SEQ ID NO: 283080 - DNA, 120 bp, Artificial Sequence
  ENSG00000130054_1 (sequence is synthesized)
cccaggccgagcgacaaaccttgcgccgactccgagcgggcgcagcgatggcgactgtccctggcgtccctgctcttcttcaccgtgctgctcgctgaccatctgtggctgtgcgcgggg

SEQ ID NO: 283081 - DNA, 80 bp, Artificial Sequence
  ENSG00000130054_2 (sequence is synthesized)
gaccatctgtggctgtgcgcgggggcccggccccgggccagggagctgagcagcgccatgcggcccccatggggggccgg

SEQ ID NO: 283082 - DNA, 120 bp, Artificial Sequence
  ENSG00000130054_3 (sequence is synthesized)
cccagcgcgcccccaggcacctgcggccccagatacagcaacctgaccaaagccgcccccgccgccggctctcggccggtctgcggcggcgtcccagagcccacggggctggacgcagct

SEQ ID NO: 283083 - DNA, 120 bp, Artificial Sequence
  ENSG00000130054_4 (sequence is synthesized)
tgcaccaaattgcaatctttgcagagacttttcgaaccgactactccggccccccctctgcggccccctgactccctttcccgtgccccggccgagttcccctccgccaaaaaaaacttg

SEQ ID NO: 283084 - DNA, 120 bp, Artificial Sequence
  ENSG00000130054_5 (sequence is synthesized)
ctcaaaggccactttcggaacttcactctctccttttgcgacacctacacggtctgggacttgctgctgggcatggaccgccccgacagcctggactgtagcctggacaccctgatgggg

SEQ ID NO: 283085 - DNA, 120 bp, Artificial Sequence
  ENSG00000130054_6 (sequence is synthesized)
gacctgctggccgtggtggccagcccgggctccggggcctgggaggcgtgtagcaactgtatcgaggcgtaccagcggctggaccgacacgctcaggaaaaatatgacgagttcgacctc

SEQ ID NO: 283086 - DNA, 120 bp, Artificial Sequence
  ENSG00000130054_7 (sequence is synthesized)
gtgctgcataaatacttacaggcggaagagtactcaatccggtcctgcacgaaaggctgtaaggctgtctacaaggcctggctgtgctcagaatacttcagcgtgacccagcaggaatgc

SEQ ID NO: 283087 - DNA, 120 bp, Artificial Sequence
  ENSG00000130054_8 (sequence is synthesized)
cagcgctgggtgccctgcaagcaatactgcctggaggtgcagacccggtgcccctttatactccccgacaatgaggaaatggtgtacggagggctccctggctttatctgtacagggttg

SEQ ID NO: 283088 - DNA, 120 bp, Artificial Sequence
  ENSG00000130054_9 (sequence is synthesized)
ctggatacttcaccaaagcgtctggaaaccaagtgctgtgacgtgcagtgggtctcctgtgaggcgaagaagaagaagttcaaggagtctgaggcccccaaaacccaccagcagcaattc

SEQ ID NO: 283089 - DNA, 120 bp, Artificial Sequence
  ENSG00000130054_10 (sequence is synthesized)
caccactcctatttccaccactaccaccaacagtaccatcactaccacccccatcatgatcccccaggccgtgtcagcaacaagcccgccctgctgccggtctctgggggctcccgcctc

SEQ ID NO: 283090 - DNA, 120 bp, Artificial Sequence
  ENSG00000130054_11 (sequence is synthesized)
agccctagcaggatccggctctgcgtccttgttctcatgctcctccataccgtggtgtccttctccagcaaccagggtggtgggggattggggctggagacactgcctgccctagaggag

SEQ ID NO: 283091 - DNA, 120 bp, Artificial Sequence
  ENSG00000130054_12 (sequence is synthesized)
ggcctgacacgggaagagtgacagtagggagggaggacagacctccaccacactgacatcagctccagctcccccaggttgggggggagggggctcctcccatgggaggtgtaggataag

SEQ ID NO: 283092 - DNA, 120 bp, Artificial Sequence
  ENSG00000130054_13 (sequence is synthesized)
gtgggggcgggggaaatgggggaatgacacatcccccccaacctacccccaccccaaaagcagctccaacagaatggccagagggcctcagggagctgcaaaactcatccaggagaaaaa

SEQ ID NO: 283093 - DNA, 120 bp, Artificial Sequence
  ENSG00000130054_14 (sequence is synthesized)
ggcaggagcagcaagtgacccctcccaagctcccatctatggggcttagcaaaaaaagggaggaagtgggggctggatatgcccacccctgccaaaagccctgaccccagggaaggaggc

SEQ ID NO: 283094 - DNA, 120 bp, Artificial Sequence
  ENSG00000130054_15 (sequence is synthesized)
tgctcacccagccttggccctgcagggaatgttggggggcacagaggggagaagctctttcccccactccacattccttttgttgccaagatccttaattccctcctgcccatatcccta

SEQ ID NO: 283095 - DNA, 120 bp, Artificial Sequence
  ENSG00000130054_16 (sequence is synthesized)
ccacctgggaccatcacacgtgaagcaccaggctgggagatgaggtgcacacagttgcagctaggtcggggccccagttaagctgtgccccaccaccctaggcaatgaggggcaggaaag

SEQ ID NO: 283096 - DNA, 120 bp, Artificial Sequence
  ENSG00000130054_17 (sequence is synthesized)
gggtacagaatgaatggtgaaagagagtggagatacggaagggggagaggagaggagaaatgtggacagagggcttgaagacatggccgaataggctactgccacccggctttggggaga

SEQ ID NO: 283097 - DNA, 120 bp, Artificial Sequence
  ENSG00000130054_18 (sequence is synthesized)
tgggcgataagtgttgaggtaggctcgagaactgctccccaaatcagtgagaattgcattaggagccctctggggaaagagcacaggaactgagttgctgggcctcaaaacaaaaggctg

SEQ ID NO: 283098 - DNA, 120 bp, Artificial Sequence
  ENSG00000130054_19 (sequence is synthesized)
caggcacatggttagactgccgctgtctgaaggaccatatcttacagaaggtgcacatactcccaagggccactcttgccctggagatcttggccttggggccaaagacatttccatttc

SEQ ID NO: 283099 - DNA, 120 bp, Artificial Sequence
  ENSG00000130054_20 (sequence is synthesized)
cgatctccatggggaggagggacttaagcccaagtgggtcaggcctggcccaggtccttatactcccctatcttgtcctagcccaggcctccatgaaggagaacctggtggcattgcccc

SEQ ID NO: 283100 - DNA, 120 bp, Artificial Sequence
  ENSG00000130054_21 (sequence is synthesized)
agagctctccagagatgagcctcccctatccccaccctgtccccgtccccagcctaccaaagagtattcacacctttccatccctgactctatgggttactgtcccaattgcgaaacacc

SEQ ID NO: 283101 - DNA, 120 bp, Artificial Sequence
  ENSG00000130054_22 (sequence is synthesized)
catactcctcttcaccctgtagcagggtcttctgctccagtcaccccggcctcttgcaagagaaagtccagggactggcaagaagaccctttgactaaagataatgtgctgtcatatctt

SEQ ID NO: 283102 - DNA, 120 bp, Artificial Sequence
  ENSG00000130054_23 (sequence is synthesized)
ggctgagaaactgttgagtcaggctagaggactggacaagagaagaggcattgagagcccccttgggagccattagccttgctctggtctgctgtgtggggttggggagtaggggggatc

SEQ ID NO: 283103 - DNA, 120 bp, Artificial Sequence
  ENSG00000130054_24 (sequence is synthesized)
ccacattgcctgggacatctgaatgctgatacgaatggacaggaaagggagccagagctgtatacctgggacaggccagggagcctttagtgccagcagggcctgtgtcctgggatgtga

SEQ ID NO: 283104 - DNA, 120 bp, Artificial Sequence
  ENSG00000130054_25 (sequence is synthesized)
tgctagtgagtgaatgggagggcgggcctggagctgcgtgagagtgaaaccaagaagcggatggggaagggagagctggccttggtcagcttagggatgaatggagaaggaatcattcat

SEQ ID NO: 283105 - DNA, 120 bp, Artificial Sequence
  ENSG00000130054_26 (sequence is synthesized)
gggcctcggctaggtcccagactgattacatgagactggggagtccttccctgccagttttctcatttattacagcctatcccccaaccctacccctgtgccctgcctacacactcccgt

SEQ ID NO: 283106 - DNA, 120 bp, Artificial Sequence
  ENSG00000130054_27 (sequence is synthesized)
ttggccctcagcactttgggcctggtcacataccccatccctagagtgctcttttcagctggggaggggaagaggtgctggctcctttccagacatgcttatgtataagtaaaggggcag

SEQ ID NO: 283107 - DNA, 120 bp, Artificial Sequence
  ENSG00000130054_28 (sequence is synthesized)
gtgcttgggctccagagagaccctaggtactgccttctaactcctgcatcctcagaaggggaaaagggactgggaagtaaagggaaaccatatggccccagggaatggacccttggagac

SEQ ID NO: 283108 - DNA, 120 bp, Artificial Sequence
  ENSG00000130054_29 (sequence is synthesized)
tcccatcctctcttccccctcaccaagtgcccaggagacccctggctcagaccagcccaaggccttgcccagtggcaggggaaaggggcacctcactccacctcaaagtcatttgactgc

SEQ ID NO: 283109 - DNA, 120 bp, Artificial Sequence
  ENSG00000130054_30 (sequence is synthesized)
ccccatccaccccaccaccctaatcttccaccacctctccggctgcccctgccctccatcacagacagcagagccgggcagctttcttatgccattttctacactgtgcttcatgagtag

SEQ ID NO: 283110 - DNA, 120 bp, Artificial Sequence
  ENSG00000130054_31 (sequence is synthesized)
gactttcttgcactagttcctatgactgagtctccaaactggtttcctagtagtcccccatcccttcctcccttacccagctatgattcagttgtctctgccctccctcttaccctgcct

SEQ ID NO: 283111 - DNA, 120 bp, Artificial Sequence
  ENSG00000130054_32 (sequence is synthesized)
ctgtgtttcggtgagagtctctgtatatgtactgctttctgttttgttgcattgtggggcagaggcctctctgctcttgtttaaccccataaagaaataaatggtaagacttgatgataa

SEQ ID NO: 283112 - DNA, 120 bp, Artificial Sequence
  ENSG00000130055_0 (sequence is synthesized)
gcagatttgctctccctcccgcttcctccctcccatcttcccacccgggctgtgcccaggccacagagcagctgcaggccttgggagaggacccacacagcctcctgtaggtggcaacag

SEQ ID NO: 283113 - DNA, 120 bp, Artificial Sequence
  ENSG00000130055_1 (sequence is synthesized)
tgccacctgtttgactcatagggctgaaccgaggactgaaaaagggaggaggcagaccactcggagaggagctgggaagcagtgcagagaggagagcggagcggagctgccgctgagcaa

SEQ ID NO: 283114 - DNA, 120 bp, Artificial Sequence
  ENSG00000130055_2 (sequence is synthesized)
aggccttcaccatggccgagtcccccggctgctgctccgtctgggcccgctgcctccactgcctgtatagctgccactggaggaaatgccccagagagaggatgcaaaccagcaagtgcg

SEQ ID NO: 283115 - DNA, 120 bp, Artificial Sequence
  ENSG00000130055_3 (sequence is synthesized)
actgtatctggtttggcctgctcttcctcaccttcctcctttccctgagctggctgtacatcgggctcgtccttctcaatgacctgcacaacttcaatgaattcctcttccgccgctggg

SEQ ID NO: 283116 - DNA, 120 bp, Artificial Sequence
  ENSG00000130055_4 (sequence is synthesized)
gacactggatggactggtccctggcattcctgctggtcatctctctactggtcacatatgcatccttgctattggtcctggccctgctcctgcggctttgtagacagcccctgcatctgc

SEQ ID NO: 283117 - DNA, 120 bp, Artificial Sequence
  ENSG00000130055_5 (sequence is synthesized)
acagcctccacaaggtgctgctgctcctcattatgctgcttgtggcggctggccttgtgggactggacatccaatggcagcaggagtggcatagcttgcgtgtgtcactgcaggccacag

SEQ ID NO: 283118 - DNA, 120 bp, Artificial Sequence
  ENSG00000130055_6 (sequence is synthesized)
ccccattccttcatattggagcagccgctggaattgccctcctggcctggcctgtggctgataccttctaccgtatccaccgaagaggtcccaagattctgctactgctcctattttttg

SEQ ID NO: 283119 - DNA, 120 bp, Artificial Sequence
  ENSG00000130055_7 (sequence is synthesized)
gagttgtcctggtcatctacttggcccccctatgcatctcctcaccctgcatcatggaacccagagacttaccacccaagcctgggctggtgggacaccgaggggcccccatgctggctc

SEQ ID NO: 283120 - DNA, 120 bp, Artificial Sequence
  ENSG00000130055_8 (sequence is synthesized)
ccgagaacaccctgatgtccttgcggaagacagctgaatgcggagctactgtgtttgagactgatgtgatggtcagctccgatggggtccccttcctcatgcatgatgagcacctcagca

SEQ ID NO: 283121 - DNA, 120 bp, Artificial Sequence
  ENSG00000130055_9 (sequence is synthesized)
atgtagcctctgtattcccaacccgaatcacagcccacagcagtgacttctcctggactgaactgaagagactcaatgctggatcctggttcctagagaggcgacccttctggggggcca

SEQ ID NO: 283122 - DNA, 120 bp, Artificial Sequence
  ENSG00000130055_10 (sequence is synthesized)
aaccgctggcaggccctgatcagaaagaggctgagagtcagacggtaccagcattagaagagctattggaggaagctgcagccctcaacctttccatcatgttcgacttgcgccgacccc

SEQ ID NO: 283123 - DNA, 120 bp, Artificial Sequence
  ENSG00000130055_11 (sequence is synthesized)
cacagaaccacacatactatgacacttttgtgatccagacattggagactgtgctgaatgcaagggtgccccaagccatggtcttttggctaccagatgaagatcgggctaatgtccaac

SEQ ID NO: 283124 - DNA, 120 bp, Artificial Sequence
  ENSG00000130055_12 (sequence is synthesized)
gacgggcacctggaatgcgccagatatatggacgtcagggaggcaacagaacggagaggccccagtttcttaacctcccctatcaagatctgccactattggatatcaaggcattgcata

SEQ ID NO: 283125 - DNA, 120 bp, Artificial Sequence
  ENSG00000130055_13 (sequence is synthesized)
aggataatgtctcggtgaacctatttgtagtgaacaagccctggctcttctctctgctttggtgtgcaggggtggattcggtcaccaccaacgactgccagctgctgcagcagatgcgtt

SEQ ID NO: 283126 - DNA, 120 bp, Artificial Sequence
  ENSG00000130055_14 (sequence is synthesized)
accctatctggcttattacccctcaaacctacctaatcatatgggtcattaccaattgtgtttccaccatgctgcttttgtggaccttcctcctccaaagaagatttgttaagaagagag

SEQ ID NO: 283127 - DNA, 120 bp, Artificial Sequence
  ENSG00000130055_15 (sequence is synthesized)
ggaaaactggcttagaaacagcagtgctgctgacaaggatcaacaatttcatgatggagtgaatgccctgccctgcttccccacccaagccagtctacattgcccaaacagcaagggttg

SEQ ID NO: 283128 - DNA, 120 bp, Artificial Sequence
  ENSG00000130055_16 (sequence is synthesized)
gagagtggcttaagtggaatgcttcaggggtggtgggttgcaagtggggggagctttgccaacaggaggttttgaaccatgagggccctctgcccaggtgatgggcattccctaagctgc

SEQ ID NO: 283129 - DNA, 120 bp, Artificial Sequence
  ENSG00000130055_17 (sequence is synthesized)
tatggaatctgctccctttggggttttgacctgagatgtttgggaagagagtgagtaatgagaagtttctcctcaaatgaaactagaacagaggaagtaaaagggagattgctcggataa

SEQ ID NO: 283130 - DNA, 120 bp, Artificial Sequence
  ENSG00000130055_18 (sequence is synthesized)
gtggtcaaaactgtttgcccctgtccctgcccttggaatccctaggtcttccccagcttcacacccatccttcctgaaccacaggtcttttggctaccagatgaagatcgggctaatgtc

SEQ ID NO: 283131 - DNA, 120 bp, Artificial Sequence
  ENSG00000130066_0 (sequence is synthesized)
gcgcagctcttagtcgcgggccgactggtgtttatccgtcactcgccgaggttccttgggtcatggtgccagcctgactgagaagaggacgctcccgggagacgaatgaggaaccacctc

SEQ ID NO: 283132 - DNA, 120 bp, Artificial Sequence
  ENSG00000130066_1 (sequence is synthesized)
ctcctactgttcaagtacaggggcctggtccgcaaagggaagaaaagcaaaagacgaaaatggctaaattcgtgatccgcccagccactgccgccgactgcagtgacatactgcggctga

SEQ ID NO: 283133 - DNA, 120 bp, Artificial Sequence
  ENSG00000130066_2 (sequence is synthesized)
tcaaggagctggctaaatatgaatacatggaagaacaagtaatcttaactgaaaaagatctgctagaagatggttttggagagcaccccttttaccactgcctggttgcagaagtgccga

SEQ ID NO: 283134 - DNA, 120 bp, Artificial Sequence
  ENSG00000130066_3 (sequence is synthesized)
aagagcactggactccggaaggacacagcattgttggttttgccatgtactattttacctatgacccgtggattggcaagttattgtatcttgaggacttcttcgtgatgagtgattata

SEQ ID NO: 283135 - DNA, 120 bp, Artificial Sequence
  ENSG00000130066_4 (sequence is synthesized)
ccatcaacttctataaaagaagaggtgcttctgatctgtccagtgaagagggttggagactgttcaagatcgacaaggagtacttgctaaaaatggcaacagaggagtgaggagtgctgc

SEQ ID NO: 283136 - DNA, 120 bp, Artificial Sequence
  ENSG00000130066_5 (sequence is synthesized)
tgtagatgacaacctccattctattttagaataaattcccaacttctcttgctttctatgctgtttgtagtgaaataatagaatgagcacccattccaaagctttattaccagtggcgtt

SEQ ID NO: 283137 - DNA, 120 bp, Artificial Sequence
  ENSG00000130066_6 (sequence is synthesized)
gttgcatgtttgaaatgaggtctgtttaaagtggcaatctcagatgcagtttggagagtcagatctttctccttgaatatctttcgataaacaacaaggtggtgtgatcttaatatattt

SEQ ID NO: 283138 - DNA, 120 bp, Artificial Sequence
  ENSG00000130066_7 (sequence is synthesized)
gaaaaaaacttcattctcgtgagtcatttaaatgtgtacaatgtacacactggtacttagagtttctgtttgattcttttttaataaactactctttgatttaattgtttggtgtaagca

SEQ ID NO: 283139 - DNA, 120 bp, Artificial Sequence
  ENSG00000130066_8 (sequence is synthesized)
aagcaaaagacgaaaatggctaaattcgtgatccgcccagccactgccgccgactgcagtgacatactgcggctgatcaaggagctggctaaatatgaatacatggatgggcggggaggt

SEQ ID NO: 283140 - DNA, 120 bp, Artificial Sequence
  ENSG00000130066_9 (sequence is synthesized)
gggcaatgctgcttcttctgactcaacaaatggggagagcaaattgaaaatgcgtaaattggaaggcaagttctgaaattaaacgttgtactttggcctgatgttctgacctttaaggaa

SEQ ID NO: 283141 - DNA, 120 bp, Artificial Sequence
  ENSG00000130066_10 (sequence is synthesized)
gcaagagtttgtaaacttccaaatatttactattctgaactgccgtgtaaacctgacgtattcccaagtcaacataccagtataccaataggatgtgaataatgtgtgtgttgagtttaa

SEQ ID NO: 283142 - DNA, 120 bp, Artificial Sequence
  ENSG00000130066_11 (sequence is synthesized)
aaccatagcagttttgctctggcaagtaatgaaagcgttctcgcttcctgagtgtgagctccagcagactgcagagtggccagtccacagttgtagcctgacttcagtgagttctgatgt

SEQ ID NO: 283143 - DNA, 120 bp, Artificial Sequence
  ENSG00000130066_12 (sequence is synthesized)
gtgctttttgcaaatacatgttctcagaacagtgagatcatccagcagtggcctggactgcactcacataaaaatcatgagacagccatggctacttgtttctgtaatacatgcatgtgt

SEQ ID NO: 283144 - DNA, 120 bp, Artificial Sequence
  ENSG00000130066_13 (sequence is synthesized)
acagtctctagcttcgccatgtacatggcccttccgtgtacatggatgggcggggaggtaactaaaagatcctttacacaataaagtagatgatcatgataaatgaggacacagcattgt

SEQ ID NO: 283145 - DNA, 120 bp, Artificial Sequence
  ENSG00000130066_14 (sequence is synthesized)
ggtgtgagagcccagcctgttcccctttctgcgcccatccccggctcggccgccaccccgcccgcccgccccattccgttcccctgagctggccgggccggagcctcattttgttttcta

SEQ ID NO: 283146 - DNA, 120 bp, Artificial Sequence
  ENSG00000130066_15 (sequence is synthesized)
agagagaccaagtgttatgtaagaagtagtgtcggctgtgtagaaccactgactacacaggccgaagttactgagaacttggacagaaaaaatagccagcaagtgttcaaactactgagg

SEQ ID NO: 283147 - DNA, 120 bp, Artificial Sequence
  ENSG00000130066_16 (sequence is synthesized)
gcacttaagaatactagggcaggttaaaagagctgtttaagtaagtatcagagtgctgtggagactcggaagtgtttaagctgcttaagtaagtataagtgctgtggagacccggaagag

SEQ ID NO: 283148 - DNA, 120 bp, Artificial Sequence
  ENSG00000130066_17 (sequence is synthesized)
ttagatataatgtcatttgttgtaattcagtttcataaaatggttcttgtttgaccctaacgtaacagtttttgtaattgtgttaaatcacatttttttctttaatttgtcccaatcttc

SEQ ID NO: 283149 - DNA, 120 bp, Artificial Sequence
  ENSG00000130066_18 (sequence is synthesized)
aggttacagtctctagcttcgccatgtacatggcccttccgtgtacatggatgggcggggaggtaactaaaagatcctttacacaataaagtagatgatcatgataaatgaggtaaggtc

SEQ ID NO: 283150 - DNA, 120 bp, Artificial Sequence
  ENSG00000130066_19 (sequence is synthesized)
attgtactctttctttttaggctttggcataggatcagaaattctgaagaatctaagccaggttgcaatgaggtgtcgctgcagcagcatgcacttcttggtagcagaatggaatgaacc

SEQ ID NO: 283151 - DNA, 120 bp, Artificial Sequence
  ENSG00000130066_20 (sequence is synthesized)
tcaaggagctggctaaatatgaatacatggaagaacaagtaatcttaactgaaaaaggtaattcaacagtggcgggacgggggacaagcgttcggtgcctgtcaccttcgccaaggccat

SEQ ID NO: 283152 - DNA, 120 bp, Artificial Sequence
  ENSG00000130119_0 (sequence is synthesized)
gatccggaagtcggagcctagctgcgcgagagtttctgctcgctcaaccgagttgtcgtgttgccctcgcttctcagatccccgccggaagtgaagagagcaagcagatttgaacctatc

SEQ ID NO: 283153 - DNA, 120 bp, Artificial Sequence
  ENSG00000130119_1 (sequence is synthesized)
tgctttcaagctggtcatcatgatgaaacttagacacaaaaataaaaagccaggtgaaggttccaagggccacaagaagataagttggccctaccctcagcctgcaaagcaaaatgggaa

SEQ ID NO: 283154 - DNA, 120 bp, Artificial Sequence
  ENSG00000130119_2 (sequence is synthesized)
gaaagcaacctccaaagtgccctctgcacctcattttgttcaccccaatgatcatgccaatcgagaggctgaattaaagaagaagtgggttgaggagatgagggagaagcagcaagccgc

SEQ ID NO: 283155 - DNA, 120 bp, Artificial Sequence
  ENSG00000130119_3 (sequence is synthesized)
ccgggagcaagaaagacaaaaacgcaggaccattgagagctactgtcaggatgtcctaagacgccaggaggagtttgagcataaggaggaagttttgcaggaattaaatatgtttcctca

SEQ ID NO: 283156 - DNA, 120 bp, Artificial Sequence
  ENSG00000130119_4 (sequence is synthesized)
gctggatgacgaggccacgaggaaggcttattacaaggagttccgtaaggtggtggaatactctgatgtgattctggaagtcctggatgccagagacccattaggctgccgctgcttcca

SEQ ID NO: 283157 - DNA, 120 bp, Artificial Sequence
  ENSG00000130119_5 (sequence is synthesized)
aatggaggaggctgtcctgcgagcacaaggcaacaagaagctggtcctggtcttgaacaagattgacctggtccccaaggaggttgtggagaaatggctggattaccttcggaatgagtt

SEQ ID NO: 283158 - DNA, 120 bp, Artificial Sequence
  ENSG00000130119_6 (sequence is synthesized)
gccaaccgtggctttcaaggccagtacccagcatcaggtcaaaaacctgaatcgttgcagtgtgccagtagatcaggcctctgagtcactgctgaaaagcaaagcctgctttggagctga

SEQ ID NO: 283159 - DNA, 120 bp, Artificial Sequence
  ENSG00000130119_7 (sequence is synthesized)
aaacctcatgagggttctggggaactattgccgccttggtgaagtgcgcacccacattcgtgtgggtgttgtgggtcttcccaatgttgggaagagcagcctgatcaatagcctgaagcg

SEQ ID NO: 283160 - DNA, 120 bp, Artificial Sequence
  ENSG00000130119_8 (sequence is synthesized)
cagccgcgcatgcagcgtgggagctgttcctggaattaccaaattcatgcaggaggtctacctggacaagttcatccggctcttggatgctccaggcattgtcccagggcccaactcaga

SEQ ID NO: 283161 - DNA, 120 bp, Artificial Sequence
  ENSG00000130119_9 (sequence is synthesized)
agcgctgcaacctggaggagatttccaactattatggcgtctctgggttccagaccactgagcactttctgacggcagtggcccaccgtttggggaagaagaagaagggaggcttatata

SEQ ID NO: 283162 - DNA, 120 bp, Artificial Sequence
  ENSG00000130119_10 (sequence is synthesized)
gtcaggaacaggcggccaaagctgtcctagctgactgggtgagcgggaagatcagcttctatataccaccaccagccactcacactctgcccacccatctcagtgctgagatcgttaagg

SEQ ID NO: 283163 - DNA, 120 bp, Artificial Sequence
  ENSG00000130119_11 (sequence is synthesized)
aaatgaccgaggtctttgacatcgaggatactgagcaggccaatgaagacaccatggaatgcttggccaccggagaatctgatgagctgttgggtgacacggacccacttgaaatggaga

SEQ ID NO: 283164 - DNA, 120 bp, Artificial Sequence
  ENSG00000130119_12 (sequence is synthesized)
tcaagttgctccattctccgatgacgaaaatagcagatgccattgaaaataaaaccaccgtgtataagattggagatctcactgggtattgcaccaatccgaaccgtcatcagatggggt

SEQ ID NO: 283165 - DNA, 120 bp, Artificial Sequence
  ENSG00000130119_13 (sequence is synthesized)
gggctaaacgcaatgtggaccaccgccctaagagcaacagtatggtggatgtctgctcagtggaccgccgctcagtgctgcagaggatcatggagacggaccccctgcaacagggccagg

SEQ ID NO: 283166 - DNA, 120 bp, Artificial Sequence
  ENSG00000130119_14 (sequence is synthesized)
ctctggcatctgccctgaaaaataagaagaagatgcagaaacgtgcagataaaatcgccagcaagctgtctgattccatgatgtctgctctcgacctctctggcaatgctgatgatggtg

SEQ ID NO: 283167 - DNA, 120 bp, Artificial Sequence
  ENSG00000130119_15 (sequence is synthesized)
ttggtgactaatcgactgatctcacttcccttccgctccaagcaccagttccggtggtacgggggaataccagtgaaatagtttggttctccctgaagcatctgcatattgaaagaacgc

SEQ ID NO: 283168 - DNA, 120 bp, Artificial Sequence
  ENSG00000130119_16 (sequence is synthesized)
gtttggttctccctgaagcatctgcatattgaaagaacgctttccccactgtgtgtcttctccccctcctccagtaaaaacagtcccggctaggtgctgtggctcacgtctgtaatccca

SEQ ID NO: 283169 - DNA, 68 bp, Artificial Sequence
  ENSG00000130119_17 (sequence is synthesized)
atcgcctgaacctgggagactcggcaccattgcactctagcctgggcaacaacacgaaactccgtccc

SEQ ID NO: 283170 - DNA, 120 bp, Artificial Sequence
  ENSG00000130119_18 (sequence is synthesized)
agtcggagcctagctgcgcgagagtttctgctcgctcaaccgagttgtcgtgttgccctcgcttctcagatccccgccggaagtgtaagtaagaaacttctctcctcttttctcacaatg

SEQ ID NO: 283171 - DNA, 120 bp, Artificial Sequence
  ENSG00000130119_19 (sequence is synthesized)
cctctatttaacccctactctgttttacaagagaaataaaagaagtatcagcagagctcaggtgctaacacctgttgagggctgacctacaaaactctgcctacaaaactctcttagaca

SEQ ID NO: 283172 - DNA, 120 bp, Artificial Sequence
  ENSG00000130119_20 (sequence is synthesized)
ggtgaatatgccactagaagttaggttgctggtagacctgggggtccctgcgggagggtgatggtttctttaccaccccacaggagatttcagtggcaaggcatgcctgcagtgggcttt

SEQ ID NO: 283173 - DNA, 120 bp, Artificial Sequence
  ENSG00000130119_21 (sequence is synthesized)
gggccatgcatcttccaagtccataggtcttcacctgggtggcagtgagaaaaagtagaaagtaatgagcctcctgtgtctctggaaggttctagggatagggtagagggaagaagagaa

SEQ ID NO: 283174 - DNA, 120 bp, Artificial Sequence
  ENSG00000130119_22 (sequence is synthesized)
caaacaagcctggcttgtgctgaagtgtggtaggcactaccctgtttgcgtgaagagaaaacaaagcacctgttagtagggaggctttagggggaagccccgtcttgggggcatttctgg

SEQ ID NO: 283175 - DNA, 120 bp, Artificial Sequence
  ENSG00000130119_23 (sequence is synthesized)
gcagattgtgaattggaggaatctctttaactgaagtactctggctggaccctgcccttgtgtgaccatgtctcctattgcaccagcatttgaattccatggctcaagagggttctggta

SEQ ID NO: 283176 - DNA, 120 bp, Artificial Sequence
  ENSG00000130119_24 (sequence is synthesized)
ccatttattcacagactgtatcctcgagagagctgctatatatgggagtgtaccagccaactccttttccagtgtctgtaagtcacctcattaaagtataattagctgtctcctctggga

SEQ ID NO: 283177 - DNA, 120 bp, Artificial Sequence
  ENSG00000130119_25 (sequence is synthesized)
gatcctaccccatcagacaagggcagtgagcccaagcagtgccagaggccctcagaaagggattagggtagatgattgcaactgaaacacaatcttctttctttgccagggtattttggg

SEQ ID NO: 283178 - DNA, 120 bp, Artificial Sequence
  ENSG00000130119_26 (sequence is synthesized)
ggttttgccccaaaatataccctgggcatagcattactgcagtcttggatgtctaccccaaacttccacaccatccttcgacccacagctgcacctttatttatttattttgctctgttg

SEQ ID NO: 283179 - DNA, 120 bp, Artificial Sequence
  ENSG00000130119_27 (sequence is synthesized)
gtgagccactgtgcccagcctcacagctgcatcttaaccttacctttgcctctgcctctcaagctggtacctcctaatttacatcctaagagtggaaccatgtgacaaggactggagtgc

SEQ ID NO: 283180 - DNA, 120 bp, Artificial Sequence
  ENSG00000130119_28 (sequence is synthesized)
cattggctgtggactgttcaggcagggaagtacaagaccactcttgtattcaggggcaaccaaaggagagaattacgtacttgttgagtacaaactgcaccaagccctggagacccatta

SEQ ID NO: 283181 - DNA, 120 bp, Artificial Sequence
  ENSG00000130119_29 (sequence is synthesized)
ggagacccattaccaccgttaaccctcaatacagctctgctagtaagggattcgtctccccaaatgaaaaaaaaaagtaatctcagaatgttggccgagcatggtggctcacacctgtaa

SEQ ID NO: 283182 - DNA, 75 bp, Artificial Sequence
  ENSG00000130119_30 (sequence is synthesized)
gaggttgcagtgagttcgtctcggaaaaaaaaaaaaaaagttgacaggatggccagacccaagtgggcgtattaa

SEQ ID NO: 283183 - DNA, 120 bp, Artificial Sequence
  ENSG00000130119_31 (sequence is synthesized)
aaaagttgacaggatggccagacccaagtgggcgtattaagtggtggtgctaggattggaacccaagcgtgattaaaaccctatgcaggccctttcctctatattgtactgcctccttaa

SEQ ID NO: 283184 - DNA, 120 bp, Artificial Sequence
  ENSG00000130119_32 (sequence is synthesized)
atcaagtccgttaaatgcatttaacgttaaattttttcttttttggtttaaaaaactctagtttcttaaactactagtttttagtgtcttgctaaaactatgtgctcttgaataggctac

SEQ ID NO: 283185 - DNA, 120 bp, Artificial Sequence
  ENSG00000130119_33 (sequence is synthesized)
aacttatttcacactatctcattgaactctcctggtatgtgatagtgttataatgaaaaattgcataccaggacagctaagtctattttgcaaccatacagcgtttcataatttagcatt

SEQ ID NO: 283186 - DNA, 120 bp, Artificial Sequence
  ENSG00000130119_34 (sequence is synthesized)
taaaatacagacagtccccgacttttggtggtttgatgtgggatttttggtggaaaagcagtatacattcagaatgcacctctacttatgatggggctacttcctggtaaacccattgta

SEQ ID NO: 283187 - DNA, 120 bp, Artificial Sequence
  ENSG00000130119_35 (sequence is synthesized)
atgtgcaaattacgggtttatcaggaggtgaccccatcggtaatggagaagtgctgggaggtaaatattagaaatggaagtatctaaatgagtaagaaacagcatgggagcataatttgg

SEQ ID NO: 283188 - DNA, 120 bp, Artificial Sequence
  ENSG00000130119_36 (sequence is synthesized)
aaacagcatgggagcataatttggccaaaatcaaacagaactaaagtagtcatgtcggtaagaatttgggactgcaggccagttacgatagctctcacctgtaatcccagcattttggga

SEQ ID NO: 283189 - DNA, 120 bp, Artificial Sequence
  ENSG00000130119_37 (sequence is synthesized)
ggtcaggagttcaagaccagcctaaacaatatggcgaaacctcatctctaccaaaaaaatacaaagattagctgggcatggtgtctcatgcctgtagtcccagctacctatggggctgag

SEQ ID NO: 283190 - DNA, 120 bp, Artificial Sequence
  ENSG00000130119_38 (sequence is synthesized)
gcaggaggatctcttgagcccaggaggtcgatgctgcattgagccgagattgtgccactgctctccagcgtgggcaacagagtgagactgtctcagggggaaaaaaaaagaggaaaacaa

SEQ ID NO: 283191 - DNA, 120 bp, Artificial Sequence
  ENSG00000130119_39 (sequence is synthesized)
aaaagacgttgggagtgcagtttctctacctacagcatatctcaaaggttttttttaaaaaagtattttcttaactttttaccttcatttttcaaaacaattagggtacaatttacatat

SEQ ID NO: 283192 - DNA, 120 bp, Artificial Sequence
  ENSG00000130119_40 (sequence is synthesized)
agtaaagttcactctttatagttttagttatgtgagtttgtacaaacatatacaggagtgaaccactaccacaatcgaaatatagttgcatcacccccctaaaactctccaggccctttt

SEQ ID NO: 283193 - DNA, 120 bp, Artificial Sequence
  ENSG00000130119_41 (sequence is synthesized)
gtagtcaactcctacccccgaccctcagattctgctaaccactgatttgttttctgcccctatagttttgctttagtatgactgtcatatcaatagaatcatacaatgagtaggcttatt

SEQ ID NO: 283194 - DNA, 120 bp, Artificial Sequence
  ENSG00000130119_42 (sequence is synthesized)
ttatgccttcaggttttaaaaattataaacatttacattacagtaaaattcactctggtatacagttctataaagctctgataaatgtgtagagttgtgtaaccaccaatgcaaccaagg

SEQ ID NO: 283195 - DNA, 120 bp, Artificial Sequence
  ENSG00000130119_43 (sequence is synthesized)
tacagaacagtcctcttagcctctccctaccaaatttattcctgctactttgtagtcaaaaccagtcccctacacccaaaccctggcagtcactggtttttttcttcgttctcttttttt

SEQ ID NO: 283196 - DNA, 66 bp, Artificial Sequence
  ENSG00000130119_44 (sequence is synthesized)
tgctgggattacaagagtgagccactgcgcctggcctttttctttgttcactgaggctggagtgca

SEQ ID NO: 283197 - DNA, 120 bp, Artificial Sequence
  ENSG00000130119_45 (sequence is synthesized)
taggcatgaaccaccgtgtccggccatatattttcgtcttttgaagactgttatatacatgaaattatatggtatgtagcattttgagagcgacttcttttgctatgagtaatacatttg

SEQ ID NO: 283198 - DNA, 120 bp, Artificial Sequence
  ENSG00000130119_46 (sequence is synthesized)
agattcatccatatttctcagtatattaatagttcttatttctgagtcactccattgtgtggatttactactgtttgttccccagttgaaggatgtttaggatctttgcagttttggaca

SEQ ID NO: 283199 - DNA, 120 bp, Artificial Sequence
  ENSG00000130119_47 (sequence is synthesized)
attacaagtaaagctgctataaacatttgtatgcaacattttgtgttttcatttatctatagtaaatacctagagttggattgctgggatatatggtaagcatatgtttgacattttaag

SEQ ID NO: 283200 - DNA, 120 bp, Artificial Sequence
  ENSG00000130119_48 (sequence is synthesized)
aaacttctaaactgtttttcaaagtggctctaccatttcacattcccatcagtatgaaagtttcatttccacatcctctctagtacttgggggtgtcagtttagttttttaatttttaaa

SEQ ID NO: 283201 - DNA, 120 bp, Artificial Sequence
  ENSG00000130119_49 (sequence is synthesized)
ttttttaatttttttaatacatttaaatagagatggggtctcactgtgttgaccaggatggtcttgaactgctggcctcaagtaatcctcccatctcggtctcccaaagtgctaggatta

SEQ ID NO: 283202 - DNA, 120 bp, Artificial Sequence
  ENSG00000130119_50 (sequence is synthesized)
caggtgtgagccaccatgcccagccaggttttttgacattaagtatgtggtggtatctcatcgtttttatttgcatcctctaatgatttgagcatattttatatgcttatttgctatcta

SEQ ID NO: 283203 - DNA, 120 bp, Artificial Sequence
  ENSG00000130119_51 (sequence is synthesized)
catatcttctttggcaaggtgttcacatctcttgcatattttggattgttttattatttttgaattttgaggattatatgctggatacaggggtgtttttttttttttttttttttgaaa

SEQ ID NO: 283204 - DNA, 85 bp, Artificial Sequence
  ENSG00000130119_52 (sequence is synthesized)
tcctgagtagctggaattacaggcgcaggccaccatgcttggctaacttttatatttttaccagagacaatggacctcaagtgat

SEQ ID NO: 283205 - DNA, 120 bp, Artificial Sequence
  ENSG00000130119_53 (sequence is synthesized)
tacaggcatgagccattgtgcctggccagtatcttgtcttctcattctgtaaacggtgtctttttttcattatgggaaagctttattgacacatttgtttttatttttaaaaattatggt

SEQ ID NO: 283206 - DNA, 120 bp, Artificial Sequence
  ENSG00000130119_54 (sequence is synthesized)
tggtaaaatacacagaacataaacgttaccatctgatatggtttggctgtgtccacacctaaatctcgaattgtagttcccataatccccacacatatgtaccacattttctttatccag

SEQ ID NO: 283207 - DNA, 72 bp, Artificial Sequence
  ENSG00000130119_55 (sequence is synthesized)
ggcagaatgatttatattatgcataaccaaaactgtacttattaaacaataacctcccaaccccttctgccc

SEQ ID NO: 283208 - DNA, 120 bp, Artificial Sequence
  ENSG00000130119_56 (sequence is synthesized)
ctgtacttattaaacaataacctcccaaccccttctgcccacaacctctggcgactgccatgctactttctgtctctgaatttgaataccctgatagtcatataatatttatctttttgt

SEQ ID NO: 283209 - DNA, 120 bp, Artificial Sequence
  ENSG00000130119_57 (sequence is synthesized)
gactggcttatttcactttgcataatgtattcaagcttaatctgtgttgtagcctgcgtcagaatttcttttctttttaatgctgagtattattctattgtgtgtatataccacatttta

SEQ ID NO: 283210 - DNA, 120 bp, Artificial Sequence
  ENSG00000130119_58 (sequence is synthesized)
tttatccattcatccactgatggacatgtgcattgttcccaccttttggctattgtgaaaaatgctgttatgaatatgggtatggagatctctccccttattttgagacaggatctcact

SEQ ID NO: 283211 - DNA, 90 bp, Artificial Sequence
  ENSG00000130119_59 (sequence is synthesized)
caggatctcactcataggtcactgtagcttcgacctcctgggctcaagcgaacctcccacctccgcctcttgagtagctgggaccacagg

SEQ ID NO: 283212 - DNA, 120 bp, Artificial Sequence
  ENSG00000130119_60 (sequence is synthesized)
tggctgttaaatttattaatttgtttttctatggatcatgctttttgtgttacatcagaggagtctttgcttaacatgagatgacaaaggttttctcccatgtttcctcctaaaagtttt

SEQ ID NO: 283213 - DNA, 120 bp, Artificial Sequence
  ENSG00000130119_61 (sequence is synthesized)
atagttttaggttttacatttaggtctatgatccattttgagtcaatttttgtatatggtacaaggtatgaatctatgctttttaaaaaaatatggttacccaatttttctagcagtatg

SEQ ID NO: 283214 - DNA, 120 bp, Artificial Sequence
  ENSG00000130119_62 (sequence is synthesized)
tgctaaaactttgctaaagtcacttagttctagtagctttttttgcagatttaaccagactttctacatagacaatcatatcttctgtgaataaacatggttttatttcttcatgtctaa

SEQ ID NO: 283215 - DNA, 120 bp, Artificial Sequence
  ENSG00000130119_63 (sequence is synthesized)
ctggtcctggtcttgaacaagattgggaacagaggccccttcagggagggctaacgcatcccgtagaccagactatcctttctaactccaacctgcggactggatgggaatgacagggcc

SEQ ID NO: 283216 - DNA, 120 bp, Artificial Sequence
  ENSG00000130119_64 (sequence is synthesized)
agttgagagacctgttgatgacctggtccccaaggaggttgtggagaaatggctggattaccttcggaatgagttgccaaccgtggctttcaaggccagtacccagcatcaggtcaaaaa

SEQ ID NO: 283217 - DNA, 120 bp, Artificial Sequence
  ENSG00000130147_0 (sequence is synthesized)
gaaacagagacaagcaccccaacagtagggtgcttcgaggtcctggaggggagccctggccctgtggagagagaccgagtcgtgcagcgtccgtggcctgcatttgaaactgaagggcaa

SEQ ID NO: 283218 - DNA, 120 bp, Artificial Sequence
  ENSG00000130147_1 (sequence is synthesized)
gaggctggtgagatccgagagtcatgccgctgcgtggaggaacatgctgaacctctggaggaacggctctacctccagcgtctcccttctctcctggacagaaggccgtgtcctgggact

SEQ ID NO: 283219 - DNA, 120 bp, Artificial Sequence
  ENSG00000130147_2 (sequence is synthesized)
tctctgatggcgagaggctgcggctgtaccaggaagaaatatgaagccttagcggctttacccgggaagcgagtttcgagatggcggctcagcggatccgagcggccaactccaatggcc

SEQ ID NO: 283220 - DNA, 120 bp, Artificial Sequence
  ENSG00000130147_3 (sequence is synthesized)
tccctcgctgcaagtcagaggggaccctgattgacctgagcgaagggttttcagagacgagctttaatgacatcaaagtgccttctcccagtgccttgctcgtagacaaccccacacctt

SEQ ID NO: 283221 - DNA, 120 bp, Artificial Sequence
  ENSG00000130147_4 (sequence is synthesized)
tcggaaatgcaaaggaagtgattgcgatcaaggactattgccccaccaacttcaccacactgaagttctccaagggcgaccatctctacgtcttggacacatctggcggtgagtggtggt

SEQ ID NO: 283222 - DNA, 120 bp, Artificial Sequence
  ENSG00000130147_5 (sequence is synthesized)
acgcacacaacaccaccgaaatgggctacatcccctcctcctatgtgcagcccttgaactaccggaactcaacactgagtgacagcggtatgattgataatcttccagacagcccagacg

SEQ ID NO: 283223 - DNA, 120 bp, Artificial Sequence
  ENSG00000130147_6 (sequence is synthesized)
aggtagccaaggagctggagctgctcgggggatggacagatgacaaaaaagtaccaggcagaatgtacagtaataaccctttctggaatggggtccagaccaatccatttctgaatggga

SEQ ID NO: 283224 - DNA, 120 bp, Artificial Sequence
  ENSG00000130147_7 (sequence is synthesized)
acgtgcccgtcatgcccagcctggatgagctgaatcccaaaagtactgtggatttgctcctttttgacgcaggtacatcctccttcaccgaatccagctcagccaccacgaatagcactg

SEQ ID NO: 283225 - DNA, 120 bp, Artificial Sequence
  ENSG00000130147_8 (sequence is synthesized)
gcaacatcttcgatgagcttccagtcacaaacggactccacgcagagccgccggtcaggcgggacaaccccttcttcagaagcaagcgctcctacagtctctcggaactctccgtcctcc

SEQ ID NO: 283226 - DNA, 120 bp, Artificial Sequence
  ENSG00000130147_9 (sequence is synthesized)
aagccaagtccgatgctcccacatcgtcgagtttcttcaccggcttgaaatcacctgcccccgagcaatttcagagccgggaggattttcgaactgcctggctaaaccacaggaagctgg

SEQ ID NO: 283227 - DNA, 120 bp, Artificial Sequence
  ENSG00000130147_10 (sequence is synthesized)
cccggtcttgccacgacctggacttgcttggccaaagccctggttggggccagacccaagccgtggagacaaacatcgtgtgcaagctggatagctccgggggtgctgtccagcttcctg

SEQ ID NO: 283228 - DNA, 120 bp, Artificial Sequence
  ENSG00000130147_11 (sequence is synthesized)
acaccagcatcagcatccacgtgcccgagggccacgtcgcccctggggagacccagcagatctccatgaaagccctgctggaccccccgctggagctcaacagtgacaggtcctgcagca

SEQ ID NO: 283229 - DNA, 120 bp, Artificial Sequence
  ENSG00000130147_12 (sequence is synthesized)
tcagccctgtgctggaggtcaagctgagcaacctggaggtgaaaacctctatcatcttggagatgaaagtgtcagccgagataaaaaatgacctttttagcaaaagcacagtgggcctcc

SEQ ID NO: 283230 - DNA, 120 bp, Artificial Sequence
  ENSG00000130147_13 (sequence is synthesized)
agtgcctgaggagcgactcgaaggaagggccatatgtctccgtcccgctcaactgcagctgtggggacacggtccaggcacagctgcacaacctggagccctgtatgtacgtggctgtcg

SEQ ID NO: 283231 - DNA, 120 bp, Artificial Sequence
  ENSG00000130147_14 (sequence is synthesized)
tggcccatggcccaagcatcctctacccttccaccgtgtgggacttcatcaataaaaaagtcacagtgggtctctacggccctaaacacatccacccatccttcaagacggtagtgacca

SEQ ID NO: 283232 - DNA, 120 bp, Artificial Sequence
  ENSG00000130147_15 (sequence is synthesized)
tttttgggcatgactgtgccccaaagacgctcctggtcagcgaggtcacacgccaggcacccaaccctgccccggtggccctgcagctgtgggggaagcaccagttcgttttgtccaggc

SEQ ID NO: 283233 - DNA, 120 bp, Artificial Sequence
  ENSG00000130147_16 (sequence is synthesized)
cccaggatctcaaggtctgtatgttttccaatatgacgaattacgaggtcaaagccagcgagcaggccaaagtggtgcgaggattccagctgaagctgggcaaggtgagccgcctgatct

SEQ ID NO: 283234 - DNA, 120 bp, Artificial Sequence
  ENSG00000130147_17 (sequence is synthesized)
tccccatcacctcccagaaccccaacgagctctctgacttcacgctgcgggttcaggtgaaggacgaccaggaggccatcctcacccagttttgtgtccagactcctcagccacccccta

SEQ ID NO: 283235 - DNA, 120 bp, Artificial Sequence
  ENSG00000130147_18 (sequence is synthesized)
aaagtgccatcaagccttccgggcaaaggaggtttctcaagaagaacgaagtcgggaaaatcatcctgtccccgtttgccaccactacaaagtacccgactttccaggaccgcccggtgt

SEQ ID NO: 283236 - DNA, 120 bp, Artificial Sequence
  ENSG00000130147_19 (sequence is synthesized)
ccagcctcaagtttggtaagttgctcaagactgtggtgcggcagaacaagaaccactacctgctggagtacaagaagggcgacgggatcgccctgctcagcgaggagcgggtcaggctcc

SEQ ID NO: 283237 - DNA, 120 bp, Artificial Sequence
  ENSG00000130147_20 (sequence is synthesized)
ggggccagctgtggaccaaggagtggtacatcggctactaccagggcagggtgggcctcgtgcacaccaagaacgtgctggtggtcggcagggcccggcccagcctgtgctcgggccccg

SEQ ID NO: 283238 - DNA, 120 bp, Artificial Sequence
  ENSG00000130147_21 (sequence is synthesized)
gagcacctcggtgctgctggagcagatcctgcggccctgcaaattcctcacgtacatctatgcctccgtgaggaccctgctcatggagaacatcagcagctggcgctccttcgctgacgc

SEQ ID NO: 283239 - DNA, 120 bp, Artificial Sequence
  ENSG00000130147_22 (sequence is synthesized)
cctgggctacgtgaacctgccgctcacctttttctgccgggcagagctggatagtgagcccgagcgggtggcgtccgtcctagaaaagctgaaggaggactgtaacaacactgagaacaa

SEQ ID NO: 283240 - DNA, 120 bp, Artificial Sequence
  ENSG00000130147_23 (sequence is synthesized)
agaacggaagtccttccagaaggagcttgtgatggccctactgaagatggactgccagggcctggtggtcagactcatccaggactttgtgctcctgaccacggctgtagaggtggccca

SEQ ID NO: 283241 - DNA, 120 bp, Artificial Sequence
  ENSG00000130147_24 (sequence is synthesized)
gcgctggcgggagctggctgagaagctggccaaggtctccaagcagcagatggacgcctacgagtctccccaccgggacaggaacggggttgtggacagcgaggccatgtggaagcctgc

SEQ ID NO: 283242 - DNA, 120 bp, Artificial Sequence
  ENSG00000130147_25 (sequence is synthesized)
gtatgacttcttactcacctggagccatcagatcggggacagctaccgggatgtcatccaggagctgcacctgggcctggacaagatgaaaaaccccatcaccaagcgctggaagcacct

SEQ ID NO: 283243 - DNA, 120 bp, Artificial Sequence
  ENSG00000130147_26 (sequence is synthesized)
cactgggactctgatcttggtgaactccctggacgttctgagagcagccgccttcagccctgcggaccaggacgacttcgtgatttgaatgggtcccctcccctcctgctgctctggagt

SEQ ID NO: 283244 - DNA, 120 bp, Artificial Sequence
  ENSG00000130147_27 (sequence is synthesized)
gcaagccctcttctgccctgcgtgccctgctgtcaccgcggagctgaagagggaggaaggggcggctgctcagacagatttagggcccgccagctaggctacacccatcatgcgccgccc

SEQ ID NO: 283245 - DNA, 120 bp, Artificial Sequence
  ENSG00000130147_28 (sequence is synthesized)
tcctccatcgagggagaggcctgaagggactgcctactgcagctcgttgccaatcacatagctttctatttgttaagtataaatttaaatttaaaatcacttttttaacgaatgggggga

SEQ ID NO: 283246 - DNA, 120 bp, Artificial Sequence
  ENSG00000130147_29 (sequence is synthesized)
agggatctatgagaaaggtggtatctaatttttttatggaccataaaggtttaaaagaaaataggggcacaggctgttgaggtttttatgttgttatagacctttttaaattatgttaga

SEQ ID NO: 283247 - DNA, 120 bp, Artificial Sequence
  ENSG00000130147_30 (sequence is synthesized)
gatgtatataggtatttaaaggtcactgggagcgtttctgattcccggccacactttgcatttcaacactcagcccggaaagatgctcgttcggttgttggacctctttcactccctgcg

SEQ ID NO: 283248 - DNA, 120 bp, Artificial Sequence
  ENSG00000130147_31 (sequence is synthesized)
tgtaagaaggtgaatcacgtgggaaaaagtggcttttcagtaaacgggtacagctcattctttctgagaaggccccaggtcctgctccctcctcggatttgattgtcttccgtgctttgc

SEQ ID NO: 283249 - DNA, 120 bp, Artificial Sequence
  ENSG00000130147_32 (sequence is synthesized)
ctcactcgtagtaaatgaccatccatagaatatgtgaatctttggtgagcttcagtgggcagagtgaagtcccgcattagcatttaggtgccctgagctgtttctgccaatagattagaa

SEQ ID NO: 283250 - DNA, 120 bp, Artificial Sequence
  ENSG00000130147_33 (sequence is synthesized)
agcagccatgagttgacagtctttagggcccctgccagtgtgcaattagtcattgacaagaacaatgccatttgagagtgaggtggtccctgctgctacgaggccattgtactgtttttt

SEQ ID NO: 283251 - DNA, 120 bp, Artificial Sequence
  ENSG00000130147_34 (sequence is synthesized)
ccttgaggtcaaagcagtgcttcccatagagtttgctgcctcttctgtggacaggaagaaaacttcatgaccgaatcagagccttggtggccactgactctcgtgcttattgcagatgct

SEQ ID NO: 283252 - DNA, 120 bp, Artificial Sequence
  ENSG00000130147_35 (sequence is synthesized)
gtggttggcctcacaagcaacgccttatgctgatgtgcagaggtgccagctgccatttgccaaactctgcatttcatttcatctaaggcttaacccctcttccttcctggtgtacctgtg

SEQ ID NO: 283253 - DNA, 120 bp, Artificial Sequence
  ENSG00000130147_36 (sequence is synthesized)
tctcctcggaaggaagtcatagtttagatgaaaccattttttgtacaatgtaaagatcatctgagcaagatgagcattttgtaaaaatgaaaatgtgactcacataaaatcaggaacttg

SEQ ID NO: 283254 - DNA, 120 bp, Artificial Sequence
  ENSG00000130147_37 (sequence is synthesized)
acacagtgttgcattaataactttagggtgcagacatgctgtgtgaatctcacaatgcgtcgtagatgtcgcgtgttggaagggagcaggaggaaggactgatactggcaaatcagtaga

SEQ ID NO: 283255 - DNA, 120 bp, Artificial Sequence
  ENSG00000130147_38 (sequence is synthesized)
gtgaggtgatccttagcaacgtgccaggacacttcctgtgtgcctgcagttgtcagggaccatttgggatcccgaatctcattctctaaaactgctttcttgaaacatgttacttcctta

SEQ ID NO: 283256 - DNA, 120 bp, Artificial Sequence
  ENSG00000130147_39 (sequence is synthesized)
gtataatcaatgtatactcccttactggcctgaaacgttgtatagctacttattcagatactgaagaccaacggactgaaaaaaagaacaaacattagctattttatgctgcaagaacca

SEQ ID NO: 283257 - DNA, 120 bp, Artificial Sequence
  ENSG00000130147_40 (sequence is synthesized)
ggacacacaattcgccaatcatcccaccatataaccttcgattgtgcttctcaactccaccccataatttctcccagagaccatctatcaccttttccccaaagaagaaacaaaaccagt

SEQ ID NO: 283258 - DNA, 120 bp, Artificial Sequence
  ENSG00000130147_41 (sequence is synthesized)
tgcaccttaaaccatggatattttttcctcaggggctttaaatagtttcctatgcaacgtgtcttgtagcacaaataaaattctacaaaagttgcagtaaattttatttggatattttaa

SEQ ID NO: 283259 - DNA, 80 bp, Artificial Sequence
  ENSG00000130147_42 (sequence is synthesized)
gcgcccccggctgggccgagccgctggccgacgagcggagcctcaggagccggcggggacgccatgcgagccagcgtctc

SEQ ID NO: 283260 - DNA, 120 bp, Artificial Sequence
  ENSG00000130147_43 (sequence is synthesized)
ggtttggcgaggagagacagcaggatttctgggtgccggacatgcttctcggtcagagctgcgtctcccttctctcctggacagaaggccgtgtcctgggacttctctgatggcgagagg

SEQ ID NO: 283261 - DNA, 120 bp, Artificial Sequence
  ENSG00000130147_44 (sequence is synthesized)
ctgcggctgtaccaggaagaaacatattgccgagtggatgccgccgcgcagcgtgtttgcttgaggcagaagcttcagcatctgctgggataactggaggaagaaatatgaagccttagc

SEQ ID NO: 283262 - DNA, 120 bp, Artificial Sequence
  ENSG00000130147_45 (sequence is synthesized)
acgccatgcgagccagatccctcctgtgaggatgaaattgaaaactccggtttctggcttggcgatcgggtgaccgagcagccgcgaggtgacagcgccggcggcccgcgggcggggacc

SEQ ID NO: 283263 - DNA, 120 bp, Artificial Sequence
  ENSG00000130147_46 (sequence is synthesized)
ggcgcgttgttctctgagcgatgtttaccgagaagcccgctccgcggcacgggcgggtgtcagttgggaccccaaccctgggtcccgcggctcctagcccggggcctgcggtgtagacgg

SEQ ID NO: 283264 - DNA, 120 bp, Artificial Sequence
  ENSG00000130147_47 (sequence is synthesized)
gggttggggacaggcccagctggccctgaccgggtgtcgggcgcccagagatgccgcgcgggaggagccgcgggagagccgccggactcagcgagcagagggtcgtggagcctgatggat

SEQ ID NO: 283265 - DNA, 120 bp, Artificial Sequence
  ENSG00000130147_48 (sequence is synthesized)
cgatgagatctgaaaaagaacactgtgcgagattgtattcctgcttattctttccaagttagtaggcagattggaactatagaatttatccgtgataataataaagttcgcataactttt

SEQ ID NO: 283266 - DNA, 120 bp, Artificial Sequence
  ENSG00000130147_49 (sequence is synthesized)
agcacagcagcaggggaagaggacagtgaggctgggatgcagcctccatgcagcctgtcgctttctccacaggagctctggcctgggccagactgccgagtcaccctgattcaggagtag

SEQ ID NO: 283267 - DNA, 120 bp, Artificial Sequence
  ENSG00000130147_50 (sequence is synthesized)
cagttccgtctgtcgcattgatgttggctggttctgctctcaaaggcgccggctctgtagtgatgtcagcgccgtgtgacttgaggaggagaccccactgctgcgcgtctcccttctctc

SEQ ID NO: 283268 - DNA, 120 bp, Artificial Sequence
  ENSG00000130147_51 (sequence is synthesized)
ctggacagaaggccgtgtcctgggacttctctgatggcgagaggctgcggctgtaccagcgaatccactttctgttgccacccgtggaacgttctcactcttccaagaagccaggctagc

SEQ ID NO: 283269 - DNA, 120 bp, Artificial Sequence
  ENSG00000130147_52 (sequence is synthesized)
gctcccccaccccagcagccgcgggacagagcccaggttgggtggtgtgtacacaaaggagggattgttctcacgtcgccctgcgacgagatggggatggacccgcggttagaggtcacc

SEQ ID NO: 283270 - DNA, 120 bp, Artificial Sequence
  ENSG00000130147_53 (sequence is synthesized)
ctccctggggcgtcaggggagcatttgtccttgaaacacgctggcaaaaaatgttccaaggaagcctcagctggtgtttgtgaggaagagctggattaaatggtgttctggtaaaatgtt

SEQ ID NO: 283271 - DNA, 120 bp, Artificial Sequence
  ENSG00000130147_54 (sequence is synthesized)
ctccctttggcgtgagccgagctagcaacttgcttctaaccagtaggatgcatccaagttgatgctgtgccttcctcccgtgattacattatgtgggcttagaacttcttccttgacaac

SEQ ID NO: 283272 - DNA, 120 bp, Artificial Sequence
  ENSG00000130147_55 (sequence is synthesized)
agatggtctcccctgctggctgtggtggagcaggctgccatatagagaggccatgtggcaaggaactgagggtggcctcccccggcagccagcatgcagttgaagcctcagtcccatggc

SEQ ID NO: 283273 - DNA, 120 bp, Artificial Sequence
  ENSG00000130147_56 (sequence is synthesized)
cacaagtaactggatgctacaacaagcagatgaccctggaggacccctcccccagatgaccctggaggacccctccccagtctagccttgagatgacaccccagcctgggccaagacttt

SEQ ID NO: 283274 - DNA, 120 bp, Artificial Sequence
  ENSG00000130147_57 (sequence is synthesized)
cgcagttggctggtgtttgtttgcacaaggattctttggtaacaatctgcagtcggtttctggcggaatgtgaggtgaagtcacgactgactttcgggatggagcgtctcccttctctcc

SEQ ID NO: 283275 - DNA, 120 bp, Artificial Sequence
  ENSG00000130147_58 (sequence is synthesized)
tggtgtttgtttgcacaaggattctttggtaacaatctgcagtcggtttctggcggaatgtgaggtgaagtcacgactgactttcgggatggagatttgtgcttgagaagctctgagttc

SEQ ID NO: 283276 - DNA, 120 bp, Artificial Sequence
  ENSG00000130147_59 (sequence is synthesized)
ttggcatatggcgtctcccttctctcctggacagaaggccgtgtcctgggacttctctgatggcgagaggctgcggctgtaccagttggagacaagaaagaagcttctccaagctcccct

SEQ ID NO: 283277 - DNA, 120 bp, Artificial Sequence
  ENSG00000130150_0 (sequence is synthesized)
acccttctctgtctacctctgggcgggactgccgggtgatgagatactcggtcggcgacggtagaacgggcgacggcgacaaccgcaatcacatccacgacggtgatcatggcagagaat

SEQ ID NO: 283278 - DNA, 120 bp, Artificial Sequence
  ENSG00000130150_1 (sequence is synthesized)
cacgcccagaataaagccaagctcatctctgagacccggaggaggttcgaagctgagtatgtgacagataagtcagataaatatgatgcacgtgatgttgaaaggctacaacaagatgat

SEQ ID NO: 283279 - DNA, 120 bp, Artificial Sequence
  ENSG00000130150_2 (sequence is synthesized)
aactgggttgaaagttacttatcttggagacataatattgtagatgaaacactgaagatgctcgatgagagttttcagtggaggaaagaaatttctgtcaatgaccttaatgaatcctcc

SEQ ID NO: 283280 - DNA, 120 bp, Artificial Sequence
  ENSG00000130150_3 (sequence is synthesized)
attcccagatggttattggaaattggtgttatttatctccatggttatgacaaagaaggtaacaaattgttctggatcagggtgaagtatcatgtaaaagaccagaaaaccatattggac

SEQ ID NO: 283281 - DNA, 120 bp, Artificial Sequence
  ENSG00000130150_4 (sequence is synthesized)
aaaaagaagctcatagcattctggttggaacgttatgctaagagggaaaatgggaaacctgtaacagtgatgtttgacctgtcagaaactggaataaatagcattgacatggactttgta

SEQ ID NO: 283282 - DNA, 120 bp, Artificial Sequence
  ENSG00000130150_5 (sequence is synthesized)
cgctttatcatcaactgctttaaggtttattaccctaaatacctctcaaaaatagtgatctttgatatgccttggttaatgaatgctgctttcaaaattgtgaaaacctggcttggtcca

SEQ ID NO: 283283 - DNA, 120 bp, Artificial Sequence
  ENSG00000130150_6 (sequence is synthesized)
gaagcagtgagcttgttgaagtttacaagcaaaaatgaagtccaggactatgtcagtgtagaatacctgcctccccacatgggtggaactgatcctttcaagtatagctatccaccacta

SEQ ID NO: 283284 - DNA, 120 bp, Artificial Sequence
  ENSG00000130150_7 (sequence is synthesized)
gtagatgatgacttccagaccccactgtgtgagaatgggcctattaccagtgaggatgaaacttcaagtaaagaagacatagaaagtgatggcaaagaaacattggaaacaatttctaat

SEQ ID NO: 283285 - DNA, 120 bp, Artificial Sequence
  ENSG00000130150_8 (sequence is synthesized)
gaagaacaaacacctcttcttaaaaagattaacccaaccgaatctacttccaaagcagaagaaaatgaaaaagttgattcaaaagtgaaagctttcaagaaaccattgagtgtatttaaa

SEQ ID NO: 283286 - DNA, 120 bp, Artificial Sequence
  ENSG00000130150_9 (sequence is synthesized)
ggccccttactacacatcagcccagcagaagaactgtactttggaagtacagaatccggagagaagaaaaccttaatagtgttgacaaatgtaactaaaaatatagtggcatttaaggtg

SEQ ID NO: 283287 - DNA, 120 bp, Artificial Sequence
  ENSG00000130150_10 (sequence is synthesized)
agaacaacagctccagaaaaatacagagtcaagccaagcaatagcagctgtgacccgggtgcatcagtggatatagttgtgtctccccatgggggtttaacagtctctgcccaagaccgt

SEQ ID NO: 283288 - DNA, 120 bp, Artificial Sequence
  ENSG00000130150_11 (sequence is synthesized)
tttctgataatggctgcagaaatggaacagtcatctggcacaggcccagcagaattaactcagttttggaaagaagttcccagaaacaaagtgatggaacataggttaagatgccatact

SEQ ID NO: 283289 - DNA, 120 bp, Artificial Sequence
  ENSG00000130150_12 (sequence is synthesized)
gttgaaagcagtaaaccaaacactcttacgttaaaagacaatgctttcaatatgtcagataaaaccagtgaagatatatgtctacaactcagtcgtttactagaaagcaataggaagctt

SEQ ID NO: 283290 - DNA, 120 bp, Artificial Sequence
  ENSG00000130150_13 (sequence is synthesized)
gaagaccaagttcagcgttgtatctggttccagcagctgctgctttccttaacaatgctcttgcttgcttttgtcacctctttcttctatttattgtacagttaaagaagtggtgccggg

SEQ ID NO: 283291 - DNA, 120 bp, Artificial Sequence
  ENSG00000130150_14 (sequence is synthesized)
taggaaccacggttccttcgtccattagttggaaaaagtaacagacctaaaactctaccaagctactaaaaacattgcacatctgtgcttcctaaaaggaaatatgcagcacgtggaggg

SEQ ID NO: 283292 - DNA, 120 bp, Artificial Sequence
  ENSG00000130150_15 (sequence is synthesized)
gaacacatacatgtcttgaaaataaactgctagaataaagaaatgctggagaaattgattataagagactatagctatttagtaaagtaagtaaaggcatatccattgtgtaaattaata

SEQ ID NO: 283293 - DNA, 120 bp, Artificial Sequence
  ENSG00000130150_16 (sequence is synthesized)
gtttaaatataatttattttttccttttgatctgaatacttttaaagcttaagttttatcgtgtaaatacattagctaaactgaaaagtataagtaacatgctttgttgcagccaaaaaa

SEQ ID NO: 283294 - DNA, 120 bp, Artificial Sequence
  ENSG00000130150_17 (sequence is synthesized)
cttatatagaggaatttatgtaaccatgactttgtaattttgagaattcctcccagtgatggtcagtattcttttggaatgtaaaccgatttaatgccaaaccaccttaacctttgtttc

SEQ ID NO: 283295 - DNA, 120 bp, Artificial Sequence
  ENSG00000130150_18 (sequence is synthesized)
tcagtgttccttaacagcctgccttttattaatctcaggcttttttatgaacactctcatttcagtagaatttggaaaactaagcgtggttggaatttctttgaattctgttagtaatgc

SEQ ID NO: 283296 - DNA, 120 bp, Artificial Sequence
  ENSG00000130150_19 (sequence is synthesized)
ccaaaagaaaagtctcaagcagtccccctatccagtcatttttatggagtttcatgttgtccactatagctggacactgaaccttttgcctaatttattataaaggcctgaccctctatt

SEQ ID NO: 283297 - DNA, 120 bp, Artificial Sequence
  ENSG00000130150_20 (sequence is synthesized)
gtcccatcttcacccccattccagagcagaggagtctctgtggaccatgaattgcactgtctccctcctcatttctaaatgaaaggtattagatataaatttttttgaaaggttagttgt

SEQ ID NO: 283298 - DNA, 120 bp, Artificial Sequence
  ENSG00000130150_21 (sequence is synthesized)
ttgagatgctaagcaggataataaatttagattttaaaatgttccctgtaaaagtcagcccatgacaaggaaatttacaaaatactagagtatctagaagggtgaaaacaaaaaaaaata

SEQ ID NO: 283299 - DNA, 120 bp, Artificial Sequence
  ENSG00000130150_22 (sequence is synthesized)
aaaagaaacacagacgcccaggtgtcagctctccgtttaaagaatgaaaaatgtaactcatgatgatctgtgaaaccttcaaactaggaccaattgacttacttgatattctgcctttga

SEQ ID NO: 283300 - DNA, 120 bp, Artificial Sequence
  ENSG00000130150_23 (sequence is synthesized)
tatggtagtacccacccggtattcctaaaatcctaaaaagatacaccttgcagtagcagaggcaatgacatgagtttgttttctcattaatatgaccagtttgggtctatgttggttcac

SEQ ID NO: 283301 - DNA, 120 bp, Artificial Sequence
  ENSG00000130150_24 (sequence is synthesized)
atgtacatctactttatatgaaagaaaaaacagttgtctgcctgtaaaatgttgagtttcgattgagccatgtttggagattttattactattctgaagggtagtgttgttggttttcat

SEQ ID NO: 283302 - DNA, 120 bp, Artificial Sequence
  ENSG00000130150_25 (sequence is synthesized)
cttcaagaagttgattccaaaactgagttatgaagaatgatataacagttccttcaaaattggcctaggaaataaaaccttaaaaggacactggtgtgctactttgtcttaatttgggct

SEQ ID NO: 283303 - DNA, 120 bp, Artificial Sequence
  ENSG00000130150_26 (sequence is synthesized)
tttctgtttcagtttgccacctccagctgtgaaatggactgcagtccaccctaagtactgtgcacagtatctccctgtgtgtgtgcacagtggcttccccttacatggtagatttttggc

SEQ ID NO: 283304 - DNA, 120 bp, Artificial Sequence
  ENSG00000130150_27 (sequence is synthesized)
cttaatataatctaatcccaaagtagttgtgtatgttttctgttccttggcaaataaatgaagaaataattagccaagattgaaaatgtattgtcctaacggtgtccctttaatgtttca

SEQ ID NO: 283305 - DNA, 120 bp, Artificial Sequence
  ENSG00000130150_28 (sequence is synthesized)
tatgaaaaattatgttgacccactaaaatatccttgctcaatgtctggtcagttgaatttaataacatatcttgttaatgtttgtgtgtctattaaatgtgactaagcaggattactgaa

SEQ ID NO: 283306 - DNA, 120 bp, Artificial Sequence
  ENSG00000130150_29 (sequence is synthesized)
aattcactataaaatcaaaggcatctaaacgtttgtacttgtcttgattaatcatatatttacacttgatttttttctgtcttcatttgtttttatttaatcataattgcatgatttttt

SEQ ID NO: 283307 - DNA, 120 bp, Artificial Sequence
  ENSG00000130150_30 (sequence is synthesized)
tggtactctaatcagtaattttatttttaatcatgtcattacctattcatgaccaaattaccaaggaaccaacatttagatttagatatttgttttcacttaggaatggaaattaataga

SEQ ID NO: 283308 - DNA, 120 bp, Artificial Sequence
  ENSG00000130150_31 (sequence is synthesized)
ttttccatgaaagcattagtgaaatatcattaccttgatctgcaagtagcctaaaaatgcgattgctggtaaacctggcctcaaatttcatactaccataactgtttttatatattgcca

SEQ ID NO: 283309 - DNA, 120 bp, Artificial Sequence
  ENSG00000130150_32 (sequence is synthesized)
ctaattttgactggatttaatagcactttattgtacaactacaaaaaaaaatatattcctagaattgttgccagtgtaatttctctaatgttctggtgcttttcatatattttcagtatt

SEQ ID NO: 283310 - DNA, 120 bp, Artificial Sequence
  ENSG00000130150_33 (sequence is synthesized)
agtcacaataataggtacttaaaaacatgtcatatgataggaaactagaataacacacctctaaataatccatggattaccaacttctcagcaatggtgtaaattcttctgctaaataac

SEQ ID NO: 283311 - DNA, 120 bp, Artificial Sequence
  ENSG00000130150_34 (sequence is synthesized)
ataattatttataaagacccagtaatattttcaaaggaacagcttataagtcttttaagtgggatcattcataaggaaatcagatcaccagagagcagaatcacactcagattcttcatt

SEQ ID NO: 283312 - DNA, 120 bp, Artificial Sequence
  ENSG00000130150_35 (sequence is synthesized)
cacagcagagtttcctaatctgtgtttaattcagtaccattaagcaatagcaagacagtatctttgctactaggcctagaaataaggagatactgtccatttttctcagttgttgcctat

SEQ ID NO: 283313 - DNA, 120 bp, Artificial Sequence
  ENSG00000130150_36 (sequence is synthesized)
gcctttctctgtccccacagttccttgtgctaataggttaataggtacgccatatagaattgttaaatgaatgagagtcaccccaaaaatgcaagcttatccccaaggaagcctatcaca

SEQ ID NO: 283314 - DNA, 120 bp, Artificial Sequence
  ENSG00000130150_37 (sequence is synthesized)
atggcagagaatcacgcccagaataaagccaagctcatctctgagacccggaggaggttcgaagctgagtatgtgacaggtgggtactctgttccaggtattaagaaaggtgtgcagtga

SEQ ID NO: 283315 - DNA, 120 bp, Artificial Sequence
  ENSG00000130150_38 (sequence is synthesized)
gcatccccaactttgctggagtgtttgtgagtgtatttgtgggaggtgttagggaccctttcgaccctcacaggaatgatgctgggcacgtctcaaaggttttcctctccatgacaagcc

SEQ ID NO: 283316 - DNA, 120 bp, Artificial Sequence
  ENSG00000130150_39 (sequence is synthesized)
gtgtgcactgcttcaaatggtcaagtggtgtgtcccatgctccctttaaagggttaatgtaagttggaaatcggttaagtttttagcatgccctcgtgtttatggaacttgcaggatact

SEQ ID NO: 283317 - DNA, 120 bp, Artificial Sequence
  ENSG00000130150_40 (sequence is synthesized)
ttcaccagcaacactagcgaaaatgtacctggaaactgccataatactattgatgtgtacttaattgggtatacaaattccttggatattttgtttgatttggctttcatacaacccagc

SEQ ID NO: 283318 - DNA, 120 bp, Artificial Sequence
  ENSG00000130150_41 (sequence is synthesized)
atgctacccacaaaataggccctccaatgctggaacaagttcttatcccaaactgtatcttgcaaagtacctatgagtccagaattgatttattggttgaacattctgtgtccagatgtc

SEQ ID NO: 283319 - DNA, 120 bp, Artificial Sequence
  ENSG00000130150_42 (sequence is synthesized)
acagatacttgagttgtcaggtacttaactgaatatttaatgcttgtacagtaattttgtaaaacatacggaataacttattgtaaatatggaattaaataaggatttatatgttgccta

SEQ ID NO: 283320 - DNA, 120 bp, Artificial Sequence
  ENSG00000130158_0 (sequence is synthesized)
ggcggggccggggcccggggcggcggcggcgggacgcgaggaccatggctgcctccgagcgccgcgccttcgcgcacaagatcaacaggacggtggccgcagaggtgcggaagcaggtgt

SEQ ID NO: 283321 - DNA, 120 bp, Artificial Sequence
  ENSG00000130158_1 (sequence is synthesized)
atcaacaggacggtggccgcagaggtgcggaagcaggtgtcccgggaacgcagtggctccccccactccagcaggcgctgcagcagctccctgggggtcccactgactgaagttgtcgag

SEQ ID NO: 283322 - DNA, 120 bp, Artificial Sequence
  ENSG00000130158_2 (sequence is synthesized)
cccctggactttgaggatgtacttctgagccggccaccagatgctgagcccgggcccctcagggacctggtagaattcccagctgatgacttggagctgctgctgcagccccgggaatgc

SEQ ID NO: 283323 - DNA, 120 bp, Artificial Sequence
  ENSG00000130158_3 (sequence is synthesized)
cggaccacggagcccgggatccccaaggatgaaaaactggatgcccaggtgagggccgcggtggagatgtatattgaggactgggtcattgtccacagaaggtatcagtacctgagtgca

SEQ ID NO: 283324 - DNA, 120 bp, Artificial Sequence
  ENSG00000130158_4 (sequence is synthesized)
gcatacagccccgtcaccacagacacacagcgggagcgacagaagggcctcccccgccaggtctttgagcaggatgcttctggagacgagaggtccggccctgaggactcgaatgactcc

SEQ ID NO: 283325 - DNA, 120 bp, Artificial Sequence
  ENSG00000130158_5 (sequence is synthesized)
cggcgtggctcgggctccccggaagacacccctcgaagcagtggtgcctctagcatcttcgacctgaggaacctggcagctgactcattgctgccctctctgctagagcgggcggcccca

SEQ ID NO: 283326 - DNA, 120 bp, Artificial Sequence
  ENSG00000130158_6 (sequence is synthesized)
gaagatgtggaccggcgcaatgaaacccttcgacggcagcaccggcccccggccctgctcaccctctacccggcacctgacgaggatgaagccgtggaacgctgtagccgcccagagcca

SEQ ID NO: 283327 - DNA, 120 bp, Artificial Sequence
  ENSG00000130158_7 (sequence is synthesized)
ccccgcgagcactttggacaaaggatcttggtcaagtgtctgtcgctcaagttcgagattgaaattgagcccatctttgggatcttggctctgtatgatgtgcgggagaaaaagaagatc

SEQ ID NO: 283328 - DNA, 120 bp, Artificial Sequence
  ENSG00000130158_8 (sequence is synthesized)
tcggagaacttctacttcgacctgaactcggactccatgaaggggctgcttcgggctcatggcacccaccctgccatctccaccctggcccgctctgccatcttctctgtgacctacccc

SEQ ID NO: 283329 - DNA, 120 bp, Artificial Sequence
  ENSG00000130158_9 (sequence is synthesized)
tcacctgacatcttcctggtcatcaagttggagaaggtgcttcagcaaggggacatcagtgagtgctgtgagccttacatggtgttgaaagaagtggacacagccaagaacaaagagaag

SEQ ID NO: 283330 - DNA, 120 bp, Artificial Sequence
  ENSG00000130158_10 (sequence is synthesized)
ctagagaagctgcgcctggcggccgagcagttctgcacccgcctgggccgctaccgcatgcccttcgcctggacggccgtgcacttggccaacatcgtgagcagcgctgggcagctggac

SEQ ID NO: 283331 - DNA, 120 bp, Artificial Sequence
  ENSG00000130158_11 (sequence is synthesized)
cgggactctgactcggagggcgagcgccggccagcctggacagaccgccgccgtcgggggccccaggaccgggcgagtagtggggacgacgcctgcagcttctctggcttccgtccagcc

SEQ ID NO: 283332 - DNA, 120 bp, Artificial Sequence
  ENSG00000130158_12 (sequence is synthesized)
acgctaactgtcacaaacttctttaagcaggaggctgagcgactcagtgacgaggacctcttcaagttcctggctgacatgaggcgcccgtcgtccctgctgcggcgactacgtcctgtg

SEQ ID NO: 283333 - DNA, 120 bp, Artificial Sequence
  ENSG00000130158_13 (sequence is synthesized)
actgcccagctcaagatcgacatttctccggctcctgaaaatccccacttctgcctctcccctgagctgcttcatatcaagccctacccggaccccaggggccggcccaccaaggagatt

SEQ ID NO: 283334 - DNA, 120 bp, Artificial Sequence
  ENSG00000130158_14 (sequence is synthesized)
ctggagttccccgcccgcgaagtctatgccccccataccagctacaggaacctgctgtacgtgtacccgcacagcctcaacttcagcagccgccagggctccgtgcgcaaccttgctgtg

SEQ ID NO: 283335 - DNA, 120 bp, Artificial Sequence
  ENSG00000130158_15 (sequence is synthesized)
cgagtgcagtacatgacaggcgaggaccccagccaggctctgccggtcatctttggcaagtccagctgcagtgaatttacccgcgaggccttcacaccggtggtctaccataacaagtcc

SEQ ID NO: 283336 - DNA, 120 bp, Artificial Sequence
  ENSG00000130158_16 (sequence is synthesized)
cccgagttctacgaggagttcaagctgcatcttccagcctgcgtgacagagaaccatcacctgctgttcaccttctaccatgtcagctgccagccccggccgggcactgccctggagaca

SEQ ID NO: 283337 - DNA, 120 bp, Artificial Sequence
  ENSG00000130158_17 (sequence is synthesized)
cccgtgggctttacttggatcccactgctgcagcacgggcgcctgaggaccggccccttctgtctcccagtgtctgtggaccagccgccgcccagctattccgtgctcacacccgatgtg

SEQ ID NO: 283338 - DNA, 120 bp, Artificial Sequence
  ENSG00000130158_18 (sequence is synthesized)
gcgcttccgggcatgcgctgggtggacggtcacaagggcgtgttcagtgtggagctcacagccgtgtcctctgtgcacccccaggacccctacctggacaaattcttcaccctggtgcac

SEQ ID NO: 283339 - DNA, 120 bp, Artificial Sequence
  ENSG00000130158_19 (sequence is synthesized)
gtcctggaggagggagccttcccattccggctcaaggacactgtgctgagcgagggcaacgtggagcaggagctgcgggccagtcttgcagcactgcgcctggccagccccgaacccctt

SEQ ID NO: 283340 - DNA, 120 bp, Artificial Sequence
  ENSG00000130158_20 (sequence is synthesized)
gtggccttctcccaccacgtgctggacaagctcgtgcgtctggtcatcaggcccccgatcatcagtggccagattgtgaacctgggccgtggagcctttgaagcaatggcccatgtagtc

SEQ ID NO: 283341 - DNA, 120 bp, Artificial Sequence
  ENSG00000130158_21 (sequence is synthesized)
agccttgttcaccggagcctggaggcagcccaggatgcccgcggtcactgcccacagctggctgcctacgtccactacgcctttcgccttcctggcactgagcccagcctcccggatggg

SEQ ID NO: 283342 - DNA, 120 bp, Artificial Sequence
  ENSG00000130158_22 (sequence is synthesized)
gcccctccagtgacagtgcaggctgccacactggcccgtggctctggtcgccccgcaagcctctacctggcgcgttccaagagcatcagcagcagcaaccctgacctcgccgtggcccct

SEQ ID NO: 283343 - DNA, 120 bp, Artificial Sequence
  ENSG00000130158_23 (sequence is synthesized)
ggctctgtggatgacgaggtttcccgcatcctggccagcaagctgcttcacgaggagctggctctgcagtgggtggtcagcagcagtgccgtacgcgaggccatcctccagcacgcctgg

SEQ ID NO: 283344 - DNA, 120 bp, Artificial Sequence
  ENSG00000130158_24 (sequence is synthesized)
ttcttcttccagctcatggtgaagagtatggcgctgcacctgctgcttggccagcgactagacacaccccgcaagctgcgcttccccggacgcttcctggacgacatcactgccttggtg

SEQ ID NO: 283345 - DNA, 120 bp, Artificial Sequence
  ENSG00000130158_25 (sequence is synthesized)
ggctctgtgggcctggaggtcatcacccgtgtccacaaggatgtggagctggccgagcacctcaacgccagcctggctttcttcctcagtgaccttctgtccctggtggaccggggcttt

SEQ ID NO: 283346 - DNA, 120 bp, Artificial Sequence
  ENSG00000130158_26 (sequence is synthesized)
ccctgctgaccctgcgcatggaattcacccgcatcctgtgcagccacgagcactacgtgaccctcaacctcccctgctgccccctgtcacctccagcctcgccctccccctctgtgtcct

SEQ ID NO: 283347 - DNA, 120 bp, Artificial Sequence
  ENSG00000130158_27 (sequence is synthesized)
ccaccacctcccagagctccaccttctccagccaagccccggaccccaaggtgaccagcatgttcgaactgagtggaccattccggcagcagcacttcctagctgggctcctgctgacgg

SEQ ID NO: 283348 - DNA, 120 bp, Artificial Sequence
  ENSG00000130158_28 (sequence is synthesized)
agctggcactggccctcgaacctgaggctgaaggggcattcctgttgcacaagaaggccatcagtgctgtgcacagcctgctatgtggccatgacactgacccccgctacgccgaggcca

SEQ ID NO: 283349 - DNA, 120 bp, Artificial Sequence
  ENSG00000130158_29 (sequence is synthesized)
ctgtgaaggctcgtgtggccgagctgtacctgccactgctatcgattgcacgggataccttgccacggctgcatgactttgctgagggcccaggtcagcggtcaagactggcctcaatgc

SEQ ID NO: 283350 - DNA, 120 bp, Artificial Sequence
  ENSG00000130158_30 (sequence is synthesized)
ttgactcagacacagaaggcgaaggggacattgcgggtaccatcaacccctctgtggccatggccattgctggtggccccctagcccctggctcccgggccagcatctcccaggggccac

SEQ ID NO: 283351 - DNA, 120 bp, Artificial Sequence
  ENSG00000130158_31 (sequence is synthesized)
caacggcttctcgcgcaggctgtgccctctctgctgagtcaagccggaccttgctggcgtgtgtgctgtgggtgctgaaaaacaccgagccggcgctcctgcagcgctgggccactgacc

SEQ ID NO: 283352 - DNA, 120 bp, Artificial Sequence
  ENSG00000130158_32 (sequence is synthesized)
tgacactcccccagctgggacgtctgttggatttgctgtacctttgcctagctgcctttgagtacaaggggaaaaaggcctttgaacgcatcaacagcctcacattcaaaaaatctctgg

SEQ ID NO: 283353 - DNA, 120 bp, Artificial Sequence
  ENSG00000130158_33 (sequence is synthesized)
atatgaaggcgcggctagaggaagccattctgggtaccatcggagctcgacaagaaatggttcggcgaagtcgtgagaggagcccgtttgggaatccggagaatgtgcgctggcggaaga

SEQ ID NO: 283354 - DNA, 120 bp, Artificial Sequence
  ENSG00000130158_34 (sequence is synthesized)
gcgtcacacactggaagcaaacctcagaccgcgtggacaagaccaaggatgaaatggaacacgaggccttggtggaagggaacctggcaaccgaggcaagcctagtggttctggacacac

SEQ ID NO: 283355 - DNA, 120 bp, Artificial Sequence
  ENSG00000130158_35 (sequence is synthesized)
tggagatcatcgtgcagacggtgatgctttcagaagcccgggagagcgtcttgggggcagtgctgaaggttgtgctgtacagcctgggcagtgcccagagtgccctcttcttgcagcatg

SEQ ID NO: 283356 - DNA, 120 bp, Artificial Sequence
  ENSG00000130158_36 (sequence is synthesized)
gcctggccacccagagggcccttgtgtccaagttcccggagctgctgttcgaggaggacacggagctgtgtgccgacctgtgcctgaggctcctacgacactgtggcagccgcatcagca

SEQ ID NO: 283357 - DNA, 120 bp, Artificial Sequence
  ENSG00000130158_37 (sequence is synthesized)
ccatccgcacgcacgccagcgcctcgctgtacctgctcatgcgacagaacttcgagatcggccacaactttgcccgtgtgaagatgcaggtcaccatgtctctctcgtccctggtgggga

SEQ ID NO: 283358 - DNA, 120 bp, Artificial Sequence
  ENSG00000130158_38 (sequence is synthesized)
cgacgcagaacttcagtgaagagcacctgcgacgttcactcaaaaccatcctcacctatgctgaggaggacatggggctgcgggacagcaccttcgcagagcaggtccaggacctgatgt

SEQ ID NO: 283359 - DNA, 120 bp, Artificial Sequence
  ENSG00000130158_39 (sequence is synthesized)
tcaacctgcacatgatcctgacggacacggtgaagatgaaggaacaccaggaggaccctgagatgctcatcgacctcatgtacagaattgcccggggctaccagggctcaccggaccttc

SEQ ID NO: 283360 - DNA, 120 bp, Artificial Sequence
  ENSG00000130158_40 (sequence is synthesized)
ggctgacctggttgcagaacatggccgggaagcacgcggagctgggcaaccacgccgaggccgcccagtgcatggtgcacgcggccgccctcgtggctgagtacctcgccctgctcgagg

SEQ ID NO: 283361 - DNA, 120 bp, Artificial Sequence
  ENSG00000130158_41 (sequence is synthesized)
accaccgccacctgcccgtgggctgcgtttccttccagaacatctcatccaacgtgctagaggagtccgccatctccgacgacatcctgtcgcccgacgaggagggcttctgctccggga

SEQ ID NO: 283362 - DNA, 120 bp, Artificial Sequence
  ENSG00000130158_42 (sequence is synthesized)
agcacttcactgagctggggctggtagggttgctggaacaggcagccggctacttcaccatgggcgggctctacgaggcggtgaatgaggtctacaagaacctcatccccatcctggaag

SEQ ID NO: 283363 - DNA, 120 bp, Artificial Sequence
  ENSG00000130158_43 (sequence is synthesized)
cccaccgtgactacaagaagctggccgcggtgcacggcaaactgcaggaggccttcaccaagatcatgcaccagagttccggctgggagcgcgtgttcgggacgtatttccgcgtgggct

SEQ ID NO: 283364 - DNA, 120 bp, Artificial Sequence
  ENSG00000130158_44 (sequence is synthesized)
tctacggcgcccacttcggtgacctggatgagcaggagtttgtgtacaaggagccatcgatcacgaagctggcagagatctcacaccggctggaggagttctacacggagagatttggcg

SEQ ID NO: 283365 - DNA, 120 bp, Artificial Sequence
  ENSG00000130158_45 (sequence is synthesized)
acgacgtcgttgagattatcaaagactctaaccctgtggacaagtccaagcttgactcacaaaaggcctacatccagatcacgtatgtggaaccgtactttgatacctacgagctcaagg

SEQ ID NO: 283366 - DNA, 120 bp, Artificial Sequence
  ENSG00000130158_46 (sequence is synthesized)
accgggtgacctactttgaccgcaactatgggcttcgcacattcctgttctgcacgccgttcacgccggatgggcgcgcacacggggagctgcccgagcaacacaagcgtaagacgctgc

SEQ ID NO: 283367 - DNA, 120 bp, Artificial Sequence
  ENSG00000130158_47 (sequence is synthesized)
tcagcaccgaccacgccttcccctacatcaagactcgcatccgtgtgtgccaccgggaggagacggtgctgacgccagtggaggtggccatcgaggacatgcagaagaagacacgggagc

SEQ ID NO: 283368 - DNA, 120 bp, Artificial Sequence
  ENSG00000130158_48 (sequence is synthesized)
tggcctttgccaccgagcaggacccaccagatgctaagatgctacagatggtgcttcagggctctgtagggcccaccgtgaaccagggtcccctggaggtggcccaggtgtttttagcag

SEQ ID NO: 283369 - DNA, 120 bp, Artificial Sequence
  ENSG00000130158_49 (sequence is synthesized)
agatcccggaagaccccaagctcttccggcatcacaacaaattgcggctctgcttcaaggacttctgcaagaaatgtgaggatgcgctgcggaaaaataaggccctgattgggccggacc

SEQ ID NO: 283370 - DNA, 120 bp, Artificial Sequence
  ENSG00000130158_50 (sequence is synthesized)
agaaggagtaccaccgtgagctggagcgcaactactgccgcctgcgggaggctctgcagcccctgcttacccagcgcctgccccagctgatggcacccaccccacccggcctcaggaact

SEQ ID NO: 283371 - DNA, 120 bp, Artificial Sequence
  ENSG00000130158_51 (sequence is synthesized)
ccttgaacagagcaagtttccgaaaggcagacctctgagcccacaaggaccaaagctgtacctagaggaaccagcacccgggcctcagctgtctgtgctgcgaggggagtctgccctggt

SEQ ID NO: 283372 - DNA, 120 bp, Artificial Sequence
  ENSG00000130158_52 (sequence is synthesized)
gcccactgggctgtggggtgaccacactgtacttggggctgggccctctgcccctgtgtccccatctgtgtgcactgatgcttcctcccttttttaatttaaaatggtttttataagcaa

SEQ ID NO: 283373 - DNA, 120 bp, Artificial Sequence
  ENSG00000130158_53 (sequence is synthesized)
ggttcttcttccagctcatggtgagaccccctcctccctgcctggtggcaagagacccccagtggagccccttccttttttaaagagagaagccccctggccaggcatagtggctcacac

SEQ ID NO: 283374 - DNA, 120 bp, Artificial Sequence
  ENSG00000130158_54 (sequence is synthesized)
gaagggggccatccctagcttactttctgcctcacttttcctggagagaagtccacaaatcatcaccgtacacatgcgcctgtgcgtccccatctgtcactcgtgtttgcccctgtgcgt

SEQ ID NO: 283375 - DNA, 120 bp, Artificial Sequence
  ENSG00000130158_55 (sequence is synthesized)
gacgaggtttcccgcatcctggccagcaaggccatcgactgcaactctagccgagcctcctcctacctcgagggttcctcctcggccccaccagccacccagctgagacccactgtgcag

SEQ ID NO: 283376 - DNA, 120 bp, Artificial Sequence
  ENSG00000130158_56 (sequence is synthesized)
aggtttgagggcgtgggcaggagatgatggaggaggcaggctaaggatgtacccagggacccagcgtgctgcgggctgagtgggaaggggtggactgtctttgtgcagaggactctgtgg

SEQ ID NO: 283377 - DNA, 120 bp, Artificial Sequence
  ENSG00000130158_57 (sequence is synthesized)
ctctgtgggactgagaggaaaggggtggactgtttctgtgctgaggcaaggaataaagtcagaagtgcctttgtgaatagaatttggaaggtggaggccgggtgcagtggctcacacctg

SEQ ID NO: 283378 - DNA, 120 bp, Artificial Sequence
  ENSG00000130158_58 (sequence is synthesized)
cccacgccctctctgcctgtgattccactctgtctctgccaaccccatcaacagcccgacttcagctcctggcttggccgtgacgttggacaagccatgctttttctctgagcctccatc

SEQ ID NO: 283379 - DNA, 120 bp, Artificial Sequence
  ENSG00000130158_59 (sequence is synthesized)
tccccttgtctggaataggcaggacagtgctaaccttacaggctagcagaaggattcacagaggccttgtctctgtttaccctgatcttcttttgctgcagaaaactggatgcccaggtg

SEQ ID NO: 283380 - DNA, 120 bp, Artificial Sequence
  ENSG00000130158_60 (sequence is synthesized)
cctactgtgtatctgcccattgtccctgcaagagcaggcaaacttgtctggtggagcacaaggacggtggctttgaaggtgccatgtaggtgtgtcagaacacactggggaccccctggg

SEQ ID NO: 283381 - DNA, 120 bp, Artificial Sequence
  ENSG00000130158_61 (sequence is synthesized)
acatgtgacaggaaatgacccaaacagccttgagctcaaaaggaattgcatcagtccccatgagtaaaaagttaggggtcataattataaacatttattgagtgcttagggtgtactgaa

SEQ ID NO: 283382 - DNA, 120 bp, Artificial Sequence
  ENSG00000130158_62 (sequence is synthesized)
ggcttcatatgtgtcctctgctttcatcctaggagtcagggcagccattacacccaggtaaggaaactgaggcacagcaaggttcttagaggccgtgagcctgtattttgtcaatcaaca

SEQ ID NO: 283383 - DNA, 120 bp, Artificial Sequence
  ENSG00000130158_63 (sequence is synthesized)
tttactgagcacctactgtataccaaccataattattccaaagattattgttgttttcattattattattattttaattaattaattattttgagatggaatctcactctgtcgcccagg

SEQ ID NO: 283384 - DNA, 120 bp, Artificial Sequence
  ENSG00000130158_64 (sequence is synthesized)
actgaggcccttagagttgggggtcagagacccagtgtcacagagctgagctgggatttgatccagtgcaggaaggtcaggaagaactctctccttccctggcgacagtgaacaaagtcc

SEQ ID NO: 283385 - DNA, 120 bp, Artificial Sequence
  ENSG00000130158_65 (sequence is synthesized)
cagggaaggctttcattggcccagcccaggcccttggagccagtccctagggtgggtagatgtgttttgattgaccagataaggatcacctaaagccccaaatgtgggataaggagtagc

SEQ ID NO: 283386 - DNA, 120 bp, Artificial Sequence
  ENSG00000130158_66 (sequence is synthesized)
ctcccccagcaatggtaaaagttgggaggctctccagacagaagtttctggaaagagggtaggcaaaacccccaggtgacccttagagtgatgaccctcaccccctgaccctcaatttcc

SEQ ID NO: 283387 - DNA, 120 bp, Artificial Sequence
  ENSG00000130158_67 (sequence is synthesized)
caaaggatcttggtcaagtgtctgtcgctcaagtgagtatactgacatgtctctcttcttagatgcgtgaagcaaccacatgggttccggcggggtacacactacatgagtagtgccatt

SEQ ID NO: 283388 - DNA, 120 bp, Artificial Sequence
  ENSG00000130158_68 (sequence is synthesized)
accgtgtgcggccctgtcacctatgtggccacctatgtatgggcttttatgggggaaggaagacttcctttttcattatcccgagtctccaatccttaagtgccaattgtatgccaggat

SEQ ID NO: 283389 - DNA, 120 bp, Artificial Sequence
  ENSG00000130158_69 (sequence is synthesized)
cagttctcagcctttcatgtatatgaacccgtcttatattcaccacaacctcatgaagtgggcacaggtggggaaactgaggcacagagtggtgacatgacgccaagaccatacaacttg

SEQ ID NO: 283390 - DNA, 120 bp, Artificial Sequence
  ENSG00000130158_70 (sequence is synthesized)
taaggctggagtctggcgcttgcctgctctgctgctgggatccagggtttggccgggaggctttggggcgggtgctagtgaccctgggcctggctctcagccgcccagggcccctccaca

SEQ ID NO: 283391 - DNA, 120 bp, Artificial Sequence
  ENSG00000130158_71 (sequence is synthesized)
ccagcccccggggagcagcagaagtgcgtgggaacagagttgaacaggatgtggacttggacctgagcctggccctgccgctccccaccccgagttcttgcctggatcggggcaggaaag

SEQ ID NO: 283392 - DNA, 120 bp, Artificial Sequence
  ENSG00000130158_72 (sequence is synthesized)
ggaggctccattctggcctgaggcctgggtgggcctcctgccctaaacacaaggattgggacctggctctgtgggctcatccagtcattcaacaaacacttattggccgggcacggtggc

SEQ ID NO: 283393 - DNA, 120 bp, Artificial Sequence
  ENSG00000130158_73 (sequence is synthesized)
ccagtcattcaacaaacacttattggccgggcacggtggctcccacctgtaatcctaatactctgggaagccaaggcgggcggatcacctgagctcaggaatttgagaccagcctggcca

SEQ ID NO: 283394 - DNA, 120 bp, Artificial Sequence
  ENSG00000130158_74 (sequence is synthesized)
catcgatcgctcacactcctgggtgaattccgcttatgctccaggaggcagtaaggctgtgctgcggcgggcgcccccttattgtggggccgaccccagacagctgcttcacgaggagct

SEQ ID NO: 283395 - DNA, 88 bp, Artificial Sequence
  ENSG00000130158_75 (sequence is synthesized)
ctgctccgggaagcacttcactgagctggggctggtagggttgctggaacaggcagccggctacttcaccatgcttgaactcctagac

SEQ ID NO: 283396 - DNA, 120 bp, Artificial Sequence
  ENSG00000130158_76 (sequence is synthesized)
ttacaggcgtgagccagcatgcccggcaactgattttccactgtggaaaaggggttttcttctctagtttgcttgtttgtatgagggcagttggtggtttctacatttaacttgcaggag

SEQ ID NO: 283397 - DNA, 120 bp, Artificial Sequence
  ENSG00000130158_77 (sequence is synthesized)
agatgagggagcagaggccagggacccgtgggcctccctccagacctggaaggccacaggcccagccgggaggggaaggagagtccgtgatggcttcagaccccactggtggcagcattc

SEQ ID NO: 283398 - DNA, 120 bp, Artificial Sequence
  ENSG00000130158_78 (sequence is synthesized)
tcatctcctgatctgtgcttgatggggaacgcgttgggggaactggggagctgtgggcccttaaagcctcagcactcctggttctcttggccctcggcctatttatttcgttccacaatc

SEQ ID NO: 283399 - DNA, 120 bp, Artificial Sequence
  ENSG00000130158_79 (sequence is synthesized)
ggtgcaattattgtcattgttgttatttatcatcatcagtatcattacaaaggctcagctggaaggcctgaagtgcccattatacacatagggaaactgaggcccagagaggggtcaagg

SEQ ID NO: 283400 - DNA, 120 bp, Artificial Sequence
  ENSG00000130158_80 (sequence is synthesized)
cttgcacagagttgcccctgggggaaggaggcaggactcggactctggcctcagtttccccacctgagaaacaggccacataactctagtgacctcctgggggaagggcagtcaggccct

SEQ ID NO: 283401 - DNA, 120 bp, Artificial Sequence
  ENSG00000130158_81 (sequence is synthesized)
tgggtggggcttaggcttgaccactggccacctgaggtaccttggaactctggccctgagtgcctcgctattctctgccttctgtgtgtcactgtgccccatgagtgcctccaatgtcct

SEQ ID NO: 283402 - DNA, 120 bp, Artificial Sequence
  ENSG00000130158_82 (sequence is synthesized)
tctgtattcccaccctctaccacactgttcccaatctgtgtttttagggtgctcgcttgtcccccaccctctgccctctgtcctatctcctgactgatacctgtattacctctcaccggg

SEQ ID NO: 283403 - DNA, 120 bp, Artificial Sequence
  ENSG00000130158_83 (sequence is synthesized)
ccctcaatgccccagcctcatgacctactcttcctggactgtctgtgctcccagccagccttgtcccatcaccccagccttgtatgtgcaccttcagggcccctgtccctctgacacccc

SEQ ID NO: 283404 - DNA, 120 bp, Artificial Sequence
  ENSG00000130158_84 (sequence is synthesized)
agccaggctctgccggtcagtggctgtgccccagggaaggggggtagggcatcccccatgggtccctcatgaatccactctcccaggtcatctttggcaagtccagctgcagtgaattta

SEQ ID NO: 283405 - DNA, 120 bp, Artificial Sequence
  ENSG00000130158_85 (sequence is synthesized)
cccgcgaggccttcacaccggtggtctaccataacaagtatgtagggggacacgtgaggaacttgggggcactcatgggggtaggaggatgtcccttatatatacacataaggcagcatc

SEQ ID NO: 283406 - DNA, 120 bp, Artificial Sequence
  ENSG00000130158_86 (sequence is synthesized)
gatgggaagatgggggacaggaagaagagaggtagaggctcccagagtgctaatgagggaagctgaggcagacagcagagacagtggggcctagcagcaataagggcgtggcatggcaga

SEQ ID NO: 283407 - DNA, 120 bp, Artificial Sequence
  ENSG00000130158_87 (sequence is synthesized)
gtcccccaacctggccgcagacctgacctccagcctctccccagtggatcccactgctgcagcacgggcgcctgaggaccggccccttctgtctcccagtgtctgtggaccagccgccgc

SEQ ID NO: 283408 - DNA, 120 bp, Artificial Sequence
  ENSG00000130158_88 (sequence is synthesized)
gatgtatgtgccctggagctcctgcctgccaatgcactgtccccagaagcactcccgagtcacctgccttccttcctgtcaatcctgggaggcttgttatcctctactggtgcctccagg

SEQ ID NO: 283409 - DNA, 120 bp, Artificial Sequence
  ENSG00000130158_89 (sequence is synthesized)
gcccccgtgtagctcattattcccctattaatgcctctctgtgtcctacatgtcctccccaaagattcccattgcctctctgctccattcccactttagccaccctgactgccttcctga

SEQ ID NO: 283410 - DNA, 120 bp, Artificial Sequence
  ENSG00000130158_90 (sequence is synthesized)
tcactgtcccctgccctcgtagtaccttatcattccccatgaatgcaccattgttaatgaccctaggcctcaaatcctcctatcctgtttcctgacctactcaatgaatattcattcacc

SEQ ID NO: 283411 - DNA, 120 bp, Artificial Sequence
  ENSG00000130158_91 (sequence is synthesized)
ctgtgtctccattctctgcccccgtcttggcatgtggatttccagcctgcccagtggaccctctcagtctactgggaccagggctgggggcagggtgcttggctgcacccccagaccggg

SEQ ID NO: 283412 - DNA, 120 bp, Artificial Sequence
  ENSG00000130158_92 (sequence is synthesized)
ctacactcacgctgcagtgtcgcaatggctggggccgctgggtgacctgatcagtcagggagggctgaccagtgcccacctggtgcctccctcccacaggtggcgcttccgggcatgcgc

SEQ ID NO: 283413 - DNA, 120 bp, Artificial Sequence
  ENSG00000130158_93 (sequence is synthesized)
tgggtggacggtcacaagggcgtgttcagtgtggagctcacagccgtgtcctctgtgcacccccaggtacggggtgggccgggaaccaagagtcccgccctgctcccctcttgcctgccc

SEQ ID NO: 283414 - DNA, 120 bp, Artificial Sequence
  ENSG00000130158_94 (sequence is synthesized)
tacgattgagtaacagttgccgatggccggggaggtctggcctcaggccttggacgtgactttggtcagctggacccagctttaagggaagctgctgattcaggcaggggtggtcttcat

SEQ ID NO: 283415 - DNA, 120 bp, Artificial Sequence
  ENSG00000130158_95 (sequence is synthesized)
tcatcaggcccccgatcatcagtggccagattggtaagcgaatgtggcctcagacctcagtttccccatccacatggcttctcagtcctgaggtcctgagggatcttctataagcccatt

SEQ ID NO: 283416 - DNA, 120 bp, Artificial Sequence
  ENSG00000130158_96 (sequence is synthesized)
tacctctctggccatttttctcatctgaaaaatgacctccagtcccctgcacccagagaaggtcttctgtgaccctttggcccgggtgcagcggttcacgcctgtcatcccagcactttg

SEQ ID NO: 283417 - DNA, 120 bp, Artificial Sequence
  ENSG00000130159_0 (sequence is synthesized)
ctctgggccaatatggcagcgcccagcaacaagacagagctggcctggagtccgcggctggccgcgtgagtaggtgattgtctgacaagcagaggcatgagctgggtccaggccacccta

SEQ ID NO: 283418 - DNA, 120 bp, Artificial Sequence
  ENSG00000130159_1 (sequence is synthesized)
ctggcccgaggcctctgtagggcctggggaggcacctgcggggccgccctcacaggaacctccatctctcaggtccctcgccggctccctcggggcctccactgcagcgcagctgcccat

SEQ ID NO: 283419 - DNA, 120 bp, Artificial Sequence
  ENSG00000130159_2 (sequence is synthesized)
agctctgaacagtccctggttcccagcccaccggaaccccggcagaggcccaccaaggctctggtgccctttgaggacctgtttgggcaggcgcctggtggggaacgggacaaggcgagc

SEQ ID NO: 283420 - DNA, 120 bp, Artificial Sequence
  ENSG00000130159_3 (sequence is synthesized)
ttcctgcagacggtgcagaaatttgcggagcacagcgtgcgtaagcggggccacattgacttcatctacctggccctgcgcaagatgcgggagtatggtgtcgagcgggacctggctgtg

SEQ ID NO: 283421 - DNA, 120 bp, Artificial Sequence
  ENSG00000130159_4 (sequence is synthesized)
tacaaccagctgctcaacatcttccccaaggaggtcttccggcctcgcaacatcatccagcgcatcttcgtccactaccctcggcagcaggagtgtgggattgctgtcctggagcagatg

SEQ ID NO: 283422 - DNA, 120 bp, Artificial Sequence
  ENSG00000130159_5 (sequence is synthesized)
gagaaccacggtgtgatgcccaacaaggagacggagttcctgctgattcagatctttggacgcaaaagctaccccatgctcaagttggtgcgcctgaagctgtggttccctcgattcatg

SEQ ID NO: 283423 - DNA, 120 bp, Artificial Sequence
  ENSG00000130159_6 (sequence is synthesized)
cttagtgccagggtcaccatctaccaggttcctttgcccaaagactcaacaggtgcagcagatcccccccagccccacatcgtaggaatccagagtcccgatcagcaggccgccctggcc

SEQ ID NO: 283424 - DNA, 120 bp, Artificial Sequence
  ENSG00000130159_7 (sequence is synthesized)
cgccacaatccagcccggcctgtctttgttgagggccccttctccctgtggctccgcaacaagtgtgtgtattaccacatcctcagagctgacttgctgcccccggaggagagggaagtg

SEQ ID NO: 283425 - DNA, 120 bp, Artificial Sequence
  ENSG00000130159_8 (sequence is synthesized)
gaagagacgccggaggagtggaacctctactacccgatgcagctggacctggagtatgtgaggagtggctgggacaactacgagtttgacatcaatgaagtggaggaaggccctgtcttc

SEQ ID NO: 283426 - DNA, 120 bp, Artificial Sequence
  ENSG00000130159_9 (sequence is synthesized)
gccatgtgcatggcgggtgctcatgaccaggcgacgatggctaagtggatccagggcctgcaggagaccaacccaaccctggcccagatccccgtggtcttccgcctcgccgggtccacc

SEQ ID NO: 283427 - DNA, 120 bp, Artificial Sequence
  ENSG00000130159_10 (sequence is synthesized)
cgggagctccagacatcctctgcagggctggaggagccgcccctgcccgaggaccaccaggaagaagacgacaacctgcagcgacagcagcagggccagagctagtctgagccggcgcga

SEQ ID NO: 283428 - DNA, 120 bp, Artificial Sequence
  ENSG00000130159_11 (sequence is synthesized)
gggcacgggctgtggcccgaggaggcggtggactgaaggcatgagatgccctttgagtgtacagcaaatcaatgttttcctgcttggggctctcttccctcatctctagcagtatggcat

SEQ ID NO: 283429 - DNA, 120 bp, Artificial Sequence
  ENSG00000130159_12 (sequence is synthesized)
cccctccccaggatctcgggctgccagcgatgggcaggcgagacccctccagaatctgcaggcgcctctggttctccgaattcaaataaaaaggggcgggagcgctgttggttgtgcgca

SEQ ID NO: 283430 - DNA, 120 bp, Artificial Sequence
  ENSG00000130159_13 (sequence is synthesized)
acgtcaaccccttcccagtgccccgggacctgccccaggaccctgtggagctggccatgtttggcctgcggcacatggagcctgaccttagtgccagggtcaccatctaccaggccccgt

SEQ ID NO: 283431 - DNA, 120 bp, Artificial Sequence
  ENSG00000130159_14 (sequence is synthesized)
ggcaaccgggcaggatttggaatccgcgtctgcctttttcccccaagagacccagaatcctggcagccggtttcaaagctgttgtccctcgccggctccctcggggcctccactgcagcg

SEQ ID NO: 283432 - DNA, 120 bp, Artificial Sequence
  ENSG00000130159_15 (sequence is synthesized)
ttttgcagatgacctcgcgagaggtcacgccgcaagtcggcaaccgggcaggatttggaatccgcgtctgcctttttcccccaagagacccagaatcctggcagccggtttcaaagctgt

SEQ ID NO: 283433 - DNA, 65 bp, Artificial Sequence
  ENSG00000130159_16 (sequence is synthesized)
gggccaatatggcagcgcccagcaacaagacagagctggcctggagtccgcggctggccgcgtga

SEQ ID NO: 283434 - DNA, 120 bp, Artificial Sequence
  ENSG00000130159_17 (sequence is synthesized)
gccaggttctcgctgggcctaggctgggctccctgggcctctgggccgagtcccttgcagggcacagggcatgtatgtctccacaccaggaatccagagtcccgatcagcaggccgccct

SEQ ID NO: 283435 - DNA, 120 bp, Artificial Sequence
  ENSG00000130159_18 (sequence is synthesized)
aggagagggtgagggcttaaagcaaagcatgtgttggggctggggagtgggctggcactaccctgagggtgcatgggagaggctggaggagggagaccgagagagccctggcctctgacc

SEQ ID NO: 283436 - DNA, 75 bp, Artificial Sequence
  ENSG00000130159_19 (sequence is synthesized)
agagctggcctggagtccgcggctggccgcgtgagtagatggagttttgctgttgttccccaggctgaggtgtaa

SEQ ID NO: 283437 - DNA, 120 bp, Artificial Sequence
  ENSG00000130159_20 (sequence is synthesized)
cttcccagtagctggaattacaggtgattgtctgacaagcagaggcatgagctgggtccaggccaccctactggcccgaggcctctgtagggcctggggaggcacctgcggggccgccct

SEQ ID NO: 283438 - DNA, 120 bp, Artificial Sequence
  ENSG00000130164_0 (sequence is synthesized)
ctcttgcagtgaggtgaagacatttgaaaatcaccccactgcaaactcctccccctgctagaaacctcacattgaaatgctgtaaatgacgtgggccccgagtgcaatcgcgggaagcca

SEQ ID NO: 283439 - DNA, 120 bp, Artificial Sequence
  ENSG00000130164_1 (sequence is synthesized)
gggtttccagctaggacacagcaggtcgtgatccgggtcgggacactgcctggcagaggctgcgagcatggggccctggggctggaaattgcgctggaccgtcgccttgctcctcgccgc

SEQ ID NO: 283440 - DNA, 120 bp, Artificial Sequence
  ENSG00000130164_2 (sequence is synthesized)
ggcggggactgcagtgggcgacagatgcgaaagaaacgagttccagtgccaagacgggaaatgcatctcctacaagtgggtctgcgatggcagcgctgagtgccaggatggctctgatga

SEQ ID NO: 283441 - DNA, 120 bp, Artificial Sequence
  ENSG00000130164_3 (sequence is synthesized)
gtcccaggagacgtgcttgtctgtcacctgcaaatccggggacttcagctgtgggggccgtgtcaaccgctgcattcctcagttctggaggtgcgatggccaagtggactgcgacaacgg

SEQ ID NO: 283442 - DNA, 120 bp, Artificial Sequence
  ENSG00000130164_4 (sequence is synthesized)
ctcagacgagcaaggctgtccccccaagacgtgctcccaggacgagtttcgctgccacgatgggaagtgcatctctcggcagttcgtctgtgactcagaccgggactgcttggacggctc

SEQ ID NO: 283443 - DNA, 120 bp, Artificial Sequence
  ENSG00000130164_5 (sequence is synthesized)
agacgaggcctcctgcccggtgctcacctgtggtcccgccagcttccagtgcaacagctccacctgcatcccccagctgtgggcctgcgacaacgaccccgactgcgaagatggctcgga

SEQ ID NO: 283444 - DNA, 120 bp, Artificial Sequence
  ENSG00000130164_6 (sequence is synthesized)
tgagtggccgcagcgctgtaggggtctttacgtgttccaaggggacagtagcccctgctcggccttcgagttccactgcctaagtggcgagtgcatccactccagctggcgctgtgatgg

SEQ ID NO: 283445 - DNA, 120 bp, Artificial Sequence
  ENSG00000130164_7 (sequence is synthesized)
tggccccgactgcaaggacaaatctgacgaggaaaactgcgctgtggccacctgtcgccctgacgaattccagtgctctgatggaaactgcatccatggcagccggcagtgtgaccggga

SEQ ID NO: 283446 - DNA, 120 bp, Artificial Sequence
  ENSG00000130164_8 (sequence is synthesized)
atatgactgcaaggacatgagcgatgaagttggctgcgttaatgtgacactctgcgagggacccaacaagttcaagtgtcacagcggcgaatgcatcaccctggacaaagtctgcaacat

SEQ ID NO: 283447 - DNA, 120 bp, Artificial Sequence
  ENSG00000130164_9 (sequence is synthesized)
ggctagagactgccgggactggtcagatgaacccatcaaagagtgcgggaccaacgaatgcttggacaacaacggcggctgttcccacgtctgcaatgaccttaagatcggctacgagtg

SEQ ID NO: 283448 - DNA, 120 bp, Artificial Sequence
  ENSG00000130164_10 (sequence is synthesized)
cctgtgccccgacggcttccagctggtggcccagcgaagatgcgaagatatcgatgagtgtcaggatcccgacacctgcagccagctctgcgtgaacctggagggtggctacaagtgcca

SEQ ID NO: 283449 - DNA, 120 bp, Artificial Sequence
  ENSG00000130164_11 (sequence is synthesized)
gtgtgaggaaggcttccagctggacccccacacgaaggcctgcaaggctgtgggctccatcgcctacctcttcttcaccaaccggcacgaggtcaggaagatgacgctggaccggagcga

SEQ ID NO: 283450 - DNA, 120 bp, Artificial Sequence
  ENSG00000130164_12 (sequence is synthesized)
gtacaccagcctcatccccaacctgaggaacgtggtcgctctggacacggaggtggccagcaatagaatctactggtctgacctgtcccagagaatgatctgcagcacccagcttgacag

SEQ ID NO: 283451 - DNA, 120 bp, Artificial Sequence
  ENSG00000130164_13 (sequence is synthesized)
agcccacggcgtctcttcctatgacaccgtcatcagcagagacatccaggcccccgacgggctggctgtggactggatccacagcaacatctactggaccgactctgtcctgggcactgt

SEQ ID NO: 283452 - DNA, 120 bp, Artificial Sequence
  ENSG00000130164_14 (sequence is synthesized)
ctctgttgcggataccaagggcgtgaagaggaaaacgttattcagggagaacggctccaagccaagggccatcgtggtggatcctgttcatggcttcatgtactggactgactggggaac

SEQ ID NO: 283453 - DNA, 120 bp, Artificial Sequence
  ENSG00000130164_15 (sequence is synthesized)
aagggggcctgaatggtgtggacatctactcgctggtgactgaaaacattcagtggcccaatggcatcaccctagatctcctcagtggccgcctctactgggttgactccaaacttcact

SEQ ID NO: 283454 - DNA, 120 bp, Artificial Sequence
  ENSG00000130164_16 (sequence is synthesized)
ccatctcaagcatcgatgtcaacgggggcaaccggaagaccatcttggaggatgaaaagaggctggcccaccccttctccttggccgtctttgaggacaaagtattttggacagatatca

SEQ ID NO: 283455 - DNA, 120 bp, Artificial Sequence
  ENSG00000130164_17 (sequence is synthesized)
tcaacgaagccattttcagtgccaaccgcctcacaggttccgatgtcaacttgttggctgaaaacctactgtccccagaggatatggttctcttccacaacctcacccagccaagaggag

SEQ ID NO: 283456 - DNA, 120 bp, Artificial Sequence
  ENSG00000130164_18 (sequence is synthesized)
tgaactggtgtgagaggaccaccctgagcaatggcggctgccagtatctgtgcctccctgccccgcagatcaacccccactcgcccaagtttacctgcgcctgcccggacggcatgctgc

SEQ ID NO: 283457 - DNA, 120 bp, Artificial Sequence
  ENSG00000130164_19 (sequence is synthesized)
tggccagggacatgaggagctgcctcacagaggctgaggctgcagtggccacccaggagacatccaccgtcaggctaaaggtcagctccacagccgtaaggacacagcacacaaccaccc

SEQ ID NO: 283458 - DNA, 120 bp, Artificial Sequence
  ENSG00000130164_20 (sequence is synthesized)
gacctgttcccgacacctcccggctgcctggggccacccctgggctcaccacggtggagatagtgacaatgtctcaccaagctctgggcgacgttgctggcagaggaaatgagaagaagc

SEQ ID NO: 283459 - DNA, 120 bp, Artificial Sequence
  ENSG00000130164_21 (sequence is synthesized)
ccagtagcgtgagggctctgtccattgtcctccccatcgtgctcctcgtcttcctttgcctgggggtcttccttctatggaagaactggcggcttaagaacatcaacagcatcaactttg

SEQ ID NO: 283460 - DNA, 120 bp, Artificial Sequence
  ENSG00000130164_22 (sequence is synthesized)
acaaccccgtctatcagaagaccacagaggatgaggtccacatttgccacaaccaggacggctacagctacccctcgagacagatggtcagtctggaggatgacgtggcgtgaacatctg

SEQ ID NO: 283461 - DNA, 120 bp, Artificial Sequence
  ENSG00000130164_23 (sequence is synthesized)
cctggagtcccgtccctgcccagaacccttcctgagacctcgccggccttgttttattcaaagacagagaagaccaaagcattgcctgccagagctttgttttatatatttattcatctg

SEQ ID NO: 283462 - DNA, 120 bp, Artificial Sequence
  ENSG00000130164_24 (sequence is synthesized)
ggaggcagaacaggcttcggacagtgcccatgcaatggcttgggttgggattttggtttcttcctttcctcgtgaaggataagagaaacaggcccggggggaccaggatgacacctccat

SEQ ID NO: 283463 - DNA, 120 bp, Artificial Sequence
  ENSG00000130164_25 (sequence is synthesized)
ttctctccaggaagttttgagtttctctccaccgtgacacaatcctcaaacatggaagatgaaaggggaggggatgtcaggcccagagaagcaagtggctttcaacacacaacagcagat

SEQ ID NO: 283464 - DNA, 120 bp, Artificial Sequence
  ENSG00000130164_26 (sequence is synthesized)
ggcaccaacgggaccccctggccctgcctcatccaccaatctctaagccaaacccctaaactcaggagtcaacgtgtttacctcttctatgcaagccttgctagacagccaggttagcct

SEQ ID NO: 283465 - DNA, 120 bp, Artificial Sequence
  ENSG00000130164_27 (sequence is synthesized)
ttgccctgtcacccccgaatcatgacccacccagtgtctttcgaggtgggtttgtaccttccttaagccaggaaagggattcatggcgtcggaaatgatctggctgaatccgtggtggca

SEQ ID NO: 283466 - DNA, 120 bp, Artificial Sequence
  ENSG00000130164_28 (sequence is synthesized)
ccgagaccaaactcattcaccaaatgatgccacttcccagaggcagagcctgagtcactggtcacccttaatatttattaagtgcctgagacacccggttaccttggccgtgaggacacg

SEQ ID NO: 283467 - DNA, 120 bp, Artificial Sequence
  ENSG00000130164_29 (sequence is synthesized)
tggcctgcacccaggtgtggctgtcaggacaccagcctggtgcccatcctcccgacccctacccacttccattcccgtggtctccttgcactttctcagttcagagttgtacactgtgta

SEQ ID NO: 283468 - DNA, 120 bp, Artificial Sequence
  ENSG00000130164_30 (sequence is synthesized)
gagctgcaaggcagctgccccgaactgggctccatctcttgggggctcataccaagcctcttccgcccttcaaatccccccttgaccaggaggcattacaaagtggggatggtgctacct

SEQ ID NO: 283469 - DNA, 120 bp, Artificial Sequence
  ENSG00000130164_31 (sequence is synthesized)
cttcgggtttgtcacgcacagtcagggaggctgtccctgccgagggctagccacctggcacacacactggcaagccgctgtgattcccgctggtcgtgatccccgtgatcctgtgatccc

SEQ ID NO: 283470 - DNA, 120 bp, Artificial Sequence
  ENSG00000130164_32 (sequence is synthesized)
cgccccgtgaggctgaacacatagtgacgcttgctagccaagcctcaatgacccacgtaacatgaagggggaaaagccagaaagttctgccaaggagcaaggccaagaatcccgaaggga

SEQ ID NO: 283471 - DNA, 120 bp, Artificial Sequence
  ENSG00000130164_33 (sequence is synthesized)
cttgagcacccgaaattctgaaacgtcttgagcactgacctttagaaggaaatgcttattggagcattttggatttcggatttttaccactgagtgtggagtcctaattaggaaaaaaac

SEQ ID NO: 283472 - DNA, 88 bp, Artificial Sequence
  ENSG00000130164_34 (sequence is synthesized)
tttttaccactgagtgtggagtcctaattaggaaaaaaaccaggctgaccgaaccaaaggaaagcaataaaagaaggcagatagggtc

SEQ ID NO: 283473 - DNA, 86 bp, Artificial Sequence
  ENSG00000130164_35 (sequence is synthesized)
gaaattctgtctcaaaaaaaaagaagaagaaggccgacaaactatgtaactctgcctttctccatggtccagaacacacagccctc

SEQ ID NO: 283474 - DNA, 120 bp, Artificial Sequence
  ENSG00000130164_36 (sequence is synthesized)
taactctgcctttctccatggtccagaacacacagccctcctgcgtaaataactccttatcttcctgctcccagctatcatcagacacctcggctgatagaaaattgcaagttagctcac

SEQ ID NO: 283475 - DNA, 120 bp, Artificial Sequence
  ENSG00000130164_37 (sequence is synthesized)
tagctcactgcaacctcggcattataagtactgcacaaagccctcttcagcgcacagcacaagcaccattctataaaatctccagcaagcggccaggtgcagtggctcatacctgtaatc

SEQ ID NO: 283476 - DNA, 120 bp, Artificial Sequence
  ENSG00000130164_38 (sequence is synthesized)
attttaataaaatgcacaagtaggttgacaagaatttcacctgcaaccttgtcaaccacctagaataaaagcctctgcagccctcccctaaagactcatcaatgtgaggctgaggcagga

SEQ ID NO: 283477 - DNA, 86 bp, Artificial Sequence
  ENSG00000130164_39 (sequence is synthesized)
ttgaagaccctatttcagaaatacaactataaaaaaataaataaatcctccagtctggatcgtttgacgggacttcaggttctttc

SEQ ID NO: 283478 - DNA, 120 bp, Artificial Sequence
  ENSG00000130164_40 (sequence is synthesized)
actgttgcactgatgtccggagagacagtgacagcctccgtcagactcccgcgtgaagatgtcacaagggattggcaattgtccccagggacaaaacactgtgtcccccccagtgcaggg

SEQ ID NO: 283479 - DNA, 120 bp, Artificial Sequence
  ENSG00000130164_41 (sequence is synthesized)
aaccgtgataagcctttctggtttcggagcacgtaaatgcgtccctgtacagatagtggggattttttgttatgtttgcactttgtatattggttgaaactgttatcacttatatatata

SEQ ID NO: 283480 - DNA, 87 bp, Artificial Sequence
  ENSG00000130164_42 (sequence is synthesized)
cagcgctgagtgccaggatggctctgatgagtcccaggagacgtgctgtgagtcccctttgggcatgatatgcatttatttttgtaa

SEQ ID NO: 283481 - DNA, 120 bp, Artificial Sequence
  ENSG00000130164_43 (sequence is synthesized)
ctcccaaagtgctgggattacaggcaccacgcctggcctgtgacacgattcttaacccctttttgatgatggcggctggaaaagtggccagtggattttgatgtattcaatcatgaatta

SEQ ID NO: 283482 - DNA, 120 bp, Artificial Sequence
  ENSG00000130164_44 (sequence is synthesized)
aggggaggcctggcgttcctccgcggttcctgtcacaaaggcgacgacaagtcccgggtccccggagccgcctccgcgacatacacgagtcgccctccgttatcctgggccctcctggcg

SEQ ID NO: 283483 - DNA, 120 bp, Artificial Sequence
  ENSG00000130164_45 (sequence is synthesized)
aagtccccggtttccgctgtgctctgtggcgacacctccgtccccaccttgtcctggggggcgccctcgccccaccagccccgatcaagttcacagaggggcccccggccaccctcaagg

SEQ ID NO: 283484 - DNA, 120 bp, Artificial Sequence
  ENSG00000130164_46 (sequence is synthesized)
ggggacagagaggggcaggttgaccgggacttcaaagccgtgatcgtgaatatcgagaactgccattgtcgtctttatgtccgcccacctagtgcttccacttctatgcaaatgcctcca

SEQ ID NO: 283485 - DNA, 120 bp, Artificial Sequence
  ENSG00000130164_47 (sequence is synthesized)
ccacctagtgcttccacttctatgcaaatgcctccaagccattcacttccccaatcttgtcgttgatgggtatgtgtttaaaacatgcacggtgaggccgggcgcagtggctcacgcctg

SEQ ID NO: 283486 - DNA, 120 bp, Artificial Sequence
  ENSG00000130164_48 (sequence is synthesized)
aaaaaaaaccatgcatggtgcatcagcagcccatggcctctggccaggcatggcgaggctgaggtgggaggatggtttgagctcaggcatttgaggctgtcgtgagctatgattatgcca

SEQ ID NO: 283487 - DNA, 87 bp, Artificial Sequence
  ENSG00000130164_49 (sequence is synthesized)
gaggctgtcgtgagctatgattatgccactgcttttaaaaaatgaatttggccagacacaggtgcctcacgcctgtaatcccagcac

SEQ ID NO: 283488 - DNA, 120 bp, Artificial Sequence
  ENSG00000130164_50 (sequence is synthesized)
cacttgagttcaggagttggagaccaggcctgagcaacaaagcgagatcccatctctacaaaaaccaaaaagttaaaaatcagctgggtacggtggcacgtgcctgtgatcccagctact

SEQ ID NO: 283489 - DNA, 120 bp, Artificial Sequence
  ENSG00000130164_51 (sequence is synthesized)
tttgttcagtgactattctcggggccctgtgtagggggttattgcctctgaaatgcctcttctttatgtacaaagattatttgcacgaactggactgtgtgcaacgctttttgggagaat

SEQ ID NO: 283490 - DNA, 120 bp, Artificial Sequence
  ENSG00000130164_52 (sequence is synthesized)
gatgtccccgttgtatgtatgagtggcttctgggagatgggtgtcactttttaaaccactgtatagaaggtttttgtagcctgaatgtcttactgtgatcaattaaatttcttaaatgaa

SEQ ID NO: 283491 - DNA, 120 bp, Artificial Sequence
  ENSG00000130165_0 (sequence is synthesized)
gaagtcactatctcccgggtgaacggagctttcgcagctggagaaggctcatccacctgcagacatggggcgcagaaagtcaaaacgaaagccgcctcccaagaagaagatgacaggcac

SEQ ID NO: 283492 - DNA, 120 bp, Artificial Sequence
  ENSG00000130165_1 (sequence is synthesized)
cctcgagacccagttcacctgccccttctgcaaccacgagaaatcctgtgatgtgaaaatggaccgtgcccgcaacaccggagtcatctcttgtaccgtgtgcctagaggaattccagac

SEQ ID NO: 283493 - DNA, 120 bp, Artificial Sequence
  ENSG00000130165_2 (sequence is synthesized)
gcccataacgtatctgtcagaacccgtggatgtgtacagtgattggatagacgcctgcgaggcggccaatcagtagcgacacagaggacccgccccctgagcagccccgcgtactgtgga

SEQ ID NO: 283494 - DNA, 120 bp, Artificial Sequence
  ENSG00000130165_3 (sequence is synthesized)
ccccctgagcagccccgcgtactgtggatccagctgttcggttctggtccagagacattccaggggtccagggtgtgggtcctgggctgtcacagccgtgtgtgtgtgtgtgtgtgtgtg

SEQ ID NO: 283495 - DNA, 120 bp, Artificial Sequence
  ENSG00000130165_4 (sequence is synthesized)
actggggtggccgtgagtgtgtgctcacaggtacgcggtggtgtcgggttcctgggcctgaggggcctgaactgatctcacttggctccgaaagcctttgctgtgttccctgcagcccct

SEQ ID NO: 283496 - DNA, 120 bp, Artificial Sequence
  ENSG00000130165_5 (sequence is synthesized)
ggccccccagccttggggctctggctccccccggcggaattgggggactgtttcctgacatcctggacaagggaagcccactagaggctggaacaggacctctccagcctcctcaccagc

SEQ ID NO: 283497 - DNA, 120 bp, Artificial Sequence
  ENSG00000130165_6 (sequence is synthesized)
accgtgcccatctcaactggacttcccgctctccttctccaccttctagtgcccgtggccggggattcaaagccgccgttccccaggtccctgggctgggccctgacagggagccgcccc

SEQ ID NO: 283498 - DNA, 120 bp, Artificial Sequence
  ENSG00000130165_7 (sequence is synthesized)
cctccccatggtaaccaggaagcccgtttcatgttcagttgcttttgtagaggaagcaagggctgggatggggacagctgtcaatcacaagcccttaaataaagcagccagcgcacatcc

SEQ ID NO: 283499 - DNA, 120 bp, Artificial Sequence
  ENSG00000130165_8 (sequence is synthesized)
ttttaattttttttttttagagatgaggcctcactatgttgcccaggctggtatccaggtcctggcatcaagtaatcctctcaccttagcttcccaaagtgctggctgggatcacaggtg

SEQ ID NO: 283500 - DNA, 120 bp, Artificial Sequence
  ENSG00000130165_9 (sequence is synthesized)
tgagccaccatgcctggccttgtctctgttttatagacgaggaaactgtggcacaaagagcttaaataacctgcccaggtcacgcagctcatccacctgcagacatggggcgcagaaagt

SEQ ID NO: 283501 - DNA, 120 bp, Artificial Sequence
  ENSG00000130165_10 (sequence is synthesized)
cccgggtgaacggagctttcgcagctggagaagggtttcatcctgttgcctaggctggagtgcagtgcctggatcataactctggatcatcactgaaacctgaaactcctgggctcaagc

SEQ ID NO: 283502 - DNA, 120 bp, Artificial Sequence
  ENSG00000130165_11 (sequence is synthesized)
aggggacggacagctgccctgagccttcacacagtgttcctctactcagaagtgcctgtccccacttctctgccctgcagtctgtcatctggatcgaggccatcagataacctgagtgtc

SEQ ID NO: 283503 - DNA, 120 bp, Artificial Sequence
  ENSG00000130165_12 (sequence is synthesized)
actcctcctggatggtacttacatgtcctttgccaagaggagcagccagaataaaatcaccagttcctaggctcttaggctccacccggccctgaacagctggcttgtcttggagtctct

SEQ ID NO: 283504 - DNA, 120 bp, Artificial Sequence
  ENSG00000130165_13 (sequence is synthesized)
ttccagagggtggggagggggctggagtccggaccctgctcatctggcccactgtgtgccctggtgcagggccaaagccgtccagaggaacaggtgccacctagtgatttctgtggggtg

SEQ ID NO: 283505 - DNA, 120 bp, Artificial Sequence
  ENSG00000130165_14 (sequence is synthesized)
aacgtccagcgcacatcccttgctgtccgtgatgtcttgggttctgcgtctgcctggtcaccagaagaaggagaggggacctgaggctctgacgttcgggaggtggcctggtggcccatg

SEQ ID NO: 283506 - DNA, 120 bp, Artificial Sequence
  ENSG00000130165_15 (sequence is synthesized)
tgaccagcccttcaaaccacccagcgttttattcagtcagtaagcattcagggtggtggagcaggcagacatctggccaggtgtttacagcagtcacaataggaaatgggggaggtgaga

SEQ ID NO: 283507 - DNA, 120 bp, Artificial Sequence
  ENSG00000130165_16 (sequence is synthesized)
cagaacaggtggtcagaggaggcttctgggaggggcaggctgagacagtgacaccgtagggccacctctagccagacgctgacctctggccttcctgcgtcgccccagtgtcctgacagc

SEQ ID NO: 283508 - DNA, 120 bp, Artificial Sequence
  ENSG00000130165_17 (sequence is synthesized)
cactttgtggggcaggtgccaagctaaccccaagttcaaagatgaggaaacagaggctagaggtgaaggaggtcactggcccaagaccctacagccagaaagtggcacaggggggatttg

SEQ ID NO: 283509 - DNA, 120 bp, Artificial Sequence
  ENSG00000130165_18 (sequence is synthesized)
aacccaggaaacgaggctccacagcttacagtctgacttcttgtgagcccagagtccaggctgagggaacagcttacaggccgttctggaggtagtgagtggaagagggacacgggaggg

SEQ ID NO: 283510 - DNA, 120 bp, Artificial Sequence
  ENSG00000130165_19 (sequence is synthesized)
aaacatgaaaggggcctttattcaagggtggtgaggactctcagaaggctggtgttggggcgggatgtgtgtggccgatggggagcacctgagggctgatgtccccttagctggtcgcac

SEQ ID NO: 283511 - DNA, 120 bp, Artificial Sequence
  ENSG00000130165_20 (sequence is synthesized)
aggggatgaaagcaccttcttcccggagccatgctgaggatggaagtgccaggcatggtttgagcggctctggggcccacccagggcactgacggatgtgaacagcggggggagacattg

SEQ ID NO: 283512 - DNA, 120 bp, Artificial Sequence
  ENSG00000130165_21 (sequence is synthesized)
agctggcccggaagccctggctgccagactgggctgctgggtctggcctgtgcaccccctcaggcccactctgccatgacatgtcttccctggttatcccgccacctccaagatcccagg

SEQ ID NO: 283513 - DNA, 120 bp, Artificial Sequence
  ENSG00000130165_22 (sequence is synthesized)
taaggtctgctagccctggcaggagccggcacacatgcgcagagtggtggacaggcacctaggtttagggtgatggccctctgggatccagcaaaaagggggctcattcctctggcaccc

SEQ ID NO: 283514 - DNA, 120 bp, Artificial Sequence
  ENSG00000130165_23 (sequence is synthesized)
gaggcccttcctgccgcccgcccaccccagcctcacaggctaagtgctaatatggtgctgttttcccgaggaggcagggccctgggccaggcccggatcctcctcagcatagcttccccg

SEQ ID NO: 283515 - DNA, 120 bp, Artificial Sequence
  ENSG00000130165_24 (sequence is synthesized)
cgccggcccagggggagcaggacttgcggtagccaggccaaaagcgcctggaatccggtttacgaggccccaggggctgcgtgcgtctgtgcgcgggtcttctggtgtctgcctccgcag

SEQ ID NO: 283516 - DNA, 120 bp, Artificial Sequence
  ENSG00000130165_25 (sequence is synthesized)
gtctccacgttccagcctcaactcctgccctccctggggagaagacagctccgtgccgcgctcctcgcttctctgcctcctctcctccttggaatcctgatggttggggacctctccctc

SEQ ID NO: 283517 - DNA, 120 bp, Artificial Sequence
  ENSG00000130165_26 (sequence is synthesized)
ctcccggggataacagggtcccctctgaaatgtgaggaggttgaggccctggacacagccttttagagtcccgggttggcaggctcagccttaagacggctgagagcgggcggggcgcac

SEQ ID NO: 283518 - DNA, 120 bp, Artificial Sequence
  ENSG00000130165_27 (sequence is synthesized)
agaattaaccgtgccctatggtgccctgtgccagtcagtaaagggccattgccttggctcagaagtgcccctctccctgtcccctttcccctccccacagtctggggctaaagggttcac

SEQ ID NO: 283519 - DNA, 120 bp, Artificial Sequence
  ENSG00000130165_28 (sequence is synthesized)
cctgcccacagggcccaccaggacccctacttgtcatcctttctctattgatgcctggtctttaccagcgattaaacatgtagaacatcaccccatctgggggtgtcatttcatgaccac

SEQ ID NO: 283520 - DNA, 120 bp, Artificial Sequence
  ENSG00000130165_29 (sequence is synthesized)
caatggtgcgatctcggctcactgcagtctccgcctcttgggttcaggctcatccacctgcagacatggggcgcagaaagtcaaaacgaaagccgcctcccaagaagaagatgacaggca

SEQ ID NO: 283521 - DNA, 120 bp, Artificial Sequence
  ENSG00000130165_30 (sequence is synthesized)
ggactggaagttcctctactccgtgcgtttacggggtcctggaggaggctcctgggacctcgagcttgggggaaagccggtcggggagactgactccccccgaccccatccttccaagcg

SEQ ID NO: 283522 - DNA, 120 bp, Artificial Sequence
  ENSG00000130165_31 (sequence is synthesized)
gtgccaccctccccaggaacagtggcttccttgtattggcgccagcgatgatgggccagctctgtgctaagtacttaacttaccattcctggtgtcagccccacaagtctcctctgagat

SEQ ID NO: 283523 - DNA, 120 bp, Artificial Sequence
  ENSG00000130167_0 (sequence is synthesized)
tggacaaccatcaggcagccaggacacagaggggcagagcaagtcagcattggcgccccttcctcagatccctatcatcttgggaaacagtagcccagaggttcaggaagatgttaactt

SEQ ID NO: 283524 - DNA, 120 bp, Artificial Sequence
  ENSG00000130167_1 (sequence is synthesized)
aaatgttcagggtgccccagtctgttcagcatggctgaaatccacactccgtattcttccttgaagaaactgttatctttactcaatggcttcgtggctgtgtctggcatcatcctagtt

SEQ ID NO: 283525 - DNA, 120 bp, Artificial Sequence
  ENSG00000130167_2 (sequence is synthesized)
ggcctgggcattggtggtaaatgtggaggggcctctctgacgaatgtcctcgggctgtcctccgcatacctccttcacgttggcaacctgtgcctggtgatgggatgcatcacggtactg

SEQ ID NO: 283526 - DNA, 120 bp, Artificial Sequence
  ENSG00000130167_3 (sequence is synthesized)
cttggctgtgccgggtggtatggagcgactaaagagagcagaggcacgctcttgttttgcatcctgtcaatggttattgtcctcatcatggaagttacagctgccacagtggtccttctt

SEQ ID NO: 283527 - DNA, 120 bp, Artificial Sequence
  ENSG00000130167_4 (sequence is synthesized)
agacgactattctacacagtggaacttggtcatggagaagctaaagtgctgtggggtgaataactacacagatttttctggctcttccttcgaaatgacaacgggccacacctaccccag

SEQ ID NO: 283528 - DNA, 120 bp, Artificial Sequence
  ENSG00000130167_5 (sequence is synthesized)
gagttgctgtaaatccatcggaagtgtgtcctgtgacggacgcgatgtgtctccaaacgtcatccaccagaagggctgtttccataaactcctaaaaatcaccaagactcagagcttcac

SEQ ID NO: 283529 - DNA, 120 bp, Artificial Sequence
  ENSG00000130167_6 (sequence is synthesized)
cctgagtgggagctctctgggagctgcagtgatacagaggtgggggtctcgctatgttgcgcaggctggtcttgaactgctggcctaaagcgatccccccgcctaggcctcccaaagtgc

SEQ ID NO: 283530 - DNA, 120 bp, Artificial Sequence
  ENSG00000130167_7 (sequence is synthesized)
tgggtttaccagcgtgagccaccacgctgggcttcctgcatccttttaaggttcctgagggtctgcctgagaggagctgtccctgaatctccatgcagccccacctgccacatcaccaag

SEQ ID NO: 283531 - DNA, 120 bp, Artificial Sequence
  ENSG00000130167_8 (sequence is synthesized)
ggagaagatgagacacctgggcccatctggctgctggagattcagtctcagttttatttctctgtggcactcactgcttctggaggggagactgttaataaaagatttgggaaccccctg

SEQ ID NO: 283532 - DNA, 120 bp, Artificial Sequence
  ENSG00000130167_9 (sequence is synthesized)
cgcgatgtgtctccaaacgtcatccaccagaagaaactgaggctcggggaggggacatcactagttcaagatcacagagctttggcagagttggaatttgaagccccattggcctgagtc

SEQ ID NO: 283533 - DNA, 120 bp, Artificial Sequence
  ENSG00000130167_10 (sequence is synthesized)
aaaagtgatcatcctagcgggagtgagggccagccacgtgatggagcactcactttggctgtttccataaactcctaaaaatcaccaagactcagagcttcaccctgagtgggagctctc

SEQ ID NO: 283534 - DNA, 120 bp, Artificial Sequence
  ENSG00000130167_11 (sequence is synthesized)
tgggagctgcagtgatacaggtaagacccagcctctctagggtctttgagctgttttattaagcacctactgtatgccaaacactgttctggtcactgggacacaggagtgaacaaaact

SEQ ID NO: 283535 - DNA, 120 bp, Artificial Sequence
  ENSG00000130173_0 (sequence is synthesized)
ataccttagaccctcagtcatgccagtgcctgctctgtgcctgctctgggccctggcaatggtgacccggcctgcctcagcggcccccatgggcggcccagaactggcacagcatgagga

SEQ ID NO: 283536 - DNA, 120 bp, Artificial Sequence
  ENSG00000130173_1 (sequence is synthesized)
gctgaccctgctcttccatgggaccctgcagctgggccaggccctcaacggtgtgtacaggaccacggagggacggctgacaaaggccaggaacagcctgggtctctatggccgcacaat

SEQ ID NO: 283537 - DNA, 120 bp, Artificial Sequence
  ENSG00000130173_2 (sequence is synthesized)
agaactcctggggcaggaggtcagccggggccgggatgcagcccaggaacttcgggcaagcctgttggagactcagatggaggaggatattctgcagctgcaggcagaggccacagctga

SEQ ID NO: 283538 - DNA, 120 bp, Artificial Sequence
  ENSG00000130173_3 (sequence is synthesized)
tgctacgggacagcgtgcagcggctagaagtccagctgaggagcgcctggctgggccctgcctaccgagaatttgaggtcttaaaggctcacgctgacaagcagagccacatcctatggg

SEQ ID NO: 283539 - DNA, 120 bp, Artificial Sequence
  ENSG00000130173_4 (sequence is synthesized)
ccctcacaggccacgtgcagcggcagaggcgggagatggtggcacagcagcatcggctgcgacagatccaggagagactccacacagcggcgctcccagcctgaatctgcctggatggaa

SEQ ID NO: 283540 - DNA, 120 bp, Artificial Sequence
  ENSG00000130173_5 (sequence is synthesized)
ctgaggaccaatcatgctgcaaggaacacttccacgccccgtgaggcccctgtgcagggaggagctgcctgttcactgggatcagccagggcgccgggccccacttctgagcacagagca

SEQ ID NO: 283541 - DNA, 120 bp, Artificial Sequence
  ENSG00000130173_6 (sequence is synthesized)
gagacagacgcaggcggggacaaaggcagaggatgtagccccattggggaggggtggaggaaggacatgtaccctttcatgcctacacacccctcattaaagcagagtcgtggcatctca

SEQ ID NO: 283542 - DNA, 120 bp, Artificial Sequence
  ENSG00000130173_7 (sequence is synthesized)
acatacatcgggtgtgagcacggaatagctgggcggcggctggtccacagacactgggagacagaaggggccggtcctcaggcgcccgtgctgcagcagtgggatccactggggagaggc

SEQ ID NO: 283543 - DNA, 120 bp, Artificial Sequence
  ENSG00000130173_8 (sequence is synthesized)
tggagaccaccggtgtgaaggcctcgcgggtaaattcactgcagctggacttgccaaagatgacctgggagagtggattcatgagggacccatgggggatgccctaccccccttccctgg

SEQ ID NO: 283544 - DNA, 120 bp, Artificial Sequence
  ENSG00000130173_9 (sequence is synthesized)
actgggagacagaaggggccggtcctcaggcgcccgtgctgcagcagtgggatccactggggagaggctggagatggaggaggatattctgcagctgcaggcagaggccacagctgaggt

SEQ ID NO: 283545 - DNA, 120 bp, Artificial Sequence
  ENSG00000130175_0 (sequence is synthesized)
atgctgttgccgctgctgctgctgctacccatgtgctgggccgtggaggtcaagaggccccggggcgtctccctcaccaatcatcacttctacgatgagtccaagcctttcacctgcctg

SEQ ID NO: 283546 - DNA, 120 bp, Artificial Sequence
  ENSG00000130175_1 (sequence is synthesized)
gacggttcggccaccatcccatttgatcaggtcaacgatgactattgcgactgcaaagatggctctgacgagccaggcacggctgcctgtcctaatggcagcttccactgcaccaacact

SEQ ID NO: 283547 - DNA, 120 bp, Artificial Sequence
  ENSG00000130175_2 (sequence is synthesized)
ggctataagcccctgtatatcccctccaaccgggtcaacgatggtgtttgtgactgctgcgatggaacagacgagtacaacagcggcgtcatctgtgagaacacctgcaaagagaagggc

SEQ ID NO: 283548 - DNA, 120 bp, Artificial Sequence
  ENSG00000130175_3 (sequence is synthesized)
cgtaaggagagagagtccctgcagcagatggccgaggtcacccgcgaagggttccgtctgaagaagatccttattgaggactggaagaaggcacgggaggagaagcagaaaaagctcatt

SEQ ID NO: 283549 - DNA, 120 bp, Artificial Sequence
  ENSG00000130175_4 (sequence is synthesized)
gagctacaggctgggaagaagtctctggaagaccaggtggagatgctgcggacagtgaaggaggaagctgagaagccagagagagaggccaaagagcagcaccagaagctgtgggaagag

SEQ ID NO: 283550 - DNA, 120 bp, Artificial Sequence
  ENSG00000130175_5 (sequence is synthesized)
cagctggctgctgccaaggcccaacaggagcaggagctggcggctgatgccttcaaggagctggatgatgacatggacgggacggtctcggtgactgagctgcagactcacccggagctg

SEQ ID NO: 283551 - DNA, 120 bp, Artificial Sequence
  ENSG00000130175_6 (sequence is synthesized)
gacacagatggggatggggcgttgtcagaagcggaagctcaggccctcctcagtggggacacacagacagacgccacctctttctacgaccgcgtctgggccgccatcagggacaagtac

SEQ ID NO: 283552 - DNA, 120 bp, Artificial Sequence
  ENSG00000130175_7 (sequence is synthesized)
gaggaggaggaggaggaggaggaggaagaagaggctgaagaagaggaggaggaggaggattccgaggaggccccaccgccactgtcacccccgcagccggccagccctgctgaggaagac

SEQ ID NO: 283553 - DNA, 120 bp, Artificial Sequence
  ENSG00000130175_8 (sequence is synthesized)
agacaaaatgccgccctacgacgagcagacgcaggccttcatcgatgctgcccaggaggcccgcaacaagttcgaggaggccgagcggtcgctgaaggacatggaggagtccatcaggaa

SEQ ID NO: 283554 - DNA, 120 bp, Artificial Sequence
  ENSG00000130175_9 (sequence is synthesized)
cctggagcaagagatttcttttgactttggccccaacggggagtttgcttacctgtacagccagtgctacgagctcaccaccaacgaatacgtctaccgcctctgccccttcaagcttgt

SEQ ID NO: 283555 - DNA, 120 bp, Artificial Sequence
  ENSG00000130175_10 (sequence is synthesized)
ctcgcagaaacccaaactcgggggctctcccaccagccttggcacctggggctcatggattggccccgaccacgacaagttcagtgccatgaagtatgagcaaggcacgggctgctggca

SEQ ID NO: 283556 - DNA, 120 bp, Artificial Sequence
  ENSG00000130175_11 (sequence is synthesized)
gggccccaaccgctccaccaccgtgcgcctcctgtgcgggaaagagaccatggtgaccagcaccacagagcccagtcgctgcgagtacctcatggagctgatgacgccagccgcctgccc

SEQ ID NO: 283557 - DNA, 120 bp, Artificial Sequence
  ENSG00000130175_12 (sequence is synthesized)
ggagccaccgcctgaagcacccaccgaagacgaccatgacgagctctagctggatgggcgcagagaacctcaagaaggcatgaagccagcccctgcagtgccgtccacccgcccctctgg

SEQ ID NO: 283558 - DNA, 120 bp, Artificial Sequence
  ENSG00000130175_13 (sequence is synthesized)
gcctgcctgtggctctgttgccctcctctgtggcggcaggacctttgtggggcttcgtgccctgctctggggcccaggcggggctggtccacattcccaggccccaacagccttcaaaga

SEQ ID NO: 283559 - DNA, 120 bp, Artificial Sequence
  ENSG00000130175_14 (sequence is synthesized)
tgggtaaaggagcttgccctccctgggccccccaccttggtgactcgccccaccacccccagccctgtccctgccacccctcctagtggggactagtgaatgacttgacctgtgacctca

SEQ ID NO: 283560 - DNA, 120 bp, Artificial Sequence
  ENSG00000130175_15 (sequence is synthesized)
cttacagggggcaaccggagggtgcatgtgtgggtgtggacggcggaggctgttaatccctttggtctgttggcgggaattgggtcacaattgggcacagggagcggaggttttgagatc

SEQ ID NO: 283561 - DNA, 120 bp, Artificial Sequence
  ENSG00000130175_16 (sequence is synthesized)
ttgagatcctcgccattgatttgagcaaagtgagactggccaggattggggagatcgctgcccctcgcccccatatcggaaacaaagtgaggcctcattgcctggaagcgatggaggaat

SEQ ID NO: 283562 - DNA, 120 bp, Artificial Sequence
  ENSG00000130175_17 (sequence is synthesized)
ccaattggctggaagtagccctctcccactgaccgggatccgctttcttcctgcagcgtgaagacacagcgcatctccccgctgtaggcttcctcccacagaacccgtttcgggcctcag

SEQ ID NO: 283563 - DNA, 120 bp, Artificial Sequence
  ENSG00000130175_18 (sequence is synthesized)
agagccgcgccgcaggacggagggtctggacactttggggtcacgtgctcattccgtttccctacctcccccaaccttatcccgcccctgggggttcgcgggcatttttcaggaactttc

SEQ ID NO: 283564 - DNA, 120 bp, Artificial Sequence
  ENSG00000130175_19 (sequence is synthesized)
tttccggcttgagaagccgccactcccaagatggagcaggaaccgcggctgctggacaagaggggtgcggtggatactgacctttgctccggcctcgtcgtgaagacacagcgcatctcc

SEQ ID NO: 283565 - DNA, 120 bp, Artificial Sequence
  ENSG00000130175_20 (sequence is synthesized)
ctttctgcagcaggaaccgcggctgctggacaagaggggtgcggtggatactgacctttgctccggcctcgtgtagcgtgaagacacagcgcatctccccgctgtaggcttcctcccaca

SEQ ID NO: 283566 - DNA, 120 bp, Artificial Sequence
  ENSG00000130175_21 (sequence is synthesized)
gccttttgactcagtttcccggtagtgctccgctggtggggatgggaggacagaggtggtatttggtggagaaggcgcttacctgccctgggctgagcttcctgtaccccgcagatcatc

SEQ ID NO: 283567 - DNA, 120 bp, Artificial Sequence
  ENSG00000130175_22 (sequence is synthesized)
cagcttgtttgtgtcactcctggccccactcgctcaggagctgggagcctgggcagcaagtcggggctgctctatagctggtgaggccctcaaggctgtcggggtgaagtccttggccag

SEQ ID NO: 283568 - DNA, 120 bp, Artificial Sequence
  ENSG00000130175_23 (sequence is synthesized)
agcaaaatgagggtatgggagcacacagccacatccatggaaccccgttccccatcctcctggatggggttgaggacatctctgacctccaacccctctcccagctgcccaggaggcccg

SEQ ID NO: 283569 - DNA, 120 bp, Artificial Sequence
  ENSG00000130175_24 (sequence is synthesized)
ccctgtgtctctcacagcacctggggctcatggattggccccgaccacgacaagttcagtgccatgaagtatgagcaaggcacgggctgctggcagggccccaaccgctccaccaccgtg

SEQ ID NO: 283570 - DNA, 82 bp, Artificial Sequence
  ENSG00000130175_25 (sequence is synthesized)
ctcctgcctttttttttttggatggagtttcactcttgttgccgaggctggaatgtggaatgcaatggcgcgatctcggctc

SEQ ID NO: 283571 - DNA, 70 bp, Artificial Sequence
  ENSG00000130175_26 (sequence is synthesized)
caaacatcaccatgtccagctgtccccagctttctaatctggtctttctcttgccccagaacctcaagaa

SEQ ID NO: 283572 - DNA, 120 bp, Artificial Sequence
  ENSG00000130175_27 (sequence is synthesized)
accgccactgtcacccccgcagccggccagccctgctgaggaagacaaaatgccgccctacgacgagcagacgcaggccttcatcgatggtgagggtgggcgggggccaggctcctcggg

SEQ ID NO: 283573 - DNA, 120 bp, Artificial Sequence
  ENSG00000130175_28 (sequence is synthesized)
tgggcccagcgtttcctgccgtggtggcacaggtcgagggaagatcctgagcttagaccctgctctgactcggccagcacaagccccagtatcttggggagtccaggaagggggcctagg

SEQ ID NO: 283574 - DNA, 120 bp, Artificial Sequence
  ENSG00000130175_29 (sequence is synthesized)
cgtgtgaccccgcctcttactcgtggatggccaggtccaggatgccctgggcgaggagatagggggaccaccctctccccaggagctgggcacagaccctcagcctcagggagtgtgtct

SEQ ID NO: 283575 - DNA, 120 bp, Artificial Sequence
  ENSG00000130175_30 (sequence is synthesized)
aggcatctagtgatcggatggcttttcccagccccactacgctctggggaaagccagacctgggttcgaatcctggctgtgcctctgagcttgctgggttacctggtggagggtggactt

SEQ ID NO: 283576 - DNA, 120 bp, Artificial Sequence
  ENSG00000130175_31 (sequence is synthesized)
tagctggatgggcgcagaggtgggcggggaggtggagtctcgtcggcctgccccagcaaggggaggcggcgggccctgaggaagatggacccacatggccactctatcaacctgtgtccc

SEQ ID NO: 283577 - DNA, 120 bp, Artificial Sequence
  ENSG00000130175_32 (sequence is synthesized)
ttgaggtggagtctcactctttggcccaggctggagtgcagtgatgcgacctcagctgactgcaacctctacctcccgggttcaaacaattgtcttgtctcagcctcccaagtagctggg

SEQ ID NO: 283578 - DNA, 120 bp, Artificial Sequence
  ENSG00000130175_33 (sequence is synthesized)
ccacacccggccatctcctgcctttttttttttggatggagtttcactcttgttgccgagatcatgctactgcactctccagcctgggctacagagtgagactctcaaaaaaaaaaaata

SEQ ID NO: 283579 - DNA, 79 bp, Artificial Sequence
  ENSG00000130175_34 (sequence is synthesized)
agcctgggctacagagtgagactctcaaaaaaaaaaaataataataataagagaaaatagacaaggtctccaggctggt

SEQ ID NO: 283580 - DNA, 120 bp, Artificial Sequence
  ENSG00000130175_35 (sequence is synthesized)
aactttctttccggcttgagaagccgccactcccaagatggaggtacgctgcgccgccattaagagctagccctcagaactatcctctctaaggtttcacagtcctgcccaagatggccg

SEQ ID NO: 283581 - DNA, 120 bp, Artificial Sequence
  ENSG00000130175_36 (sequence is synthesized)
tctcggctctggcaccgcccccactcctgcctctcccaacatggcgaccctgagtctccgttcccggtgcggaacgtacgaccggaagtgacggggtccagaaatttccgctttctttct

SEQ ID NO: 283582 - DNA, 120 bp, Artificial Sequence
  ENSG00000130175_37 (sequence is synthesized)
cagaaatttccgctttctttctgcagcaggaaccgcggctgctggacaagaggggtgcggtggatactgacctttgctccggcctcgtaacccgtttcgggcctcagagcgtctggtgag

SEQ ID NO: 283583 - DNA, 120 bp, Artificial Sequence
  ENSG00000130175_38 (sequence is synthesized)
agtttcttacagggggcaaccggagggtgcatgtgtgggtgtggacggcggaggctgttaatccctttgcgtgaagacacagcgcatctccccgctgtaggcttcctcccacagaacccg

SEQ ID NO: 283584 - DNA, 120 bp, Artificial Sequence
  ENSG00000130176_0 (sequence is synthesized)
gcagacggaacttcagccgctgcctctgttctcagcgtcagtgccgccactgcccccgccagagcccaccggccagcatgtcctctgctcacttcaaccgaggccctgcctacgggctgt

SEQ ID NO: 283585 - DNA, 120 bp, Artificial Sequence
  ENSG00000130176_1 (sequence is synthesized)
cagccgaggttaagaacaagctggcccagaagtatgaccaccagcgggagcaggagctgagagagtggatcgagggggtgacaggccgtcgcatcggcaacaacttcatggacggcctca

SEQ ID NO: 283586 - DNA, 120 bp, Artificial Sequence
  ENSG00000130176_2 (sequence is synthesized)
aagatggcatcattctttgcgaattcatcaataagctgcagccaggctccgtgaagaagatcaatgagtcaacccaaaattggcaccagctggagaacatcggcaacttcatcaaggcca

SEQ ID NO: 283587 - DNA, 120 bp, Artificial Sequence
  ENSG00000130176_3 (sequence is synthesized)
tcaccaagtatggggtgaagccccacgacatttttgaggccaacgacctgtttgagaacaccaaccatacacaggtgcagtccaccctcctggctttggccagcatggcgaagacgaaag

SEQ ID NO: 283588 - DNA, 120 bp, Artificial Sequence
  ENSG00000130176_4 (sequence is synthesized)
gaaacaaggtgaacgtgggagtgaagtacgcagagaagcaggagcggaaattcgagccggggaagctaagagaagggcggaacatcattgggctgcagatgggcaccaacaagtttgcca

SEQ ID NO: 283589 - DNA, 120 bp, Artificial Sequence
  ENSG00000130176_5 (sequence is synthesized)
gccagcagggcatgacggcctatggcacccggcgccacctctacgaccccaagctgggcacagaccagcctctggaccaggcgaccatcagcctgcagatgggcaccaacaaaggagcca

SEQ ID NO: 283590 - DNA, 120 bp, Artificial Sequence
  ENSG00000130176_6 (sequence is synthesized)
atggagcactgcgacacgctcaatgtcagcctgcagatgggcagcaacaagggcgcctcgcagcggggcatgacggtgtatgggctgccacgccaggtctacgaccccaagtactgtctg

SEQ ID NO: 283591 - DNA, 120 bp, Artificial Sequence
  ENSG00000130176_7 (sequence is synthesized)
actcccgagtacccagagctgggtgagcccgcccacaaccaccacgcacacaactactacaattccgcctagggccacaaggccttccctgttttccccccaagggaggctgctgctgct

SEQ ID NO: 283592 - DNA, 120 bp, Artificial Sequence
  ENSG00000130176_8 (sequence is synthesized)
cttggctggacccagccaggcccagccgaccccctctccctgcatggcatcctccagcccctgtagaactcaacctctacagggttagagtttggagagagcagactggcggggggccca

SEQ ID NO: 283593 - DNA, 120 bp, Artificial Sequence
  ENSG00000130176_9 (sequence is synthesized)
ttggggggaaggggaccctccgctctgtagtgctacagggtccaacatagagccgggtgtccccaacagcgcccaaaggacgcactgagcaacgctattccagctgtccccccactccct

SEQ ID NO: 283594 - DNA, 120 bp, Artificial Sequence
  ENSG00000130176_10 (sequence is synthesized)
cacaagtgggtacccccaggaccagaagctcccccagcaaagcccccagagcccaggctcggcctgcccccaccccattcccgcagtgggagcaaactgcatgcccagagacccagcgga

SEQ ID NO: 283595 - DNA, 120 bp, Artificial Sequence
  ENSG00000130176_11 (sequence is synthesized)
cacacgcggtttggtttgcagcgactggcatactatgtggatgtgacagtggcgtttgtaatgagagcactttcttttttttctatttcactggagcacaataaatggctgtaaaatctc

SEQ ID NO: 283596 - DNA, 120 bp, Artificial Sequence
  ENSG00000130176_12 (sequence is synthesized)
tttttccatatcccccggcctgacaaagaaattggggagcgcttgagtgctggggtacctgggaagtgacgccgtgaaagtgtgggagatcctgaagacagagggggacggtgaaaggca

SEQ ID NO: 283597 - DNA, 120 bp, Artificial Sequence
  ENSG00000130176_13 (sequence is synthesized)
ggaagcgggcatcagaagtgcggcaggggtctcctgactgtggagctaggaagatacctggacaccaccttcatgctatggttgggtaaactgaggttcggagaggagaggcaaatagct

SEQ ID NO: 283598 - DNA, 120 bp, Artificial Sequence
  ENSG00000130176_14 (sequence is synthesized)
acagacgggggagggcgagccaggagcgagataagacctagacaaggatggaggggcagggagaggagacagagccccaccacccccaccccaggcaggaaacctggagacagagaaaga

SEQ ID NO: 283599 - DNA, 120 bp, Artificial Sequence
  ENSG00000130176_15 (sequence is synthesized)
cctagagaggcagatatacaagacccaggagccctacccctggccagacagggactagccacctagagagatggggacccaagactgggccaagaaaagacagcgctggggaagagagag

SEQ ID NO: 283600 - DNA, 120 bp, Artificial Sequence
  ENSG00000130176_16 (sequence is synthesized)
acaagcccccaccactaaccagagacagagccctggagctgaagacctgggggacacggagagacagagatgtatgaccagcactcctctgcaagccagcacccagggacacctccttag

SEQ ID NO: 283601 - DNA, 120 bp, Artificial Sequence
  ENSG00000130176_17 (sequence is synthesized)
acatccttcttcccttcctgagctggcccagaagtatgaccaccagcgggagcaggagctgagagagtggatcgagggggtgacaggccgtcgcatcggcaacaacttcatggacggcct

SEQ ID NO: 283602 - DNA, 120 bp, Artificial Sequence
  ENSG00000130176_18 (sequence is synthesized)
gcgcagagccgcgcagagacgccgcgccttataaggcggcctcggggagcccgggccacgctatataagggccggtttgctttataaagccgggctggtggcgtggggggcggcagggcc

SEQ ID NO: 283603 - DNA, 120 bp, Artificial Sequence
  ENSG00000130177_0 (sequence is synthesized)
ggggtgcgggtgtgggtggggacctgcggccttcgagtccgcggccttcgagtcctggggcggcggcggcggctgcaggcacgggcacgggcacggggcggggtgcttagggtgcaggag

SEQ ID NO: 283604 - DNA, 120 bp, Artificial Sequence
  ENSG00000130177_1 (sequence is synthesized)
gggtgcttagggtgcaggaggcgcgcgcctagcggcggagtgtggcgtgaggccgggcccgcgccgccatgaacctagagcggctgcggaagcgcgtccggcagtacctcgaccagcaac

SEQ ID NO: 283605 - DNA, 120 bp, Artificial Sequence
  ENSG00000130177_2 (sequence is synthesized)
agtatcaaagtgctctattttgggcagataaagtagcttcactctctcgtgaagaaccccaggacatctattggttggctcagtgtctttacctgacagcacaatatcacagagccgccc

SEQ ID NO: 283606 - DNA, 120 bp, Artificial Sequence
  ENSG00000130177_3 (sequence is synthesized)
atgcacttcggtcacgaaaactggacaaattgtatgaagcatgtcgttaccttgcagctaggtgccattatgctgcaaaagagcaccagcaggcccttgatgttcttgacatggaagagc

SEQ ID NO: 283607 - DNA, 120 bp, Artificial Sequence
  ENSG00000130177_4 (sequence is synthesized)
ccatcaataaaagattatttgaaaaatacttgaaggacgaaagtggcttcaaagatccttccagcgactgggaaatgtcacagtcttcaataaagagttctatctgtcttctacgcggga

SEQ ID NO: 283608 - DNA, 120 bp, Artificial Sequence
  ENSG00000130177_5 (sequence is synthesized)
aaatctatgatgctctagataaccgaaccctggctacctacagctacaaagaagctttgaagcttgatgtctactgttttgaagcgttcgatcttttaacatcacatcacatgctgacag

SEQ ID NO: 283609 - DNA, 120 bp, Artificial Sequence
  ENSG00000130177_6 (sequence is synthesized)
cacaagaagaaaaagaacttcttgaatcactaccccttagcaagctgtgtaatgaagaacaggaattgctgcgttttctatttgagaacaaattgaaaaaatataataagcctagtgaaa

SEQ ID NO: 283610 - DNA, 120 bp, Artificial Sequence
  ENSG00000130177_7 (sequence is synthesized)
cggtcatccctgaatctgtagatggcttgcaagagaatctggatgtggtagtgtctttagctgagagacattattataactgtgattttaaaatgtgctacaagcttacttctgtagtaa

SEQ ID NO: 283611 - DNA, 120 bp, Artificial Sequence
  ENSG00000130177_8 (sequence is synthesized)
tggagaaagatcctttccatgcaagttgtttacctgtacatatagggacgcttgtagagctgaataaagccaatgaacttttctatctttctcataaactggtggatttatatcctagta

SEQ ID NO: 283612 - DNA, 120 bp, Artificial Sequence
  ENSG00000130177_9 (sequence is synthesized)
aaaatgaacatgccagaagatatctcagcaaagccacaacacttgagaaaacctatggacctgcatggatagcctatggacattcatttgcggtggagagtgagcacgaccaagcgatgg

SEQ ID NO: 283613 - DNA, 120 bp, Artificial Sequence
  ENSG00000130177_10 (sequence is synthesized)
ctgcttacttcacagcagcacagctgatgaaagggtgtcatttgcctatgctgtatattggattagaatatggtttgaccaataactcaaaactagctgaaaggttcttcagccaagctc

SEQ ID NO: 283614 - DNA, 120 bp, Artificial Sequence
  ENSG00000130177_11 (sequence is synthesized)
tgagcattgcaccggaagacccttttgttatgcatgaggtcggcgtggttgcatttcagaatggagaatggaaaacagccgaaaaatggtttcttgatgctttggaaaaaattaaagcaa

SEQ ID NO: 283615 - DNA, 120 bp, Artificial Sequence
  ENSG00000130177_12 (sequence is synthesized)
ttgggaacgaggtaacagttgacaaatgggaacctttgttgaacaacttggggcatgtctgcagaaaacttaaaaagtatgctgaggccttggattaccaccgtcaggcactggtgttga

SEQ ID NO: 283616 - DNA, 120 bp, Artificial Sequence
  ENSG00000130177_13 (sequence is synthesized)
ttcctcagaacgcatccacctactctgctattggatatatccacagtctgatgggcaactttgaaaatgctgtggactacttccacacagcccttggtcttaggcgagatgatacatttt

SEQ ID NO: 283617 - DNA, 120 bp, Artificial Sequence
  ENSG00000130177_14 (sequence is synthesized)
ctgttacaatgcttggtcattgcatcgaaatgtacattggtgattctgaagcttatattggagcagacattaaagacaaattaaaatgttatgactttgatgtgcatacaatgaagacac

SEQ ID NO: 283618 - DNA, 120 bp, Artificial Sequence
  ENSG00000130177_15 (sequence is synthesized)
taaaaaacattatttcacctccgtgggatttcagggaatttgaagtagaaaaacagactgcagaagaaacggggcttacgccattggaaacctcaaggaaaactccagattccagacctt

SEQ ID NO: 283619 - DNA, 120 bp, Artificial Sequence
  ENSG00000130177_16 (sequence is synthesized)
ccttggaagaaacctttgaaattgaaatgaatgaaagtgacatgatgttagagacatctatgtcagaccacagcacgtgactccagtcagtggtcctggtcccactgtcccagtgtaggt

SEQ ID NO: 283620 - DNA, 120 bp, Artificial Sequence
  ENSG00000130177_17 (sequence is synthesized)
tagtattccttcacatcctctccatggcttaagaatgtcccacttcctaacgtgactccaaactgcatctctacatttaggaacagagacccgccttaagagactggatcgcacaccttt

SEQ ID NO: 283621 - DNA, 120 bp, Artificial Sequence
  ENSG00000130177_18 (sequence is synthesized)
gcaacagatgtgttctgattctctgaacctacaaaatagttatacatagtggaataaagaaggtaaaccatctgttatgtctttttttttcttttccaataaacttttattttggactaa

SEQ ID NO: 283622 - DNA, 120 bp, Artificial Sequence
  ENSG00000130177_19 (sequence is synthesized)
caaaattaatattgtttggattttttgcctctgaaatcttctaagtcaacaacaggccacatacaggtttaaatagacctactcactttcttaatgtcttcaaatgtaaagcacgttgca

SEQ ID NO: 283623 - DNA, 120 bp, Artificial Sequence
  ENSG00000130177_20 (sequence is synthesized)
gaatgcagtattgtacggtgccttgtgctgtccgaatctagggattgtgataggaagaggccatctttttgagaagtgattgagatagtataaaccaggatttcagtatctcatgcagtg

SEQ ID NO: 283624 - DNA, 120 bp, Artificial Sequence
  ENSG00000130177_21 (sequence is synthesized)
attctcaaccgtgttgctctttacatccttgggaagacagagaaacatccatgtccagttcccaactccagagcagatgctttaaagctcccaggtgatcctaatgtaccacaggcactg

SEQ ID NO: 283625 - DNA, 120 bp, Artificial Sequence
  ENSG00000130177_22 (sequence is synthesized)
ttgagtattgtataatttacctttcttctgagatctgattaatacagaagccactgcgcccagtcgagatagaactttttaaaaaatcttttttggggtagatttccagcataagaaaat

SEQ ID NO: 283626 - DNA, 120 bp, Artificial Sequence
  ENSG00000130177_23 (sequence is synthesized)
agaatagtgtgatgaacctccatgacccataaccaacttcaacaatctttggttcatggccagtcatgtagctatgtctggccacttcccccaccctggatgccctggaatattttgaaa

SEQ ID NO: 283627 - DNA, 120 bp, Artificial Sequence
  ENSG00000130177_24 (sequence is synthesized)
tgtacattggtgattctgaagcttatattgcacctaactggaaatgactcaaacgtccaccagtaggagagaggagaaataaattgtggagcagacattaaagacaaattaaaatgttat

SEQ ID NO: 283628 - DNA, 120 bp, Artificial Sequence
  ENSG00000130177_25 (sequence is synthesized)
accaacctaataggatttcctgttggttttgattcttttaaataagcggcctacttattttatgtattacaattctgttgacttaaagtaaatgtatgtgataatgtttatttttattcc

SEQ ID NO: 283629 - DNA, 120 bp, Artificial Sequence
  ENSG00000130177_26 (sequence is synthesized)
tttcaaataaaccagaattttttctttcatttgtaacttaattatggccttaactgaatcaacctgaagataatggagtgaagaaagtgaagtgttacaacccacagcatcatatgtgat

SEQ ID NO: 283630 - DNA, 120 bp, Artificial Sequence
  ENSG00000130177_27 (sequence is synthesized)
aggtgaggtgctttgctgtatcctctgcagtattcgggaagtgctgtcttagggggtgtctgttcccaccttgcccacagtgtgtccttcatctaactctccagttagagagttaatttt

SEQ ID NO: 283631 - DNA, 120 bp, Artificial Sequence
  ENSG00000130177_28 (sequence is synthesized)
ttatctagaaggaaagacaagtatgaaatcattgctgtaagagcagaattatatgattgtgaagagttgtaatgaaatcatgtcttaaattacatgtgatacgaacaattgttctttttc

SEQ ID NO: 283632 - DNA, 120 bp, Artificial Sequence
  ENSG00000130177_29 (sequence is synthesized)
atctcaggtatgaatttatttttttcctctctagttaacctgtagaattgatgtcttgctcataagctttcaagtagtaattagtgagtactttaaaagcaatgtgaaagaataaatgtt

SEQ ID NO: 283633 - DNA, 120 bp, Artificial Sequence
  ENSG00000130177_30 (sequence is synthesized)
tttttttttcttcctttcttttctttctctctttctttcttgccttttcttttccttctcacctcccctcccctctctctcgagggttctcactctgttgcccagactagagtgcagtgg

SEQ ID NO: 283634 - DNA, 120 bp, Artificial Sequence
  ENSG00000130182_0 (sequence is synthesized)
ccattttcccagagcccttccccaggctggcggaggctggctttggccctggagtcctcagaaaaccccccagcatctctgcctgtgtagtggggactccgagtggtgtgggaggagagg

SEQ ID NO: 283635 - DNA, 120 bp, Artificial Sequence
  ENSG00000130182_1 (sequence is synthesized)
agagagacccaagagcggggctggcgttagggaggcatccccgcagtgaaggatgcttggagaatcagtcccagctgccgtggagcaggagcagctgggggaagtcaagctggaggagga

SEQ ID NO: 283636 - DNA, 120 bp, Artificial Sequence
  ENSG00000130182_2 (sequence is synthesized)
ggaggctgtcagcccagaggaccccaggcgaccagagtccaggctgaggcccgaggtggctcaccagctgttcagatgcttccagtatcaggaggacatggggccacgggcgtccctgag

SEQ ID NO: 283637 - DNA, 120 bp, Artificial Sequence
  ENSG00000130182_3 (sequence is synthesized)
ccggctccgggagctctgcggccactggctgcggccggctctgcacaccaagaaacagatcctggagctgctggtgctggagcagttcctgagtgtgctgcctccgcacctcctgggccg

SEQ ID NO: 283638 - DNA, 120 bp, Artificial Sequence
  ENSG00000130182_4 (sequence is synthesized)
cctgcaggggcagccgctcagggatggggaggaggtggtgctgctgctcgagggcatccaccgggagcccagccacgcggggccgctggattttagttgtaatgctggcaagagttgtcc

SEQ ID NO: 283639 - DNA, 120 bp, Artificial Sequence
  ENSG00000130182_5 (sequence is synthesized)
ccgtgcagacgtcaccttggaggaaaaggggtgtgcttcccaggtccccagccacagccccaagaaggaattgcctgcggaagagccttcagtgctgggcccatcggatgagcctccccg

SEQ ID NO: 283640 - DNA, 120 bp, Artificial Sequence
  ENSG00000130182_6 (sequence is synthesized)
accccagccaagggctgcccagcctgctgagccgggacagtggaggcttcccccaagttcaaagcagccgctgagcccggggccccagaagacattccaggccctgcaagaaagcagtcc

SEQ ID NO: 283641 - DNA, 120 bp, Artificial Sequence
  ENSG00000130182_7 (sequence is synthesized)
ccagggcccctcaccatggccagaggagagttcccgagatcaggagctggcggctgtgctggagtgcctgacctttgaggatgtgccagagaataaggcgtggcctgcacaccccctggg

SEQ ID NO: 283642 - DNA, 120 bp, Artificial Sequence
  ENSG00000130182_8 (sequence is synthesized)
attcggaagcagaaccccagacaaggaggaatttaaacaagaagagcccaaaggggctgcctggcccactcccatcttagcagagtcccaggcagatagtcctggggtgccgggagagcc

SEQ ID NO: 283643 - DNA, 120 bp, Artificial Sequence
  ENSG00000130182_9 (sequence is synthesized)
ttgcgcccagtcgctcggacggggcgctgcggctagcggccctggtgaagatgggtcccttcttggcagcagtgaaattttggaggtcaaagtggctgagggcgtccccgagcccaatcc

SEQ ID NO: 283644 - DNA, 120 bp, Artificial Sequence
  ENSG00000130182_10 (sequence is synthesized)
ggagttgcagttcatctgcgcggactgcggggtgagcttcccgcagctgtctcgcctgaaggcgcaccagctgcgctcgcacccggctgggcgctccttcctgtgcctttgctgcgggaa

SEQ ID NO: 283645 - DNA, 120 bp, Artificial Sequence
  ENSG00000130182_11 (sequence is synthesized)
tgcggccaccgcttccgccagagctcgcacctgagcaagcacctgctgacccactcctccgaacccgccttcctgtgcgcagagtgcggccgcggcttccagcgccgcgccagccttgtg

SEQ ID NO: 283646 - DNA, 120 bp, Artificial Sequence
  ENSG00000130182_12 (sequence is synthesized)
cagcacctgctggcgcacgcccaggaccagaagccgccctgcgctcctgagagtaaggccgaagcgccgccactgaccgatgtcctgtgctcccactgcggccagagcttccagcgccgc

SEQ ID NO: 283647 - DNA, 120 bp, Artificial Sequence
  ENSG00000130182_13 (sequence is synthesized)
tccagcctcaagcgccacctgcggatccacgccagggacaaggaccgccggtcctccgaaggctccggcagccgccgccgggactccgaccggaggcccttcgtgtgcagcgactgcggc

SEQ ID NO: 283648 - DNA, 120 bp, Artificial Sequence
  ENSG00000130182_14 (sequence is synthesized)
aaggccttccggcgcagcgagcacctggtggcccaccggagggtgcacacgggcgagcggcccttctcctgccaggcttgcggccgcagcttcacgcagagctcgcagctggtcagccac

SEQ ID NO: 283649 - DNA, 120 bp, Artificial Sequence
  ENSG00000130182_15 (sequence is synthesized)
caacgggtgcacacgggcgagaagccctacgcctgtccgcagtgcgggaagcgctttgtgcgccgggccagccttgcccgccacctgctgacccacggtggccctcggccccaccactgc

SEQ ID NO: 283650 - DNA, 120 bp, Artificial Sequence
  ENSG00000130182_16 (sequence is synthesized)
acccagtgcgggaagagtttcggccagacccaggatctggcccgccaccagcgcagccacacgggcgagaagccctgccgctgcagcgagtgcggtgagggcttcagccagagcgcccac

SEQ ID NO: 283651 - DNA, 120 bp, Artificial Sequence
  ENSG00000130182_17 (sequence is synthesized)
ctggcgcgccaccagcgcatccacacaggggagaagccccacgcctgcgacacctgcggccaccgtttccgcaatagctccaacctggcccgccatcgccgcagccacacgggcgagcgg

SEQ ID NO: 283652 - DNA, 120 bp, Artificial Sequence
  ENSG00000130182_18 (sequence is synthesized)
ccctacagctgtcagacgtgcggtcgcagcttccggcgcaacgcgcatctgcggcggcacctggctacccatgcggagcccgggcaggagcaggccgagcccccgcaggagtgcgtggag

SEQ ID NO: 283653 - DNA, 120 bp, Artificial Sequence
  ENSG00000130182_19 (sequence is synthesized)
tgcgggaagagcttcagccgcagctgcaatctgctgcgacacctgctggtgcacacgggcgccaggccctactcctgcacgcagtgtggccgcagcttcagccgcaactcccacctgctg

SEQ ID NO: 283654 - DNA, 120 bp, Artificial Sequence
  ENSG00000130182_20 (sequence is synthesized)
cgccacctgcgcacccacgcccgcgagacgctgtactagcttggcccgccttccgccagccgcgccctgcgccacctacccggggtcctccacagcggaggcctgcaggaatgtcccttc

SEQ ID NO: 283655 - DNA, 120 bp, Artificial Sequence
  ENSG00000130182_21 (sequence is synthesized)
ccaccacaccccacttccctctccttccactttcacagctgtccttccctggccgaggcattgctttctggcctcagctatgtaattaaaacgcccgaagtaaaatggccttctccaaaa

SEQ ID NO: 283656 - DNA, 120 bp, Artificial Sequence
  ENSG00000130182_22 (sequence is synthesized)
attttcccagagcccttccccaggctggcggaggctggctttggccctggagtcctcagaaaaccccccagcatctctgcctgtgtagtggggactccgagtggattttagttgtaatgc

SEQ ID NO: 283657 - DNA, 120 bp, Artificial Sequence
  ENSG00000130182_23 (sequence is synthesized)
aaatctctaaatgctttaaggagggatgataatacagaactgtcagttttctctggcctttgctttgttggtaaccctgagaccgggggctgtcctgccctcgtgagccattacccagtg

SEQ ID NO: 283658 - DNA, 120 bp, Artificial Sequence
  ENSG00000130182_24 (sequence is synthesized)
agaaaagcgattcctctgggtctgcgtattgggtgtcttttaacatggatgacccaggtatggggccagcttcctcgcagcagatcctaacccagggtgttcaccttcgcaggtgtggga

SEQ ID NO: 283659 - DNA, 120 bp, Artificial Sequence
  ENSG00000130182_25 (sequence is synthesized)
gcagcatgcggatgatggggacttgatccccccagtgaggaatctctggaaacttcactttcccccacctgaccattccttcttcacctcctaactcctcccctggctgactctaacctc

SEQ ID NO: 283660 - DNA, 120 bp, Artificial Sequence
  ENSG00000130182_26 (sequence is synthesized)
ccattttcccagagcccttccccaggctggcggaggctggctttggccctggagtcctcagaaaaccccccagcatctctgcctgtgtagtggggactccgagtgagacgggatttcacc

SEQ ID NO: 283661 - DNA, 120 bp, Artificial Sequence
  ENSG00000130182_27 (sequence is synthesized)
ttccccaggctggcggaggctggctttggccctggagtcctcagaaaaccccccagcatctctgcctgtgtagtggggactccgagtgccactgcatgctggacagtgccctgtgccatt

SEQ ID NO: 283662 - DNA, 120 bp, Artificial Sequence
  ENSG00000130193_0 (sequence is synthesized)
gcgcgctgcgctcgtgagttcccaggaggcctggcgggcaccgtaaccagcgccgcggacaccggcaccggcgccacggactccgcaggaccccgcgcccgccgccgccgctatgctggg

SEQ ID NO: 283663 - DNA, 120 bp, Artificial Sequence
  ENSG00000130193_1 (sequence is synthesized)
cgctatgctggggctgctggtggcgttgctggccctggggctcgctgtctttgcgctgctggacgtctggtacctggtgcgccttccgtgcgccgtgctgcgcgcgcgcctgctgcagcc

SEQ ID NO: 283664 - DNA, 120 bp, Artificial Sequence
  ENSG00000130193_2 (sequence is synthesized)
gcgcgtccgtgacctgctagctgagcagcgcttcccgggccgcgtgctgccctcggacttggacctgctgctgcacatgaacaacgcgcgctacctgcgcgaggccgactttgcgcgcgt

SEQ ID NO: 283665 - DNA, 120 bp, Artificial Sequence
  ENSG00000130193_3 (sequence is synthesized)
cacctgacccgctgcggggtgctcggggcgctgagggagttgcgggcgcacacggtgctggcggcctcgtgcgcgcgccaccgccgctcgctgcgcctgctggagcccttcgaggtgcgc

SEQ ID NO: 283666 - DNA, 120 bp, Artificial Sequence
  ENSG00000130193_4 (sequence is synthesized)
gcgcacccgcctgctgggctgggacgaccgcgcgttctacctggaggcgcgctttgtcagcctgcgggacggcttcgtgtgcgcgctgctgcgcttccggcagcacctgctgggcacctc

SEQ ID NO: 283667 - DNA, 120 bp, Artificial Sequence
  ENSG00000130193_5 (sequence is synthesized)
acccgagcgcgtcgtgcagcacctgtgccagcgcagggtggagccccctgagctgcccgctgatctgcagcactggatctcctacaacgaggccagcagccagctgctccgcatggagag

SEQ ID NO: 283668 - DNA, 120 bp, Artificial Sequence
  ENSG00000130193_6 (sequence is synthesized)
tgggctcagtgatgtcaccaaggaccagtgaccgccaccttcacaccgtctgccctggccaccatcctgggcctgggggctgcccacagatgggcagtctcagccatactctgttccagc

SEQ ID NO: 283669 - DNA, 120 bp, Artificial Sequence
  ENSG00000130193_7 (sequence is synthesized)
tggagtagcctcctgaccagcctggcccaccctgctccacccactgggcccccccagttattgatacccctctgtgctgggctccacgctaggcagaaggaggagtggcattggcatcct

SEQ ID NO: 283670 - DNA, 120 bp, Artificial Sequence
  ENSG00000130193_8 (sequence is synthesized)
gacccagctctgccctcaaggtggggatggatgggcaaaggagagtcctgcctggccctacgatgaggccactcatgtgggcctaggtaggggaggatggtgcctggagcagagggaccc

SEQ ID NO: 283671 - DNA, 120 bp, Artificial Sequence
  ENSG00000130193_9 (sequence is synthesized)
caggcctgggctctccagggcctgggcctgattcaggtgcagtgggcactcctgaagggtcagagcggcatctgccaggcagcccctctggcttccgctgaggtggttgcaggcctgggg

SEQ ID NO: 283672 - DNA, 120 bp, Artificial Sequence
  ENSG00000130193_10 (sequence is synthesized)
cagagcctgggtggtcagaggccggggctagaggcagatggaagggaggcatttgctgacagaggacggggcacccgggctccccactgcagtcggccttgcctcctcctcctcctctac

SEQ ID NO: 283673 - DNA, 120 bp, Artificial Sequence
  ENSG00000130193_11 (sequence is synthesized)
ctccagtcaggctggacgggagggtagccttgtggctgagaggggtcagactaggtggcacaggggctcctggaaagacagcaggcttcctgctgggcgttcccttgttggagggaatag

SEQ ID NO: 283674 - DNA, 120 bp, Artificial Sequence
  ENSG00000130193_12 (sequence is synthesized)
agtgggggtgggactctgcaggggtgtccttgtccactcgcacccctcgccgcccaccagggccatgctctgtgacttgggctgatccccaccctttctgggcctacagcaccacaggcc

SEQ ID NO: 283675 - DNA, 120 bp, Artificial Sequence
  ENSG00000130193_13 (sequence is synthesized)
gctgtacccccttagagctgcccctctctggcctggccggcaggcgtcttcttaactcctctgtcctctatattcagcatgttccttgtcagctgctgggccggccctgccttgcgctag

SEQ ID NO: 283676 - DNA, 120 bp, Artificial Sequence
  ENSG00000130193_14 (sequence is synthesized)
cagagcctctcctggcagcttctcaggtctccctaatggagacaccaggctactaggacactggctggggccaccccctcctgcctaatgcctcaccttacagctggggaaactgaggcc

SEQ ID NO: 283677 - DNA, 120 bp, Artificial Sequence
  ENSG00000130193_15 (sequence is synthesized)
tggaatggcccagagtcaccaaggcaaagttggggctggtcccagcctgaggctccagctgatgccctcagctcccagagagggggtgccccatctagctgggtgcaggggtcactgctt

SEQ ID NO: 283678 - DNA, 120 bp, Artificial Sequence
  ENSG00000130193_16 (sequence is synthesized)
gtcagctcagggccctgtgcccgcttgcctgttcccctacatctgtgcctgcacatccagaactgcctccttgccgctgcctccaggaagcccaccttgagccagagtcaagggctgcag

SEQ ID NO: 283679 - DNA, 120 bp, Artificial Sequence
  ENSG00000130193_17 (sequence is synthesized)
cactgcccgatagaacacgcccgccctcactgctgttcttgccttacagccaccatgggaaagctgcaacctttctgttttatttaaagaaagcccaacattaaagggttttcattgcaa

SEQ ID NO: 283680 - DNA, 120 bp, Artificial Sequence
  ENSG00000130193_18 (sequence is synthesized)
tgttgagaggctggcctgcggtgatgtggccaaagaggaagagctgggctggggtgagtgttggtcacatggttgaaactaggtggggaggggagtggtccaggggagagtccaggccca

SEQ ID NO: 283681 - DNA, 120 bp, Artificial Sequence
  ENSG00000130193_19 (sequence is synthesized)
gctctgctgggacttgccatgggggtcacgactcatctgcagggaaggtctgggctttatctctgagcacctctgtgtgctgctcaccctgaagtgggggtgggcctgtgcctggcctgt

SEQ ID NO: 283682 - DNA, 120 bp, Artificial Sequence
  ENSG00000130193_20 (sequence is synthesized)
cccctcatcctgggagctcccaatgcccatctgcaaggctgtggacccctcaggagtggcctggagcctggctcccattgccacatggtggctgtgtgtgtggagagggttgatagtgga

SEQ ID NO: 283683 - DNA, 120 bp, Artificial Sequence
  ENSG00000130193_21 (sequence is synthesized)
gtggtcaggcccaggctgccctgggggatgaagtgccatcctctgggtgccctggagaaagaagagaactcagtgagccctgtctggtactttcctggaggagggctcccatgctggccc

SEQ ID NO: 283684 - DNA, 120 bp, Artificial Sequence
  ENSG00000130193_22 (sequence is synthesized)
tccacccctctgtcccctgtcaccctgaggcctctggatttcctctctgcccttcccaacctgccaacttcacgggtttctggctgggttctggggatggcccctaggggagacgggcca

SEQ ID NO: 283685 - DNA, 120 bp, Artificial Sequence
  ENSG00000130193_23 (sequence is synthesized)
ggcacaagcggggctgtgtcaaggtgggtatgcaggggtagcacaagtgtgcagagcctggggaggcatgggcaaagcatggcaggcggcggggcaggggatcttggaaggtcacgggct

SEQ ID NO: 283686 - DNA, 120 bp, Artificial Sequence
  ENSG00000130202_0 (sequence is synthesized)
gagcgagaatggaatcccggggaggaacaggggtggaatccggggggcggggtcagaacgccaggagggggcggggccggagccagggtcggcttgactcgggggagcagcgggtggatc

SEQ ID NO: 283687 - DNA, 120 bp, Artificial Sequence
  ENSG00000130202_1 (sequence is synthesized)
ctgtgacgtcagcgggttcgaaccgccggagctgagcgagaggccgggggtgccgagccgggcggggagagctgggccgggagagcagaacagggaggctagagcgcagcgggaaccggc

SEQ ID NO: 283688 - DNA, 120 bp, Artificial Sequence
  ENSG00000130202_2 (sequence is synthesized)
agagcgcagcgggaaccggcccggagccggagccggagccccacaggcacctactaaaccgcccagccgatcggcccccacagagtggcccgcgggcctccggccgggcccagtcccctc

SEQ ID NO: 283689 - DNA, 120 bp, Artificial Sequence
  ENSG00000130202_3 (sequence is synthesized)
gccgctgccctcctgccgtcgagatcgccgccgacgccgctgctgtggccgctgctgctgctgctgctcctggaaaccggagcccaggatgtgcgagttcaagtgctacccgaggtgcga

SEQ ID NO: 283690 - DNA, 120 bp, Artificial Sequence
  ENSG00000130202_4 (sequence is synthesized)
ggccagctcgggggcaccgtggagctgccgtgccacctgctgccacctgttcctggactgtacatctccctggtgacctggcagcgcccagatgcacctgcgaaccaccagaatgtggcc

SEQ ID NO: 283691 - DNA, 120 bp, Artificial Sequence
  ENSG00000130202_5 (sequence is synthesized)
gccttccaccctaagatgggtcccagcttccccagcccgaagcctggcagcgagcggctgtccttcgtctctgccaagcagagcactgggcaagacacagaggcagagctccaggacgcc

SEQ ID NO: 283692 - DNA, 120 bp, Artificial Sequence
  ENSG00000130202_6 (sequence is synthesized)
acgctggccctccacgggctcacggtggaggacgagggcaactacacttgcgagtttgccaccttccccaaggggtccgtccgagggatgacctggctcagagtcatagccaagcccaag

SEQ ID NO: 283693 - DNA, 120 bp, Artificial Sequence
  ENSG00000130202_7 (sequence is synthesized)
aaccaagctgaggcccagaaggtcacgttcagccaggaccctacgacagtggccctctgcatctccaaagagggccgcccacctgcccggatctcctggctctcatccctggactgggaa

SEQ ID NO: 283694 - DNA, 120 bp, Artificial Sequence
  ENSG00000130202_8 (sequence is synthesized)
tcgggccgagcagatggtgtcacggtcacctgcaaagtggagcatgagagcttcgaggaaccagccctgatacctgtgaccctctctgtacgctaccctcctgaagtgtccatctccggc

SEQ ID NO: 283695 - DNA, 120 bp, Artificial Sequence
  ENSG00000130202_9 (sequence is synthesized)
tatgatgacaactggtacctcggccgtactgatgccaccctgagctgtgacgtccgcagcaacccagagcccacgggctatgactggagcacgacctcaggcaccttcccgacctccgca

SEQ ID NO: 283696 - DNA, 120 bp, Artificial Sequence
  ENSG00000130202_10 (sequence is synthesized)
gtggcccagggctcccagctggtcatccacgcagtggacagtctgttcaataccaccttcgtctgcacagtcaccaatgccgtgggcatgggccgcgctgagcaggtcatctttgtccga

SEQ ID NO: 283697 - DNA, 120 bp, Artificial Sequence
  ENSG00000130202_11 (sequence is synthesized)
gaaacccccagggcctcgccccgagatgtgggcccgctggtgtggggggccgtgggggggacactgctggtgctgctgcttctggctggggggtccttggccttcatcctgctgagggtg

SEQ ID NO: 283698 - DNA, 120 bp, Artificial Sequence
  ENSG00000130202_12 (sequence is synthesized)
aggaggaggaggaagagccctggaggagcaggaggaggagccagtggcgacgggggattctacgatccgaaagctcaggtgttgggaaatggggaccccgtcttctggacaccagtagtc

SEQ ID NO: 283699 - DNA, 120 bp, Artificial Sequence
  ENSG00000130202_13 (sequence is synthesized)
cctggtcccatggaaccagatggcaaggatgaggaggaggaggaggaggaagagaaggcagagaaaggcctcatgttgcctccacccccagcactcgaggatgacatggagtcccagctg

SEQ ID NO: 283700 - DNA, 120 bp, Artificial Sequence
  ENSG00000130202_14 (sequence is synthesized)
gacggctccctcatctcacggcgggcagtttatgtgtgacctggacacagacagagacagagccaggcccggccctcccgcccccgacctgaccacgccggcctagggttccagactggt

SEQ ID NO: 283701 - DNA, 120 bp, Artificial Sequence
  ENSG00000130202_15 (sequence is synthesized)
tggacttgttcgtctggacgacactggagtggaacactgcctcccactttcttgggacttggagggaggtggaacagcacactggacttctcccgtctctagggctgcatggggagcccg

SEQ ID NO: 283702 - DNA, 120 bp, Artificial Sequence
  ENSG00000130202_16 (sequence is synthesized)
gggagctgagtagtggggatccagagaggacccccgcccccagagacttggttttggctccagccttcccctggccccgtgacactcaggagttaataaatgccttggaggaaaacatca

SEQ ID NO: 283703 - DNA, 120 bp, Artificial Sequence
  ENSG00000130202_17 (sequence is synthesized)
tctgccggcagcagcggaaggagcagacgctgcagggggcagaggaggacgaagacctggagggacctccctcctacaagccaccgaccccaaaagcgaagctggaggcacaggagatgc

SEQ ID NO: 283704 - DNA, 120 bp, Artificial Sequence
  ENSG00000130202_18 (sequence is synthesized)
cctcccagctcttcactctgggggcctcggagcacagcccactcaagaccccctactttgatgctggcgcctcatgcactgagcaggaaatgcctcgataccatgagctgcccaccttgg

SEQ ID NO: 283705 - DNA, 120 bp, Artificial Sequence
  ENSG00000130202_19 (sequence is synthesized)
aagaacggtcaggacccttgcaccctggagccacaagcctggggtcccccatcccggtgcctccagggccacctgctgtggaagacgtttccctggatctagaggatgaggagggggagg

SEQ ID NO: 283706 - DNA, 120 bp, Artificial Sequence
  ENSG00000130202_20 (sequence is synthesized)
aggaggaagagtatctggacaagatcaaccccatctatgatgctctgtcctatagcagcccctctgattcctaccagggcaaaggctttgtcatgtcccgggccatgtatgtgtgagctg

SEQ ID NO: 283707 - DNA, 120 bp, Artificial Sequence
  ENSG00000130202_21 (sequence is synthesized)
ccatgcgcctggcgtctcacatctcacctgttgatcccttagctttcttgccaaggatctagtgccccctgacctctggccaggccactgtcagttaacacatatgcattccatttgtga

SEQ ID NO: 283708 - DNA, 120 bp, Artificial Sequence
  ENSG00000130202_22 (sequence is synthesized)
tgtctaccttggtggctccactatgacccctaacccatgagcccagagaaattcaccgtgataatggaatcctggcaaccttatctcatgaggcaggaggtggggaaggtgcttctgcac

SEQ ID NO: 283709 - DNA, 120 bp, Artificial Sequence
  ENSG00000130202_23 (sequence is synthesized)
aacctctgatcccaaggactcctctcccagactgtgaccttagaccatacctctcaccccccaatgcctcgactcccccaaaatcacaaagaagaccctagacctataatttgtcttcag

SEQ ID NO: 283710 - DNA, 120 bp, Artificial Sequence
  ENSG00000130202_24 (sequence is synthesized)
gtagtaaattcccaataggtctgctggagtgggcgctgagggctccctgctgctcagacctgagccctccaggcagcagggtcccacttaccccctccccaccctgttccccaaaggtgg

SEQ ID NO: 283711 - DNA, 120 bp, Artificial Sequence
  ENSG00000130202_25 (sequence is synthesized)
gaaagaggggattccccagcccaaggcagggttttcccagcaccctcctgtaagcagaagtctcagggtccagacccttccctgagcccccacccccaccccaattcctgcctaccaagc

SEQ ID NO: 283712 - DNA, 120 bp, Artificial Sequence
  ENSG00000130202_26 (sequence is synthesized)
aagcagccccagcctagggtcagacagggtgagcctcatacagactgtgccttgatggccccagccttgggagaagaatttactgttaacctggaagactactgaatcattttacccttg

SEQ ID NO: 283713 - DNA, 120 bp, Artificial Sequence
  ENSG00000130202_27 (sequence is synthesized)
cccagtggaataggacctaaacatcccccttccggggaaagtgggtcatctgaattgggggtagcaattgatactgttttgtaaactacatttcctacaaaatatgaatttatactttga

SEQ ID NO: 283714 - DNA, 120 bp, Artificial Sequence
  ENSG00000130202_28 (sequence is synthesized)
gcgccgccgacctgggagggatgcagacctgcctggctgaggggagatgagggttggccttcccctcgtggcctcagactggggtctggatttggggtgtcggggtaggtgaaggcagca

SEQ ID NO: 283715 - DNA, 120 bp, Artificial Sequence
  ENSG00000130203_0 (sequence is synthesized)
ctactcagccccagcggaggtgaaggacgtccttccccaggagccgactggccaatcacaggcaggaagatgaaggttctgtgggctgcgttgctggtcacattcctggcaggatgccag

SEQ ID NO: 283716 - DNA, 120 bp, Artificial Sequence
  ENSG00000130203_1 (sequence is synthesized)
gccaaggtggagcaagcggtggagacagagccggagcccgagctgcgccagcagaccgagtggcagagcggccagcgctgggaactggcactgggtcgcttttgggattacctgcgctgg

SEQ ID NO: 283717 - DNA, 120 bp, Artificial Sequence
  ENSG00000130203_2 (sequence is synthesized)
gtgcagacactgtctgagcaggtgcaggaggagctgctcagctcccaggtcacccaggaactgagggcgctgatggacgagaccatgaaggagttgaaggcctacaaatcggaactggag

SEQ ID NO: 283718 - DNA, 120 bp, Artificial Sequence
  ENSG00000130203_3 (sequence is synthesized)
gaacaactgaccccggtggcggaggagacgcgggcacggctgtccaaggagctgcaggcggcgcaggcccggctgggcgcggacatggaggacgtgtgcggccgcctggtgcagtaccgc

SEQ ID NO: 283719 - DNA, 120 bp, Artificial Sequence
  ENSG00000130203_4 (sequence is synthesized)
cctccgcgatgccgatgacctgcagaagcgcctggcagtgtaccaggccggggcccgcgagggcgccgagcgcggcctcagcgccatccgcgagcgcctggggcccctggtggaacaggg

SEQ ID NO: 283720 - DNA, 120 bp, Artificial Sequence
  ENSG00000130203_5 (sequence is synthesized)
actgtgggctccctggccggccagccgctacaggagcgggcccaggcctggggcgagcggctgcgcgcgcggatggaggagatgggcagccggacccgcgaccgcctggacgaggtgaag

SEQ ID NO: 283721 - DNA, 120 bp, Artificial Sequence
  ENSG00000130203_6 (sequence is synthesized)
cctggacgaggtgaaggagcaggtggcggaggtgcgcgccaagctggaggagcaggcccagcagatacgcctgcaggccgaggccttccaggcccgcctcaagagctggttcgagcccct

SEQ ID NO: 283722 - DNA, 120 bp, Artificial Sequence
  ENSG00000130203_7 (sequence is synthesized)
ggtggaagacatgcagcgccagtgggccgggctggtggagaaggtgcaggctgccgtgggcaccagcgccgcccctgtgcccagcgacaatcactgaacgccgaagcctgcagccatgcg

SEQ ID NO: 283723 - DNA, 120 bp, Artificial Sequence
  ENSG00000130203_8 (sequence is synthesized)
accccacgccaccccgtgcctcctgcctccgcgcagcctgcagcgggagaccctgtccccgccccagccgtcctcctggggtggaccctagtttaataaagattcaccaagtttcacgca

SEQ ID NO: 283724 - DNA, 120 bp, Artificial Sequence
  ENSG00000130203_9 (sequence is synthesized)
gaggtgaaggacgtccttccccaggagccggtgagaagcgcagtcgggggcacggggatgagctcaggggcctctagaaagagctgggaccctgggaacccctggcctccagactggcca

SEQ ID NO: 283725 - DNA, 120 bp, Artificial Sequence
  ENSG00000130203_10 (sequence is synthesized)
ctactcagccccagcggaggtgaaggacgtccttccccaggagccgactggccaatcacaggcaggaagatgaaggttctgtgggctgcgttgctggtcacattcctggcaggtatgggg

SEQ ID NO: 283726 - DNA, 120 bp, Artificial Sequence
  ENSG00000130203_11 (sequence is synthesized)
gcggggcttgctcggttccccccgctcctccccctctcatcctcacctcaacctcctggccccattcaggcagaccctgggccccctcttctgaggcttctgtgctgcttcctggctctg

SEQ ID NO: 283727 - DNA, 120 bp, Artificial Sequence
  ENSG00000130203_12 (sequence is synthesized)
aacagcgatttgacgctctctgggcctcggtttcccccatccttgagataggagttagaagttgttttgttgttgttgtttgttgttgttgttttgtttttttgagatgaagtctcgctc

SEQ ID NO: 283728 - DNA, 67 bp, Artificial Sequence
  ENSG00000130203_13 (sequence is synthesized)
cccgtgagttagaggtttctaatgcattgcaggcagatagtgaataccagacacggggcagctgtga

SEQ ID NO: 283729 - DNA, 120 bp, Artificial Sequence
  ENSG00000130203_14 (sequence is synthesized)
tgcaggcagatagtgaataccagacacggggcagctgtgatctttattctccatcacccccacacagccctgcctggggcacacaaggacactcaatacatgcttttccgctgggcgcgg

SEQ ID NO: 283730 - DNA, 120 bp, Artificial Sequence
  ENSG00000130203_15 (sequence is synthesized)
ccgggagaggaagatggaattttctatggaggccgacctggggatggggagataagagaagaccaggagggagttaaatagggaatgggttgggggcggcttggtaaatgtgctgggatt

SEQ ID NO: 283731 - DNA, 120 bp, Artificial Sequence
  ENSG00000130203_16 (sequence is synthesized)
aggctgttgcagataatgcaacaaggcttggaaggctaacctggggtgaggccgggttggggccgggctgggggtgggaggagtcctcactggcggttgattgacagtttctccttcccc

SEQ ID NO: 283732 - DNA, 120 bp, Artificial Sequence
  ENSG00000130204_0 (sequence is synthesized)
cgacggtggtggcggcggcggcagcgggttcggttgcgcgtggcgcacggggtgggagcggagcccaggccgggagcaggcgccgccgccagcgaccatggggaacgtgttggctgccag

SEQ ID NO: 283733 - DNA, 120 bp, Artificial Sequence
  ENSG00000130204_1 (sequence is synthesized)
gccgcctgcgccggccctcgtggggctgccgccacctccgccctcgccgccgggcttcacgctgccgccgctgggaggcagcctgggcgccggcaccagtacgagtcgaagttcggaacg

SEQ ID NO: 283734 - DNA, 120 bp, Artificial Sequence
  ENSG00000130204_2 (sequence is synthesized)
gcaccagtacgagtcgaagttcggaacggacccccggggctgcaaccgccagcgcctcaggggccgccgaggatggggcctgcggctgcctgcccaacccgggcacattcgaggagtgcc

SEQ ID NO: 283735 - DNA, 120 bp, Artificial Sequence
  ENSG00000130204_3 (sequence is synthesized)
accggaagtgcaaggagctgtttcccattcagatggagggtgtcaagctcacagtcaacaaagggttgagtaaccattttcaggtcaaccacacagtagccctcagcacaatcggggagt

SEQ ID NO: 283736 - DNA, 120 bp, Artificial Sequence
  ENSG00000130204_4 (sequence is synthesized)
ccaactaccacttcggggtcacatatgtggggacaaagcagctgagtcccacagaggcgttccctgtactggtgggtgacatggacaacagtggcagtctcaacgctcaggtcattcacc

SEQ ID NO: 283737 - DNA, 120 bp, Artificial Sequence
  ENSG00000130204_5 (sequence is synthesized)
agctgggccccggtctcaggtccaagatggccatccagacccagcagtcgaagtttgtgaactggcaggtggacggggagtatcggggctctgacttcacagcagccgtcaccctgggga

SEQ ID NO: 283738 - DNA, 120 bp, Artificial Sequence
  ENSG00000130204_6 (sequence is synthesized)
acccagacgtcctcgtgggttcaggaatcctcgtagcccactacctccagagcatcacgccttgcctggccctgggtggagagctggtctaccaccggcggcctggagaggagggcactg

SEQ ID NO: 283739 - DNA, 120 bp, Artificial Sequence
  ENSG00000130204_7 (sequence is synthesized)
tgaacaactggttggcaacggtaacgttgggccaggcgggcatgcacgcaacatactaccacaaagccagtgaccagctgcaggtgggtgtggagtttgaggccagcacaaggatgcagg

SEQ ID NO: 283740 - DNA, 120 bp, Artificial Sequence
  ENSG00000130204_8 (sequence is synthesized)
acaccagcgtctccttcgggtaccagctggacctgcccaaggccaacctcctcttcaaaggctctgtggatagcaactggatcgtgggtgccacgctggagaagaagctcccacccctgc

SEQ ID NO: 283741 - DNA, 120 bp, Artificial Sequence
  ENSG00000130204_9 (sequence is synthesized)
ccctgacactggcccttggggccttcctgaatcaccgcaagaacaagtttcagtgtggctttggcctcaccatcggctgagccctcctggcccccgccttccacgcccttccgattccac

SEQ ID NO: 283742 - DNA, 120 bp, Artificial Sequence
  ENSG00000130204_10 (sequence is synthesized)
ctccacctccacctccccctgccacagaggggagacctgagcccccctcccttccctccccccttgggggtcgggggggacattggaaaggagggaccccgccaccccagcagctgagga

SEQ ID NO: 283743 - DNA, 120 bp, Artificial Sequence
  ENSG00000130204_11 (sequence is synthesized)
ggggattctggaactgaatggcgcttcgggattctgagtagcaggggcagcatgcccagtgggcctggggtcccgggagggattccggaattgaggggcacgcaggattctgagcaccag

SEQ ID NO: 283744 - DNA, 120 bp, Artificial Sequence
  ENSG00000130204_12 (sequence is synthesized)
gggcagaggcggccagacaacctcagggaggagtgtcctggcgtccccatcctccaaagggcctgggcccgccccgagggggcagcgagaggagcttccccatccccggtcagtccaccc

SEQ ID NO: 283745 - DNA, 120 bp, Artificial Sequence
  ENSG00000130204_13 (sequence is synthesized)
tgccccgtccactttcccatctcctcggtataaatcatgtttataagttatggaagaaccgggacattttacagaaaaaaaacaaaaaacaacaaaaaatatacgtgggaaaaaaaacga

SEQ ID NO: 283746 - DNA, 80 bp, Artificial Sequence
  ENSG00000130204_14 (sequence is synthesized)
ggggcgacggtggtggcggcggcggcagcgggttcggttgcgcgtggcgcacggggtgggagcggagcccaggccgggag

SEQ ID NO: 283747 - DNA, 120 bp, Artificial Sequence
  ENSG00000130204_15 (sequence is synthesized)
ggtgggagcggagcccaggccgggagcaggcgccgccgccagtgagaaccggggccggagccgggtgcggatttgctggggctgagtcgggggcgcgcgggccctgacctctgccctctg

SEQ ID NO: 283748 - DNA, 120 bp, Artificial Sequence
  ENSG00000130204_16 (sequence is synthesized)
tgactcaactctgagtggatgtgtgggccaccacaggtgctggaggacagtgtgctgccaccctgtgggcctccacattaccagggaacacttgttaaaaggtaggtggggccgggtgcg

SEQ ID NO: 283749 - DNA, 78 bp, Artificial Sequence
  ENSG00000130204_17 (sequence is synthesized)
tgcgggtgcctatagtcccaactactgaggctgaggcgggaaaatggtatgaacccaggaggcggagcttgcggtgag

SEQ ID NO: 283750 - DNA, 82 bp, Artificial Sequence
  ENSG00000130204_18 (sequence is synthesized)
aagactccatctcaaaaaaaaaaaagtaggtggacaaccctctactatgttttatgcttggaaaaaaaaagtaggtagagca

SEQ ID NO: 283751 - DNA, 68 bp, Artificial Sequence
  ENSG00000130204_19 (sequence is synthesized)
taaaatgaaataaataaataaatgttaaaaaaaatctggtggagcatctgatgggtgtttgggccaag

SEQ ID NO: 283752 - DNA, 120 bp, Artificial Sequence
  ENSG00000130204_20 (sequence is synthesized)
aaaaaatctggtggagcatctgatgggtgtttgggccaagctggagctttgtccatcccctcttatttttctgcacttgactctcttatttttctgagactggtctccctctgtcgccca

SEQ ID NO: 283753 - DNA, 90 bp, Artificial Sequence
  ENSG00000130204_21 (sequence is synthesized)
tctgagactggcagtgcaactgcggctcactgcagcctccacctcccgggctcaagcagccttcccacctcagcctcctgagtagctagg

SEQ ID NO: 283754 - DNA, 68 bp, Artificial Sequence
  ENSG00000130204_22 (sequence is synthesized)
tgagtagctaggaccacaggtgtatgccaccaggcccagctaatttttttgatagttttgggagacct

SEQ ID NO: 283755 - DNA, 120 bp, Artificial Sequence
  ENSG00000130204_23 (sequence is synthesized)
cacccagccagggtagaaggcactttggaagcctcgagcctgccccattcatcttacgttagtggaaactgaggcttccagaggtttcaaggtcacaactaaatccagaacctcatctca

SEQ ID NO: 283756 - DNA, 120 bp, Artificial Sequence
  ENSG00000130204_24 (sequence is synthesized)
ggcacactggtcgtagtcccaatgtccagtcttaagtcttcttggatatctgtggctcacagattttgggtgtttgagcctcctgctgagcactgctggggccacagcggtgaccagccc

SEQ ID NO: 283757 - DNA, 120 bp, Artificial Sequence
  ENSG00000130204_25 (sequence is synthesized)
tgtcttcacgggactcagtgagaggaacagattcatccgcagagtgggcaggactaggttgggggaacccaggggtctagagggcttttcagagggcaggggtcactgagcggagagcag

SEQ ID NO: 283758 - DNA, 120 bp, Artificial Sequence
  ENSG00000130204_26 (sequence is synthesized)
aggaggagtgagccatttgctccagcgtgaagttgttggtgtgatggggtttcagggtggcaggagcagtgtggttaaaggtctggaagctgtcggcatgtggctggtatccaaggtggc

SEQ ID NO: 283759 - DNA, 120 bp, Artificial Sequence
  ENSG00000130204_27 (sequence is synthesized)
ggaacacttgttaaaaggctctgtggatagcaactggatcgtgggtgccacgctggagaagaagctcccacccctgcccctgacactggcccttggggccttcctgaatcaccgcaagaa

SEQ ID NO: 283760 - DNA, 84 bp, Artificial Sequence
  ENSG00000130208_0 (sequence is synthesized)
tcaatcgatcacgaccctctcacgtgcacccacttagagttgtgagcccttaaaaggaacagggatcttgcccattccccgaac

SEQ ID NO: 283761 - DNA, 120 bp, Artificial Sequence
  ENSG00000130208_1 (sequence is synthesized)
gaataaaccccttccttaactcagcgtctgaggaattttgtctgcggctcctcctgctacattctgagtggggaaagggactaaggtggtctgaggaccccacagagtcaggaagattga

SEQ ID NO: 283762 - DNA, 120 bp, Artificial Sequence
  ENSG00000130208_2 (sequence is synthesized)
ggctcttcctgtcgctcccggtcctggtggtggttctgtcgatcgtcttggaaggcccagccccagcccaggggaccccagacgtctccagtgccttggataagctgaaggagtttggaa

SEQ ID NO: 283763 - DNA, 120 bp, Artificial Sequence
  ENSG00000130208_3 (sequence is synthesized)
acacactggaggacaaggctcgggaactcatcagccgcatcaaacagagtgaactttctgccaagatgcgggagtggttttcagagacatttcagaaagtgaaggagaaactcaagattg

SEQ ID NO: 283764 - DNA, 120 bp, Artificial Sequence
  ENSG00000130208_4 (sequence is synthesized)
actcatgaggacctgaagggtgacatcccaggaggggcctctgaaatttcccacaccccagcgcctgtgctgaggactccctccatgtggccccaggtgccaccaataaaaatcctacag

SEQ ID NO: 283765 - DNA, 120 bp, Artificial Sequence
  ENSG00000130208_5 (sequence is synthesized)
ccaagccctccagcaaggattcagagtgcccctccggcctcgccatgaggctcttcctgtcgctcccggtcctggtggtggttctgtcgatcgtcttggaagggagtggttttcagagac

SEQ ID NO: 283766 - DNA, 120 bp, Artificial Sequence
  ENSG00000130208_6 (sequence is synthesized)
aagtgttgggattacaggcgtgagccaaatgcccagccaaggggagtggttttcagagacatttcagaaagtgaaggagaaactcaagattgactcatgaggacctgaagggtgacatcc

SEQ ID NO: 283767 - DNA, 120 bp, Artificial Sequence
  ENSG00000130208_7 (sequence is synthesized)
aacgctcacgggacaggggcagaggagaaaaacgtgggtggacagagggaggcaggcggtcaggggaaggctcaggaggagggagatcaacatcaacctgccccgccccctccccagcct

SEQ ID NO: 283768 - DNA, 120 bp, Artificial Sequence
  ENSG00000130208_8 (sequence is synthesized)
cagagtgcccctccggcctcgccatgaggctcttcctgtcgctcccggtcctggtggtggttctgtcgatcgtcttggaaggttctcccaggctcagtcccgcaggcgccaaatctgcgc

SEQ ID NO: 283769 - DNA, 120 bp, Artificial Sequence
  ENSG00000130208_9 (sequence is synthesized)
aggagagcactagcaaccgatgacgtattgaggcccacacctctgggattggctgtcctgcttcgacagccttgaaagtgggcccagccccagcccaggggaccccagacgtctccagtg

SEQ ID NO: 283770 - DNA, 120 bp, Artificial Sequence
  ENSG00000130222_0 (sequence is synthesized)
gcactcgctggtggtgggcgcgccgtgctgagctctggctgtcagtgtgttcgcccgcgtcccctccgcgctctccgcttgtggataactagctgctggttgatcgcactatgactctgg

SEQ ID NO: 283771 - DNA, 120 bp, Artificial Sequence
  ENSG00000130222_1 (sequence is synthesized)
aagaagtccgcggccaggacacagttccggaaagcacagccaggatgcagggtgccgggaaagcgctgcatgagttgctgctgtcggcgcagcgtcagggctgcctcactgccggcgtct

SEQ ID NO: 283772 - DNA, 120 bp, Artificial Sequence
  ENSG00000130222_2 (sequence is synthesized)
acgagtcagccaaagtcttgaacgtggaccccgacaatgtgaccttctgtgtgctggctgcgggtgaggaggacgagggcgacatcgcgctgcagatccattttacgctgatccaggctt

SEQ ID NO: 283773 - DNA, 120 bp, Artificial Sequence
  ENSG00000130222_3 (sequence is synthesized)
tctgctgcgagaacgacatcgacatagtgcgcgtgggcgatgtgcagcggctggcggctatcgtgggcgccggcgaggaggcgggtgcgccgggcgacctgcactgcatcctcatttcga

SEQ ID NO: 283774 - DNA, 120 bp, Artificial Sequence
  ENSG00000130222_4 (sequence is synthesized)
gtgacagcccggcggggaccttggtctgatcgacgtggtgacgccccggggcgcctagagcgcggctggctctgtggaggggccctccgagggtgcccgagtgcggcgtggagactggca

SEQ ID NO: 283775 - DNA, 120 bp, Artificial Sequence
  ENSG00000130222_5 (sequence is synthesized)
ggcggggggggcgcctggagagcgaggaggcgcggcctcccgaggaggggcccggtggcggcagggccaggctggtccgagctgaggactctgcaagtgtctggagcggctgctcgccca

SEQ ID NO: 283776 - DNA, 120 bp, Artificial Sequence
  ENSG00000130222_6 (sequence is synthesized)
ggaaggcctaggctaggacgttggcctcagggccaggaaggacagactggccgggcaggcgtgactcagcagcctgcgctcggcaggaaggagcggcgccctggacttggtacagttgca

SEQ ID NO: 283777 - DNA, 120 bp, Artificial Sequence
  ENSG00000130222_7 (sequence is synthesized)
ggagcgtgaaggacttagccgactgcgctgctttttcaaaacggatccgggcaatgcttcgttttctaaaggatgctgctgttgaagctttgaattttacaataaactttttgaaacaaa

SEQ ID NO: 283778 - DNA, 120 bp, Artificial Sequence
  ENSG00000130222_8 (sequence is synthesized)
ccggaaagcacagccaggtgggtttcagggcgctgagaaagccgctggtcggtcggcgaccgtcagggttttccagggtgggaatccgcggggtaggaggggagcgcgggggtccgggcg

SEQ ID NO: 283779 - DNA, 120 bp, Artificial Sequence
  ENSG00000130222_9 (sequence is synthesized)
ccagatcccggttggagagccggggtgcaggcgctgagccgggattggagtgtggttggagttggggagccaagggtgtgtgccggtggccggggctggggtctccgccgcgccctccgg

SEQ ID NO: 283780 - DNA, 120 bp, Artificial Sequence
  ENSG00000130224_0 (sequence is synthesized)
acactcgcggcacaggctgacagtattgtcgggggctattctctctcccaggaacatggcggcgagtcagggaggaggcggtaacagtgggggcggcggttgtggtggaggtggaagtag

SEQ ID NO: 283781 - DNA, 120 bp, Artificial Sequence
  ENSG00000130224_1 (sequence is synthesized)
cggtggctgtggcacggctggagggggaggtggcggggctggagggggaggcggcggcggcggcgggaccctggtggtccccatcccggtaccgactcttttcggtcagccgttccccaa

SEQ ID NO: 283782 - DNA, 120 bp, Artificial Sequence
  ENSG00000130224_2 (sequence is synthesized)
cgggccgccgtggaacccggggagcctgcagcctcagcacaccgtgaggagcctggaccgggccctggaagaggcgggcagctccggcatcctgagcctcagtggtcggaaactccgaga

SEQ ID NO: 283783 - DNA, 120 bp, Artificial Sequence
  ENSG00000130224_3 (sequence is synthesized)
cttcccgggcagcggctacgacctgacggacaccacccaagcagatctttccagaaatcgttttacagaaattccttctgatgtctggttatttgcaccccttgaaacattaaatttata

SEQ ID NO: 283784 - DNA, 120 bp, Artificial Sequence
  ENSG00000130224_4 (sequence is synthesized)
tcataattgcatcaaaaccattcctgaagccattaaaaatctgcagatgttaacataccttaacattagccgaaatcttttatcaacattgccaaaatacctatttgatcttccccttaa

SEQ ID NO: 283785 - DNA, 120 bp, Artificial Sequence
  ENSG00000130224_5 (sequence is synthesized)
agttttggtcgtcagtaataataaactggtatccattccagaagaaattgggaagttaaaagatttaatggaattggatattagctgcaatgagattcaagtccttccccaacaaatggg

SEQ ID NO: 283786 - DNA, 120 bp, Artificial Sequence
  ENSG00000130224_6 (sequence is synthesized)
aaaattacattcacttagagagctaaatataagaagaaataatcttcatgttttgccagatgaattaggagaccttcccttagtcaagctggatttctcttgtaataaagtgaccgaaat

SEQ ID NO: 283787 - DNA, 120 bp, Artificial Sequence
  ENSG00000130224_7 (sequence is synthesized)
tccagtttgttacagaaagctgcatcatttacaagtaataattttggataacaatccattgcaagtaccaccagcacagatatgtttaaagggtaaggtgcacatatttaagtacttaaa

SEQ ID NO: 283788 - DNA, 120 bp, Artificial Sequence
  ENSG00000130224_8 (sequence is synthesized)
tattcaagcatgttgcagaatggataagaaaccagattccctggatcttccatcattgagtaaacgaatgccctcacagcctctcacagacagtatggaagatttttatccaaataaaaa

SEQ ID NO: 283789 - DNA, 120 bp, Artificial Sequence
  ENSG00000130224_9 (sequence is synthesized)
tcatggccctgactctggaattggaagtgataatggagagaaacgattatccacaacagaaccatcagatgatgacacagtcagccttcattctcaagtctcagaatcaaatagagagca

SEQ ID NO: 283790 - DNA, 120 bp, Artificial Sequence
  ENSG00000130224_10 (sequence is synthesized)
gacatcaagaaatgacagtcacataataggaagtaagactgattctcagaaagaccaggaggtatatgattttgttgaccccaacacagaagatgtagcagttcctgaacagggaaatgc

SEQ ID NO: 283791 - DNA, 120 bp, Artificial Sequence
  ENSG00000130224_11 (sequence is synthesized)
acatattggatcatttgtatcattctttaagggaaaagaaaaatgttctgaaaaatctcggaaaaatgaagaattaggagatgaaaaaagacttgagaaagaacagttactggcagagga

SEQ ID NO: 283792 - DNA, 120 bp, Artificial Sequence
  ENSG00000130224_12 (sequence is synthesized)
agaggatgatgatttgaaggaagtaactgatttgaggaaaatagctgctcagttattgcagcaagaacagaagaacaggattcttaatcattcaacttctgtgatgagaaacaagccaaa

SEQ ID NO: 283793 - DNA, 120 bp, Artificial Sequence
  ENSG00000130224_13 (sequence is synthesized)
acaaactgtggaatgtgaaaagagtgtctcagcagatgaagttaattcaccattatcacccctcacctggcagcccttagaaaatcagaaggatcaaatagatgaacaaccgtggccaga

SEQ ID NO: 283794 - DNA, 120 bp, Artificial Sequence
  ENSG00000130224_14 (sequence is synthesized)
atctcaccctataatctggcagagtgaagaaaggaggcggagcaaacagattagaaaagaatatttcaagtataaatcaatgaggaagagttcaagtggcaatgaaaatgatgagcaaga

SEQ ID NO: 283795 - DNA, 120 bp, Artificial Sequence
  ENSG00000130224_15 (sequence is synthesized)
cagtgataatgctaatatgtcaacacaatctccagtatcatctgaggaatatgacagaactgatggtttttcacacagtccctttggcttgaagcctagatcagcttttagccgctcatc

SEQ ID NO: 283796 - DNA, 120 bp, Artificial Sequence
  ENSG00000130224_16 (sequence is synthesized)
tcgccaagaatatggggcagcagatccaggatttacaatgagaagaaagatggaacatttacgggaagagcgagagcaaatacgacaacttcgcaacaatcttgaatccaggttaaaagt

SEQ ID NO: 283797 - DNA, 120 bp, Artificial Sequence
  ENSG00000130224_17 (sequence is synthesized)
aattttgcctgatgacattggagctgcactgatggatggggttgttctttgccatttagccaatcatataaggccacgttctgttgctagtattcatgtaccatcaccagcagtgcccaa

SEQ ID NO: 283798 - DNA, 120 bp, Artificial Sequence
  ENSG00000130224_18 (sequence is synthesized)
actgagcatggcaaaatgtcgaagaaatgtagaaaattttcttgatgcttgtaaaaagttgggtgtctcacaggaaagactttgtttgcctcatcatattttggaagaacgaggacttgt

SEQ ID NO: 283799 - DNA, 120 bp, Artificial Sequence
  ENSG00000130224_19 (sequence is synthesized)
gaaagttggtgtcacagttcaggcgctccttgaattaccaacaaccaaggcatctcagctttctgtggcttaatataacattttaaaattctaagtgtatagtttcatttatttgaagtg

SEQ ID NO: 283800 - DNA, 120 bp, Artificial Sequence
  ENSG00000130224_20 (sequence is synthesized)
ttccgtcaaaaatagtttgccttaggtcacgccttaggattttaaaaaaattacattgaaacatcaaacttaaacattgaattgcccgaacttctttgggggaaaactggattaacttaa

SEQ ID NO: 283801 - DNA, 120 bp, Artificial Sequence
  ENSG00000130224_21 (sequence is synthesized)
taagagtatttgataaactcaaattctctttttactaagtcagttgataatcttgattatttttcagaaagcagactgatactaaatttaaaatgtagtttcaatttaataatcacatta

SEQ ID NO: 283802 - DNA, 120 bp, Artificial Sequence
  ENSG00000130224_22 (sequence is synthesized)
attaggtttaatttttttacatcatagcatattagtaaacatctggataaaggtaattttttttagcaatttagagcaattctatatttgagttatttaatacacttctaattctagttt

SEQ ID NO: 283803 - DNA, 120 bp, Artificial Sequence
  ENSG00000130224_23 (sequence is synthesized)
acaatttcttcaatctttggtcttagttttctagaaaaaaggagtagaaaaaacaattctggctttatattaaattcttttagtattataggttggtgccaaaatattttcagttgtact

SEQ ID NO: 283804 - DNA, 120 bp, Artificial Sequence
  ENSG00000130224_24 (sequence is synthesized)
gtagattgtttacatgtgaagtgcctgtgtaattgatgactcttacatagtcttaagcatttttgcaattttttaaatgtattaatagagtcaatggaactttaaaatattttagtagat

SEQ ID NO: 283805 - DNA, 120 bp, Artificial Sequence
  ENSG00000130224_25 (sequence is synthesized)
tttgtaaagtcagtaatatgtgaggatttaaatgagcctcacattgtgacatttgtggttttttagttagtccattgcagtttcccttaaattggttatttcatgttgtcaaaaatacca

SEQ ID NO: 283806 - DNA, 120 bp, Artificial Sequence
  ENSG00000130224_26 (sequence is synthesized)
atgattaatttatgctatttaattttgtgaaacttaatcatcttttaaaatgtattatttgaagagtattttatttctgtattgaaaatgttacacaaagcagtaaagtttttgagaact

SEQ ID NO: 283807 - DNA, 120 bp, Artificial Sequence
  ENSG00000130224_27 (sequence is synthesized)
tgagaactagtgaagtactaattatcaaggacattttgataaaactgccaaagtttgggtttatatcttccctttgagcagcattctatcagtgctgcctttagctatactcagagagca

SEQ ID NO: 283808 - DNA, 120 bp, Artificial Sequence
  ENSG00000130224_28 (sequence is synthesized)
gcagttgaggaataggtttttactcaaaatctggccatttgtgaatcctgtaaaccttgtgatcttcaattactttgatgttaaattaaacacagactcttctataaatattttcatgag

SEQ ID NO: 283809 - DNA, 120 bp, Artificial Sequence
  ENSG00000130224_29 (sequence is synthesized)
atactgtgttacacaaagtccttgttttaacttaggtatgggtaaatttacattggtggtattgcaggaatttttcaaaaacattactgtaatgaataactgagtttcctatagaagaac

SEQ ID NO: 283810 - DNA, 120 bp, Artificial Sequence
  ENSG00000130224_30 (sequence is synthesized)
ctgaataattacttttgtagtaaccaagcaagcatcatatcttaagtatgtgatcatttgcacttgttacctcttaatatggatgcaacttattaaaaatgttggcctgggtatttcaaa

SEQ ID NO: 283811 - DNA, 120 bp, Artificial Sequence
  ENSG00000130224_31 (sequence is synthesized)
gggtatatataaaaggtaaaaaactagtgtgccaaatggtataggaacaactgtactttttttgatcagttggcatgaagccatagaattaaattttggctttagaatacagatgtgttc

SEQ ID NO: 283812 - DNA, 120 bp, Artificial Sequence
  ENSG00000130224_32 (sequence is synthesized)
attacattccccaagggtcaaattggagcttttaaagaattaaagcttctatgagtatatggtttaagaattaaattattagtaatttattattttaaatatttgacctcattagttgtt

SEQ ID NO: 283813 - DNA, 120 bp, Artificial Sequence
  ENSG00000130224_33 (sequence is synthesized)
aattttttagttggataaaaaaaaaactcgctgacataatctccctagtgaaaacttgggtaatatatgtaagaaatggcaaataaataccttagttaatgactttttatgtagaaattt

SEQ ID NO: 283814 - DNA, 120 bp, Artificial Sequence
  ENSG00000130224_34 (sequence is synthesized)
gacagcattacaaattaagtgaccattaaaaacacagcaatcattcatactgctttcataggtgttatgatagtctctgattaatcaatctagtatgaattattttacaagtgttgtcct

SEQ ID NO: 283815 - DNA, 120 bp, Artificial Sequence
  ENSG00000130224_35 (sequence is synthesized)
gtttcatatctttgaagtagtagtgaaattgtaggccattttcttataacatttcagttacttttcagttaattattcctttaaaaagaaaatacagcagaacctcactgtagcattctt

SEQ ID NO: 283816 - DNA, 120 bp, Artificial Sequence
  ENSG00000130224_36 (sequence is synthesized)
tactgcagagcaaaattcaatttaagatgggcttctctgaggtccacatcatggcagttcatttactcttgtgccaaatggcaacaccacgtctaaagcagtttcacagcatggtcccct

SEQ ID NO: 283817 - DNA, 120 bp, Artificial Sequence
  ENSG00000130224_37 (sequence is synthesized)
acaatgttataccaaggctctgatgtatttcttttagtagtttctaagtgtaaaatttattctaaatgtttttatggctattatctatttcatcagttattgaattaagaatgattttca

SEQ ID NO: 283818 - DNA, 120 bp, Artificial Sequence
  ENSG00000130224_38 (sequence is synthesized)
ttacttgagtgggatttgtgatttaatgacagttgaataatcaaaaatattttattaggcccccaaaatttaatagatatctatttctgttacattttattactgtatggcacaagaaag

SEQ ID NO: 283819 - DNA, 120 bp, Artificial Sequence
  ENSG00000130224_39 (sequence is synthesized)
aagtgacattgggtatgttagaaatgaaataaggagtaaaaatgcattaccatttgtttaataattatctttacagaatgctagtttaatgacttttttaactgaattttttgaataaat

SEQ ID NO: 283820 - DNA, 120 bp, Artificial Sequence
  ENSG00000130224_40 (sequence is synthesized)
cagaaatgtttgtattggtcacagatctatcataattgcttttctgatgcatttaaaaataaatggaacacttaaatgtatattaccgatgcaaactgtggataaagttgaaagaaaaaa

SEQ ID NO: 283821 - DNA, 120 bp, Artificial Sequence
  ENSG00000130226_0 (sequence is synthesized)
ggaatgtgtgccggtctctaggtggtgccaaattctggggcctaggcatttccctcgctttatgtttttggttttttttcttccttcaatctctttgattaggccgtacgtggctgtggc

SEQ ID NO: 283822 - DNA, 120 bp, Artificial Sequence
  ENSG00000130226_1 (sequence is synthesized)
aaggagttggggaaaaaaattataaaaacaggaaagagagaaagcacagccagagccccggcttcgcgagccgccggggagggggcggaggaggctgagccaggcagagtcgccagcgga

SEQ ID NO: 283823 - DNA, 120 bp, Artificial Sequence
  ENSG00000130226_2 (sequence is synthesized)
gactcgcgagtggcgcgcgggaggagcggccgccggcgctgggcttgccttgctgctgctgctgctgctgcctccccaccgcctttttttttttttaatctggagcggggtggggagtgg

SEQ ID NO: 283824 - DNA, 120 bp, Artificial Sequence
  ENSG00000130226_3 (sequence is synthesized)
gaaccggagagaaagcaaaatattaaaaagccccaaagacagccagcaggagcgcggtgcccgatggcttcgctgtaccagaggttcactggcaagatcaacacctcgaggtccttcccc

SEQ ID NO: 283825 - DNA, 120 bp, Artificial Sequence
  ENSG00000130226_4 (sequence is synthesized)
caagatcaacacctcgaggtccttccccgcgcccccggaggcgagtcacctcctgggcggccaggggcccgaggaggacggcggcgcaggagccaagcccctcggcccgcgggcgcaggc

SEQ ID NO: 283826 - DNA, 120 bp, Artificial Sequence
  ENSG00000130226_5 (sequence is synthesized)
ggcggcggcgcgggtggccggccccggttccagtaccaggcgcggagcgatggtgacgaggaggacgagctggtggggagtaaccctccgcagaggaattggaaaggaatagcaattgca

SEQ ID NO: 283827 - DNA, 120 bp, Artificial Sequence
  ENSG00000130226_6 (sequence is synthesized)
ctgcttgtcattctggtcatctgctccttgatcgtcacctcggtcatacttctgacaccagcggaagataatagtctgtctcaaaagaagaaggtcactgtagaagatctcttcagtgaa

SEQ ID NO: 283828 - DNA, 120 bp, Artificial Sequence
  ENSG00000130226_7 (sequence is synthesized)
gacttcaaaattcatgaccccgaggctaagtggataagtgatacagaattcatctacagagaacagaaaggaacagtgagactgtggaatgttgaaacaaatacttctactgtcttaata

SEQ ID NO: 283829 - DNA, 120 bp, Artificial Sequence
  ENSG00000130226_8 (sequence is synthesized)
gaaggcaaaaaaattgaatcattaagagccatcagatatgaaatatctccagatagagagtatgcacttttttcatacaatgtggaacccatatatcaacactcgtatactggatattac

SEQ ID NO: 283830 - DNA, 120 bp, Artificial Sequence
  ENSG00000130226_9 (sequence is synthesized)
gtcctgagcaaaattcctcatggggatcctcaaagtctggacccaccagaagtcagcaatgcaaaacttcagtatgcaggatggggccctaaaggccaacagctgatatttatttttgaa

SEQ ID NO: 283831 - DNA, 120 bp, Artificial Sequence
  ENSG00000130226_10 (sequence is synthesized)
aacaatatctactactgtgcacatgtcgggaaacaggccatccgtgtggtctccactggcaaggaaggtgtgatttacaatggcctcagtgactggctgtatgaagaggagattttgaag

SEQ ID NO: 283832 - DNA, 120 bp, Artificial Sequence
  ENSG00000130226_11 (sequence is synthesized)
acacacatcgcacactggtggtctccggatggcacgagactcgcctacgccgccatcaatgattcccgtgtccccatcatggagctcccaacttacaccggctccatctaccccaccgtg

SEQ ID NO: 283833 - DNA, 120 bp, Artificial Sequence
  ENSG00000130226_12 (sequence is synthesized)
aagccctaccactatcccaaggctggaagtgagaaccccagcatttccctacacgttattggcttaaatggacccacccatgatctggagatgatgccgcctgatgatccacggatgagg

SEQ ID NO: 283834 - DNA, 120 bp, Artificial Sequence
  ENSG00000130226_13 (sequence is synthesized)
gagtactacatcaccatggtgaagtgggccaccagcaccaaggtcgccgtgacctggctgaaccgggcgcagaacgtgtccatcctcaccctctgcgacgccaccacgggggtctgcacg

SEQ ID NO: 283835 - DNA, 120 bp, Artificial Sequence
  ENSG00000130226_14 (sequence is synthesized)
aagaaacacgaggatgaaagtgaggcctggctccacagacagaatgaagaacctgtgttctccaaggatggccgaaagtttttcttcatcagagccatcccccagggaggacgagggaaa

SEQ ID NO: 283836 - DNA, 120 bp, Artificial Sequence
  ENSG00000130226_15 (sequence is synthesized)
ttctatcacatcacggtgtcctcgtcccagcccaacagcagcaacgacaacatccagtccatcacctccggggactgggacgtgaccaagatcctagcctacgatgagaaggggaataag

SEQ ID NO: 283837 - DNA, 120 bp, Artificial Sequence
  ENSG00000130226_16 (sequence is synthesized)
atctacttcctgagcacggaggacctgcctcggagacgacaactctacagtgccaacacggtgggcaacttcaacaggcagtgcctctcctgtgacctggttgagaactgcacctacttc

SEQ ID NO: 283838 - DNA, 120 bp, Artificial Sequence
  ENSG00000130226_17 (sequence is synthesized)
agcgcttccttcagccatagcatggacttcttcctgctcaagtgcgaaggtcctggtgttcctatggtgacggtgcacaacacaacagataagaaaaaaatgtttgacctagaaacaaat

SEQ ID NO: 283839 - DNA, 120 bp, Artificial Sequence
  ENSG00000130226_18 (sequence is synthesized)
gaacatgtcaagaaggccataaatgaccgacagatgcctaaagtggaatacagggacattgagattgatgattacaacctgcccatgcagatactgaagccagcaaccttcaccgacacc

SEQ ID NO: 283840 - DNA, 120 bp, Artificial Sequence
  ENSG00000130226_19 (sequence is synthesized)
acccactaccctctgctcctggtggtggatggcaccccaggcagccagagtgtggctgagaagttcgaggtgagctgggagacggtgatggtgagcagccacggcgcggtggtggtaaag

SEQ ID NO: 283841 - DNA, 120 bp, Artificial Sequence
  ENSG00000130226_20 (sequence is synthesized)
agggaccaagctcctgcacgaagtgaggcggcggctgggcttgctggaggagaaggaccagatggaggccgtgcggacgatgctgaaggagcagtacattgacaggacgcgcgtggccgt

SEQ ID NO: 283842 - DNA, 120 bp, Artificial Sequence
  ENSG00000130226_21 (sequence is synthesized)
gtttgggaaggattacggtggctacctgagcacctacatcctcccagcaaagggagaaaatcaaggccagacattcacctgcggctctgctctctctccaataacagacttcaaactcta

SEQ ID NO: 283843 - DNA, 120 bp, Artificial Sequence
  ENSG00000130226_22 (sequence is synthesized)
tgcctctgcgttttccgagaggtacttgggcctccatggacttgacaacagagcatacgagatgaccaaggtagcccatcgagtctccgcgctggaagaacagcagttcctgatcattca

SEQ ID NO: 283844 - DNA, 120 bp, Artificial Sequence
  ENSG00000130226_23 (sequence is synthesized)
tcccactgccgatgaaaaaattcatttccagcacacagcagaactcattacacaactaattaggggaaaggctaattacagcttacagatttacccggacgaaagccattactttaccag

SEQ ID NO: 283845 - DNA, 120 bp, Artificial Sequence
  ENSG00000130226_24 (sequence is synthesized)
ctccagcctcaaacagcatctgtaccggtccatcatcaacttcttcgtggaatgcttcaggatccaggacaaactgctgacagtcacagcgaaagaggacgaggaggaggactaagctca

SEQ ID NO: 283846 - DNA, 120 bp, Artificial Sequence
  ENSG00000130226_25 (sequence is synthesized)
ggtcgctctaagcacaaacgtggctctttctacaaccagatgcaaccgagggatttccctgccctccctcttccctcggaggggcggggcggggcggggccgggtgttccatagcatgtg

SEQ ID NO: 283847 - DNA, 120 bp, Artificial Sequence
  ENSG00000130226_26 (sequence is synthesized)
tgtctcggatgcggaaggcagttttgcttgggaaacaagctccttccccggggtcatcactcacggcctccatggcaccagggacaacgctgtccccgcagcagcgcctcctcccggcgc

SEQ ID NO: 283848 - DNA, 120 bp, Artificial Sequence
  ENSG00000130226_27 (sequence is synthesized)
ccgagagaccggcacgccacggcccctcccccaaggaacagagcaaaggatggtggccgcaggccccacgcgagcccacaggacaccggcccctagattccagccaccaagcggaagcat

SEQ ID NO: 283849 - DNA, 120 bp, Artificial Sequence
  ENSG00000130226_28 (sequence is synthesized)
gagacccgcccacactagcctctgtgttcccgttagggacatcacaccctgtctcacgtcgcagtgccatggacgcagcagttacagcaccattgttttagcagtgcgtgttcatatatg

SEQ ID NO: 283850 - DNA, 120 bp, Artificial Sequence
  ENSG00000130226_29 (sequence is synthesized)
ggcttgctacttcctgtaatgaggacgttcaacatggtgaggggctacaagaaaacgcttttctgtacagagtcttactgtagctacgctaatggttaacctgatagaattaactcgtat

SEQ ID NO: 283851 - DNA, 120 bp, Artificial Sequence
  ENSG00000130226_30 (sequence is synthesized)
ttttctatggttttaacctgatgctccactgtctccgtcatggggttgttttgctgtttggggttgggccttgtttccctttcctttctccagtccacgtgtagactttgcgcttgatga

SEQ ID NO: 283852 - DNA, 120 bp, Artificial Sequence
  ENSG00000130226_31 (sequence is synthesized)
agaagcagatcggaagtaactgctccctcctcaaggttgtcttcagacgtcttggggacgttcctaaacactgagggggaagacagccaatagcacccattaaaagaaatacctaaataa

SEQ ID NO: 283853 - DNA, 120 bp, Artificial Sequence
  ENSG00000130226_32 (sequence is synthesized)
aacctctctcccactcagctatgctagggcttggctgtaggtgtgcactgtctatttacatccgtccttacaaccatccttgtcctccttggtaccgtatcaagctctttcccatgacat

SEQ ID NO: 283854 - DNA, 120 bp, Artificial Sequence
  ENSG00000130226_33 (sequence is synthesized)
aaaaaaaaaaacagaaaaaagacaaagcgtcaactccacccacaggcccgctgtgtgtgctcgggccacgggagtcctgagggttctgtgggcctgcgcgcatccctctcccatcgtggg

SEQ ID NO: 283855 - DNA, 120 bp, Artificial Sequence
  ENSG00000130226_34 (sequence is synthesized)
cgcgcatccctctcccatcgtgggggtggctccgtgaccttcctgccacgagcaggaggttgatgatgtgctacgttagccttgtaagatacacccccaccaaatgtgcagccggtgttc

SEQ ID NO: 283856 - DNA, 120 bp, Artificial Sequence
  ENSG00000130226_35 (sequence is synthesized)
ccagtgtatatttcattctcttgtatataaaggaagcaatgtgtgtcaggcctctgtgcagtcaacccagcctcctcccgccagtgctaaccccgtgttgagcctgcatgctgacactgt

SEQ ID NO: 283857 - DNA, 120 bp, Artificial Sequence
  ENSG00000130226_36 (sequence is synthesized)
ggccgatctggactctagaagtgctagtttgaaatatatccattactgtcatttccttttgagcttgtggacaagctgaatgtcaggactgacttcgccagctcccagccctgcgggggt

SEQ ID NO: 283858 - DNA, 120 bp, Artificial Sequence
  ENSG00000130226_37 (sequence is synthesized)
gtccttggcatcccatcagcagaggagatgcgtccctgttgcattttggcgtttggggctttgggtttatccacatgagctctgaacgtccgttatagttagggtgattggaaggtctcc

SEQ ID NO: 283859 - DNA, 120 bp, Artificial Sequence
  ENSG00000130226_38 (sequence is synthesized)
atcactgggtgttttaaaggtgattcaccaccatttgtgaaaggaccaacgtgctgataaacaggaccgatccgagtgctacatgactgtgcgtttgctatttcaatgggcctgaacgac

SEQ ID NO: 283860 - DNA, 120 bp, Artificial Sequence
  ENSG00000130226_39 (sequence is synthesized)
tacaaagccagctaggtctggaaggggaagccagctctggccacgacatctggtcggagggaagtggggatgtggcatggtagcgtctgttcatccatggaataaaacattattttacca

SEQ ID NO: 283861 - DNA, 120 bp, Artificial Sequence
  ENSG00000130226_40 (sequence is synthesized)
tgcgccgtgggcgccgggccgggaggcgggcgaggaggcagcgcgcatcactcgggtccccttcctgcacccagccgccacttgccggttgctaagcagttatcattgtttctgtggcga

SEQ ID NO: 283862 - DNA, 120 bp, Artificial Sequence
  ENSG00000130226_41 (sequence is synthesized)
ttgcagaggctgttgctaattggagaagccccactaagcagcggcagcttcctgcttcggatcctctctctgctgcttgcatttaaagagcaaactcgtcttgtctacccaccctccctc

SEQ ID NO: 283863 - DNA, 120 bp, Artificial Sequence
  ENSG00000130226_42 (sequence is synthesized)
ccccatcctccccaaaatagccttgtgatttcggaagtatggactaaaatcacactcctccttaccttaccgcttggactctggtggctcccaactcgccgtcagaccccacctgccccg

SEQ ID NO: 283864 - DNA, 120 bp, Artificial Sequence
  ENSG00000130226_43 (sequence is synthesized)
gtggtgggaagcgcctggacagaccatgaccacagccaaggagccaagcgcttcggggaaatccgtgcagcagcaggaacaggagctggtggggagtaaccctccgcagaggaattggaa

SEQ ID NO: 283865 - DNA, 120 bp, Artificial Sequence
  ENSG00000130226_44 (sequence is synthesized)
agttcagacagaaaacctggcgcgcgcgcgcgcacacacacacgcctcccctggcgtcgccgcccggccgggtccctgcccttagggaccagagcggcgaccgctgcaccccgcaccgcc

SEQ ID NO: 283866 - DNA, 120 bp, Artificial Sequence
  ENSG00000130226_45 (sequence is synthesized)
gagcccccggagccggggccgagccgccggcgtccccgagtgcgccccctgtgcgtgccgccgcgctgttgctcgcagtgtgctggcgccgagctcggtggacacgcgcgcagtcagagc

SEQ ID NO: 283867 - DNA, 120 bp, Artificial Sequence
  ENSG00000130226_46 (sequence is synthesized)
gtcagagctgcctctcgccctcgctagctgggctcgcagcctcttcctccctccctggctcctggctttttgtttaaagcaacacccaccctccatccaggctttttttctttctttctt

SEQ ID NO: 283868 - DNA, 120 bp, Artificial Sequence
  ENSG00000130226_47 (sequence is synthesized)
tattggtagcggccaaaaagagttgattgctattgggatccgctgagtaaagacacgggcaggggtgcgcggaggtgagaaaactgaagacctggaagatttttttttccttcaaaaacc

SEQ ID NO: 283869 - DNA, 120 bp, Artificial Sequence
  ENSG00000130226_48 (sequence is synthesized)
cgtttccatccagtcttcagccagtccagtctactttaatcctcaccaggacaatggattaagtttctcttccctggaccagaagtcgggttcggacttggggcaaaatgaaggaaaagg

SEQ ID NO: 283870 - DNA, 120 bp, Artificial Sequence
  ENSG00000130226_49 (sequence is synthesized)
cttcaacagcccaggctgggatgcttctcaccctgtgtcgctctctggggcctcccgccagcccttttccggttctttctctgtcccgcctccccggacccctcgctgcccggtcaggtg

SEQ ID NO: 283871 - DNA, 120 bp, Artificial Sequence
  ENSG00000130226_50 (sequence is synthesized)
gttagttgtgcgtttgcctggtactgcggtgtgaaagtcaaggcatcagctggagagacgagacctcaaaacccacggagcagcccccacacccctcacccccagggcagccacacgcag

SEQ ID NO: 283872 - DNA, 120 bp, Artificial Sequence
  ENSG00000130226_51 (sequence is synthesized)
tgaaaacccctcagttccagtgtggcctgcaccattacccacgtctaatcctgatttattgagaacgtctgtggtctgctggtgagcaagtaattttttaaaatcaagagcctgggtgct

SEQ ID NO: 283873 - DNA, 120 bp, Artificial Sequence
  ENSG00000130226_52 (sequence is synthesized)
tcctcatgggggcagcaccgcagtcacagtgcgggaatgctttttctccacgcacacatttttcatgcaatttgctcttacctaaaatctcttggccattccaaagaagtttcaaaggaa

SEQ ID NO: 283874 - DNA, 120 bp, Artificial Sequence
  ENSG00000130226_53 (sequence is synthesized)
acttaggaatcttctcctagggacatttataactagttttcccactgcagggtagattgttgagttgactaaaacaaggggatagaaattgccggttgggttggcttggcttttctgcgc

SEQ ID NO: 283875 - DNA, 120 bp, Artificial Sequence
  ENSG00000130226_54 (sequence is synthesized)
acccggtcagtgaacgcatgtcagctctgcactcagtcctgctgcacttcggtggactctcaccagaggtcaaaggctatcagctcactccttttgtctgaccaatgccttgggtggctg

SEQ ID NO: 283876 - DNA, 120 bp, Artificial Sequence
  ENSG00000130226_55 (sequence is synthesized)
ctctcatcctgacttgagctaaattgggtgatctgcctggagacttagaaccttattcctccccccaaccattcccactgcctttgccttgatctggactcttctctcctcttgccagga

SEQ ID NO: 283877 - DNA, 120 bp, Artificial Sequence
  ENSG00000130226_56 (sequence is synthesized)
agttgacattgcctcattcaaaatcatgtgactcattagcagtaagtcaagcctgtagcccagcttgtcaccagggctgttttcttcattacatcaccatgtctcttcctcttcactgcc

SEQ ID NO: 283878 - DNA, 120 bp, Artificial Sequence
  ENSG00000130226_57 (sequence is synthesized)
tgcgtgactatgtctcggcagtcaatggatacagcacagcattgccagcttgccatgtacaagggggacctgtttcagatattccatggagaccctggctggaggattgcaggagagtcc

SEQ ID NO: 283879 - DNA, 120 bp, Artificial Sequence
  ENSG00000130226_58 (sequence is synthesized)
caggaggcaggactgccaatggcaccaggcttcgcagccatgcacctgcagccctcaggcagcactgtccattgtcatacgagtgtggcaggtgtgaggcatcgcatctgctcaccccgg

SEQ ID NO: 283880 - DNA, 120 bp, Artificial Sequence
  ENSG00000130226_59 (sequence is synthesized)
ggataatgcacagcagctacaggcagatttcgggccagagagcaaccgagtgagccttgcagcctctgctgccagcacaggcttgttccttcaacactggtggagagagacacgctgtca

SEQ ID NO: 283881 - DNA, 120 bp, Artificial Sequence
  ENSG00000130226_60 (sequence is synthesized)
tcaggcccaagaaatactgccttccccatcctatccctggtcactgggtgcccgcagagtgtcccagaggagggagggagggaccctccactggttcaaatggcctgttctcagagatgc

SEQ ID NO: 283882 - DNA, 120 bp, Artificial Sequence
  ENSG00000130226_61 (sequence is synthesized)
agcaatggaccctcgtgaatactgaactgataatcatgggaaggagactggctctcctggattccctcatgattcctctgagtgacaatgtgatgttggccgactgtgtcttcttcagaa

SEQ ID NO: 283883 - DNA, 120 bp, Artificial Sequence
  ENSG00000130226_62 (sequence is synthesized)
tatcatatacacttgaggtctccaggagcctccaattacattattttcctggctcatacagtgacaagtaattcttatcctggattcctcgttactgagacttttcttgccttttttgtt

SEQ ID NO: 283884 - DNA, 120 bp, Artificial Sequence
  ENSG00000130226_63 (sequence is synthesized)
agcttatgatttattctaggacttcctccaacaggttatacttaactgtctacctcagtctctggaagttttaaaaatgttcagctaaataaaagaagtagattctccctggaaaccaaa

SEQ ID NO: 283885 - DNA, 120 bp, Artificial Sequence
  ENSG00000130226_64 (sequence is synthesized)
atgacaagaaggcagggagaagcgcatctaccagggacccccgccgcgaccatgatcatcaccgttatgggcaggggagcgtgaggctgggcccgggcacacaaggagggtggagcacag

SEQ ID NO: 283886 - DNA, 120 bp, Artificial Sequence
  ENSG00000130226_65 (sequence is synthesized)
agcccagctcagtacatgtttattgactggacctggcatctctgtacctattataccagggtgctttgtgcgtttggaaatttttactcaactgactttgaaaacatttctcctcatttt

SEQ ID NO: 283887 - DNA, 120 bp, Artificial Sequence
  ENSG00000130226_66 (sequence is synthesized)
tcccagtgtctttgggtttatttagcaagaggtaatgactgggcggcccctcagagtcccgcgccagtgcagattctttataagccagatttcagaagctcgcaggctggctgtgtcacc

SEQ ID NO: 283888 - DNA, 120 bp, Artificial Sequence
  ENSG00000130226_67 (sequence is synthesized)
cagacaggtaactactgcatgtccgggtccccactgtcacctccacctgatccaccccagggctggccctcagagcttcgacaacagcagaatggcttctcagagtaaatcacacagggc

SEQ ID NO: 283889 - DNA, 120 bp, Artificial Sequence
  ENSG00000130226_68 (sequence is synthesized)
tccccaggcagaaacagacggcgtgccggctccactcacggtgcctcccgttctccagggttgcccagagagctccaggagaatccaagttccagggagggtcgtgtgaaaatcacggct

SEQ ID NO: 283890 - DNA, 120 bp, Artificial Sequence
  ENSG00000130226_69 (sequence is synthesized)
cttcagagcgtggaatgtttggtgagacctcagcttgcagttagatgccagcaccttgctgaattgaaaatgaacagtccatcaaaggtggcttaacataatctactatagtaaaagggt

SEQ ID NO: 283891 - DNA, 120 bp, Artificial Sequence
  ENSG00000130226_70 (sequence is synthesized)
atacatgctcacccatacacctgctcacacacacatgctcacccataaacatgctcacacacacacatgctcatacacgtttacccatacacatgctcacacgattacatacacctgctc

SEQ ID NO: 283892 - DNA, 120 bp, Artificial Sequence
  ENSG00000130226_71 (sequence is synthesized)
acacacacacgtgctcacaaattacatacacatgctcacacatacatgctcacaaacacgactacatacacctactcacacacacatgctcacacaattacatacaccgactcacgcaca

SEQ ID NO: 283893 - DNA, 120 bp, Artificial Sequence
  ENSG00000130226_72 (sequence is synthesized)
catgctcacacaattacatacacctgctcacccatacacacatgctcacatgattacacatgctcccacatacatacatgctcacacacattacatacacatgctcacacacgctcacac

SEQ ID NO: 283894 - DNA, 120 bp, Artificial Sequence
  ENSG00000130226_73 (sequence is synthesized)
atacacacgagtacatacacgctgacacatgctcacacacacgattacatacacatgctcacacatacacatgctcacccacacacacgctcacacatacactcacacacacctgctcac

SEQ ID NO: 283895 - DNA, 120 bp, Artificial Sequence
  ENSG00000130226_74 (sequence is synthesized)
acatacccatacatgctcacccatacacatgctcacacacacatgctcacccatacacatgctcacacacatgctcacccatacacatgctcacacacacatgctcatacacgtttaccc

SEQ ID NO: 283896 - DNA, 120 bp, Artificial Sequence
  ENSG00000130226_75 (sequence is synthesized)
atacacatgctcacacacgattacatacacctcccacatacacgattacatgcacctgctcacacacacacatgctcacaaattacatacacatgctcacacatacacatacatgctcac

SEQ ID NO: 283897 - DNA, 120 bp, Artificial Sequence
  ENSG00000130226_76 (sequence is synthesized)
aaacatgattacatacacctactcacacacacatgctcacacaattacatacgcctactcacacacacatgctcacacaaattacatacacctgctcatacacacacacatgctcacacg

SEQ ID NO: 283898 - DNA, 120 bp, Artificial Sequence
  ENSG00000130226_77 (sequence is synthesized)
attacatacacatgctcccacatgctcacctatacacatgctcacatacacacgagtacatacacatgctgacacatgctcacacacacgattacatacacatgctcacacacattcaca

SEQ ID NO: 283899 - DNA, 120 bp, Artificial Sequence
  ENSG00000130226_78 (sequence is synthesized)
ttcacatgttcacgcacacatgctcacatgctcacccatacatacacacgattacatacacatgctcatacatacacgattacatacacatgctcacacaggctcatacacatgctctta

SEQ ID NO: 283900 - DNA, 120 bp, Artificial Sequence
  ENSG00000130226_79 (sequence is synthesized)
cccatacatgctcacacacacacatgctcacacacaagcacacatgatcacacaggcacacatgatcacacatacacaggcttgcacaagtttacacacatactcatacatgctcacaca

SEQ ID NO: 283901 - DNA, 120 bp, Artificial Sequence
  ENSG00000130226_80 (sequence is synthesized)
ggcatacacacatgctcacatatgcacacactctcacatgtataggcacacacaggattacacatgctcacacatgtgcttatacacatacacccatgcacatgttcacacgtttataca

SEQ ID NO: 283902 - DNA, 120 bp, Artificial Sequence
  ENSG00000130226_81 (sequence is synthesized)
cacatatcacacacacacacccccatatactcacacacacgctgccacatgctctgtctctcacacatacctgacagttccgtgctgtcccgtttccctcggggtcttcccttcggaggc

SEQ ID NO: 283903 - DNA, 120 bp, Artificial Sequence
  ENSG00000130226_82 (sequence is synthesized)
tgcagctcgtctgagcatccagccttgaaggcactgagcaggcaaggaggtagggcttttctctggggaggcctgcgttgcagtacggcttcctcatccccaccaagggcagggaagggc

SEQ ID NO: 283904 - DNA, 120 bp, Artificial Sequence
  ENSG00000130226_83 (sequence is synthesized)
aggagtctaggacttacctgaatacagaacacctgggagcgtctgtctcgtgtcggccttgtgctgagcatgtgcagaccaggacttgcgccctaagccacttgttggcccctccctcag

SEQ ID NO: 283905 - DNA, 120 bp, Artificial Sequence
  ENSG00000130226_84 (sequence is synthesized)
aatcatgtgcagtggcttggcctcacccacagacaagggaggcggtaagaaatgccataaagagacgctgagcctgaaggacagcaccttacacctgtgcagtccacacttgcctttcca

SEQ ID NO: 283906 - DNA, 120 bp, Artificial Sequence
  ENSG00000130226_85 (sequence is synthesized)
attcgccgttgcatttcatcctcacgtcccttgacaccaaggcccagaagcggagaaggcgcacgtcgcataatgctgagttggaagggagtttgcttttcatctcttgttactgccccg

SEQ ID NO: 283907 - DNA, 120 bp, Artificial Sequence
  ENSG00000130226_86 (sequence is synthesized)
tgaacaactttccaagtgacacattttgtaaaaggagagaacctgcatggaactggctgctctggggctgtctccctgcccgaggctgcttcatgctgagttactgccaggactcctaac

SEQ ID NO: 283908 - DNA, 120 bp, Artificial Sequence
  ENSG00000130226_87 (sequence is synthesized)
tgttttgaacctggagcaagacattcctttcatggagaaagacctgacgggtgttcagggccttctactgcagcagacacgcctgtgctgtggtggtcggtgatgagcaaggtcccagca

SEQ ID NO: 283909 - DNA, 120 bp, Artificial Sequence
  ENSG00000130226_88 (sequence is synthesized)
ggttggaaaatcagcacatgctcaacgttttcttataattaatgatagctccgctctgtacttcagcccggtttaaatccctttaggacaaccatctccccgtactcccaccccagccct

SEQ ID NO: 283910 - DNA, 120 bp, Artificial Sequence
  ENSG00000130226_89 (sequence is synthesized)
gctcccctcctccgggcagtgagaagaaccaagccagcacccaccctgcccagcagtgtggctggggctatcccgctgcggagagtgggactgttgttctgggttggtgagagtggtgct

SEQ ID NO: 283911 - DNA, 120 bp, Artificial Sequence
  ENSG00000130226_90 (sequence is synthesized)
ggtgggccctgagccttgccccactgcttccctctgaccaacaccacatgttactacgcactagcaggatgtcctggggccatctgtagctaggcagtagtgaaagaggggtacccttcc

SEQ ID NO: 283912 - DNA, 120 bp, Artificial Sequence
  ENSG00000130226_91 (sequence is synthesized)
cagaactgaactcactttcccacaaccaacccgtggcccgtccacaacagcatcaagtgctgacccagcagcctcaaacctgggctcttcccagtaatgcacagggatgtctctggaaac

SEQ ID NO: 283913 - DNA, 120 bp, Artificial Sequence
  ENSG00000130226_92 (sequence is synthesized)
ttctgccatttccttcctgccttctgctcctttggtggaacaggtatgacccaatggtctcttcaggtccaacatgaatgaatgggagagctccttggggacagatgacaggcaggcacc

SEQ ID NO: 283914 - DNA, 120 bp, Artificial Sequence
  ENSG00000130226_93 (sequence is synthesized)
ctgcctccctcagagagctcttgccctgggctgatcactgccttggcctccagcatccctgcctgtgggagggagggaccacctgtgggcttgatcaggcagggagagctccagccagaa

SEQ ID NO: 283915 - DNA, 120 bp, Artificial Sequence
  ENSG00000130226_94 (sequence is synthesized)
gggagttggaccccagtgtggatgaagaggggcagaaggacggggttacaccacacttgagttcccttgtgaaagacgttcagatttcagactttttcaaagtaagtgtggcagttgcat

SEQ ID NO: 283916 - DNA, 120 bp, Artificial Sequence
  ENSG00000130226_95 (sequence is synthesized)
ggcagtgttaagcacactgaccatggacgctccaaaggtccatgtgtatgtgttcatgtgggcaactccccaagatatggggcgagctgaaccccccaggtacagagcagcctgcatcgc

SEQ ID NO: 283917 - DNA, 120 bp, Artificial Sequence
  ENSG00000130226_96 (sequence is synthesized)
tgcaggctccatgggtatcagggagcaggacccacccagggacacacatgtgggcacagcaaaggccttcacagacaccccatgcatctggagccaggcccagccccaggtaagagcacg

SEQ ID NO: 283918 - DNA, 120 bp, Artificial Sequence
  ENSG00000130226_97 (sequence is synthesized)
ggagacgggggcctgaggcaggaggagaaagcttcctgcccatatcctcttgtactacttgatgttttaatgacatatcatagcctaatgacagcattaataaatacttcaaaataaaga

SEQ ID NO: 283919 - DNA, 120 bp, Artificial Sequence
  ENSG00000130226_98 (sequence is synthesized)
tgaatttcaccctccaaaaacatacaaagaaggcaggaagaggcagtctagtgtcatagaaagatgtaggttttgggccagatgcagtggctcacacctgtagtccctgcactttgggag

SEQ ID NO: 283920 - DNA, 88 bp, Artificial Sequence
  ENSG00000130226_99 (sequence is synthesized)
ccagcctagtttttagaaaatagccggacgtagtcatgtgtacctgtggtcccagctacacaggaggctgaagtgggagaatcacttg

SEQ ID NO: 283921 - DNA, 71 bp, Artificial Sequence
  ENSG00000130226_100 (sequence is synthesized)
gtttttagaaaatagccggacgtagtcatgtgtacctgtggtcccagctacacaggaggctgagtaacacc

SEQ ID NO: 283922 - DNA, 120 bp, Artificial Sequence
  ENSG00000130226_101 (sequence is synthesized)
ctatgaaaatgtgtatctggtaaaatcaggcttttgtaatggtgttgcctcccgagcatccacacagccttcacttaatgagaaatgggtctgctgaagacgtgtcctttgtgtgccacc

SEQ ID NO: 283923 - DNA, 120 bp, Artificial Sequence
  ENSG00000130226_102 (sequence is synthesized)
tcccagagacatcatttctccgggggagctgtggggtgttgcttagcaacaggaacagtgcagggcacggtgagctttccttccttctccacaatcttcattcccctttgttctcttgct

SEQ ID NO: 283924 - DNA, 120 bp, Artificial Sequence
  ENSG00000130226_103 (sequence is synthesized)
ctctttccgttaggcagaaggaccaaaagcaactcatggagttcttgtagaatagcttccaaatgaaacttggagtgctgtacacagatgcagattcatttattttccctgttgaacttt

SEQ ID NO: 283925 - DNA, 120 bp, Artificial Sequence
  ENSG00000130226_104 (sequence is synthesized)
aatttggattaaatctactttccttgtatgggggattttttttttaaaacaacagaacaaaatacagttgggggcagaaggcatatgttcacaatgcctgtgttggttcataacataatc

SEQ ID NO: 283926 - DNA, 120 bp, Artificial Sequence
  ENSG00000130226_105 (sequence is synthesized)
tatttcttctaattgggtctgaaataattcaagtgcatccatggaagatgtacccatccctccacaggccaagttgccagcacctccctgttgcctccattgctgttgcttacatttcat

SEQ ID NO: 283927 - DNA, 120 bp, Artificial Sequence
  ENSG00000130226_106 (sequence is synthesized)
ctttgcttcagtggaatacacttgaaggtttatcctcaggccagagaactttatagtgatcaaagtctagttcagatccttgcttttataataaatgaggtccagagaggtcaagtgact

SEQ ID NO: 283928 - DNA, 120 bp, Artificial Sequence
  ENSG00000130226_107 (sequence is synthesized)
agctaaggaagctgaggcaccacagcttaggtgatcgggccacatgcatgcagcgaggaagcaaaagcagaggagttgcatctcggacgcaagcagtgcggctccaacagagcctgttct

SEQ ID NO: 283929 - DNA, 120 bp, Artificial Sequence
  ENSG00000130226_108 (sequence is synthesized)
tccagacatgtggtcattgcatggcgctgctcagccgcctgccctcatgcggtctgaaggacaactgcaaatccagagcgatgcccggcctgcactcccattgagatgagtctggggagg

SEQ ID NO: 283930 - DNA, 120 bp, Artificial Sequence
  ENSG00000130227_0 (sequence is synthesized)
cgcaggcgcagcggcgacggcgtcggcggcggcggcggcagcggctccggccgaggtgcgcgctgggggggagggggggccggagaggagcatgaatggagcaaaatggcggatcatgtg

SEQ ID NO: 283931 - DNA, 120 bp, Artificial Sequence
  ENSG00000130227_1 (sequence is synthesized)
tgtgcagagcctggcccaactagagaatctgtgcaaacagctgtatgaaaccacagacacaaccactcgactccaggcagagaaagccttggttgaatttaccaacagccctgattgcct

SEQ ID NO: 283932 - DNA, 120 bp, Artificial Sequence
  ENSG00000130227_2 (sequence is synthesized)
gagcaagtgccagctactcctcgaaagaggaagttcctcttactcccagttactggcagctacatgccttaccaagcttgtatcacgcacaaacaaccccctaccattggaacagcgaat

SEQ ID NO: 283933 - DNA, 120 bp, Artificial Sequence
  ENSG00000130227_3 (sequence is synthesized)
agatattcggaactatgtgctcaactaccttgccactcggccgaagttggctactttcgtgacacaagcacttattcagttatatgccagaatcacaaaactgggctggtttgactgtca

SEQ ID NO: 283934 - DNA, 120 bp, Artificial Sequence
  ENSG00000130227_4 (sequence is synthesized)
gaaggatgactatgtcttcagaaatgcaatcacagacgtcacaaggtttttacaggatagtgttgaatactgcatcattggtgtcacaattttatctcagctaaccaatgaaattaatca

SEQ ID NO: 283935 - DNA, 120 bp, Artificial Sequence
  ENSG00000130227_5 (sequence is synthesized)
agcagacaccacccatcctttaaccaagcacagaaaaatagcctcttcttttcgcgattcatcattatttgatatcttcacactttcctgcaatttactaaaacaggcttcaggaaagaa

SEQ ID NO: 283936 - DNA, 120 bp, Artificial Sequence
  ENSG00000130227_6 (sequence is synthesized)
tctaaacttgaatgatgaaagtcagcatggcttgctcatgcaactgctcaagctcactcataactgcctcaactttgacttcatcggcacttccactgatgagtcctcagacgacctgtg

SEQ ID NO: 283937 - DNA, 120 bp, Artificial Sequence
  ENSG00000130227_7 (sequence is synthesized)
tacagtgcagattcccaccagctggagatcagccttcttagattcttcaaccttgcagctgttttttgacctgtatcattccatccctccttcattttcacctctggtattatcctgctt

SEQ ID NO: 283938 - DNA, 120 bp, Artificial Sequence
  ENSG00000130227_8 (sequence is synthesized)
ggtacagatcgcttcagtcagaagatccctgtttaacaatgcagagagggccaagtttctctctcatcttgttgatggtgttaaacgaatactggaaaacccacagagtttatcagaccc

SEQ ID NO: 283939 - DNA, 120 bp, Artificial Sequence
  ENSG00000130227_9 (sequence is synthesized)
aaacaattaccatgagttttgcagactactggcccgattgaagagtaactatcaactgggagaattggtaaaggtggaaaactaccctgaggtcatccgattgatagccaacttcacagt

SEQ ID NO: 283940 - DNA, 120 bp, Artificial Sequence
  ENSG00000130227_10 (sequence is synthesized)
gaccagcctacagcactgggaatttgctccaaatagtgtgcactatcttctgagcctgtggcagcggctggcagcctctgtgccgtatgtcaaagccacagagccccacatgctggaaac

SEQ ID NO: 283941 - DNA, 120 bp, Artificial Sequence
  ENSG00000130227_11 (sequence is synthesized)
ttacactcctgaggtcaccaaagcctacatcacatcccggttggaatctgtgcacatcatactgagagatggcctggaagatcccctggaggatacggggctggtccagcagcagttgga

SEQ ID NO: 283942 - DNA, 120 bp, Artificial Sequence
  ENSG00000130227_12 (sequence is synthesized)
ccagctgtccaccattgggcgttgtgaatatgagaagacgtgtgcactcctcgtgcagttgtttgaccagtcggcccagtcgtaccaggagctgctacagagcgccagcgcaagcccaat

SEQ ID NO: 283943 - DNA, 120 bp, Artificial Sequence
  ENSG00000130227_13 (sequence is synthesized)
ggacattgcagtgcaggagggaaggctgacatggctggtttacattattggagcagtgatcggtggccgggtttcttttgccagcactgatgagcaagacgccatggatggtgagcttgt

SEQ ID NO: 283944 - DNA, 120 bp, Artificial Sequence
  ENSG00000130227_14 (sequence is synthesized)
ctgtcgggtgctccagctgatgaacctaacagattctcgtttggcccaggcgggtaatgagaagctagagttggccatgctgagcttttttgaacagtttcgtaagatctacattgggga

SEQ ID NO: 283945 - DNA, 120 bp, Artificial Sequence
  ENSG00000130227_15 (sequence is synthesized)
ccaagtgcagaaatcctctaagctgtaccgccgactctcagaagttctgggcttgaatgatgagaccatggtcctaagcgtcttcataggaaaaatcatcaccaacttgaagtactgggg

SEQ ID NO: 283946 - DNA, 120 bp, Artificial Sequence
  ENSG00000130227_16 (sequence is synthesized)
ccgttgtgaaccaatcacctccaagacactacagcttctcaatgacctgtccattgggtacagtagcgtaaggaagctagtgaagcttagtgcggtacagttcatgctgaacaatcacac

SEQ ID NO: 283947 - DNA, 120 bp, Artificial Sequence
  ENSG00000130227_17 (sequence is synthesized)
gagcgagcacttttcatttttgggtattaacaatcagtccaacctgacagacatgcggtgtcggactaccttctacacagcacttgggcgtctcctcatggtggatttaggagaggatga

SEQ ID NO: 283948 - DNA, 120 bp, Artificial Sequence
  ENSG00000130227_18 (sequence is synthesized)
agatcagtatgagcagttcatgctgccactcacagcagcatttgaggctgtggcccagatgtttagcaccaatagtttcaacgagcaggaggcaaagcgaactctagttggcctagtaag

SEQ ID NO: 283949 - DNA, 120 bp, Artificial Sequence
  ENSG00000130227_19 (sequence is synthesized)
agacctgagagggatcgctttcgctttcaatgccaagaccagcttcatgatgctctttgaatggatatatccatcctatatgccaattctccaacgggcaattgagctctggtaccatga

SEQ ID NO: 283950 - DNA, 120 bp, Artificial Sequence
  ENSG00000130227_20 (sequence is synthesized)
tttgatgtctcttcccccaatggcatcttactcttccgagaaaccagcaagatgataacaatgtatggcaatcgcatcctgacactaggagaggtcccaaaggatcaggtctatgctctg

SEQ ID NO: 283951 - DNA, 120 bp, Artificial Sequence
  ENSG00000130227_21 (sequence is synthesized)
aagctcaagggcatctccatctgcttctccatgctgaaggctgctctcagtgggagttacgtcaatttcggagtctttcgtctctatggagacgatgccctggacaatgctctgcagacc

SEQ ID NO: 283952 - DNA, 120 bp, Artificial Sequence
  ENSG00000130227_22 (sequence is synthesized)
ttcatcaagctgctcctctctattcctcacagtgatctcttggattaccccaagctcagccagtcttattattcactactggaagtcctgacccaggaccatatgaactttattgcaagc

SEQ ID NO: 283953 - DNA, 120 bp, Artificial Sequence
  ENSG00000130227_23 (sequence is synthesized)
ctggaacctcacgtcatcatgtatattctctcttccatttctgaaggacttactgcacttgacaccatggtatgcacaggctgctgctcctgcctggaccacattgtgacatacctcttc

SEQ ID NO: 283954 - DNA, 120 bp, Artificial Sequence
  ENSG00000130227_24 (sequence is synthesized)
aagcagctgtcacgtagcaccaagaagaggaccacacccctgaaccaggagagcgaccgctttctgcacatcatgcagcagcatccagagatgatccagcagatgctgtccacggtgctg

SEQ ID NO: 283955 - DNA, 120 bp, Artificial Sequence
  ENSG00000130227_25 (sequence is synthesized)
aacatcatcatctttgaagactgtaggaaccagtggtctatgtcccgaccactacttggcttgatattgcttaatgaaaagtatttttctgacctaagaaacagtattgtgaacagccag

SEQ ID NO: 283956 - DNA, 120 bp, Artificial Sequence
  ENSG00000130227_26 (sequence is synthesized)
ccaccggagaagcagcaggccatgcacctgtgttttgagaacctgatggaaggcatcgagcgaaatcttcttacgaaaaacagagacaggttcacccagaacctgtcagcattccgtcga

SEQ ID NO: 283957 - DNA, 120 bp, Artificial Sequence
  ENSG00000130227_27 (sequence is synthesized)
gaagtcaacgactcaatgaagaattccacttatggcgtgaatagcaatgacatgatgagctgacacctccttggactctacctgtacagagcagcgtccctttggtttggcccagagggg

SEQ ID NO: 283958 - DNA, 120 bp, Artificial Sequence
  ENSG00000130227_28 (sequence is synthesized)
cgaacaattgcaagggagagggcctggctgatcctggctcttttctccaggggtgtggggaaaatggcaaaggtcaactagctgcttccccagggaataggggtgtgagtacactcacta

SEQ ID NO: 283959 - DNA, 120 bp, Artificial Sequence
  ENSG00000130227_29 (sequence is synthesized)
gggggcagggcgctgctggttcctgggggactgggtgggaagggtggtgggaggagataagagatacaaactgagactccagcctctcctcctggggccacccaagtggggagaacccct

SEQ ID NO: 283960 - DNA, 120 bp, Artificial Sequence
  ENSG00000130227_30 (sequence is synthesized)
agtgtcctgccacaacctgccttgtataaacatgtacattttttcataacattttgaacaaggtttatattgactcaagtttaaaaacaaaaagtgtgactgaaaaatttttacagagtc

SEQ ID NO: 283961 - DNA, 120 bp, Artificial Sequence
  ENSG00000130227_31 (sequence is synthesized)
tagtgcaccaatgctgatgtgaggggttgtgtatgcgagtgaagaaaatgtgtattctggtggcctgaagctttactggacaaggatgtgtgagagtgcagagatatatttagtgacaca

SEQ ID NO: 283962 - DNA, 120 bp, Artificial Sequence
  ENSG00000130227_32 (sequence is synthesized)
gtagagaggcaaaaaaaaagctaaaattccaaatgtatattttttcgtattgccctgtcctcacccagaaatgatcaattcctgttactgtattaacccttgttattaggaactctaagc

SEQ ID NO: 283963 - DNA, 120 bp, Artificial Sequence
  ENSG00000130227_33 (sequence is synthesized)
catgccagaacaccgtccctccccttggaccgtgtagattctgccctgggtccctagccccttgcagtgataaataactccagctaaaagtgtttggtgttcttatctccaccctctttc

SEQ ID NO: 283964 - DNA, 120 bp, Artificial Sequence
  ENSG00000130227_34 (sequence is synthesized)
ctactttgcttaccctcatcctcagacagatgcctcttgcttttaaaagttggatttaacgacgtgttgtagggttcttggtctgtgtgaaggcagagaccagagagaaggaagtgagcc

SEQ ID NO: 283965 - DNA, 120 bp, Artificial Sequence
  ENSG00000130227_35 (sequence is synthesized)
cactgctctcctgggagcaatgtgggtgagtccaccagaggccctgctgtgtgtggccaataaattttagtcttccccagccctcgaggcagtgtgtgtggatgtatgcgtgtggatatt

SEQ ID NO: 283966 - DNA, 120 bp, Artificial Sequence
  ENSG00000130227_36 (sequence is synthesized)
tatatatgtaccctgcactcatgaatgtatgaactggaggaagttactacagtggaagggttcttaataacaaggtctacctagcatgaagtatttaacattctcccatcccttaaaaaa

SEQ ID NO: 283967 - DNA, 120 bp, Artificial Sequence
  ENSG00000130227_37 (sequence is synthesized)
tatacatttttataaaatgaaaaccataataaatgttttgaatattaaaaaaaataataacctacagaggaaaattaatggagacagctatttgccttgtactttttccacaattgttgc

SEQ ID NO: 283968 - DNA, 120 bp, Artificial Sequence
  ENSG00000130227_38 (sequence is synthesized)
tgctagttgtacacatctctagttcagctcttgcccacgggacactcatcaattaggttttatttttatttctttcctctacccccagaaacaagcctgttaattttttttccttctcct

SEQ ID NO: 283969 - DNA, 120 bp, Artificial Sequence
  ENSG00000130227_39 (sequence is synthesized)
ctggcgactgtgtgatgaatcctttcttgcgtgatcaggttgcggatagacttgtaagggtgtttgctgcatacagtgtaagcattgtgaccgccaataaacttcaatggtttctactga

SEQ ID NO: 283970 - DNA, 120 bp, Artificial Sequence
  ENSG00000130227_40 (sequence is synthesized)
cattggtaagtgaagttcaaaccaattttaagaacaagaaaggaaatgaatatcttagaagaaaaggtaaccttgaaatagaagactcagatgaagcttcacaaactatttgtctgattt

SEQ ID NO: 283971 - DNA, 120 bp, Artificial Sequence
  ENSG00000130227_41 (sequence is synthesized)
tgtcttcagagttggagctcctaattggcccttttttatttttttttttacgttatacccctttggttacatttttccctttttaggagctcaatttatcaaagcacacactaggagcca

SEQ ID NO: 283972 - DNA, 120 bp, Artificial Sequence
  ENSG00000130227_42 (sequence is synthesized)
aatatattacccagggctgtgtgcagagtgacattttgcctcctaccaactgtcccaaccctaaacactcatatccatgagctggtttaataatttaagatggaaaaagcaaagggggtc

SEQ ID NO: 283973 - DNA, 120 bp, Artificial Sequence
  ENSG00000130227_43 (sequence is synthesized)
taaaggactctgccagccaagaatccagaagcaagggctactagaattctgcagctgacagtggatggtgcaggtgcagaattgcatacgtctgcatgttatcactgccgcagaaatctc

SEQ ID NO: 283974 - DNA, 120 bp, Artificial Sequence
  ENSG00000130227_44 (sequence is synthesized)
ttacccttgctgcagaaatcagccctggagtgccccagaattccaagggcctgggtatgggccagtgtagctttggaaccaagtagtgaagattatctgaaggataatttttctagtcaa

SEQ ID NO: 283975 - DNA, 120 bp, Artificial Sequence
  ENSG00000130227_45 (sequence is synthesized)
cgtgatgtctgtgaattggtggtgcagatgtgtggtgacttttgatgaatgactttcttcttctcccagccctcaaggaaaccagcaaatcaaaagggtctcctgcttttttttttcttt

SEQ ID NO: 283976 - DNA, 120 bp, Artificial Sequence
  ENSG00000130227_46 (sequence is synthesized)
ggtcccgggtattgctacagcaaagacggtggtcctgattcccacgatactgccagattatacttacgtcatcagagtggctctttgagatccagatgatgtgagttatggtgaagtcac

SEQ ID NO: 283977 - DNA, 120 bp, Artificial Sequence
  ENSG00000130227_47 (sequence is synthesized)
atgcagagggagtcagtacttttatgaatatacatcgtgctatttgctgtttcccgtaaagaaatatctcttaatgtgatctcccacattttcgaagcataaaggttgtcattcctgtga

SEQ ID NO: 283978 - DNA, 120 bp, Artificial Sequence
  ENSG00000130227_48 (sequence is synthesized)
aagtcaggatgcatcaaagcaatcttcacagcatttgtcgctccaacgaagcgagacaagaagtttctccatggattataggcaatttttcaggaacagaaaatagacattcttctctgg

SEQ ID NO: 283979 - DNA, 120 bp, Artificial Sequence
  ENSG00000130227_49 (sequence is synthesized)
attgctactaatacctgttgggataataaagggacccccttgagttcccctgggtttgctcctctttcatcccatcttcccatatatgcacagctttgaattcttggtattggggttaca

SEQ ID NO: 283980 - DNA, 120 bp, Artificial Sequence
  ENSG00000130227_50 (sequence is synthesized)
tgttcaatgatatgctgagattgctaaccatacaaaatgtctagaatccagttcgtttccagaatttggggcttatgaaagtgaagggcccgacgcaataacttctggataaagcctaag

SEQ ID NO: 283981 - DNA, 120 bp, Artificial Sequence
  ENSG00000130227_51 (sequence is synthesized)
tcctcccttttgttatcgggagatttcttcattcatcttttctttactgccactaataactaagaaaaacattgttaatgattttgaattctgtgtagaccacgttctttagctacctag

SEQ ID NO: 283982 - DNA, 120 bp, Artificial Sequence
  ENSG00000130234_0 (sequence is synthesized)
cgcccaacccaagttcaaaggctgataagagagaaaatctcatgaggaggttttagtctagggaaagtcattcagtggatgtgatcttggctcacaggggacgatgtcaagctcttcctg

SEQ ID NO: 283983 - DNA, 120 bp, Artificial Sequence
  ENSG00000130234_1 (sequence is synthesized)
gctccttctcagccttgttgctgtaactgctgctcagtccaccattgaggaacaggccaagacatttttggacaagtttaaccacgaagccgaagacctgttctatcaaagttcacttgc

SEQ ID NO: 283984 - DNA, 120 bp, Artificial Sequence
  ENSG00000130234_2 (sequence is synthesized)
ttcttggaattataacaccaatattactgaagagaatgtccaaaacatgaataatgctggggacaaatggtctgcctttttaaaggaacagtccacacttgcccaaatgtatccactaca

SEQ ID NO: 283985 - DNA, 120 bp, Artificial Sequence
  ENSG00000130234_3 (sequence is synthesized)
agaaattcagaatctcacagtcaagcttcagctgcaggctcttcagcaaaatgggtcttcagtgctctcagaagacaagagcaaacggttgaacacaattctaaatacaatgagcaccat

SEQ ID NO: 283986 - DNA, 120 bp, Artificial Sequence
  ENSG00000130234_4 (sequence is synthesized)
ctacagtactggaaaagtttgtaacccagataatccacaagaatgcttattacttgaaccaggtttgaatgaaataatggcaaacagtttagactacaatgagaggctctgggcttggga

SEQ ID NO: 283987 - DNA, 120 bp, Artificial Sequence
  ENSG00000130234_5 (sequence is synthesized)
aagctggagatctgaggtcggcaagcagctgaggccattatatgaagagtatgtggtcttgaaaaatgagatggcaagagcaaatcattatgaggactatggggattattggagaggaga

SEQ ID NO: 283988 - DNA, 120 bp, Artificial Sequence
  ENSG00000130234_6 (sequence is synthesized)
ctatgaagtaaatggggtagatggctatgactacagccgcggccagttgattgaagatgtggaacatacctttgaagagattaaaccattatatgaacatcttcatgcctatgtgagggc

SEQ ID NO: 283989 - DNA, 120 bp, Artificial Sequence
  ENSG00000130234_7 (sequence is synthesized)
aaagttgatgaatgcctatccttcctatatcagtccaattggatgcctccctgctcatttgcttggtgatatgtggggtagattttggacaaatctgtactctttgacagttccctttgg

SEQ ID NO: 283990 - DNA, 120 bp, Artificial Sequence
  ENSG00000130234_8 (sequence is synthesized)
acagaaaccaaacatagatgttactgatgcaatggtggaccaggcctgggatgcacagagaatattcaaggaggccgagaagttctttgtatctgttggtcttcctaatatgactcaagg

SEQ ID NO: 283991 - DNA, 120 bp, Artificial Sequence
  ENSG00000130234_9 (sequence is synthesized)
attctgggaaaattccatgctaacggacccaggaaatgttcagaaagcagtctgccatcccacagcttgggacctggggaagggcgacttcaggatccttatgtgcacaaaggtgacaat

SEQ ID NO: 283992 - DNA, 120 bp, Artificial Sequence
  ENSG00000130234_10 (sequence is synthesized)
ggacgacttcctgacagctcatcatgagatggggcatatccagtatgatatggcatatgctgcacaaccttttctgctaagaaatggagctaatgaaggattccatgaagctgttgggga

SEQ ID NO: 283993 - DNA, 120 bp, Artificial Sequence
  ENSG00000130234_11 (sequence is synthesized)
aatcatgtcactttctgcagccacacctaagcatttaaaatccattggtcttctgtcacccgattttcaagaagacaatgaaacagaaataaacttcctgctcaaacaagcactcacgat

SEQ ID NO: 283994 - DNA, 120 bp, Artificial Sequence
  ENSG00000130234_12 (sequence is synthesized)
tgttgggactctgccatttacttacatgttagagaagtggaggtggatggtctttaaaggggaaattcccaaagaccagtggatgaaaaagtggtgggagatgaagcgagagatagttgg

SEQ ID NO: 283995 - DNA, 120 bp, Artificial Sequence
  ENSG00000130234_13 (sequence is synthesized)
ggtggtggaacctgtgccccatgatgaaacatactgtgaccccgcatctctgttccatgtttctaatgattactcattcattcgatattacacaaggaccctttaccaattccagtttca

SEQ ID NO: 283996 - DNA, 120 bp, Artificial Sequence
  ENSG00000130234_14 (sequence is synthesized)
ccctctgcacaaatgtgacatctcaaactctacagaagctggacagaaactgttcaatatgctgaggcttggaaaatcagaaccctggaccctagcattggaaaatgttgtaggagcaaa

SEQ ID NO: 283997 - DNA, 120 bp, Artificial Sequence
  ENSG00000130234_15 (sequence is synthesized)
gaacatgaatgtaaggccactgctcaactactttgagcccttatttacctggctgaaagaccagaacaagaattcttttgtgggatggagtaccgactggagtccatatgcagaccaaag

SEQ ID NO: 283998 - DNA, 120 bp, Artificial Sequence
  ENSG00000130234_16 (sequence is synthesized)
catcaaagtgaggataagcctaaaatcagctcttggagataaagcatatgaatggaacgacaatgaaatgtacctgttccgatcatctgttgcatatgctatgaggcagtactttttaaa

SEQ ID NO: 283999 - DNA, 120 bp, Artificial Sequence
  ENSG00000130234_17 (sequence is synthesized)
agtaaaaaatcagatgattctttttggggaggaggatgtgcgagtggctaatttgaaaccaagaatctcctttaatttctttgtcactgcacctaaaaatgtgtctgatatcattcctag

SEQ ID NO: 284000 - DNA, 120 bp, Artificial Sequence
  ENSG00000130234_18 (sequence is synthesized)
aactgaagttgaaaaggccatcaggatgtcccggagccgtatcaatgatgctttccgtctgaatgacaacagcctagagtttctggggatacagccaacacttggacctcctaaccagcc

SEQ ID NO: 284001 - DNA, 120 bp, Artificial Sequence
  ENSG00000130234_19 (sequence is synthesized)
ccctgtttccatatggctgattgtttttggagttgtgatgggagtgatagtggttggcattgtcatcctgatcttcactgggatcagagatcggaagaagaaaaataaagcaagaagtgg

SEQ ID NO: 284002 - DNA, 120 bp, Artificial Sequence
  ENSG00000130234_20 (sequence is synthesized)
agaaaatccttatgcctccatcgatattagcaaaggagaaaataatccaggattccaaaacactgatgatgttcagacctccttttagaaaaatctatgtttttcctcttgaggtgattt

SEQ ID NO: 284003 - DNA, 120 bp, Artificial Sequence
  ENSG00000130234_21 (sequence is synthesized)
tgttgtatgtaaatgttaatttcatggtatagaaaatataagatgataaagatatcattaaatgtcaaaactatgactctgttcagaaaaaaaattgtccaaagacaacatggccaagga

SEQ ID NO: 284004 - DNA, 120 bp, Artificial Sequence
  ENSG00000130234_22 (sequence is synthesized)
gagagcatcttcattgacattgctttcagtatttatttctgtctctggatttgacttctgttctgtttcttaataaggattttgtattagagtatattagggaaagtgtgtatttggtct

SEQ ID NO: 284005 - DNA, 120 bp, Artificial Sequence
  ENSG00000130234_23 (sequence is synthesized)
cacaggctgttcagggataatctaaatgtaaatgtctgttgaatttctgaagttgaaaacaaggatatatcattggagcaagtgttggatcttgtatggaatatggatggatcacttgta

SEQ ID NO: 284006 - DNA, 120 bp, Artificial Sequence
  ENSG00000130234_24 (sequence is synthesized)
aggacagtgcctgggaactggtgtagctgcaaggattgagaatggcatgcattagctcactttcatttaatccattgtcaaggatgacatgctttcttcacagtaactcagttcaagtac

SEQ ID NO: 284007 - DNA, 120 bp, Artificial Sequence
  ENSG00000130234_25 (sequence is synthesized)
tatggtgatttgcctacagtgatgtttggaatcgatcatgctttcttcaaggtgacaggtctaaagagagaagaatccagggaacaggtagaggacattgctttttcacttccaaggtgc

SEQ ID NO: 284008 - DNA, 120 bp, Artificial Sequence
  ENSG00000130234_26 (sequence is synthesized)
ttgatcaacatctccctgacaacacaaaactagagccaggggcctccgtgaactcccagagcatgcctgatagaaactcatttctactgttctctaactgtggagtgaatggaaattcca

SEQ ID NO: 284009 - DNA, 120 bp, Artificial Sequence
  ENSG00000130234_27 (sequence is synthesized)
actgtatgttcaccctctgaagtgggtacccagtctcttaaatcttttgtatttgctcacagtgtttgagcagtgctgagcacaaagcagacactcaataaatgctagatttacacactc

SEQ ID NO: 284010 - DNA, 120 bp, Artificial Sequence
  ENSG00000130234_28 (sequence is synthesized)
catacactctggcaatgaggacactgagctcgcttctgaaatttgacaagataaccactaaaatctctttgaattctatgttgttgtgatcccatggctacagaggatcaggagttgaca

SEQ ID NO: 284011 - DNA, 120 bp, Artificial Sequence
  ENSG00000130234_29 (sequence is synthesized)
gtttgccacaatcctgggccaccgattattccttgttgattctcctgctgttttcagtttggaaattttctataattgaaaaagatgtgggttttatataaaggcagaacaaatagtgcc

SEQ ID NO: 284012 - DNA, 120 bp, Artificial Sequence
  ENSG00000130234_30 (sequence is synthesized)
aaaacttgatatcacaatttttatgtagttgatttcatgtgctttgggcagcattaatgttttttttgacaattacatcctctcattgtttgccctcccccatgtctctctatcctgtga

SEQ ID NO: 284013 - DNA, 120 bp, Artificial Sequence
  ENSG00000130234_31 (sequence is synthesized)
ttctctctctaatctccttttcaccagcaggggaagtcttcattctcttgattgtgtcctctgtgccacaagtgaagatgtttgttttgtttctctacagggaggaggatgtgcgagtgg

SEQ ID NO: 284014 - DNA, 120 bp, Artificial Sequence
  ENSG00000130244_0 (sequence is synthesized)
gcgccgagaccacactttcatggaggcggtgaaggcggaagcgtgggagggggccgcggtggcccaggacctgctggctctggggtatggaggtgtcccgggggcggcgtcgcggggcgc

SEQ ID NO: 284015 - DNA, 120 bp, Artificial Sequence
  ENSG00000130244_1 (sequence is synthesized)
ctcatgcccagacttcagggggctgtgcgtgcggctggcggcggagctggcgacgctgggcgccctcgagcagcagcgagaggcgggcgcggaggtgctgagcgccggcgacggccctgg

SEQ ID NO: 284016 - DNA, 120 bp, Artificial Sequence
  ENSG00000130244_2 (sequence is synthesized)
cgcggaggaggactttctgcggcagctcggcagcctgctgcgggagctgcactgcccggatcgcgcgctctgcggcggggatggcgcggctgcgcttcgggaacccggtgccggactgcg

SEQ ID NO: 284017 - DNA, 120 bp, Artificial Sequence
  ENSG00000130244_3 (sequence is synthesized)
cctgctgcgctttctctgctcagagctccaagccacccgcctcctgtgcctccgctctctgctggatccgagtcctaggccaccccttggtgaaggggtagtggagggagccggcatggt

SEQ ID NO: 284018 - DNA, 120 bp, Artificial Sequence
  ENSG00000130244_4 (sequence is synthesized)
ccaagaactggaccttaccctccaagccctggggctgcccagacctgcaccagggacccccgccagccagctgctgcaggagttgcatgctaagatctcagagctgcagccttctctgcc

SEQ ID NO: 284019 - DNA, 120 bp, Artificial Sequence
  ENSG00000130244_5 (sequence is synthesized)
cccaaagcctcagagatcagtaccgctgccgccgctgcctcctcctcaagcgccttgacctcactacatctgctttccactggagtgaccgggcagaggcccaaggagaggccatgaggg

SEQ ID NO: 284020 - DNA, 120 bp, Artificial Sequence
  ENSG00000130244_6 (sequence is synthesized)
cagtgctgatcccaattcgagaggttctgaccccagaatcggacatctccattgcacacgttctggctgcccgagccgacctgtcttgtctcgtcccagccaccagcgtggctgtccgca

SEQ ID NO: 284021 - DNA, 120 bp, Artificial Sequence
  ENSG00000130244_7 (sequence is synthesized)
gagggacctgctgtgccatcaacaaggtgcttatgggcaacgttccagaccgggggggccgcccaaatgagctggagcctcccatgcccacctggaggagccgaagagaggatggaggcc

SEQ ID NO: 284022 - DNA, 120 bp, Artificial Sequence
  ENSG00000130244_8 (sequence is synthesized)
cccagtgttggggtcgcaagaagaagaagaagaagtaaagggggactggtggtcgggggcggggggtcctccatgagatgctaatgctatcggtaatctctggggagtccgtttaaggct

SEQ ID NO: 284023 - DNA, 120 bp, Artificial Sequence
  ENSG00000130244_9 (sequence is synthesized)
ttccttggtatttggcacccaagccccccatctcctattcctgagtccccaaatgccctgctcccattcacgtcaataccaagaaccatgttctccagagaataaatttaatttatgaca

SEQ ID NO: 284024 - DNA, 120 bp, Artificial Sequence
  ENSG00000130244_10 (sequence is synthesized)
caccacactccaggctgggtgacagcgagaccctgtctcaaaaaataaatatttatttgagctgtgggcagtgaggtcttgaatggtaaagtaatgcttccaagatgacaggtcccacgt

SEQ ID NO: 284025 - DNA, 120 bp, Artificial Sequence
  ENSG00000130244_11 (sequence is synthesized)
ggcctaggtcctcaggggtgtggggagctgagtttacagaggggcccatcctctctgccccagttggcctctgacttcttctcccatcagatctcagagctgcagccttctctgccccca

SEQ ID NO: 284026 - DNA, 120 bp, Artificial Sequence
  ENSG00000130244_12 (sequence is synthesized)
aggcccagttgtgggggctgcagttgcagggaggaggaatgagggccaggagtatcaccctcttgcaggttctcaggccatggacattttataattttttgaggtttggggctcctagaa

SEQ ID NO: 284027 - DNA, 120 bp, Artificial Sequence
  ENSG00000130244_13 (sequence is synthesized)
ttttgaggtttggggctcctagaatctcagggtcccagggtattgttgaattcccagctctgagctggcagtatattcagaggcataccccatcattttttttttttttttgagacgggg

SEQ ID NO: 284028 - DNA, 120 bp, Artificial Sequence
  ENSG00000130244_14 (sequence is synthesized)
gcggaagcgtgggagggggccgcggtggcccaggacctgctggctctggggtaaaagggtgtgcggtgaggctggtgggtgcaggaaggccaggtctgccccctggacgcggacgaaaag

SEQ ID NO: 284029 - DNA, 70 bp, Artificial Sequence
  ENSG00000130244_15 (sequence is synthesized)
attttttattttttgagacggagttttgcttttgttggccacgctggagtgcaatggtgcgatcttggct

SEQ ID NO: 284030 - DNA, 120 bp, Artificial Sequence
  ENSG00000130244_16 (sequence is synthesized)
caggtgatctgcctgccttggccttccaaggttctgggattgcaggcatgagccaccacgcctggccaagtgtaccccatctttaagagatacgagcagagtcaggcacagtggctcatg

SEQ ID NO: 284031 - DNA, 87 bp, Artificial Sequence
  ENSG00000130244_17 (sequence is synthesized)
tcagaagtttgagaccaccttgggcaacatagcaagacccccgtctctactaaaaattaaaaaaaaaaaaattagctgggcatggtg

SEQ ID NO: 284032 - DNA, 120 bp, Artificial Sequence
  ENSG00000130244_18 (sequence is synthesized)
taccacctctaatccacccactagacatggcagctagaaggacctcgctcacacaaaaactgactgtggactccccagctcagaatgcttccgtggctccctaatgatctgaaaacaaag

SEQ ID NO: 284033 - DNA, 120 bp, Artificial Sequence
  ENSG00000130244_19 (sequence is synthesized)
tctagctatttactgagtccctggctacttctccagcttgggcttaaaatccttccctatcaccaaacactacctatttgttgttttttaacctttttttttttcaagacagagtcttgc

SEQ ID NO: 284034 - DNA, 86 bp, Artificial Sequence
  ENSG00000130244_20 (sequence is synthesized)
tgtgatctacccgccgaaaccgcacccttttaaccatttaaaaaaaaaaaacaaagacagaaataggccaggcacagtggctcacg

SEQ ID NO: 284035 - DNA, 120 bp, Artificial Sequence
  ENSG00000130244_21 (sequence is synthesized)
aaaaaacagaaataccctctgttttagtgattaggtatctagccgcatgcctctgtaagtagtcttatgtaaaatgagtattagggaataaagtctaacacagcaactattgaggcaaaa

SEQ ID NO: 284036 - DNA, 120 bp, Artificial Sequence
  ENSG00000130244_22 (sequence is synthesized)
tttaagttaagaaaaaaactgagcccgaggtgggtggatcacttgagcccaggagcagaggttgcagtgagccgggttctcgccactgagctccagcctgggcgacagagcctaggcgac

SEQ ID NO: 284037 - DNA, 72 bp, Artificial Sequence
  ENSG00000130244_23 (sequence is synthesized)
gaaaaaagaaagctcatgctagtatcttccaccagttcagtcccccctcccccagccactgtactcaaatag

SEQ ID NO: 284038 - DNA, 120 bp, Artificial Sequence
  ENSG00000130244_24 (sequence is synthesized)
cagttcagtcccccctcccccagccactgtactcaaatagtcaacatctgctgtttcttcttcagcctcatgctgttcccttcgctctctggcccccttgtccaagatactttttttctc

SEQ ID NO: 284039 - DNA, 120 bp, Artificial Sequence
  ENSG00000130254_0 (sequence is synthesized)
agagccgctatagctgccggcggtgtgcgactgagtcggtggcgaagacgggaacgcgacgatggcggagactctgcccgggtcgggcgactcgggccctggcacggcttctctcggccc

SEQ ID NO: 284040 - DNA, 120 bp, Artificial Sequence
  ENSG00000130254_1 (sequence is synthesized)
gggcgttgcggagactgggacgaggcggctcagcgagctgcgggtgatcgatctgcgggcggagctgaagaagcggaacctggacacgggcggcaacaagagcgtcctgatggagcggct

SEQ ID NO: 284041 - DNA, 120 bp, Artificial Sequence
  ENSG00000130254_2 (sequence is synthesized)
caagaaggcggttaaagaagaggggcaagatcctgatgaaattggcatcgagttagaagccaccagcaagaagtcagccaagagatgtgttaaaggactgaagatggaggaggaaggcac

SEQ ID NO: 284042 - DNA, 120 bp, Artificial Sequence
  ENSG00000130254_3 (sequence is synthesized)
agaagataatggcctggaagacgattccagagacgggcaggaggacatggaagcaagtctggagaacctgcagaatatgggcatgatggacatgagtgtgctagacgaaactgaagtggc

SEQ ID NO: 284043 - DNA, 120 bp, Artificial Sequence
  ENSG00000130254_4 (sequence is synthesized)
gaatagcagtgctccagattttggggaggatggcacggacggccttctcgattccttttgtgatagtaaagaatacgtggctgcacagctgagacagctcccggctcagcccccagagca

SEQ ID NO: 284044 - DNA, 120 bp, Artificial Sequence
  ENSG00000130254_5 (sequence is synthesized)
tgctgtggatggggaaggatttaagaacactttggaaacttcatcgttgaacttcaaagtaactccggacattgaagaatcccttttggagccagaaaatgagaaaatactcgacatttt

SEQ ID NO: 284045 - DNA, 120 bp, Artificial Sequence
  ENSG00000130254_6 (sequence is synthesized)
gggggaaacttgtaaatctgagccagtaaaagaagaaagttccgagctggagcagccatttgcacaggacacaagtagcgtggggccagacagaaagcttgcggaggaagaggacctatt

SEQ ID NO: 284046 - DNA, 120 bp, Artificial Sequence
  ENSG00000130254_7 (sequence is synthesized)
tgacagcgcccatccggaagagggtgatttagatttggccagcgagtcaacagcacacgctcagtcgagcaaggcagacagcctgttagcggtagtgaaaagggagcccgcggagcagcc

SEQ ID NO: 284047 - DNA, 120 bp, Artificial Sequence
  ENSG00000130254_8 (sequence is synthesized)
aggcgatggcgagaggacggactgtgagcctgtagggctagagccggcagttgagcagagtagtgcggcctccgagctcgcggaggcctctagcgaggagctcgcagaagcacccacgga

SEQ ID NO: 284048 - DNA, 120 bp, Artificial Sequence
  ENSG00000130254_9 (sequence is synthesized)
agccccaagcccagaagccagagatagcaaagaagacgggaggaagtttgattttgacgcttgtaatgaagtccctccggctcctaaagagtcctcaaccagtgagggcgctgatcagaa

SEQ ID NO: 284049 - DNA, 120 bp, Artificial Sequence
  ENSG00000130254_10 (sequence is synthesized)
aatgagctcttttaaggaagaaaaagatataaagccaatcattaaagatgaaaaaggtcgggtcggcagcggttctggtcggaacctgtgggtcagcgggctgtcctccacaacacgcgc

SEQ ID NO: 284050 - DNA, 120 bp, Artificial Sequence
  ENSG00000130254_11 (sequence is synthesized)
tacggatctcaagaaccttttcagcaagtatgggaaggttgtcggggccaaagtggtaacgaacgcccgcagcccgggggctcgatgctatggattcgtcaccatgtcgacatctgacga

SEQ ID NO: 284051 - DNA, 120 bp, Artificial Sequence
  ENSG00000130254_12 (sequence is synthesized)
ggcgaccaagtgcatcagccatctccacagaactgagctgcatggacgaatgatctccgtagagaaggccaaaaatgagcctgctgggaaaaagctttccgacagaaaagagtgcgaagt

SEQ ID NO: 284052 - DNA, 120 bp, Artificial Sequence
  ENSG00000130254_13 (sequence is synthesized)
tcaaaattgaaaaaactgtaattaagaaggaagagaagattgagaagaaggaggaaaaaaagcctgaagacattaagaaggaagaaaaagaccaggatgagctgaaacccggacctacaa

SEQ ID NO: 284053 - DNA, 120 bp, Artificial Sequence
  ENSG00000130254_14 (sequence is synthesized)
atcggtctagagtcaccaaatcaggaagcagaggaatggagcggacggtcgtgatggataaatcgaaaggagagcccgtcattagcgtgaaaaccacaagcaggtccaaagagagaagct

SEQ ID NO: 284054 - DNA, 120 bp, Artificial Sequence
  ENSG00000130254_15 (sequence is synthesized)
ccaagagtcaggatcgcaagtcagaaagcaaagaaaagagagacatcttgtcgtttgataaaatcaaagaacaaagggagagagagcgccagaggcagcgggaacgggagatccgcgaaa

SEQ ID NO: 284055 - DNA, 120 bp, Artificial Sequence
  ENSG00000130254_16 (sequence is synthesized)
cggagaggcggcgggagcgcgagcagcgggagcgggagcaacgcctcgaggccttccatgagcggaaggagaaggcccggctacagcgggaacgcctgcagctcgagtgccagcgccagc

SEQ ID NO: 284056 - DNA, 120 bp, Artificial Sequence
  ENSG00000130254_17 (sequence is synthesized)
ggctggagcgggagcgcatggagcgggagcggctggagcgcgagcgcatgcgcgtggagcgtgagcgcaggaaggagcaggagcgcatccaccgcgagcgcgaggagctgcggcgccagc

SEQ ID NO: 284057 - DNA, 120 bp, Artificial Sequence
  ENSG00000130254_18 (sequence is synthesized)
aggagcagctgcgttacgagcaggagcggcggcccgggcggaggccctacgacctggaccgacgagatgatgcctattggccagaaggaaagcgtgtggcaatggaggaccgatatcgtg

SEQ ID NO: 284058 - DNA, 120 bp, Artificial Sequence
  ENSG00000130254_19 (sequence is synthesized)
cagactttccccggccagaccaccgctttcacgacttcgatcatcgagaccggggccagtaccaggaccacgccatcgacaggcgggagggttcgaggccaatgatgggagaccaccggg

SEQ ID NO: 284059 - DNA, 120 bp, Artificial Sequence
  ENSG00000130254_20 (sequence is synthesized)
atgggcagcactatggagatgaccgccatggccacggaggacccccagagcgccacggccgggactcccgtgatggctgggggggctacggctccgacaagaggctgagtgaaggccggg

SEQ ID NO: 284060 - DNA, 120 bp, Artificial Sequence
  ENSG00000130254_21 (sequence is synthesized)
ggctgccccctccccccaggggtggccgtgactggggagagcacaaccagcggctagaggagcaccaggcacgcgcctggcagggtgccatggacgcaggcgcggctagccgggagcacg

SEQ ID NO: 284061 - DNA, 120 bp, Artificial Sequence
  ENSG00000130254_22 (sequence is synthesized)
ccaggtggcaaggtggcgagaggggcctgtctgggccctcggggccggggcacatggcaagccgcggtggagtggcggggcgaggcggctttgcacaaggtggacattcccagggccacg

SEQ ID NO: 284062 - DNA, 120 bp, Artificial Sequence
  ENSG00000130254_23 (sequence is synthesized)
tggtgccaggtggcggactggaaggtggcggagtggccagccaggaccggggcagcagagtccctcacccacaccctcatccccccccgtacccccacttcacccgccgctactaagtcc

SEQ ID NO: 284063 - DNA, 120 bp, Artificial Sequence
  ENSG00000130254_24 (sequence is synthesized)
cactcgctgcgagttttcgggtgggcagacgcactgttgaatctggtagccagggttccctcgaacttgggggatctttttaaaagcaaagtaaatcctgccaccatgttgtagctcaat

SEQ ID NO: 284064 - DNA, 120 bp, Artificial Sequence
  ENSG00000130254_25 (sequence is synthesized)
acaatgtgaactcactttttttttttttttaaataaatgtgttcttgttctgccatttttaaatcaaggtttctgttaacgaggcattccattttccattaataaagtttaccattcgca

SEQ ID NO: 284065 - DNA, 120 bp, Artificial Sequence
  ENSG00000130254_26 (sequence is synthesized)
tgtgtgtgtgcgttaaattcttaagtcagcagttgggattgggcgtcgttagggtttttaaagagggctgcggtcttaagaatggttgtgcttcctgttaggccttggggtgatgcctaa

SEQ ID NO: 284066 - DNA, 120 bp, Artificial Sequence
  ENSG00000130254_27 (sequence is synthesized)
ctcaccggaggctgtgtagcatcttcctgaacttgagttattctgggaaacttgatggctgccacttgctgaaggacgagatgatgcctattggccagaaggaaagcgtgtggcaatgga

SEQ ID NO: 284067 - DNA, 120 bp, Artificial Sequence
  ENSG00000130254_28 (sequence is synthesized)
ccacagcaggcaggcactcgtgcagatgggtctggctgctttcctgcacggccactgtgactgcttggccacttgggactcaggacactggactcggattttcatctcccagagggtggc

SEQ ID NO: 284068 - DNA, 120 bp, Artificial Sequence
  ENSG00000130254_29 (sequence is synthesized)
cattatgaaaacagcactgttttgcctttaaaattgaagtttgtaggaggcgcgataattgtgtagattgcggatacagacacacacatgaatcctggtgctttctgcagagcagtgccc

SEQ ID NO: 284069 - DNA, 120 bp, Artificial Sequence
  ENSG00000130254_30 (sequence is synthesized)
atccgtgtttgcttcccttactggctcctgaccgggatgtgccgccttcagacagagcattggttcacacggcagctcaccatagggtgggatgggccagacccaggcttttcgagccgg

SEQ ID NO: 284070 - DNA, 120 bp, Artificial Sequence
  ENSG00000130254_31 (sequence is synthesized)
gccaggtatggttcccttattttgggaggaggggcctggagatatacacactttggattcagtaatttgttttgttatgggttaccggaatcaaccacctaatggtttcttgagagacta

SEQ ID NO: 284071 - DNA, 120 bp, Artificial Sequence
  ENSG00000130254_32 (sequence is synthesized)
gttttagaagttcgcaagcacctgcattttatgtttctcttgtggttgtcatctatgggatggtgaaaagcacattacaagaaaggaataattctgctcattgaagactgtttcaaggat

SEQ ID NO: 284072 - DNA, 120 bp, Artificial Sequence
  ENSG00000130254_33 (sequence is synthesized)
tttagagactgccgtcttggatgagatctgatcatcaaaagacatttcagttcataactgacatgggcatgattattccttgagtcgggtcggcagcggttctggtcggaacctgtgggt

SEQ ID NO: 284073 - DNA, 120 bp, Artificial Sequence
  ENSG00000130254_34 (sequence is synthesized)
gcttgatcccagagaggtggcaaccaagtcagcacgtgtggcgggtatgcaagtgtgggttctggccagcgactagaagtacaaatatttagtcggacgtggtggctcatgcctgtaatc

SEQ ID NO: 284074 - DNA, 120 bp, Artificial Sequence
  ENSG00000130254_35 (sequence is synthesized)
atattttaagctgtgttatgatcttgtaaattgctctaatggtggacaatccagatcatacaaggatcagagattggaaacccattcgtatcaccagatctgtggaagagccattctggc

SEQ ID NO: 284075 - DNA, 120 bp, Artificial Sequence
  ENSG00000130254_36 (sequence is synthesized)
ttcttgaggtcaaatacatttggtgcaatgtagtagtgattcttttcatgtctaaccacgtagagtggcatttaattcccccgtccccgtgattcctccatgtgtttctacacatgaaac

SEQ ID NO: 284076 - DNA, 120 bp, Artificial Sequence
  ENSG00000130254_37 (sequence is synthesized)
agatcttgtgatattttgctgcagtcattttgattaacgcagttaaggcaggataaagctgttgtcagggcacttaccacctgagaagtgactggattccagaagaggaaacagagtttc

SEQ ID NO: 284077 - DNA, 120 bp, Artificial Sequence
  ENSG00000130254_38 (sequence is synthesized)
tccgtgaaaattttcaacatattattccccttccggactgcgtttatctcccaccgtcagaagagattctgattttcatattggattgttctgttaaaagaaattcaaagaaatttggaa

SEQ ID NO: 284078 - DNA, 120 bp, Artificial Sequence
  ENSG00000130254_39 (sequence is synthesized)
gttgagctgtcattgaatggtgattgcattcggttcagcaccttggacattggaaaatcagtcagaagacccagacttgaacaaaaactcgaagaagactattgagaaccagccgcgtgg

SEQ ID NO: 284079 - DNA, 120 bp, Artificial Sequence
  ENSG00000130254_40 (sequence is synthesized)
ttgtaggtgtttaaatctgtgggggccttttctcttccgtgtagcgtagaggcttacctagaggcggtcgcggcgcaggtagtgtaaccagtataactttgtgtacccgcgggttttcca

SEQ ID NO: 284080 - DNA, 120 bp, Artificial Sequence
  ENSG00000130254_41 (sequence is synthesized)
atctctgtgtagctagcagttctcttcgtgttagtgtggcagccgtgccagttccacatttgtgattgctttatttccctggtaattaaaccttgtgccattctattcctgttaaatccg

SEQ ID NO: 284081 - DNA, 120 bp, Artificial Sequence
  ENSG00000130254_42 (sequence is synthesized)
aagctgtttttttctgcaattggccagccagactgacgaaattgtagttttgcttctaaagaatgtttcgtttctctttgtgtgtttttaatgggtgattcaattccttttctttttctc

SEQ ID NO: 284082 - DNA, 120 bp, Artificial Sequence
  ENSG00000130254_43 (sequence is synthesized)
aacctaccatggttgtgttcttaaattgttaattgttatcttcagctaaatcgaattgacttttacaaatctgacattgtatttttggggtcagattttccaatataagcttgcagaggt

SEQ ID NO: 284083 - DNA, 120 bp, Artificial Sequence
  ENSG00000130254_44 (sequence is synthesized)
gtctgttaaaattttatttcagactaattttctggtaggtattcagttttagcacataatcatatttttagttttgttctctttcgtttttttcctgtatgagtaacattaacttttgtc

SEQ ID NO: 284084 - DNA, 120 bp, Artificial Sequence
  ENSG00000130255_0 (sequence is synthesized)
ccttccgccacggccgtctctggagagcagcagccatggccctacgctaccctatggccgtgggcctcaacaagggccacaaagtgaccaagaacgtgagcaagcccaggcacagccgac

SEQ ID NO: 284085 - DNA, 120 bp, Artificial Sequence
  ENSG00000130255_1 (sequence is synthesized)
gccgcgggcgtctgaccaaacacaccaagttcgtgcgggacatgattcgggaggtgtgtggctttgccccgtacgagcggcgcgccatggagttactgaaggtctccaaggacaaacggg

SEQ ID NO: 284086 - DNA, 120 bp, Artificial Sequence
  ENSG00000130255_2 (sequence is synthesized)
atttatcaagaaaagggtggggacgcacatccgcgccaagaggaagcgggaggagctgagcaacgtactggccgccatgaggaaagctgctgccaagaaagactgagcccctcccctgcc

SEQ ID NO: 284087 - DNA, 120 bp, Artificial Sequence
  ENSG00000130255_3 (sequence is synthesized)
ctctccctgaaataaagaacagcttgacagaagccctggctctcctgctgtccgtgggtgggtgtgggtgtgtcgggggcccgcagtcccctgtctggtgcccgctctgagccacaccct

SEQ ID NO: 284088 - DNA, 120 bp, Artificial Sequence
  ENSG00000130255_4 (sequence is synthesized)
ctccgggtgctgcctggtcgtgaatcaaaagccgtggcccgcccacccttcccggggcagcaggtgaggaagccgccgtactgcaaatgactttaatcattaaatagcttctatgccaca

SEQ ID NO: 284089 - DNA, 120 bp, Artificial Sequence
  ENSG00000130255_5 (sequence is synthesized)
ggagagcagcaggtaagtggtttcccgcactgccggtatccgccgccatccggactcccgggtcctctgtgcaggttggaggatggttggttgtggcgagcgaggctgaaggagccggga

SEQ ID NO: 284090 - DNA, 120 bp, Artificial Sequence
  ENSG00000130255_6 (sequence is synthesized)
cgagaagagaggaccgtgggggcgttcgcgtggctcccagcccgggaccccacccccgctggacagtgggggaaactgaggcctgagcggagtgaccaccccggctatggccagccagcc

SEQ ID NO: 284091 - DNA, 120 bp, Artificial Sequence
  ENSG00000130255_7 (sequence is synthesized)
tccagggagcgcgagtgctgctgacaggggccaacgctggtgttggtgaggagctggcctatcactacgcgcgtctgggctcccacctggtgctcactgcccacactgaggctctcctgc

SEQ ID NO: 284092 - DNA, 120 bp, Artificial Sequence
  ENSG00000130255_8 (sequence is synthesized)
agaagggtcggcccgaaataggcggagttgggattcgaactcatttcacaggcagagggaggagagcagccatagccacctccactggttccgactccagctcccgggctcgcaggagta

SEQ ID NO: 284093 - DNA, 120 bp, Artificial Sequence
  ENSG00000130255_9 (sequence is synthesized)
ggccgtctctggagagcagcagccatggccctacgctaccctatggccgtgggcctcaacaagggccacaaagtgaccaagaacgtgagcaagcccaggcacagccgacgccgcggggtg

SEQ ID NO: 284094 - DNA, 120 bp, Artificial Sequence
  ENSG00000130255_10 (sequence is synthesized)
agtgcgggtgccgcgcggaggttgtcgggggtttcttggagggcggagggcatggcttgggcaaaggctctcgacctgaaagaacgcgcgttcgggcgcagaactaaggggggcttgaat

SEQ ID NO: 284095 - DNA, 120 bp, Artificial Sequence
  ENSG00000130255_11 (sequence is synthesized)
ggaagagatggggtgggggagtgggacttcctgcctggtgctcgaaggcgggcacccatctgggtttttcccaaccgtgcaatccacgctggggcagagggagcaccttgagagcggcgc

SEQ ID NO: 284096 - DNA, 120 bp, Artificial Sequence
  ENSG00000130255_12 (sequence is synthesized)
gtgtgtgaggttgagggatttcaggtgtgtcagtgtattgggcgcctttattaagcgggcagcgggtttggggttctgacgcaggagtaaggagttcgctcatggagctggcccgaggtt

SEQ ID NO: 284097 - DNA, 120 bp, Artificial Sequence
  ENSG00000130255_13 (sequence is synthesized)
gcggtgtgtgaggttgagggatttcaggtgtgtcagtgtattgggcgcctttattcagcaggcagcccagactccaggtgcgtcctgccagtgttgcggagactgggacttagggaggat

SEQ ID NO: 284098 - DNA, 120 bp, Artificial Sequence
  ENSG00000130255_14 (sequence is synthesized)
gggagctgctccgggcgcggcgaaaagcgctaggcgttaataccttggttctcacagctacccacagaggggaggaagtagccagggaaatcgcggcagcgcgagagaagctgcttaact

SEQ ID NO: 284099 - DNA, 120 bp, Artificial Sequence
  ENSG00000130255_15 (sequence is synthesized)
agaatgcagggatccccctaccctgacggccgcccctttcccccctagcgtctgaccaaacacaccaagttcgtgcgggacatgattcgggaggtgtgtggctttgccccgtacgagcgg

SEQ ID NO: 284100 - DNA, 120 bp, Artificial Sequence
  ENSG00000130255_16 (sequence is synthesized)
gctgggaggcgaagaccaggcgggcactgttgcccggcgacgctccggcgctgggtccccgaggcccggcccctccccgggaggaggtgggcttcgagtcacgtgacccgtgccctacgg

SEQ ID NO: 284101 - DNA, 120 bp, Artificial Sequence
  ENSG00000130255_17 (sequence is synthesized)
gagggggtgcggtcggggacccggcaggaggcggccgagaagagaggaccgtgggggcgttcgcgtggctcccagcccgggaccccacccccgctggacagtgggggaaactgaggcctg

SEQ ID NO: 284102 - DNA, 120 bp, Artificial Sequence
  ENSG00000130270_0 (sequence is synthesized)
gtttcaggaccgttggcaccgggctaacggttccaccacgtccgccgccctggacgcccgcggcctgcccccccctgcctctcctgcgccgatacacttcgagtggattctggccatttg

SEQ ID NO: 284103 - DNA, 120 bp, Artificial Sequence
  ENSG00000130270_1 (sequence is synthesized)
agcattctctccaactctccaatccccagtctgcccccacgggggtctcccccacctctcccccgtcccacagcctaaacccctcttcgccctgaacctcccttttcctcatgcggtgaa

SEQ ID NO: 284104 - DNA, 120 bp, Artificial Sequence
  ENSG00000130270_2 (sequence is synthesized)
tgggcactggccccgctcagactcccaggagcaccagagctggccctgagccaagccctgccccaccaggacctggggacacgggtgactcagacgtgactcaggaaggctcaggtcctg

SEQ ID NO: 284105 - DNA, 120 bp, Artificial Sequence
  ENSG00000130270_3 (sequence is synthesized)
ctggcatccgcggaggtgagacggtgatcagagctgggatgggagactccccaggcagaggggcacctgagaggaggcacaaggcccagcctggccgggctaggaagtatgaatggagac

SEQ ID NO: 284106 - DNA, 120 bp, Artificial Sequence
  ENSG00000130270_4 (sequence is synthesized)
cagaaggccccaccagcatgggcagcctcggccagagagaagatctccaagatgaggacaggaactcagcattcacctggaaggtccaggccaacaaccgtgcctacaacgggcagttca

SEQ ID NO: 284107 - DNA, 120 bp, Artificial Sequence
  ENSG00000130270_5 (sequence is synthesized)
aggagaaggtgatcctgtgctggcaaaggaagaaatacaagaccaatgtcatccgcacggccaagtacaacttctactcgttcctgccgctgaacctgtacgagcagttccaccgcgtgt

SEQ ID NO: 284108 - DNA, 120 bp, Artificial Sequence
  ENSG00000130270_6 (sequence is synthesized)
ccaacctgttcttcctcatcatcatcatcctgcagagcattcccgacatctccacgctgccctggttctcgctcagtacccctatggtctgcctcctcttcatccgtgccacccgggacc

SEQ ID NO: 284109 - DNA, 120 bp, Artificial Sequence
  ENSG00000130270_7 (sequence is synthesized)
tggtggacgacatggggagacacaagagtgacagagccatcaacaacagaccctgccagattctgatggggaagagcttcaagcagaagaaatggcaggatctgtgcgtgggggatgtgg

SEQ ID NO: 284110 - DNA, 120 bp, Artificial Sequence
  ENSG00000130270_8 (sequence is synthesized)
tctgtctccgcaaggacaacatcgtcccagccgacatgctcttgctggccagcacggagcccagcagcctgtgctatgtggagacggtggacattgacggggagaccaacttgaagttca

SEQ ID NO: 284111 - DNA, 120 bp, Artificial Sequence
  ENSG00000130270_9 (sequence is synthesized)
gacaggccctgatggtcacccacaaagaactggccactataaagaagatggcgtcctttcaaggcacagtgacgtgtgaggcgcctaacagtcggatgcaccacttcgtggggtgcctgg

SEQ ID NO: 284112 - DNA, 120 bp, Artificial Sequence
  ENSG00000130270_10 (sequence is synthesized)
aatggaatgacaagaaatactccctggacattggcaacctcctcctccgaggctgcaggattcgcaacacagacacctgctatggactggtcatttatgctggttttgacacaaaaatta

SEQ ID NO: 284113 - DNA, 120 bp, Artificial Sequence
  ENSG00000130270_11 (sequence is synthesized)
tgaagaactgtggcaagatccatttgaagagaaccaagctggacctcctgatgaacaagctggtggttgtgatcttcatctccgtggtgcttgtctgcctggtgttggccttcggcttcg

SEQ ID NO: 284114 - DNA, 120 bp, Artificial Sequence
  ENSG00000130270_12 (sequence is synthesized)
gtttctcagtcaaagaattcaaagaccaccactactacctctcgggggtgcatgggagcagcgtggccgcagagtccttcttcgtcttctggagcttcctcatcctgctcagcgtcacca

SEQ ID NO: 284115 - DNA, 120 bp, Artificial Sequence
  ENSG00000130270_13 (sequence is synthesized)
tcccgatgtccatgttcatcctgtccgagttcatctacctggggaacagcgtcttcatcgactgggacgtgcagatgtactacaagccgcaggacgtgcctgccaaggcccgcagcacca

SEQ ID NO: 284116 - DNA, 120 bp, Artificial Sequence
  ENSG00000130270_14 (sequence is synthesized)
gcctcaacgaccacctgggccaggtggaatacatcttctcggacaagacgggcacgctcacgcagaacatcttgaccttcaacaagtgctgcatcagcggccgcgtctatgggccggatt

SEQ ID NO: 284117 - DNA, 120 bp, Artificial Sequence
  ENSG00000130270_15 (sequence is synthesized)
cagaggccacgacccgacctaaggagaacccctacctctggaacaagttcgccgacgggaagctgctcttccacaatgcggccctgctgcacctcgtgcggaccaacggggacgaggccg

SEQ ID NO: 284118 - DNA, 120 bp, Artificial Sequence
  ENSG00000130270_16 (sequence is synthesized)
tgcgggagttctggcgcctgctggccatctgccacacggtgatggtgcgggagagcccccgtgagcgcccagaccagctgttgtaccaggcggcctcccccgacgagggggcgctggtca

SEQ ID NO: 284119 - DNA, 120 bp, Artificial Sequence
  ENSG00000130270_17 (sequence is synthesized)
ccgcagcccggaacttcggctacgtgttcctgtcccgcacccaggacaccgtcacgatcatggagctgggggaggaacgggtctaccaggtcctggccataatggacttcaacagcacgc

SEQ ID NO: 284120 - DNA, 120 bp, Artificial Sequence
  ENSG00000130270_18 (sequence is synthesized)
gcaaacggatgtcggtgctggttcgaaagccagagggcgccatctgcctgtacaccaagggcgccgacacggtcatcttcgaacgcttgcacaggaggggggcaatggaatttgccacag

SEQ ID NO: 284121 - DNA, 120 bp, Artificial Sequence
  ENSG00000130270_19 (sequence is synthesized)
aggaggccttggctgcctttgcccaggagaccctgcggacactgtgcctggcctacagggaggtggctgaggacatttacgaggactggcagcagcgccaccaggaggccagcctcctgc

SEQ ID NO: 284122 - DNA, 120 bp, Artificial Sequence
  ENSG00000130270_20 (sequence is synthesized)
tgcagaaccgggcacaggccctgcaacagctgctgggagccacagccatcgaggacagactccaggacggtgtccctgaaaccatcaaatgtctcaagaagagcaacatcaaaatatggg

SEQ ID NO: 284123 - DNA, 120 bp, Artificial Sequence
  ENSG00000130270_21 (sequence is synthesized)
gctgtcagagaatatgctcattctggaggagaaggagattagccgcatcctggagacctactgggaaaacagtaacaaccttctaaccagggagtccctgtcgcaggtcaagctggcctt

SEQ ID NO: 284124 - DNA, 120 bp, Artificial Sequence
  ENSG00000130270_22 (sequence is synthesized)
ggtcattaacggagacttcctggacaaactgctggtgtccctgcggaaggagccgcgcgccctggcgcagaacgtgaacatggacgaggcgtggcaggagctcggccagtccaggaggga

SEQ ID NO: 284125 - DNA, 120 bp, Artificial Sequence
  ENSG00000130270_23 (sequence is synthesized)
tttcctctacgccaggcgcctgtccctgctgtgccggaggttcgggctcccgctggctgcaccgccagcccaggactccagagcccgccgtagctccgaggtgctgcaggagcgcgcctt

SEQ ID NO: 284126 - DNA, 120 bp, Artificial Sequence
  ENSG00000130270_24 (sequence is synthesized)
cgtggacctggcgtccaagtgccaggcggtcatctgctgccgcgtgacgcccaagcagaaggccctgatcgtggccctggtcaagaagtaccaccaggtggtgaccctggccatcgggga

SEQ ID NO: 284127 - DNA, 120 bp, Artificial Sequence
  ENSG00000130270_25 (sequence is synthesized)
cggtgccaacgacatcaacatgatcaagaccgcggacgtgggcgtggggctggcgggccaggagggcatgcaggcagttcagaacagcgacttcgtgctcggccagttctgcttcctgca

SEQ ID NO: 284128 - DNA, 120 bp, Artificial Sequence
  ENSG00000130270_26 (sequence is synthesized)
gcgcctcctgctggtgcacggccgctggtcctacgtgcggatctgcaagttcctgcgctacttcttctacaagagcatggccagcatgatggtgcaggtctggtttgcctgctacaacgg

SEQ ID NO: 284129 - DNA, 120 bp, Artificial Sequence
  ENSG00000130270_27 (sequence is synthesized)
cttcaccggccagcccctgtatgaaggatggttcctggctcttttcaacctcctgtacagcaccctgccagttctctacattgggctctttgagcaggacgtgagcgcagagcagagcct

SEQ ID NO: 284130 - DNA, 120 bp, Artificial Sequence
  ENSG00000130270_28 (sequence is synthesized)
ggagaagccggagctgtacgtggtggggcagaaggacgagctcttcaactactgggtcttcgtccaagccatcgcccatggtgtgaccacctctctggtcaacttcttcatgacactgtg

SEQ ID NO: 284131 - DNA, 120 bp, Artificial Sequence
  ENSG00000130270_29 (sequence is synthesized)
gatcagccgcgacacggcgggacccgccagcttcagcgaccaccagtcctttgcggtcgtggtggccctgtcttgcctgctgtccatcaccatggaggtcattcttatcatcaagtactg

SEQ ID NO: 284132 - DNA, 120 bp, Artificial Sequence
  ENSG00000130270_30 (sequence is synthesized)
gaccgccctgtgcgtggcgaccatcctcctcagccttggtttctacgccatcatgactaccaccacccagagcttctggctcttcagagtatcccccacgaccttcccgtttctgtatgc

SEQ ID NO: 284133 - DNA, 120 bp, Artificial Sequence
  ENSG00000130270_31 (sequence is synthesized)
cgacctcagcgtgatgtcctctccctccatcctgctggtggtcctgctgagtgtgtccataaacaccttccctgtcctggccctccgagtcatcttcccagccctcaaggagctacgtgc

SEQ ID NO: 284134 - DNA, 120 bp, Artificial Sequence
  ENSG00000130270_32 (sequence is synthesized)
caaggaggagaaggtggaggagggccccagcgaggagattttcaccatggagcccttgcctcatgtacaccgggagtctcgtgcccgccgttccagctatgctttctcccaccgtgaggg

SEQ ID NO: 284135 - DNA, 120 bp, Artificial Sequence
  ENSG00000130270_33 (sequence is synthesized)
atatgcaaacctcatcactcagggcacaattctgcggaggggaccaggggtcagcagtgacatagcatctgaatccctagacccatctgatgaagaggcagcttcgagcccaaaagagtc

SEQ ID NO: 284136 - DNA, 120 bp, Artificial Sequence
  ENSG00000130270_34 (sequence is synthesized)
acagtgacacctcaggaagatgtccttcctggggaagaagaagcaccagccacaggggcaggtgtcctcccaggaagtacagctcccccctacacctagctcatcattttctatggatag

SEQ ID NO: 284137 - DNA, 120 bp, Artificial Sequence
  ENSG00000130270_35 (sequence is synthesized)
acaatccgctcttcatccagaaaaccaacctgccctccccaaatatgtgctcaccagcagcaacaggctatctgagtctttccaagagcaattgccaagggcacaggagaggtcattgtc

SEQ ID NO: 284138 - DNA, 120 bp, Artificial Sequence
  ENSG00000130270_36 (sequence is synthesized)
acccaagcagaggccaccttctcctgagaagttgctgttgaccaaggagaggtcacattcttttcaggagaaatcactgttgcacagagaaagccagctgtcgtcatttgagagccagcc

SEQ ID NO: 284139 - DNA, 120 bp, Artificial Sequence
  ENSG00000130270_37 (sequence is synthesized)
acagcctctggggagccagtcatttctttcaggccagctgacgttggagagccagccagactcctcggaggagaagtcagcatttttgaagccctccacaccgttccggaagagctggca

SEQ ID NO: 284140 - DNA, 120 bp, Artificial Sequence
  ENSG00000130270_38 (sequence is synthesized)
aaaggagcctcacacccccaaggaggggacggtgccacttccagacaagacccacaaatctcaggtggagactctgccaccaagtctggaagaatcgtccacgtccacgagcgagcagcc

SEQ ID NO: 284141 - DNA, 120 bp, Artificial Sequence
  ENSG00000130270_39 (sequence is synthesized)
tatggaggtggagctgtggcccgcggagaagcagtcatcatcatccatggagtggctgctggtgcccggggaggagcagctatccttgcccccagaggagcagtcattgccctctgcgga

SEQ ID NO: 284142 - DNA, 120 bp, Artificial Sequence
  ENSG00000130270_40 (sequence is synthesized)
ggggaccagggttcagcagtgacgtagcatctgaatccctagacccatctgatgaagaggcatcttcgagcccaaaggagtcacgctggcatatcaggaagatgtccttcctgggaagaa

SEQ ID NO: 284143 - DNA, 120 bp, Artificial Sequence
  ENSG00000130270_41 (sequence is synthesized)
gaagctccagccagttctgctgcaagtcaaccagcatgcagggggccttcctctaaagacaaggactccacatgcttttctttttctaataaaccagggtccatctgaccccagcgctaa

SEQ ID NO: 284144 - DNA, 120 bp, Artificial Sequence
  ENSG00000130270_42 (sequence is synthesized)
gcctctcctgcgccggtgagcggcgggtgctcccactgctgtgcgtccccgggagcccgcgcaccctctctgggctccacccaggctgagagctggggtcgtggcggcgggggtggagag

SEQ ID NO: 284145 - DNA, 83 bp, Artificial Sequence
  ENSG00000130270_43 (sequence is synthesized)
aagttcagacaggccctgatggtcacccacaaagaactggccactataaagaagatggcgtcctttcaaggtgctggccaggc

SEQ ID NO: 284146 - DNA, 120 bp, Artificial Sequence
  ENSG00000130270_44 (sequence is synthesized)
ggccgggacgaggacagaggccgaggccctgatggcgaacccttgcagagcttagggctcgggcgatggggaggacaaggaaagtctgaagaggacgtgggtgcaggaccctggaggtca

SEQ ID NO: 284147 - DNA, 120 bp, Artificial Sequence
  ENSG00000130270_45 (sequence is synthesized)
ctgggtgggagcgtggacccgcggggagtggggtgggagcccggggaaggcttcctgagggggcaaaggcccggaggtggggactgcagctgcgggccccccgtcatcccgtgcctctgg

SEQ ID NO: 284148 - DNA, 120 bp, Artificial Sequence
  ENSG00000130270_46 (sequence is synthesized)
gaagaaatggcaggatctgtgcgtgggggatgtggtctgtctccgcaaggacaacatcgtcccagtgagctggggttgaccccgaggtcccagaaccacgcgccccctcaccgagagcac

SEQ ID NO: 284149 - DNA, 120 bp, Artificial Sequence
  ENSG00000130270_47 (sequence is synthesized)
acgtctggccccatgcccagcacctccgcccgaatctgaaccagggaaccgtagccagatggcctggtttcctttggagggggccaggaaaatttttttttttttttgaggcagagtctc

SEQ ID NO: 284150 - DNA, 120 bp, Artificial Sequence
  ENSG00000130270_48 (sequence is synthesized)
gcctcccaagtagctgggattacagttgcgtgccaccccgcctggctaatttttgtattttttttttcagtagagatggggtttcaccctgtttcccaggctggtctcgaactcctgact

SEQ ID NO: 284151 - DNA, 120 bp, Artificial Sequence
  ENSG00000130270_49 (sequence is synthesized)
gtgatctgcctgcctcagcctccaaaatattggcattgcaggcatgagccaccacacctagccaaacttttaaacagtgtgtatttatttattttttgagatggggtcttgctctgccgc

SEQ ID NO: 284152 - DNA, 89 bp, Artificial Sequence
  ENSG00000130270_50 (sequence is synthesized)
gcagcctcgaatttcccaagtagccgggactacaggagagtgccaccttacccagcttatttttgtattttttgtcaagacagggaatc

SEQ ID NO: 284153 - DNA, 77 bp, Artificial Sequence
  ENSG00000130270_51 (sequence is synthesized)
agcttcccaagtagccgggactacaggagagtgccaccttacccagcttatttttgtattttttgtcaagacaggga

SEQ ID NO: 284154 - DNA, 120 bp, Artificial Sequence
  ENSG00000130270_52 (sequence is synthesized)
gatgtgagccaccacacccggccactgctcttcttttgactttcacaagcctttatttgtggatgctgaaattcgaattgctgagtatttctcagatcacaaaataaaatagttttgttt

SEQ ID NO: 284155 - DNA, 120 bp, Artificial Sequence
  ENSG00000130270_53 (sequence is synthesized)
gtttcaggaccgttggcaccgggctaacggttccaccacgtccgccgccctggacgcccgcggcctgcccccccctgcctctcctgcgccggacctggggacacgggtgactcagacgtg

SEQ ID NO: 284156 - DNA, 80 bp, Artificial Sequence
  ENSG00000130283_0 (sequence is synthesized)
ggcggtatggcggcggcggggcccgcggcggggccgacggggcccgagcccatgccgagctacgcgcagctagtgcagcg

SEQ ID NO: 284157 - DNA, 80 bp, Artificial Sequence
  ENSG00000130283_1 (sequence is synthesized)
ggcccgagcccatgccgagctacgcgcagctagtgcagcgcggctggggcagcgcgctggcggcggcgcggggctgcacg

SEQ ID NO: 284158 - DNA, 120 bp, Artificial Sequence
  ENSG00000130283_2 (sequence is synthesized)
cgccgcccgagctgctgctgctggcgctcggcgcgctgggctggaccgccctgcgctccgcggccactgcgcgcctctttcggcccctggcgaagcggtgctgcctccagcccagagatg

SEQ ID NO: 284159 - DNA, 120 bp, Artificial Sequence
  ENSG00000130283_3 (sequence is synthesized)
agcccagagatgccgccaagatgcccgagagcgcttggaagtttctcttctacctgggcagctggagctacagtgcctacctgctgtttggcaccgactaccccttcttccatgacccac

SEQ ID NO: 284160 - DNA, 120 bp, Artificial Sequence
  ENSG00000130283_4 (sequence is synthesized)
catctgtcttctacgactggacgccgggcatggcagtgccacgggacattgcagccgcctacctgctccagggaagcttctatggccactccatctacgctacgctatacatggacacct

SEQ ID NO: 284161 - DNA, 120 bp, Artificial Sequence
  ENSG00000130283_5 (sequence is synthesized)
ggcgcaaggactcggtggtcatgctgctccaccacgtggtcactctcatcctcatcgtctcctcctacgccttccggtaccacaatgtgggcatccttgtgctcttcctgcacgatatca

SEQ ID NO: 284162 - DNA, 120 bp, Artificial Sequence
  ENSG00000130283_6 (sequence is synthesized)
gtgacgtgcagcttgagttcaccaagctcaacatttacttcaagtcccgcggcggctcctaccatcggctgcatgccttggcagcagacttgggctgcctcagcttcggcttcagctggt

SEQ ID NO: 284163 - DNA, 120 bp, Artificial Sequence
  ENSG00000130283_7 (sequence is synthesized)
tctggttccgcctctactggttcccgctcaaggtcctgtatgccaccagtcactgcagtctgcgcacggtgcctgacatccccttctacttcttcttcaatgcgctcctgctgctgctca

SEQ ID NO: 284164 - DNA, 120 bp, Artificial Sequence
  ENSG00000130283_8 (sequence is synthesized)
cccttatgaacctctactggttcctgtacatcgtggcgtttgcagccaaggtgttgacaggccaggtgcacgagctgaaggacctgcgggagtatgacacagccgaggcccagagcctga

SEQ ID NO: 284165 - DNA, 120 bp, Artificial Sequence
  ENSG00000130283_9 (sequence is synthesized)
agcccagcaaagccgagaagccactgaggaacggcctggtgaaggacaagcgcttctgaacccctcggccccgcccccgtggacccggccccaccccgaataccccggccacgctccccg

SEQ ID NO: 284166 - DNA, 120 bp, Artificial Sequence
  ENSG00000130283_10 (sequence is synthesized)
tcatcctgcctccagttcccggccacgccccccaggacccctgcccctccggggacaccggccccgccctcagcccactggtcccgggccgccgcggaccctgcgcactctctggtcatc

SEQ ID NO: 284167 - DNA, 120 bp, Artificial Sequence
  ENSG00000130283_11 (sequence is synthesized)
gcactctctggtcatcgcctgggaggaagatgccaccgccgcagcaaggtccctgcggccaccacctcctcctcctcctggccctgctgctgccctcgctgcccctgacccgcgcccccg

SEQ ID NO: 284168 - DNA, 120 bp, Artificial Sequence
  ENSG00000130283_12 (sequence is synthesized)
tgcccccaggcccagccgccgccctgctccaggctctaggactgcgcgatgagccccagggtgcccccaggctccggccggttcccccggtcatgtggcgcctgtttcgacgccgggacc

SEQ ID NO: 284169 - DNA, 120 bp, Artificial Sequence
  ENSG00000130283_13 (sequence is synthesized)
cccaggagaccaggtctggctcgcggcggacgtccccaggggtcaccctgcaaccgtgccacgtggaggagctgggggtcgccggaaacatcgtgcgccacatcccggaccgcggtgcgc

SEQ ID NO: 284170 - DNA, 120 bp, Artificial Sequence
  ENSG00000130283_14 (sequence is synthesized)
ccacccgggcctcggagcctgcctcggccgcggggcattgccctgagtggacagtcgtcttcgacctgtcggctgtggaacccgctgagcgcccgagccgggcccgcctggagctgcgtt

SEQ ID NO: 284171 - DNA, 80 bp, Artificial Sequence
  ENSG00000130283_15 (sequence is synthesized)
ggctgggagctgagcgtggcgcaagcgggccagggcgcgggcgcggaccccgggccggtgctgctccgccagttggtgcc

SEQ ID NO: 284172 - DNA, 80 bp, Artificial Sequence
  ENSG00000130283_16 (sequence is synthesized)
ggccgccagtgcgcgcggagctgctgggcgccgcttgggctcgcaacgcctcatggccgcgcagcctccgcctggcgctg

SEQ ID NO: 284173 - DNA, 80 bp, Artificial Sequence
  ENSG00000130283_17 (sequence is synthesized)
ccgaggcctcgctgctgctggtgaccctcgacccgcgcctgtgccaccccctggcccggccgcggcgcgacgccgaaccc

SEQ ID NO: 284174 - DNA, 120 bp, Artificial Sequence
  ENSG00000130283_18 (sequence is synthesized)
ggctgtacgtgagcttccgcgaggtgggctggcaccgctgggtcatcgcgccgcgcggcttcctggccaactactgccagggtcagtgcgcgctgcccgtcgcgctgtcggggtccgggg

SEQ ID NO: 284175 - DNA, 120 bp, Artificial Sequence
  ENSG00000130283_19 (sequence is synthesized)
ggccgccggcgctcaaccacgctgtgctgcgcgcgctcatgcacgcggccgccccgggagccgccgacctgccctgctgcgtgcccgcgcgcctgtcgcccatctccgtgctcttctttg

SEQ ID NO: 284176 - DNA, 120 bp, Artificial Sequence
  ENSG00000130283_20 (sequence is synthesized)
acaacagcgacaacgtggtgctgcggcagtatgaggacatggtggtggacgagtgcggctgccgctaacccggggcgggcagggacgcgggcccaacaataaatgccgcgtggtctgctc

SEQ ID NO: 284177 - DNA, 120 bp, Artificial Sequence
  ENSG00000130287_0 (sequence is synthesized)
ggagcgcagggcgcaggggctggacccggcgcggagctggctgagtcggagcgcagcgtcctttgtgcccggcggccgccccgggatgcgtccgagctaggagccagatccaggatgggg

SEQ ID NO: 284178 - DNA, 120 bp, Artificial Sequence
  ENSG00000130287_1 (sequence is synthesized)
gccccgtttgtctgggccttgggccttttgatgctgcagatgctgctctttgtggctggggaacagggcacacaggatatcaccgatgccagcgaaagggggctccacatgcagaagctg

SEQ ID NO: 284179 - DNA, 120 bp, Artificial Sequence
  ENSG00000130287_2 (sequence is synthesized)
gggtctgggtcagtgcaggctgcgctggcggagctggtggccctgccctgtctctttaccctgcagccacggccaagcgcagcccgagatgcccctcggataaagtggaccaaggtgcgg

SEQ ID NO: 284180 - DNA, 120 bp, Artificial Sequence
  ENSG00000130287_3 (sequence is synthesized)
actgcgtcgggccagcgacaggacttgcccatcctggtggccaaggacaatgtcgtgagggtggccaaaagctggcagggacgagtgtcactgccttcctacccccggcgccgagccaac

SEQ ID NO: 284181 - DNA, 120 bp, Artificial Sequence
  ENSG00000130287_4 (sequence is synthesized)
gccacgctacttctggggccactgagggccagtgactctgggctgtaccgctgccaggtggtgaggggcatcgaggatgagcaggacctggtgcccttggaggtgacaggtgttgtgttc

SEQ ID NO: 284182 - DNA, 120 bp, Artificial Sequence
  ENSG00000130287_5 (sequence is synthesized)
cactaccgatcagcccgggaccgctatgcactgaccttcgctgaggcccaggaggcctgccgtctcagctcagccatcattgcagcccctcggcatctacaggctgcctttgaggatggc

SEQ ID NO: 284183 - DNA, 120 bp, Artificial Sequence
  ENSG00000130287_6 (sequence is synthesized)
tttgacaactgtgatgctggctggctctctgaccgcactgttcggtatcctatcacccagtcccgtcctggttgctatggcgaccgtagcagccttccaggggttcggagctatgggagg

SEQ ID NO: 284184 - DNA, 120 bp, Artificial Sequence
  ENSG00000130287_7 (sequence is synthesized)
cgcaacccacaggaactctacgatgtgtattgctttgcccgggagctggggggcgaggtcttctacgtgggcccggcccgccgcctgacactggccggcgcgcgtgcacagtgccgccgc

SEQ ID NO: 284185 - DNA, 120 bp, Artificial Sequence
  ENSG00000130287_8 (sequence is synthesized)
cagggtgccgcgctggcctcggtgggacagctgcacctggcctggcatgagggcctggaccagtgcgacccgggctggctggccgacggcagcgtgcgctacccgatccagacgccgcgc

SEQ ID NO: 284186 - DNA, 120 bp, Artificial Sequence
  ENSG00000130287_9 (sequence is synthesized)
cggcgctgcgggggcccagccccgggcgtgcgcaccgtctaccgcttcgctaaccggaccggcttcccctcacccgccgagcgcttcgacgcctactgcttccgagctcatcaccccacg

SEQ ID NO: 284187 - DNA, 120 bp, Artificial Sequence
  ENSG00000130287_10 (sequence is synthesized)
tcacaacatggagacctagagaccccatcctctggggatgagggggagattctgtcagcagaggggcccccagttagagaactggagcccaccctggaggaggaagaggtggtcacccct

SEQ ID NO: 284188 - DNA, 120 bp, Artificial Sequence
  ENSG00000130287_11 (sequence is synthesized)
gacttccaggagcctctggtgtccagtggggaagaagaaaccctgattttggaggagaagcaggagtctcaacagaccctcagccctacccctggggaccccatgctggcctcatggccc

SEQ ID NO: 284189 - DNA, 120 bp, Artificial Sequence
  ENSG00000130287_12 (sequence is synthesized)
actggggaagtgtggctaagcacggtggcccccagccctagcgacatgggggcaggcactgcagcaagttcacacacggaggtggccccaactgaccctatgcctaggagaagggggcgc

SEQ ID NO: 284190 - DNA, 120 bp, Artificial Sequence
  ENSG00000130287_13 (sequence is synthesized)
ttcaaagggttgaatgggcgctacttccagcagcaggaaccggagccggggctgcaaggggggatggaggccagcgcccagccccccacctcagaggctgcagtgaaccaaatggagcct

SEQ ID NO: 284191 - DNA, 120 bp, Artificial Sequence
  ENSG00000130287_14 (sequence is synthesized)
ccgttggccatggcagtcacagagatgttgggcagtggccagagccggagcccctgggctgatctgaccaatgaggtggatatgcctggagctggttctgctggtggcaagagctcccca

SEQ ID NO: 284192 - DNA, 120 bp, Artificial Sequence
  ENSG00000130287_15 (sequence is synthesized)
gagccctggctgtggccccctaccatggtcccacccagcatctcaggccacagcagggcccctgtcctggagctagagaaagccgagggccccagtgccaggccagccaccccagacctg

SEQ ID NO: 284193 - DNA, 120 bp, Artificial Sequence
  ENSG00000130287_16 (sequence is synthesized)
ttttggtcccccttggaggccactgtctcagctcccagccctgccccctgggaggcattccctgtggccacctccccagatctccctatgatggccatgctgcgtggtcccaaagagtgg

SEQ ID NO: 284194 - DNA, 120 bp, Artificial Sequence
  ENSG00000130287_17 (sequence is synthesized)
atgctaccacaccccacccccatctccaccgaggccaatagagttgaggcacatggtgaggccaccgccacggctccaccctcccctgctgcagagaccaaggtgtattccctgcctctc

SEQ ID NO: 284195 - DNA, 120 bp, Artificial Sequence
  ENSG00000130287_18 (sequence is synthesized)
tctttgaccccaacaggacagggtggagaggccatgcccacaacacctgagtcccccagggcagacttcagagaaactggggagaccagccctgctcaggtcaacaaagctgagcactcc

SEQ ID NO: 284196 - DNA, 120 bp, Artificial Sequence
  ENSG00000130287_19 (sequence is synthesized)
agctccagcccatggccttctgtaaacaggaatgtggctgtaggttttgtccccactgagactgccactgagccaacgggcctcaggggtatcccggggtctgagtctggggtcttcgac

SEQ ID NO: 284197 - DNA, 120 bp, Artificial Sequence
  ENSG00000130287_20 (sequence is synthesized)
acagcagaaagccccacttctggcttgcaggccactgtagatgaggtgcaggacccctggccctcagtgtacagcaaagggctggatgcaagttccccatctgcccccctggggagccct

SEQ ID NO: 284198 - DNA, 120 bp, Artificial Sequence
  ENSG00000130287_21 (sequence is synthesized)
ggagtcttcttggtacccaaagtcaccccaaatttggagccttgggttgctacagatgaaggacccactgtgaatcccatggattccacagtcacgccggcccccagtgatgctagtgga

SEQ ID NO: 284199 - DNA, 120 bp, Artificial Sequence
  ENSG00000130287_22 (sequence is synthesized)
atttgggaacctggatcccaggtgtttgaagaagccgaaagcaccaccttgagccctcaggtggccctggatacaagcattgtgacgcccctcacgaccctggagcagggggacaaggtt

SEQ ID NO: 284200 - DNA, 120 bp, Artificial Sequence
  ENSG00000130287_23 (sequence is synthesized)
ggagttccagccatgtctacactgggctcctcaagctcccaaccccacccagagccagaggatcaggtggagacccagggaacatcaggagcttcagtgcctccgcatcagagcagtccc

SEQ ID NO: 284201 - DNA, 120 bp, Artificial Sequence
  ENSG00000130287_24 (sequence is synthesized)
ctagggaaaccggctgttcctcctgggacaccgactgcagccagtgtgggcgagtctgcctcagtttcctcaggggagcctacggtaccgtgggacccctccagcaccctgctgcctgtc

SEQ ID NO: 284202 - DNA, 120 bp, Artificial Sequence
  ENSG00000130287_25 (sequence is synthesized)
accctgggcatagaggacttcgaactggaggtcctggcagggagcccgggtgtagagagcttctgggaggaggtggcaagtggagaggagccagccctgccagggacccctatgaatgca

SEQ ID NO: 284203 - DNA, 120 bp, Artificial Sequence
  ENSG00000130287_26 (sequence is synthesized)
tgtcttcatggagggacatgtaatgccaatggcaccatgtatggctgtagctgtgatcagggcttcgccggggagaactgtgagattgacattgatgactgcctctgcagcccctgtgag

SEQ ID NO: 284204 - DNA, 120 bp, Artificial Sequence
  ENSG00000130287_27 (sequence is synthesized)
aatggaggcacctgtattgatgaggtcaatggctttgtctgcctttgcctccccagctatgggggcagcttttgtgagaaagacaccgagggctgtgaccgcggctggcataagttccag

SEQ ID NO: 284205 - DNA, 120 bp, Artificial Sequence
  ENSG00000130287_28 (sequence is synthesized)
ggccactgttaccgctattttgcccaccggagggcatgggaagatgccgagaaggactgccgccgccgctccggccacctgaccagcgtccactcaccggaggaacacagcttcattaat

SEQ ID NO: 284206 - DNA, 120 bp, Artificial Sequence
  ENSG00000130287_29 (sequence is synthesized)
agctttgggcatgaaaacacgtggatcggcctgaacgacaggatcgtggagagagatttccagtggacggacaacaccgggctgcaatttgagaactggcgagagaaccagccggacaat

SEQ ID NO: 284207 - DNA, 120 bp, Artificial Sequence
  ENSG00000130287_30 (sequence is synthesized)
ttcttcgcgggtggcgaggactgtgtggtgatggtggcgcatgaaagcgggcgctggaacgatgtcccctgcaactacaacctaccctatgtctgcaagaagggcacagtgctctgtggt

SEQ ID NO: 284208 - DNA, 120 bp, Artificial Sequence
  ENSG00000130287_31 (sequence is synthesized)
ccccctccggcagtggagaatgcctcactcatcggtgcccgcaaggccaagtacaatgtccatgccactgtaaggtaccagtgcaatgaaggatttgcccagcaccatgtggccaccatt

SEQ ID NO: 284209 - DNA, 120 bp, Artificial Sequence
  ENSG00000130287_32 (sequence is synthesized)
cgatgccggagcaatggcaagtgggacaggccccaaattgtctgcaccaaacccagacgttcacatcggatgcggcgacaccaccaccaccaccaacaccaccaccagcatcaccaccac

SEQ ID NO: 284210 - DNA, 120 bp, Artificial Sequence
  ENSG00000130287_33 (sequence is synthesized)
aaatcccgcaaggagcgcagaaaacacaagaaacacccaacggaggactgggagaaggacgaagggaatttctgctgaagaaccagaaaaaagaaagcacaacacctttcccatgcctcc

SEQ ID NO: 284211 - DNA, 120 bp, Artificial Sequence
  ENSG00000130287_34 (sequence is synthesized)
tctggagccttcgcctggggagacagaacccagagagaaacaagagagtccagaagtccctgaaccccaaaccacatcccccacacacataatcctttgtacaaagctcctcttttccct

SEQ ID NO: 284212 - DNA, 120 bp, Artificial Sequence
  ENSG00000130287_35 (sequence is synthesized)
ttttttacatacacaagatcctcttggcaggtggagccaggtgtctgaaaagttcattctcgtctggctgaactctgggagtgtgtcccagctgagggaagcacaagtagcaaagctcat

SEQ ID NO: 284213 - DNA, 120 bp, Artificial Sequence
  ENSG00000130287_36 (sequence is synthesized)
tggtctggtctcttgtttgccaggctgattgaagcaggccttgatgagggtgcatgagtgtatgtttgcattcacatgaaggaattgcttttcacaccagaaattcagacttagtcaatg

SEQ ID NO: 284214 - DNA, 120 bp, Artificial Sequence
  ENSG00000130287_37 (sequence is synthesized)
ttggctgaattcctaaatccaggaagaagcctggacgtagggtcattagctttgggaatagaaggctacacagaagcacactgtttttgaacttgacaacagctctccctttaccctgga

SEQ ID NO: 284215 - DNA, 120 bp, Artificial Sequence
  ENSG00000130287_38 (sequence is synthesized)
cttcagcccaagttccgtctttggtcttggtggataaacacacagtgtggagatcccacgtactgcattttagggatgtttttaggacaacctccctccatgccttcagagttaggagtg

SEQ ID NO: 284216 - DNA, 120 bp, Artificial Sequence
  ENSG00000130287_39 (sequence is synthesized)
agaatgatcaaagcaatatgtaggtgatggagggagagtgtattgctaacccttccaggtctagtccagcgctgagatttggtggttctgcatgtgtgatgaatctctttcacacaaata

SEQ ID NO: 284217 - DNA, 120 bp, Artificial Sequence
  ENSG00000130287_40 (sequence is synthesized)
gacgagaggatatttagggctagatgagcccagatttcttccccctccatctctcagggagacaaagaacctccttcctggaccaaggaggtgctgccaagttttctagcccagtgcaca

SEQ ID NO: 284218 - DNA, 120 bp, Artificial Sequence
  ENSG00000130287_41 (sequence is synthesized)
tacccagtccttaagcagacattggtagtgcccctgccctgggtcccactcctgccccaccccacccttgtccctggccattgcctggtggtctagaaacacttaaaacttgaagtagtg

SEQ ID NO: 284219 - DNA, 120 bp, Artificial Sequence
  ENSG00000130287_42 (sequence is synthesized)
acacctacctgcggtcatattgtagagagatgctcagtgttaaaactgaaacacacaaacacacacacacacacatttttctcttgtagattttaattttttaagtgggaaagaactcac

SEQ ID NO: 284220 - DNA, 120 bp, Artificial Sequence
  ENSG00000130287_43 (sequence is synthesized)
cttgccttcctcccccaaatgtgcaacctgtaaaaggtctctccacaccaggggccaggatccagttccctcatctctggcaggaaagatccacagcttttcctccatgtctgttactca

SEQ ID NO: 284221 - DNA, 120 bp, Artificial Sequence
  ENSG00000130287_44 (sequence is synthesized)
ctttcagcagtccgggtaaaatctgtggatcagggttaaaaaagcaccgtggagaatggccctcttcaggaaagaaaaataagcaaatgaatggtccacctaggggttcagtaaagaaag

SEQ ID NO: 284222 - DNA, 120 bp, Artificial Sequence
  ENSG00000130287_45 (sequence is synthesized)
aaatgtgttaactgagcctgaatcccttctgggaagtaataatgaccattgacaactaagaagtagacaccatgctaaagacttacatacaatctccttgaatcttctcaatagcccatt

SEQ ID NO: 284223 - DNA, 120 bp, Artificial Sequence
  ENSG00000130287_46 (sequence is synthesized)
gacttagaaactgttactttcccattttacacacagtgaaactgaggctcagatataaaggaaaggtactggcttgaagtcacaaccacgacaggagtaaggatttggaataaggatttg

SEQ ID NO: 284224 - DNA, 120 bp, Artificial Sequence
  ENSG00000130287_47 (sequence is synthesized)
gtcctgttttctggaccaaatccttactctggctctgcttacactttctctccatcaccaaatccttactccaaatccagaagtcagagccaactcccatcttggttctgacccaaatcc

SEQ ID NO: 284225 - DNA, 120 bp, Artificial Sequence
  ENSG00000130287_48 (sequence is synthesized)
tgctctggactctggagaggagattgaaatataattgcaccctcatacacatttaggaaatggttaagaagtgtaaactgaacccttatccttgtcttcaatcttcctccctgtagacat

SEQ ID NO: 284226 - DNA, 120 bp, Artificial Sequence
  ENSG00000130287_49 (sequence is synthesized)
ctatcttattatggttattattcagaaaacccagggatacaggtttgtcttcttactttgataactcttcttagtttaaaataataataataacacatctttggtcatctatgtcacaca

SEQ ID NO: 284227 - DNA, 120 bp, Artificial Sequence
  ENSG00000130287_50 (sequence is synthesized)
aaaattttcctttgtttgcggggggctggggatgcagtgttttttggggggtcttggtttatgctccctgcccttgagcccctcagccgtttgccctgcccccacctcggctccatggtg

SEQ ID NO: 284228 - DNA, 120 bp, Artificial Sequence
  ENSG00000130287_51 (sequence is synthesized)
ggagggggctctggtcttttctaaagtgggcggtttgtcttttgatctttcccttttggatgtgcgtgtgtgtctgcgtgtgccatgtgcgtggcacgcatatgagtgtgtgtgcgtgtg

SEQ ID NO: 284229 - DNA, 120 bp, Artificial Sequence
  ENSG00000130287_52 (sequence is synthesized)
aacggctttgggtcctgctggttttgctgtgagctgcagtgttctgtgggtctgtggtatctgacactgtggacattaatgtacttcttggacattttaataaattttttaacagttcaa

SEQ ID NO: 284230 - DNA, 120 bp, Artificial Sequence
  ENSG00000130287_53 (sequence is synthesized)
ccacctgcctggagggtgggcaggggtggcacttgtagcccttttgccagggcatcgcatccctcccctggttttcaagacgtcatctttccaaagctgtgttcattaacgcaagccctg

SEQ ID NO: 284231 - DNA, 120 bp, Artificial Sequence
  ENSG00000130287_54 (sequence is synthesized)
actgcttcttaatgcatgaaatctgtcaattcacttgttaattcatacattcacttcattcattcattcaccaaatatttactgagcacctgctatatgccaggcaccattccaggaata

SEQ ID NO: 284232 - DNA, 120 bp, Artificial Sequence
  ENSG00000130287_55 (sequence is synthesized)
ttgacacagcacagcagcaatcaaggctgactttgctttgtccccagggagtgaccatttcttggggaggatatagacaaacaagtaaatatctaagtaaataagtctatactgtaattc

SEQ ID NO: 284233 - DNA, 120 bp, Artificial Sequence
  ENSG00000130287_56 (sequence is synthesized)
gagatctcaacataggtttttggtatttctagtttccaagtaagacatcctatttctccacacattgatctggcttaatgtctgcctgataatacagccttgcagataagtgagaactta

SEQ ID NO: 284234 - DNA, 80 bp, Artificial Sequence
  ENSG00000130294_0 (sequence is synthesized)
ccccgcggcggccgcgtcgcccgtccctctccccgcgcgacaaaccagctggcgactggagctcggacgccgcgcgcagc

SEQ ID NO: 284235 - DNA, 120 bp, Artificial Sequence
  ENSG00000130294_1 (sequence is synthesized)
ccgtcacgcggcggcgccgtcacagcgcagagcagccggcgagcggcagcagctccgggctcgagagcccgcgcccatgccagtgcccatgcggggccgccgccagtgacgccggagagg

SEQ ID NO: 284236 - DNA, 120 bp, Artificial Sequence
  ENSG00000130294_2 (sequence is synthesized)
acgccggagaggtgttccccccacactggggctcccactactgcgaggagtgacccacgaaggccacagagatggccggggcttcggtgaaggtggcggtgcgggtccgccccttcaatt

SEQ ID NO: 284237 - DNA, 120 bp, Artificial Sequence
  ENSG00000130294_3 (sequence is synthesized)
cccgggaaatgagccgtgactccaagtgcatcattcagatgtctggaagcaccaccaccattgttaaccccaaacagcccaaggagacgcccaaaagcttcagctttgactactcctact

SEQ ID NO: 284238 - DNA, 120 bp, Artificial Sequence
  ENSG00000130294_4 (sequence is synthesized)
ggtcgcacacctcacctgaggacatcaactacgcgtcgcagaagcaggtgtaccgggacatcggcgaggagatgctgcagcatgcctttgagggatacaacgtgtgcatcttcgcctatg

SEQ ID NO: 284239 - DNA, 120 bp, Artificial Sequence
  ENSG00000130294_5 (sequence is synthesized)
ggcagacgggtgccggcaagtcctacaccatgatgggcaagcaggagaaggaccagcagggcatcatcccacagctctgcgaggacctcttctctcggatcaacgacacgaccaacgaca

SEQ ID NO: 284240 - DNA, 120 bp, Artificial Sequence
  ENSG00000130294_6 (sequence is synthesized)
acatgtcctactccgtggaggtcagctacatggagatttactgtgagcgcgtccgtgacctcctgaaccccaagaacaagggcaaccttcgcgtgagggagcacccactgctggggccct

SEQ ID NO: 284241 - DNA, 120 bp, Artificial Sequence
  ENSG00000130294_7 (sequence is synthesized)
acgtggaggacctctccaagctggctgtcacctcctacaatgacatccaggacctcatggactcagggaacaaggccaggaccgtggcggccaccaacatgaatgagaccagcagtcgct

SEQ ID NO: 284242 - DNA, 120 bp, Artificial Sequence
  ENSG00000130294_8 (sequence is synthesized)
cccacgccgtcttcaacatcatcttcacccagaagcgccatgacgcagagaccaatatcaccacggagaaggtgagcaaaatcagcctggtggacctggctgggagcgagcgggctgact

SEQ ID NO: 284243 - DNA, 120 bp, Artificial Sequence
  ENSG00000130294_9 (sequence is synthesized)
ccacgggagccaagggcacgcgcctcaaggagggggccaacatcaacaagtcgctgaccaccctgggcaaggtcatctccgccctggctgaaatggactccggacccaacaagaacaaga

SEQ ID NO: 284244 - DNA, 120 bp, Artificial Sequence
  ENSG00000130294_10 (sequence is synthesized)
aaaagaagaagacagatttcattccgtaccgagattccgtgttgacctggctcctccgggaaaacctgggcggtaactcaaggacagctatggtggcagccttgagtcctgcagacatca

SEQ ID NO: 284245 - DNA, 120 bp, Artificial Sequence
  ENSG00000130294_11 (sequence is synthesized)
actacgatgagacccttagcacgctgaggtatgctgaccgggccaagcagatccgctgcaatgctgtcatcaatgaggaccccaacaacaagctgatccgcgagctgaaggatgaggtga

SEQ ID NO: 284246 - DNA, 120 bp, Artificial Sequence
  ENSG00000130294_12 (sequence is synthesized)
cccggctgcgggaccttctgtacgcccagggtcttggcgacatcactgacatgaccaatgccctggtgggtatgagcccctcatcctcgctctcagccctgtccagccgcgcggcctccg

SEQ ID NO: 284247 - DNA, 120 bp, Artificial Sequence
  ENSG00000130294_13 (sequence is synthesized)
tgtccagcctccacgagcgcatcttgtttgccccgggcagcgaggaggccattgaaagactgaaggaaacagagaagatcatagctgagctcaatgagacctgggaggagaagctgcggc

SEQ ID NO: 284248 - DNA, 120 bp, Artificial Sequence
  ENSG00000130294_14 (sequence is synthesized)
ggacagaagccatccggatggagagggaagccctgctggccgagatgggtgtggccatgagggaggatggcggcaccttgggcgtattctctcccaaaaagacaccacacctcgtcaacc

SEQ ID NO: 284249 - DNA, 120 bp, Artificial Sequence
  ENSG00000130294_15 (sequence is synthesized)
tgaacgaggacccgctgatgtctgagtgcctgctctactacatcaaggatgggatcaccagagtgggcagggaggatggcgagaggcggcaggacattgttctgagtgggcacttcatca

SEQ ID NO: 284250 - DNA, 120 bp, Artificial Sequence
  ENSG00000130294_16 (sequence is synthesized)
aggaggagcactgcgtcttccggagcgactccaggggaggcagcgaagctgtggtgaccttggagccctgtgagggggcagacacctacgtcaatggcaagaaagtcacagagcccagca

SEQ ID NO: 284251 - DNA, 120 bp, Artificial Sequence
  ENSG00000130294_17 (sequence is synthesized)
tcctgcgttcaggaaaccgcatcatcatgggtaagagccatgtgttccggttcaaccaccccgagcaggcccggcaggagcgtgagcgcacgccttgtgcggagacgccagctgagcctg

SEQ ID NO: 284252 - DNA, 120 bp, Artificial Sequence
  ENSG00000130294_18 (sequence is synthesized)
tggactgggccttcgcccagcgtgagctgctggagaagcagggcatcgacatgaagcaggagatggagcagaggctccaggaactggaggaccagtaccgccgcgagcgggaggaggcca

SEQ ID NO: 284253 - DNA, 120 bp, Artificial Sequence
  ENSG00000130294_19 (sequence is synthesized)
cctacctgctggagcagcagcggctggactatgagagcaagctggaggctctgcagaagcagatggactccaggtactacccggaggtgaacgaggaggaggaggagcccgaggatgaag

SEQ ID NO: 284254 - DNA, 120 bp, Artificial Sequence
  ENSG00000130294_20 (sequence is synthesized)
tccagtggacagagcgggagtgtgagctggcgctctgggccttccggaagtggaagtggtaccagttcacgtctctgcgggacctgctgtggggcaacgccatcttcctcaaggaggcca

SEQ ID NO: 284255 - DNA, 120 bp, Artificial Sequence
  ENSG00000130294_21 (sequence is synthesized)
atgccatcagcgtggagctgaaaaagaaggtacaattccagtttgtcctcctgacggacacactctactcccctctgccacccgacctgctgcccccagaggccgccaaagaccgagaga

SEQ ID NO: 284256 - DNA, 120 bp, Artificial Sequence
  ENSG00000130294_22 (sequence is synthesized)
cgcggcccttcccccgcaccattgtggccgtggaggtccaggaccagaagaacggggccacccactactggacgctggagaagctcaggcagcgtctggacctgatgcgggagatgtacg

SEQ ID NO: 284257 - DNA, 120 bp, Artificial Sequence
  ENSG00000130294_23 (sequence is synthesized)
accgcgctgcagaggtgccctccagtgtcatcgaggactgtgacaacgtggtgaccggcggagaccccttctatgaccgcttcccctggttccggctggtgggcagggccttcgtgtacc

SEQ ID NO: 284258 - DNA, 120 bp, Artificial Sequence
  ENSG00000130294_24 (sequence is synthesized)
tgagcaacctgctgtaccccgttcccctggtacaccgtgtggcaatcgtcagcgagaagggcgaggtgaagggcttcctccgcgtggccgtccaggccatctcagccgatgaagaggccc

SEQ ID NO: 284259 - DNA, 120 bp, Artificial Sequence
  ENSG00000130294_25 (sequence is synthesized)
ctgattatggctctggcgtccgccagtcgggaactgctaaaatctcctttgatgaccagcattttgaaaagttccagtccgagtcttgccccgtggtggggatgtcccgctcgggaacct

SEQ ID NO: 284260 - DNA, 120 bp, Artificial Sequence
  ENSG00000130294_26 (sequence is synthesized)
cccaggaagagcttcgcatcgtggagggccagggccagggtgcagacgtggggccctcagccgatgaagtcaacaacaacacctgttcagcagtgcccccagaaggcctcctcctagaca

SEQ ID NO: 284261 - DNA, 120 bp, Artificial Sequence
  ENSG00000130294_27 (sequence is synthesized)
gctctgagaaagccgccctggatgggcccctggatgctgccctggaccacctccgcctgggcaacaccttcaccttccgtgtgacagtcctgcaggcgtccagcatctctgccgaatatg

SEQ ID NO: 284262 - DNA, 120 bp, Artificial Sequence
  ENSG00000130294_28 (sequence is synthesized)
ccgacatcttctgccagttcaacttcatccaccgccacgacgaggccttctccacagagcccctgaagaacacaggcagaggccccccacttggcttctaccacgtccagaacatcgcag

SEQ ID NO: 284263 - DNA, 120 bp, Artificial Sequence
  ENSG00000130294_29 (sequence is synthesized)
tggaggtgaccaagtccttcattgagtacatcaagagccagcccattgttttcgaggtctttggccactaccagcagcacccgttcccgcccctctgcaaggacgtgctcagccccctga

SEQ ID NO: 284264 - DNA, 120 bp, Artificial Sequence
  ENSG00000130294_30 (sequence is synthesized)
ggccctcgcgccgccacttccctcgggtcatgccactgtccaagccagtgcccgccaccaagctcagcacactgacgcggccctgtccgggaccctgccactgcaagtacgacctgctgg

SEQ ID NO: 284265 - DNA, 120 bp, Artificial Sequence
  ENSG00000130294_31 (sequence is synthesized)
tctacttcgagatctgtgagctggaggccaacggcgattacatcccggccgtggtggaccaccgtgggggcatgccatgcatggggaccttcctcctccaccagggcatccagcgacgga

SEQ ID NO: 284266 - DNA, 120 bp, Artificial Sequence
  ENSG00000130294_32 (sequence is synthesized)
ttacggtgacactactgcatgagacaggcagccatatccgctggaaggaagtgcgcgagctggtcgtgggccgcatccgaaacactccagagaccgacgagtccctgatcgaccccaaca

SEQ ID NO: 284267 - DNA, 120 bp, Artificial Sequence
  ENSG00000130294_33 (sequence is synthesized)
tcttgtctctcaacatcctctcttccggatacatccacccagcccaagatgaccggaccttttaccaatttgaggctgcgtgggacagctccatgcacaactctctcctgctgaaccggg

SEQ ID NO: 284268 - DNA, 120 bp, Artificial Sequence
  ENSG00000130294_34 (sequence is synthesized)
tcaccccttatcgagagaaaatctacatgacactctccgcttatatcgagatggagaactgcacccagccggctgttgtcaccaaggacttctgcatggtcttctattcccgtgatgcca

SEQ ID NO: 284269 - DNA, 120 bp, Artificial Sequence
  ENSG00000130294_35 (sequence is synthesized)
agctgccagcctcgcgctccatccgcaacctctttggcagtgggagccttcgggcctcagagagtaaccgtgtgactggtgtgtacgagctcagcctgtgccacgtggctgacgcgggca

SEQ ID NO: 284270 - DNA, 120 bp, Artificial Sequence
  ENSG00000130294_36 (sequence is synthesized)
gcccagggatgcagcgccggcgccgacgagtcctggacacatctgtggcctatgtccggggcgaggagaacctggcaggctggaggccccggagtgacagtctcattctggaccaccagt

SEQ ID NO: 284271 - DNA, 120 bp, Artificial Sequence
  ENSG00000130294_37 (sequence is synthesized)
tccccggccttcagcgaggactctgagtcccatggctcctccagcgcctcctccccgctctcggctgagggccgcccatcacccctggaggctcccaacgagaggcagcgggagctggcc

SEQ ID NO: 284272 - DNA, 120 bp, Artificial Sequence
  ENSG00000130294_38 (sequence is synthesized)
gtcaagtgcttgcgcctgctcacgcacacattcaacagagagtacacacacagccacgtctgcgtcagtgccagcgagagcaagctctccgagatgtctgtcaccctgctccgggacccg

SEQ ID NO: 284273 - DNA, 120 bp, Artificial Sequence
  ENSG00000130294_39 (sequence is synthesized)
tcgatgtcccctctaggggtggccactctcaccccctcctccacttgcccctctctggttgaagggcggtacggtgccactgacctgaggaccccgcagccctgctcccggccagccagc

SEQ ID NO: 284274 - DNA, 120 bp, Artificial Sequence
  ENSG00000130294_40 (sequence is synthesized)
ccagagcccgagctgctgccagaggccgactccaagaagctcccttcccctgcccgggcaacagagacagacaaggagccccagcgcctgctggtccctgacatccaggagatccgagtc

SEQ ID NO: 284275 - DNA, 120 bp, Artificial Sequence
  ENSG00000130294_41 (sequence is synthesized)
agcccgatcgtttccaagaaggggtacctgcacttcctggagccgcacacgtcaggctgggccaggcgcttcgtggtggtgcggcgcccctatgcctacatgtacaacagcgacaaggac

SEQ ID NO: 284276 - DNA, 120 bp, Artificial Sequence
  ENSG00000130294_42 (sequence is synthesized)
accgtggagcggttcgtgctcaacctggccactgcccaggtggagtacagtgaggaccagcaggctatgctcaagacacccaacacattcgcggtgtgcacggaacaccgcggcatcctg

SEQ ID NO: 284277 - DNA, 120 bp, Artificial Sequence
  ENSG00000130294_43 (sequence is synthesized)
ctgcaggccgccagcgacaaggacatgcatgactggctgtacgccttcaaccccctcctggccgggaccatacggtccaagctctccagaaggaggtctgcccagatgcgggtctgaacc

SEQ ID NO: 284278 - DNA, 120 bp, Artificial Sequence
  ENSG00000130294_44 (sequence is synthesized)
tgagccctcccgtgacagccggcaggcccagcccatcccctccctcatcctcgtctgtcctgtcacctgccgcccagcccctctcctgccagacagcccacgaccgggtcgaccccccag

SEQ ID NO: 284279 - DNA, 120 bp, Artificial Sequence
  ENSG00000130294_45 (sequence is synthesized)
gggacgcccatgccaggcccggggacctgtgccacacgaccagctgtgctcccagcagaggctgtgcgtgtcagttcttcttgcagaatgtgctctggtggaacaagttgggagaggctg

SEQ ID NO: 284280 - DNA, 120 bp, Artificial Sequence
  ENSG00000130294_46 (sequence is synthesized)
ggggggccaagggcacaggttacgggggttcttgctgccgttctaatatttttttaagcatagacagacttataattaatatacgttagttagtgacattgaaacagtcaactcggaaat

SEQ ID NO: 284281 - DNA, 120 bp, Artificial Sequence
  ENSG00000130294_47 (sequence is synthesized)
taactataagacttgttctatttataagtatttatttctaatgcctccacatagccctgtaatattcagatggaacccccaaccacctccaccctgtttgttcccacatgtgtctcccaa

SEQ ID NO: 284282 - DNA, 120 bp, Artificial Sequence
  ENSG00000130294_48 (sequence is synthesized)
gcctgctagggacaggcagggcagggacagccaccttggaaggccgcagtgaggagctgtctggaccagtggggcaccttggggctagcacacgggtgtatcgcctgggccccaggcttc

SEQ ID NO: 284283 - DNA, 120 bp, Artificial Sequence
  ENSG00000130294_49 (sequence is synthesized)
tccatggccacatgggtcctgggtgtatgtgtgggagagtgggggggtgtctttggtgcctgaagtctgcgcggcatggagggtggtgtgagttcctctggtgggagggagaacgcacat

SEQ ID NO: 284284 - DNA, 120 bp, Artificial Sequence
  ENSG00000130294_50 (sequence is synthesized)
ctcttctgggcggccacctgaggagtgactccaagaagagttccggcagctttccccaggaaagggtgaggggtgacactcggctctggctctgagatgaggcagacggcacccaggctg

SEQ ID NO: 284285 - DNA, 120 bp, Artificial Sequence
  ENSG00000130294_51 (sequence is synthesized)
tgatctgtcctgggcggggaccaggagggagcggggtcgggatcacctgccagtgtgcagactctgggactgcgtgctgtctccggaccatcagggtagggtggtgggttgagaccagga

SEQ ID NO: 284286 - DNA, 120 bp, Artificial Sequence
  ENSG00000130294_52 (sequence is synthesized)
agtcagggaagatcggaattcagggcgacggtctaggtgtcgagggctgtggcgcagcctcttcagctgcggcgagaaatggagtgagtcaaggtagcttctgggaagaaatgctgccat

SEQ ID NO: 284287 - DNA, 120 bp, Artificial Sequence
  ENSG00000130294_53 (sequence is synthesized)
tagcaggtttcttgcaaagactttcctctctttgttcccagggcagagagtttctgtgagtcccactgagaaaatcccatggggtgggggtatcctggtcggtcggcaatggagggtggc

SEQ ID NO: 284288 - DNA, 120 bp, Artificial Sequence
  ENSG00000130294_54 (sequence is synthesized)
tggcttggtggttattgtcttcaaggagctcttcgctgctgcatctgcggtgtccctttgttcttgtcccatttcaccccctctgcagacaccaatgtccgagggccacccaggacagga

SEQ ID NO: 284289 - DNA, 120 bp, Artificial Sequence
  ENSG00000130294_55 (sequence is synthesized)
cgggggtcagccccaagctgagagtctggtcataggagtcatgtccagaggcctagggaggttttagggccctccccacccacacccacaggtcgatttggtctctttttagctcaagga

SEQ ID NO: 284290 - DNA, 120 bp, Artificial Sequence
  ENSG00000130294_56 (sequence is synthesized)
aagacagtagccaagcaacagagcccctctcccgccgtggcccgtgggagcagttacatcgggtctggtgctccagacctagggcccagcactttcatcagatcctgcctcctggagtgg

SEQ ID NO: 284291 - DNA, 120 bp, Artificial Sequence
  ENSG00000130294_57 (sequence is synthesized)
gggaaacgcagcaccccactggttctgaggcccctaccctcccaggctgtcccacgtgatgctgacatgagcctcagagaccccaatcccatgcctgggggagagacagcggctcaggag

SEQ ID NO: 284292 - DNA, 120 bp, Artificial Sequence
  ENSG00000130294_58 (sequence is synthesized)
tgggggagcacgggccttctacaccacatgggaaggctctggcatgaggttttcctttgggaaggttgtttgggcccctgaagttccatctccgagagtggtgtgcagggcaggccaggg

SEQ ID NO: 284293 - DNA, 120 bp, Artificial Sequence
  ENSG00000130294_59 (sequence is synthesized)
cccatgctggctgcagtctctgtggctgcctgcctgggccagcctgtttgggagctgggactgtgggctcgccttttcgtacctgggctcaggtgcggtgtggccaccgccaccctcatc

SEQ ID NO: 284294 - DNA, 120 bp, Artificial Sequence
  ENSG00000130294_60 (sequence is synthesized)
ccctgcctgggaggctctcccaggggctgatgggggggttctgtgagggagaatcagggctcgggaagccacgcctgggaaggcaggacacaggacacagcagctttctttggaaatctc

SEQ ID NO: 284295 - DNA, 120 bp, Artificial Sequence
  ENSG00000130294_61 (sequence is synthesized)
ccaggtgaggattcacatcccaaaataaaattcagaagccaggtggcctgtgctccccatgggtgacctctggaggcagtggaccaagatgcagcaaggagaggatgcagaacagcttct

SEQ ID NO: 284296 - DNA, 120 bp, Artificial Sequence
  ENSG00000130294_62 (sequence is synthesized)
tgcagaagcacctgctccggcatccagcgctgcctggaggcaggaaggagaggcagggcaggacacgctggtctgagatgagggggagccccacgggccccaggcaggctagaggaggca

SEQ ID NO: 284297 - DNA, 120 bp, Artificial Sequence
  ENSG00000130294_63 (sequence is synthesized)
caggccctgccacggccaactcaggtcagccagcctgaggctgtggcctccaaagggtctgggcgcaccccccaggtcgcaggtgtctgaggccagccaacctgcagagcactcgcggcg

SEQ ID NO: 284298 - DNA, 120 bp, Artificial Sequence
  ENSG00000130294_64 (sequence is synthesized)
tgggtgggctgagtggaggtgcctgggagctgcctaaattcagaagcctccactgccatggagactgcctggctgtgtcctctcagccaggtgccgtgttggccttggctaggacccaga

SEQ ID NO: 284299 - DNA, 120 bp, Artificial Sequence
  ENSG00000130294_65 (sequence is synthesized)
gccacactgcagcctccgccgactccctccttccgggcctgctctagtgaggagtgcctaagccaggacccagaaactcagagttgatggtgagaggaggccgcctgagtcaggacacct

SEQ ID NO: 284300 - DNA, 120 bp, Artificial Sequence
  ENSG00000130294_66 (sequence is synthesized)
ggcttcttgaaaagttcgctctgccagaaaccacctagggaccacgttagctgccttccttgagctccccaggagtcggtttccacatctgtgaggtggagggctggtgtggaggtgctc

SEQ ID NO: 284301 - DNA, 120 bp, Artificial Sequence
  ENSG00000130294_67 (sequence is synthesized)
atggggtgcggtgcttgggagacagccaggcccagggtggctgctgcttcctgctaagtgggggaggtgagacagatctggaaagccgtctccctcagatggtttcatttaatgctttat

SEQ ID NO: 284302 - DNA, 120 bp, Artificial Sequence
  ENSG00000130294_68 (sequence is synthesized)
actgccgagtctgggggcttgttttggtttgggggcagccatcctccaccagaaagggggagctccttccgctgcggctccagatagatggggatgccgggctccaggccgaccagcact

SEQ ID NO: 284303 - DNA, 120 bp, Artificial Sequence
  ENSG00000130294_69 (sequence is synthesized)
tgggatctgatgggacacggccagtgcctaggggtgccaagtccaaggcctcccactgggagtcatcgctgagaagatgccaatgtttcatccaccggctgcacaggcacaaactccccc

SEQ ID NO: 284304 - DNA, 120 bp, Artificial Sequence
  ENSG00000130294_70 (sequence is synthesized)
acccaggacggctgtgatgaggtggccctccctgtcaaccctggtccctggagtccccagcacctggggccctggtggggctgatgtcacaggtgtttactgtgctgctgcactggtcct

SEQ ID NO: 284305 - DNA, 120 bp, Artificial Sequence
  ENSG00000130294_71 (sequence is synthesized)
atgccagcctcacccatgtggggaccacggaaggcacactcccttacccccggtgccgggccgtgcggtcccccagacggacagcagctgtggcgacctgcgtttctccctgggcctgtg

SEQ ID NO: 284306 - DNA, 120 bp, Artificial Sequence
  ENSG00000130294_72 (sequence is synthesized)
cttcctgtagttagtccgtcccctggttcccctgtggctcagaggccgcgtccctggcttgtacatatgtgattgctgtgggcacaccccagaccccatgtcatagctgccgtcccgacg

SEQ ID NO: 284307 - DNA, 120 bp, Artificial Sequence
  ENSG00000130294_73 (sequence is synthesized)
tcacgacgcctgtcccgatgtcttacacccgagtgttagccctaggctcctgtactgtgcgtgcacttgaggctctgtccaattaagaaataaatgtggctcttactcaacacagtccca

SEQ ID NO: 284308 - DNA, 120 bp, Artificial Sequence
  ENSG00000130294_74 (sequence is synthesized)
atgagcgagcgcatggctgctctcaccccctcccccaccttctcgagccccgactccgacgccaccgagcctgccgaggagcagagcgtgggggaggaggaggaggaggaggaggaggag

SEQ ID NO: 284309 - DNA, 120 bp, Artificial Sequence
  ENSG00000130294_75 (sequence is synthesized)
ctcaacatcctctcttccggatacatccacccagcccaagatgaccgcgtttcattgggaaatgacactaggaccttttaccaatttgaggctgcgtgggacagctccatgcacaactct

SEQ ID NO: 284310 - DNA, 120 bp, Artificial Sequence
  ENSG00000130294_76 (sequence is synthesized)
gggatggaagagggaggaacctgaaggacatgctagcaagtccctgactgtggcctagaggaggcctctggggtggcggcctggggtctgggcagggagaggcctgggcagcctgagaat

SEQ ID NO: 284311 - DNA, 120 bp, Artificial Sequence
  ENSG00000130294_77 (sequence is synthesized)
gtgtccagcagagcgggccccgccccttgcccagcctccagctttgaggacccacttggcagggcctgcgctggcccctccctttcgcttcctctgcagtgggctcgggcttgaccttga

SEQ ID NO: 284312 - DNA, 120 bp, Artificial Sequence
  ENSG00000130294_78 (sequence is synthesized)
catcactgacaccaacactgtgcctggaggacccaaatacgtgtccgaccttgagaacaataaccttaaccgtggcgggacggtgaatgaagcccctgaccctctctccacagtgaccaa

SEQ ID NO: 284313 - DNA, 120 bp, Artificial Sequence
  ENSG00000130294_79 (sequence is synthesized)
cccatgaccatggccgtgactcgggcacagagagcacagaacagggggccccaatggccgagtgccttggggtggccacaggctgagggaagggcctggaggagtggagtccgcagccct

SEQ ID NO: 284314 - DNA, 120 bp, Artificial Sequence
  ENSG00000130294_80 (sequence is synthesized)
ctcagagggtgcctgtgccccgccagctccatcctagtgtgtgtgtgttctcttccctgaagaagaccagaaatgggtggaaaataagctaaagctcccctttcctgagacagtgcttat

SEQ ID NO: 284315 - DNA, 120 bp, Artificial Sequence
  ENSG00000130294_81 (sequence is synthesized)
aggcaaggcacctatgccagggcactccaccaaaaccactcagcccctgaagcttgaggttcttgtaagctctggacaaccccatatgacccagacgacttctctagttctcaagtccct

SEQ ID NO: 284316 - DNA, 120 bp, Artificial Sequence
  ENSG00000130294_82 (sequence is synthesized)
gagagattgagagagagagatggcagtgggggtaggagtgggccctggcctgatacaaggagcggccctgacaagtgcttttccagccccatattcccagccctgtcctccctggcctga

SEQ ID NO: 284317 - DNA, 120 bp, Artificial Sequence
  ENSG00000130294_83 (sequence is synthesized)
ggttcctcccagccattcctctccacacaccacagggcctgttatttcaggggacgtgggatggggtcttggcactgccacccaaacccactgcagggctgtagccgccagaacccatgg

SEQ ID NO: 284318 - DNA, 120 bp, Artificial Sequence
  ENSG00000130294_84 (sequence is synthesized)
gtccatgtgtatgaatatgtgaggctcccaagcaaactttccaggtcacctgttggtcctgagggtgggaacatggaggcagggctgtgtcacctgagccttacaaatggctgcctcctt

SEQ ID NO: 284319 - DNA, 120 bp, Artificial Sequence
  ENSG00000130294_85 (sequence is synthesized)
ccccggtctccagtctggggtctgcacccagcccccttcaccccatgggaccgtggtattctgaggcctcaacgtggccaaactctcgaggtcctcatatggcctcagccactcccagcc

SEQ ID NO: 284320 - DNA, 120 bp, Artificial Sequence
  ENSG00000130294_86 (sequence is synthesized)
gagacccctgttctcagtcccacctgcaggtgtcctccggaaccttccggaaccttcctgctggccatacatgtgatttctttccaagcctgggggcacagttttggttctctcatcttt

SEQ ID NO: 284321 - DNA, 120 bp, Artificial Sequence
  ENSG00000130294_87 (sequence is synthesized)
aagtgggcggtggctggaagggggctctggacacagcttcccacaggacctgctgggtggctcttcttggaggctgtcagcaccttggggagccacacaccgaacaccaggaccagccgt

SEQ ID NO: 284322 - DNA, 120 bp, Artificial Sequence
  ENSG00000130294_88 (sequence is synthesized)
gcttgcgtgctgaacacgctcctgattcttgggggtgggggagaatgagccggaatgtcagggccctgacagcagggctgccgaggctaccgggcacccgtggccaccttcagtgggtct

SEQ ID NO: 284323 - DNA, 120 bp, Artificial Sequence
  ENSG00000130294_89 (sequence is synthesized)
ccctgtggtctgccacatggacctggtgtccaggttcacactgggcacagctgggaggaaagagcttgggggtcaggatccagtgtccttgagggctggctgtggtcattctggaggtca

SEQ ID NO: 284324 - DNA, 120 bp, Artificial Sequence
  ENSG00000130294_90 (sequence is synthesized)
ctcagtaattgtgggatgccaccgacctgtctgtgggagggtggccgaggtgctctcagaatctgtccggggcacagtggggctgctctgtggggtatggggcctgaggggctctcgacg

SEQ ID NO: 284325 - DNA, 120 bp, Artificial Sequence
  ENSG00000130294_91 (sequence is synthesized)
ccgtggagggactggagatgccagatgctgtgctcatgttgcctgtaccccacttgggctgggacaaagtggaggctgctgtgggggcctggcctcacgtcacagccccatgggcacctg

SEQ ID NO: 284326 - DNA, 120 bp, Artificial Sequence
  ENSG00000130294_92 (sequence is synthesized)
agcaagaccagccaatgcatcttttctctgggggccggagggagtctgggatgaggactctgaacaggggctgtagctcagggacctcaacaccccatcaccccagccaggctgactgtg

SEQ ID NO: 284327 - DNA, 120 bp, Artificial Sequence
  ENSG00000130294_93 (sequence is synthesized)
cgtttgatagtggggcaagtcagcagccaggctggctgtgtgtccctgttgcggggcctggtgactgcatgtcactccttctactccccacagtaaccgtgtgactggtgtgtacgagct

SEQ ID NO: 284328 - DNA, 120 bp, Artificial Sequence
  ENSG00000130294_94 (sequence is synthesized)
gaggaactctgggggcctgagggtagctgcgtgggaacatgagctgtgcgtggtgccgggacaggacgtgtgtgccacagggtggggagctacgtggaatcatgtgagggaaccgtgcag

SEQ ID NO: 284329 - DNA, 120 bp, Artificial Sequence
  ENSG00000130294_95 (sequence is synthesized)
gagaactgtgtgaattgtgaagagctgtgcggcccgtgtgaggagttccaagagactaagaacacgtggggctgcaggaagaactgggagaaggcgtgtggactgagtggggaactgtgg

SEQ ID NO: 284330 - DNA, 120 bp, Artificial Sequence
  ENSG00000130294_96 (sequence is synthesized)
tgtcaccttcagtctagttgtggagatgaagagatgctggacttgctttcacagggtggaggtgggggcaggagagccactgggagaagggcgtggagtggggcacaggctccctggctg

SEQ ID NO: 284331 - DNA, 120 bp, Artificial Sequence
  ENSG00000130294_97 (sequence is synthesized)
ggccccgaggttcctgggggaccctgcccaccaagcccagcacttcctggaatcgggcacaagcttggctatcctggtggacgggccccgggagctcccactgtgggcacagctggagag

SEQ ID NO: 284332 - DNA, 120 bp, Artificial Sequence
  ENSG00000130294_98 (sequence is synthesized)
atagggactttcccccagagactggaggaccccttccccaagcgtcagccctttccaaggggtgcctgcattgctggaattaaaggcctgccagggcaagcggattggatcttgcggctg

SEQ ID NO: 284333 - DNA, 120 bp, Artificial Sequence
  ENSG00000130294_99 (sequence is synthesized)
tccgtgttgacctggctcctccgggaaaacctgggtgagaacttgtgggtttgcctgtccccagggctctgatcccaccctgggctgtgcccttcttccccactgagggggtgcccagtc

SEQ ID NO: 284334 - DNA, 120 bp, Artificial Sequence
  ENSG00000130294_100 (sequence is synthesized)
aggctgggaggtgaacctggagggtccagtcagttcgtggcccttctggaggacctggggcaacggccagcagtgggttaacgaagcgagtgtgggaaccaggacagcccagggggtggc

SEQ ID NO: 284335 - DNA, 120 bp, Artificial Sequence
  ENSG00000130294_101 (sequence is synthesized)
acagcacacacctgcctgtgtcagtggtcctgggtcaggtgggctgtgacacccaggccaagtactcatccttctctgggccttggtttccccatcagtcacggggacctgggacgcgat

SEQ ID NO: 284336 - DNA, 120 bp, Artificial Sequence
  ENSG00000130294_102 (sequence is synthesized)
ctgggagctctgcttgctggattttgaggggctgccataaacctcctcttctccgtctgagttctgagcagtgagacttagacggggaggtgggaattgaaatgcacccgacgctgatcc

SEQ ID NO: 284337 - DNA, 120 bp, Artificial Sequence
  ENSG00000130294_103 (sequence is synthesized)
cgtccatcccggaataacctcagagtcctccccaactgcatttacagctggagaggctgatgcccagggaggtaaactgagtcttgggctgacctggtgaacatagatgactgggggtcc

SEQ ID NO: 284338 - DNA, 120 bp, Artificial Sequence
  ENSG00000130294_104 (sequence is synthesized)
ctggcctccctcagccgcatggctgaggtgtgcagagccctggctgaccacctctgcaccccacaactagccatgcttgctccccagctcaggtcagtattgcagaccgcagcaggcctg

SEQ ID NO: 284339 - DNA, 120 bp, Artificial Sequence
  ENSG00000130294_105 (sequence is synthesized)
cggatggatgggccccgctgagagaggaggagagtgtgttccttcacctgagacgtgggctgggaaggagccgcctgctccaggcacacccaggttcagtcccagggcgggggcagggga

SEQ ID NO: 284340 - DNA, 120 bp, Artificial Sequence
  ENSG00000130294_106 (sequence is synthesized)
gtcctcccacagaggctttcctggggcccgtgtggtatgtgcccagcccttcacaccgtctcttcagtccctatggggacccactggggacccatgccctggggacatggccctgaggat

SEQ ID NO: 284341 - DNA, 120 bp, Artificial Sequence
  ENSG00000130294_107 (sequence is synthesized)
acacagttccctggggtcaagcaggcaagatcatctgtccagacttgaagcaccgccaggcagcagtcctgagggctggcgtggagtcagtggtgatcttttccgatggctgaggttacc

SEQ ID NO: 284342 - DNA, 120 bp, Artificial Sequence
  ENSG00000130294_108 (sequence is synthesized)
tagacaggattccctcaagagaaagaacacagtctgttcctcatgccacgcattacctgatgctttgatcctactaacctgggccaggaatctgatgttaaatactgaggaatatatttc

SEQ ID NO: 284343 - DNA, 120 bp, Artificial Sequence
  ENSG00000130294_109 (sequence is synthesized)
aaatgaaaatgatagaagtgcttgaaaaaaatattgaacataaatggtatttattttggagtaaatactttaaaaccctccacaactttcctctctgctttggggaaaggaaggcctgat

SEQ ID NO: 284344 - DNA, 120 bp, Artificial Sequence
  ENSG00000130294_110 (sequence is synthesized)
agtcagcccctggaactaggaaggcggctgggggcgggtgacgcaggctggggtttgccggggtggcccccgagcggcgtgtgacttgggggtccaaggaagttaaactggacaggctgg

SEQ ID NO: 284345 - DNA, 120 bp, Artificial Sequence
  ENSG00000130294_111 (sequence is synthesized)
ggattgcccccttcttaggcctctatccttggcttatagaacagccgcctcttccttgtgtctgttcacatggccctccccctctgcgtgtgcctgggcccaaacttccgcttttcatag

SEQ ID NO: 284346 - DNA, 120 bp, Artificial Sequence
  ENSG00000130294_112 (sequence is synthesized)
ggacagcagccatgttggattgggacctactctgatgacctctcgttaactccgttttctctgtaaaggccctatcccaggatatactctcattctgaagtcctggggttgggacttcaa

SEQ ID NO: 284347 - DNA, 120 bp, Artificial Sequence
  ENSG00000130294_113 (sequence is synthesized)
catacgaatttggtgaggggacatggtccaacccataactcttgctgagtggggcaggacctaagaaggggagtcctgaagagaccagcgctgccctttgtcacctttcccagctccgtg

SEQ ID NO: 284348 - DNA, 120 bp, Artificial Sequence
  ENSG00000130294_114 (sequence is synthesized)
ttctgaaagggcagctgagccacgcggcccctgttcgtcctggagagagagcccgagggacacactccagagtctgtctggggcacgtggtgggaggaggggctgggctgaagggcctag

SEQ ID NO: 284349 - DNA, 120 bp, Artificial Sequence
  ENSG00000130294_115 (sequence is synthesized)
aggaggctgctgcccctgggcagacgtgggcccagctaggggtcccagatctgggcctgaagcgcttagctcactgatgtgactctccttcccccttgaatgtgacctggccgtgccctc

SEQ ID NO: 284350 - DNA, 120 bp, Artificial Sequence
  ENSG00000130294_116 (sequence is synthesized)
tgccttttaaaaaacaaaaacaaaaactggactgcaaggttgaatccataaatccataaatccatgtgctgttttttttttgtttttgagaccgagtctcactcttgtcgcccaggctgg

SEQ ID NO: 284351 - DNA, 61 bp, Artificial Sequence
  ENSG00000130294_117 (sequence is synthesized)
cctccatgtgcttttaatggcagttaactcactctaccatacttagtgtgtgggtgttgtc

SEQ ID NO: 284352 - DNA, 120 bp, Artificial Sequence
  ENSG00000130294_118 (sequence is synthesized)
agttaactcactctaccatacttagtgtgtgggtgttgtccttgggatgcaagatggctgcagcaccaccagacattgtgtctgcattccgggcagcacaaaaacagaagtgttccatcc

SEQ ID NO: 284353 - DNA, 120 bp, Artificial Sequence
  ENSG00000130294_119 (sequence is synthesized)
ccacagcacccccagagtctgcagtacataggccgtggccagacctgggctgtggcctcccttccaagtgcaagaggtgactggaagtgtgggcgtttcttgctggtcatagtagtgagg

SEQ ID NO: 284354 - DNA, 120 bp, Artificial Sequence
  ENSG00000130294_120 (sequence is synthesized)
gagagggagggtggggagcagtgggcaggggcatctgcaagcacatcccctctccttagttacagccgaattattccagcttcacatggggatggtgtgaccatctcaccagatggtggt

SEQ ID NO: 284355 - DNA, 120 bp, Artificial Sequence
  ENSG00000130294_121 (sequence is synthesized)
gaggttgccgtgaggaggcgctggcagagctcttcccagcgagtgcttgggactcttcagccatgcacagcagctgcccccacttcaggaagacaaaggggccagctgttcagcagttag

SEQ ID NO: 284356 - DNA, 120 bp, Artificial Sequence
  ENSG00000130294_122 (sequence is synthesized)
cgtgtcatccaccaggaagtcattttctgtggtgtttgggttaaaatgtgcacattcaaacaagacctggtttgatcctcacagacattccagggtcggggaggggtcaccccaatttta

SEQ ID NO: 284357 - DNA, 120 bp, Artificial Sequence
  ENSG00000130294_123 (sequence is synthesized)
tggtgaggcagctgaggcccgagcagtgagcctatgtctgggaccctcggggtccccacacatggagaccagtccctcaggcagcccaggggtggacagagctgtggctacctgtcccca

SEQ ID NO: 284358 - DNA, 120 bp, Artificial Sequence
  ENSG00000130294_124 (sequence is synthesized)
gtggggttttctcgagggcaggagcagagactttctcctgcctgcgtccaggccacacctgaggccctgggaaggccctggggctgcctgtcggtgctgggcattgtgcccccaggagaa

SEQ ID NO: 284359 - DNA, 120 bp, Artificial Sequence
  ENSG00000130294_125 (sequence is synthesized)
attatcatgactttttggtgtaagaagaagcaggaacattcctcctctgtgtcttgcttagccttccttttccagcagtcaggaaggccggtggtttccaggctaagcacctgcatttgt

SEQ ID NO: 284360 - DNA, 120 bp, Artificial Sequence
  ENSG00000130294_126 (sequence is synthesized)
cagtgtgtgtatacgggggtgttcactgtggccgagagacagacaagaaagaccgtggagcagcaactacacatggcacctgggttgctgaggaccctgtagggcctccctgttccccct

SEQ ID NO: 284361 - DNA, 120 bp, Artificial Sequence
  ENSG00000130294_127 (sequence is synthesized)
ctgtgcctcgttgatggtttctgtttcttgccttctctgggccccatctcttactttttcccatcttcatcttttttctctccctccctctgtctgtctgcccgccctacccctcctccc

SEQ ID NO: 284362 - DNA, 120 bp, Artificial Sequence
  ENSG00000130299_0 (sequence is synthesized)
gcccagacttgaagccacacaggcaggtcgggcaggcgggtcgcaggttgtaaatccatgtggcgggggctttggaccctggcggcccaagcggcacgtgggcctcgcagattgtgcacg

SEQ ID NO: 284363 - DNA, 120 bp, Artificial Sequence
  ENSG00000130299_1 (sequence is synthesized)
cgccggagcagcggcgcaccagcccccggctccggcgccaccatcttcgcgctaagctctggccaaggccgctgcggcatcgcagtgatccggaccagcggccccgccagcggccacgcc

SEQ ID NO: 284364 - DNA, 120 bp, Artificial Sequence
  ENSG00000130299_2 (sequence is synthesized)
ctccgaattctcacagcaccccgagacctgccccttgctcgccacgccagcctgcgcctgctcagcgatccccgctccggggagcctctggaccgcgcactggtgctctggttcccaggt

SEQ ID NO: 284365 - DNA, 120 bp, Artificial Sequence
  ENSG00000130299_3 (sequence is synthesized)
ccccagagtttcaccggtgaggactgcgtggagttccacgtgcatggaggcccggcagtggtgagcggcgtcctgcaggccttgggcagcgtgccagggcttcgaccggcggaggcaggc

SEQ ID NO: 284366 - DNA, 120 bp, Artificial Sequence
  ENSG00000130299_4 (sequence is synthesized)
gagttcaccagacgggcgttcgccaatgggaagctgaacctgaccgaagtggaggggctggcggaccttatccacgcggaaacagaggcgcagcggcggcaggccctcaggcagctggac

SEQ ID NO: 284367 - DNA, 120 bp, Artificial Sequence
  ENSG00000130299_5 (sequence is synthesized)
ggagagctgggccacctctgccgtggctgggccgagaccctcaccaaagctctggcccacgtggaggcctatatcgatttcggcgaggatgacaacctggaggagggggtcctggagcaa

SEQ ID NO: 284368 - DNA, 120 bp, Artificial Sequence
  ENSG00000130299_6 (sequence is synthesized)
ggtgggtctacctggtggtgggggaggaagacacctcatatcagccctcaaaggctcccctcactgtctctctctgcctgccttctctcacccacagccgacatcgaagtacgggcactg

SEQ ID NO: 284369 - DNA, 120 bp, Artificial Sequence
  ENSG00000130299_7 (sequence is synthesized)
caggtggccctgggtgcacatctacgagatgccaggcgcgggcagaggctccgctcaggggtgcacgtagtggtcactggaccccccaatgcgggcaagagcagcctagtgaacctgctc

SEQ ID NO: 284370 - DNA, 120 bp, Artificial Sequence
  ENSG00000130299_8 (sequence is synthesized)
agccagggaccacccgtgacgtgctggagaccccagtcgacctggccggatttcctgtgctgctgagcgacacggctgggttgcgggagggcgtggggcccgtggagcaggagggcgtgc

SEQ ID NO: 284371 - DNA, 120 bp, Artificial Sequence
  ENSG00000130299_9 (sequence is synthesized)
ggcgcgcccgggagaggctagagcaggctgacctcattctggccatgctggatgcttctgacctggcctctccctccagttgcaacttcctggccaccgtcgtagcctctgtgggagccc

SEQ ID NO: 284372 - DNA, 120 bp, Artificial Sequence
  ENSG00000130299_10 (sequence is synthesized)
agagccccagtgacagcagccagcgcctcctcctggtgctgaacaagtcggacctgctgtccccggagggcccaggtcccggtcctgacctgcccccgcacctgctgctgtcctgtctga

SEQ ID NO: 284373 - DNA, 120 bp, Artificial Sequence
  ENSG00000130299_11 (sequence is synthesized)
cgggagaggggctggacggcctcctggaggcgctgaggaaggagctagctgcagtgtgtggggacccgtccacagatcccccgctgctgacccgagcaaggcaccagcaccacctccagg

SEQ ID NO: 284374 - DNA, 120 bp, Artificial Sequence
  ENSG00000130299_12 (sequence is synthesized)
gttgcctggatgccctcggccactacaagcagtcaaaagacctggccctggcggcagaggcgctgcgggtggcccggggtcacctgacccggctcacaggtggagggggtaccgaggaga

SEQ ID NO: 284375 - DNA, 120 bp, Artificial Sequence
  ENSG00000130299_13 (sequence is synthesized)
tcctggacatcatcttccaggacttctgtgtgggcaagtgacgggatccagggaagtcgcacccaagctgcgtggagacccaggagcctcgggggatctggaaacagtttaggccaattg

SEQ ID NO: 284376 - DNA, 120 bp, Artificial Sequence
  ENSG00000130299_14 (sequence is synthesized)
ggattctcattcgcctgggaaagaacttgattctcaaatagtgaagcaacacagctgagaggtagtgagatccctgcagggactccctggagattcaggccctggaatggggctgaatgg

SEQ ID NO: 284377 - DNA, 120 bp, Artificial Sequence
  ENSG00000130299_15 (sequence is synthesized)
aggtcccgttcgacccttgatgctggggcatccgggttgggatggagataggaggatctcagtatatttgtttcgtagttttttatttattttgcaaataccaaaggaatgtaaaaaaaa

SEQ ID NO: 284378 - DNA, 66 bp, Artificial Sequence
  ENSG00000130299_16 (sequence is synthesized)
ccccttccccttccccttccccttcccctacccttccctcctctgtctccggggctcaagcgcttc

SEQ ID NO: 284379 - DNA, 120 bp, Artificial Sequence
  ENSG00000130299_17 (sequence is synthesized)
caaagtgctgggatcacaggcgtgagctatcacacctggccccagaagtgtttcaacatggaaattttccttagcccttctgtggttgtcatggcttaatgtgtgtctttccagaacttt

SEQ ID NO: 284380 - DNA, 120 bp, Artificial Sequence
  ENSG00000130299_18 (sequence is synthesized)
gttgtcatggcttaatgtgtgtctttccagaactttgaatgtttgcatacttgtggatgtacctttcaaatatgtttgtcttgtgtatcatatataaatggtattgtgttcattgctcta

SEQ ID NO: 284381 - DNA, 120 bp, Artificial Sequence
  ENSG00000130299_19 (sequence is synthesized)
gttcgcgtctccgcccgtgttgttttctgggtttccttctcgcccgcctacctcgctccctgctgctggtccccgcccgcactgatggtgcattctccaacttgtccccacccatgcttt

SEQ ID NO: 284382 - DNA, 120 bp, Artificial Sequence
  ENSG00000130299_20 (sequence is synthesized)
agtgcctggaattccaccatcagcgctttattccgagtttcagtgcagacctggaccagagagacagagagccaaggaagtccacagtggagagagggctgtgctgggggttccaggaag

SEQ ID NO: 284383 - DNA, 120 bp, Artificial Sequence
  ENSG00000130299_21 (sequence is synthesized)
acttcctggaggaggggatcttggagctaggccttgaagacgagtttgtcaaatgaggaagggcatccgaagccgagggaacggcagaagggaacgctggggaggggagagaatctggag

SEQ ID NO: 284384 - DNA, 120 bp, Artificial Sequence
  ENSG00000130299_22 (sequence is synthesized)
cggtcaccgagatgctctgagtttccggtctgaacctgaacgtaaagaggtgtagtccctcctttcttgaacgggaaaactgaacgcacataggtccttgccacgcctaaggctgcggag

SEQ ID NO: 284385 - DNA, 120 bp, Artificial Sequence
  ENSG00000130299_23 (sequence is synthesized)
tgagcagatggaaaatgcgggactcaaaacctcccctcgctgtaatttgcactgccctgtgccaaactctgtcctttcttccattccttattcctattgtcagcctcgctgcgctaggac

SEQ ID NO: 284386 - DNA, 120 bp, Artificial Sequence
  ENSG00000130299_24 (sequence is synthesized)
tccattctctccctcagagaccccatctgtgcaacccctgcatgagaccccctctcaatcccgcattcattccctgcgtgaaagcttccggcctatgagccgccattctggcccctgaag

SEQ ID NO: 284387 - DNA, 120 bp, Artificial Sequence
  ENSG00000130299_25 (sequence is synthesized)
tcgggctggacaaattgggtgtgggaaggtgggtttctgggtgcacacaccacctctgctctccctgccccgccaggctctggcccacgtggaggcctatatcgatttcggcgaggatga

SEQ ID NO: 284388 - DNA, 120 bp, Artificial Sequence
  ENSG00000130299_26 (sequence is synthesized)
aggcgggtcgcaggttgtaaatccatgtggcgggggctttggaccctggcggcccaagcggcacgtgggcctcgcagaacatccaatttgtgcatcccccagccgcagaacccccccacc

SEQ ID NO: 284389 - DNA, 120 bp, Artificial Sequence
  ENSG00000130299_27 (sequence is synthesized)
agacttgaagccacacaggcaggtcgggcaggcgggtcgcaggttgtaaatccatgtggcgggggctttggaccctggcggcccaagcggcacgtgggcctcgcagccgcagaacccccc

SEQ ID NO: 284390 - DNA, 120 bp, Artificial Sequence
  ENSG00000130299_28 (sequence is synthesized)
gcaggcgggtcgcaggttgtaaatccatgtggcgggggctttggaccctggcggcccaagcggcacgtgggcctcgcaggtggggctacaggggaaggggtgcgacagcttggggtgctg

SEQ ID NO: 284391 - DNA, 120 bp, Artificial Sequence
  ENSG00000130299_29 (sequence is synthesized)
cttggaccccagacccactccctgggttttaggggcccaattccctgcggcagagcaatcattcgcgttcttccgtgcctcaatcgttcatgacccttgcggcagagcccatatctgggt

SEQ ID NO: 284392 - DNA, 120 bp, Artificial Sequence
  ENSG00000130299_30 (sequence is synthesized)
actgatggtgcattctccaacttgtccccacccatgctttcttctggtccccgcctcggagcctcagtttccccatctgcaaactccggaccctggagacgctgtttggaatattgtgca

SEQ ID NO: 284393 - DNA, 120 bp, Artificial Sequence
  ENSG00000130299_31 (sequence is synthesized)
ttcagtgctgtcctgggttaacctgaaagcaatctccgaggctcccctttctggctttcggggagccagagactgaccggacacttggctctgcaggtgcagacctggaccagagagaca

SEQ ID NO: 284394 - DNA, 120 bp, Artificial Sequence
  ENSG00000130299_32 (sequence is synthesized)
tggaagcgagtatcttcagacggtgggcaggacgtatcctaagatacccaatggtggtcgagaatagttgagcactttactagtcaagccgcggagtgggcggggccccctgcccagact

SEQ ID NO: 284395 - DNA, 120 bp, Artificial Sequence
  ENSG00000130299_33 (sequence is synthesized)
gaacctgaacgtaaagagaacatccaatttgtgcatcccccagccgcagaacccccccacctggagcatctcgcgatcatcgagccctcggtctacttgacactgaggctgagcctccca

SEQ ID NO: 284396 - DNA, 120 bp, Artificial Sequence
  ENSG00000130300_0 (sequence is synthesized)
agagcaggcctggtggtgagcagggacggtgcaccggacggcgggatcgagcaaatgggtctggccatggagcacggagggtcctacgctcgggcggggggcagctctcggggctgctgg

SEQ ID NO: 284397 - DNA, 120 bp, Artificial Sequence
  ENSG00000130300_1 (sequence is synthesized)
tattacctgcgctacttcttcctcttcgtctccctcatccaattcctcatcatcctggggctcgtgctcttcatggtctatggcaacgtgcacgtgagcacagagtccaacctgcaggcc

SEQ ID NO: 284398 - DNA, 120 bp, Artificial Sequence
  ENSG00000130300_2 (sequence is synthesized)
accgagcgccgagccgagggcctatacagtcagctcctagggctcacggcctcccagtccaacttgaccaaggagctcaacttcaccacccgcgccaaggatgccatcatgcagatgtgg

SEQ ID NO: 284399 - DNA, 120 bp, Artificial Sequence
  ENSG00000130300_3 (sequence is synthesized)
ctgaatgctcgccgcgacctggaccgcatcaatgccagcttccgccagtgccagggtgaccgggtcatctacacgaacaatcagaggtacatggctgccatcatcttgagtgagaagcaa

SEQ ID NO: 284400 - DNA, 120 bp, Artificial Sequence
  ENSG00000130300_4 (sequence is synthesized)
tgcagagatcaattcaaggacatgaacaagagctgcgatgccttgctcttcatgctgaatcagaaggtgaagacgctggaggtggagatagccaaggagaagaccatttgcactaaggat

SEQ ID NO: 284401 - DNA, 120 bp, Artificial Sequence
  ENSG00000130300_5 (sequence is synthesized)
aaggaaagcgtgctgctgaacaaacgcgtggcggaggaacagctggttgaatgcgtgaaaacccgggagctgcagcaccaagagcgccagctggccaaggagcaactgcaaaaggtgcaa

SEQ ID NO: 284402 - DNA, 120 bp, Artificial Sequence
  ENSG00000130300_6 (sequence is synthesized)
gccctctgcctgcccctggacaaggacaagtttgagatggaccttcgtaacctgtggagggactccattatcccacgcagcctggacaacctgggttacaacctctaccatcccctgggc

SEQ ID NO: 284403 - DNA, 120 bp, Artificial Sequence
  ENSG00000130300_7 (sequence is synthesized)
tcggaattggcctccatccgcagagcctgcgaccacatgcccagcctcatgagctccaaggtggaggagctggcccggagcctccgggcggatatcgaacgcgtggcccgcgagaactca

SEQ ID NO: 284404 - DNA, 120 bp, Artificial Sequence
  ENSG00000130300_8 (sequence is synthesized)
gacctccaacgccagaagctggaagcccagcagggcctgcgggccagtcaggaggcgaaacagaaggtggagaaggaggctcaggcccgggaggccaagctccaagctgaatgctcccgg

SEQ ID NO: 284405 - DNA, 120 bp, Artificial Sequence
  ENSG00000130300_9 (sequence is synthesized)
tagcgctggaggagaaggcggtgctgcggaaggaacgagacaacctggccaaggagctggaagagaagaagagggaggcggagcagctcaggatggagctggccatcagaaactcagccc

SEQ ID NO: 284406 - DNA, 120 bp, Artificial Sequence
  ENSG00000130300_10 (sequence is synthesized)
tggacacctgcatcaagaccaagtcgcagccgatgatgccagtgtcaaggcccatgggccctgtccccaacccccagcccatcgacccagctagcctggaggagttcaagaggaagatcc

SEQ ID NO: 284407 - DNA, 120 bp, Artificial Sequence
  ENSG00000130300_11 (sequence is synthesized)
tggagtcccagaggccccctgcaggcatccctgtagccccatccagtggctgaggaggctccaggcctgaggaccaagggatggcccgactcggcggtttgcggaggatgcagggatatg

SEQ ID NO: 284408 - DNA, 120 bp, Artificial Sequence
  ENSG00000130300_12 (sequence is synthesized)
ctcacagcgcccgacacaaccccctcccgccgcccccaaccacccagggccaccatcagacaactccctgcatgcaaacccctagtaccctctcacacccgcacccgcgcctcacgatcc

SEQ ID NO: 284409 - DNA, 120 bp, Artificial Sequence
  ENSG00000130300_13 (sequence is synthesized)
ctcacccagagcacacggccgcggagatgacgtcacgcaagcaacggcgctgacgtcacatatcaccgtggtgatggcgtcacgtggccatgtagacgtcacgaagagatatagcgatgg

SEQ ID NO: 284410 - DNA, 120 bp, Artificial Sequence
  ENSG00000130300_14 (sequence is synthesized)
cgtcgtgcagatgcagcacgtcgcacacagacatggggaacttggcatgacgtcacaccgagatgcagcaacgacgtcacgggccatgtcgacgtcacacatattaatgtcacacagacg

SEQ ID NO: 284411 - DNA, 120 bp, Artificial Sequence
  ENSG00000130300_15 (sequence is synthesized)
cggcgatggcatcacacagacggtgatgatgtcacacacagacacagtgacaacacacaccatgacaacgacacctatagatatggcaccaacatcacatgcacgcatgccctttcacac

SEQ ID NO: 284412 - DNA, 120 bp, Artificial Sequence
  ENSG00000130300_16 (sequence is synthesized)
acactttctacccaattctcacctagtgtcacgttcccccgaccctggcacacgggccaaggtacccacaggatcccatcccctcccgcacagccctgggccccagcacctcccctcctc

SEQ ID NO: 284413 - DNA, 120 bp, Artificial Sequence
  ENSG00000130300_17 (sequence is synthesized)
cagcctcctggcctcccagccacttcctcacccccagtgcctggacccggaggtgagaacaggaagccattcacctccgctccttgagcgtgagtgtttccaggaccccctcggggccct

SEQ ID NO: 284414 - DNA, 120 bp, Artificial Sequence
  ENSG00000130300_18 (sequence is synthesized)
gagccgggggtgagggtcacctgttgtcgggaggggagccactccttctcccccaactcccagccctgcctgtggcccgttgaaatgttggtggcacttaataaatattagtaaatcctt

SEQ ID NO: 284415 - DNA, 120 bp, Artificial Sequence
  ENSG00000130300_19 (sequence is synthesized)
gagtgagaagcaatgcagagatcaattcaaggacatgaacaagagctgcgatgccttgctcttcatgctgaatcagaaggtgagaacaggaagccattcacctccgctccttgagcgtga

SEQ ID NO: 284416 - DNA, 120 bp, Artificial Sequence
  ENSG00000130303_0 (sequence is synthesized)
gaagattccagcaccctcccctaactccaggccagactctaaaggggagatctggatggcatctacttcgtatgactattgcagagtgcccatggaagacggggataagcgctgtaagct

SEQ ID NO: 284417 - DNA, 120 bp, Artificial Sequence
  ENSG00000130303_1 (sequence is synthesized)
tctgctggggataggaattctggtgctcctgatcatcgtgattctgggggtgcccttgattatcttcaccatcaaggccaacagcgaggcctgccgggacggccttcgggcagtgatgga

SEQ ID NO: 284418 - DNA, 120 bp, Artificial Sequence
  ENSG00000130303_2 (sequence is synthesized)
gtgtcgcaatgtcacccatctcctgcaacaagagctgaccgaggcccagaagggctttcaggatgtggaggcccaggccgccacctgcaaccacactgtgatggccctaatggcttccct

SEQ ID NO: 284419 - DNA, 120 bp, Artificial Sequence
  ENSG00000130303_3 (sequence is synthesized)
ggatgcagagaaggcccaaggacaaaagaaagtggaggagcttgagggagagatcactacattaaaccataagcttcaggacgcgtctgcagaggtggagcgactgagaagagaaaacca

SEQ ID NO: 284420 - DNA, 120 bp, Artificial Sequence
  ENSG00000130303_4 (sequence is synthesized)
gctcccaggactccagctccgctgcggcgccccagctgctgattgtgctgctgggcctcagcgctctgctgcagtgagatcccaggaagctggcacatcttggaaggtccgtcctgctcg

SEQ ID NO: 284421 - DNA, 120 bp, Artificial Sequence
  ENSG00000130303_5 (sequence is synthesized)
gcttttcgcttgaacattcccttgatctcatcagttctgagcgggtcatggggcaacacggttagcggggagagcacggggtagccggagaagggcctctggagcaggtctggaggggcc

SEQ ID NO: 284422 - DNA, 120 bp, Artificial Sequence
  ENSG00000130303_6 (sequence is synthesized)
atggggaagtcctgggtgtggggacacagtcgggttgacccagggctgtctccctccagagcctccctccggacaatgagtcccccctcttgtctcccaccctgagattgggcatggggt

SEQ ID NO: 284423 - DNA, 120 bp, Artificial Sequence
  ENSG00000130303_7 (sequence is synthesized)
gcggtgtggggggcatgtgctgcctgttgttatgggttttttttgcggggggggttgcttttttctggggtctttgagctccaaaaaataaacacttcctttgagggagagcacacctga

SEQ ID NO: 284424 - DNA, 120 bp, Artificial Sequence
  ENSG00000130303_8 (sequence is synthesized)
tttaagcccctctgtccccaggacctagggaggaggcccaggtcccaggggcagcagccaaactccccaggccaaaaccccagattctaactcttcttagatggccctaatggcttccct

SEQ ID NO: 284425 - DNA, 120 bp, Artificial Sequence
  ENSG00000130304_0 (sequence is synthesized)
ctctctgcttccccaggatgcgggctccgggtgcgggcgcggcctcggtggtctcgctggcgctgttgtggctgctggggctgccgtggacctggagcgcggcagcggcgctcggcgtgt

SEQ ID NO: 284426 - DNA, 120 bp, Artificial Sequence
  ENSG00000130304_1 (sequence is synthesized)
acgtgggcagcggcggctggcgcttcctgcgcatcgtctgcaagaccgcgaggcgagacctcttcggtctctctgtgctgatccgcgtgcgcctggagctgcggcggcaccagcgtgccg

SEQ ID NO: 284427 - DNA, 120 bp, Artificial Sequence
  ENSG00000130304_2 (sequence is synthesized)
gccacaccatcccgcgcatctttcaggcggtagtgcagcgacagcccgagcgcctggcgctggtggatgccgggaccggcgagtgctggacctttgcgcagctggacgcctactccaatg

SEQ ID NO: 284428 - DNA, 120 bp, Artificial Sequence
  ENSG00000130304_3 (sequence is synthesized)
cggtagccaacctcttccgccagctgggcttcgcgccgggcgacgtggtggccatcttcctggagggccggccggagttcgtggggctgtggctgggcctggccaaggcgggcatggagg

SEQ ID NO: 284429 - DNA, 120 bp, Artificial Sequence
  ENSG00000130304_4 (sequence is synthesized)
ccgcgctgctcaacgtgaacctgcggcgcgagcccctggccttctgcctgggcacctcgggcgctaaggccctgatctttggaggagaaatggtggcggcggtggccgaagtgagcgggc

SEQ ID NO: 284430 - DNA, 120 bp, Artificial Sequence
  ENSG00000130304_5 (sequence is synthesized)
atctggggaaaagtttgatcaagttctgctctggagacttggggcccgagggcatcttgccggacacccacctcctggacccgctgctgaaggaggcctctactgcccccttggcacaga

SEQ ID NO: 284431 - DNA, 120 bp, Artificial Sequence
  ENSG00000130304_6 (sequence is synthesized)
tccccagcaagggcatggacgatcgtcttttctacatctacacgtcggggaccaccgggctgcccaaggctgccattgtcgtgcacagcaggtactaccgcatggcagccttcggccacc

SEQ ID NO: 284432 - DNA, 120 bp, Artificial Sequence
  ENSG00000130304_7 (sequence is synthesized)
acgcctaccgcatgcaggcggctgacgtgctctatgactgcctgcccctgtaccactcggcaggaaacatcatcggcgtggggcagtgtctcatctatgggctgacagtcgtcctccgca

SEQ ID NO: 284433 - DNA, 120 bp, Artificial Sequence
  ENSG00000130304_8 (sequence is synthesized)
agaaattctcggccagccgcttctgggacgactgcatcaagtacaactgcacggtggttcagtacatcggggagatctgccgctacctgctgaagcagccggtgcgcgaggcggagaggc

SEQ ID NO: 284434 - DNA, 120 bp, Artificial Sequence
  ENSG00000130304_9 (sequence is synthesized)
gacaccgcgtgcgcctggcggtggggaacgggctgcgtcctgccatctgggaggagttcacggagcgcttcggcgtacgccaaatcggggagttctacggcgccaccgagtgcaactgca

SEQ ID NO: 284435 - DNA, 120 bp, Artificial Sequence
  ENSG00000130304_10 (sequence is synthesized)
gcattgccaacatggacggcaaggtcggctcctgtggtttcaacagccgcatcctgccccacgtgtaccccatccggctggtgaaggtcaatgaggacacaatggagctgctgcgggatg

SEQ ID NO: 284436 - DNA, 120 bp, Artificial Sequence
  ENSG00000130304_11 (sequence is synthesized)
cccagggcctctgcatcccctgccaggccggggagcctggcctccttgtgggtcagatcaaccaacaggacccgctgcgccgcttcgatggctatgtcagcgagagcgccaccagcaaga

SEQ ID NO: 284437 - DNA, 120 bp, Artificial Sequence
  ENSG00000130304_12 (sequence is synthesized)
agatcgcccacagcgtcttcagcaagggcgacagcgcctacctctcaggtgacgtgctagtgatggatgagctgggctacatgtacttccgggaccgtagcggggacaccttccgctggc

SEQ ID NO: 284438 - DNA, 120 bp, Artificial Sequence
  ENSG00000130304_13 (sequence is synthesized)
gaggggagaacgtctccaccaccgaggtggagggcgtgctgagccgcctgctgggccagacagacgtggccgtctatggggtggctgttccaggagtggagggtaaggcagggatggcgg

SEQ ID NO: 284439 - DNA, 120 bp, Artificial Sequence
  ENSG00000130304_14 (sequence is synthesized)
cgcgatataccaggagctgcagaaggtgctggcaccctatgcccggcccatcttcctgcgcctcctgccccaggtggacaccacaggcaccttcaagatccagaagacgaggctgcagcg

SEQ ID NO: 284440 - DNA, 120 bp, Artificial Sequence
  ENSG00000130304_15 (sequence is synthesized)
agagggctttgacccacgccagacctcagaccggctcttcttcctggacctgaagcagggccactacctgcccttaaatgaggcagtctacactcgcatctgctcgggcgccttcgccct

SEQ ID NO: 284441 - DNA, 120 bp, Artificial Sequence
  ENSG00000130304_16 (sequence is synthesized)
ctgaagctgttcctctactggccacaaactctgggcctggtgggagaggccagcttgagccagacagcgctgcccaggggtggccgcctagtacacacccacctggccgagctgtacctg

SEQ ID NO: 284442 - DNA, 120 bp, Artificial Sequence
  ENSG00000130304_17 (sequence is synthesized)
gcacggcccatcctggactgagaaactggaacctcagaggaacccgtgcctctctgctgccttggtgcccctgtgtctgcctcctctccctgcttttcagcctctgtctccttccatccc

SEQ ID NO: 284443 - DNA, 87 bp, Artificial Sequence
  ENSG00000130304_18 (sequence is synthesized)
ctcctctccctgcttttcagcctctgtctccttccatccctgtccctgtctggccttaactcttccctcaagatagagtctcactct

SEQ ID NO: 284444 - DNA, 79 bp, Artificial Sequence
  ENSG00000130304_19 (sequence is synthesized)
ggtgatccgcttctggcccggcctttcctttttcctctcctctcctgccgagagtggaacacgcgtgtcctgggagctg

SEQ ID NO: 284445 - DNA, 120 bp, Artificial Sequence
  ENSG00000130304_20 (sequence is synthesized)
ctctcctgccgagagtggaacacgcgtgtcctgggagctgcatcttgtgtagggtccagctgcttttggggactgcaggaatcatctcccctgggccctggactcggactggggcctccc

SEQ ID NO: 284446 - DNA, 120 bp, Artificial Sequence
  ENSG00000130304_21 (sequence is synthesized)
cacctccctctcggctgtgccttacggagccccgatccaggcctcctgtggctgttgggttccagatgctgcagctccatgtgacttccaagcaggccctccgccctccctgctgaatgg

SEQ ID NO: 284447 - DNA, 120 bp, Artificial Sequence
  ENSG00000130304_22 (sequence is synthesized)
aggagccgggggtcccccaggccaactggaaaatctcccaggctaggccaattgccttttgcacttccccgttcctgtcacatttccccagccccaccttcccctcctgatgccctgaaa

SEQ ID NO: 284448 - DNA, 120 bp, Artificial Sequence
  ENSG00000130304_23 (sequence is synthesized)
gcttccggaattgactgtgaccacttggatgtcaccactgtcagcccctgccttgatgtccccatttagccatctccatggagctcctgctggagggccctgaaccctgcactgcgtggc

SEQ ID NO: 284449 - DNA, 120 bp, Artificial Sequence
  ENSG00000130304_24 (sequence is synthesized)
tgcccagccagctgcctcctgtcctgggaggaggcctcctgggtgtcctcatctggtgtgtctactggagggtcccacaggagaggcagcagaggggtcaggggaggtctcctgccgggg

SEQ ID NO: 284450 - DNA, 120 bp, Artificial Sequence
  ENSG00000130304_25 (sequence is synthesized)
gttggcctctcaagcctcaggggttctagcctgttgaatataccccacctggtggtggcccctccgatgtccccactgatggctctgacaccgtgttggtggcgatgtcccagacaatcc

SEQ ID NO: 284451 - DNA, 120 bp, Artificial Sequence
  ENSG00000130304_26 (sequence is synthesized)
caccaggacggcccagacatccctactggcttcgctggtggctcatctcgaacatccacgccagcctttctggggccggccacccaggccgcctgtccgtctgtcctccctccagcagca

SEQ ID NO: 284452 - DNA, 120 bp, Artificial Sequence
  ENSG00000130304_27 (sequence is synthesized)
ccccctggcccctggagtggtggggccatggcaagagacaccgtggcgtctcatgtgaactttcctgggcactgtggttttatttcctaattgatttaagaaataaacctgaagaccgtc

SEQ ID NO: 284453 - DNA, 120 bp, Artificial Sequence
  ENSG00000130304_28 (sequence is synthesized)
gctgggattacaggcttgagccaccccgcctggccgtgcccattcttaagccagtcatattggctgaggaggggctgggctgattggccaggttctctcctagagatggtgtgggctgta

SEQ ID NO: 284454 - DNA, 120 bp, Artificial Sequence
  ENSG00000130304_29 (sequence is synthesized)
gtgtgggctgtaccacacctaaggcagtggcccaagtctgagaatggagggagaggaccctcccccttagggacctgctgttggtcagcagccagtgatcttgggtgcactgcatttcct

SEQ ID NO: 284455 - DNA, 120 bp, Artificial Sequence
  ENSG00000130304_30 (sequence is synthesized)
ctctgggcctcagtgccttcatctccaagctcagctcagagcatggcggtggtgtctgctgatcatattggtttagtcatcagctatttagtcagtaccttctcaggggcacagctgggg

SEQ ID NO: 284456 - DNA, 120 bp, Artificial Sequence
  ENSG00000130304_31 (sequence is synthesized)
gcacaggggatgcctctcagtgacgtttgagctgagactgaagagttcaggcaaatgcatctgggggaagactgcttcaggcaaaaggctagcatgtgcaaagtccctgaggaggcagag

SEQ ID NO: 284457 - DNA, 120 bp, Artificial Sequence
  ENSG00000130304_32 (sequence is synthesized)
tgttcagcggagatggagggagaggaggcagcaggggcggcagggccagatccagttggccacaggaagaaatgtgggtttcatcctgtgtgtgagcgggaagccccgagcacatttgca

SEQ ID NO: 284458 - DNA, 120 bp, Artificial Sequence
  ENSG00000130304_33 (sequence is synthesized)
gctgttatgatccatctggtgggtaatccctggcatgcaactgttttattcccactctggggccgggatgcctgggttcaaatcaaattctgccacttcccagctctgtgatctcgttcc

SEQ ID NO: 284459 - DNA, 120 bp, Artificial Sequence
  ENSG00000130304_34 (sequence is synthesized)
agttccttaccatctgtgagcctcggtttctccatctgtaaagtggcggggggggagtcattccgaagcccaactggagatgagaactcttaaaggcaccgtggggcacctggtggatga

SEQ ID NO: 284460 - DNA, 120 bp, Artificial Sequence
  ENSG00000130304_35 (sequence is synthesized)
ccccaggaagctcttgcggggcttgagaatgtgtggcagggagggaagatgtcctgcagggggagcccatgagcaggtggctccgtgggcacctggggctcagtccagacgcagcgcagc

SEQ ID NO: 284461 - DNA, 120 bp, Artificial Sequence
  ENSG00000130304_36 (sequence is synthesized)
ctagtgggtgcacctgggagtggtctgcccaggggtgacgctccggccagcccaggctcagccagggggctctgggtgacagtgtaggctccaggctgagggttgccctgcggggtgcca

SEQ ID NO: 284462 - DNA, 120 bp, Artificial Sequence
  ENSG00000130304_37 (sequence is synthesized)
gctctcctgctagtcctgccctgtgtgcctgctgaggctcagacagggatgtggtatctccaggaagctgcttggcagaatcgagggaccacgaaggggtgcgggtagggggaggaggaa

SEQ ID NO: 284463 - DNA, 120 bp, Artificial Sequence
  ENSG00000130304_38 (sequence is synthesized)
gaaggggtgcgggtagggggaggaggaaagacactgcatctgcttggatagaagttgcatccggccaggcacaagtggctcacacctggaatctcacactttgggaggctgaggcaggag

SEQ ID NO: 284464 - DNA, 89 bp, Artificial Sequence
  ENSG00000130304_39 (sequence is synthesized)
gagttcaagaccagcctgggcaacagagcgagatcccccatctctacaaaaaaattggaagatcacttgaacccaggagttagaggctg

SEQ ID NO: 284465 - DNA, 120 bp, Artificial Sequence
  ENSG00000130304_40 (sequence is synthesized)
tgccactgcactccagcctgggcggcacagggagacccccaaccaaaaaacaacaaaaaaagctgcatcctagaccctttgcaagagactgaacgagtcctaggagtcaatgtggtccct

SEQ ID NO: 284466 - DNA, 120 bp, Artificial Sequence
  ENSG00000130304_41 (sequence is synthesized)
ccctaatggagtgtggacgattctgcagccatcatcatccttaggctgttccgctcataggattagctccctgggtggggcggtctcggggtctctcctctgatccgggctccccaccgc

SEQ ID NO: 284467 - DNA, 120 bp, Artificial Sequence
  ENSG00000130304_42 (sequence is synthesized)
gggtgaggccaggcgtgggcatcaggtgggcggggacccaggactggcccctgggcgggcggggagatgctgcgccccaggcctcggaaggcggccgccctggacgtgggcatgaggtgc

SEQ ID NO: 284468 - DNA, 120 bp, Artificial Sequence
  ENSG00000130304_43 (sequence is synthesized)
aacgctggaaaggtcggccaaggagagcagaaaacaagcagtggtggagtcggcagtggggcagaggagggggagctggaagggaaggaccccaaagcagaagcccgcacagtaggcaca

SEQ ID NO: 284469 - DNA, 120 bp, Artificial Sequence
  ENSG00000130304_44 (sequence is synthesized)
gcgcacccaagaagggtccaggagtctgcagaaacagaaaggtccccggcctcagcctcctagtccctgcctgcctcctgcctgagcttctgggagactgaaggcacggcttgcagcttc

SEQ ID NO: 284470 - DNA, 120 bp, Artificial Sequence
  ENSG00000130304_45 (sequence is synthesized)
cctctctcaagggcctcccctgcctctgcccttggtccgtgtgactgaccacatcaccccttgcagtcttgtcaccatccagcacggcctggtattcagtcatatacatggaaggggtct

SEQ ID NO: 284471 - DNA, 120 bp, Artificial Sequence
  ENSG00000130304_46 (sequence is synthesized)
ctcttcccagaggactgtgaaccccagagggtggggcctggtggtctggatgctctgtccccagagctgagaacagtgcctaaagcacaacagacactgcggtctctctgtgctgatccg

SEQ ID NO: 284472 - DNA, 120 bp, Artificial Sequence
  ENSG00000130304_47 (sequence is synthesized)
tcttcctggggcccctgggatacataaaacagcctggactggcgcggaaggctccgccaaggcgcacgcagggcggggtgtaaggggagttcctgggactcccggtgcaccaccagaggg

SEQ ID NO: 284473 - DNA, 120 bp, Artificial Sequence
  ENSG00000130304_48 (sequence is synthesized)
acaatcctgcagcctgcacagatagtcatgtgactgtggtccttgggtcaggagagttggaggataggtatggctgtgcgccctggcaagtgcctcagcctttctgagcctcagtttctg

SEQ ID NO: 284474 - DNA, 120 bp, Artificial Sequence
  ENSG00000130304_49 (sequence is synthesized)
ggcaagtgcctcagcctttctgagcctcagtttctgcgtgtggagattagcaaggagaatagggctctgtgtaccgtgctgttattttgttgttgttgtttgagacagagtctcgctctg

SEQ ID NO: 284475 - DNA, 120 bp, Artificial Sequence
  ENSG00000130304_50 (sequence is synthesized)
tcctcctgcctcagcctcccaagtagcagcaaacagataccttcataattagcaactacttactctcttaatcatctccattctccgcttgcatgaatctccctctcctttcccaagccc

SEQ ID NO: 284476 - DNA, 120 bp, Artificial Sequence
  ENSG00000130304_51 (sequence is synthesized)
gccaggcatggtggcaggtgcctgtagtcaatgctactaaggaggctgaggcgggaggatcacgtgagctcacgagatcgaggctgcagtgagctatgattacaccactggactccagcc

SEQ ID NO: 284477 - DNA, 120 bp, Artificial Sequence
  ENSG00000130304_52 (sequence is synthesized)
tgggcaacagagtgagactctgtgtctctaaaaaggaaaaaaaaaaacagcaagtgccatgggggctgggtccttaatgccaagaacaatgctccttcctcagtgtgcttggtgttggat

SEQ ID NO: 284478 - DNA, 120 bp, Artificial Sequence
  ENSG00000130304_53 (sequence is synthesized)
aacaatgctccttcctcagtgtgcttggtgttggatggccagcccccagggcacttttgctcactgtagctcagattcttgcataggaaacacaccaggccaggcacggtggctcacgcc

SEQ ID NO: 284479 - DNA, 83 bp, Artificial Sequence
  ENSG00000130304_54 (sequence is synthesized)
ggggaaagggagactccctttcccggtccactaagtagcaggtgtttttccttgacactaaggctaccgctagactagacttc

SEQ ID NO: 284480 - DNA, 85 bp, Artificial Sequence
  ENSG00000130304_55 (sequence is synthesized)
gaaagggagactccctttcccggtccactaagtagcaggtgtttttccttgacactaaggctaccgctagactagaaccctctgg

SEQ ID NO: 284481 - DNA, 120 bp, Artificial Sequence
  ENSG00000130304_56 (sequence is synthesized)
ttctggtcactactcactgtgtcccctcagctcctatctctctatggcccggttttttctaggttatgattacagagcgaggattattataatactggaataaagagtaattgctacaaa

SEQ ID NO: 284482 - DNA, 120 bp, Artificial Sequence
  ENSG00000130305_0 (sequence is synthesized)
gcgttttgccacagagccgtaaaggcgcgcgggaacatggggctgtatgctgcagctgcaggcgtgttggccggcgtggagagccgccagggctctatcaaggggttggtgtactccagc

SEQ ID NO: 284483 - DNA, 120 bp, Artificial Sequence
  ENSG00000130305_1 (sequence is synthesized)
aacttccagaacgtgaagcagctgtacgcgctggtgtgcgaaacgcagcgctactccgccgtgctggatgctgtgatcgccagcgccggcctcctccgtgcggagaagaagctgcggccg

SEQ ID NO: 284484 - DNA, 120 bp, Artificial Sequence
  ENSG00000130305_2 (sequence is synthesized)
cacctggccaaggtgctagtgtatgagttgttgttgggaaagggctttcgagggggtgggggccgatggaaggctctgttgggccggcaccaggcgaggctcaaggctgagttggctcgg

SEQ ID NO: 284485 - DNA, 120 bp, Artificial Sequence
  ENSG00000130305_3 (sequence is synthesized)
ctcaaggttcatcggggtgtgagccggaatgaggacctgttggaagtgggatccaggcctggtccagcctcccagctgcctcgatttgtgcgtgtgaacactctcaagacctgctccgat

SEQ ID NO: 284486 - DNA, 120 bp, Artificial Sequence
  ENSG00000130305_4 (sequence is synthesized)
gatgtagttgattatttcaagagacaaggtttctcctatcagggtcgggcttccagcctcgatgacttacgagccctcaaggggaagcattttctcctggaccccttgatgccggagctg

SEQ ID NO: 284487 - DNA, 120 bp, Artificial Sequence
  ENSG00000130305_5 (sequence is synthesized)
ctggtgtttcccgcccagacagatctgcatgaacacccactgtaccgggccggacacctcattctgcaggacagggccagctgtctcccagccatgctgctggaccccccgccaggctcc

SEQ ID NO: 284488 - DNA, 120 bp, Artificial Sequence
  ENSG00000130305_6 (sequence is synthesized)
catgtcatcgatgcctgtgccgccccaggcaataagaccagtcacttggctgctcttctgaagaaccaagggaagatctttgcctttgacctggatgccaagcggctggcatccatggcc

SEQ ID NO: 284489 - DNA, 120 bp, Artificial Sequence
  ENSG00000130305_7 (sequence is synthesized)
acgctgctggcccgggctggcgtctcttgctgtgaactggctgaggaggacttcctggcggtctccccctcggatccacgctaccatgaggtccactacatcctgctggatccttcctgc

SEQ ID NO: 284490 - DNA, 120 bp, Artificial Sequence
  ENSG00000130305_8 (sequence is synthesized)
agtggctcgggtatgccgagcagacagctggaggagcccggggcaggcacacctagcccggtgcgtctgcatgccctggcagggttccagcagcgagccctgtgccacgcactcactttc

SEQ ID NO: 284491 - DNA, 120 bp, Artificial Sequence
  ENSG00000130305_9 (sequence is synthesized)
agacgtggtgcgagatgcgctgcagcagaacccgggcgccttcaggctagctcccgccctgcctgcctggccccaccgaggcctgagcacgttcccgggtgccgagcactgcctccgggc

SEQ ID NO: 284492 - DNA, 120 bp, Artificial Sequence
  ENSG00000130305_10 (sequence is synthesized)
ctcccctgagaccacactcagcagtggcttcttcgttgctgtaattgaacgggtcgaggtgccaagctcagcctcacaggccaaagcatcagcaccagaacgcacacccagcccagcccc

SEQ ID NO: 284493 - DNA, 120 bp, Artificial Sequence
  ENSG00000130305_11 (sequence is synthesized)
aaagagaaagaagagacagcaaagagccgcagccggtgcttgcacaccgccttgcacatagcagaggctccgggctgactccttcctggtgggaaaggaagatgcctgtcctctccgtgg

SEQ ID NO: 284494 - DNA, 120 bp, Artificial Sequence
  ENSG00000130305_12 (sequence is synthesized)
aggaccctgggccctcaccgcaggaagcagtttgggttttgaaaggttattgggtcccttccttgggctgtgttcttgctggtgagcaaagtgttgcctgcaaaaataaaatgcagaacg

SEQ ID NO: 284495 - DNA, 120 bp, Artificial Sequence
  ENSG00000130305_13 (sequence is synthesized)
tactctacgatagatcacagttttttattcttaatgtcacaagcaggagaaaaatctcacattcatactaaaagttccaactagactcaacaggaatgaagtctctatttgtaatggaaa

SEQ ID NO: 284496 - DNA, 120 bp, Artificial Sequence
  ENSG00000130305_14 (sequence is synthesized)
gtcccagcctcccgctgccgtccagtgcgtgtactgtacacatccacactcacactcactcagggttcccggaccggctgtcctgcctgcggaactgaggtaaactagctcaggtgctga

SEQ ID NO: 284497 - DNA, 120 bp, Artificial Sequence
  ENSG00000130305_15 (sequence is synthesized)
cactaggagggtctaccttacataaggtacaggtagaagcttgattgctaggcccaggcccacccagaccctccaatcctaacaggtatttaggcttgaggttcactccctcctcagctg

SEQ ID NO: 284498 - DNA, 120 bp, Artificial Sequence
  ENSG00000130305_16 (sequence is synthesized)
cacacgcagccaggtattaacgaggatcagagctgttctgaggggtgggaaggagcagccccaccaccactcactcaccctcagtcacatcggggagggggcaccagttacatttacatc

SEQ ID NO: 284499 - DNA, 120 bp, Artificial Sequence
  ENSG00000130305_17 (sequence is synthesized)
acattatttataaaataagaattacatttcatataacatggccagaaggagctctagtcccccaggaaagctgccggggacagcatttgagcctcttctttgcacaggcataacttaact

SEQ ID NO: 284500 - DNA, 120 bp, Artificial Sequence
  ENSG00000130305_18 (sequence is synthesized)
atacagctaattcctagttaatagcatttatacttaaccacctcaatgaaccaagcttgaaggaatttaaaaggcaatttagcttaaatacaaaaataaatttttgttaaaaaacgttta

SEQ ID NO: 284501 - DNA, 120 bp, Artificial Sequence
  ENSG00000130305_19 (sequence is synthesized)
agtgagtgggggcgtgcttgggaggcgcaggatggcaccggcacatctaacatctacacttctctagctcagcctcacaggccaaagcatcagcaccagaacgcacacccagcccagccc

SEQ ID NO: 284502 - DNA, 120 bp, Artificial Sequence
  ENSG00000130305_20 (sequence is synthesized)
gtgcctttcagtgggtaatgaaggctgaaaggatgactttcgcttaagtctttcttgctgcaccaaagcagttcacggtatttgccccaagctaagctttccccactgcaggtgtgagat

SEQ ID NO: 284503 - DNA, 120 bp, Artificial Sequence
  ENSG00000130305_21 (sequence is synthesized)
gtggatcccttagcccttggggcagagaccccaggccagttacctctgactgtgagccctttaaacgtaggccgtttcaatattgtgtgtcctggcttaacctgcatgttctggttggct

SEQ ID NO: 284504 - DNA, 120 bp, Artificial Sequence
  ENSG00000130305_22 (sequence is synthesized)
aggtgaggggaggggagggacggggaagtgaaccccgacggtcagcgctttgtcatctggtctcagctctgctgccgtgcacggcgggactggagcaagtcgctcatctgaaatgagtat

SEQ ID NO: 284505 - DNA, 120 bp, Artificial Sequence
  ENSG00000130305_23 (sequence is synthesized)
gagccgaccttccctgggttacgaattaagatgggatgaaaatgctttaactttgagtgttttgaaggattaaataaccgaagtacaaagtggtagtggcggagactgtaaggaagtcgg

SEQ ID NO: 284506 - DNA, 90 bp, Artificial Sequence
  ENSG00000130305_24 (sequence is synthesized)
ccagctactcgggaggctgagggaggaggatcacttgagcccaggaggtcgaagctgcagtgagctatgatctgtagaccccattctaaa

SEQ ID NO: 284507 - DNA, 120 bp, Artificial Sequence
  ENSG00000130305_25 (sequence is synthesized)
gacagagctagaccccattctaaaaagaaaacccaaacccacgaaagggtaatgttggcaagaagttgggtgcagaggtgtctactggtgaacatcggtggagaaagggtctaaggctgg

SEQ ID NO: 284508 - DNA, 120 bp, Artificial Sequence
  ENSG00000130305_26 (sequence is synthesized)
gaagcgagacgccaggttccgatcctgttctgtagttaatttctggtgtgatcttggataaggtatcccacctgtatcttgtcaggtgatctgtttagccattccattgccggggctcca

SEQ ID NO: 284509 - DNA, 120 bp, Artificial Sequence
  ENSG00000130307_0 (sequence is synthesized)
agtggtcagagtgaccccaacagagtgtcccgggactcaggcctctgatcaagttacccccagaggatcagagaggggttgacgaaggagaagcattcagagggcactggcttctggaca

SEQ ID NO: 284510 - DNA, 120 bp, Artificial Sequence
  ENSG00000130307_1 (sequence is synthesized)
gcaatgagtgcccgggccacgcggccccgaagccggcgagggaggcatgctccacccggtgaactggatcccgtggctgagagttcagaggaggtcgaggcagccagtgggagctccaag

SEQ ID NO: 284511 - DNA, 120 bp, Artificial Sequence
  ENSG00000130307_2 (sequence is synthesized)
cccagctttgccccacctccggtgagctccgggctggagcagctgggccccatggaggaggtcagtggccaaggcctaggaagcaggactgacaagaagatggatgggggctctggcagg

SEQ ID NO: 284512 - DNA, 120 bp, Artificial Sequence
  ENSG00000130307_3 (sequence is synthesized)
gaactggcctcagcccccgaagtgccccacaaacctgcagtggaagcccaccaagccccagaagcagccctacagtacaaggagactgtgccccctgggaatggggcccccgatgtgttt

SEQ ID NO: 284513 - DNA, 120 bp, Artificial Sequence
  ENSG00000130307_4 (sequence is synthesized)
cagaccctccagcacactctgagctccctggaggcagcggctgcagcctggcgccaccagccccccagccattctgggccgatggagttcgaaggcacaagcgaagggggagcaggttcc

SEQ ID NO: 284514 - DNA, 120 bp, Artificial Sequence
  ENSG00000130307_5 (sequence is synthesized)
cttgggaagcaggaaggggcagggagctgccagcgagaggcagctcgcctggccgagaggaatgcctggctccggctggccctgagtagccgagaggatgagctggtccgcacgcaggcc

SEQ ID NO: 284515 - DNA, 120 bp, Artificial Sequence
  ENSG00000130307_6 (sequence is synthesized)
tccctggaggccatccgagctgagaaggagacgctgcagaaagaggttcaagagctgcaggattccctcttgaggctggagccctgcccacatctttcccacaaccaagcaggtggctca

SEQ ID NO: 284516 - DNA, 120 bp, Artificial Sequence
  ENSG00000130307_7 (sequence is synthesized)
ggcagtggttctagcagctctgaggcagacagggaaccctgggagactcaggactccttctccctggctcaccccctgcttcggcgcctccgcagccattccagcacccagatccttggg

SEQ ID NO: 284517 - DNA, 120 bp, Artificial Sequence
  ENSG00000130307_8 (sequence is synthesized)
tctcttcccaaccagcccctcagtcctgagatgcacatcatggaagcccagatggagcaactccgggggagcattgagaagctcaaatgctttaatcgtctgctatcagctgtgctacag

SEQ ID NO: 284518 - DNA, 120 bp, Artificial Sequence
  ENSG00000130307_9 (sequence is synthesized)
ggatacaagggccgctgtgaaggcctcagcatgcagctaggccagcgggaggctgaggccacagcattgcatctggccttgcagtacagtgaacactgtgaagaggcatacagggttctg

SEQ ID NO: 284519 - DNA, 120 bp, Artificial Sequence
  ENSG00000130307_10 (sequence is synthesized)
cttgctctgcgggaggccgactcaggagcaggagacgaagcccccatgagtgacctgcaagcagctgaaaaggaagcatggaggctgctggcacaagaggaggctgccatggatgcagga

SEQ ID NO: 284520 - DNA, 120 bp, Artificial Sequence
  ENSG00000130307_11 (sequence is synthesized)
gcacagcagaatccacagccaagccctgaaggcagcagtgtggataagcccaccccacaggaagtggctttccagctccgaagctatgtccagcgtctccaggagcgccgttctctaatg

SEQ ID NO: 284521 - DNA, 120 bp, Artificial Sequence
  ENSG00000130307_12 (sequence is synthesized)
aagattctctcagagcctggccccaccttggcacccatgcccactgtgccccgtgcagaagccatggtgcaggccattctggggacccaggctggcccagctcttccccgactggagaag

SEQ ID NO: 284522 - DNA, 120 bp, Artificial Sequence
  ENSG00000130307_13 (sequence is synthesized)
tgatgcttcggctgcagctggtgcggcgtgagaagcggggcctagagctgcgggaggctgccctccgagccctgggtccagctcacgtgctcctgctggagcagctgcggtgggaacggg

SEQ ID NO: 284523 - DNA, 120 bp, Artificial Sequence
  ENSG00000130307_14 (sequence is synthesized)
cagagctccaggctggtggggcaaacagcagtggcggacatagcagcggaggtggcagcagcggggacgaggaagagtggtatcagggccttcctgctgtccctggtggcaccagtggca

SEQ ID NO: 284524 - DNA, 120 bp, Artificial Sequence
  ENSG00000130307_15 (sequence is synthesized)
ttgatggtggccaggtgggcagagcctgggacccagagaagttagcccaggaactggcagcatcgctcaccaggacactggacctgcaggagcagctgcagtctctgcgcagggagctgg

SEQ ID NO: 284525 - DNA, 120 bp, Artificial Sequence
  ENSG00000130307_16 (sequence is synthesized)
aacaggtggctcagaaggggcgagccagacggtctcagagtgccgagctgaacagggatttatgcaaagcccacagcgccctggtcctggccttccgaggagcccaccggaagcaggaag

SEQ ID NO: 284526 - DNA, 120 bp, Artificial Sequence
  ENSG00000130307_17 (sequence is synthesized)
agcaacgccggaagttggagcagcagatggcactcatggaggctcagcaggccgaggaggtggcggtgctcgaagccactgcaagggccctggggaagcccaggcctcccctcccgcctc

SEQ ID NO: 284527 - DNA, 120 bp, Artificial Sequence
  ENSG00000130307_18 (sequence is synthesized)
cccagcttggggacacctttctgtaggccccttacccagccatgtctggacatgccagacagctgtggcatgtcataaactgtcctggagtgacatcatgtcatgttgcatgatttggca

SEQ ID NO: 284528 - DNA, 120 bp, Artificial Sequence
  ENSG00000130307_19 (sequence is synthesized)
tgttggggcacatttggcgtgagggaagctggtgcacatgggtgtccagggcctgatggggtgtggccaggcaatgaagaaagactcaggtgtctttggcctggcaccaagtggaatgtg

SEQ ID NO: 284529 - DNA, 120 bp, Artificial Sequence
  ENSG00000130307_20 (sequence is synthesized)
aacttcatatcagtggggtcaggccagaagcaacctgggctatgggaccaggtccctgggactgacgcatttcgggggtccgtgaggttgcatagccacagctgaagttccaactggcct

SEQ ID NO: 284530 - DNA, 120 bp, Artificial Sequence
  ENSG00000130307_21 (sequence is synthesized)
gtctcccgaagcccagggagggattcatggggactggacagagcttctcctggcagccccttcccagggagatgctgggtttggctggcagattttcctgaagggggccgggctcagtgg

SEQ ID NO: 284531 - DNA, 68 bp, Artificial Sequence
  ENSG00000130307_22 (sequence is synthesized)
tagccaggcgtggtggcatgtgcctataaagatatttaggaggctaaagtgggagggtaacttgagct

SEQ ID NO: 284532 - DNA, 60 bp, Artificial Sequence
  ENSG00000130307_23 (sequence is synthesized)
atcacgccactgcactccagtctgggtcacagagtaagaccttgtctcaaaaaaaaaaac

SEQ ID NO: 284533 - DNA, 86 bp, Artificial Sequence
  ENSG00000130307_24 (sequence is synthesized)
aaaatacaaaaattggctgggtgttactgaggcaggataattgcttgaacctgagaggcgggggttgcagtgaaccgagatcgcgc

SEQ ID NO: 284534 - DNA, 120 bp, Artificial Sequence
  ENSG00000130307_25 (sequence is synthesized)
gaacctgagaggcgggggttgcagtgaaccgagatcgcgccaacaacaagatcgtgcccgggcaataagagcaaaactctgtctctaaataaataaataaaacacaaaacaaaacaaaaa

SEQ ID NO: 284535 - DNA, 120 bp, Artificial Sequence
  ENSG00000130307_26 (sequence is synthesized)
agtggtcagagtgaccccaacagagtgtcccgggactcaggcctctgatcaagttacccccagaggatcagagaggtagagagagctgaacctctcatttaggagggccggggaggagag

SEQ ID NO: 284536 - DNA, 120 bp, Artificial Sequence
  ENSG00000130307_27 (sequence is synthesized)
catctttgccatccacagatctgctgatgtgcctgctctgctcacacacctaccatagctccctattgccttcagcctgactttcttttttttttgagtcttgctgtgtcacccaggctg

SEQ ID NO: 284537 - DNA, 120 bp, Artificial Sequence
  ENSG00000130307_28 (sequence is synthesized)
tcggctcacagcaacccctgcctcccggttcaagcgggagcctcagcttcctgagtagttgggattacaggtgtgcgccaccacatccggctaagttttgcatttttagtgagacaggcc

SEQ ID NO: 284538 - DNA, 120 bp, Artificial Sequence
  ENSG00000130307_29 (sequence is synthesized)
acattagccaggctggtcttgaactcctgcccttaagtgatcccccaactttggcctccaaaagtgctgggattacaagtgtaagccgccgccccagaagaccctatttccagaaacttc

SEQ ID NO: 284539 - DNA, 120 bp, Artificial Sequence
  ENSG00000130307_30 (sequence is synthesized)
tgtctctcaccttcaggcctttcccagtgcccgtcacagtccaacttcactctgtttctcagctccaggtctcccctccaacttcttcaccacctctatctagcctcttccttgaattca

SEQ ID NO: 284540 - DNA, 120 bp, Artificial Sequence
  ENSG00000130307_31 (sequence is synthesized)
cagcctcccagtctcaccctgggatgccagtcccagaacacgcagctcttgccaactccctgctccgctcacacctccccaagaccatgaagtttaagccctcagaattccctgcccagg

SEQ ID NO: 284541 - DNA, 120 bp, Artificial Sequence
  ENSG00000130307_32 (sequence is synthesized)
gagtgagactccgtctcaaaaaataaaaaagaattccttgcccagcatggagtgactcaagtgcctgagttggtgtccacaggactgacaagaagatggatgggggctctggcagggaac

SEQ ID NO: 284542 - DNA, 120 bp, Artificial Sequence
  ENSG00000130307_33 (sequence is synthesized)
ctttgcccgcgcagtgcctcccaacctggtcgcgcagcgccgggtccgctccttggctcagcagcagctccaggccgcggcggcagccccacgcggcggccacatgcagcggcgtcagtg

SEQ ID NO: 284543 - DNA, 120 bp, Artificial Sequence
  ENSG00000130307_34 (sequence is synthesized)
cctcgacagatctggggcggcagcgcaagaggggtcattgcggactcagcctcccggcaggaaccccgatctccgctctggggacctggagccttcgttctcggcctcccggatctccgc

SEQ ID NO: 284544 - DNA, 120 bp, Artificial Sequence
  ENSG00000130307_35 (sequence is synthesized)
aacctccgcctcccggactcaagtgattcttgtgcctcagcctcgcaagtcgctgggattataggcatggaccaccatgcccggaccaaatcaggggttgacgaaggagaagcattcaga

SEQ ID NO: 284545 - DNA, 120 bp, Artificial Sequence
  ENSG00000130309_0 (sequence is synthesized)
gacccctttaaggcgcggccagagtcctcccgcagaaaaacgacttaaaggagacgcgtggcgcgatggcggcggccccacgcgcgggccggcggcgcgggcagccgctcctggcgctgc

SEQ ID NO: 284546 - DNA, 120 bp, Artificial Sequence
  ENSG00000130309_1 (sequence is synthesized)
gccccgccgggcgccgacgcctacttccccgaggagcgctggagcccggagtcgcccctgcaggcgccgcgcgtgctcatcgcgctgttggcgcgaaacgcggcccacgcgttgcccacc

SEQ ID NO: 284547 - DNA, 120 bp, Artificial Sequence
  ENSG00000130309_2 (sequence is synthesized)
tggcgcgaaacgcggcccacgcgttgcccaccacgctgggcgcactcgagcggctgcggcacccgcgggagcgcacggcgctatgggtggctacggaccacaacatggataacacgtcaa

SEQ ID NO: 284548 - DNA, 120 bp, Artificial Sequence
  ENSG00000130309_3 (sequence is synthesized)
ctgtgctgcgggagtggctggtggccgtgaagagtttgtaccattccgtggagtggcggccagcagaggagcccaggtcctacccggacgaggaaggcccgaaacactggtctgactcac

SEQ ID NO: 284549 - DNA, 120 bp, Artificial Sequence
  ENSG00000130309_4 (sequence is synthesized)
gctacgagcatgtcatgaagttgcgccaggcagccctgaaatcagctcgagacatgtgggctgattacatcctgtttgtagatgcggacaacctgatcctcaaccctgacacactgagcc

SEQ ID NO: 284550 - DNA, 120 bp, Artificial Sequence
  ENSG00000130309_5 (sequence is synthesized)
tgctcatcgctgagaacaagacggtggtcgcccccatgctggattcccgggctgcgtactccaacttctggtgtggaatgacttcccagggctactacaagcgcacacctgcctacatcc

SEQ ID NO: 284551 - DNA, 120 bp, Artificial Sequence
  ENSG00000130309_6 (sequence is synthesized)
ctatccgcaagcgagaccgccggggctgctttgcagttcccatggtgcactcgaccttcctgatcgacctgcggaaggcggcgtccaggaacctggccttctacccacctcaccctgact

SEQ ID NO: 284552 - DNA, 120 bp, Artificial Sequence
  ENSG00000130309_7 (sequence is synthesized)
acacctggtcctttgacgacatcatcgtctttgccttctcctgcaagcaggcagaggttcagatgtatgtgtgcaacaaggaggagtacggattcttgccagtgccattgcgcgcccaca

SEQ ID NO: 284553 - DNA, 120 bp, Artificial Sequence
  ENSG00000130309_8 (sequence is synthesized)
gcaccctccaggatgaggccgagagcttcatgcatgtgcagctggaggtcatggtgaagcacccgcccgcagagccctcccgcttcatctcggctcccaccaagacaccggacaagatgg

SEQ ID NO: 284554 - DNA, 120 bp, Artificial Sequence
  ENSG00000130309_9 (sequence is synthesized)
gcttcgacgaggtcttcatgatcaacctgaggcggcggcaggaccggcgggagcgcatgctgcgggcgctgcaggcacaggagatcgagtgccggctggtggaggccgtggacggcaaag

SEQ ID NO: 284555 - DNA, 120 bp, Artificial Sequence
  ENSG00000130309_10 (sequence is synthesized)
ccatgaacaccagccaggtggaggcgctggggatccagatgctgcctggctaccgggacccctaccacggccggcccctcaccaagggtgagctgggctgcttcctgagccactacaaca

SEQ ID NO: 284556 - DNA, 120 bp, Artificial Sequence
  ENSG00000130309_11 (sequence is synthesized)
tctggaaggaggtggtggaccgggggctgcagaaatcgcttgtgtttgaggatgacctgcgttttgagatcttcttcaagagacgtctgatgaacctcatgcgggatgtggagcgggagg

SEQ ID NO: 284557 - DNA, 120 bp, Artificial Sequence
  ENSG00000130309_12 (sequence is synthesized)
gcctggactgggacctcatctatgtgggccggaagcggatgcaggtggagcaccccgagaaggctgtgcctcgcgtgaggaacctggtggaggccgactattcctactggaccctggcct

SEQ ID NO: 284558 - DNA, 120 bp, Artificial Sequence
  ENSG00000130309_13 (sequence is synthesized)
acgtgatctccctgcaaggcgcccgcaaactgctggctgctgagccgctctccaagatgctgcctgtggacgagttcctgcccgtcatgttcgacaaacacccagtgtccgagtacaagg

SEQ ID NO: 284559 - DNA, 120 bp, Artificial Sequence
  ENSG00000130309_14 (sequence is synthesized)
cccacttctccctccgcaacctgcatgccttctctgtggagccgctgctcatctaccccacacactacacaggagacgatggctatgtgagtgacaccgagacctcagtcgtatggaaca

SEQ ID NO: 284560 - DNA, 120 bp, Artificial Sequence
  ENSG00000130309_15 (sequence is synthesized)
cgggagcagcaggcactgagccgtgaggccaagaactcggacgtgctccagtccccactggacagtgctgcccgggatgaactctgaggggtagcagccagaaagccaaagcagccatcg

SEQ ID NO: 284561 - DNA, 120 bp, Artificial Sequence
  ENSG00000130309_16 (sequence is synthesized)
gtggcccaggctccacgtgcttactgaggacatcaggtccacctctggaccccttggcaggccacagagggctctcgtgtggggtggtgtccagccagctcttgctaagcaatcacgtgc

SEQ ID NO: 284562 - DNA, 120 bp, Artificial Sequence
  ENSG00000130309_17 (sequence is synthesized)
acacaggcagcattaatggagtgcctactgcatgccagcaacagggcttggccctggggaattgggaggaaccaagccctcttcatctgttcatgtgcccagcatttattaagcacctgc

SEQ ID NO: 284563 - DNA, 120 bp, Artificial Sequence
  ENSG00000130309_18 (sequence is synthesized)
tgtatgcaaggttcccatgttacggcagtgaatgaggcataattgttccctccatcagcgattgattcagtcatcaagcagttactgatcagattaagaatcaggcactagtgatacaca

SEQ ID NO: 284564 - DNA, 120 bp, Artificial Sequence
  ENSG00000130309_19 (sequence is synthesized)
ttcatttttaaaattcattcaaggatttattgagtgcctactgtgtgttgggtgccattccaggctctgggatttttttttttttttttttaagagtagagtctgtctctgtcacccagg

SEQ ID NO: 284565 - DNA, 85 bp, Artificial Sequence
  ENSG00000130309_20 (sequence is synthesized)
cacccaggctggagtgcagtggtgtgacggctcactgcagcctgcgcctcccagcgtccagcaattcttgtttctcgtcacatct

SEQ ID NO: 284566 - DNA, 120 bp, Artificial Sequence
  ENSG00000130309_21 (sequence is synthesized)
tgtgcccagcccaggctctgggaatattgagataaataagatgcttctatccatttattcaagcacatattggtcacctactgtgtgcctggcactcatgtcacaaagataagttcctga

SEQ ID NO: 284567 - DNA, 120 bp, Artificial Sequence
  ENSG00000130309_22 (sequence is synthesized)
ttcggtacacttactgagcacctgctgtgtgcagggagctgagctatgggatgggaatgggagtaaacaaggtactttttacttttttctttttttcctcactgctagacggtgtgggaa

SEQ ID NO: 284568 - DNA, 120 bp, Artificial Sequence
  ENSG00000130309_23 (sequence is synthesized)
cttctcactcattggcttctttcccacacacctgaagagcactgactgtgtgccgggcactagtgatacaaaagagtgtgacagttgttcagtctgcattttcgatcatgggctacatgc

SEQ ID NO: 284569 - DNA, 120 bp, Artificial Sequence
  ENSG00000130309_24 (sequence is synthesized)
cgagtgctggggcacagagatgaacaagatcggttccttcacttcttcatgccacaagtgtttattgagcacctgtgtgccaggcctcacagactcccagttgggttgaagaatggttga

SEQ ID NO: 284570 - DNA, 120 bp, Artificial Sequence
  ENSG00000130309_25 (sequence is synthesized)
ctgagtttgattcttcctgtaccctcggtcgtctgagctgtgtgcagacaacatccccccaccacccaagagggagggtagctcttccgccaccaggggcaagcacaggtcctggtggcc

SEQ ID NO: 284571 - DNA, 120 bp, Artificial Sequence
  ENSG00000130309_26 (sequence is synthesized)
ccacgccacatgttagcccccctggagggggcgccagttggagacgggggctgggtgtccctggcccactcccggtcccctgtgctttacctccttgcccttgtgtctcaggtgtggtcc

SEQ ID NO: 284572 - DNA, 120 bp, Artificial Sequence
  ENSG00000130309_27 (sequence is synthesized)
ctgcctgcttgatgaagttgctctgttcaagcctttggtgggatcatgtgtttgggggcttttaggggacccagctgcactggggcactgcccgtggcctgggtaggacatttcccagca

SEQ ID NO: 284573 - DNA, 120 bp, Artificial Sequence
  ENSG00000130309_28 (sequence is synthesized)
agggctggaggagttgccgtgccttcagcctgaatcgaatgtcagaaccagccagcggtgcttcaccctcttggggataacttgcttagttttttaataaatgttcctggttggttttca

SEQ ID NO: 284574 - DNA, 120 bp, Artificial Sequence
  ENSG00000130309_29 (sequence is synthesized)
gtagcctatagggaagggcgttggaaggatcacccagaactcaagggacctggccggaagcctgcaggcttggtcaaggcttagagacttgactgaggcctgtggaggtggatgtggcta

SEQ ID NO: 284575 - DNA, 120 bp, Artificial Sequence
  ENSG00000130309_30 (sequence is synthesized)
aaatttgaccgggcagcctgtgggcgtggctgaagagcatgggggtgtggtcagagctggaggtgtggccgaagagtgtgggggcgtggccagggcgcctggtcttagacaagcccctgg

SEQ ID NO: 284576 - DNA, 120 bp, Artificial Sequence
  ENSG00000130309_31 (sequence is synthesized)
atgggagtgccaccaacatgtttccagcactggagccgtccttctcttctgtaagtgggctggtttgtcctctcccttcctccatctcttttttcccttccatgtgcagtgccctaatct

SEQ ID NO: 284577 - DNA, 120 bp, Artificial Sequence
  ENSG00000130309_32 (sequence is synthesized)
gcattctgggaacactgccccatgtgaatagtaactgcacccctccattcctgactgcccccccatcagggcacctcgcccacctccacccccactgtcctctgaactcagagcagcttc

SEQ ID NO: 284578 - DNA, 120 bp, Artificial Sequence
  ENSG00000130309_33 (sequence is synthesized)
agcctcagagaacgtctgcgtgatcctgctctccccagctccagatcctccatggctccctcacgccctttggaaaaactcactcttctcccccatgaccgccagacccctgggctcctg

SEQ ID NO: 284579 - DNA, 120 bp, Artificial Sequence
  ENSG00000130309_34 (sequence is synthesized)
cattcactccatccagtcacagagctctgcaaacatgctgagcctgctcccatcccaggacctgacggggtaactagatccctggctttctgggcaagctccctccggagggcgggagga

SEQ ID NO: 284580 - DNA, 120 bp, Artificial Sequence
  ENSG00000130309_35 (sequence is synthesized)
agagctctgaagaaacctttgactggtgacttctcactccctgcctcagttttctcaaatggaaaatgggtccgggtgcagtggctcacgcagtaatcctagcaatttgggaggccaagg

SEQ ID NO: 284581 - DNA, 120 bp, Artificial Sequence
  ENSG00000130309_36 (sequence is synthesized)
aggtcgactttgtgggccgagccagtctgactgggagccatggagtgggtggggaaagcgtgttggagagaggctggaggctccttaccccagcgactcctcaacgtctgtgccccacag

SEQ ID NO: 284582 - DNA, 120 bp, Artificial Sequence
  ENSG00000130309_37 (sequence is synthesized)
gaaggcggcgtccaggaacctggccttctacccacctcaccctgactacacctggtcctttgacgacatcatcgtctttgccttctcctgcaagcaggcagtgaagcacccgcccgcaga

SEQ ID NO: 284583 - DNA, 120 bp, Artificial Sequence
  ENSG00000130311_0 (sequence is synthesized)
aagttactgtgaggcggcggctaagaaggcggctctggtggcggcggtggaggctgaggcggcggccgaggcggcgacggaggaaacagaagatggcagattttttgaaaggactgcctg

SEQ ID NO: 284584 - DNA, 120 bp, Artificial Sequence
  ENSG00000130311_1 (sequence is synthesized)
tctacaacaaaagcaattttagtcgatttcacgcggactccgtgtgcaaagcctcgaaccgacggccctcagtctacctgcctacccgcgagtacccgtctgaacagatcatcgtgacag

SEQ ID NO: 284585 - DNA, 120 bp, Artificial Sequence
  ENSG00000130311_2 (sequence is synthesized)
aaaagacaaacatcctcctgcgctacctgcatcagcaatgggacaaaaagaacgctgccaagaagagagaccaggagcaagtggagctggaaggcgagagctccgcacctccccgcaagg

SEQ ID NO: 284586 - DNA, 120 bp, Artificial Sequence
  ENSG00000130311_3 (sequence is synthesized)
tggcgcggaccgacagcccagacatgcacgaggacacttaagactctcaactccacaggcgcctcctgccaggtctgctcctcggtcgcccacccgcctgcccgccatgtgtaagcaccc

SEQ ID NO: 284587 - DNA, 120 bp, Artificial Sequence
  ENSG00000130311_4 (sequence is synthesized)
cgcccgcccgcctccctgccggcccatccacaccctgcgtccacaccacttccaacctcataggagccgatgtatttattttccttgagtttttatttatgctgtaacctgtatcaagcg

SEQ ID NO: 284588 - DNA, 120 bp, Artificial Sequence
  ENSG00000130311_5 (sequence is synthesized)
ttggttaaaggggacatcagacccagtagtgtgatgttggtagatgctttttaaaaaaaacaacattgtccccccgacccccgccttccatcgggccagttccccgattcctgcccccag

SEQ ID NO: 284589 - DNA, 120 bp, Artificial Sequence
  ENSG00000130311_6 (sequence is synthesized)
ttctccagagaaccagagtgtgtctgtgagagtctctagcgggggctttactgtggccgggcgacaggggcgggcccggggtggcctgacctaccaggacagccgagtggccttctcccc

SEQ ID NO: 284590 - DNA, 120 bp, Artificial Sequence
  ENSG00000130311_7 (sequence is synthesized)
cccaacaccggtccaggccattgagactcggtcttgtcccacgcttcgcccggaactttcccatgcccaggcctcactcagcgtgcacgcacgttggggagaagtcggcccttgggatct

SEQ ID NO: 284591 - DNA, 120 bp, Artificial Sequence
  ENSG00000130311_8 (sequence is synthesized)
ttctcttgagtcattttatttttatcatggactagtgcgtgctccgtgtccaccccaataaaagggtctttcctacttgacctcgcgtctttgctccacacaccttggctgcagaggacg

SEQ ID NO: 284592 - DNA, 120 bp, Artificial Sequence
  ENSG00000130311_9 (sequence is synthesized)
gagcccctgggagtcatccctgttgtcaccaagaggagtgagaagggccccccacgccaggggccccaggaccggctggattctctcgtgggcttgctgaggccaccatgttcaaggcca

SEQ ID NO: 284593 - DNA, 120 bp, Artificial Sequence
  ENSG00000130311_10 (sequence is synthesized)
agacctgcctggaccatcccctctgcctctcctgtcaaggtgaccccaaggacaggtcattcctgagagacggtccatggtgccaaggatggagcggggtcagccccctgcctgggatac

SEQ ID NO: 284594 - DNA, 120 bp, Artificial Sequence
  ENSG00000130311_11 (sequence is synthesized)
cgccaagcagggcagcgcacctgtcagacaccgcagagatggccggcctcatccgggggcctggggtctctggcctctgctgctcccctgaggcatggtgacagtacagacggcatctgg

SEQ ID NO: 284595 - DNA, 120 bp, Artificial Sequence
  ENSG00000130311_12 (sequence is synthesized)
ccggtcttgctgtcctaggtggtggcctcacccttgctgggtcatagaggagctgtacagaaggttggcacctggcagttggcatgtgccatggccgctcatggggacccctcttccgcc

SEQ ID NO: 284596 - DNA, 120 bp, Artificial Sequence
  ENSG00000130311_13 (sequence is synthesized)
agctgggctgggtttggggctgagcttgggtatgtaggggtgttcgggctctgggcagaaggtttgtggccctgaccactgagcctggggctgggggaacaccgcttctccccttattgc

SEQ ID NO: 284597 - DNA, 120 bp, Artificial Sequence
  ENSG00000130311_14 (sequence is synthesized)
tccccttattgcccccactggtggtggtggggatctcagttttcttttgttttgttttgtttgtttgtttgagttggggtcttgtactctttcccaggctggagtgcagtggcgtaatca

SEQ ID NO: 284598 - DNA, 67 bp, Artificial Sequence
  ENSG00000130311_15 (sequence is synthesized)
gtggcgtaatcacagctcactgcagcctcgacctcaagccttcctcccacctcagccttccaagcga

SEQ ID NO: 284599 - DNA, 74 bp, Artificial Sequence
  ENSG00000130311_16 (sequence is synthesized)
gtgcgcccctacacccagctaatttttctatttttagtggagacggcgttttgtcatgttggccaggctggtct

SEQ ID NO: 284600 - DNA, 90 bp, Artificial Sequence
  ENSG00000130311_17 (sequence is synthesized)
tcgcctgcctcggcctcccaaagtgctgtgaccgcacctggctgcctggctaatattttaaaaattttttgtagagacagggtttcacca

SEQ ID NO: 284601 - DNA, 120 bp, Artificial Sequence
  ENSG00000130311_18 (sequence is synthesized)
gcctcccaaagtgctggggttacagacgtgaaccaccgtgcctggcagaggtctctgttttgagagctgagtctgagggcgttgggatggtgtagggttgggccacagagctagcagaca

SEQ ID NO: 284602 - DNA, 120 bp, Artificial Sequence
  ENSG00000130311_19 (sequence is synthesized)
acagagctagcagacactccgggctatggagggtccgcctgccccagattccactgtggagggccctgcctgtgtcagaccctcgggcctaggcggcccatctctcccaaggacggagag

SEQ ID NO: 284603 - DNA, 120 bp, Artificial Sequence
  ENSG00000130311_20 (sequence is synthesized)
tgccagggtgggctcccgtcctacacaaggagtggctgaccaggcccaggcacagcacagccaccctgctgtacctcccagctcccggcagtgtctacaccacagtgatggtgctacagg

SEQ ID NO: 284604 - DNA, 120 bp, Artificial Sequence
  ENSG00000130311_21 (sequence is synthesized)
ggccatgtggtcacaggacaggtggtcaggaaatgcacacttgactgcggtcgatggtgccgggtccggctgaatgccctggaggctcccaggccagctggggagtcccagtccccaggg

SEQ ID NO: 284605 - DNA, 120 bp, Artificial Sequence
  ENSG00000130311_22 (sequence is synthesized)
ttggtgtgacctgggcaggcctgcggtgtccatctgtgaatgactgagatggtgggacttcagcttccaaggccaggggccagagtgggagcagggggcactcccgcctttcccctcggc

SEQ ID NO: 284606 - DNA, 120 bp, Artificial Sequence
  ENSG00000130311_23 (sequence is synthesized)
ctgtctagacctctctggctcccagtttctgctttgagtggctgggggctgtctcctgcctgtgctgtctgcccgtcgctctgcagggctgctgggcgggcacctccttcccctccccta

SEQ ID NO: 284607 - DNA, 120 bp, Artificial Sequence
  ENSG00000130311_24 (sequence is synthesized)
cctcagctccctcctttggggtctgagggctgtgccccagcttgcctccctgtggcctccccctagaacccctgggtctgtcgggacatgccccacctggcacacacaccctgtgtagct

SEQ ID NO: 284608 - DNA, 120 bp, Artificial Sequence
  ENSG00000130311_25 (sequence is synthesized)
cccactgcctgtgggaggacgctgggcccctgagccggcctctgtctacccctcctgcctttggggtcccctttaccccactgttcccccaaactgccttccaccttctccgcctttgca

SEQ ID NO: 284609 - DNA, 120 bp, Artificial Sequence
  ENSG00000130311_26 (sequence is synthesized)
caggctgttctcctgcctccagtgaactctgacttctccacagcctcccaaagggccccttgctcacactggcccagccctgcagcatggccatgttggtctctgagccttaagcctttg

SEQ ID NO: 284610 - DNA, 120 bp, Artificial Sequence
  ENSG00000130311_27 (sequence is synthesized)
gatgtggacacatttgtcctcttcctgaaaaatgtgagggtctgagaggccacgttcctgttcctgagtcatacgacagagtcccagtgacttgggtctgatgtctgtcccacagtggga

SEQ ID NO: 284611 - DNA, 120 bp, Artificial Sequence
  ENSG00000130311_28 (sequence is synthesized)
catccctgctgcatcccaatgccaccccgtgtcctggggacacccaaatgtgccattctctcagtatcacaagtcggggactgcaggaggctcaggtgccaggtgccttctgatgttcat

SEQ ID NO: 284612 - DNA, 120 bp, Artificial Sequence
  ENSG00000130311_29 (sequence is synthesized)
gccacaagctcttcccactgtctctggctccccagacgatgttccaggaggcgggtgtgccagaaggggccacgtcttgcaaaccaccgcgctgtcctctttgagaaggagtcttactca

SEQ ID NO: 284613 - DNA, 120 bp, Artificial Sequence
  ENSG00000130311_30 (sequence is synthesized)
ggactggggcctgtgcacacattgtcgcctcttttcagcacttagagattccttcctttgtctagtggctgaagccagggctgaagttggcctccaaatctgggccgtctcagaggcggc

SEQ ID NO: 284614 - DNA, 120 bp, Artificial Sequence
  ENSG00000130311_31 (sequence is synthesized)
gcagcctggagttttccatctgtggccaagacccagtttttgggaggaggccctcatgggtcaagccagcctgtaccaggatggggggagggggttcccaacctaggccccagccaccca

SEQ ID NO: 284615 - DNA, 120 bp, Artificial Sequence
  ENSG00000130311_32 (sequence is synthesized)
gactcccccacccccactcccttttccactgctctgacctcgggcactgttgaaatatagtttttattgcatttctgccgttttacaaaaatatgacaaaataaattaaaaacaaataaa

SEQ ID NO: 284616 - DNA, 120 bp, Artificial Sequence
  ENSG00000130311_33 (sequence is synthesized)
tagacttggcttgggttcacacgctgtctactgaatccagttaagtcagggagggcctccagggaggtacaggagggggaccttgggggcttcagcctggggatgcacacgtggatgcct

SEQ ID NO: 284617 - DNA, 120 bp, Artificial Sequence
  ENSG00000130311_34 (sequence is synthesized)
gtccactcccagcccctggggacagccagaaacctggctttccccaggtgtctcttgattgggacacactgggatccacagccagcccaaaggggcccccaagttgtccctcatctgcca

SEQ ID NO: 284618 - DNA, 120 bp, Artificial Sequence
  ENSG00000130311_35 (sequence is synthesized)
gagtagctgcgagtgtgctcagaagcaaaaacatgggacttttggagatctctggagttgggggtactgagttccagccccaaaaagacctcccagggcagtgtcaggggaggagcctgg

SEQ ID NO: 284619 - DNA, 120 bp, Artificial Sequence
  ENSG00000130312_0 (sequence is synthesized)
ccggctacctgttggtgtgtatgcagagcatccctgtgccccgcggatatagactggcgcgcctctgttgcgcaggcgcagaactacaacttcagggttttccccaacggcctctttttt

SEQ ID NO: 284620 - DNA, 120 bp, Artificial Sequence
  ENSG00000130312_1 (sequence is synthesized)
gcacgttaggagaaactacatttcccataatcctttgttccagggctggagcggctctgggctccggaatcgcccgcagccggtactgcgggacccactgcggatatggctgtcttggct

SEQ ID NO: 284621 - DNA, 120 bp, Artificial Sequence
  ENSG00000130312_2 (sequence is synthesized)
ggatccctgttgggccccacgagtaggtcggcagcgttgctgggtggcaggtggctccagccccgggcctggctggggttcccagacgcctggggcctccccaccccgcagcaggcccgg

SEQ ID NO: 284622 - DNA, 120 bp, Artificial Sequence
  ENSG00000130312_3 (sequence is synthesized)
ggcaaggctcgcgggaatgagtatcagccgagcaacatcaaacgcaagaacaagcacggctgggtccggcgcctgagcacgccggccggcgtgcaggtcatccttcgccgaatgctcaag

SEQ ID NO: 284623 - DNA, 120 bp, Artificial Sequence
  ENSG00000130312_4 (sequence is synthesized)
gtcgctgagccattgaggatcgcgacgcagtcggcgggaccctcatggaagcatcgccctcgcctcggaccttgcctggcgctatttttgcagggagctggggagcaggaacgcctcgga

SEQ ID NO: 284624 - DNA, 120 bp, Artificial Sequence
  ENSG00000130312_5 (sequence is synthesized)
cctgagtgctctccatattgtggggttgaagtctggatgggagcttgccaagtccctttttaggctttttaattaggaagcatttcgaacctgcgcaacagaccaaagaacagtacaaag

SEQ ID NO: 284625 - DNA, 120 bp, Artificial Sequence
  ENSG00000130312_6 (sequence is synthesized)
aacatccgtgtacccagtaccctgactaccgactacctacaacccgtccctgccccatcctgagttcttttgaagctgatctcaggcatcggattatttcttctgtaaatatttcagaat

SEQ ID NO: 284626 - DNA, 120 bp, Artificial Sequence
  ENSG00000130312_7 (sequence is synthesized)
gtatctctccaagatgagagctcattaaaagacaattacaaagcttatcacatccaaaagaattatcaataattttgaaatattattaaacgtgtaataaatgttcaaagttccacttgc

SEQ ID NO: 284627 - DNA, 120 bp, Artificial Sequence
  ENSG00000130312_8 (sequence is synthesized)
accaagcgatgccccgccggcccagcggctacttcttgtcttctggaggcgccggcagtggctccggtagagccttgggcgagggctcgggctcccagagcaggaattcgtggagcagcg

SEQ ID NO: 284628 - DNA, 120 bp, Artificial Sequence
  ENSG00000130312_9 (sequence is synthesized)
tgttgaccgtctcagggcattccagcatcaccatgtggctgccctcgtcgatgagcttcaggaatgccaggagcaggatctgcagaagacgcagggctcaaggagagaatgaggccactt

SEQ ID NO: 284629 - DNA, 87 bp, Artificial Sequence
  ENSG00000130312_10 (sequence is synthesized)
agagatgagatcttgcttatgttgcccaggttggtcttgaactcctcagctatagcagtcctcccacctcagcttcccaaagtgttg

SEQ ID NO: 284630 - DNA, 120 bp, Artificial Sequence
  ENSG00000130312_11 (sequence is synthesized)
tggagtctcactctgtcacccaggctagaatctctaaaacagtggtgctcaacttgcctggctgttcaatcttgcctttcttcctggataaaggagagaatgaggccacttggtagtggt

SEQ ID NO: 284631 - DNA, 120 bp, Artificial Sequence
  ENSG00000130312_12 (sequence is synthesized)
ggagagaatgaggccacttggtagtggtcaagccctggggaccaagccttccatggaggggttcttggtaagttttaggttgtattacctgccctttaagcaggagtgaattacagtaac

SEQ ID NO: 284632 - DNA, 120 bp, Artificial Sequence
  ENSG00000130313_0 (sequence is synthesized)
ctcctccccgccgccgccctcgccatggccgcgccggccccgggcctcatctcggtgttctcgagttcccaggagctgggtgcggcgctagcgcagctggtggcccagcgcgcagcatgc

SEQ ID NO: 284633 - DNA, 120 bp, Artificial Sequence
  ENSG00000130313_1 (sequence is synthesized)
tgcctggcaggggcccgcgcccgtttcgcgctcggcctgtcgggcgggagcctcgtctcgatgctagcccgcgagctacccgccgccgtcgcccctgccgggccagctagcttagcgcgc

SEQ ID NO: 284634 - DNA, 120 bp, Artificial Sequence
  ENSG00000130313_2 (sequence is synthesized)
tggacgctgggcttctgcgacgagcgcctcgtgcccttcgatcacgccgagagcacgtacggcctctaccggacgcatcttctctccagactgccgatcccagaaagccaggtgatcacc

SEQ ID NO: 284635 - DNA, 120 bp, Artificial Sequence
  ENSG00000130313_3 (sequence is synthesized)
attaaccccgagctgcctgtggaggaggcggctgaggactacgccaagaagctgagacaggcattccaaggggactccatcccggttttcgacctgctgatcctgggggtgggccccgat

SEQ ID NO: 284636 - DNA, 120 bp, Artificial Sequence
  ENSG00000130313_4 (sequence is synthesized)
gagaagattgtggctcccatcagtgactccccgaagccaccgccacagcgtgtgaccctcacactacctgtcctgaatgcagcacgaactgtcatctttgtggcaactggagaaggcaag

SEQ ID NO: 284637 - DNA, 120 bp, Artificial Sequence
  ENSG00000130313_5 (sequence is synthesized)
gcagctgttctgaagcgcattttggaggaccaggaggaaaacccgctgcccgccgccctggtccagccccacaccgggaaactgtgctggttcttggacgaggcggccgcccgcctcctg

SEQ ID NO: 284638 - DNA, 120 bp, Artificial Sequence
  ENSG00000130313_6 (sequence is synthesized)
accgtgcccttcgagaagcattccactttgtagctggccagagggacgccgcagctgggaccaggcacgcggcccatggggctgggcccctgctggccgccactctccgggctctccttt

SEQ ID NO: 284639 - DNA, 120 bp, Artificial Sequence
  ENSG00000130313_7 (sequence is synthesized)
caaaaagccacgtcgtgctgctgctggaagccaacagcctccggccagcagccctacccggggctcaacacacaggctgtggctctggacatccggatattaaaaggagcgttgctggaa

SEQ ID NO: 284640 - DNA, 120 bp, Artificial Sequence
  ENSG00000130313_8 (sequence is synthesized)
gcggctgaggactacgccaagaagctgagacaggaactgccccagggatcactggcagatccctttgaggaatcccctcttcgaggccacagccctgccctggggagcctgaaggccact

SEQ ID NO: 284641 - DNA, 120 bp, Artificial Sequence
  ENSG00000130313_9 (sequence is synthesized)
gaaacaggacaatgggctggctagacaggtgcaggctatggccaggaaaccccccaaatacaacggaattgaaagactcctgttggaatgctggcccccgcaggaaccaccatgatcccg

SEQ ID NO: 284642 - DNA, 120 bp, Artificial Sequence
  ENSG00000130313_10 (sequence is synthesized)
attcacccaggagggccaccctcccgtccagccccccaagagcagcagggctccctcttgcccttgaacctcctctgccctgacaggcggcgtcacccagggctcaggatcctggcttcc

SEQ ID NO: 284643 - DNA, 120 bp, Artificial Sequence
  ENSG00000130313_11 (sequence is synthesized)
agcattccagaggtgactcaccaaccaaagtgtcactcaccaaccgaaggaccttgcacaaatgcaccagcctccccatgcctcagtctccccatctgtaaatgagtgttatgacggtac

SEQ ID NO: 284644 - DNA, 120 bp, Artificial Sequence
  ENSG00000130313_12 (sequence is synthesized)
cagccaccgcctacaccccggctacggaggccgccgggggccatgccgaaagggccgcgcccactgtctgcacctcggctacgggggccactgggtatcatgccaagagggccgtgccca

SEQ ID NO: 284645 - DNA, 120 bp, Artificial Sequence
  ENSG00000130313_13 (sequence is synthesized)
ctgcctgcacctcggctacgtgggtcgctgggggtcatgccaagagggccgcgcccaccggttgccctcggctacgggggccactgggggtcatgccgagatggtcacgcccactgcctg

SEQ ID NO: 284646 - DNA, 120 bp, Artificial Sequence
  ENSG00000130313_14 (sequence is synthesized)
cacctcgactacgggggccgctgggggtctagccgacagggctcgcccgcctcctgaaccccgcctacagtgggtcccgcaggacctcactgcgccctctgcctttatctaggcagggct

SEQ ID NO: 284647 - DNA, 120 bp, Artificial Sequence
  ENSG00000130313_15 (sequence is synthesized)
tggccaggcagagggaacggcacgggcaagggcctggaagggaatccgagtggcccatgtcaaacgatgcccataactcagccccgtagcggacgggggcacgaggaatcaggtgtagag

SEQ ID NO: 284648 - DNA, 120 bp, Artificial Sequence
  ENSG00000130313_16 (sequence is synthesized)
cctgaatctcagggtcctgatctctaaccccagcgagttctcggggatccctgggcagctttgccgctctgatggctctgcttccaggctgttcatctttggctttgagcctcaggattc

SEQ ID NO: 284649 - DNA, 120 bp, Artificial Sequence
  ENSG00000130313_17 (sequence is synthesized)
tatagaatcagaggagcgcgctcttttaaagacagggtaactgaggcttggaggagccttggcctggccgagggaagagtgggaggggcgggctcaaaggccaggaacctcaagtcactt

SEQ ID NO: 284650 - DNA, 120 bp, Artificial Sequence
  ENSG00000130313_18 (sequence is synthesized)
gagtctggcagcgtcaagggacaccccatgctgggtgtgccgtcttctctttgcatagaatcttgagctgatgatggttttgtgggttttttattaagagaaaaggcttactgaacgctt

SEQ ID NO: 284651 - DNA, 120 bp, Artificial Sequence
  ENSG00000130313_19 (sequence is synthesized)
tatatgcatcaattcatgagtccgtaccacagcctatgagatgttacactcatttcacagatggagaaactgaggccagaagaggtgagcttacctgcccaaggcatctagtgaccagag

SEQ ID NO: 284652 - DNA, 120 bp, Artificial Sequence
  ENSG00000130313_20 (sequence is synthesized)
gggcagccagggtgtgatcctgcctcatctgacttcgtagttgggtacacatttaacttccgccttcctgtgtgtgttttccaagagcatcattaaaaagttttggccgggtgcggtggc

SEQ ID NO: 284653 - DNA, 120 bp, Artificial Sequence
  ENSG00000130332_0 (sequence is synthesized)
gagccacacggcgcgacaagatggcggataaggagaagaagaaaaaggagagcatcttggacttgtccaagtacatcgacaagacgatccgggtaaagttccagggaggccgcgaagcca

SEQ ID NO: 284654 - DNA, 120 bp, Artificial Sequence
  ENSG00000130332_1 (sequence is synthesized)
gtggaatcctgaagggcttcgacccactcctcaaccttgtgctggacggcaccattgagtacatgcgagaccctgacgaccagtacaagctcacggaggacacccggcagctgggcctcg

SEQ ID NO: 284655 - DNA, 120 bp, Artificial Sequence
  ENSG00000130332_2 (sequence is synthesized)
ggcacgtccgtggtgctaatctgcccgcaggacggcatggaggccatccccaaccccttcatccagcagcaggacgcctagcctggccgggggcgcggggggtgcagggcaggcccgagc

SEQ ID NO: 284656 - DNA, 120 bp, Artificial Sequence
  ENSG00000130332_3 (sequence is synthesized)
agctcggtttcccgcggacttggctgctgctcccaccgcagtaccgcctcctggaacggaagcattttcctttttgtataggttgaatttttgttttcttaataaaattgcaaacctcaa

SEQ ID NO: 284657 - DNA, 120 bp, Artificial Sequence
  ENSG00000130332_4 (sequence is synthesized)
gtgagtagagctgaccggccgcagttcagccacacatggactcattaccgaagctgcctccacccaggcagcccgagccagcagctgtgaccggcaccctgtggcccacacggccagaag

SEQ ID NO: 284658 - DNA, 120 bp, Artificial Sequence
  ENSG00000130332_5 (sequence is synthesized)
tgtttgccatctggccccccgcagacgtggtctgctgcctgtggtggagatcactctggaggcggctgtcatcggccactcccgggagccctctcctaccctcagtcctccatccctgga

SEQ ID NO: 284659 - DNA, 120 bp, Artificial Sequence
  ENSG00000130332_6 (sequence is synthesized)
agagccacacggcgcgacaagatggcggataaggagaagaagaaaaaggagagcatcttggacttgtccaagtacatcgacaagacgatccgggtaaagttccagggaggccgcgaaggt

SEQ ID NO: 284660 - DNA, 120 bp, Artificial Sequence
  ENSG00000130332_7 (sequence is synthesized)
gaggaggctcccgctgtcggtaccccctctttaaaaatttcaaataaacccagcaacagagatgatgaggacgcatgcggaagcacctcttttatttattttcattattttttttgagac

SEQ ID NO: 284661 - DNA, 120 bp, Artificial Sequence
  ENSG00000130332_8 (sequence is synthesized)
ctcaaactcctggcctcaagcgatctgcctgcctcagccccctaaattgctgggatttcaggcatgagccaccatgcccagcctagcatttttgactgggcaagtgagctgccttctcct

SEQ ID NO: 284662 - DNA, 120 bp, Artificial Sequence
  ENSG00000130332_9 (sequence is synthesized)
ctgtccccatcagccatcactgcctgtcccatccctggccctggcacccacgcatcccttccctgtctttgtggattggcctgtcctggacatttcatagaaatgggatctcacggtgcg

SEQ ID NO: 284663 - DNA, 120 bp, Artificial Sequence
  ENSG00000130332_10 (sequence is synthesized)
gagccacacggcgcgacaagatggcggtgagcgcgcggcggaatctggagccggggggcgtggagctcgggccgcgctccaggtctcatgcgctctgctttccccgcaggataaggagaa

SEQ ID NO: 284664 - DNA, 120 bp, Artificial Sequence
  ENSG00000130332_11 (sequence is synthesized)
gataaggagaagaagaaaaaggagagcatcttggacttgtccaagtacatcgacaagacgatccgggtaaagttccagggaggccgcgaagagtcacaggccctagcccacactccagag

SEQ ID NO: 284665 - DNA, 120 bp, Artificial Sequence
  ENSG00000130332_12 (sequence is synthesized)
gaggggcaccttggctccatgttagagacctacctacctcagtgctcacatctctccccgtgaggagggcgggctcactggtcaggctggtgccaaggacctgaacatctgcatctgacc

SEQ ID NO: 284666 - DNA, 120 bp, Artificial Sequence
  ENSG00000130332_13 (sequence is synthesized)
aagggcgcggggcggtgcctgcgaagagccacacggcgcgacaagatggcggataaggagaagaagaaaaaggagagcatcttggacttgtccaagtacatcgacaagacgatccgggta

SEQ ID NO: 284667 - DNA, 120 bp, Artificial Sequence
  ENSG00000130338_0 (sequence is synthesized)
aaacattgcagcggctcacacagtgtttgttgcactttatttttcagtgggtttggtgatttggacggattaaaattctagactgaaaagtaactcctactgtggttatggctagaggaa

SEQ ID NO: 284668 - DNA, 120 bp, Artificial Sequence
  ENSG00000130338_1 (sequence is synthesized)
agcaagttcaagtatgatgggacaagtttgaataatgaactgattcctttgcctatcttaattaactgtatttgagaaattttaatttattattcccccccttttttcctgcatctatag

SEQ ID NO: 284669 - DNA, 120 bp, Artificial Sequence
  ENSG00000130338_2 (sequence is synthesized)
gataatattgtaaaatagcaattgaaaccaataattattaaataaatatcaaggaaaatccaagcaaagctttctttttgttggactagtggtgtggtgtttggagacagtctctgaatg

SEQ ID NO: 284670 - DNA, 120 bp, Artificial Sequence
  ENSG00000130338_3 (sequence is synthesized)
tgaacaggaaagcacccatcagcaaaacactatcactctctagggagacagctgggggaatctgactctggcttctgcttttgttttaagggattaacttccctgtcaagtccaagaaga

SEQ ID NO: 284671 - DNA, 120 bp, Artificial Sequence
  ENSG00000130338_4 (sequence is synthesized)
cttgcgtatgagaagattacctgatggacttaattctaagattagcttttttcatcaagatggaaaaagatctttaggagcagaaaaggggagtgctaactgggggagcgagaagggaga

SEQ ID NO: 284672 - DNA, 120 bp, Artificial Sequence
  ENSG00000130338_5 (sequence is synthesized)
cgagcaaaagaaacaaaatcttgccacgtggctctgttttgtcagcaagaggatttaagactcacccagggcaaacactgggaccactgtaagagcgctggaacattctgcctcttgagt

SEQ ID NO: 284673 - DNA, 120 bp, Artificial Sequence
  ENSG00000130338_6 (sequence is synthesized)
gaaggggccttctttctagcctctatggcactgaggggtgcgccggctggtggaggagcagtccgatggagccctgcgttccccggggacacagggccaagctttgaggtggaaagtttc

SEQ ID NO: 284674 - DNA, 120 bp, Artificial Sequence
  ENSG00000130338_7 (sequence is synthesized)
tggttctgaaacaacaaggagagagtctgtttttcttcctaaaatttggactcttgtctgcacaaactctggtctgttttgcacggtttgtgtgcctttttttccctttatgcaatcttt

SEQ ID NO: 284675 - DNA, 120 bp, Artificial Sequence
  ENSG00000130338_8 (sequence is synthesized)
ttcagctttagcagcagaaatttgtctagttcaggaaacatgctagagggtggcttcagaaggaagatgatcctgtgtattctgtctctgcatccgaacttttgaagagaaaaattcgag

SEQ ID NO: 284676 - DNA, 120 bp, Artificial Sequence
  ENSG00000130338_9 (sequence is synthesized)
ctagagggattcttaaagccttaagttacttgaaatctatgtatttgcaaccctttgtctctggaatcatattacactaaactggaatctcaggctgaatgagaataaccaagtggagta

SEQ ID NO: 284677 - DNA, 120 bp, Artificial Sequence
  ENSG00000130338_10 (sequence is synthesized)
aaaagaagaaaaccgtttcttgatcaccacttaattaacgatgctctttctccaaaggatcagcacgttcttcctctgagaacttgaaaatacaaatggaccccatgtttttttaagcat

SEQ ID NO: 284678 - DNA, 120 bp, Artificial Sequence
  ENSG00000130338_11 (sequence is synthesized)
taccttttcttagaagactgccatcatcttttatagaggaattttttcactatgcattcggtggatctttataaaatactgaccttctaattagattcaggtcagtcttaattaaagggg

SEQ ID NO: 284679 - DNA, 120 bp, Artificial Sequence
  ENSG00000130338_12 (sequence is synthesized)
gaaaaaagcaacgcaagccaaccacaaaaacacatataccaatgaaagaaattggtttaaatttcacagcattaacattactttttaagtaaaacagttcattgaagaaagtatgtatgc

SEQ ID NO: 284680 - DNA, 120 bp, Artificial Sequence
  ENSG00000130338_13 (sequence is synthesized)
agcagtggaacatgggcctgtgctttgcagcgattccaacatcctgtgcctgtcctggaaggggcgtgtccccaagagtgagaaggagaagcctgtgtgcaggagacgctactatgagga

SEQ ID NO: 284681 - DNA, 120 bp, Artificial Sequence
  ENSG00000130338_14 (sequence is synthesized)
aggctggctggccacgggcaacgggcgaggagtggttggggtgactttcacctctagtcactgtcgcagggacaggagtactccacagaggataaatttcaacctccggggccacaatag

SEQ ID NO: 284682 - DNA, 120 bp, Artificial Sequence
  ENSG00000130338_15 (sequence is synthesized)
cgaggttgtgctggtgaggtggaatgagccctaccagaaactggccacgtgcgatgcggacggaggcatattcgtgtggattcagtacgagggcaggtggtctgtggagctggtcaacga

SEQ ID NO: 284683 - DNA, 120 bp, Artificial Sequence
  ENSG00000130338_16 (sequence is synthesized)
ccgcggggcgcaggtgagtgatttcacgtggagccatgatggaactcaagcacttatttcctatcgagatgggtttgtcctggttgggtctgtcagtggacaaagacactggtcatccga

SEQ ID NO: 284684 - DNA, 120 bp, Artificial Sequence
  ENSG00000130338_17 (sequence is synthesized)
aatcaacttggaaagtcaaattacgtgtggcatatggactcctgacgaccaacaggtgctgtttggcacggccgatgggcaggtgattgtcatggattgccacggcagaatgctggccca

SEQ ID NO: 284685 - DNA, 120 bp, Artificial Sequence
  ENSG00000130338_18 (sequence is synthesized)
cgtcctcttgcacgagtcagacggtgtcctcggcatgtcctggaactacccgatcttcctggtggaggacagcagcgagagcgacacggactcagatgactacgcccctccccaagatgg

SEQ ID NO: 284686 - DNA, 120 bp, Artificial Sequence
  ENSG00000130338_19 (sequence is synthesized)
tccggcagcatatcccatcccagtgcagaacatcaagcctctgctcaccgtcagcttcacctcgggagacatcagcttaatgaacaactacgatgacttgtctcccacggtcatccgctc

SEQ ID NO: 284687 - DNA, 120 bp, Artificial Sequence
  ENSG00000130338_20 (sequence is synthesized)
agggctgaaagaggtggtagcccagtggtgcacacagggggacttgctggcagtcgctgggatggaacggcagacccagcttggtgagcttcccaatggtccccttctgaagagtgccat

SEQ ID NO: 284688 - DNA, 120 bp, Artificial Sequence
  ENSG00000130338_21 (sequence is synthesized)
ggtcaagttctacaatgttcgtggggagcacatcttcacactggacactctcgtgcagcgccccatcatctccatctgctggggtcaccgggattcgaggctgttgatggcatcaggacc

SEQ ID NO: 284689 - DNA, 120 bp, Artificial Sequence
  ENSG00000130338_22 (sequence is synthesized)
agccctgtacgtggtgcgtgtggagcaccgggtgtccagcctgcagctgctgtgccagcaggccatcgccagcaccttgcgtgaggacaaggacgtcagcaagctgactctgcccccccg

SEQ ID NO: 284690 - DNA, 120 bp, Artificial Sequence
  ENSG00000130338_23 (sequence is synthesized)
cctctgctcctacctctccactgccttcatccccaccatcaagcccccaattccagatccgaacaacatgagagactttgtcagctacccatcagccggcaacgagcggctgcactgcac

SEQ ID NO: 284691 - DNA, 120 bp, Artificial Sequence
  ENSG00000130338_24 (sequence is synthesized)
catgaagcgcacagaggacgacccggaggtgggcggcccgtgctacacgctctacctggagtacctgggcgggcttgtgcccatcctcaaagggcggcgcatcagcaagctgcggccaga

SEQ ID NO: 284692 - DNA, 120 bp, Artificial Sequence
  ENSG00000130338_25 (sequence is synthesized)
gttcgtcatcatggacccgcggacagatagcaaaccagatgaaatctatgggaacagcttgatttctactgtgatcgacagctgcaactgctcagactccagtgacattgagctgagtga

SEQ ID NO: 284693 - DNA, 120 bp, Artificial Sequence
  ENSG00000130338_26 (sequence is synthesized)
tgactgggctgccaagaaatctcccaaaatctccagagctagcaaatcacccaaactcccaaggatcagcattgaggcccgcaagtcacccaagctgccccgggctgctcaggagctctc

SEQ ID NO: 284694 - DNA, 120 bp, Artificial Sequence
  ENSG00000130338_27 (sequence is synthesized)
ccggtccccacggttgcccctgcgcaagccctctgtgggctcgcccagcctgactcggagagagtttccttttgaagacatcactcagcacaactatcttgctcaggtcacgtctaatat

SEQ ID NO: 284695 - DNA, 120 bp, Artificial Sequence
  ENSG00000130338_28 (sequence is synthesized)
ctggggaaccaaatttaagattgtgggcttggctgctttcctgccaaccaacctcggtgcagtaatctataaaaccagcctcctgcatctccagccgcggcagatgaccatttatctccc

SEQ ID NO: 284696 - DNA, 120 bp, Artificial Sequence
  ENSG00000130338_29 (sequence is synthesized)
agaagttcggaaaatttccatggactatattaatttacctgtcttcaacccaaatgttttcagtgaagatgaagatgatttaccagtgacaggagcatctggtgtccctgagaacagccc

SEQ ID NO: 284697 - DNA, 120 bp, Artificial Sequence
  ENSG00000130338_30 (sequence is synthesized)
accttgtaccgtgaacatccctattgcaccgatccacagctcggctcaggctatgtcccccacgcagagcatagggctggtgcagtccctactggccaatcagaatgtgcagctagatgt

SEQ ID NO: 284698 - DNA, 120 bp, Artificial Sequence
  ENSG00000130338_31 (sequence is synthesized)
cctgaccaaccagacgacagctgtagggacagcagaacatgcaggtgacagtgccacccagtacccagtctccaaccggtactccaatcctggacaggtgattttcggaagcgtggaaat

SEQ ID NO: 284699 - DNA, 120 bp, Artificial Sequence
  ENSG00000130338_32 (sequence is synthesized)
gggccgcatcattcagaacccccctccactgtccctgcctcccccgccgcaggggcccatgcagctgtccacggtgggccatggagaccgagaccacgaacacctgcagaagtcagccaa

SEQ ID NO: 284700 - DNA, 120 bp, Artificial Sequence
  ENSG00000130338_33 (sequence is synthesized)
ggccctgcggccaacaccgcagctggcagctgagggggacgcagtggtctttagtgccccccaggaggtccaggtgacgaagataaaccctccacccccgtacccaggaaccatccccgc

SEQ ID NO: 284701 - DNA, 120 bp, Artificial Sequence
  ENSG00000130338_34 (sequence is synthesized)
tgcccccaccacagcagcacccccgccccctctgccgcccccacagcccccagtggatgtgtgcttgaagaagggcgacttctccctctaccccacgtcagtgcactaccagacccccct

SEQ ID NO: 284702 - DNA, 120 bp, Artificial Sequence
  ENSG00000130338_35 (sequence is synthesized)
gggctatgagaggatcaccaccttcgacagcagtggcaacgtggaggaggtgtgccggccccgcacccggatgctgtgctcccagaacacgtacaccctccccggcccgggtagctctgc

SEQ ID NO: 284703 - DNA, 120 bp, Artificial Sequence
  ENSG00000130338_36 (sequence is synthesized)
caccttgaggctcacggccactgagaagaaggtccctcagccctgcagcagtgccaccctgaaccgcctgaccgtccctcgctactccatccccaccggggacccacccccgtatcctga

SEQ ID NO: 284704 - DNA, 120 bp, Artificial Sequence
  ENSG00000130338_37 (sequence is synthesized)
aattgccagccagctggcccaggggcggggggctgcccagaggtccgacaatagcctcatccacgctaccctgcggaggaacaaccgtgaggctacgctcaagatggcccagctggccga

SEQ ID NO: 284705 - DNA, 120 bp, Artificial Sequence
  ENSG00000130338_38 (sequence is synthesized)
cagcccgcgggcccccctgcagcccctggccaagtccaagggcgggcccgggggggtggtgacacagctcccagcgcggcccccacctgccctgtacacctgcagtcagtgcagtggcac

SEQ ID NO: 284706 - DNA, 120 bp, Artificial Sequence
  ENSG00000130338_39 (sequence is synthesized)
agggcccagctcacagcccggagcctccctggcccataccgccagcgcctccccgttggcctcccagtcctcctacagcctcctgagcccacccgacagcgcccgcgaccgcaccgacta

SEQ ID NO: 284707 - DNA, 120 bp, Artificial Sequence
  ENSG00000130338_40 (sequence is synthesized)
cgtcaactcggccttcacggaggacgaggccctgtcccagcactgtcagcttgagaagcccttgaggcaccctcccctgcctgaagctgctgtcaccctgaaacggccacccccttacca

SEQ ID NO: 284708 - DNA, 120 bp, Artificial Sequence
  ENSG00000130338_41 (sequence is synthesized)
gtgggaccccatgctgggtgaggatgtttgggttcctcaagaaaggacagcacagacttcagggcccaaccccttaaaactgtcctctctgatgctgagtcagggccagcacctggacgt

SEQ ID NO: 284709 - DNA, 120 bp, Artificial Sequence
  ENSG00000130338_42 (sequence is synthesized)
gtcccgactgcccttcatctcccccaagtctcctgccagccccactgccactttccaaacaggctatgggatgggagtgccatatccaggaagctataacaacccccctttgcctggagt

SEQ ID NO: 284710 - DNA, 120 bp, Artificial Sequence
  ENSG00000130338_43 (sequence is synthesized)
gcaggctccctgctctcccaaagatgccctgtccccaacgcagtttgcacaacaggagcctgctgtggtccttcagccgctgtacccacccagcctctcctattgcaccctgccccccat

SEQ ID NO: 284711 - DNA, 120 bp, Artificial Sequence
  ENSG00000130338_44 (sequence is synthesized)
gtacccaggaagcagcacgtgctctagtttacagctgccacctgtcgccttgcatccatggagttcctacagcgcctgcccgcccatgcagaacccccagggcactctccccccaaagcc

SEQ ID NO: 284712 - DNA, 120 bp, Artificial Sequence
  ENSG00000130338_45 (sequence is synthesized)
acacttggtggtggagaagccccttgtgtccccaccacctgccgacctccaaagccacttgggcacagaggtgatggtagagactgcagacaacttccaggaagtcctctccctgaccga

SEQ ID NO: 284713 - DNA, 120 bp, Artificial Sequence
  ENSG00000130338_46 (sequence is synthesized)
aagcccagtcccccagcggacagaaaaatttggaaagaagaaccggaagcgcctggacagccgagcagaagaaggcagcgttcaggccatcactgagggcaaagtgaagaaggaggctag

SEQ ID NO: 284714 - DNA, 120 bp, Artificial Sequence
  ENSG00000130338_47 (sequence is synthesized)
acctggggagagagaagaagaaagtgaagagtcagaaagaccaactgaagtcaaagaagttgaataagacaaacgagttccaggacagctccgagagcgagcctgagctgttcatcagcg

SEQ ID NO: 284715 - DNA, 120 bp, Artificial Sequence
  ENSG00000130338_48 (sequence is synthesized)
gggatgagctcatgaaccagagccagggcagcagaaagggctggaaaagcaagcgctccccacgggccgccggcgagctggaggaggccaagtgccggcgggccagtgagaaggaggacg

SEQ ID NO: 284716 - DNA, 120 bp, Artificial Sequence
  ENSG00000130338_49 (sequence is synthesized)
ggcggctgggcagccaaggcttcgtgtacgtgatggccaacaagcagccgctgtggaacgaggccacccaggtctaccagctggacttcggggggcgggtgacccaggagtccgccaaga

SEQ ID NO: 284717 - DNA, 120 bp, Artificial Sequence
  ENSG00000130338_50 (sequence is synthesized)
acttccagattgagttagaggggcggcaggtgatgcagtttggacggattgatggcagtgcgtacattctagacttccagtatccgttctcagccgtgcaggcctttgcagttgccctgg

SEQ ID NO: 284718 - DNA, 120 bp, Artificial Sequence
  ENSG00000130338_51 (sequence is synthesized)
ccaacgtgactcagcgcctcaaatgaagagactggtgtggggaggagagagatgcagagagcctttggaagaggtcttcggagatgccagaggagccctctaggggtccgatgcctggga

SEQ ID NO: 284719 - DNA, 120 bp, Artificial Sequence
  ENSG00000130338_52 (sequence is synthesized)
ggaccagaagccaacagcaaaactggaaaagcccggcaggcccaggagagggcgctgacctgtggtcgtcatttatttggttgggttttattaccttttattgtctgttcttcttttctt

SEQ ID NO: 284720 - DNA, 120 bp, Artificial Sequence
  ENSG00000130338_53 (sequence is synthesized)
ctttcatttcagtggcatttggaagcaaagagtgctaggcacctgctgttctttcaggaaacagcttggctgtggtaatgctctactgggcccttcagaatgaagacagtctgccttaga

SEQ ID NO: 284721 - DNA, 120 bp, Artificial Sequence
  ENSG00000130338_54 (sequence is synthesized)
gcctgctattcttttagacatagggaggatgcattatcctgtattctcctccaacatcaccactagcgtaaaagcaaaaagcttttacaaaacacagccaaaaattctcaagatgcaggt

SEQ ID NO: 284722 - DNA, 120 bp, Artificial Sequence
  ENSG00000130338_55 (sequence is synthesized)
tcttggggaatgggatggggacagcatttgatttacactgattatgttactccccaaaaggtgacttaattaataaagggcatttgggcagacacactgtgttggaccaacaaagtaggc

SEQ ID NO: 284723 - DNA, 120 bp, Artificial Sequence
  ENSG00000130338_56 (sequence is synthesized)
tctttacaggggtgttctcaccaggtagaaatgcgatttgctcactgaggatgttggggaagggacgaagggtaaagaagaaactgcacgtatacacaggttcacatcactctgcagaca

SEQ ID NO: 284724 - DNA, 120 bp, Artificial Sequence
  ENSG00000130338_57 (sequence is synthesized)
gcaatgtgactcagcgtgtgacttgtagcagcagtacgagggctacactcctctgctgaggatgtctacattgaaagcctccactagtttcatcgtttgtcaaagttccgtaggatcagt

SEQ ID NO: 284725 - DNA, 120 bp, Artificial Sequence
  ENSG00000130338_58 (sequence is synthesized)
gatggtcattcagcatgactggttctgggagaaggtgagagacaaaaatggaaagatcctggcctgtggtagtggtagcagttttctcaaataatgtggtgacagtcactagatcctcac

SEQ ID NO: 284726 - DNA, 120 bp, Artificial Sequence
  ENSG00000130338_59 (sequence is synthesized)
atgctgagaaacagcctctactctctctgccccttttactttttaatctggaatgcattactgtaaacatgatctttcccatgagataccatgttctatgccttcccattctaaaagtgt

SEQ ID NO: 284727 - DNA, 120 bp, Artificial Sequence
  ENSG00000130338_60 (sequence is synthesized)
ggacaacgcttgatttgaaaccactccttttctcctcttggctacattaaaattcagttgactacaaatgctttctatcaaattagaaatgtaaccaaaaaaatgttaagtgttcaccag

SEQ ID NO: 284728 - DNA, 120 bp, Artificial Sequence
  ENSG00000130338_61 (sequence is synthesized)
ggtattaaaatacagaggagtatggtcaaatctttgacaaaattttcatgatcttctctaacaaaaaaagttgtttattaactgtacagactgtttactaaggagctaaaccactgagaa

SEQ ID NO: 284729 - DNA, 120 bp, Artificial Sequence
  ENSG00000130338_62 (sequence is synthesized)
aacgttattaaaattgtaatacctaggtagttggttgatcacagtttgttaattgtataaaaaaaaattacctagaatatctcttcccacttcctcgtcctcgtgagaacctgtgggcag

SEQ ID NO: 284730 - DNA, 83 bp, Artificial Sequence
  ENSG00000130338_63 (sequence is synthesized)
ctcttcccacttcctcgtcctcgtgagaacctgtgggcagtattcaagccctgatgacaaaacccagtgttttttgttgttgc

SEQ ID NO: 284731 - DNA, 120 bp, Artificial Sequence
  ENSG00000130338_64 (sequence is synthesized)
cctgggcctgctgtgcaggagcacaggaactatctgctggcgttgggttccaaatttgcattttatttggaaacagacaagtagaagatgctacagaaaagtattttcaaatttaaacgt

SEQ ID NO: 284732 - DNA, 120 bp, Artificial Sequence
  ENSG00000130338_65 (sequence is synthesized)
tttttaatcccctgttttagttaaaaaattggaaaagaaaccgacccatttttttcccagatcaagatgacatgacatcactcccaattctctccaaaccccagagaaatactgacgaag

SEQ ID NO: 284733 - DNA, 120 bp, Artificial Sequence
  ENSG00000130338_66 (sequence is synthesized)
ttttctgatgtggcaaaggatatttcccatctaataccagtttctcatttatatttaacgtattggacctgatatttttagtgggtgcattcttccagaaagaattcagcaatgttatca

SEQ ID NO: 284734 - DNA, 120 bp, Artificial Sequence
  ENSG00000130338_67 (sequence is synthesized)
gaattaattcttttatatgagtttatgtagcttgatatggtgtttcagtgcttattggttgtgcaataatggttatagcctgttagataatctaaatgcaattcccctgttttgtcgttt

SEQ ID NO: 284735 - DNA, 120 bp, Artificial Sequence
  ENSG00000130338_68 (sequence is synthesized)
aggagataattatttatcttgcttttcatagtgttcttaggaattattttgttgttacgttttggtgagttatacccattttatttatttagaaaaatagtatctttgttaacgacttac

SEQ ID NO: 284736 - DNA, 85 bp, Artificial Sequence
  ENSG00000130338_69 (sequence is synthesized)
ttatttatttagaaaaatagtatctttgttaacgacttacatggtcacagtatattttgctgcaagaaataaagaggatatgata

SEQ ID NO: 284737 - DNA, 90 bp, Artificial Sequence
  ENSG00000130338_70 (sequence is synthesized)
acggagtcccactcttgtcgcccaactagagtgtagtggcacaatctcggctccccacaacctctgactccagggttcaggtgattattt

SEQ ID NO: 284738 - DNA, 120 bp, Artificial Sequence
  ENSG00000130338_71 (sequence is synthesized)
ccatagaaggttttttgctggataatttgtaacttttctaattgggaaaaaattcctattaatcacttaaaaatttttttttgtattttgtgttattgattatatacaaaggagactttt

SEQ ID NO: 284739 - DNA, 120 bp, Artificial Sequence
  ENSG00000130338_72 (sequence is synthesized)
tttttgagataacactcaaatagtattctcttcttttgaaaattttatttttatctgaaaataacagttgatctgaaataaaaaggggagacctattagaatgagagtagccaaggaaag

SEQ ID NO: 284740 - DNA, 120 bp, Artificial Sequence
  ENSG00000130338_73 (sequence is synthesized)
agttactaggtaataagcttcactttttgtgttctaattgtttttgagatataaagaccctgaaaaagcccattttagaacctgtttaataagagcaaatataggggaaaatctttgaaa

SEQ ID NO: 284741 - DNA, 120 bp, Artificial Sequence
  ENSG00000130338_74 (sequence is synthesized)
tgaaagctacaaatacatgtgagaagaaaaaaatggatttttttagcaaataattaactaagcttctaaatgcctagctccctcccccaaaggcgctttcccccgatggaggcacaggct

SEQ ID NO: 284742 - DNA, 120 bp, Artificial Sequence
  ENSG00000130338_75 (sequence is synthesized)
tctgtctcggatgtttggcgcacgtgagtttgtatgagtttgtaccggagtgaccccggcagccactgcccacctcccctctacccaggggcctgaaaagaggggctgccctcctgcgcc

SEQ ID NO: 284743 - DNA, 120 bp, Artificial Sequence
  ENSG00000130338_76 (sequence is synthesized)
aaggcagacacaagctgcgggctgtgcggtcctagtagtgtgacgtttcagttaatagtggtggtcttattttcaactatgctttcattcagtcagtctctgttgactaaatacgacgaa

SEQ ID NO: 284744 - DNA, 120 bp, Artificial Sequence
  ENSG00000130338_77 (sequence is synthesized)
aattcatactttatgcaggagatttctaaaaatttaatgtttattaatagtttatgaatatcaagatacctcattgaatccctaaatttaaaagcagtccagtaaaaggttaactgtata

SEQ ID NO: 284745 - DNA, 120 bp, Artificial Sequence
  ENSG00000130338_78 (sequence is synthesized)
aagaatctatgactttttgagggaagtgtgatatattaacaaatataaccaattctaaatttgttttagctctaacctcatcaaaccaaaggcacagatttgtgtacaatatacccattg

SEQ ID NO: 284746 - DNA, 120 bp, Artificial Sequence
  ENSG00000130338_79 (sequence is synthesized)
aatgtatatcctgagaaaaattggggccaaagaagcaggaaaatctcaaagctctaatggcagcataaatcaaagaatttcacaggctagtgtttttatccatagccattgctcccttgt

SEQ ID NO: 284747 - DNA, 120 bp, Artificial Sequence
  ENSG00000130338_80 (sequence is synthesized)
caagtgtctcacaaggacatggaagaatgtgttatgttcatcttgtaatcatagcaaaaagtctgcaaaccccagggtcaagcctgctctgccacagggttggatggtgaccttgggcaa

SEQ ID NO: 284748 - DNA, 120 bp, Artificial Sequence
  ENSG00000130338_81 (sequence is synthesized)
gtccctggggctggctaggcctccacttgtccatctgtgaaatgaaaggatcagcctggacagccctctaaactcccttacagctctcagcctaagagcgcagcactgaacagcctcatc

SEQ ID NO: 284749 - DNA, 120 bp, Artificial Sequence
  ENSG00000130338_82 (sequence is synthesized)
attccacttttcatgggaaatatatttcacaccattgcctttgtgtagagaaatatttcttttcctgtgttaatgagctatgtactgaatataaaccagtgcatttaaagtaatatcttt

SEQ ID NO: 284750 - DNA, 120 bp, Artificial Sequence
  ENSG00000130338_83 (sequence is synthesized)
tgtgcacctctaaatgtgtttggaattgtgtttgttctcatagaatatacaaaagtactgattctaggtaagaaggagtctccacgggtgtgccctgctcagctggatgtccatgagaac

SEQ ID NO: 284751 - DNA, 120 bp, Artificial Sequence
  ENSG00000130338_84 (sequence is synthesized)
agccatgaaataagtcactacttgtccccaaaaccacaggaatatatacctaggtcacctcaaattcctgagtgtgctctgccatgttacacggtcttcaaattgaaaaggtttcttgaa

SEQ ID NO: 284752 - DNA, 120 bp, Artificial Sequence
  ENSG00000130338_85 (sequence is synthesized)
aaggaaagtttggcccagcaactggagaaggagtccatggtgtcgctgtgtgcctgtatcatttggccaagtcaatggttgtaagcaaagttagtggagacaaaaatgtgtccaaaatgt

SEQ ID NO: 284753 - DNA, 120 bp, Artificial Sequence
  ENSG00000130338_86 (sequence is synthesized)
cgtttgagttcctgggatttctgtaatagcacacaactcagaactcttcagcatttgtgtgattccttacctctggctgataaaactctaatgggttgtggcttactttgtttccatttt

SEQ ID NO: 284754 - DNA, 120 bp, Artificial Sequence
  ENSG00000130338_87 (sequence is synthesized)
ctttggctttgtgcaatttttgtgtaactttacttgtacctatattttctgtttacagttctttttaaggggaggggtagggttctaagatcttgttgtttattgtagataaaaattttt

SEQ ID NO: 284755 - DNA, 120 bp, Artificial Sequence
  ENSG00000130338_88 (sequence is synthesized)
tcgtgttgtagaaaagcatgggttatgcgtttgactgaaaaagacactgtattatttaccaaaggggtattgtttttgcatttgtttataaatgcattattttggtactgtaaatttgga

SEQ ID NO: 284756 - DNA, 120 bp, Artificial Sequence
  ENSG00000130338_89 (sequence is synthesized)
cataatttctgagtttattactactggcattttctttttcccttttttttttttttaaccgtaagtgcacgatgcaggtgcataggccccagaccaaactagaccaccagcatgttcatg

SEQ ID NO: 284757 - DNA, 120 bp, Artificial Sequence
  ENSG00000130338_90 (sequence is synthesized)
tccagacctcggcagtggcgtgcactgcttgtgcacctcagttcctccagtgttggtttgtttgttttttaattcagcatcctgctggttttactttccaagcaagatctgttgcgactc

SEQ ID NO: 284758 - DNA, 120 bp, Artificial Sequence
  ENSG00000130338_91 (sequence is synthesized)
ccaaatgcgttttaatgagctcatccttatttgcctttcttcttacgtattttgtgtattagattgtgcaggagatattctagaaggcattaatggtttgcattcaaaacgatgtggttt

SEQ ID NO: 284759 - DNA, 120 bp, Artificial Sequence
  ENSG00000130338_92 (sequence is synthesized)
gtccaagttattttctgtctttattactgagacggattaatctccttatttttttcttgatgatttgaagttgtaagagttgtccagctattgcttaataaaattttgcagatcaaaaaa

SEQ ID NO: 284760 - DNA, 120 bp, Artificial Sequence
  ENSG00000130338_93 (sequence is synthesized)
tcgtatggcagttgaagagtgtgtgtctatgtgcatttaaaaccttctttctgtacttacacattcacacgggaagacaggctcattcttgtgcacacttgagagttttacaactgatga

SEQ ID NO: 284761 - DNA, 120 bp, Artificial Sequence
  ENSG00000130338_94 (sequence is synthesized)
aaattaatttaagaatcagatggagcaacttgacaccagtgggctcaggagcccggggagaaaaatacatcactaatggccagttttccatatggtctgcacgggtaaagaaagtctgca

SEQ ID NO: 284762 - DNA, 120 bp, Artificial Sequence
  ENSG00000130338_95 (sequence is synthesized)
gatgcggggctgctggaggcggagaggcacggaggagccgctggggctgccgccacggccgcccggagatttgtaagactccagggcctcccagccgtgaataatctgatggttcctgaa

SEQ ID NO: 284763 - DNA, 120 bp, Artificial Sequence
  ENSG00000130338_96 (sequence is synthesized)
tcacccgagggactgggaccttgttctcctgtggtcatgggctgttaacgccttacaccccatgcaaagagaatgtctgctaatgaaacgtgagcctgtgggggctagtgtggaacatcc

SEQ ID NO: 284764 - DNA, 120 bp, Artificial Sequence
  ENSG00000130338_97 (sequence is synthesized)
ttgaagctacgacatttccagaatcccattgaaatgaacagttctctaaatgtactttttgacaggtttttaatcatattccatgggcagtggatagctgggcggtggatagatgaacca

SEQ ID NO: 284765 - DNA, 120 bp, Artificial Sequence
  ENSG00000130338_98 (sequence is synthesized)
tcctgggtcaagctgagtatctccacgtttaggtgcacaaatactattttgtgaagatcttaaatttgtggtataagaacttgaaggaaatagaactgatttgttacttctaaaagattt

SEQ ID NO: 284766 - DNA, 120 bp, Artificial Sequence
  ENSG00000130340_0 (sequence is synthesized)
cggctgggcctgagcgtcgagactcggggccgaggcggaggagcggccgccgcgccggggcccagccggagccgccgccctcgcccttgcctttgcctgcgcggctcagaatcaccatcc

SEQ ID NO: 284767 - DNA, 120 bp, Artificial Sequence
  ENSG00000130340_1 (sequence is synthesized)
gcggctcagaatcaccatccgcggcgcgggagacgagccggccgtcccgggccgggggacccgcccgccatggccaccaaggctcgggttatgtatgattttgctgctgaacctggaaat

SEQ ID NO: 284768 - DNA, 120 bp, Artificial Sequence
  ENSG00000130340_2 (sequence is synthesized)
aatgaactgacggttaatgaaggagaaatcatcacaatcacaaatccggatgtaggtggaggatggctggaaggaagaaacatcaaaggagaacgagggctggttcccacagactacgtt

SEQ ID NO: 284769 - DNA, 120 bp, Artificial Sequence
  ENSG00000130340_3 (sequence is synthesized)
gaaattttacccagtgatggaaaagatcaattttcttgtggaaattcagtggctgaccaagccttccttgattctctctcagccagcacagctcaggccagttcgtcggctgccagcaac

SEQ ID NO: 284770 - DNA, 120 bp, Artificial Sequence
  ENSG00000130340_4 (sequence is synthesized)
aatcaccaggttggcagtggcaatgacccctggtcagcctggagtgcctccaaatctgggaactgggaaagctcagaaggctggggggcccagccagagggggctggagcccaaagaaac

SEQ ID NO: 284771 - DNA, 120 bp, Artificial Sequence
  ENSG00000130340_5 (sequence is synthesized)
acaaacactcccaacaactgggacactgccttcggccacccccaggcctaccaaggaccagcaactggtgatgatgatgactgggatgaagactgggatgggcccaaatcctcttcctac

SEQ ID NO: 284772 - DNA, 120 bp, Artificial Sequence
  ENSG00000130340_6 (sequence is synthesized)
tttaaggattcagagtcagctgatgcaggcggcgctcagcgaggaaacagtcgtgctagttcctcatccatgaaaattccccttaacaaatttcctggatttgcgaaacctggcacggaa

SEQ ID NO: 284773 - DNA, 120 bp, Artificial Sequence
  ENSG00000130340_7 (sequence is synthesized)
cagtatttgttggccaaacaactagcaaaacccaaagagaaaattcccatcattgttggagattatggcccaatgtgggtttatcctacctctacttttgactgtgtggtagcagatccc

SEQ ID NO: 284774 - DNA, 120 bp, Artificial Sequence
  ENSG00000130340_8 (sequence is synthesized)
aggaaaggctccaaaatgtatggtctaaagagctacatcgaatatcagctaacacctactaacactaatcgatctgtaaaccacaggtataagcactttgactggttatatgagcgtctc

SEQ ID NO: 284775 - DNA, 120 bp, Artificial Sequence
  ENSG00000130340_9 (sequence is synthesized)
ctggttaagtttgggtcagccattccaatcccttctcttccagacaaacaagtcacaggccgctttgaagaggaatttatcaaaatgcgcatggagagacttcaggcctggatgaccagg

SEQ ID NO: 284776 - DNA, 120 bp, Artificial Sequence
  ENSG00000130340_10 (sequence is synthesized)
atgtgtcgccatccagtaatctcagaaagtgaagttttccagcagttcctaaatttccgagatgagaaggaatggaaaactggaaagaggaaggccgagagagatgagctggcgggagtc

SEQ ID NO: 284777 - DNA, 120 bp, Artificial Sequence
  ENSG00000130340_11 (sequence is synthesized)
atgatattttccaccatggaaccagaggcacctgacttggacttagtagaaatagagcagaagtgcgaggctgtggggaagttcaccaaggccatggatgacggcgtgaaggagctgctg

SEQ ID NO: 284778 - DNA, 120 bp, Artificial Sequence
  ENSG00000130340_12 (sequence is synthesized)
acggtggggcaggagcactggaagcgctgcacgggcccattacccaaggaatatcagaagataggaaaggccttgcagagtttggccacagtgttcagttccagtggctatcaaggtgaa

SEQ ID NO: 284779 - DNA, 120 bp, Artificial Sequence
  ENSG00000130340_13 (sequence is synthesized)
acagatctcaatgatgcaataacagaagcaggaaagacttatgaagaaattgccagtctcgtggcagaacagccaaagaaagatctccatttcctgatggaatgtaatcacgagtataaa

SEQ ID NO: 284780 - DNA, 120 bp, Artificial Sequence
  ENSG00000130340_14 (sequence is synthesized)
ggttttcttggctgcttccctgacatcattggcactcacaagggagcaatagaaaaagtgaaagaaagtgacaaactagttgcaacaagtaaaatcaccctacaagacaaacagaacatg

SEQ ID NO: 284781 - DNA, 120 bp, Artificial Sequence
  ENSG00000130340_15 (sequence is synthesized)
gtgaagagagtcagcatcatgtcttacgcgttgcaagctgagatgaatcactttcacagtaaccggatctatgattacaacagtgtcatccgcctgtacctggagcagcaagtgcaattt

SEQ ID NO: 284782 - DNA, 120 bp, Artificial Sequence
  ENSG00000130340_16 (sequence is synthesized)
tacgaaacgattgcagaaaagctgaggcaggccctcagccgctttccagtgatgtaggacagaacgggccttgaagagaatgccgcgtgctttctcctgacttggggcaatgcaattcaa

SEQ ID NO: 284783 - DNA, 120 bp, Artificial Sequence
  ENSG00000130340_17 (sequence is synthesized)
ttattcagaaaaaaaaggaaacaaaaccaaaaagaaagagttgcaaaaaactgcatttattttattagccaccctaaatgcgtcagttatttagggatggtcttttgttcatttccgcat

SEQ ID NO: 284784 - DNA, 120 bp, Artificial Sequence
  ENSG00000130340_18 (sequence is synthesized)
ccattatttaaaccagtggaaattgtctctatttttggaaagtacttaaaagttaccagaattttcaatggaaaatgaggggtttctccccactgatattttacatagagtcataattta

SEQ ID NO: 284785 - DNA, 120 bp, Artificial Sequence
  ENSG00000130340_19 (sequence is synthesized)
tatgtcttataaattataagtcttatataatttataagtctcccacaatcttccagttcttacccagtgtcagataattaattactaattactttcttaaaaacatgaactatgccagaa

SEQ ID NO: 284786 - DNA, 120 bp, Artificial Sequence
  ENSG00000130340_20 (sequence is synthesized)
taaaaaatatctatgtttgtatatttttataactcctttcagtcctctggggctcctgtcattgagggaagtcgttacgcctttcactgccacagttacagctcaagtgcttacacttca

SEQ ID NO: 284787 - DNA, 120 bp, Artificial Sequence
  ENSG00000130340_21 (sequence is synthesized)
agagggaggacgctgggggcccctggggctgctagtgccatcgtggtgtgtggcaggtgggccatcccatgtccctccagggggaccccacagcctggcagatgagcagatacccctggc

SEQ ID NO: 284788 - DNA, 120 bp, Artificial Sequence
  ENSG00000130340_22 (sequence is synthesized)
cacccatgtcctcagcgacatttctgatgtgctgctcttatgtgaggaccagtgctttctctctttgcacttccttcctaatcttggttaaggcatgttttatgccatgaagaatacatt

SEQ ID NO: 284789 - DNA, 120 bp, Artificial Sequence
  ENSG00000130340_23 (sequence is synthesized)
agaagaattgagggactttgtagagaattttgtggctttggtccaacgggtgagtggctgtgcggaggcctgtgttcgggagggcctgggagaaggagggcacccagcaccccggcgtct

SEQ ID NO: 284790 - DNA, 120 bp, Artificial Sequence
  ENSG00000130340_24 (sequence is synthesized)
ctggccctttcttattctttggctcctcatccaccgtgatgagaagcgctgctgtggccacggcacactgcttggcttgggtggcgggttcatggccagttggtgtcatcagcaaagaga

SEQ ID NO: 284791 - DNA, 120 bp, Artificial Sequence
  ENSG00000130340_25 (sequence is synthesized)
aaaagcacaggttagctccccattagatggaaaagtgtagggactgagaagggctgcagcctcagcagtgtacagagtccccggcgctctgaggttggagagaaagaacagaccagcgcc

SEQ ID NO: 284792 - DNA, 120 bp, Artificial Sequence
  ENSG00000130340_26 (sequence is synthesized)
cttcccgactacatccgaaacttcacacagggtgtttctgagcaccagcacttccagcgcttcacttaacggcataaagcaaaacaggaccttggcacaccgtcagctcgaactcaacac

SEQ ID NO: 284793 - DNA, 120 bp, Artificial Sequence
  ENSG00000130340_27 (sequence is synthesized)
tggcagccaccgtctcacccctgcggaggagcgctcccgtctcccacaggtgccttaccgcgttccctcccgctgctttcatttttctgacctaataattacgggaaatggaaagtctgg

SEQ ID NO: 284794 - DNA, 120 bp, Artificial Sequence
  ENSG00000130340_28 (sequence is synthesized)
gccagcatcaataaaatgacaccaaaaataagtagatgaaatcaaatgaatatgagaacatcttgttcttcaatatcacgggtttttgttaatgtttcataagtaattctccccacttga

SEQ ID NO: 284795 - DNA, 120 bp, Artificial Sequence
  ENSG00000130340_29 (sequence is synthesized)
tttttcttctataaaatcccatagaacaatgtttatgctatagccatttaatatatgtacaaattgtaaagaatatgtataaatgttttacacgaatgtaagagcatgtagaagccaaca

SEQ ID NO: 284796 - DNA, 120 bp, Artificial Sequence
  ENSG00000130340_30 (sequence is synthesized)
tataaataaattgtttaaaaaaactgtacagtaaattctcaaagcactttttcaaaacactttttggactttgtgtgtgatttttgttgttgttgttaagtactttttattccagctgct

SEQ ID NO: 284797 - DNA, 120 bp, Artificial Sequence
  ENSG00000130340_31 (sequence is synthesized)
gaaaatggtccaggtaatgaattcttccccaaatcctatttcttctgacatgaattcatcatttcagttccgtaggtcagtgttgcggtccgggaagcgtatcataaccacctgggagtt

SEQ ID NO: 284798 - DNA, 120 bp, Artificial Sequence
  ENSG00000130340_32 (sequence is synthesized)
gccaagaagcagacagtctcccagtgtctgactctcggatatttggatttgactggtgtgaggcaaagtgaaaaagggatgggggaaatggagatggcacgggctcctcagagcgtggta

SEQ ID NO: 284799 - DNA, 120 bp, Artificial Sequence
  ENSG00000130340_33 (sequence is synthesized)
gccgactgtgaggaaaagcagagggaatgtgaaagaaaataagagaatccacgggatttgatgcctggaagattctccttcaagtggcaacatggcatatatatccttctccggggagtc

SEQ ID NO: 284800 - DNA, 120 bp, Artificial Sequence
  ENSG00000130340_34 (sequence is synthesized)
acatgcaccatttggttcttagatacgttgatgttttgatttttaatgatttgtatcaacctgtaggtaccacagaagagctgtagtcatacaatcacataacttttacaaatatagtgg

SEQ ID NO: 284801 - DNA, 120 bp, Artificial Sequence
  ENSG00000130340_35 (sequence is synthesized)
acctctgactctgcgctgccacccggcagtgcgaggaccacatactgaccaggtgtggagccgatgcccagacccgtgatggcagaccatgttccgtgctccccaccttgcactgaggtg

SEQ ID NO: 284802 - DNA, 120 bp, Artificial Sequence
  ENSG00000130340_36 (sequence is synthesized)
cgtggaagttggcctacagcaacgagagacagagccctgaaagcttctcagacttcagtcctgcccttccacaagctctgcggaggcccagtcctgcttctactggacacttctcaggca

SEQ ID NO: 284803 - DNA, 120 bp, Artificial Sequence
  ENSG00000130340_37 (sequence is synthesized)
aaaggatcccaggctctccccagtcagaagcttaactgaagccagagctgggtggaccctcgcccaccaggaatagcggctataatgacaagggtcattgtgtgttttgctgcttaatga

SEQ ID NO: 284804 - DNA, 120 bp, Artificial Sequence
  ENSG00000130347_0 (sequence is synthesized)
gcaaagccatcccggcggctaaggagagcgggcaggcaaggagattccgggccagggtcgcggcggcagtcggcaagcgttcgattctctggcgttggatcgcgagcggtgtctgcttgt

SEQ ID NO: 284805 - DNA, 120 bp, Artificial Sequence
  ENSG00000130347_1 (sequence is synthesized)
cccgccgagggctcccaggacagggcagggatctagggggtttgcgcacctgctttttaatgccccgcccccccttttttttttaaagtggagggggtgaaagtgagggaggagaatgga

SEQ ID NO: 284806 - DNA, 120 bp, Artificial Sequence
  ENSG00000130347_2 (sequence is synthesized)
cagaatactgactggaacgttaattcgagcatttcatatgcgaagagcggaataacagttccgtattcttctttcagtttctccattagattagcttcattttcgaatgctccgttttgc

SEQ ID NO: 284807 - DNA, 120 bp, Artificial Sequence
  ENSG00000130347_3 (sequence is synthesized)
atgcttaattttgaaactagcccgtggtttggcagaatttgactgaattcaggggtgagagtttgatccagtccaagtgtatttgaatttgagcacgcagttcaaccagtgtttacaatg

SEQ ID NO: 284808 - DNA, 120 bp, Artificial Sequence
  ENSG00000130347_4 (sequence is synthesized)
gaatttctgaagacttgtgtacttagaagaaatgcatgcactgcggtttgcttctggagaagcaaagttgtccaaaagccttcagttagaaggattagtactacctctcctaggagcact

SEQ ID NO: 284809 - DNA, 120 bp, Artificial Sequence
  ENSG00000130347_5 (sequence is synthesized)
gtcatgcctgcttgggtgatagataaatatgggaagaatgaagtgcttcgattcactcagaacatgatgatgcctatcatacactatccaaatgaagtcattgtcaaagttcacgctgcc

SEQ ID NO: 284810 - DNA, 120 bp, Artificial Sequence
  ENSG00000130347_6 (sequence is synthesized)
agtgtaaatcctatagacgttaatatgagaagtggttatggagctacagctttaaatatgaagcgtgatcctttacacgtgaaaatcaaaggagaagaatttcctctgactctgggtcgg

SEQ ID NO: 284811 - DNA, 120 bp, Artificial Sequence
  ENSG00000130347_7 (sequence is synthesized)
gatgtctctggcgtggtgatggaatgtgggcttgatgtgaaatacttcaagcctggagatgaggtctgggctgcagttcctccttggaaacaaggcactctttcagagtttgttgtagtc

SEQ ID NO: 284812 - DNA, 120 bp, Artificial Sequence
  ENSG00000130347_8 (sequence is synthesized)
agtgggaatgaggtctctcacaaacccaaatcactcactcatactcaagctgcctctttgccatatgtggctctcacagcctggtctgctataaacaaagttggtggcctgaatgacaag

SEQ ID NO: 284813 - DNA, 120 bp, Artificial Sequence
  ENSG00000130347_9 (sequence is synthesized)
aattgcacaggaaaacgtgttctaatcttaggcgcttcaggcggagttggtacttttgctatacaggtaatgaaagcatgggatgctcatgtgacagcagtttgctcccaagatgccagt

SEQ ID NO: 284814 - DNA, 120 bp, Artificial Sequence
  ENSG00000130347_10 (sequence is synthesized)
gaacttgtaaggaagcttggtgcagacgatgtaattgattacaaatctggaagtgtggaagagcagttgaaatccttaaaaccatttgattttatccttgataatgttggcggatccact

SEQ ID NO: 284815 - DNA, 120 bp, Artificial Sequence
  ENSG00000130347_11 (sequence is synthesized)
gaaacatgggctccagattttctcaagaaatggtcaggagccacctatgtgactttggtgactcctttcctcctgaacatggaccgattgggcatagcagatggcatgttgcagacagga

SEQ ID NO: 284816 - DNA, 120 bp, Artificial Sequence
  ENSG00000130347_12 (sequence is synthesized)
caaaggcattaaagcatttctggaaaggagtccattatcgctgggcatttttcatggccagtggcccatgtttagatgacattgcagaactggtggatgcgggaaagatccggccagtta

SEQ ID NO: 284817 - DNA, 120 bp, Artificial Sequence
  ENSG00000130347_13 (sequence is synthesized)
ttgaacaaacctttcctttttctaaagttccagaagccttcctgaaggtggaaagaggacacgcacgaggaaagactgtaattaatgttgtttaaataaaaatgcagtttagtgattgtt

SEQ ID NO: 284818 - DNA, 120 bp, Artificial Sequence
  ENSG00000130347_14 (sequence is synthesized)
gacgttcttatttggtgagtgcctgtgagcccaaatttttttctagccatccctttcaaacatttttccagattagattatacattccatgatacaagctttaaaaaataaacacaccat

SEQ ID NO: 284819 - DNA, 120 bp, Artificial Sequence
  ENSG00000130347_15 (sequence is synthesized)
tttggccagtaattgatataaaaatatcagcacttggatttgtctgtagtcagtagaaattcgaagttttttcaagctgttccttcacactggctttgcaggttgttgtggcaccttctg

SEQ ID NO: 284820 - DNA, 79 bp, Artificial Sequence
  ENSG00000130347_16 (sequence is synthesized)
tccttcacactggctttgcaggttgttgtggcaccttctgttttactagcttaaactactttattgtcttttttgtttt

SEQ ID NO: 284821 - DNA, 120 bp, Artificial Sequence
  ENSG00000130347_17 (sequence is synthesized)
ctgggcttaagtgatccaccatgtcagtctcccaaagttctgggattacaggcgtgaaccaccctgctgggcctgatcgtcttaatgtacaatactaaaactttcagtgtatagatggat

SEQ ID NO: 284822 - DNA, 120 bp, Artificial Sequence
  ENSG00000130347_18 (sequence is synthesized)
gttggcatgaagagataatttaaagctggttccttcttgaattcatcactgagcagctttctaactgccaaggtttccttttttgttcctccaccataatgtggtcaccacagctcttaa

SEQ ID NO: 284823 - DNA, 120 bp, Artificial Sequence
  ENSG00000130347_19 (sequence is synthesized)
agttctaaatctcttagtgtcatatataaaaatctgcctggtgattcatttgtttatgctcttaatattgaaaggtgagagcagagtttctaactttttaaaacccttacatcttgcata

SEQ ID NO: 284824 - DNA, 120 bp, Artificial Sequence
  ENSG00000130347_20 (sequence is synthesized)
aggattaggcctgtttcggcaattgaaacatgcttctctgagggcttttccatggaaattgcagccttccaatggagcccaaagcttgccactttgatgtcaaatgtttacatttagata

SEQ ID NO: 284825 - DNA, 120 bp, Artificial Sequence
  ENSG00000130347_21 (sequence is synthesized)
tctctccaatcaacccattgcagtgtgcacttcgaatattcatttacggtaagtgtttttacttcctaatatactcatcctcagtattgcacctgatatgcttgcttgtaacttttgatg

SEQ ID NO: 284826 - DNA, 120 bp, Artificial Sequence
  ENSG00000130347_22 (sequence is synthesized)
tagacctgttttgagatttctgcttggtttattcctgttagacactcgtttggtagcatgtatgttagatgtaggcttttctctaaaattgttggtctggtcttactaccgagttattgc

SEQ ID NO: 284827 - DNA, 120 bp, Artificial Sequence
  ENSG00000130347_23 (sequence is synthesized)
tatgtctttgttcagttatttatttattaaacatttatggagcatccattctctgtcagtcattgtgccaaggtgctgtgcacacattttgtcagcatgaaatgagaaatcagtttgttg

SEQ ID NO: 284828 - DNA, 120 bp, Artificial Sequence
  ENSG00000130348_0 (sequence is synthesized)
agtgacaattaaagatggctgcgcccatgtaacatcactagcgaccggtgacctctttttcccccttgcctggctcctgtggtggcaggctgggcacgaggaccatgctgggccggagcc

SEQ ID NO: 284829 - DNA, 120 bp, Artificial Sequence
  ENSG00000130348_1 (sequence is synthesized)
tccgagaagtttctgcggcactgaaacaaggccaaattacaccaacagagctctgtcaaaaatgtctctctcttatcaagaagaccaagtttctaaatgcctacattactgtgtcagaag

SEQ ID NO: 284830 - DNA, 120 bp, Artificial Sequence
  ENSG00000130348_2 (sequence is synthesized)
aggtggccttaaaacaagctgaagaatcagaaaagagatataagaatggacagtcacttggggatttagatggaattcctattgcagtaaaagacaatttcagcacttctggcattgaga

SEQ ID NO: 284831 - DNA, 120 bp, Artificial Sequence
  ENSG00000130348_3 (sequence is synthesized)
caacatgtgcatcaaatatgctgaaaggttatataccaccttataatgctacagtagttcagaagttgttggatcagggagctctactaatgggaaaaacaaatttagatgagtttgcta

SEQ ID NO: 284832 - DNA, 120 bp, Artificial Sequence
  ENSG00000130348_4 (sequence is synthesized)
tgggatctgggagcacagatggtgtatttggaccagttaaaaacccctggagttattcaaaacaatatagagaaaagaggaagcagaatccccacagcgagaatgaagattcagactggc

SEQ ID NO: 284833 - DNA, 120 bp, Artificial Sequence
  ENSG00000130348_5 (sequence is synthesized)
tgataactggaggaagctcaggtgggagtgcagctgctgtatcggcgttcacatgctacgcggctttaggatcagatacaggaggatcgaccagaaatcctgctgcccactgtgggcttg

SEQ ID NO: 284834 - DNA, 120 bp, Artificial Sequence
  ENSG00000130348_6 (sequence is synthesized)
ttggtttcaaaccaagctatggcttagtttcccgtcatggtctcattcccctggtgaattcgatggatgtgccaggaatcttaaccagatgtgtggatgatgcagcaattgtgttgggtg

SEQ ID NO: 284835 - DNA, 120 bp, Artificial Sequence
  ENSG00000130348_7 (sequence is synthesized)
cactggccggacctgaccccagggactctaccacagtacatgaacctattaataaaccattcatgcttcccagtttggcagatgtgagcaaactatgtataggaattccaaaggaatatc

SEQ ID NO: 284836 - DNA, 120 bp, Artificial Sequence
  ENSG00000130348_8 (sequence is synthesized)
ttgtaccggaattatcaagtgaagtacagtctctttggtccaaagctgctgacctctttgagtctgagggggccaaagtaattgaagtatcccttcctcacaccagttattcaattgtct

SEQ ID NO: 284837 - DNA, 120 bp, Artificial Sequence
  ENSG00000130348_9 (sequence is synthesized)
gctaccatgtattgtgcacatcagaagtggcatcgaatatggcaagatttgatgggctacaatatggtcacagatgtgacattgatgtgtccactgaagccatgtatgctgcaaccagac

SEQ ID NO: 284838 - DNA, 120 bp, Artificial Sequence
  ENSG00000130348_10 (sequence is synthesized)
gagaagggtttaatgatgtggtgagaggaagaattctctcaggaaactttttcttattaaaagaaaactatgaaaattattttgtcaaagcacagaaagtgagacgcctcattgctaatg

SEQ ID NO: 284839 - DNA, 120 bp, Artificial Sequence
  ENSG00000130348_11 (sequence is synthesized)
actttgtaaatgcttttaactctggagtagatgtcttgctaactcccaccaccttgagtgaggcagtaccatacttggagttcatcaaagaggacaacagaacccgaagtgcccaggatg

SEQ ID NO: 284840 - DNA, 120 bp, Artificial Sequence
  ENSG00000130348_12 (sequence is synthesized)
atatttttacacaagctgtaaatatggcaggattgccagcagtgagtatccctgttgcactctcaaaccaagggttgccaataggactgcagtttattggacgtgcgttttgtgaccagc

SEQ ID NO: 284841 - DNA, 120 bp, Artificial Sequence
  ENSG00000130348_13 (sequence is synthesized)
agcttcttacagtagccaaatggtttgaaaaacaagtacagtttcctgttattcaacttcaagaactcatggatgattgttcagcagtccttgaaaatgaaaagttagcctctgtctctc

SEQ ID NO: 284842 - DNA, 75 bp, Artificial Sequence
  ENSG00000130348_14 (sequence is synthesized)
tcagcagtccttgaaaatgaaaagttagcctctgtctctctaaaacagtaaacatatcttacaaattaaaatgac

SEQ ID NO: 284843 - DNA, 83 bp, Artificial Sequence
  ENSG00000130348_15 (sequence is synthesized)
actgtctcaaaataaataaataaaataaaataaaatgacgtacagagattctatattctagagagtcaaatggtcttgctcaa

SEQ ID NO: 284844 - DNA, 120 bp, Artificial Sequence
  ENSG00000130348_16 (sequence is synthesized)
atggtcttgctcaattcttgtaattaggttcttgttaatacagtcattccatggaattactttttaaaattcctgtgacaattaataataaataacgtgtcagcatttagtaagcatcca

SEQ ID NO: 284845 - DNA, 120 bp, Artificial Sequence
  ENSG00000130348_17 (sequence is synthesized)
ctaagtgtacaatacttctacaataacacaagatacctgttcctcaaagacaatgcattctgccataatgttcattaaagagtttacagtaaaaataagattagggataaacttctcaaa

SEQ ID NO: 284846 - DNA, 120 bp, Artificial Sequence
  ENSG00000130348_18 (sequence is synthesized)
aattgtacatctgtgtaactaaagcactaacaaaaacatgaatagtccttctagaggtaacttggatagcctaggcaggcaacttatcatgtggtgaaggccgcctcaggggttgttaaa

SEQ ID NO: 284847 - DNA, 120 bp, Artificial Sequence
  ENSG00000130348_19 (sequence is synthesized)
aatgcacagaaacaattgagtgcgattattggcttctgagcgctgagcagagcaggtggaagaggaactttgagcacaggaggaaatgcaaccagtcagggcccagaatcatgcaaatct

SEQ ID NO: 284848 - DNA, 120 bp, Artificial Sequence
  ENSG00000130348_20 (sequence is synthesized)
caggggtatgcctctctggggaggagctccacttgcagggactccttttatttccctaagaaagagctgaaatgactgagaactttcctttcctccttagagttacaattttacttctgc

SEQ ID NO: 284849 - DNA, 120 bp, Artificial Sequence
  ENSG00000130348_21 (sequence is synthesized)
tattccggagcccatgcctagaagccagaacaactccatgttacactgagttcatgctcctatttactgatcacaaatgagctcattaatgtcatcgaaacatttattgtaacctaacag

SEQ ID NO: 284850 - DNA, 120 bp, Artificial Sequence
  ENSG00000130348_22 (sequence is synthesized)
accatcacagattggaaacttggtagatagcagagcatggtattagtgaaaaaggttcaaaatacacaagtaacatacactctgaaaaacatgcagataatttgctgatgaagcagaaga

SEQ ID NO: 284851 - DNA, 120 bp, Artificial Sequence
  ENSG00000130348_23 (sequence is synthesized)
ggggatgcgcatggcaagaacttgccttaccccagattctctatatctcatggtttccttttcctcttgactgtctttacgagtgttttttatttgggaccctcgagcccagagatatta

SEQ ID NO: 284852 - DNA, 120 bp, Artificial Sequence
  ENSG00000130348_24 (sequence is synthesized)
atggatatctgtattcaatatttgacaaaatctaatggaaaccatccatttactcatgataaggcttcatcactggatttctgtgtcttcactagaacaccattgtcatctcatattgat

SEQ ID NO: 284853 - DNA, 120 bp, Artificial Sequence
  ENSG00000130348_25 (sequence is synthesized)
caggtattttaatctagcacttacatattgttgataaatgaaagctgaattgttacttaataaattcactttgtttagtaaaaaaaaattgttttctaaatatgacgttcatgaagagaa

SEQ ID NO: 284854 - DNA, 120 bp, Artificial Sequence
  ENSG00000130348_26 (sequence is synthesized)
aataatgagtcagaatcatctgcagaaccactggaatgtttcatcgtcacctgttagttttcataaacagttttctgtcctctctgagatcctcccgctcccaaatactcaacctgatta

SEQ ID NO: 284855 - DNA, 120 bp, Artificial Sequence
  ENSG00000130348_27 (sequence is synthesized)
acttcacataaaagtcttatgtgccaggcttagtaatattcctatagattttgactctgaatccctgaaagaggaagaaatccatgagagaaaattgcattactttatagcaagaggaaa

SEQ ID NO: 284856 - DNA, 120 bp, Artificial Sequence
  ENSG00000130348_28 (sequence is synthesized)
ccgttttaagttttttaattgctcagacaccacaacatcctagatggaggaaaccattttagttgaaggagcaaatatgatgtcaaaagcaagtaaataaacaaaccgttgccccaatct

SEQ ID NO: 284857 - DNA, 120 bp, Artificial Sequence
  ENSG00000130348_29 (sequence is synthesized)
tgtcaaaagcaagtaaataaacaaaccgttgccccaatctgtttttatgtaatgaatttaaaaaaaaagagagagagagagagatgggctctccctgtgttgcccaggctagtctcaaac

SEQ ID NO: 284858 - DNA, 120 bp, Artificial Sequence
  ENSG00000130348_30 (sequence is synthesized)
tgctgagattaaagacgtgagccaccacacctggccgaaataataatattcaatattatatattcaatgatattattcagtattcaatattatttcaaataatattaaatctcttgttcc

SEQ ID NO: 284859 - DNA, 120 bp, Artificial Sequence
  ENSG00000130348_31 (sequence is synthesized)
tgtatctctacatgagctgcactaataatttgaatctggaaattaaaaagtgaaacatttaccgttctcatatactgatacccaactaccatgaaatgatacctaatttgtttttctttt

SEQ ID NO: 284860 - DNA, 120 bp, Artificial Sequence
  ENSG00000130348_32 (sequence is synthesized)
ctcttcatttttactcttaatctagtaggtctcattttgccaagtcactgtctgggaatttaagtggcaaatactttctttgtctcagctaattaaactctaaaattattagcaacagaa

SEQ ID NO: 284861 - DNA, 120 bp, Artificial Sequence
  ENSG00000130348_33 (sequence is synthesized)
cgcccatgtaacatcactagcgaccggtgacctctttttcccccttgcctggctcctgtggtggcaggctgggcacgaggaccatgctgggccggagcctccgagaacctgactttgaaa

SEQ ID NO: 284862 - DNA, 120 bp, Artificial Sequence
  ENSG00000130348_34 (sequence is synthesized)
ctgtaaaataggaataataaaaatactgacttcagagaggtttgtgaggatcaattagacagtcatgttaagtctgtaaattgtttctgtaatgggcaagatagcaaatattttagattt

SEQ ID NO: 284863 - DNA, 120 bp, Artificial Sequence
  ENSG00000130348_35 (sequence is synthesized)
tgtggaccatgcagtctttatcataactgcttaactgccattatagtgagaaagcagccacagacaatatgtaaatgaaaaagtgtgtctctgttccaataaaactttattttcaaaaac

SEQ ID NO: 284864 - DNA, 120 bp, Artificial Sequence
  ENSG00000130348_36 (sequence is synthesized)
cagctggcttgtcacatctggcctatgggccatagtttgcccatccctaatgtaaagaaaggactttagcccaaagccacaacttgcatagtaatgcctcaaaaaatgttaacatcttta

SEQ ID NO: 284865 - DNA, 120 bp, Artificial Sequence
  ENSG00000130348_37 (sequence is synthesized)
ttaacatctttactgttattattattactactgcatctattacagtagcaattgagtaatgaatacatgaatgttataatgttaaattactaaccttttaaaaatattaagcattgcaat

SEQ ID NO: 284866 - DNA, 120 bp, Artificial Sequence
  ENSG00000130348_38 (sequence is synthesized)
taaatcttttaggaagataagttaccctgcagaataatgaagtttcacaacctcagcactgttggtgtttggggctggtaattgtttgttgtgggagactgtcctgtgcattgtaagatg

SEQ ID NO: 284867 - DNA, 120 bp, Artificial Sequence
  ENSG00000130348_39 (sequence is synthesized)
tttagtagcatccctggcctctacccctacatgcaagtagtaccccaccaccaaaaccacaatcccacaaccaaaaatgtctgcagacattgtcaagtgtctcctggttagggaaaagga

SEQ ID NO: 284868 - DNA, 120 bp, Artificial Sequence
  ENSG00000130348_40 (sequence is synthesized)
gacaaaagtaacccccaggtaagaccactgctatagagaaatactaccttatttaaaatcttccattaaggtaatatatgtaaggccaggtgcgtacacctgtaatcccagcaccttggg

SEQ ID NO: 284869 - DNA, 120 bp, Artificial Sequence
  ENSG00000130348_41 (sequence is synthesized)
agtttgagaccagcctgggcaacatacagagccctatgtctacaaaaagttttaaaaaaattgtggggtgtggtggtgtgcacctgtggtcctagctgtttgggaggctgaggggggagg

SEQ ID NO: 284870 - DNA, 90 bp, Artificial Sequence
  ENSG00000130348_42 (sequence is synthesized)
gttttaaaaaaattgtggggtgtggtggtgtgcacctgtggtcctagctgtttgggaggctgagggactgccgtgagccatgattgcacc

SEQ ID NO: 284871 - DNA, 120 bp, Artificial Sequence
  ENSG00000130349_0 (sequence is synthesized)
gcgcagataggggtagcctggaggcctgcagtccgcgcggccgcggggagggacgagagggcctgacgtacagattataagcgccatggctatggctagtgttaaattgcttgccggtgt

SEQ ID NO: 284872 - DNA, 120 bp, Artificial Sequence
  ENSG00000130349_1 (sequence is synthesized)
tttaagaaagccagatgcctggattggactctggggtgttctccgagggacaccttcatcatacaaactctgtacttcctggaatcgatacttgtatttttctagtaccaagttacgtgc

SEQ ID NO: 284873 - DNA, 120 bp, Artificial Sequence
  ENSG00000130349_2 (sequence is synthesized)
accaaattataaaacacttttttataatattttctcactgagactcccagggcttttactatctccagaatgtatttttcctttttccgtaagactcaaaagtaatataaggtctacaaa

SEQ ID NO: 284874 - DNA, 120 bp, Artificial Sequence
  ENSG00000130349_3 (sequence is synthesized)
atctactaaaaagtctctgcaaaaagtagatgaagaggactctgatgaagaaagccatcatgatgagatgagtgagcaggaagaggagcttgaggatgatcctactgtagtcaaaaacta

SEQ ID NO: 284875 - DNA, 120 bp, Artificial Sequence
  ENSG00000130349_4 (sequence is synthesized)
agtggaagatgctttctacaaaggtgaactcaggctgaatgaggaaaaattatggaagaaaagcagaacggtgaaagtgggagatacattggatcttctcattggagaggataaagaagc

SEQ ID NO: 284876 - DNA, 120 bp, Artificial Sequence
  ENSG00000130349_5 (sequence is synthesized)
aggaacagagacagttatgcggattctcttgaaaaaagtgtttgaagagaagactgaaagtgaaaaatacagagtggtgttacggcggtggaaaagtttaaagttgcctaagaagagaat

SEQ ID NO: 284877 - DNA, 120 bp, Artificial Sequence
  ENSG00000130349_6 (sequence is synthesized)
gtctaaataaatggattgctttttagcaatagagctgctttctagtggtaaaggaaggggtcacctgaaaaataggacatttttattaaaataaagttctcttagcgtttgtggaatctg

SEQ ID NO: 284878 - DNA, 120 bp, Artificial Sequence
  ENSG00000130349_7 (sequence is synthesized)
ccgagccattttgtggaaattgggatccatatctggagacacttcccaaggcctgcctcacctccaccccctgcccaccttgatccatgctcctttgacctcctcgtgtgagaacccctt

SEQ ID NO: 284879 - DNA, 120 bp, Artificial Sequence
  ENSG00000130349_8 (sequence is synthesized)
tgccagagtgagacgtgtgcagaatgaactaagccccagagggttttaatggcttgcctgctgtttcccacataaactacctcaggagtcactgtaaaataaactggccttgttgtctta

SEQ ID NO: 284880 - DNA, 120 bp, Artificial Sequence
  ENSG00000130349_9 (sequence is synthesized)
agcctggaggcctgcagtccgcgcggccgcggggagggacgagagggcctgacgtacaggtgagtgcgcctctgctggcgcgccgcgccgggccccctgcccgcgccccctgtcacttcg

SEQ ID NO: 284881 - DNA, 120 bp, Artificial Sequence
  ENSG00000130349_10 (sequence is synthesized)
cctctccgccccgcccacgctcccgccgggtctccccgtgagtgtcccgtgtcctgccagcctcgggacgccccgcgagctcagggctgcgcagggactgtggtaattgagcgcggcgaa

SEQ ID NO: 284882 - DNA, 120 bp, Artificial Sequence
  ENSG00000130349_11 (sequence is synthesized)
gccttccgttcctgcctcctgtcgctcctgctggctccgaatgcagactgcgaacccggggacgcagttgtccatttcctttgaccttggggacccaggaaggtgcactgcccgcggggg

SEQ ID NO: 284883 - DNA, 120 bp, Artificial Sequence
  ENSG00000130349_12 (sequence is synthesized)
tggggagggagcgagaggaatccgaccctgtctcagcccacagcctccgaggtctccaagtaaagggaaggatctttagctgcattagacttcaaagcgtttagaccagtttctccatct

SEQ ID NO: 284884 - DNA, 120 bp, Artificial Sequence
  ENSG00000130349_13 (sequence is synthesized)
tacggagcggtgaacgggctcaggaatgtggagcgtttcctggcgtcaagcaggtcaaagtcagcgctgctttttttacagacactgcttttcttacagtcttcgattataagcgccatg

SEQ ID NO: 284885 - DNA, 120 bp, Artificial Sequence
  ENSG00000130349_14 (sequence is synthesized)
tgagcaaactgatttccaaagaagtcaagtgactgcctgcaaatcctatgtgccatatttgaatctaagacacagttgactgtaagatgaaccattgatttaaaaacagcttcttgagga

SEQ ID NO: 284886 - DNA, 81 bp, Artificial Sequence
  ENSG00000130349_15 (sequence is synthesized)
gaatcaccatattagatgtatgtagcaaacgtaaaatgtacctggatatttcacaaatgctataatgtgagacggtacctc

SEQ ID NO: 284887 - DNA, 120 bp, Artificial Sequence
  ENSG00000130363_0 (sequence is synthesized)
ggctgccaggggcgtgttatcgcgggggcagcctgggagcgctgctgcgccgcggcaggagaaacagccgaggacaccctggaagagcaggagcacgtgggcctgcgagaatggcgccaa

SEQ ID NO: 284888 - DNA, 120 bp, Artificial Sequence
  ENSG00000130363_1 (sequence is synthesized)
caccagccctgcaaagccacattccaaagccgggccaaggacagccaccgttgccccgcaggcctcaaggatgacggtcaagccagccaaggccgcctccctagccaggaacctcgcaaa

SEQ ID NO: 284889 - DNA, 120 bp, Artificial Sequence
  ENSG00000130363_2 (sequence is synthesized)
gcgcaggcgcacctacctgggtggcgcggctgggcggagtcaagagccggaagtcccttgtgccgcagtccttcccgggaaacctggggaccggaactgcccggagttcccgcccccaga

SEQ ID NO: 284890 - DNA, 120 bp, Artificial Sequence
  ENSG00000130363_3 (sequence is synthesized)
cagaaccctgggttgctgggcaaccgatgcggcccccgcagctggtctctgtggtgctgggagcgagcccagtatagctcccacctcctgcgctggtaacctcccgtcccgcccgcctcc

SEQ ID NO: 284891 - DNA, 120 bp, Artificial Sequence
  ENSG00000130363_4 (sequence is synthesized)
cttgttgtcgcctctcctcgcgtcgcggaatccttgcccttggcactacttacatctctccgggtcccacaacaccttagcgcccacctgcttcaaagccaagctccaccgaaagcgagg

SEQ ID NO: 284892 - DNA, 120 bp, Artificial Sequence
  ENSG00000130363_5 (sequence is synthesized)
cagtcagcccccggacatggcctcagcgctgactgatcgcacctctcgggccccgagcacctacacctacaccagccggccccgagcactgccctgccagcgcagccgttaccgggacag

SEQ ID NO: 284893 - DNA, 120 bp, Artificial Sequence
  ENSG00000130363_6 (sequence is synthesized)
cctgacgcagccagatgaagaacctatgcattatggaaacataatgtatgacagaagggtaattcgaggtaacacttatgcactccagacagggccactgctcggacggcctgattctct

SEQ ID NO: 284894 - DNA, 120 bp, Artificial Sequence
  ENSG00000130363_7 (sequence is synthesized)
agagctccagagacaacgggaggctaggaagagggctcttgccagaaaacaagcccaagagcagctcagaccacaaacacctgaacctgtggaaggcagaaagcatgtcgatgtgcaaac

SEQ ID NO: 284895 - DNA, 120 bp, Artificial Sequence
  ENSG00000130363_8 (sequence is synthesized)
agaattataccttgaagaaattgctgatcgcataatagaagttgatatggaatgccaaacagatgcatttttggacagaccaccaacaccactctttattcctgccaaaactggcaaaga

SEQ ID NO: 284896 - DNA, 120 bp, Artificial Sequence
  ENSG00000130363_9 (sequence is synthesized)
actagaaggagagctctttgactttgatcttgaagttaaaccagtgttagaagttttggtggggaagacaattgagcagtctcttctggaagtaatggaagaagaagagctggctaacct

SEQ ID NO: 284897 - DNA, 120 bp, Artificial Sequence
  ENSG00000130363_10 (sequence is synthesized)
gcgggccagtcagcgtgagtatgaagaactacggaatagtgaacgtgctgaagttcaacgacttgaagagcaagagaggcgacaccgagaagaaaaagaacggcgtaagaaacagcagtg

SEQ ID NO: 284898 - DNA, 120 bp, Artificial Sequence
  ENSG00000130363_11 (sequence is synthesized)
ggaaataatgcacaagcacaacgagacatcacaaaaaatcgccgcccgagcatttgcacagcgttacctggctgaccttctcccgtctgtttttggcagcctcagggatagtggctactt

SEQ ID NO: 284899 - DNA, 120 bp, Artificial Sequence
  ENSG00000130363_12 (sequence is synthesized)
ttatgatcccattgaaagagatattgagataggatttcttccatggctaatgaatgaagttgaaaaaaccatggaatatagcatggtgggaagaacagtgcttgacatgttgatccgtga

SEQ ID NO: 284900 - DNA, 120 bp, Artificial Sequence
  ENSG00000130363_13 (sequence is synthesized)
ggtggttgaaaagaggctgtgtatgtatgagcatggggaagacacacatcagtctccagaacccgaggatgagcctggtggtcctggagcaatgacagagtcactggaggcctctgaatt

SEQ ID NO: 284901 - DNA, 120 bp, Artificial Sequence
  ENSG00000130363_14 (sequence is synthesized)
cctggagcagagcatgtcacagacacgggagctgcttttagatggaggctacctacaaagaacaacatatgacagaaggtcatcccaggaaaggaagtttatggaagagagagaactctt

SEQ ID NO: 284902 - DNA, 120 bp, Artificial Sequence
  ENSG00000130363_15 (sequence is synthesized)
agggcaagatgaagaaacagcaatgaggaagtccttaggggaggaagaattgtcataggagggaagcttcaaagtcatgaaaccaatcaacagccaagtcagcaagcaatcaggtaatga

SEQ ID NO: 284903 - DNA, 120 bp, Artificial Sequence
  ENSG00000130363_16 (sequence is synthesized)
tgtgcgagtcccctcaggttatagaaattatgttgtatttagtcagtatgtctttttgtgtaatggactgggccaatcaaatgtgataaaattaatttgagaatgaaacttaaattgaat

SEQ ID NO: 284904 - DNA, 120 bp, Artificial Sequence
  ENSG00000130363_17 (sequence is synthesized)
tcatttatttaatagaatattcaaaggctatattgtaattctaatgagaattatatttaattactagctttctattaccattatatgtaaccagcaaatatatttttccttagcccttct

SEQ ID NO: 284905 - DNA, 76 bp, Artificial Sequence
  ENSG00000130363_18 (sequence is synthesized)
tcaatatcagtgctgtcagccatatagcttttcttctctataggaaaactatttcacctactgtaagagtgaatgc

SEQ ID NO: 284906 - DNA, 67 bp, Artificial Sequence
  ENSG00000130363_19 (sequence is synthesized)
aaaagagagagaatgcctaaacgttgtgctactgaaagccacagtgctcccttcctgcaaggaccat

SEQ ID NO: 284907 - DNA, 120 bp, Artificial Sequence
  ENSG00000130363_20 (sequence is synthesized)
gctactgaaagccacagtgctcccttcctgcaaggaccatcttcaatattcaagtaaggcttaaggaattcagtggattagtatatgctctcatctattttttcacattcctactatgaa

SEQ ID NO: 284908 - DNA, 120 bp, Artificial Sequence
  ENSG00000130363_21 (sequence is synthesized)
aaaatttcaggcaatgccaataaagcaaaagtccctgtttgccctcatacagtctcactcccctcctcaaaggtagatcactgttatcaggtatgagctatctaggccttttttgaggta

SEQ ID NO: 284909 - DNA, 120 bp, Artificial Sequence
  ENSG00000130363_22 (sequence is synthesized)
tctagaaatatatagcttgattttctttatataaatataaacattatttacatattttatttttcacttaagagaatgtcttagatctttcaaggttagtggcatcaatctcttatcttg

SEQ ID NO: 284910 - DNA, 120 bp, Artificial Sequence
  ENSG00000130363_23 (sequence is synthesized)
tagtggcatcaatctcttatcttgtcaaaatatggttaaggtattacatattatgactgtgctgtagcatagggaattaacatttgactttttaatctgaatgtgttagagaatttacct

SEQ ID NO: 284911 - DNA, 120 bp, Artificial Sequence
  ENSG00000130363_24 (sequence is synthesized)
gcagtattaaaatcacaagttattttctctccaaagccttcctaatcgtaagcaataactgaagtcttcagagcctttagataaatagagcctatttttctttttacttatttttatttt

SEQ ID NO: 284912 - DNA, 71 bp, Artificial Sequence
  ENSG00000130363_25 (sequence is synthesized)
cttcttggctagttactgtattttttgtagagatgggctcttgctgtgttgcccaggctggtctccaactc

SEQ ID NO: 284913 - DNA, 78 bp, Artificial Sequence
  ENSG00000130363_26 (sequence is synthesized)
acctggctgagtctgtttttcgcaaaatacttacacatatataaacgtagtgatttaaaataacttataattattaac

SEQ ID NO: 284914 - DNA, 120 bp, Artificial Sequence
  ENSG00000130363_27 (sequence is synthesized)
atataaacgtagtgatttaaaataacttataattattaacccatttaccttaatttcttttaagttaggtaccaagaatgtatccacatttaaaaaattttaaaagaatgcacccatttt

SEQ ID NO: 284915 - DNA, 120 bp, Artificial Sequence
  ENSG00000130363_28 (sequence is synthesized)
cccatatagtatttcactataacacttaggcctcatggcaaccttctgaagaatgcatgacaatatttgtattttttagtttctaatccttaattcggtcagccagcaaacattagctga

SEQ ID NO: 284916 - DNA, 120 bp, Artificial Sequence
  ENSG00000130363_29 (sequence is synthesized)
gtgcctgctctgccttgggaatgagactgcagatacagcggtgaacagtcacgaatactacatgttttttacagcctagcagtggagctaaatgaagtaaatgatgtaaataaagaaacc

SEQ ID NO: 284917 - DNA, 120 bp, Artificial Sequence
  ENSG00000130363_30 (sequence is synthesized)
aaagctcaggaatttaaagtgatttgcaatagatgacgagcctagtagggaataggactaaagctggaatccaaatctccttacttctaatctggtatactttcttctaataacttgctg

SEQ ID NO: 284918 - DNA, 120 bp, Artificial Sequence
  ENSG00000130363_31 (sequence is synthesized)
tttttgtgaggtacaaagaataatttaaaataaattattgcactaatagcattttaaaaattggaatcacgcctcttatccatcatggggctggttccatcttgttaaacagtctttatg

SEQ ID NO: 284919 - DNA, 120 bp, Artificial Sequence
  ENSG00000130363_32 (sequence is synthesized)
atcatcctaacatttataagatattaattttggcaagaagaccaaaaatttttaattagggctattgctgattattattgttattaccaattttaaaatatctacaactagcttttagaa

SEQ ID NO: 284920 - DNA, 120 bp, Artificial Sequence
  ENSG00000130363_33 (sequence is synthesized)
agtgagactccttctcaaaaaaaaaaaaccttaaaattgatttgaagttgattatctttcataatcttctaattctcctttagaatgatccagtccattaaacactttgcagatgccaga

SEQ ID NO: 284921 - DNA, 120 bp, Artificial Sequence
  ENSG00000130363_34 (sequence is synthesized)
atgatccagtccattaaacactttgcagatgccagacctatgctctataaatccataaattaattcaatttattgaaagaagtagatatctataaaccccacactgaactggttaagctt

SEQ ID NO: 284922 - DNA, 120 bp, Artificial Sequence
  ENSG00000130363_35 (sequence is synthesized)
aattgcaatcctagtccatcctagagagaaatcaaaataattgagaggttagggcattgtcgctgtgagaaagcttagaggtaacacattatatgttatctggagagaagaatgttaaat

SEQ ID NO: 284923 - DNA, 120 bp, Artificial Sequence
  ENSG00000130363_36 (sequence is synthesized)
ggaaacaaagtttatgaagaatttcttcaagtacctgaaggactttctgggaaattacaagatagcattcttaggttccatatgtctagaagacttttcataactgtaagcaacttttgc

SEQ ID NO: 284924 - DNA, 120 bp, Artificial Sequence
  ENSG00000130363_37 (sequence is synthesized)
aaatggtttgggaacataaaactcttccagcatagaagaaaatgggtactattaacattcagatggttatgggaccatcataacagtttgatgtgatatgcaaaatgctacatccccaac

SEQ ID NO: 284925 - DNA, 120 bp, Artificial Sequence
  ENSG00000130363_38 (sequence is synthesized)
tatgaccctcagtatgacttttaaaggaattataagctccaaatactttttggagtataaacagtacttgactttttcacacatttgctaatacccttctcataagttttatttctttct

SEQ ID NO: 284926 - DNA, 120 bp, Artificial Sequence
  ENSG00000130363_39 (sequence is synthesized)
ttctgatgtttcagctaacactgagttaacagaagctaaataataataaaatgaagaacagatagtaaatatattgaaattgtcattcctggccgggtgtggtggcttacgcctataatc

SEQ ID NO: 284927 - DNA, 65 bp, Artificial Sequence
  ENSG00000130363_40 (sequence is synthesized)
ataagaatcacttgaacccaggaggtcgcgccgctgcactccagccgtcattcttaacataaatt

SEQ ID NO: 284928 - DNA, 120 bp, Artificial Sequence
  ENSG00000130363_41 (sequence is synthesized)
agaaaaagaaattgtcattcttaacataaattcccatatcactaaaatagatcagagaggtagaatgaaattttctctagcataggcatcattacatttaagccatctgagggctatgag

SEQ ID NO: 284929 - DNA, 120 bp, Artificial Sequence
  ENSG00000130363_42 (sequence is synthesized)
cgtggcctgcaaagtcactctgagcaacacaaggtggagtttgaaagcagattcaaagccagaccactgggcttgagtcctcacatgcaagcatgtagtcttcaccatggagaagggggt

SEQ ID NO: 284930 - DNA, 120 bp, Artificial Sequence
  ENSG00000130363_43 (sequence is synthesized)
ttgcctttctcaaagcttttttcttttaaattaagaaaaagaactgatttatcagtctagtgtttcattttaaaaacatatgaaagggtgggtaacttgcagaagaaagtatttggagcc

SEQ ID NO: 284931 - DNA, 120 bp, Artificial Sequence
  ENSG00000130363_44 (sequence is synthesized)
tataattccattaaaagttataatggcggtcatagttggggaagcagcattttgcatattatatcaaaatgttatggtaccataaccatccaaatgttaatggtaccaatttcttctatc

SEQ ID NO: 284932 - DNA, 120 bp, Artificial Sequence
  ENSG00000130363_45 (sequence is synthesized)
ctagaaacatttcattttatgttgttgaaacataacaactatatcagctagattttttttctatgctttacctgctatggaaaatttgacacattctgctttactcttttgtttataggt

SEQ ID NO: 284933 - DNA, 120 bp, Artificial Sequence
  ENSG00000130363_46 (sequence is synthesized)
gaatcacagaatgtatttttatgtattctgtagttcaatagccatggctgtttacttcatttaatttatttagcataaagacattatgaaaaggcctaaacatgagcttcacttccccac

SEQ ID NO: 284934 - DNA, 120 bp, Artificial Sequence
  ENSG00000130363_47 (sequence is synthesized)
taactaattagcatctgttatttcttaaccgtaatgcctaggcctaacctcaaccaaccttccacaatcttgttcacagtcagagacccaaaaaagagtgttataagtggggtgtcacta

SEQ ID NO: 284935 - DNA, 120 bp, Artificial Sequence
  ENSG00000130363_48 (sequence is synthesized)
ttgtgaaagtagtgctaatggtgttgaattggtacctatgattcttcttttgaattagattgtatgtttcatgatctcaacttacattactaaaattcaataaactgatcatttagatga

SEQ ID NO: 284936 - DNA, 120 bp, Artificial Sequence
  ENSG00000130368_0 (sequence is synthesized)
ggatccagaagggtcattcaatcagttctcagtcttatcaggtctaagttcctttcttatcaggtcctaaaggcctaatcttatcattgtgacaaagataactgtagagtctgttaaact

SEQ ID NO: 284937 - DNA, 120 bp, Artificial Sequence
  ENSG00000130368_1 (sequence is synthesized)
tttttttaataacatgaagattatgatttatagctgaatttctcccttttattccaattcaacaattttcatggctttttgtgtttgttttgttctggacatatttacagaaaattacct

SEQ ID NO: 284938 - DNA, 120 bp, Artificial Sequence
  ENSG00000130368_2 (sequence is synthesized)
gaagagttccaacctgaggcctcctcatggatgggtcaaacgtgacatcatttgttgttgaggaacccacgaacatctcaactggcaggaacgcctcagtcgggaatgcacatcggcaaa

SEQ ID NO: 284939 - DNA, 120 bp, Artificial Sequence
  ENSG00000130368_3 (sequence is synthesized)
tccccatcgtgcactgggtcattatgagcatctccccagtggggtttgttgagaatgggattctcctctggttcctgtgcttccggatgagaagaaatcccttcactgtctacatcaccc

SEQ ID NO: 284940 - DNA, 120 bp, Artificial Sequence
  ENSG00000130368_4 (sequence is synthesized)
acctgtctatcgcagacatctcactgctcttctgtattttcatcttgtctatcgactatgctttagattatgagctttcttctggccattactacacaattgtcacattatcagtgactt

SEQ ID NO: 284941 - DNA, 120 bp, Artificial Sequence
  ENSG00000130368_5 (sequence is synthesized)
ttctgtttggctacaacacgggcctctatctgctgacggccattagtgtggagaggtgcctgtcagtcctttaccccatctggtaccgatgccatcgccccaagtaccagtcggcattgg

SEQ ID NO: 284942 - DNA, 120 bp, Artificial Sequence
  ENSG00000130368_6 (sequence is synthesized)
tctgtgcccttctgtgggctctttcttgcttggtgaccaccatggagtatgtcatgtgcatcgacagagaagaagagagtcactctcggaatgactgccgagcagtcatcatctttatag

SEQ ID NO: 284943 - DNA, 120 bp, Artificial Sequence
  ENSG00000130368_7 (sequence is synthesized)
ccatcctgagcttcctggtcttcacgcccctcatgctggtgtccagcaccatcttggtcgtgaagatccggaagaacacgtgggcttcccattcctccaagctttacatagtcatcatgg

SEQ ID NO: 284944 - DNA, 120 bp, Artificial Sequence
  ENSG00000130368_8 (sequence is synthesized)
tcaccatcattatattcctcatcttcgctatgcccatgagactcctttacctgctgtactatgagtattggtcgacctttgggaacctacaccacatttccctgctcttctccacaatca

SEQ ID NO: 284945 - DNA, 120 bp, Artificial Sequence
  ENSG00000130368_9 (sequence is synthesized)
acagtagcgccaaccctttcatttacttctttgtgggaagcagtaagaagaagagattcaaggagtccttaaaagttgttctgaccagggctttcaaagatgaaatgcaacctcggcgcc

SEQ ID NO: 284946 - DNA, 120 bp, Artificial Sequence
  ENSG00000130368_10 (sequence is synthesized)
agaaagacaattgtaatacggtcacagttgagactgtcgtctaagaactgtgagggaagttgtggataaaaatggtggaacacaggtcatttttagtttgtgcttggaatatgacttaag

SEQ ID NO: 284947 - DNA, 120 bp, Artificial Sequence
  ENSG00000130368_11 (sequence is synthesized)
tatctcctaaatgtgatacagaagaacatctcatcccatatgcatgagatactaattaatgatgaaattgaactcttgtactgtatcttctggaaatgacctgtcatttctgtacttgac

SEQ ID NO: 284948 - DNA, 120 bp, Artificial Sequence
  ENSG00000130368_12 (sequence is synthesized)
aaagactctatttctttcagctcttttggcagcatcttaccatgaaccataaaaatgacttttgcaggaagatttacagatgtgtacgggacaaggtaacaaaactatttgttggaactt

SEQ ID NO: 284949 - DNA, 120 bp, Artificial Sequence
  ENSG00000130368_13 (sequence is synthesized)
gaggaggcagcttgatgtagcaggaagaacaagggtcgcttcctgtgtgacctcaggcaagttgttaaacctctcagagcctcattttctcactcataaaatggttgcggcaatagtcta

SEQ ID NO: 284950 - DNA, 120 bp, Artificial Sequence
  ENSG00000130368_14 (sequence is synthesized)
tacctccttggtctgctgtgaagatgaaatgagaagatgaggcttgtaaagcacctggcacattgtggatgttcaacaaatatcagtctctcctcactcccttcaatggtagacaagata

SEQ ID NO: 284951 - DNA, 120 bp, Artificial Sequence
  ENSG00000130368_15 (sequence is synthesized)
cacacacacacacacacacacacagctctatcatgtacagaagttattatgtgtttttacatgttgaatgtaaatttacgaaggtcttctttttgcttgcagcatgaaagcatttcatgg

SEQ ID NO: 284952 - DNA, 120 bp, Artificial Sequence
  ENSG00000130368_16 (sequence is synthesized)
ctttttgcttgcagcatgaaagcatttcatggcattacacctctattgaaaaacatcgcggatgttatgatctaacaagccatgtgctagtgcatcatttcaggttgtgaagaaatacat

SEQ ID NO: 284953 - DNA, 120 bp, Artificial Sequence
  ENSG00000130368_17 (sequence is synthesized)
ttggccaccagtagaggagtttctcatggctccccttccctctgtgggaatactagatgaaatgaaagtctgtgttttgaaatcctttgattgcataaacatttttacgaatggagttga

SEQ ID NO: 284954 - DNA, 120 bp, Artificial Sequence
  ENSG00000130368_18 (sequence is synthesized)
atttatgacttcctgggggtgactgggaccttcctcccccatgaagaggtgggttatttgtagccagagttctcacctgcagccaagtgcgggtctctgcacctgtctgcctcctctcct

SEQ ID NO: 284955 - DNA, 120 bp, Artificial Sequence
  ENSG00000130368_19 (sequence is synthesized)
cctgaggctttttttttttttttcatcacacctggaaggaggctcagtggcaagggctaatgaaaatgtggtcacatcctggaggactctgatatttttgctcatgacagatccttgcat

SEQ ID NO: 284956 - DNA, 120 bp, Artificial Sequence
  ENSG00000130368_20 (sequence is synthesized)
gacttcctcagaatctttactcagcactccagggggggctctgcctcttgcctgccatgagttgccctccagacactgcacgtcctgggttttagctgtgaagcccgtcgcatagctatg

SEQ ID NO: 284957 - DNA, 120 bp, Artificial Sequence
  ENSG00000130368_21 (sequence is synthesized)
tttatttccttctgtcccttctaggagttccacaaaagggcaatatgtcacatgattctacaggttgtaaaatgttcaagtccatagaaatgagcccgatagtatttattttaaccattt

SEQ ID NO: 284958 - DNA, 120 bp, Artificial Sequence
  ENSG00000130368_22 (sequence is synthesized)
gctctttaaaaggtcagagaggcagtgatgtaattgttctctgttgctgcttgtccttccccatcctcttcctttctcaaaagaaatgatgtggggcagcttcgctgggggagaggagtc

SEQ ID NO: 284959 - DNA, 120 bp, Artificial Sequence
  ENSG00000130368_23 (sequence is synthesized)
tgtcccctcgagcaaggaccccactgccagccaagcttggatgcaggaggcttttcagtgggtgacaacatctgattcagaaacaaggcagctttgctttcaggagcccagatggggtgt

SEQ ID NO: 284960 - DNA, 120 bp, Artificial Sequence
  ENSG00000130368_24 (sequence is synthesized)
ggagcaatgacatttagaatgatcttgtttttggttgaaaacagagcattttccctgggaaagaacagaatatggagatcagagcaactcccctctgtttcctgtcctctcctgtgtgtg

SEQ ID NO: 284961 - DNA, 120 bp, Artificial Sequence
  ENSG00000130368_25 (sequence is synthesized)
ctgtgtgctggcctctggggtagggaaagggggccaacctcgtctcatctctaaggggatcttagtctcaaagaggaccctaaagactatcagatacaaggaatttctacctaaggaaaa

SEQ ID NO: 284962 - DNA, 120 bp, Artificial Sequence
  ENSG00000130368_26 (sequence is synthesized)
tatggtgaactaataggaagcccctatttattgtttttctgcagataaagtggggaaatcgaatgtgataatgaatataaaaattattctaaccttttaaaatgatgccttaccaagagg

SEQ ID NO: 284963 - DNA, 120 bp, Artificial Sequence
  ENSG00000130368_27 (sequence is synthesized)
taggaggtaggattcagagtttggcagggttataaagactaatttctttctgtcttcccccaaacccattcccaaagtgaactgtaaggttaaaactataacaagaagatttaagtaaat

SEQ ID NO: 284964 - DNA, 120 bp, Artificial Sequence
  ENSG00000130368_28 (sequence is synthesized)
ttgcaaatatgtagagaatactaaatcatttgtatcctttaggcattcagacaatttgcctaagtcattgtaggttactaggtgccacttccgagaattccttggggatggggaggagat

SEQ ID NO: 284965 - DNA, 120 bp, Artificial Sequence
  ENSG00000130368_29 (sequence is synthesized)
tgtttggataatgcctgtcctaactgaacgggaagggtttgtagcattcctactacaaagattcatgcacagccttctctgcagaacaccatgatgtggacaaggcaaagacggggaagc

SEQ ID NO: 284966 - DNA, 120 bp, Artificial Sequence
  ENSG00000130368_30 (sequence is synthesized)
ggaagccgctgtctatgtcataggagaaagagacaccgcataactacaacaccaggctgcacacaagtttgtttgacaagtgttaggaacaaaattgtgtggcagaggtcaccacagcag

SEQ ID NO: 284967 - DNA, 120 bp, Artificial Sequence
  ENSG00000130368_31 (sequence is synthesized)
gggctcttcctgccacccccatattgcatgcagcctcttctgttccctcccctgcccactggggtttctcctcagcactcatcatgccatatatcgatttgcttatttgctcgttctctg

SEQ ID NO: 284968 - DNA, 120 bp, Artificial Sequence
  ENSG00000130368_32 (sequence is synthesized)
tctcttcacgctagactataagctccttgagggcagggacgtagctttgctcactgctgtagccccagcttatttgctgtgttggtcgaatccactgcacccctctctgggctgtttcct

SEQ ID NO: 284969 - DNA, 120 bp, Artificial Sequence
  ENSG00000130368_33 (sequence is synthesized)
ttgtacatataaatagactcaaattgcttccacctaaccagaagccattccttgccccacagccctttccagtttctatctcccctccctcccttccttccaaaccaccttctggaaagg

SEQ ID NO: 284970 - DNA, 120 bp, Artificial Sequence
  ENSG00000130368_34 (sequence is synthesized)
ctcttccacactcactgtcctgactcttgccacaattcacccctcaacatcctgccatttgtcttgcagcctgaccatcatagagagattggtccagataggaaggtgagtaacttccac

SEQ ID NO: 284971 - DNA, 120 bp, Artificial Sequence
  ENSG00000130368_35 (sequence is synthesized)
agtgtcaaatctgatgggctgttttctacctatgccttttgtggcatttaatacccacagtcttcctgaaattatctcttttcttggattctagtttgctacatttttctccagctctct

SEQ ID NO: 284972 - DNA, 120 bp, Artificial Sequence
  ENSG00000130368_36 (sequence is synthesized)
ttttgaatcctatcttcctgattggaatcttctcacttctttcctccctcttctactgctcctcccttaaatggacacattttccataattcagtggctgggcctctgctctcctctttc

SEQ ID NO: 284973 - DNA, 120 bp, Artificial Sequence
  ENSG00000130368_37 (sequence is synthesized)
tgagaaatctccctggatcctgatccataatcacctgcttattaatgaacctcaaatagacatttgctgaccagaaccctttgctgggctccagtcctgtgtgtccaatcatctaatgga

SEQ ID NO: 284974 - DNA, 120 bp, Artificial Sequence
  ENSG00000130368_38 (sequence is synthesized)
tgggctccagtcctgtgtgtccaatcatctaatggactttttgacccaatgtcctgcaggtgcttgtaacccattcatttccccaccgtttcttttttcttttcttttcttttccttttt

SEQ ID NO: 284975 - DNA, 120 bp, Artificial Sequence
  ENSG00000130368_39 (sequence is synthesized)
gcgccgggcctgcccctattcttttttcagtgaagtacaccgctggtcaccctgtcccccttgctatgctattccctttgcacagactgctctacctttttttaatctagcaaactccat

SEQ ID NO: 284976 - DNA, 120 bp, Artificial Sequence
  ENSG00000130368_40 (sequence is synthesized)
tatccatctacgtccagctcaagcattagagactcaggagagcctctggaagctgagttcctggataaccgtgccataccttttctttcccagactttccacatctttcccttcctcact

SEQ ID NO: 284977 - DNA, 120 bp, Artificial Sequence
  ENSG00000130368_41 (sequence is synthesized)
ctcagcaaatgatggctggctcccctttacacaaggggaatagaagcaaccggaagaactcttccagacatccccgctgtcccctctgctgacctagctccatcttcttcatatcagcct

SEQ ID NO: 284978 - DNA, 120 bp, Artificial Sequence
  ENSG00000130368_42 (sequence is synthesized)
ctcccctgtgtgctcagggggaactcactatgcccctccctggctaaggtgataccctggctaagatgctccaaccccttcccctgttgcctgcccgatggcatttcgccagcaattctc

SEQ ID NO: 284979 - DNA, 120 bp, Artificial Sequence
  ENSG00000130368_43 (sequence is synthesized)
cctctctgtcctgcaccatcaatttcagtccaggataacggaggacagaattttcaggaatcaggatggaggagggttggtgaacagcaccactggccttgactagcctgctccctgcca

SEQ ID NO: 284980 - DNA, 120 bp, Artificial Sequence
  ENSG00000130368_44 (sequence is synthesized)
cacatactggttgtttctctggagacagcattgtatgcactgagatgagcaactggagagccaccagcagccatcccctctctttgtgcctcacagctccagtgactgatggagatggag

SEQ ID NO: 284981 - DNA, 120 bp, Artificial Sequence
  ENSG00000130368_45 (sequence is synthesized)
atgggatcgttggctgccttcatggagttgtttaaggagcacttagaagatgctttacgggcatccctagaatttcaccattagaagagtagttctgttaggttgaaatttgtcttttta

SEQ ID NO: 284982 - DNA, 120 bp, Artificial Sequence
  ENSG00000130368_46 (sequence is synthesized)
ctcaacctcttcttaaattaggaatcacttctggaaaggaaaacacatcaagccatacatactttttcctgtgctttttctcatggagaggagcagcacaagacaagacacccagctgtt

SEQ ID NO: 284983 - DNA, 120 bp, Artificial Sequence
  ENSG00000130368_47 (sequence is synthesized)
caggctgctgaatgagatggtgaggagtgggtggtagaagtgaagaaaggaggaggtgggagcaatcaagtatttgcttgcttgattccacaaacaagaagcttcttttctctttaacct

SEQ ID NO: 284984 - DNA, 120 bp, Artificial Sequence
  ENSG00000130368_48 (sequence is synthesized)
aacatttgactgtttaactttgcaaggttatatgggaaaaaaaatccttgatatgaaaacattagcaaatgtatcacttataaaatgggtaccatcaggcctccccctgcttagcaccag

SEQ ID NO: 284985 - DNA, 120 bp, Artificial Sequence
  ENSG00000130368_49 (sequence is synthesized)
agtctctctcactgcctcatctacagttttgtggatcagtcttgtgatgcctgagagtcaatgtgcaaactgtcctcgaactttaattgatgatcttgacaaacattcaggattctgtga

SEQ ID NO: 284986 - DNA, 120 bp, Artificial Sequence
  ENSG00000130368_50 (sequence is synthesized)
aggaggtaagagaggtgtcacagaactgctaaaatacacttcaactattgataaaagagcatggagcagagttagaccggttagcagctgaatcagaggtaaataaacaaggatgatgat

SEQ ID NO: 284987 - DNA, 120 bp, Artificial Sequence
  ENSG00000130368_51 (sequence is synthesized)
gagatgggagcttccaaaaagaagcgttttaatatcaaatgttgaagagaggctcttgggaaaactgctgaagtctttagatatttttgcaaaaattacccactttttgatgttcagcaa

SEQ ID NO: 284988 - DNA, 68 bp, Artificial Sequence
  ENSG00000130368_52 (sequence is synthesized)
atatttttgcaaaaattacccactttttgatgttcagcaaaagtaaccattaagtaaagacagaaaaa

SEQ ID NO: 284989 - DNA, 74 bp, Artificial Sequence
  ENSG00000130368_53 (sequence is synthesized)
ttatgccaaaaaattaagtacttttgtggcttaaaagaacaatgtattgtcatttctcaaggctccatgggttg

SEQ ID NO: 284990 - DNA, 120 bp, Artificial Sequence
  ENSG00000130368_54 (sequence is synthesized)
aagaacaatgtattgtcatttctcaaggctccatgggttgattgagttcagtttctcatttggcgtctcttgtagttgtagtgagttgttggctgaggcagaagccacctgaaggcttga

SEQ ID NO: 284991 - DNA, 120 bp, Artificial Sequence
  ENSG00000130368_55 (sequence is synthesized)
ctaggcagggcaatcgaggtggtacactcacaaggctggtcatttcctggggctcagctggaaaggtggaccagagttcctacacaaggccctttgatgtggtttgggtttcttacaaca

SEQ ID NO: 284992 - DNA, 120 bp, Artificial Sequence
  ENSG00000130368_56 (sequence is synthesized)
tggtgattgtgttctggaaggaagtctcctgagacttagcttttcctaaaggccaaaaatcagctattggggtctcatttgcttaaaattattggcatgttgttgaaattataatgagtt

SEQ ID NO: 284993 - DNA, 120 bp, Artificial Sequence
  ENSG00000130368_57 (sequence is synthesized)
ttagtaaagcaaaattaaaacaattttcatgattttaatttcacttttttcatgattttctatgaaattttggtcctcattttaacaagattcctttttaacaatcttttactaaaacca

SEQ ID NO: 284994 - DNA, 120 bp, Artificial Sequence
  ENSG00000130368_58 (sequence is synthesized)
gtcattcatggataaggagatcctcttacactaattatttaaatgtgtacatatacatgttaatacaaagggttgaattgttaaagcaaattcagagtgacttacagatcttacccaaca

SEQ ID NO: 284995 - DNA, 120 bp, Artificial Sequence
  ENSG00000130368_59 (sequence is synthesized)
tgaaactaatgattcaaatgataagaggcaagtgccaggcacaaatgaaacactcttttctggaggagaccaacagttttaattatttctggggtttttttggtcaaatttctcatgttg

SEQ ID NO: 284996 - DNA, 120 bp, Artificial Sequence
  ENSG00000130368_60 (sequence is synthesized)
cttctagattgttttccaaatgtcatttagttttctatctgtactttttgtgattctctgaattctctgtcagacatttcggagatcttcaattcttctgggtccattgctacagctttg

SEQ ID NO: 284997 - DNA, 120 bp, Artificial Sequence
  ENSG00000130368_61 (sequence is synthesized)
ttatctcttttgatgttgtcgttttcccctgagttttcacagtccttgcacttcacgtcgatccccgtgcaattgagaagatagtcacctctgacagttttttaagggttcttggtggtg

SEQ ID NO: 284998 - DNA, 120 bp, Artificial Sequence
  ENSG00000130368_62 (sequence is synthesized)
tcagagctttgctacttagtattggaacttaaactctggtctgttgtttcttcctgttctgagtgagacttgcggtgagcactggaacttaaacattgccctggaactatattgctgctc

SEQ ID NO: 284999 - DNA, 120 bp, Artificial Sequence
  ENSG00000130368_63 (sequence is synthesized)
tgtcaacatttcccagttcagggaagatgtaagtgggtatcagaacttaatcttgagctttttgttgtttccaggccaggggagggctctcgagtatacctaggctcgtggaaaatgcag

SEQ ID NO: 285000 - DNA, 120 bp, Artificial Sequence
  ENSG00000130368_64 (sequence is synthesized)
ccagggatttggacctccctgtggattgtgccagccagtcccttcaccatggtgtccccactgatcagagctcagagtgcaccagtacaccagttgctgcaatcagtgcttggctttttg

SEQ ID NO: 285001 - DNA, 120 bp, Artificial Sequence
  ENSG00000130368_65 (sequence is synthesized)
tccccagttcaccccaggtcattcagctatcctggcattcccagtggttcctgtgggacggggccagagtgggtgtcccatgaagatgaccagatcagtggggagataaaatgctcacct

SEQ ID NO: 285002 - DNA, 120 bp, Artificial Sequence
  ENSG00000130368_66 (sequence is synthesized)
gtaattctctcctgtcaccttggaaaccatggatctagagacattctctgagtgacactatgccagctgggagtggtggcacagtccgaattgattgtttctcttaccagttctggcttc

SEQ ID NO: 285003 - DNA, 120 bp, Artificial Sequence
  ENSG00000130368_67 (sequence is synthesized)
tttcaattctgtggacctagggggtttctcagcttctccccaaagttctggtgaattcagggtggtgttcttgtctttgaatagttggaatctatttctgtggggggaatggttccagag

SEQ ID NO: 285004 - DNA, 120 bp, Artificial Sequence
  ENSG00000130368_68 (sequence is synthesized)
aatcttctattctgccatcttgttgagctctcccaaaatgtccccttctcctacattggcacacgctttggtttcacattgactgatgagttttgagcaacgtatacaaagaaacattgt

SEQ ID NO: 285005 - DNA, 120 bp, Artificial Sequence
  ENSG00000130368_69 (sequence is synthesized)
tctcaaaggaaactggtgaagtttgggggtgcctccattttgcacgttgttcattacacaagtagaatatacttatgtgactacccgtaccctttctccagcctccctgccccataaacc

SEQ ID NO: 285006 - DNA, 120 bp, Artificial Sequence
  ENSG00000130368_70 (sequence is synthesized)
tataaatcccaaatttatttataatagacaatcttgacagattaggtatatcctgctggaaataggactagttcactgagtataacgtttctacagagcagtctgattgaggtcttcagc

SEQ ID NO: 285007 - DNA, 120 bp, Artificial Sequence
  ENSG00000130368_71 (sequence is synthesized)
atctttgcaaggtgccctggttgaggttattgttccgcaggcactcctgtggggaaggagtgatttgcaggcttcatgctgacattacctgtatggtacattttggccaacaccagcctg

SEQ ID NO: 285008 - DNA, 120 bp, Artificial Sequence
  ENSG00000130368_72 (sequence is synthesized)
ttaatgcctgaggcagaggcctctggaatgagaaaacaggactggaagcctgcctacttagtagcttggcaagtgtcaacaagttaatctctgtgactggtgacttagttggagttccac

SEQ ID NO: 285009 - DNA, 120 bp, Artificial Sequence
  ENSG00000130368_73 (sequence is synthesized)
ccaaagcagatcctgagacaaggatttagtgcaagtaattcatgtggccatcatccagaggagcatgggagaaagtggggaatttagacagggaaaggaggaagttagcaaagggtgagt

SEQ ID NO: 285010 - DNA, 120 bp, Artificial Sequence
  ENSG00000130368_74 (sequence is synthesized)
gaaggagaacaagggcccaggacagtgaggccccacctcagaactgccctcctggaagggcgaaggagccgtggcgccgacccccacctcctgcccctcaatagggagcatcactccccg

SEQ ID NO: 285011 - DNA, 120 bp, Artificial Sequence
  ENSG00000130368_75 (sequence is synthesized)
acgtcaactcccagctcttcctggcctgccctgtgctcaggccgagcatggcctaaagcagggaatatgtctaggcagagtgacacagggagccatgggcaggtacaggatctacctgca

SEQ ID NO: 285012 - DNA, 120 bp, Artificial Sequence
  ENSG00000130368_76 (sequence is synthesized)
agtgactacaggggtggcttcagggctgaccaatggcatctgctatcatggaattaaagtaacctaccccacgaagtagctgtgccaagtaagtgaaataatgcacaaggaaattctgtg

SEQ ID NO: 285013 - DNA, 120 bp, Artificial Sequence
  ENSG00000130368_77 (sequence is synthesized)
taaactttcaagcatcaagcaaatgttagttatttcttgaggacgttatgtaaagtgatataagccaggcccggaaggacaaagactgtatgattccactcatatgaggggcttagagtt

SEQ ID NO: 285014 - DNA, 120 bp, Artificial Sequence
  ENSG00000130368_78 (sequence is synthesized)
gtcagattcatagagacagaaggtagaatggtggtggccgggggctggagggaggagggagtggggagttagtgtttagtaggaactgaatttcagtttgaggagatgaaaatgttctgg

SEQ ID NO: 285015 - DNA, 120 bp, Artificial Sequence
  ENSG00000130368_79 (sequence is synthesized)
ggatctattgcacaacaatggacatgtagctaaccccactgtactgtattcttaaaaatgtttcagatggtaaattttatgttatgtatattttaccacaataaagaagtgagttattgt

SEQ ID NO: 285016 - DNA, 120 bp, Artificial Sequence
  ENSG00000130377_0 (sequence is synthesized)
gtagaaggcctgttgtggagggaaaccacccatcctcctgcctcccaccaccaccatcatcctggctggacggagagggtgacgggggctgggaaggggcagctcatgttcaggtttcca

SEQ ID NO: 285017 - DNA, 120 bp, Artificial Sequence
  ENSG00000130377_1 (sequence is synthesized)
ggaggggctacctgttgactgtctttgcaggaagaagaaaacacctgagtgaccagatgtcccagctccaggtgccttgccagatggccagaaccacacctcttgaagagtgacaggtgc

SEQ ID NO: 285018 - DNA, 120 bp, Artificial Sequence
  ENSG00000130377_2 (sequence is synthesized)
cagtgtgctgtggagcatggtttctgcacacctggaatgactggaaccccaaagactcaagaaggagctaaagatcttgaagtagacatgaataaaacagaagttactcccaggctgtgg

SEQ ID NO: 285019 - DNA, 120 bp, Artificial Sequence
  ENSG00000130377_3 (sequence is synthesized)
accacctgtcgagatggagaagtccttctgaggctatccaaacacggaccaggccatgagaccccgatgaccatccctgaattttttcgagagtcagtcaaccgatttggaacttatcca

SEQ ID NO: 285020 - DNA, 120 bp, Artificial Sequence
  ENSG00000130377_4 (sequence is synthesized)
gccctcgcatccaagaatggcaaaaagtgggaaattctgaatttcaaccagtactatgaggcttgtcggaaggctgcaaaatccttgatcaagctgggtttggagcgtttccacggagtt

SEQ ID NO: 285021 - DNA, 120 bp, Artificial Sequence
  ENSG00000130377_5 (sequence is synthesized)
ggtatcctggggtttaactctgcagagtggtttatcactgctgttggtgccatcctagccgggggtctttgtgttggtatttatgccaccaactctgccgaggtttgtcaatatgtcatc

SEQ ID NO: 285022 - DNA, 120 bp, Artificial Sequence
  ENSG00000130377_6 (sequence is synthesized)
actcatgccaaagtgaacatcttgctggttgagaatgatcaacagttacagaaaatcctttcgattccacagagcagcctagagcccctaaaagcgatcatccagtacagactgccaatg

SEQ ID NO: 285023 - DNA, 120 bp, Artificial Sequence
  ENSG00000130377_7 (sequence is synthesized)
aagaagaacaacaacttgtactcttgggatgatttcatggaacttggcagaagtatccctgacacccaactggagcaggtcatcgagagccagaaggcgaatcaatgcgcagtgctcatc

SEQ ID NO: 285024 - DNA, 120 bp, Artificial Sequence
  ENSG00000130377_8 (sequence is synthesized)
tacacttcagggaccacaggcatacccaagggagtgatgctcagtcatgacaacatcacgtggattgcaggagcagtgacaaaggactttaaactgacagacaagcatgagacggtggtt

SEQ ID NO: 285025 - DNA, 120 bp, Artificial Sequence
  ENSG00000130377_9 (sequence is synthesized)
agctacctcccactcagccatattgcagcacagatgatggacatctgggtacccataaagattggggcgctcacatactttgctcaagcagatgctctcaagggcaccttggtaagtact

SEQ ID NO: 285026 - DNA, 120 bp, Artificial Sequence
  ENSG00000130377_10 (sequence is synthesized)
ctaaaggaggtaaaacctactgtcttcattggagtgcctcaaatttgggagaagatacatgagatggtgaagaaaaatagtgccaagtccatgggcttgaagaagaaggcattcgtgtgg

SEQ ID NO: 285027 - DNA, 120 bp, Artificial Sequence
  ENSG00000130377_11 (sequence is synthesized)
gtcaagacatcccttggcttggatcactgtcactcttttatcagtgggactgcgcccctcaaccaagagactgccgagttctttctaagcttggacatacctataggcgagttgtatggg

SEQ ID NO: 285028 - DNA, 120 bp, Artificial Sequence
  ENSG00000130377_12 (sequence is synthesized)
ttgagtgagagctcgggaccccacacgatatccaaccagaataactacaggcttctaagctgtggcaagatcttgactgggtgtaagaatatgctgttccagcagaacaaggatggcatt

SEQ ID NO: 285029 - DNA, 120 bp, Artificial Sequence
  ENSG00000130377_13 (sequence is synthesized)
ggggagatctgcctctggggtaggcacatcttcatgggctatctggaaagtgagactgaaactacagaggccatcgatgatgaaggctggctacactctggggatctgggccagctggac

SEQ ID NO: 285030 - DNA, 120 bp, Artificial Sequence
  ENSG00000130377_14 (sequence is synthesized)
ggtctgggtttcctctatgtcaccggccacatcaaagaaatccttatcactgctggtggtgaaaatgtgccccccattcctgttgagaccttggttaagaagaagatccccatcatcagt

SEQ ID NO: 285031 - DNA, 120 bp, Artificial Sequence
  ENSG00000130377_15 (sequence is synthesized)
aacgccatgttagtaggagataaactgaagtttctgagcatgttgctgacgctgaagtgtgagatgaatcagatgagcggagaacctctggacaagctgaacttcgaggccatcaacttc

SEQ ID NO: 285032 - DNA, 120 bp, Artificial Sequence
  ENSG00000130377_16 (sequence is synthesized)
tgtcggggtctgggcagccaggcatccaccgtgactgagattgtgaagcagcaagaccccctggtctacaaggccatccagcaaggcatcaatgctgtgaaccaggaagccatgaacaat

SEQ ID NO: 285033 - DNA, 120 bp, Artificial Sequence
  ENSG00000130377_17 (sequence is synthesized)
gcacagaggattgaaaagtgggtcatcttggagaaggacttttccatctatggtggagagctaggtccaatgatgaaacttaagagacattttgtagcccagaaatacaaaaaacaaatt

SEQ ID NO: 285034 - DNA, 120 bp, Artificial Sequence
  ENSG00000130377_18 (sequence is synthesized)
gatcacatgtaccactgactgctttgatggagctgctctcagctgttctgatgccttcagcaggaagacctcattgcaataagtgaaatgctgctctaggtagaagctctccctgctgtt

SEQ ID NO: 285035 - DNA, 120 bp, Artificial Sequence
  ENSG00000130377_19 (sequence is synthesized)
tttaagaagccacattcctcattggtcagtttcttgattgttcgtctgttggagaggtgctccctagaagaacctgccatacgtttcaaagcaataaaatcactgtatatctttctaagg

SEQ ID NO: 285036 - DNA, 120 bp, Artificial Sequence
  ENSG00000130377_20 (sequence is synthesized)
accttcaagtcatgactccagggaagcctattgggaagtctactaaaaactgcctgatttacaagaaagacctgaacttgtgggctcccatttgatttttttctcctcaggggactcaga

SEQ ID NO: 285037 - DNA, 120 bp, Artificial Sequence
  ENSG00000130377_21 (sequence is synthesized)
cattagaaagaaaaagcctcacagatttgaagaactggacccccaaatcaactcacctgcctggaagcaactgggaaacccttccaataagtcctgataataaagcacttcagggtccca

SEQ ID NO: 285038 - DNA, 120 bp, Artificial Sequence
  ENSG00000130377_22 (sequence is synthesized)
ttgtgaggaaagtgggtgtgacctttcaaaggacgtgaaatgtgagcagagggagggggtgtgaccttacaagggaagtgggtgtggcctttcaaagaaagtgggagtgggatgatttca

SEQ ID NO: 285039 - DNA, 120 bp, Artificial Sequence
  ENSG00000130377_23 (sequence is synthesized)
gaatattccaggagcaggggaaacagcagcaaacaagacagactcaatctggaccttgggaacagataagaaatgaacaaatgaaaacattcagtttgtgtgacatgatcacgtggattg

SEQ ID NO: 285040 - DNA, 120 bp, Artificial Sequence
  ENSG00000130377_24 (sequence is synthesized)
caagactcccgtctcaaaaaacgaaagaaaagaaagaaaccactcccagactccctgcctgggcgggatcctttgatcaagccctcaacatgccttggggctctcttcacaatggaagaa

SEQ ID NO: 285041 - DNA, 120 bp, Artificial Sequence
  ENSG00000130377_25 (sequence is synthesized)
aaggtgcaaagtcctggaaaaggaagagccatgagggacttcttttagctcatcaaccaagatccacaattctgtgtagcataatttggtcagagatgtgttgtctcgggcagactattg

SEQ ID NO: 285042 - DNA, 120 bp, Artificial Sequence
  ENSG00000130377_26 (sequence is synthesized)
tcatcctctaccgacactgttggaagctactgatatggactacaaagaatccaggagtcctgaaaccaagtcatttggaattccacagagcagcctagagcccctaaaagcgatcatcca

SEQ ID NO: 285043 - DNA, 80 bp, Artificial Sequence
  ENSG00000130382_0 (sequence is synthesized)
gagcgggcggccgggatcggcggcggcggcggcggcggcggcgcttgacagacaatgagggcggcggggcggcgttgagc

SEQ ID NO: 285044 - DNA, 120 bp, Artificial Sequence
  ENSG00000130382_1 (sequence is synthesized)
cggcggcggcggcggcgagcgacgcggggcccgggggcggggcggggcgccagccatggacaatcagtgcaccgtccaggtgaggttagagctggggcatcgcgcccaactgcgcaagaa

SEQ ID NO: 285045 - DNA, 120 bp, Artificial Sequence
  ENSG00000130382_2 (sequence is synthesized)
cccaactgcgcaagaagcccaccacggaggggttcactcacgactggatggtgtttgtccgcggccccgagcaatgtgacatccagcacttcgtggagaaggtggtcttctggctgcacg

SEQ ID NO: 285046 - DNA, 120 bp, Artificial Sequence
  ENSG00000130382_3 (sequence is synthesized)
acagcttccccaagcccagacgcgtgtgcaaggagcccccctacaaagtagaggagtcggggtacgctggcttcatcatgcccatcgaggtgcacttcaaaaacaaggaggagccgagga

SEQ ID NO: 285047 - DNA, 120 bp, Artificial Sequence
  ENSG00000130382_4 (sequence is synthesized)
aggtctgcttcacctacgacctgttcctgaacctggaaggcaacccgcccgtgaaccacctgcgctgcgagaagctcaccttcaacaaccccaccacggagttccggtacaagctcctgc

SEQ ID NO: 285048 - DNA, 120 bp, Artificial Sequence
  ENSG00000130382_5 (sequence is synthesized)
gggccggcggggtgatggtaatgcccgaaggagcagacacggtgtccaggcccagtcccgactaccccatgttacccacaattccactctctgccttctctgaccccaagaagaccaaac

SEQ ID NO: 285049 - DNA, 120 bp, Artificial Sequence
  ENSG00000130382_6 (sequence is synthesized)
catcccacggctccaaggacgccaacaaggagagcagcaagacctccaagccacacaaggtgaccaaggagcaccgggagcggccccgcaaagactccgagagcaagagctcctccaagg

SEQ ID NO: 285050 - DNA, 120 bp, Artificial Sequence
  ENSG00000130382_7 (sequence is synthesized)
agctggagcgtgagcaggccaaaagctccaaggacacctcgcggaagctgggcgagggccggctgcccaaggaggagaaggcgccaccgcccaaggctgccttcaaggaacccaagatgg

SEQ ID NO: 285051 - DNA, 120 bp, Artificial Sequence
  ENSG00000130382_8 (sequence is synthesized)
ccctgaaagagaccaagctggaaagcacgtcccccaagggtgggcccccacccccacccccacccccaccccgggcttccagcaagcggccggccaccgccgactcgccaaagcccagcg

SEQ ID NO: 285052 - DNA, 120 bp, Artificial Sequence
  ENSG00000130382_9 (sequence is synthesized)
ccaagaagcagaagaagagcagctcgaaggggtcccggagtgctccaggcacctcgccccgcacctcctcctcctcctccttctcggacaagaagccggccaaggacaagagcagcacca

SEQ ID NO: 285053 - DNA, 120 bp, Artificial Sequence
  ENSG00000130382_10 (sequence is synthesized)
gaggggagaaggtgaaggccgagagtgagccccgggaggccaaaaaggccctggaggtggaggagtccaactcagaggacgaggcctccttcaagtccgagtctgcccagtcaagcccgt

SEQ ID NO: 285054 - DNA, 120 bp, Artificial Sequence
  ENSG00000130382_11 (sequence is synthesized)
ccaactccagctccagctcagactccagctcagactcagacttcgagccatcccagaaccacagccaaggacccctgcgctccatggtggaggacctgcagtccgaggagtccgacgagg

SEQ ID NO: 285055 - DNA, 120 bp, Artificial Sequence
  ENSG00000130382_12 (sequence is synthesized)
acgactcttcgtcaggcgaggaggctgccggcaagaccaacccggggagggactccaggttgagcttcagcgacagcgagagtgacaacagcgccgactcctccctgcccagccgtgagc

SEQ ID NO: 285056 - DNA, 120 bp, Artificial Sequence
  ENSG00000130382_13 (sequence is synthesized)
ccccacccccccagaagccacccccgcccaacagcaaggtgtcaggccggaggagccccgagtcctgcagcaagcctgagaagatcctcaagaagggcacctacgacaaggcctacacgg

SEQ ID NO: 285057 - DNA, 120 bp, Artificial Sequence
  ENSG00000130382_14 (sequence is synthesized)
atgagctggtggagctacaccggaggctgatggcgctgcgggagcgcaacgtgctgcagcagattgtgaatctgatcgaggagactggccacttcaatgtcaccaacaccaccttcgact

SEQ ID NO: 285058 - DNA, 120 bp, Artificial Sequence
  ENSG00000130382_15 (sequence is synthesized)
tcgacctcttctccctggacgagaccaccgtgcgcaaactgcagagctgcctggaggccgtggccacatgaccctgggccgcgtgccgggcccccaccgccggggtcctgggaggctgca

SEQ ID NO: 285059 - DNA, 120 bp, Artificial Sequence
  ENSG00000130382_16 (sequence is synthesized)
gccaggcctcgcctgccctcctctcccgtctcgcctgcccgcagcactgccttagcgacagccctgtcctcgcccgcacagcccgctgcactttcctcggcggctccctgcccactctcc

SEQ ID NO: 285060 - DNA, 120 bp, Artificial Sequence
  ENSG00000130382_17 (sequence is synthesized)
ccgctccatcgccaggagccctggggccgggctgggccacacgggagccgccccccgggctctctgggctcccctcagagagcggctggtgttgaaggcagctctgggcagagacagggc

SEQ ID NO: 285061 - DNA, 120 bp, Artificial Sequence
  ENSG00000130382_18 (sequence is synthesized)
ggctggggggcatctccagcctcccgaatggttcagaacacaccctccgcccaccctggacctcagaaggccctgcctgtgtgtctgcgtcgtcctccgtgtagacctagcgccggctcc

SEQ ID NO: 285062 - DNA, 120 bp, Artificial Sequence
  ENSG00000130382_19 (sequence is synthesized)
tccccggctcgcgctgcgctggggtctgtgctgtatagttctctctattatatatgtgtgtgcactgtctggtcaagagcagtgtccatgtgcgtttctgtggcagcagtgcacgtgggg

SEQ ID NO: 285063 - DNA, 120 bp, Artificial Sequence
  ENSG00000130382_20 (sequence is synthesized)
tgggtggggggtgcgtacggtggggcttgtaggttaagatgtctctgcggtggtgtggggctggaggccgagccaggcacggcagctggccctctccaggcgcatggaggaattctccct

SEQ ID NO: 285064 - DNA, 120 bp, Artificial Sequence
  ENSG00000130382_21 (sequence is synthesized)
ttgccgttccaaggatgccgccgcctcctaccggggctcccgggggggtcagccaacactacaaagggcagcgagtcctcagggcgcccgggagccaccagtctgctctcgggctctact

SEQ ID NO: 285065 - DNA, 120 bp, Artificial Sequence
  ENSG00000130382_22 (sequence is synthesized)
cagactagcgccaacagtctccgcggacagactcgcatcagccgccctggggctcggcctcctcccataggctcctcttcctctctttcattcaagtcttcaaactttgaaaaaaatatg

SEQ ID NO: 285066 - DNA, 120 bp, Artificial Sequence
  ENSG00000130382_23 (sequence is synthesized)
agcttttgccaaataagacgggatagtttatggagttttctgaggcgcattgaactctggtcagcccctcgagcgtgggctcggccatcagcaggcccggtgggttggccgggctggccc

SEQ ID NO: 285067 - DNA, 120 bp, Artificial Sequence
  ENSG00000130382_24 (sequence is synthesized)
tcccaggctgcctttctctctggtcgcggcctggcccgccccggcctccaccgccgcaattcatgctggtgccgcgcccgcagccccactcctggtatgcctgagattctccaggggcca

SEQ ID NO: 285068 - DNA, 120 bp, Artificial Sequence
  ENSG00000130382_25 (sequence is synthesized)
agccggtcctccttcccggcccactcttccagggccaggacgctcccgcggagccagcccatcgtggctgggggtcccaggggctggaggcctgcctggttagcctctgtttcccagaca

SEQ ID NO: 285069 - DNA, 120 bp, Artificial Sequence
  ENSG00000130382_26 (sequence is synthesized)
ttgactcgaggcgcctccagtcctctcaaccccctgactttcaagtcctttcaagtccttgtgccctgaccaagttatgaggaaaagagggctgagggcctggaggtgggctcgcacccc

SEQ ID NO: 285070 - DNA, 120 bp, Artificial Sequence
  ENSG00000130382_27 (sequence is synthesized)
ctcgaacccacctagatgtctcctcctccccagcctatgagttcagacttggggggctccatctgtccctccctgaggtccctcatcttgtccctgctctgattctgtcagcagatcctg

SEQ ID NO: 285071 - DNA, 120 bp, Artificial Sequence
  ENSG00000130382_28 (sequence is synthesized)
aacactccttggtggggacccatgcctccaaggctgcccccaatgccagctgtcctggggaaactccccagaactctcggggaaaggcccgagaaccttcggaggaagcctccgggactc

SEQ ID NO: 285072 - DNA, 120 bp, Artificial Sequence
  ENSG00000130382_29 (sequence is synthesized)
ctcgccacctgctctgtttctctcccggccccactgccttcaggtatcaggaagagggcaggcccctgtgccccctctccccttcccagggcggccaacaatactccaccatggggcgct

SEQ ID NO: 285073 - DNA, 120 bp, Artificial Sequence
  ENSG00000130382_30 (sequence is synthesized)
tcctttcttctctggaaactaagacattggactgaaggaactggcctgaggggggctgaccgggggcccgtgctgctgggagctctacgcacaagaggccgccggggtcacggacaggaa

SEQ ID NO: 285074 - DNA, 120 bp, Artificial Sequence
  ENSG00000130382_31 (sequence is synthesized)
cctcagcccagggtgctggcctttctccttcgcaggagtcccccaaaatccacacagcgactcgagcagccttccactcagccagaggagggtcgggctcccccgcctgctctcggtggt

SEQ ID NO: 285075 - DNA, 120 bp, Artificial Sequence
  ENSG00000130382_32 (sequence is synthesized)
ggcgtctggcccttcctgccgtttccaaggcctccggaagcaccaacccagttctcagttacctcctctggccggaaggcctcacgttgtcctccagagctgctctgggcccagggctgg

SEQ ID NO: 285076 - DNA, 120 bp, Artificial Sequence
  ENSG00000130382_33 (sequence is synthesized)
ctccgtgaccacctgatggacgtgctgggcagcatgggctcccaaggcagcatccccagctgctctcccaccccaccccagctgcccggcggctgggcccacgagggctctggggacact

SEQ ID NO: 285077 - DNA, 120 bp, Artificial Sequence
  ENSG00000130382_34 (sequence is synthesized)
tccataggaaaggggcctggcactttgtgattgccacgtgtttcctgttaagccgcctgcccccagtgcaaatctctgtgttttgctctctcctgaacaaaaatgtaaaccgacgccgga

SEQ ID NO: 285078 - DNA, 120 bp, Artificial Sequence
  ENSG00000130382_35 (sequence is synthesized)
aagcaaatggtatcgaatacctttcttgcccataagggtttttacaaagaacgtgtctcactaggaactaggacactcatcggcccgagaccaactcctggataaaaggaataaggagaa

SEQ ID NO: 285079 - DNA, 120 bp, Artificial Sequence
  ENSG00000130382_36 (sequence is synthesized)
tcgtgtttgtaacgagttacaggattgtttctttcctggattttaaacttttgttaaattgtgaaattatggaggagttttatagaaaaaaaaagtgaaataaagtcagatgggaaagca

SEQ ID NO: 285080 - DNA, 120 bp, Artificial Sequence
  ENSG00000130382_37 (sequence is synthesized)
ggattaccgagggggtgggcaggccggcgtagggtgcaggaagagagatctgtgaccccaggcccagcttcccagccaggctgtggctccctcgccctccctgggctctcggcagagctt

SEQ ID NO: 285081 - DNA, 120 bp, Artificial Sequence
  ENSG00000130382_38 (sequence is synthesized)
ctgatctctgtgccccgagcagaggaggggttctcctccggctgcagcaatggaggggccctgcgcgcccactgccggccagtcccctgaggcctgcgagcagggccaggaaggacccct

SEQ ID NO: 285082 - DNA, 120 bp, Artificial Sequence
  ENSG00000130383_0 (sequence is synthesized)
ccagctactctgacccatggatcccctgggcccagccaagccacagtggctgtggcgccgctgtctggccgggctgctgtttcagctgctggtggctgtgtgtttcttctcctacctgcg

SEQ ID NO: 285083 - DNA, 120 bp, Artificial Sequence
  ENSG00000130383_1 (sequence is synthesized)
tgtgtcccgagacgatgccactggatcccctaggccagggcttatggcagtggaacctgtcaccggggctcccaatgggtcccgctgccaggacagcatggcgacccctgcccaccccac

SEQ ID NO: 285084 - DNA, 120 bp, Artificial Sequence
  ENSG00000130383_2 (sequence is synthesized)
cctactgatcctgctgtggacgtggccttttaacacacccgtggctctgccccgctgctcagagatggtgcccggcgcggccgactgcaacatcactgccgactccagtgtgtacccaca

SEQ ID NO: 285085 - DNA, 120 bp, Artificial Sequence
  ENSG00000130383_3 (sequence is synthesized)
ggcagacgcggtcatcgtgcaccactgggatatcatgtacaaccccagtgccaacctcccgccccccaccaggccgcaggggcagcgctggatctggttcagcatggagtcccccagcaa

SEQ ID NO: 285086 - DNA, 120 bp, Artificial Sequence
  ENSG00000130383_4 (sequence is synthesized)
ctgccggcacctggaagccctggacggatacttcaatctcaccatgtcctaccgcagcgactccgacatcttcacgccctacggctggctggagccgtggtccggccagcctgcccaccc

SEQ ID NO: 285087 - DNA, 120 bp, Artificial Sequence
  ENSG00000130383_5 (sequence is synthesized)
accgctcaacctctcggccaagaccgagctggtggcctgggcggtgtccaactggaagccggactcggccagggtgcgctactaccagagcctgcaggctcatctcaaggtggacgtgta

SEQ ID NO: 285088 - DNA, 120 bp, Artificial Sequence
  ENSG00000130383_6 (sequence is synthesized)
cggacgctcccacaagcccctgcccaaggggaccatgatggagacgctgtcccggtacaagttctatctggccttcgagaactccttgcaccccgactacatcaccgagaagctgtggag

SEQ ID NO: 285089 - DNA, 120 bp, Artificial Sequence
  ENSG00000130383_7 (sequence is synthesized)
acctggcccggtacctgcaggagctggacaaggaccacgcccgctacctgagctactttcactggcgggagacgctgcggcctcgctccttcagctgggcactggctttctgcaaggcct

SEQ ID NO: 285090 - DNA, 120 bp, Artificial Sequence
  ENSG00000130383_8 (sequence is synthesized)
gctggaagctgcagcaggaatctaggtaccagacggtgcgcagcatagcggcttggttcacctgagaggccggcatggggcctgggctgccgggacctcactttcccagggcctcaccta

SEQ ID NO: 285091 - DNA, 120 bp, Artificial Sequence
  ENSG00000130383_9 (sequence is synthesized)
cctagggtctcactagtcgggggatttacctacctggggcctcggctgcctggggcctcggctgcctggggtctcacctgcctggggcctcacctgctggagtctttggtggccaggcat

SEQ ID NO: 285092 - DNA, 120 bp, Artificial Sequence
  ENSG00000130383_10 (sequence is synthesized)
gtgacttacctgggatttcacttgccgggcttcactgccaggagcctcccctgctggggaccttgccagctggggctggggatggtgcctactggggaccttgctttctggaggctgcac

SEQ ID NO: 285093 - DNA, 120 bp, Artificial Sequence
  ENSG00000130383_11 (sequence is synthesized)
ctactgaggatctcggctgttggggactttacctgctgggacctgctcccagagaccttgccacactgaatgtcacctgctaggagcctcacccgctgggaggcacagggcccaagggag

SEQ ID NO: 285094 - DNA, 120 bp, Artificial Sequence
  ENSG00000130383_12 (sequence is synthesized)
ctggatgtgttgcccaaggtgtgcagggcaggtcagggaagggcagggtcccctaaggaggagggcgaagggtatgtgtgtgaccatcagcagtggtgtgcacatggctgggggacactc

SEQ ID NO: 285095 - DNA, 120 bp, Artificial Sequence
  ENSG00000130383_13 (sequence is synthesized)
ggtttgaccgccagcggatgggtgtcacaaatgcatcactatgggtgtgacctcggcgtgactctgatagtgcctgtggatgtgttgcgatgcctcaccctggagggcactgggccctga

SEQ ID NO: 285096 - DNA, 120 bp, Artificial Sequence
  ENSG00000130383_14 (sequence is synthesized)
gaacgggtgcccttgaggccctgcccccgggcgatggtgcaggctggtttgcttgtggttttattgctgttgttaaccacccatgaggggtgcaaacagataatgctgttaacattttca

SEQ ID NO: 285097 - DNA, 120 bp, Artificial Sequence
  ENSG00000130385_0 (sequence is synthesized)
atggtcctcctcagtattcttagaattctttttctttgtgaactcgtgcttttcatggaacacagggcccaaatggcagaaggagggcagtcctctattgcccttctggctgaggcccct

SEQ ID NO: 285098 - DNA, 120 bp, Artificial Sequence
  ENSG00000130385_1 (sequence is synthesized)
actttgcccctgattgaggagctgctagaagaatcccctggcgaacagccaaggaagccccggctcctagggcattcactgcggtacatgctggagttgtaccggcgttcagctgactcg

SEQ ID NO: 285099 - DNA, 120 bp, Artificial Sequence
  ENSG00000130385_2 (sequence is synthesized)
catgggcaccctagagagaaccgcaccattggggccaccatggtgaggctggtgaagcccttgaccaatgtggcaaggcctcacagaggtacctggcatatacagatcctgggctttcct

SEQ ID NO: 285100 - DNA, 120 bp, Artificial Sequence
  ENSG00000130385_3 (sequence is synthesized)
ctcagaccaaaccgaggactataccaactagttagagccactgtggtttaccgccatcatctccaactaactcgcttcaatctctcctgccatgtggagccctgggtgcagaaaaaccca

SEQ ID NO: 285101 - DNA, 120 bp, Artificial Sequence
  ENSG00000130385_4 (sequence is synthesized)
ttctggaataacaagggacacaggatcctacgactccgttttatgtgtcagcagcaaaaagatagtggtggtcttgagctctggcatggcacttcatccttggacattgccttcttgtta

SEQ ID NO: 285102 - DNA, 120 bp, Artificial Sequence
  ENSG00000130385_5 (sequence is synthesized)
ctctatttcaatgatactcataaaagcattcggaaggctaaatttcttcccaggggcatggaggagttcatggaaagggaatctcttctccggagaacccgacaagcagatggtatctca

SEQ ID NO: 285103 - DNA, 120 bp, Artificial Sequence
  ENSG00000130385_6 (sequence is synthesized)
gctgaggttactgcctcttcctcaaaacatagcgggcctgaaaataaccagtgttccctccaccctttccaaatcagcttccgccagctgggttgggatcactggatcattgctccccct

SEQ ID NO: 285104 - DNA, 120 bp, Artificial Sequence
  ENSG00000130385_7 (sequence is synthesized)
ttctacaccccaaactactgtaaaggaacttgtctccgagtactacgcgatggtctcaattcccccaatcacgccattattcagaaccttatcaatcagttggtggaccagagtgtcccc

SEQ ID NO: 285105 - DNA, 120 bp, Artificial Sequence
  ENSG00000130385_8 (sequence is synthesized)
cggccctcctgtgtcccgtataagtatgttccaattagtgtccttatgattgaggcaaatgggagtattttgtacaaggagtatgagggtatgattgctgagtcttgtacatgcagatga

SEQ ID NO: 285106 - DNA, 120 bp, Artificial Sequence
  ENSG00000130396_0 (sequence is synthesized)
gtggctcgcggcgccccttcgccgtggccgggatggagcctgtgacgcgcgctgtgcttcgggttcataaacttgcaggctgccagctgggaggggaaagtcagtatcacaaagttcggg

SEQ ID NO: 285107 - DNA, 120 bp, Artificial Sequence
  ENSG00000130396_1 (sequence is synthesized)
aggtgcgggctgcctgatggcacaggcccggagtcggacgcctccgaggaaaggcgcgccttctccaccttcggggccgcgaggaagggccctctgcggcggcctctgcccggagggagg

SEQ ID NO: 285108 - DNA, 120 bp, Artificial Sequence
  ENSG00000130396_2 (sequence is synthesized)
cgccggccccaggctggctccctgagaggaggaggaaatcacgctcgctcctggcctggatttggagttccatggagtgatgagattttattttcaagataaagctgctggaaactttgc

SEQ ID NO: 285109 - DNA, 120 bp, Artificial Sequence
  ENSG00000130396_3 (sequence is synthesized)
aacaaaatgtattcgggtctctagtactgccaccactcaagatgtaatcgaaacgctcgcggagaaatttcgacctgatatgcgaatgctgtcctctcccaagtattcactctatgaagt

SEQ ID NO: 285110 - DNA, 120 bp, Artificial Sequence
  ENSG00000130396_4 (sequence is synthesized)
gcatgtcagcggagaagaaagaagattggatatagatgagaaacctctagttgtacaactgaattggaacaaagatgatcgggaaggcagatttgttcttaagaatgagaatgacgccat

SEQ ID NO: 285111 - DNA, 120 bp, Artificial Sequence
  ENSG00000130396_5 (sequence is synthesized)
tcctcctaagaaggctcaaagtaatggacctgaaaagcaggaaaaagaaggggttatccagaacttcaagagaactctctcaaagaaagaaaagaaggaaaaaaagaagagagaaaaaga

SEQ ID NO: 285112 - DNA, 120 bp, Artificial Sequence
  ENSG00000130396_6 (sequence is synthesized)
ggcattgcgacaggcatctgataaagatgatagacctttccaaggggaggatgttgaaaattctcgactggctgctgaggtttacaaagacatgccggaaaccagctttactcgaaccat

SEQ ID NO: 285113 - DNA, 120 bp, Artificial Sequence
  ENSG00000130396_7 (sequence is synthesized)
ttctaatcctgaggtggttatgaaacgacggaggcagcaaaaattggaaaagagaatgcaggaatttcggagctcagatgggcggcctgattcaggtggaacattgagaatttatgcaga

SEQ ID NO: 285114 - DNA, 120 bp, Artificial Sequence
  ENSG00000130396_8 (sequence is synthesized)
tagtttaaaaccaaatattccctacaagacaatcctgctgtctactacagatcctgcagactttgctgtggctgaagctttagagaagtatggtctggaaaaagaaaaccctaaggatta

SEQ ID NO: 285115 - DNA, 120 bp, Artificial Sequence
  ENSG00000130396_9 (sequence is synthesized)
ctgcatcgcccgggttatgcttcctcctggagcccagcattctgatgaaaagggtgctaaagaaattattcttgatgatgatgagtgtcctttacaaatcttcagggaatggccaagtga

SEQ ID NO: 285116 - DNA, 120 bp, Artificial Sequence
  ENSG00000130396_10 (sequence is synthesized)
caaagggattttagtctttcagttgaagaggaggccaccagaccacatcccaaagaaaaccaagaaacacttggaaggcaagacacccaagggaaaggagagagctgacgggtctggcta

SEQ ID NO: 285117 - DNA, 120 bp, Artificial Sequence
  ENSG00000130396_11 (sequence is synthesized)
tggctccacccttcctccggagaagctgccctatttagtagagttaagcccagggagaaggaatcactttgcctactacaactatcacacttacgaagatggttctgactctagagataa

SEQ ID NO: 285118 - DNA, 120 bp, Artificial Sequence
  ENSG00000130396_12 (sequence is synthesized)
gccaaagctttaccgccttcagttaagtgttactgaagttgggacagaaaagttggatgacaactctatccagttgtttggcccaggaattcagccccatcactgtgaccttaccaacat

SEQ ID NO: 285119 - DNA, 120 bp, Artificial Sequence
  ENSG00000130396_13 (sequence is synthesized)
ggatggagtggtcactgtgacgcccagaagtatggacgcagaaacctacgtggaaggccagcgcatctcagaaaccaccatgctgcagagtggcatgaaagtgcagtttggggcgtccca

SEQ ID NO: 285120 - DNA, 120 bp, Artificial Sequence
  ENSG00000130396_14 (sequence is synthesized)
tgtatttaagtttgtggaccccagtcaggatcatgctcttgcaaaaagatctgtggatggaggcctgatggttaagggcccaagacataaacctggaattgttcaggagacaacttttga

SEQ ID NO: 285121 - DNA, 120 bp, Artificial Sequence
  ENSG00000130396_15 (sequence is synthesized)
tttgggaggagatattcatagtgggacagcattaccgacaagcaagagcaccactaggctggacagcgacagagtgtcgtctgcctctagcacagccgagcggggaatggtgaagccgat

SEQ ID NO: 285122 - DNA, 120 bp, Artificial Sequence
  ENSG00000130396_16 (sequence is synthesized)
gatcagagtagaacagcagccagattatcgcaggcaagaaagcagaacacaggatgcttctgggcctgagctgatactacctgcaagcattgaattcagggaaagttctgaagattcatt

SEQ ID NO: 285123 - DNA, 120 bp, Artificial Sequence
  ENSG00000130396_17 (sequence is synthesized)
tttgtctgccattataaattatactaatagctctacagtccactttaagttgtcccctacatatgtattatatatggcatgccggtatgtattgtccaaccagtacagacctgacatcag

SEQ ID NO: 285124 - DNA, 120 bp, Artificial Sequence
  ENSG00000130396_18 (sequence is synthesized)
ccctacagagcgcacacataaagtcattgcagtcgtcaacaagatggtgagcatgatggagggtgtcatccagaaacagaagaatattgcaggggcacttgccttctggatggcaaatgc

SEQ ID NO: 285125 - DNA, 120 bp, Artificial Sequence
  ENSG00000130396_19 (sequence is synthesized)
atctgaacttctcaacttcattaagcaagaccgagaccttagtcggatcacactggatgctcaagatgttttagcacatttggttcaaatggcatttaaatacttggttcactgtcttca

SEQ ID NO: 285126 - DNA, 120 bp, Artificial Sequence
  ENSG00000130396_20 (sequence is synthesized)
atcagaacttaataattacatgccagcctttctagatgaccctgaagagaacagtctgcaacgaccaaaaatagatgatgtgctgcacacgctcacaggagccatgtccttgctacgacg

SEQ ID NO: 285127 - DNA, 120 bp, Artificial Sequence
  ENSG00000130396_21 (sequence is synthesized)
ctgcagagtcaatgccgccctgaccatccagctcttctctcagctcttccacttcatcaatatgtggctgttcaatagattggtgaccgacccagattcggggctgtgctcccattactg

SEQ ID NO: 285128 - DNA, 120 bp, Artificial Sequence
  ENSG00000130396_22 (sequence is synthesized)
gggtgcgattatccgtcagcagttgggccatattgaagcctgggctgagaagcaggggctggaactggctgcggactgtcatctgagcaggatcgtgcaggcaacgactttgcttaccat

SEQ ID NO: 285129 - DNA, 120 bp, Artificial Sequence
  ENSG00000130396_23 (sequence is synthesized)
ggataagtatgcacctgatgacattccaaatataaacagcacctgctttaagttaaattcattacaacttcaagccttattacagaactatcactgtgcacctgatgagccttttatccc

SEQ ID NO: 285130 - DNA, 120 bp, Artificial Sequence
  ENSG00000130396_24 (sequence is synthesized)
ttggaggaggatcctgatctgcagctgccgtttcttttgccagaagatggttattcttgtgatgttgtcagaaacattccaaatggtttacaagaatttttagaccctctgtgccagaga

SEQ ID NO: 285131 - DNA, 120 bp, Artificial Sequence
  ENSG00000130396_25 (sequence is synthesized)
ggattttgcaggttaattcctcacacacgttcaccaggtacttggacaatatattttgaaggtgcagattatgaaagtcaccttctgcgtgagaacacagagctggctcagcctctgagg

SEQ ID NO: 285132 - DNA, 120 bp, Artificial Sequence
  ENSG00000130396_26 (sequence is synthesized)
aaagaacctgaaataatcactgtgaccctaaaaaagcagaatggaatgggccttagcattgttgcagcaaagggtgctggtcaagataaactaggaatctatgtgaagtcggttgtgaaa

SEQ ID NO: 285133 - DNA, 120 bp, Artificial Sequence
  ENSG00000130396_27 (sequence is synthesized)
ggaggtgctgcagatgtggatggacgtctagctgcaggtgatcagctcctcagtgtggatggacgaagtctggttggactctctcaggaaagggcggcagaactcatgacaagaacaagc

SEQ ID NO: 285134 - DNA, 120 bp, Artificial Sequence
  ENSG00000130396_28 (sequence is synthesized)
tctgtggtgacactggaagtagcaaagcagggtgccatctaccacggtctggccacccttctcaatcagccatcccccatgatgcagagaatttcagatcgtcgtggctcaggtaaaccc

SEQ ID NO: 285135 - DNA, 120 bp, Artificial Sequence
  ENSG00000130396_29 (sequence is synthesized)
cgaccaaagagtgaaggctttgagctctataataattcaactcaaaatgggtctcctgagagtcctcagctgccttgggcagaatatagtgaaccaaagaaattgcctggtgatgacaga

SEQ ID NO: 285136 - DNA, 120 bp, Artificial Sequence
  ENSG00000130396_30 (sequence is synthesized)
ctgatgaaaaatagagctgatcaccgttccagccccaacgtagcaaatcagcctcctagtcctggagggaaaagtgcatatgcctctggaacaacagcgaagataacatctgtctctact

SEQ ID NO: 285137 - DNA, 120 bp, Artificial Sequence
  ENSG00000130396_31 (sequence is synthesized)
ggaaacctctgcactgaggagcagacgcctccgcctagacctgaagcctaccccatccccactcagacgtacaccagagagtattttaccttcccagcttccaaatcccaggatcggatg

SEQ ID NO: 285138 - DNA, 120 bp, Artificial Sequence
  ENSG00000130396_32 (sequence is synthesized)
gctcctcctcagaaccagtggccaaattatgaggaaaagccacatatgcacacagatagtaatcattccagtattgcaattcagcgtgttacacgttcccaagaagaacttcgagaagat

SEQ ID NO: 285139 - DNA, 120 bp, Artificial Sequence
  ENSG00000130396_33 (sequence is synthesized)
aaagcttaccaacttgagcggcatcgaatagaggcagctatggaccgaaagtctgatagtgatatgtggataaatcagagctcctcactggactccagtacctctagccaggagcatctg

SEQ ID NO: 285140 - DNA, 120 bp, Artificial Sequence
  ENSG00000130396_34 (sequence is synthesized)
aaccattcctctaagtcggtcacccctgcttccacactgaccaaaagtggccctggccgttggaaaacaccagcagccataccggccacccctgtggccgtctcccagccaatccgaaca

SEQ ID NO: 285141 - DNA, 120 bp, Artificial Sequence
  ENSG00000130396_35 (sequence is synthesized)
gacctgcctccgccacccccgccacctccagtccactatgccggtgatttcgatggaatgtccatggatttgcctctcccaccacccccttccgccaaccagatagggctgccgtctgcg

SEQ ID NO: 285142 - DNA, 120 bp, Artificial Sequence
  ENSG00000130396_36 (sequence is synthesized)
caggtggctgctgctgaacggagaaagagagaagaacatcagcgttggtatgagaaggagaaggcccgcctggaggaggagcgggagaggaagcggagagagcaggagaggaagttgggc

SEQ ID NO: 285143 - DNA, 120 bp, Artificial Sequence
  ENSG00000130396_37 (sequence is synthesized)
cagatgcgcactcagtccttaaaccctgctccgttttctcccctgactgcacagcagatgaagcccgaaaagccttccacactccagcggccacaggaaacagtcattcgggagctgcag

SEQ ID NO: 285144 - DNA, 120 bp, Artificial Sequence
  ENSG00000130396_38 (sequence is synthesized)
cctcagcagcagccccgcacgatcgagcgcagagacttgcagtacattacagtcagcaaagaggagctttcctcgggggacagtctgtcccccgacccgtggaagcgggacgccaaggag

SEQ ID NO: 285145 - DNA, 120 bp, Artificial Sequence
  ENSG00000130396_39 (sequence is synthesized)
aagctggagaagcagcagcagatgcacatcgtggacatgctgagcaaggagatccaggagctccagagcaaaccggaccgcagcgccgaggagagcgaccggctgcgcaagctcatgctg

SEQ ID NO: 285146 - DNA, 120 bp, Artificial Sequence
  ENSG00000130396_40 (sequence is synthesized)
gagtggcagttccagaagagactccaggagtcgaagcagaaggacgaagatgacgaggaggaggaggacgatgatgtggacaccatgctgatcatgcagcgcctggaggctgaacgaaga

SEQ ID NO: 285147 - DNA, 120 bp, Artificial Sequence
  ENSG00000130396_41 (sequence is synthesized)
gcgagggacgaggagcggaggcggcagcagcagttagaagagatgcgcaagcgggaagcggaagaccgagcgaggcaagaggaagagcgccggcggcaggaggaggagcgaacaaaacga

SEQ ID NO: 285148 - DNA, 120 bp, Artificial Sequence
  ENSG00000130396_42 (sequence is synthesized)
gacgctgaagaaaagaggcgacaggaagaagggtattacagccgcctggaagccgagaggcgcagacagcacgacgaggcggcgcgcaggttgctggagcccgaggcgcccggtctgtgc

SEQ ID NO: 285149 - DNA, 120 bp, Artificial Sequence
  ENSG00000130396_43 (sequence is synthesized)
cgccctccgcttccccgggactacgagcccccgtccccgtcccccgcgcccggcgcccctcctcccccgcctcagcgaaacgcctcctacctcaaaacacaggtcctctcccccgactcg

SEQ ID NO: 285150 - DNA, 120 bp, Artificial Sequence
  ENSG00000130396_44 (sequence is synthesized)
ctgttcactgccaagtttgttgcatacaatgaggaggaggaggaggaggactgcagcctagcaggaccaaactcttacccaggatctactggagcagctgttggagcccatgacgcctgt

SEQ ID NO: 285151 - DNA, 120 bp, Artificial Sequence
  ENSG00000130396_45 (sequence is synthesized)
cgggatgcaaaagagaagcgctctaaaagccaagatgcagattcacctggaagttctggggcccctgaaaacttgacattcaaggaacgccagcgtcttttttcacaaggtcaagatgta

SEQ ID NO: 285152 - DNA, 120 bp, Artificial Sequence
  ENSG00000130396_46 (sequence is synthesized)
tccaataaagtgaaagcttctcgtaaattaacagaactggagaatgaactgaacacaaagtgaaagaaaatgaggagaacactttgtatttaccccaaaatcttttcagttgtgggtttg

SEQ ID NO: 285153 - DNA, 120 bp, Artificial Sequence
  ENSG00000130396_47 (sequence is synthesized)
taggtgcgagtttgaagaggaaaagaggaagggggttatatttctaagtgatttacaatttctgtttctaaaattgttgggatttagaaatgtttcaattccaagaaattttattttact

SEQ ID NO: 285154 - DNA, 120 bp, Artificial Sequence
  ENSG00000130396_48 (sequence is synthesized)
ttaccatgagattgccatttatgtaatttaaacactgtctagtttcttaattatctaactcacacgagggtaagttttttgttggtttcttttttggagtcctgagttcaaaggggacag

SEQ ID NO: 285155 - DNA, 120 bp, Artificial Sequence
  ENSG00000130396_49 (sequence is synthesized)
ggcccgtcctccggccccggccccgcgcggctgaggaggcgcggccaggaccatgtcggcgggcggccgtgacgaggagcggcggaagctggccgacatcatccaccactggaacgccaa

SEQ ID NO: 285156 - DNA, 120 bp, Artificial Sequence
  ENSG00000130396_50 (sequence is synthesized)
atgttacactcacccagagttgctgtgccagtcagaggcagagctgggccagtgggcagtattcctccctcatagtgaagggcgtcaggtcaacattttagcaccttttgagagtagtaa

SEQ ID NO: 285157 - DNA, 120 bp, Artificial Sequence
  ENSG00000130396_51 (sequence is synthesized)
taatcgattggctggggcagagcgggctggaagttctgtgtttcttaagaagcacgaggcagagcagggcctggctcccccagctttgtgattggacctgcaactttaccccatctggcc

SEQ ID NO: 285158 - DNA, 120 bp, Artificial Sequence
  ENSG00000130396_52 (sequence is synthesized)
cacctacctctcttctggactgtctccagatccccttatctgccaagttttgtctccttcaaacttctgaactcttgggcgtgtgtagcagtgagcctctttgcaaagggttcgtttcct

SEQ ID NO: 285159 - DNA, 120 bp, Artificial Sequence
  ENSG00000130396_53 (sequence is synthesized)
cgggcactcatctttactgaacatggcccagcttgtcattgtgaaggtgacattggttcagtgattgcttaaatggcatgtggaccgtgggaagcagtaggagcgtagtaagacagttgg

SEQ ID NO: 285160 - DNA, 120 bp, Artificial Sequence
  ENSG00000130396_54 (sequence is synthesized)
ctgccattcaacatttcaaatagatggtttactcaaatcactcacttctggttgatggtaaagagagcagatggcttagaaaacatgatacaggaaaatttagtatgtaatccagtaaat

SEQ ID NO: 285161 - DNA, 120 bp, Artificial Sequence
  ENSG00000130396_55 (sequence is synthesized)
atcctaagttatttattttcatgtgtgtgtgtgtgtttaaatcaagtaacccttttaattgaattttaaaatgacagcgaattttgacattctgagaaatggggattttgagatgtttct

SEQ ID NO: 285162 - DNA, 120 bp, Artificial Sequence
  ENSG00000130396_56 (sequence is synthesized)
ctccatatctccctttgtcctgtgtgtgtggccgacgccctctggatgaagaggctgtagccgttgagctccctgtgggggcctgtttcatcccgaggggactgcgtgttgctctgtgtg

SEQ ID NO: 285163 - DNA, 120 bp, Artificial Sequence
  ENSG00000130396_57 (sequence is synthesized)
gtttgagagaagctgctcttctctgttacttcccttctatgaaggtagaagctttcagtgttacaacttctgatggcggaaaatttagtttttattaataattccttcttggatagtcta

SEQ ID NO: 285164 - DNA, 120 bp, Artificial Sequence
  ENSG00000130396_58 (sequence is synthesized)
gtgaactatattaatagaacagtgtactgttcacagaaaagaacttgtagggagttttttgtagtgatatgctctattaggatacagaacaatctaagagtaagcttgatagacatgatg

SEQ ID NO: 285165 - DNA, 120 bp, Artificial Sequence
  ENSG00000130396_59 (sequence is synthesized)
tgacttcacttaaatggagtagagtgaataatgtaaggacactcacctctgttgaaattggtgatttctgcattttgtagacctttgccctctaagtttatcatcatattatctgttgaa

SEQ ID NO: 285166 - DNA, 120 bp, Artificial Sequence
  ENSG00000130396_60 (sequence is synthesized)
tctgaacagcatttgaagtcctctcaaagagtttgagctttcaggattaggttcccctgtgagtctttcacttgtgtaatggtaagtcaacattgatgatctttctaaggaaatcagatt

SEQ ID NO: 285167 - DNA, 120 bp, Artificial Sequence
  ENSG00000130396_61 (sequence is synthesized)
tacaaaatgctgagccgcttgatgtctaagtgttggtggtttttgctgttgctttgctgttccatgaaagcgctccctggctgcttggagggctgtgcttttccaggtcagtgccagctt

SEQ ID NO: 285168 - DNA, 120 bp, Artificial Sequence
  ENSG00000130396_62 (sequence is synthesized)
ggctgtcccaggccgtgcacagtgcccattgctatagctgggcccagtcctggccacgccggagcctcggcgggggcagctgggttgtcacggcagcacagtgcacatgcagagaggacc

SEQ ID NO: 285169 - DNA, 120 bp, Artificial Sequence
  ENSG00000130396_63 (sequence is synthesized)
aggccatgtttttcctgtgctgagaaactcttgggttatttaatttttccaatgtgttttcataactcatgattatttgaaatacacttgtgttagtaactgcttctataattaagtggt

SEQ ID NO: 285170 - DNA, 120 bp, Artificial Sequence
  ENSG00000130396_64 (sequence is synthesized)
cactgtaaaaaggcgaataacctatttttatatcagaatgtccaaaactcatgggtttgctttgttatagaaaaatgtgccattcatttgttgggtagaataaagttgtcttgtaattgt

SEQ ID NO: 285171 - DNA, 120 bp, Artificial Sequence
  ENSG00000130396_65 (sequence is synthesized)
tttgagggtaccatgaagtgaaatggatccttaggacttgaagatgtgatgcagatttgtttctttcttacactgaagattggtgtgatggcagagttttaaaatcgctgttaaatactg

SEQ ID NO: 285172 - DNA, 120 bp, Artificial Sequence
  ENSG00000130396_66 (sequence is synthesized)
atattcagaaattttcaagccataattcatatatatgtattttttcctcccaagccatgtctattacagttttgtctgtaagcagtggtgctttttaaaataaagaacacttatacccat

SEQ ID NO: 285173 - DNA, 120 bp, Artificial Sequence
  ENSG00000130396_67 (sequence is synthesized)
gcgaaacgcctcctacctcaaaacacaggtcctctcccccgactcgctgttcactgccaagtttgttgcatacaatgaggaggaggaggaggaggactgcagcctagcaggtcaggataa

SEQ ID NO: 285174 - DNA, 120 bp, Artificial Sequence
  ENSG00000130396_68 (sequence is synthesized)
gtactccagcacaagaaagtctcatggggaccttcttcctgcccctcttaaaccacggccacccccctgccagccacgcccggcctccgatggcgtctttctctccaactcattccagcc

SEQ ID NO: 285175 - DNA, 120 bp, Artificial Sequence
  ENSG00000130396_69 (sequence is synthesized)
agccaaagccaacagtactgctcacaaaaaaggccagcccctgccccctccaaaaaaatccagctcctaccatcccagccactgcaaaggaccaaactcttacccaggatctactggagc

SEQ ID NO: 285176 - DNA, 120 bp, Artificial Sequence
  ENSG00000130396_70 (sequence is synthesized)
agctgtcaagcagagaatagcttgaactattcagactattgttggcactgtttagtagtgaccacacgctcttctacccgggaaggaacatatgacgacatgctcctcccatgtcccctg

SEQ ID NO: 285177 - DNA, 120 bp, Artificial Sequence
  ENSG00000130396_71 (sequence is synthesized)
atggtgtctgttcccacaatatccttctagtctgcatcgtgaagtggcttaggccaaagcttcctgtgtgatgacgcacgtccgagactgttccatctcattcctcgcaaatttgagctc

SEQ ID NO: 285178 - DNA, 120 bp, Artificial Sequence
  ENSG00000130396_72 (sequence is synthesized)
ttctgatcaattctaaatatttgattaattttaattctgaaagaaaattttgaggatttaagcttaggggattttatttttataaataccagattattgttagacttaataaatcactgt

SEQ ID NO: 285179 - DNA, 120 bp, Artificial Sequence
  ENSG00000130396_73 (sequence is synthesized)
taaatttaaagatgacagttaccttggaaagttcactaatacttcgctccaaggcgtctgtaaaagaagatatctttattggagcaatgttcatgtgactgggaatgacagaagaatggg

SEQ ID NO: 285180 - DNA, 120 bp, Artificial Sequence
  ENSG00000130396_74 (sequence is synthesized)
agatgagtagggacccctcaagcacagctgtcactcagaaattttaaatttgaaaaagaaatcgattttcatctgtatgccgtcaaggaaggaattcagttacagggcatctgtaactta

SEQ ID NO: 285181 - DNA, 120 bp, Artificial Sequence
  ENSG00000130396_75 (sequence is synthesized)
aatattgtaagaataactcatatggaagttcaagctatttttatactataatagagttatttaattttaatttgttgaattattagttaccactgtcatttcttcagctatggatatgtg

SEQ ID NO: 285182 - DNA, 120 bp, Artificial Sequence
  ENSG00000130396_76 (sequence is synthesized)
gctgatgttggggagacggacctcagtgtgttttatattgtctggtgttaagatgataaattactttgtgattacaagcaaattttctatttgacaaagcccttggtggagtccaaatga

SEQ ID NO: 285183 - DNA, 120 bp, Artificial Sequence
  ENSG00000130396_77 (sequence is synthesized)
tttttctgtaccatattgttctcttacacatacgtatgttaggaaaataggcacactttcaaagagaatgttctcttacacatacgtatgttaggaaaatagacacattttcaaagagaa

SEQ ID NO: 285184 - DNA, 120 bp, Artificial Sequence
  ENSG00000130396_78 (sequence is synthesized)
tgttctcttacatatgttaggaaaataggcacactttcaaagagaggtataggggctttttactgccttcgaaatcacttttaataaaagttgtatgataaatcattaaaaatgcgagtg

SEQ ID NO: 285185 - DNA, 120 bp, Artificial Sequence
  ENSG00000130396_79 (sequence is synthesized)
taaatatttttttttacctctatcagggtttttatttgaaagtgtgctcttaccatttccttgtttgagtaagagagtgaatggttctgagtgtttaggaaggatttgcttgcttgcagc

SEQ ID NO: 285186 - DNA, 120 bp, Artificial Sequence
  ENSG00000130396_80 (sequence is synthesized)
agaagttctaggaaaagcaggcacctcccaaatatcttgaggacactggcagccttatggtgactaaatccacactttctttaaagagatgcagatgaattacttttctgttaatatata

SEQ ID NO: 285187 - DNA, 120 bp, Artificial Sequence
  ENSG00000130396_81 (sequence is synthesized)
gaaaaatacacaggagaacatgcagatacatgtaaatatctacatacagggatatttgtatgtgtggttgtgaaacccatacacaagtggatttggccatctttgggcagtgaggtcaaa

SEQ ID NO: 285188 - DNA, 120 bp, Artificial Sequence
  ENSG00000130396_82 (sequence is synthesized)
tgtgaatatgtgtaaaagtgcttttcagaactgcattactatgagaaaacatcaaaactgctgtagttttccatttctactgtatttcagttgcaacctatttttaataaactttgtatg

SEQ ID NO: 285189 - DNA, 120 bp, Artificial Sequence
  ENSG00000130396_83 (sequence is synthesized)
tatttaagtgtatttgctattgttttgaaagtgctgacaaagtttatatttgtaacatcagccttcctcgcccatctctttccatctgtctcttcttcattaaacacttactgagtatga

SEQ ID NO: 285190 - DNA, 120 bp, Artificial Sequence
  ENSG00000130396_84 (sequence is synthesized)
ttttactctgaattagcattgattataatttctaaatttgcagtgttttatcttttgatttttaatatactagtcaggtaaatcagttttaaattaataagtctgggcaaaatgaaatgt

SEQ ID NO: 285191 - DNA, 120 bp, Artificial Sequence
  ENSG00000130396_85 (sequence is synthesized)
tatttattctcagtatggatcaaacactttttaatgcagtatttaacatatactattttttaaattttaaaacagatcattgaaaatcaagttagtctgtatggttgtaaaaagctcact

SEQ ID NO: 285192 - DNA, 120 bp, Artificial Sequence
  ENSG00000130396_86 (sequence is synthesized)
gcaactgagacatgcagtactaaaaccctttttgactgtgcaacctttatcggcatttcataatttctgcttaatgcacttcagtgtggatatgaaatgacaaaagttctgtttcttctc

SEQ ID NO: 285193 - DNA, 120 bp, Artificial Sequence
  ENSG00000130396_87 (sequence is synthesized)
tttattatttatccttggttcctattctttggatctcatctgaggttgcctggcctgcacatgtggtcgggagaggatgtgatagatcagtacttgatactgagttgcatggtgtccaag

SEQ ID NO: 285194 - DNA, 120 bp, Artificial Sequence
  ENSG00000130396_88 (sequence is synthesized)
ccagtgactacaagtatcagggtggctgtgggtaaccatggatacatgtatgtatactgcacagactaccagataatgcacggtctacaatttggtgttatattatttgatatctccatt

SEQ ID NO: 285195 - DNA, 120 bp, Artificial Sequence
  ENSG00000130396_89 (sequence is synthesized)
tctccgctgattccatctataaattgtagctaactgaatccatatgtctatgtgcatgaatcctaagaaatagttgcagtggttatttacttcccattgctatgtatgcacccaaattat

SEQ ID NO: 285196 - DNA, 120 bp, Artificial Sequence
  ENSG00000130396_90 (sequence is synthesized)
tttgcaaatatctggtatctgtggtaaataccttggtgaaatgggaaggtactggtctatcttcagcagcttttcaagagcattcctttatatttttattacttttgtttattctctgtt

SEQ ID NO: 285197 - DNA, 120 bp, Artificial Sequence
  ENSG00000130396_91 (sequence is synthesized)
ataactaaaagaggatattttgatttcttcctaaaatgttaccaagcaactgttcttcatgttaatactaagattcttgatagttccatttaaaagccacaagaagtcattctggtttat

SEQ ID NO: 285198 - DNA, 120 bp, Artificial Sequence
  ENSG00000130396_92 (sequence is synthesized)
tcctcactccaagggaacacttactttgtgtagacaagaagatgagagtctttccttcaggatttctaaacacagagcaagaagattcaatgaaaaattgggctcagggcagtaattggg

SEQ ID NO: 285199 - DNA, 120 bp, Artificial Sequence
  ENSG00000130396_93 (sequence is synthesized)
attcaatgaaaaattgggctcagggcagtaattggggctggcatttattcttaagagttttctccctcaaaaggtgaaggagtgacattgcgtattcactctgtgtgtgtgtgtgtgtgt

SEQ ID NO: 285200 - DNA, 120 bp, Artificial Sequence
  ENSG00000130396_94 (sequence is synthesized)
agggagtagggagaaaatacaggatgaaattgaaaacagggactaacaacttttcactgaatgccagcaagctctctaaaattagttttctttggttgaacaaatttacaattcattgta

SEQ ID NO: 285201 - DNA, 120 bp, Artificial Sequence
  ENSG00000130396_95 (sequence is synthesized)
cttcatttcacagcattaaacatttactcgaggcagtttattctgtttgctctttcatcccccttcttatttacttttttcttgtgctctaaaacttttgtcaatctttaacaaaactgt

SEQ ID NO: 285202 - DNA, 120 bp, Artificial Sequence
  ENSG00000130396_96 (sequence is synthesized)
gctgttaccttttttaatgttaaaagaattttaacactgtcaactgtagtttgtgcagatgtatgtcagaaaaaaatgtacagtatgtgtcaaaatatatttgaatatcttgttgctgtt

SEQ ID NO: 285203 - DNA, 80 bp, Artificial Sequence
  ENSG00000130396_97 (sequence is synthesized)
gcgcggcgcggactgagccccaggcggaggccaagtcggaggacgcggcgcggccgcggaggcggaggcagccgcggagg

SEQ ID NO: 285204 - DNA, 120 bp, Artificial Sequence
  ENSG00000130396_98 (sequence is synthesized)
atccagcgcagaatgtggtgatcccggtcttgaaaaaccagctgtcttggttgctgttgaaaactgagagaagtagacggttgattttcagttcatgaagttgttgtggtcccggaaatg

SEQ ID NO: 285205 - DNA, 120 bp, Artificial Sequence
  ENSG00000130396_99 (sequence is synthesized)
gttgtttgaaaaagaattttaatgtgaaaatattgtactacttttgtggcctgtttaatccaatattcattgctgtcagtatttgctaaatagtttgagcatttattactgcagcctgta

SEQ ID NO: 285206 - DNA, 120 bp, Artificial Sequence
  ENSG00000130396_100 (sequence is synthesized)
ttacactgtcagatttttccagtgtgaatttttctaatgctacaattaatagaaatacattaacactgatttactgcattatgattttaacaatataacattgattgttacttggataca

SEQ ID NO: 285207 - DNA, 120 bp, Artificial Sequence
  ENSG00000130396_101 (sequence is synthesized)
tactcaggccaccaacagggatgaatttcaaactgatgaaactttgatacaatatgaggggtcttttaccttcctacttactcagtaaaggtatttttgtattctctgagcactgcatct

SEQ ID NO: 285208 - DNA, 120 bp, Artificial Sequence
  ENSG00000130396_102 (sequence is synthesized)
agtatagtcttgtcctcacaaaagctgatgggtgaagtgtaccttttcttcctttgaaacgtgtctcactgaagttcaccctctgcgtctcttctcctccttccctattccgcgtgttct

SEQ ID NO: 285209 - DNA, 120 bp, Artificial Sequence
  ENSG00000130396_103 (sequence is synthesized)
gcagtcgtcaacaagatggtgagcatgatggagggtgtcatccaggtacgttccagccggccagccatgctcctccagtgattgtggttgtaattgctaagccagtgaattcagcttctt

SEQ ID NO: 285210 - DNA, 120 bp, Artificial Sequence
  ENSG00000130396_104 (sequence is synthesized)
taaggcttctcatttggttacaagatttttttctaaaataaaagttatgtaaatattgtaggaaaatgtataactttaaagagttgaaaggaaatgcaagcttttttctattttgttttc

SEQ ID NO: 285211 - DNA, 120 bp, Artificial Sequence
  ENSG00000130396_105 (sequence is synthesized)
cctgtaaaacttcagcataagtgaagttaacttgtagtaatagttgtgagaaagtgctgagactgttgtgggcttttgtagaattttttctgtaaataatttgttgagatgaagttcata

SEQ ID NO: 285212 - DNA, 120 bp, Artificial Sequence
  ENSG00000130396_106 (sequence is synthesized)
taatattaaccattttgaagtgaacaattcagtcgcatttggtgcattcacagtgttgtgcagccaccacccctgtcggttccaaaacgtctccatcacctcagagcgatacccctcaag

SEQ ID NO: 285213 - DNA, 120 bp, Artificial Sequence
  ENSG00000130396_107 (sequence is synthesized)
tagttcctggggtttttctcttcccccgttccctggtaacgccttcttagactttttaaaaatggttctcaaaagtcacttgctcctgtgtaatgagcctagacgttggtagtaattggg

SEQ ID NO: 285214 - DNA, 120 bp, Artificial Sequence
  ENSG00000130396_108 (sequence is synthesized)
ctttttgatagcacatgtgtaggtgtaatggacattgtaacatacttctcacttaaaatgaaattctgtcataaacctgttttcaaaatttcagaagataaaggtattttgttggtagaa

SEQ ID NO: 285215 - DNA, 120 bp, Artificial Sequence
  ENSG00000130402_0 (sequence is synthesized)
gaagcagctgaagcggcggtagcggcggcggctcgggcagaggggcgggagctgaggcgggagcggacaggctggtgggcgagcgagaggcggcggaatggtggactaccacgcggcgaa

SEQ ID NO: 285216 - DNA, 120 bp, Artificial Sequence
  ENSG00000130402_1 (sequence is synthesized)
ccagtcgtaccagtacggccccagcagcgcgggcaatggcgctggcggcgggggcagcatgggcgactacatggcccaggaggacgactgggaccgggacctgctgctggacccggcctg

SEQ ID NO: 285217 - DNA, 120 bp, Artificial Sequence
  ENSG00000130402_2 (sequence is synthesized)
ggagaagcagcagcgcaagaccttcacggcatggtgcaactcccacctgcggaaggcaggcacacagatcgagaacattgatgaggacttccgagacgggctcaagctcatgctgctcct

SEQ ID NO: 285218 - DNA, 120 bp, Artificial Sequence
  ENSG00000130402_3 (sequence is synthesized)
ggaggtcatatcaggggagcggttacctaagccggagcgggggaagatgagagtgcacaaaatcaacaatgtgaacaaagcgctggactttattgccagcaaaggcgtcaagctggtctc

SEQ ID NO: 285219 - DNA, 120 bp, Artificial Sequence
  ENSG00000130402_4 (sequence is synthesized)
catcggggcagaagagattgtggacggcaacgcaaagatgaccctgggaatgatctggaccatcatccttaggttcgccatccaggacatctccgtggaagagacctcggccaaggaagg

SEQ ID NO: 285220 - DNA, 120 bp, Artificial Sequence
  ENSG00000130402_5 (sequence is synthesized)
gctccttctctggtgccagagaaagacagccccgtataagaacgtcaatgtgcagaacttccacatcagctggaaggatggtcttgccttcaatgccctgatccaccggcacagaccaga

SEQ ID NO: 285221 - DNA, 120 bp, Artificial Sequence
  ENSG00000130402_6 (sequence is synthesized)
gctgattgagtatgacaagctgaggaaggacgaccctgtcaccaacctgaacaatgccttcgaagtggctgagaaatacctcgacatccccaagatgctggatgcagaggacatcgtgaa

SEQ ID NO: 285222 - DNA, 120 bp, Artificial Sequence
  ENSG00000130402_7 (sequence is synthesized)
cacggcccggcccgacgagaaggccataatgacctatgtgtccagcttctaccatgccttttcaggagcgcagaaggctgaaactgccgccaaccggatctgtaaggtgctggctgtcaa

SEQ ID NO: 285223 - DNA, 120 bp, Artificial Sequence
  ENSG00000130402_8 (sequence is synthesized)
ccaagagaacgagcacctgatggaggactacgagaagctggccagcgacctcctggagtggatccggcgcaccatcccctggctggaggaccgtgtgccccaaaagactatccaggagat

SEQ ID NO: 285224 - DNA, 120 bp, Artificial Sequence
  ENSG00000130402_9 (sequence is synthesized)
gcagcagaagctggaggacttccgcgactaccggcgtgtgcacaagccgcccaaggtgcaggagaagtgccagctggagatcaacttcaacacgctgcagaccaagctgcgcctcagcaa

SEQ ID NO: 285225 - DNA, 120 bp, Artificial Sequence
  ENSG00000130402_10 (sequence is synthesized)
ccggcccgccttcatgccctccgagggcaagatggtctcggacatcaacaatggctggcagcacttggagcaggctgagaagggctacgaggagtggctgctgaatgagatccgcaggct

SEQ ID NO: 285226 - DNA, 120 bp, Artificial Sequence
  ENSG00000130402_11 (sequence is synthesized)
ggagcggctcgaccacctggcagagaagttccggcagaaggcctccatccacgaggcctggactgacgggaaggaagccatgctgaagcaccgggactacgagacggccacactatcgga

SEQ ID NO: 285227 - DNA, 120 bp, Artificial Sequence
  ENSG00000130402_12 (sequence is synthesized)
catcaaagccctcattcgcaagcacgaggccttcgagagcgacctggctgcgcaccaggaccgcgtggagcagatcgccgccattgcccaggagctcaacgagctggattactacgactc

SEQ ID NO: 285228 - DNA, 120 bp, Artificial Sequence
  ENSG00000130402_13 (sequence is synthesized)
ccacaatgtcaacacccggtgccagaagatctgtgaccagtgggacgccctcggctctctgacacatagtcgcagggaagccctggagaaaacagagaagcagctggaggccatcgacca

SEQ ID NO: 285229 - DNA, 120 bp, Artificial Sequence
  ENSG00000130402_14 (sequence is synthesized)
gctgcacctggaatacgccaagcgcgcggcccccttcaacaactggatggagagcgccatggaggacctccaggacatgttcatcgtccataccatcgaggagattgagggcctgatctc

SEQ ID NO: 285230 - DNA, 120 bp, Artificial Sequence
  ENSG00000130402_15 (sequence is synthesized)
agcccatgaccagttcaagtccaccctgccggacgccgatagggagcgcgaggccatcctggccatccacaaggaggcccagaggatcgctgagagcaaccacatcaagctgtcgggcag

SEQ ID NO: 285231 - DNA, 120 bp, Artificial Sequence
  ENSG00000130402_16 (sequence is synthesized)
caacccctacaccaccgtcaccccgcaaatcatcaactccaagtgggagaaggtgcagcagctggtgccaaaacgggaccatgccctcctggaggagcagagcaagcagcagtccaacga

SEQ ID NO: 285232 - DNA, 120 bp, Artificial Sequence
  ENSG00000130402_17 (sequence is synthesized)
gcacctgcgccgccagttcgccagccaggccaatgttgtggggccctggatccagaccaagatggaggagatcgggcgcatctccattgagatgaacgggaccctggaggaccagctgag

SEQ ID NO: 285233 - DNA, 120 bp, Artificial Sequence
  ENSG00000130402_18 (sequence is synthesized)
ccacctgaagcagtatgaacgcagcatcgtggactacaagcccaacctggacctgctggagcagcagcaccagctcatccaggaggccctcatcttcgacaacaagcacaccaactatac

SEQ ID NO: 285234 - DNA, 120 bp, Artificial Sequence
  ENSG00000130402_19 (sequence is synthesized)
catggagcacatccgcgtgggctgggagcagctgctcaccaccattgcccgcaccatcaacgaggtggagaaccagatcctcacccgcgacgccaagggcatcagccaggagcagatgca

SEQ ID NO: 285235 - DNA, 120 bp, Artificial Sequence
  ENSG00000130402_20 (sequence is synthesized)
gcctgcctcatcagcctgggctacgacgtggagaacgaccggcagggtgaggccgagttcaaccgcatcatgagcctggtcgaccccaaccatagcggccttgtgaccttccaagccttc

SEQ ID NO: 285236 - DNA, 120 bp, Artificial Sequence
  ENSG00000130402_21 (sequence is synthesized)
atcgacttcatgtcgcgggagaccaccgacacggacacggctgaccaggtcatcgcttccttcaaggtcttagcaggggacaagaacttcatcacagctgaggagctgcggagagagctg

SEQ ID NO: 285237 - DNA, 120 bp, Artificial Sequence
  ENSG00000130402_22 (sequence is synthesized)
ccccccgaccaggccgagtactgcatcgcccgcatggcgccataccagggccctgacgccgtgcccggtgccctcgactacaagtccttctccacggccttgtatggcgagagcgacctg

SEQ ID NO: 285238 - DNA, 120 bp, Artificial Sequence
  ENSG00000130402_23 (sequence is synthesized)
tgaggccccagagacctgacccaacacccccgacggcctccaggaggggcctgggcagccccacagtcccattcctccactctgtatctatgcaaagcactctctgcagtcctccggggt

SEQ ID NO: 285239 - DNA, 120 bp, Artificial Sequence
  ENSG00000130402_24 (sequence is synthesized)
gggtgggtgggcagggaggggctggggcaggctctctcctctctctctttgtgggttggccaggaggttcccccgaccaggttggggagacttggggccagcgcttctggtctggtaaat

SEQ ID NO: 285240 - DNA, 120 bp, Artificial Sequence
  ENSG00000130402_25 (sequence is synthesized)
atgtatgatgtgttgtgcttttttaaccaaggaggggccagtggattcccacagcacaaccggtcccttccatgccctgggatgcctcaccacacccaggtctcttcctttgctctgagg

SEQ ID NO: 285241 - DNA, 120 bp, Artificial Sequence
  ENSG00000130402_26 (sequence is synthesized)
tcccttcaaggcctccccaatccaggccaaagccccatgtgccttgtccaggaactgcctgggccatgcgaggggccagcagagggcgccaccaccacctgacggctggggacccaccca

SEQ ID NO: 285242 - DNA, 120 bp, Artificial Sequence
  ENSG00000130402_27 (sequence is synthesized)
gcccctctcccctctctgctccagactcacttgccattgccaggagatggccccaacaagcaccccgcttttgcagcagaggagctgagttggcagaccgggcccccctgaaccgcaccc

SEQ ID NO: 285243 - DNA, 120 bp, Artificial Sequence
  ENSG00000130402_28 (sequence is synthesized)
gttggcagaccgggcccccctgaaccgcaccccatcccaccagccccggccttgctttgtctggcctcacgtgtctcagattttctaagaaccaaaaaaaaaaaaggaaaaaaaacacaa

SEQ ID NO: 285244 - DNA, 120 bp, Artificial Sequence
  ENSG00000130402_29 (sequence is synthesized)
aaaacaaaaaaactataaaaaagaaagaattaaaaactttcagagaattactatttactttattaacttacggatttattatataaatatatattcacctagcaacatatctctgccgtc

SEQ ID NO: 285245 - DNA, 120 bp, Artificial Sequence
  ENSG00000130402_30 (sequence is synthesized)
tctcctgctctcataatgaagacatagccgattctctgcccgggccccttgctgatgctcctccgggtctgcgtcgggcgtgggtctctggggaccctccagaggtggaggtgggctgat

SEQ ID NO: 285246 - DNA, 120 bp, Artificial Sequence
  ENSG00000130402_31 (sequence is synthesized)
ggcctggctgcctggtggttgatggttttgctccccctaccttttttttttgagtttattctgattgattttttttcttggtttctggataaaccaccctctggggacaggataataaaa

SEQ ID NO: 285247 - DNA, 120 bp, Artificial Sequence
  ENSG00000130402_32 (sequence is synthesized)
catgtaatatttttaagaaggattcctgcagcatcatctttttttatttctcctgtgtctgtcctccaccttctaggagagccagggcagagctagcactgtcttaagctgtcaacgtgg

SEQ ID NO: 285248 - DNA, 120 bp, Artificial Sequence
  ENSG00000130402_33 (sequence is synthesized)
actagctcgtgtcatctgctcgagaagggctgtcgctgttcttgtttctgagtgaggagtacgcaggccagagtggtcacccggccgtgagcagtgagggccagagactagccccagaca

SEQ ID NO: 285249 - DNA, 120 bp, Artificial Sequence
  ENSG00000130402_34 (sequence is synthesized)
ggtggatgccagagagagtggcacccatgccaggcaaggcctagggaggtggtcttgctcagcaaccctgccctgagcagcaggtgcgcccatccggagatcctaggagaaggtggccac

SEQ ID NO: 285250 - DNA, 120 bp, Artificial Sequence
  ENSG00000130402_35 (sequence is synthesized)
ctccatccactaaggaagagaaggaagacagtggcttgaggcagggagctcgcaggacagagcctgagccaccctgtccctcccacctggctcacctgtctgtgggtcaggcagatgacc

SEQ ID NO: 285251 - DNA, 120 bp, Artificial Sequence
  ENSG00000130402_36 (sequence is synthesized)
ccctcacccccatccaggtgctggctgcagtggcctgtgcagagaggggcagggtgagtgcccaccagtccccgtaccccttccccccatgccccaccatgccggggtggtactcacaga

SEQ ID NO: 285252 - DNA, 120 bp, Artificial Sequence
  ENSG00000130402_37 (sequence is synthesized)
agatgcaggtgaggtgggccacacaggacacgaaccgctcgaagtccacacgcagacggctatcccggtagcggctggtgagggtctgggtcagctggttgttcaggtggaagcctaggg

SEQ ID NO: 285253 - DNA, 120 bp, Artificial Sequence
  ENSG00000130402_38 (sequence is synthesized)
ggaggctgcttctgagcccagtggcccacagggaacccaccttggcattgcatccccaccccacctcctcagggaggacatgaatgccacagggtgtcacaccccaactctgccccatcc

SEQ ID NO: 285254 - DNA, 120 bp, Artificial Sequence
  ENSG00000130402_39 (sequence is synthesized)
cggcagggtgagtacaggctgatcccttcaatcctctgggcctgtttcctcatccatcaaacggactaagacagccccgaccccatagggtgtgtgaagacagaacgctcaggacagcgt

SEQ ID NO: 285255 - DNA, 120 bp, Artificial Sequence
  ENSG00000130402_40 (sequence is synthesized)
ctgacacgtgactcgatgtgtgggtactgttactccttaaatcctgtggggctttctccttgccagtgggcactggaggatatttctgtgcagcaaaaaatatagtcaatcccatatgga

SEQ ID NO: 285256 - DNA, 120 bp, Artificial Sequence
  ENSG00000130402_41 (sequence is synthesized)
ttccccctgccctctgcatgtgaccccgatccctcatcctggtctccacgccgcccctcccgcacacctgccttcggatggccccggcaggatcatggcggggcgctggggcccgaggag

SEQ ID NO: 285257 - DNA, 120 bp, Artificial Sequence
  ENSG00000130402_42 (sequence is synthesized)
acgccgaggcccagcctgcctcaaggcctggaatagggtccccagtgccccaactgcacctccttccagaagccagggaagggccttatgggatgaggccttttgcccatcctgtctcag

SEQ ID NO: 285258 - DNA, 120 bp, Artificial Sequence
  ENSG00000130402_43 (sequence is synthesized)
cttgcctccctgcccacatctccctggaccccttcccttttacctggtctcttggggccgctgtctccctgctccccgccactgtcctgtctgcctgctgtgcacatggggcggcccctc

SEQ ID NO: 285259 - DNA, 120 bp, Artificial Sequence
  ENSG00000130402_44 (sequence is synthesized)
ttgcctactctgggcccggcctcctctgctatgcctgcgtcctcggagcagaagcagacaggcagcatggactccgatgacttcagggctctgcttatctccacaggatacagcctgggt

SEQ ID NO: 285260 - DNA, 120 bp, Artificial Sequence
  ENSG00000130402_45 (sequence is synthesized)
ggcgtattcagggaccagctagagaggagtgagtgacacgcagtgatgggtcaggcccaacaagacccttgtggtgtgggataagaaattcatgttccactctgagggccatgggagccc

SEQ ID NO: 285261 - DNA, 120 bp, Artificial Sequence
  ENSG00000130402_46 (sequence is synthesized)
cttagggtcttactccgtggtgggagctgctcactcacattttcagacagatcatttagcaactgactcctccaacccaaaacaaagctgcctttatagggcccacagctagtctgtctc

SEQ ID NO: 285262 - DNA, 120 bp, Artificial Sequence
  ENSG00000130402_47 (sequence is synthesized)
gcaaggcatgtccacgcaggcctggggctggcttccagtccagagcaagtgctcttcctcctgcatgagcctcaggccggcccggccgccctccctgcgtctttcactctctcctgcctc

SEQ ID NO: 285263 - DNA, 120 bp, Artificial Sequence
  ENSG00000130402_48 (sequence is synthesized)
tctctctctttctctctctctctgtgcagatattgtgggcactctgaggccagatgagaaggccatcatgacttacgtgtcctgcttctaccacgctttctcgggggctcagaaggctga

SEQ ID NO: 285264 - DNA, 120 bp, Artificial Sequence
  ENSG00000130413_0 (sequence is synthesized)
gccggccggctggtaaccccccagcggagggaccgggccgagcccgcggacccctccgagtgtctcctggggcccagccgttggtaccccatttcccccgggtccggtatttggggtggt

SEQ ID NO: 285265 - DNA, 120 bp, Artificial Sequence
  ENSG00000130413_1 (sequence is synthesized)
ctctgtctgccccggttcatctccaccgtctcaccttcaccccatcttgggacgtgaaactttttgaaagtttagaagcgaacttactgtggggaccttcctctggggttagttctctgg

SEQ ID NO: 285266 - DNA, 120 bp, Artificial Sequence
  ENSG00000130413_2 (sequence is synthesized)
tgccaccttcagtgatctgtgtggcagctctgctgctcacttctggctttactgggttttggtatttaactgttgcttacgcacactggaaattttcacctgcagtttttcttctgccta

SEQ ID NO: 285267 - DNA, 120 bp, Artificial Sequence
  ENSG00000130413_3 (sequence is synthesized)
agctctcacgtgtgaatatgtgtctagtgcatccttaacctgaggacttcaccagttcgaaattacagttttcaccatcaactaccttatcctttttggcctggttttcttcctcaaaca

SEQ ID NO: 285268 - DNA, 120 bp, Artificial Sequence
  ENSG00000130413_4 (sequence is synthesized)
gtggaaacatttttaaagttgcttttgttgcagagttaaacaaatggctgatagtggcttagataaaaaatccacaaaatgccccgactgttcatctgcttctcagaaagatgtactttg

SEQ ID NO: 285269 - DNA, 120 bp, Artificial Sequence
  ENSG00000130413_5 (sequence is synthesized)
tgtatgttccagcaaaacaagggttcctccagttttggtggtggaaatgtcacagacatcaagcattggtagtgcagaatctttaatttcactggagagaaaaaaagaaaaaaatatcaa

SEQ ID NO: 285270 - DNA, 120 bp, Artificial Sequence
  ENSG00000130413_6 (sequence is synthesized)
cagagatataacctccaggaaagatttgccctcaagaacctcaaatgtagagagaaaagcatctcagcaacaatggggtcggggcaactttacagaaggaaaagttcctcacataaggat

SEQ ID NO: 285271 - DNA, 120 bp, Artificial Sequence
  ENSG00000130413_7 (sequence is synthesized)
tgagaatggagctgctattgaggaaatctatacctttggaagaatattgggaaaagggagctttggaatagtcattgaagcgacagacaaggaaacagaaacgaagtgggcaattaaaaa

SEQ ID NO: 285272 - DNA, 120 bp, Artificial Sequence
  ENSG00000130413_8 (sequence is synthesized)
agtgaacaaagaaaaggctggaagctctgctgtgaagttacttgaacgagaggtgaacattctgaaaagtgtaaaacatgaacacatcatacatctggaacaagtatttgaaacgccaaa

SEQ ID NO: 285273 - DNA, 120 bp, Artificial Sequence
  ENSG00000130413_9 (sequence is synthesized)
gaaaatgtaccttgtgatggagctttgtgaggatggagaactcaaagaaattctggataggaaagggcatttctcagagaatgagacaaggtggatcattcaaagtctcgcatcagctat

SEQ ID NO: 285274 - DNA, 120 bp, Artificial Sequence
  ENSG00000130413_10 (sequence is synthesized)
agcatatcttcacaataatgatattgtacatagagatctgaaactggaaaatataatggttaaaagcagtcttattgatgataacaatgaaataaacttaaacataaaggtgactgattt

SEQ ID NO: 285275 - DNA, 120 bp, Artificial Sequence
  ENSG00000130413_11 (sequence is synthesized)
tatatggcccctgaagttatcagtgcccacgactatagccagcagtgtgacatttggagcataggcgtcgtaatgtacatgttattacgtggagaaccaccctttttggcaagctcagaa

SEQ ID NO: 285276 - DNA, 120 bp, Artificial Sequence
  ENSG00000130413_12 (sequence is synthesized)
gagaagctttttgagttaataagaaaaggagaactacattttgaaaatgcagtctggaattccataagtgactgtgctaaaagtgttttgaaacaacttatgaaagtagatcctgctcac

SEQ ID NO: 285277 - DNA, 120 bp, Artificial Sequence
  ENSG00000130413_13 (sequence is synthesized)
agaatcacagctaaggaactactagataaccagtggttaacaggcaataaactttcttcggtgagaccaaccaatgtattagagatgatgaaggaatggaaaaataacccagaaagtgtt

SEQ ID NO: 285278 - DNA, 120 bp, Artificial Sequence
  ENSG00000130413_14 (sequence is synthesized)
gaggaaaacacaacagaagagaagaataagccgtccactgaagaaaagttgaaaagttaccaaccctggggaaatgtccctgatgccaattacacttcagatgaagaggaggaaaaacag

SEQ ID NO: 285279 - DNA, 120 bp, Artificial Sequence
  ENSG00000130413_15 (sequence is synthesized)
tctactgcttatgaaaagcaatttcctgcaaccagtaaggacaactttgatatgtgcagttcaagtttcacatctagcaaactccttccagctgaaatcaagggagaaatggagaaaacc

SEQ ID NO: 285280 - DNA, 120 bp, Artificial Sequence
  ENSG00000130413_16 (sequence is synthesized)
cctgtgactccaagccaaggaacagcaaccaagtaccctgctaaatccggcgccctgtccagaaccaaaaagaaactctaaggttccctccagtgttggacagtacaaaaacaaagctgc

SEQ ID NO: 285281 - DNA, 120 bp, Artificial Sequence
  ENSG00000130413_17 (sequence is synthesized)
tcttgttagcactttgatgagggggtaggaggggaagaagacagccctatgctgagcttgtagccttttagctccacagagccccgccatgtgtttgcaccagcttaaaattgaagctgc

SEQ ID NO: 285282 - DNA, 120 bp, Artificial Sequence
  ENSG00000130413_18 (sequence is synthesized)
ttatctccaaagcagcataagctgcacatggcattaaaggacagccaccagtaggcttggcagtgggctgcagtggaaatcaactcaagatgtacacgaaggttttttaggggggcagat

SEQ ID NO: 285283 - DNA, 120 bp, Artificial Sequence
  ENSG00000130413_19 (sequence is synthesized)
accttcaatttaaggctgtgggcacacttgctcatttttacttcaaattcttatgtttaggcacagctatttataggggaaaacaagaggccaaatatagtaatggaggtgccaaataat

SEQ ID NO: 285284 - DNA, 120 bp, Artificial Sequence
  ENSG00000130413_20 (sequence is synthesized)
tatgtgcactttgcactagaagactttgttagaaaattactaataaacttgccatacgtattacagcagaagtgcttcagtcattcacatgtgttcgtgagattttaggttgctatagat

SEQ ID NO: 285285 - DNA, 120 bp, Artificial Sequence
  ENSG00000130413_21 (sequence is synthesized)
tgtttaagacagcttattttaaatgtagaaaaataggagattttgtaactgcttgccattaacttgctgctaaattcccaatgtattgattaaatcaataaaaaacagatgttactcagc

SEQ ID NO: 285286 - DNA, 120 bp, Artificial Sequence
  ENSG00000130413_22 (sequence is synthesized)
atgtactcccaattacttctggaagtttctcaaagtactcctttatatgtactgcagagtgtatttttcttcctcctcaactgagatctttccaacttgccaccatgcagctgccaatgg

SEQ ID NO: 285287 - DNA, 120 bp, Artificial Sequence
  ENSG00000130413_23 (sequence is synthesized)
tcctagttaagtaaaatgctgccatacctattttagactcagggaaaaatagcacccactcatttttatttttgctcaatataaaaatgaggatacttatgaggatacttaaacttttag

SEQ ID NO: 285288 - DNA, 120 bp, Artificial Sequence
  ENSG00000130413_24 (sequence is synthesized)
gattagctagttttctaaaaatcgaattattcactcctttgtaaagtatgtaataggaatttgctctaataatcaatagattaaggtttaaaatttgaaaccatagtaatgtatgtttaa

SEQ ID NO: 285289 - DNA, 120 bp, Artificial Sequence
  ENSG00000130413_25 (sequence is synthesized)
caccaatattttaagcctttttaaaaaccacaacccacattaagaaatacatttcatactgtgatcaagtacacacgcacacacacactctatacatatatgtctgtccaattaaaagtt

SEQ ID NO: 285290 - DNA, 120 bp, Artificial Sequence
  ENSG00000130413_26 (sequence is synthesized)
tcacagaaatttccaaggaggtatgctaaatattatctctttgattctactttatttttaaaaagtggtatcaacccacaaaatggatttcataacccactacgcagtttgataagatgc

SEQ ID NO: 285291 - DNA, 120 bp, Artificial Sequence
  ENSG00000130413_27 (sequence is synthesized)
tgttttagaccatgcttttcaccagttttgtggtcctattttgtccttttcatgtctatacaggatgcttctagtgctagttgctagcttttctctgatttccaggatggtaataggtta

SEQ ID NO: 285292 - DNA, 120 bp, Artificial Sequence
  ENSG00000130413_28 (sequence is synthesized)
agaattccgggctcagcgacagcctgcgccgagtgtgcgcacctgtcggagacccgccagtccgccggccgcgatggggagccagataaacgttacataactagaaagtggcagagcaaa

SEQ ID NO: 285293 - DNA, 120 bp, Artificial Sequence
  ENSG00000130413_29 (sequence is synthesized)
gtgactgattttggcttagcggtgaagaagcaaagtaggagtgaagccatgctgcaggccacatgtgggactcctatctatatggattacgtggagaaccaccctttttggcaagctcag

SEQ ID NO: 285294 - DNA, 120 bp, Artificial Sequence
  ENSG00000130413_30 (sequence is synthesized)
ggcttggagaaggggctttgcacccgccgccgctgtttgtcctcgcgcggcccccgtccactgccctgcggttgctctgcgggctgaaaagtttctcccggtgcagaattccgggctcag

SEQ ID NO: 285295 - DNA, 120 bp, Artificial Sequence
  ENSG00000130413_31 (sequence is synthesized)
cgacagcctgcgccgagtgtgcgcacctgtcggagacccgccagtccgccggccgcggtgactgattttggcttagcggtgaagaagcaaagtaggagtgaagccatgctgcaggccaca

SEQ ID NO: 285296 - DNA, 64 bp, Artificial Sequence
  ENSG00000130413_32 (sequence is synthesized)
gcctcctgggttcaagtcgactaaaggcatgcaccaccatgcccagcaattttttgtattttta

SEQ ID NO: 285297 - DNA, 86 bp, Artificial Sequence
  ENSG00000130413_33 (sequence is synthesized)
gactaaaggcatgcaccaccatgcccagcaattttttgtatttttagtagacacagaatttcaccatattggccaggatggtctcg

SEQ ID NO: 285298 - DNA, 81 bp, Artificial Sequence
  ENSG00000130413_34 (sequence is synthesized)
taatattcttaaaagatcactctgactattggggtgggggggagtggcttggaaatagggaattagatagatgttgaagta

SEQ ID NO: 285299 - DNA, 120 bp, Artificial Sequence
  ENSG00000130413_35 (sequence is synthesized)
tctcagcacatccggccttctggctcatctcctccctgcatctcactacgcccctccccactccagggcctgaagttaaatcattttggaaagtgatacaggagaggactctgctatgaa

SEQ ID NO: 285300 - DNA, 120 bp, Artificial Sequence
  ENSG00000130413_36 (sequence is synthesized)
acacaggagggatgggtcggcagagtttgtaagtttggatgggtaataacttaacccaggggattgttggtggaggaacgagggagtcctgtagctagagataggcagaagcagacagga

SEQ ID NO: 285301 - DNA, 120 bp, Artificial Sequence
  ENSG00000130413_37 (sequence is synthesized)
tatttgggttctaggtaagcaaggtgcatctaagacctaagaagtcttcagaggcagcagagacgaacaaatgaacgtgaaggcagggccactacttctcagcacatccggccttctggc

SEQ ID NO: 285302 - DNA, 120 bp, Artificial Sequence
  ENSG00000130413_38 (sequence is synthesized)
gaggttggaacagtttggagggctcagaacaagacaggaaaatgtgggacagtttggagctccctagagacttgttgaatgtctttgaacaaaatgctgataatgatatggatgatgaaa

SEQ ID NO: 285303 - DNA, 76 bp, Artificial Sequence
  ENSG00000130413_39 (sequence is synthesized)
tccctagagacttgttgaatgtctttgaacaaaatgctgataatgatatggatgatgaaattcaggctgaggtgct

SEQ ID NO: 285304 - DNA, 74 bp, Artificial Sequence
  ENSG00000130413_40 (sequence is synthesized)
tacccagagtactaggaggaaaaagtggtttcgtgggctgggcccaggattctcatgctgtgtgcagtctagag

SEQ ID NO: 285305 - DNA, 120 bp, Artificial Sequence
  ENSG00000130413_41 (sequence is synthesized)
gggctgggcccaggattctcatgctgtgtgcagtctagagacttggtgccctgcatcctagccactccagccatggctgaaagggcccaacatagagctcgggccatggcctcagagggt

SEQ ID NO: 285306 - DNA, 120 bp, Artificial Sequence
  ENSG00000130413_42 (sequence is synthesized)
gcaagcctcaagccttggctgctttaatgtggtgttgagtctgcgagtgcacagaagtgaagaattagggtttgggaacctccacatagatttcagaagatatatggaaacgcctggatg

SEQ ID NO: 285307 - DNA, 120 bp, Artificial Sequence
  ENSG00000130413_43 (sequence is synthesized)
aacgcctggatgcgcaggcagtagtttgctgcaggggcaggatcttcagggagaacctcttctagggcagtgcagaagggaaatatggggtgggagcccccacacagagtccctactggg

SEQ ID NO: 285308 - DNA, 120 bp, Artificial Sequence
  ENSG00000130413_44 (sequence is synthesized)
gagaagagggccaccattctccagaccctagaatagtagatccaccgacagcttgcaccatgcacctggaaaggccacagacacttaatgtcagcctgtgaaagcagccaggagggaggc

SEQ ID NO: 285309 - DNA, 78 bp, Artificial Sequence
  ENSG00000130413_45 (sequence is synthesized)
tgggcctgtagcctttttgttttggccaatttctcccatttgtaatggctatatttacccaatgcctatacccccatt

SEQ ID NO: 285310 - DNA, 64 bp, Artificial Sequence
  ENSG00000130413_46 (sequence is synthesized)
gggctcataggcagaagggacttaccttgtctcagatgtggacttttgagttaatgctgaaatg

SEQ ID NO: 285311 - DNA, 87 bp, Artificial Sequence
  ENSG00000130413_47 (sequence is synthesized)
ggaaggcatgattggttttgaaatgtgaacatatgtgatttgggaagggccagagttggaattcaccttgtagctcccataattccc

SEQ ID NO: 285312 - DNA, 87 bp, Artificial Sequence
  ENSG00000130413_48 (sequence is synthesized)
caccttgtaccactgggagatgattgaatcagaagggtgggtcttttccatgttgttctaatgatagtgaatgggtctcacgagatc

SEQ ID NO: 285313 - DNA, 120 bp, Artificial Sequence
  ENSG00000130413_49 (sequence is synthesized)
ctgtgtacaagccctctctttgcctgcttccatccatgtaagatgtgacatgctcctccttgccttctgacatgattgtgaagcttccccagtcatgtggaactgtaaatccaataaacc

SEQ ID NO: 285314 - DNA, 120 bp, Artificial Sequence
  ENSG00000130413_50 (sequence is synthesized)
tcagcagcgtgaaaacggactaatacacatggtgaatgtgaaagtgatcacacatacagagagagagagagtggcattttgagagtggcatttctatggaaggctttgactagctgaccc

SEQ ID NO: 285315 - DNA, 120 bp, Artificial Sequence
  ENSG00000130413_51 (sequence is synthesized)
gagagtggcatttctatggaaggctttgactagctgacccaaccagggcattacctagtggcattagttcagctgctctcccatgttctggttcctatgcacgatgggtccagaaactct

SEQ ID NO: 285316 - DNA, 120 bp, Artificial Sequence
  ENSG00000130413_52 (sequence is synthesized)
tgttaattccctggagttgatttggatcagggagactgactcccccaaaaccaaattgataagaaatgaaggtgtaaatgagtttagctgtttattatttacaatgcaaaccaaaatggt

SEQ ID NO: 285317 - DNA, 120 bp, Artificial Sequence
  ENSG00000130413_53 (sequence is synthesized)
gatgttggcaaaaccaatgtattctttctttataagcagaagttaaatgataagaggatggattcttggtttggatgatggttttatgggtagtggttatttttttctcagtgctgatct

SEQ ID NO: 285318 - DNA, 120 bp, Artificial Sequence
  ENSG00000130413_54 (sequence is synthesized)
tagttactatgtgtcgattttgtagtatagctctcagaaatttgggatgttttggggtgaatgtattttatatctacacacacttatgtgtgtgtatatatataaatcatttctcctttt

SEQ ID NO: 285319 - DNA, 120 bp, Artificial Sequence
  ENSG00000130413_55 (sequence is synthesized)
tcttatgaagatatttcattaatatattatagtttgaaagagattcatttttatacttttgagtttttccacatttcaccattaggatttttatggttttcctccaaaggacacttaata

SEQ ID NO: 285320 - DNA, 120 bp, Artificial Sequence
  ENSG00000130413_56 (sequence is synthesized)
aaattcatcaacgcttattttggttaattaagatgtgtttattaatattgaagcaaatatatagtgtcttctatttgattttaacttggagcagaatctcttttcccttgggtgagtatc

SEQ ID NO: 285321 - DNA, 120 bp, Artificial Sequence
  ENSG00000130413_57 (sequence is synthesized)
ggaccaacttgcttccagattgcttacacctggggagacaataccaccatgaagatgacagataacccacgatgaagtgctaagttgtttgctatggtagtagctggaattcagagggga

SEQ ID NO: 285322 - DNA, 120 bp, Artificial Sequence
  ENSG00000130414_0 (sequence is synthesized)
gcgtccccttgggtccttgatcctgagctgaccgggtagccatggccttgcggctcctgaagctggcagcgacgtccgcgtccgcccgggtcgtggcggcgggcgcccagcgcgtgagag

SEQ ID NO: 285323 - DNA, 120 bp, Artificial Sequence
  ENSG00000130414_1 (sequence is synthesized)
gaattcatagcagtgtgcagtgcaaactgcgctatggaatgtggcatttcctacttggggataaagcaagcaaaagactgacagaacgcagcagagtgataactgtagatggcaatatat

SEQ ID NO: 285324 - DNA, 120 bp, Artificial Sequence
  ENSG00000130414_2 (sequence is synthesized)
gtactggaaaaggcaaacttgcaaaagaaatagcagagaaactaggcttcaagcactttcctgaagcggggattcattatccagacagtaccacaggagatgggaagcccctcgccaccg

SEQ ID NO: 285325 - DNA, 120 bp, Artificial Sequence
  ENSG00000130414_3 (sequence is synthesized)
actataatggcaactgtagtttggagaaattttacgatgatccgagaagcaatgatggcaacagttaccgcctgcagtcctggttgtacagcagtcgcctgctgcagtactcagatgcct

SEQ ID NO: 285326 - DNA, 120 bp, Artificial Sequence
  ENSG00000130414_4 (sequence is synthesized)
tggagcacttgctgaccacaggacaaggtgttgtgttggagcgctccatcttcagtgactttgtgttcctggaggcgatgtacaaccagggattcatccgaaagcagtgtgtggaccact

SEQ ID NO: 285327 - DNA, 120 bp, Artificial Sequence
  ENSG00000130414_5 (sequence is synthesized)
acaacgaggtgaagagcgtcaccatctgcgattacctgcccccccacctggtgatttacatcgatgtgcccgttccagaggtccagaggcggattcagaagaaaggagatccacatgaaa

SEQ ID NO: 285328 - DNA, 120 bp, Artificial Sequence
  ENSG00000130414_6 (sequence is synthesized)
tgaagatcacctctgcctatctacaggacattgagaatgcctataagaaaacctttctccctgagatgagtgaaaaatgtgaggttttacaatattctgcaagggaagctcaagattcaa

SEQ ID NO: 285329 - DNA, 120 bp, Artificial Sequence
  ENSG00000130414_7 (sequence is synthesized)
aaaaggtggtagaggacattgaatacctgaagttcgataaagggccgtggctcaagcaggacaatcgcactttataccacctgcgattactggttcaggataagtttgaggtgctgaatt

SEQ ID NO: 285330 - DNA, 120 bp, Artificial Sequence
  ENSG00000130414_8 (sequence is synthesized)
acacaagcattcctatctttctcccggaagtcaccattggagctcatcagactgaccgtgtcttacatcagttcagagagctgccgggccgcaagtacagccctgggtacaacaccgagg

SEQ ID NO: 285331 - DNA, 120 bp, Artificial Sequence
  ENSG00000130414_9 (sequence is synthesized)
tgggagacaagtggatctggctgaagtgaacgggccgccttctgctccagctgcatcacagtgatggccaagctgcatcagccgcactctcctggacgccatatagctttaagatcgggg

SEQ ID NO: 285332 - DNA, 120 bp, Artificial Sequence
  ENSG00000130414_10 (sequence is synthesized)
gagggtaaataatgcaaaaattgcacagtggaagaaggggtctcacaaaaagcaatccatcctgtagtataggtaatggagttgggggaagcagcttccattctggatgtttggaaccct

SEQ ID NO: 285333 - DNA, 120 bp, Artificial Sequence
  ENSG00000130414_11 (sequence is synthesized)
ttagctttgttttggaatggcccaccattctcactggaaaacagtggtctgctgtgaaaggccagctctcggcagcccctgtggtttcagcgctgccgctctgtgtcattcaggttgtgc

SEQ ID NO: 285334 - DNA, 120 bp, Artificial Sequence
  ENSG00000130414_12 (sequence is synthesized)
acattgtttttcttctgacttccagaaataaaagtgtttccatgggaatttccccatcgtacgtctatgtgcgtgcgggcacgtcgaaactgcacacgtgcacacacgctgctctgggcc

SEQ ID NO: 285335 - DNA, 120 bp, Artificial Sequence
  ENSG00000130414_13 (sequence is synthesized)
ctgtttggtgtggtgtggtttaattgaggcttacattatgctgaagagtttttctaaaggcctactgtatttattttagtaatgtgctacattagagtagaaaaaataagaacgtgaaga

SEQ ID NO: 285336 - DNA, 120 bp, Artificial Sequence
  ENSG00000130414_14 (sequence is synthesized)
agaaatagcaaaaggagaaaattaccacagatttacagaacaatatgttttaagagagacgttgagaaagattcacgtggccgtcctcagcgtctcaaactcctttgaagggagatttga

SEQ ID NO: 285337 - DNA, 120 bp, Artificial Sequence
  ENSG00000130414_15 (sequence is synthesized)
gcttaggctgttgatgacataagatgcaaaagcaaaataatatactctctttattacccagaaaatcaagttgccagtcaaaactgagaaatgagaaagaaaatcagatttctttattca

SEQ ID NO: 285338 - DNA, 120 bp, Artificial Sequence
  ENSG00000130414_16 (sequence is synthesized)
tctctgttgaagcctagaaaaccaaaacaagctggttgtggttcagcatcatggtttaggaatcaagctgtcagttgtgagtcctactgaactgtgggttttccactgtaaagctccact

SEQ ID NO: 285339 - DNA, 120 bp, Artificial Sequence
  ENSG00000130414_17 (sequence is synthesized)
gtgtccattaggaatcaggctgccagttgtgagtcctactgaactgtgggttttccactgtaaagctccactgtgtccaatatggtagctcctagccacatgtgggtattgaaatttaaa

SEQ ID NO: 285340 - DNA, 120 bp, Artificial Sequence
  ENSG00000130414_18 (sequence is synthesized)
tgagctaaaatgtaatagagtttaaaattgggttccttggttgcactggccatagttcaggcactccacagccgcctgtgggcagtagttccagtgctggtgcagaggacgatgctctgc

SEQ ID NO: 285341 - DNA, 120 bp, Artificial Sequence
  ENSG00000130414_19 (sequence is synthesized)
tccccgcggaagctctaccaggcctcgctgctgcggagcatgcgaagaagatgcacactccttccctccttgcgtccgcctgcctttttccctctccccttccttccctccttctttcct

SEQ ID NO: 285342 - DNA, 120 bp, Artificial Sequence
  ENSG00000130414_20 (sequence is synthesized)
cttcctccctgcctctttccttccctccttctcttccttccttccgtctgtccttgttttcctccctgcctctttccttccctccttctcttccttccttccttccgtctgtccttgttt

SEQ ID NO: 285343 - DNA, 120 bp, Artificial Sequence
  ENSG00000130414_21 (sequence is synthesized)
tcctcccttcccttcctccctgcctccttccttgttttaagaatttgaaaataaagtttcccaggagttttgaattggagtcgagatttaagtggctgaagttttgcatttcactaggaa

SEQ ID NO: 285344 - DNA, 120 bp, Artificial Sequence
  ENSG00000130414_22 (sequence is synthesized)
accaacagctttaatcatgaaatgaaagcacagctgggcattgggccagtcacagagtgtcttttgctctgagcacttcacaaacccattgtggaggggaggaaagaaaaagaaagccat

SEQ ID NO: 285345 - DNA, 120 bp, Artificial Sequence
  ENSG00000130414_23 (sequence is synthesized)
ctttaattatcttagctgttcctaatgtctttggctgcaaagagctagctgtttccttcaaccttggtggttgcacgggtagtgtcctcagcagtgagagggcaggtctgccctgtggtc

SEQ ID NO: 285346 - DNA, 120 bp, Artificial Sequence
  ENSG00000130414_24 (sequence is synthesized)
aggattgcccttgtgaggggcagagctctccaaccatgcagggctccgtgtcggcatggtgtggactcgggtgctctgatcatcccctgtgtttgcgtctgaccctgtgtggttgcattc

SEQ ID NO: 285347 - DNA, 120 bp, Artificial Sequence
  ENSG00000130414_25 (sequence is synthesized)
ccttgatggagtgggaagtatgtaatttgtagtgctgaggacattcgtctgtttgattttctggtgttttcaatgacatgcatgttcagcagagaaagatgaataaacactgtccaattc

SEQ ID NO: 285348 - DNA, 120 bp, Artificial Sequence
  ENSG00000130414_26 (sequence is synthesized)
ttctctccacatagaagcctcaagaagaggtgaggagatgccccgatttccttatttcagagcagtacatgcgttcgtctcacgaaagctcttacaactaaaacaacagcaccaacaaac

SEQ ID NO: 285349 - DNA, 120 bp, Artificial Sequence
  ENSG00000130414_27 (sequence is synthesized)
caggatcaaaataatcgtgcattttccaggattccatgttggacttctcagtgctttggagatcaggaaataatcatgctgttgcagcagtatggttttgtgtctggattttattcatac

SEQ ID NO: 285350 - DNA, 120 bp, Artificial Sequence
  ENSG00000130414_28 (sequence is synthesized)
aggcatgtgtttacaggcatgagaattctgtattgaaaagaaagtccttgtttttttctaacgtatctttctgttccatcaactgttaaaaccaaattgttaagaacattgagcttctta

SEQ ID NO: 285351 - DNA, 120 bp, Artificial Sequence
  ENSG00000130414_29 (sequence is synthesized)
ggagagattacatgcagctacttaggaccacctcagcaaaatggagttgcctgggtagatagcagcagcagctcaccagccccacgctgccaggctgctggctgctgtccaccaggcagc

SEQ ID NO: 285352 - DNA, 120 bp, Artificial Sequence
  ENSG00000130414_30 (sequence is synthesized)
tgtggaacctccatgttctgcctaggtgttgtggcaagaacagcagggaaacaggcggccgcctccaggccacaggtggacccagggaccttcagttacgccgcttcaattgaattcgtg

SEQ ID NO: 285353 - DNA, 120 bp, Artificial Sequence
  ENSG00000130414_31 (sequence is synthesized)
gtggtttctctgctacagcagaagtggaagaagctcttgtcttgtttggcatttgtcccattttttggctaataattggctttgaatttctctgtgccctgcttaccaattatagctttc

SEQ ID NO: 285354 - DNA, 120 bp, Artificial Sequence
  ENSG00000130414_32 (sequence is synthesized)
tggattggctgttcttagcagtgcaaatgtcaatgcaaagaagcaagcaggcggctactttctgggaagaagcatagtccgtgctcacactggatataaatctgcaagatttgggggttt

SEQ ID NO: 285355 - DNA, 120 bp, Artificial Sequence
  ENSG00000130414_33 (sequence is synthesized)
ggcaaaataggggtggagggaaagctgccatggctgtcagaaattggggctttttgaagaaaagcttgtgtaggcatcagccactggctggccagaattccatgaatggaagcaggtgcc

SEQ ID NO: 285356 - DNA, 120 bp, Artificial Sequence
  ENSG00000130414_34 (sequence is synthesized)
cgagtgatctggggctttacatgtggatataaatagaagccgggagcctgaggctttgctttaggaaaatcatgagccagaaaacagaggaggtgattgtcagtagtcacctcacgccgc

SEQ ID NO: 285357 - DNA, 120 bp, Artificial Sequence
  ENSG00000130414_35 (sequence is synthesized)
tagtgttttctaatactctctcgaattgtcaaagcaaaggaccttataacagcaacacgtgtgtgactcgaagcagcgagcttcccttgggaaaaggagcctcttctcagcagagggtcc

SEQ ID NO: 285358 - DNA, 120 bp, Artificial Sequence
  ENSG00000130414_36 (sequence is synthesized)
cagcctttctgtccttccccatcggaatgccaggctctgtgagtttggatgttggacattgccacctgaattccaggaggccggggagctccagtgatggacttgtccccaaaagagtgg

SEQ ID NO: 285359 - DNA, 120 bp, Artificial Sequence
  ENSG00000130414_37 (sequence is synthesized)
tgctgttctcagagccataaatgttccactgaaagtgtctgtcccctggctcacgctggctgcgcttgcttgaaggaggctgatttaagggttctaataggaagacaaatgaaactgtca

SEQ ID NO: 285360 - DNA, 120 bp, Artificial Sequence
  ENSG00000130414_38 (sequence is synthesized)
aattttatctttaagcatgtgagtaagtttgctcattcgcttttactattgatgtatagttttaaaattcttaatttaaaaattattttaatagtaaatttttcacaagtgaacactttt

SEQ ID NO: 285361 - DNA, 120 bp, Artificial Sequence
  ENSG00000130414_39 (sequence is synthesized)
tatctttaaattaaaattctgaagctccctagttagttagatccaattgctggttacattttgggaagctctcattttagtgctatgtagtttcattgaataaacatgtttttaatgaga

SEQ ID NO: 285362 - DNA, 120 bp, Artificial Sequence
  ENSG00000130414_40 (sequence is synthesized)
accgcgtccccttgggtccttgatcctgagctgaccgggtagccatggccttgcggctcctgaagctggcagcgacgtccgcgtccgcccgggtcgtggcgcgggcgcccagcgcgtgga

SEQ ID NO: 285363 - DNA, 120 bp, Artificial Sequence
  ENSG00000130414_41 (sequence is synthesized)
agatgctgttaagatactgtgctccctccttgaagctgatcgttccctccttgaagctgatcgttccctccttgaagctgatcgtgtccaagatagttgctaggacaacagaatcttctg

SEQ ID NO: 285364 - DNA, 120 bp, Artificial Sequence
  ENSG00000130414_42 (sequence is synthesized)
tgggtgtgtggtgcgactttgcaagggctgtgatagactcaccttgcacttactgtgtttatgaatgtctgttagatagatgaataaatgccattacttaatcggtctccgctggaaaaa

SEQ ID NO: 285365 - DNA, 120 bp, Artificial Sequence
  ENSG00000130414_43 (sequence is synthesized)
tcggggagaggaagtctgagatggcaggagagcctttgctcttccttgcgggactgtgacaagagacaggaagaaagaatccaggaaagatttggccaggctgatgagtgtcctagagcc

SEQ ID NO: 285366 - DNA, 120 bp, Artificial Sequence
  ENSG00000130414_44 (sequence is synthesized)
aaagatgcctgtcagggagtcccatgtccacaggaacagctggcaccagaagctcttctgtgctccatcactgaccaggcacattctgtaacgtgcgtggccgtggcatgaacaggcagc

SEQ ID NO: 285367 - DNA, 120 bp, Artificial Sequence
  ENSG00000130414_45 (sequence is synthesized)
atctctattttgaatgtagatcagcactaaaagccctgttttaatagcatttatactaattcctaccagtcctcacgaggagggtgacacacaccctgttcccacttgagagagggcatc

SEQ ID NO: 285368 - DNA, 120 bp, Artificial Sequence
  ENSG00000130414_46 (sequence is synthesized)
tgcaggggtggaggggagaccccatggctcggcctggtgccacagcctgcgggcctgccgcccaccagtgctctgcggtcccactgtggtccccgagtcccctcagctgtttaaacttgg

SEQ ID NO: 285369 - DNA, 120 bp, Artificial Sequence
  ENSG00000130414_47 (sequence is synthesized)
gaggctggtgagggcctcctggcagagcgtcctccatccctctgtcacgtacctttctgttctctgatgaggtttttgtgtcctatcgttttcttccacattggaagcaatttctaatat

SEQ ID NO: 285370 - DNA, 120 bp, Artificial Sequence
  ENSG00000130414_48 (sequence is synthesized)
ccctcatcacttcaatctatttaacgcaaatcgtgcctctccccctttttcttacttaccaattctagaacagtagagcagtgatatccacacacatccatttactctttgtagttttca

SEQ ID NO: 285371 - DNA, 120 bp, Artificial Sequence
  ENSG00000130414_49 (sequence is synthesized)
ttggatcttaattaggtggcctcgaagcaacgccttttgaagtgaccctgtggccgttggtagctctgttggcggcttgatggaggatcctgagatgaaacaaagaccgtctttgccctg

SEQ ID NO: 285372 - DNA, 68 bp, Artificial Sequence
  ENSG00000130414_50 (sequence is synthesized)
ttgtttaatactatgttattttttcctggaggagaatatggtctcctttttgatactgtgatgaaaat

SEQ ID NO: 285373 - DNA, 120 bp, Artificial Sequence
  ENSG00000130414_51 (sequence is synthesized)
gaggagaatatggtctcctttttgatactgtgatgaaaatgcagggctacctgcctgttcctcactctgatgcccatcctcagtgccggaattcttgtaggtgctcaggaaatacctctc

SEQ ID NO: 285374 - DNA, 120 bp, Artificial Sequence
  ENSG00000130414_52 (sequence is synthesized)
tggatggtgggttcttgtcagggcaacagtaaagctctggttattttttgctgctcctgaaagatccatgggactaactttccttctctgttgcaatagtagaaacagcgagatgtctat

SEQ ID NO: 285375 - DNA, 120 bp, Artificial Sequence
  ENSG00000130414_53 (sequence is synthesized)
gtatgcctttctattgccactctggaacttttattgtttaagcatatgcttgtaagtatgttgtatagctagacttctaagaaccttccatcaagtggcaaaaggagggaactgcaagtt

SEQ ID NO: 285376 - DNA, 120 bp, Artificial Sequence
  ENSG00000130414_54 (sequence is synthesized)
caaaatgtttgtttctcagtggactaactggacacctttgcttattatgctgacatttattgagaaaaacaaagtcatacatttaacattctctagataattcttttgttatctgggaaa

SEQ ID NO: 285377 - DNA, 120 bp, Artificial Sequence
  ENSG00000130414_55 (sequence is synthesized)
acagtatttcaaaaataattctgaggtctaaagtagagctgtcaacttcttaatttttccaagtaaagtcttcaatactgtcatcaggtaaaattaccccattttataaaagacatcaca

SEQ ID NO: 285378 - DNA, 120 bp, Artificial Sequence
  ENSG00000130414_56 (sequence is synthesized)
ttgggaataactgataggaatatccgaaaaccatttctagattctaagaaaacagtcaaagtgatcaataactacatattttatcaagtaacttcaggtcagatttctgagatggttgtg

SEQ ID NO: 285379 - DNA, 120 bp, Artificial Sequence
  ENSG00000130414_57 (sequence is synthesized)
ttatgttgcatgttatgggcttatattacactagagtttcttttataatcagttaacatttaatcttattctacttggcacatagctaatgatagagatttagaatcatatcacctcttt

SEQ ID NO: 285380 - DNA, 120 bp, Artificial Sequence
  ENSG00000130414_58 (sequence is synthesized)
tatacttttgttgatttcactcactcctctaatacagagcacctcctatatgcaaggcgcctgtgccaggcacctaggaggctgcaaagatgaacaaagatggtctctgcccagacacca

SEQ ID NO: 285381 - DNA, 120 bp, Artificial Sequence
  ENSG00000130414_59 (sequence is synthesized)
agtccttattggaaaatagaactcccaattactgcctttcccccttttgacagagcaatgaagtgcagcattgcctgtatcatcctttccctgtgccccgtcgcattactggaattaata

SEQ ID NO: 285382 - DNA, 120 bp, Artificial Sequence
  ENSG00000130414_60 (sequence is synthesized)
catgttcagtaaatattctttgaatgatagggtttttcttattttgaacagctttaatgaggtataatttatgctccataaaattcacccattttaagggtacgactgaatgattttggg

SEQ ID NO: 285383 - DNA, 120 bp, Artificial Sequence
  ENSG00000130414_61 (sequence is synthesized)
taaatttaccaagttgttgccactcttgccataatccagttttagaatgttttcatcattttgtaggttgaaaccgcaggcctattcatttctttcttccttcctctctctcctgtaagt

SEQ ID NO: 285384 - DNA, 120 bp, Artificial Sequence
  ENSG00000130414_62 (sequence is synthesized)
gttgattgagcatccaccctgtcctagaccctgcttggtgctagggacataccagtgagcagggtggatgaggtcctcacccgtgagctcatatgctgatgggggagacctacagcaagc

SEQ ID NO: 285385 - DNA, 120 bp, Artificial Sequence
  ENSG00000130414_63 (sequence is synthesized)
aaggagataaataaatacatcaaatagaggtaaatgatgtgaagaaaacaaaacgggctgagaagatagtgtgagactgtaaggagttttaaattttaaaacttgctactcataattaga

SEQ ID NO: 285386 - DNA, 120 bp, Artificial Sequence
  ENSG00000130414_64 (sequence is synthesized)
tattcaagtttctgaaattcgcatagtgcatttcagatgatgagagaggtgacagccgtagaaagtgggagaagtggttgcggggagatgggtgagcgatggaggtggcgagcaagttgg

SEQ ID NO: 285387 - DNA, 120 bp, Artificial Sequence
  ENSG00000130414_65 (sequence is synthesized)
agagatgcagggagagtcaggtgacaagaagagagtgtgctgaggacagatggcggacagacaggccgctgcccccaatttttggtgctctttcattcctgcactcaggcacgaggcaga

SEQ ID NO: 285388 - DNA, 120 bp, Artificial Sequence
  ENSG00000130414_66 (sequence is synthesized)
caggaaagacaggcagtgctgcttcgtaacaggcatctttcttgccctaagtatacatcttagaatgtgtggagaaagtcacgctatgggagcacttgggcaggctcaggtgttcactgt

SEQ ID NO: 285389 - DNA, 120 bp, Artificial Sequence
  ENSG00000130414_67 (sequence is synthesized)
agtagaaggagaatgactctagctgatgttgggaccctttgctgtcaccccgcagtccccacagtgcccggtgtgagttgtaagaaaatggtggtcagtgattgtcttcgcattttatat

SEQ ID NO: 285390 - DNA, 120 bp, Artificial Sequence
  ENSG00000130414_68 (sequence is synthesized)
gaccgggtagccatggccttgcggctcctgaagctggcagcgacgtccgcgtccgcccgggtcgtggcggcgggcgcccagcgcgtggcttcaagcactttcctgaagcggggattcatt

SEQ ID NO: 285391 - DNA, 120 bp, Artificial Sequence
  ENSG00000130414_69 (sequence is synthesized)
accgtggccctgaccgtgggctcctggctgaggtcgtgcttgctgggtctccactggaagctgctcttcctctttccagaaagccccatgcacaccacagcctttatgttcctttgttga

SEQ ID NO: 285392 - DNA, 120 bp, Artificial Sequence
  ENSG00000130414_70 (sequence is synthesized)
agaccaggagcacagatgggtcagcctactcagttctccactgggctccctgttctcagaatggtctgtgtgtggagaagactcctaagtgcctgggaataggtgggctgtgggtgaagc

SEQ ID NO: 285393 - DNA, 120 bp, Artificial Sequence
  ENSG00000130414_71 (sequence is synthesized)
ggatgaaggcgatacagagcgaggacgtggcctgaaaccgagagcagcattctcccttccctgcttccatccgttcctggtctgcgtcccagccctggtacgtaaggctgtcccagaatc

SEQ ID NO: 285394 - DNA, 120 bp, Artificial Sequence
  ENSG00000130414_72 (sequence is synthesized)
cctgtaaattcacttttctgttaaatgattccagatcattcggttatgtgcaaccaaaagtcctcacccatacgtcatcttacagcattaaagcttcaggcgacttgggtatgttttaaa

SEQ ID NO: 285395 - DNA, 120 bp, Artificial Sequence
  ENSG00000130427_0 (sequence is synthesized)
cctttcccagatagcacgctccgccagtcccaagggtgcgcaaccggctgcactcccctcccgcgacccagggcccgggagcagcccccatgacccacacgcacgtctgcagcagccccg

SEQ ID NO: 285396 - DNA, 120 bp, Artificial Sequence
  ENSG00000130427_1 (sequence is synthesized)
ctcacgccccggcgagcctcaacccaggcgtcctgcccctgctctgaccccgggtggcccctacccctggcgacccctcacgcacacagcctctcccccacccccacccgcgcacgcaca

SEQ ID NO: 285397 - DNA, 120 bp, Artificial Sequence
  ENSG00000130427_2 (sequence is synthesized)
cacacatgcagataacagccccgacccccggccagagccgcagagtccctgggccaccccggccgctcgctgcgctgcgccgcaccgcgctgtcctcccggagccggaccggggccaccg

SEQ ID NO: 285398 - DNA, 120 bp, Artificial Sequence
  ENSG00000130427_3 (sequence is synthesized)
cctctcctccaggcccgtggggctggccctgcaccgccgagcttcccgggatgagggcccccggtgtggtcacccggcgcgccccaggtcgctgagggaccccggccaggcgcggagatg

SEQ ID NO: 285399 - DNA, 120 bp, Artificial Sequence
  ENSG00000130427_4 (sequence is synthesized)
caggtcgctgagggaccccggccaggcgcggagatgggggtgcacgaatgtcctgcctggctgtggcttctcctgtccctgctgtcgctccctctgggcctcccagtcctgggcgcccca

SEQ ID NO: 285400 - DNA, 120 bp, Artificial Sequence
  ENSG00000130427_5 (sequence is synthesized)
ccacgcctcatctgtgacagccgagtcctggagaggtacctcttggaggccaaggaggccgagaatatcacgacgggctgtgctgaacactgcagcttgaatgagaatatcactgtccca

SEQ ID NO: 285401 - DNA, 120 bp, Artificial Sequence
  ENSG00000130427_6 (sequence is synthesized)
ggccaggccctgttggtcaactcttcccagccgtgggagcccctgcagctgcatgtggataaagccgtcagtggccttcgcagcctcaccactctgcttcgggctctgggagcccagaag

SEQ ID NO: 285402 - DNA, 120 bp, Artificial Sequence
  ENSG00000130427_7 (sequence is synthesized)
gaagccatctcccctccagatgcggcctcagctgctccactccgaacaatcactgctgacactttccgcaaactcttccgagtctactccaatttcctccggggaaagctgaagctgtac

SEQ ID NO: 285403 - DNA, 120 bp, Artificial Sequence
  ENSG00000130427_8 (sequence is synthesized)
acaggggaggcctgcaggacaggggacagatgaccaggtgtgtccacctgggcatatccaccacctccctcaccaacattgcttgtgccacaccctcccccgccactcctgaaccccgtc

SEQ ID NO: 285404 - DNA, 120 bp, Artificial Sequence
  ENSG00000130427_9 (sequence is synthesized)
gaggggctctcagctcagcgccagcctgtcccatggacactccagtgccagcaatgacatctcaggggccagaggaactgtccagagagcaactctgagatctaaggatgtcacagggcc

SEQ ID NO: 285405 - DNA, 120 bp, Artificial Sequence
  ENSG00000130427_10 (sequence is synthesized)
aacttgagggcccagagcaggaagcattcagagagcagctttaaactcagggacagagccatgctgggaagacgcctgagctcactcggcaccctgcaaaatttgatgccaggacacgct

SEQ ID NO: 285406 - DNA, 120 bp, Artificial Sequence
  ENSG00000130427_11 (sequence is synthesized)
ttggaggcgatttacctgttttcgcacctaccatcagggacaggatgacctggataacttaggtggcaagctgtgacttctccaggtctcacgggcatgggcactcccttggtggcaaga

SEQ ID NO: 285407 - DNA, 120 bp, Artificial Sequence
  ENSG00000130427_12 (sequence is synthesized)
gcccccttgacaccggggtggtgggaaccatgaagacaggatgggggctggcctctggctctcatggggtccaagttttgtgtattcttcaacctcattgacaagaactgaaaccaccaa

SEQ ID NO: 285408 - DNA, 89 bp, Artificial Sequence
  ENSG00000130429_0 (sequence is synthesized)
agagccggttcggcgcgtcgactgcccagagtccgcggccggggcgcgggaggctggagtgtggtgacactaccttgactcactgcagc

SEQ ID NO: 285409 - DNA, 120 bp, Artificial Sequence
  ENSG00000130429_1 (sequence is synthesized)
cctcagcctctcaggagccaagccgccatggcctaccacagcttcctggtggagcccatcagctgccacgcctggaacaaggaccgcacccagattgccatctgccccaacaaccatgag

SEQ ID NO: 285410 - DNA, 120 bp, Artificial Sequence
  ENSG00000130429_2 (sequence is synthesized)
gtgcatatctatgaaaagagcggtgccaaatggaccaaggtgcacgagctcaaggagcacaacgggcaggtgacaggcatcgactgggcccccgagagtaaccgtattgtgacctgcggc

SEQ ID NO: 285411 - DNA, 120 bp, Artificial Sequence
  ENSG00000130429_3 (sequence is synthesized)
acagaccgcaacgcctacgtgtggacgctgaagggccgcacatggaagcccacgctggtcatcctgcggatcaaccgggctgcccgctgcgtgcgctgggcccccaacgagaacaagttt

SEQ ID NO: 285412 - DNA, 120 bp, Artificial Sequence
  ENSG00000130429_4 (sequence is synthesized)
gctgtgggcagcggctctcgtgtgatctccatctgttatttcgagcaggagaatgactggtgggtttgcaagcacatcaagaagcccatccgctccaccgtcctcagcctggactggcac

SEQ ID NO: 285413 - DNA, 120 bp, Artificial Sequence
  ENSG00000130429_5 (sequence is synthesized)
cccaacaatgtgctgctggctgccggctcctgtgacttcaagtgtcggatcttttcagcctacatcaaggaggtggaggaacggccggcacccaccccgtggggctccaagatgcccttt

SEQ ID NO: 285414 - DNA, 120 bp, Artificial Sequence
  ENSG00000130429_6 (sequence is synthesized)
tccagcagtagctgcggctgggtacatggcgtctgtttctcagccagcgggagccgcgtggcctgggtaagccacgacagcaccgtctgcctggctgatgccgacaagaagatggccgtc

SEQ ID NO: 285415 - DNA, 120 bp, Artificial Sequence
  ENSG00000130429_7 (sequence is synthesized)
gcgactctggcctctgaaacactaccactgctggcgctgaccttcatcacagacaacagcctggtggcagcgggccacgactgcttcccggtgctgttcacctatgacgccgccgcgggg

SEQ ID NO: 285416 - DNA, 120 bp, Artificial Sequence
  ENSG00000130429_8 (sequence is synthesized)
atgctgagcttcggcgggcggctggacgttcctaagcagagctcgcagcgtggcttgacggcccgcgagcgcttccagaacctggacaagaaggcgagctccgagggtggcacggctgcg

SEQ ID NO: 285417 - DNA, 120 bp, Artificial Sequence
  ENSG00000130429_9 (sequence is synthesized)
ggcgcgggcctagactcgctgcacaagaacagcgtcagccagatctcggtgctcagcggcggcaaggccaagtgctcgcagttctgcaccactggcatggatggcggcatgagtatctgg

SEQ ID NO: 285418 - DNA, 120 bp, Artificial Sequence
  ENSG00000130429_10 (sequence is synthesized)
gatgtgaagagcttggagtcagccttgaaggacctcaagatcaaatgacctgtgaggaatatgttgccttcatcctagctgctggggaagcggggagaggggtcagggaggctaatggtt

SEQ ID NO: 285419 - DNA, 120 bp, Artificial Sequence
  ENSG00000130429_11 (sequence is synthesized)
gctttgctgaatgtttctggggtaccaatacgagttcccataggggctgctccctcaaaaagggaggggacagatggggagcttttcttacctattcaaggaatacgtgcctttttctta

SEQ ID NO: 285420 - DNA, 120 bp, Artificial Sequence
  ENSG00000130429_12 (sequence is synthesized)
aatgctttcatttattgaaaaaaaaaaaaaatgcccccaaagcactatgctggtcatgaactgcttcaaaatgtggaggtaataaaatgcaactgtgtaaaaaaaaaaaaaaaaaaaaaa

SEQ ID NO: 285421 - DNA, 120 bp, Artificial Sequence
  ENSG00000130429_13 (sequence is synthesized)
agagccggttcggcgcgtcgactgcccagagtccgcggccggggcgcgggagtgtcttgttctgttgcccaggctggagtgtggtgacactaccttgactcactgcagcatctgcctccc

SEQ ID NO: 285422 - DNA, 120 bp, Artificial Sequence
  ENSG00000130429_14 (sequence is synthesized)
agagccggttcggcgcgtcgactgcccagagtccgcggccggggcgcgggagtgttcccccaggtgaacctaacttcctggcctccaagatttggggtcagagtcccaagctgcgtcatt

SEQ ID NO: 285423 - DNA, 120 bp, Artificial Sequence
  ENSG00000130429_15 (sequence is synthesized)
tagtagaagccgagtgactttgaacaaatcgttgcttttgtctgagcctgggtttcctcctgtacaaactgaagtgtcttgttctgttgcccaggctggagtgtggtgacactaccttga

SEQ ID NO: 285424 - DNA, 120 bp, Artificial Sequence
  ENSG00000130429_16 (sequence is synthesized)
gctgctgctccggcgcggagcccagagccggttcggcgcgtcgactgcccagagtccgcggccggggcgcgggagacagtgtcttgttctgttgcccaggctggagtgtggtgacactac

SEQ ID NO: 285425 - DNA, 120 bp, Artificial Sequence
  ENSG00000130429_17 (sequence is synthesized)
agctgggattacaggtccctgtgatgctgggaaactgagtcacggaggcggggagagatgtgtttgaggaattgggctgagaccgtgatctcacccccgtcaggcctggtgggctccttt

SEQ ID NO: 285426 - DNA, 120 bp, Artificial Sequence
  ENSG00000130429_18 (sequence is synthesized)
gacactcagcggcaggagccaagccgccatggcctaccacagcttcctggtggagcccatcagctgccacgcctggaacaaggaccgcacccagattgccatctgccccaacaaccatga

SEQ ID NO: 285427 - DNA, 120 bp, Artificial Sequence
  ENSG00000130429_19 (sequence is synthesized)
gctgcgtgcgctgggcccccaacgagaacaagtttgctgtgggcagcggctctcgtgtgatctccatctgttatttcgagcaggagaatgactgatggagtctcactctgtcacccaggc

SEQ ID NO: 285428 - DNA, 120 bp, Artificial Sequence
  ENSG00000130429_20 (sequence is synthesized)
ctcagcggcggcaaggccaagtgctcgcagttctgcaccactggcatggatggcggcatgagtatctgggatgtgaaggttctctgccctctgctgtgctggggctgagatgggtgatca

SEQ ID NO: 285429 - DNA, 120 bp, Artificial Sequence
  ENSG00000130429_21 (sequence is synthesized)
aggagccaagccgccatggcctaccacagcttcctggtggagcccatcagctgccacgcctggaacaaggaccgcacccgacagccagttccaggagaagacagggtggcctagcagggc

SEQ ID NO: 285430 - DNA, 120 bp, Artificial Sequence
  ENSG00000130429_22 (sequence is synthesized)
cccagctggggaggggctggcaggtgcaggggccctgaggtgtcagcaggagcagcgaagggttcctggttggccagagcaatagggtggggagaggtcccagggttcattgctgcgagt

SEQ ID NO: 285431 - DNA, 86 bp, Artificial Sequence
  ENSG00000130429_23 (sequence is synthesized)
acaattgtgatcatagctcactgcagcctcagcctcctgagctcaagtaatcctaccacttcagcctcctgagtagctcggactac

SEQ ID NO: 285432 - DNA, 90 bp, Artificial Sequence
  ENSG00000130429_24 (sequence is synthesized)
tcaagtaatcctaccactccaaatcatttatttatttattttgtagagatagggtcttgtcacgttgtccaggctggtcttgaactcctg

SEQ ID NO: 285433 - DNA, 120 bp, Artificial Sequence
  ENSG00000130429_25 (sequence is synthesized)
agccatgattgccagtccacgtcttagtttttaatctcccctgcatggctgagggcagaggccagccaggagcatctgagagacccaaatttgcatcccaccatggccagttagtagttg

SEQ ID NO: 285434 - DNA, 120 bp, Artificial Sequence
  ENSG00000130429_26 (sequence is synthesized)
tgtgacctctggtgatggcatcactttgctgagcctgctctgagggtgactgtgtggcctaaaggatagagggcacagagttcccactccagaagcgacacagcacatccctgccgcccc

SEQ ID NO: 285435 - DNA, 120 bp, Artificial Sequence
  ENSG00000130429_27 (sequence is synthesized)
agggccctgacggccttgtgggctggcaatgcccagtcgcctctctcctgggtctttggtgggctgcagggagcagtgggagcctggagtccctggtgctgaggtccatgagtcccacct

SEQ ID NO: 285436 - DNA, 120 bp, Artificial Sequence
  ENSG00000130429_28 (sequence is synthesized)
gcctgtccctctctccctgtctgcctgaccaccgttcccaggtgggtttgcaagcacatcaagaagcccatccgctccaccgtcctcagcctggactggcaccccaacaatgtgctgctg

SEQ ID NO: 285437 - DNA, 120 bp, Artificial Sequence
  ENSG00000130429_29 (sequence is synthesized)
cagggcctgcacagttggcgcccaccggcatcagcgtgaagggagctcctcgctggctgccgacggggctgcagggctcgctagccgctcacctgcgtgtgagcgcggagcccgcagtac

SEQ ID NO: 285438 - DNA, 120 bp, Artificial Sequence
  ENSG00000130429_30 (sequence is synthesized)
ctcagaggacgtgactccccgaccctgcgcccggcagtccccgggggccgtgcgcccggcccaggctcggaggtccagcccagcggcggctcaggctgcgcgcctggctcccagcctcag

SEQ ID NO: 285439 - DNA, 68 bp, Artificial Sequence
  ENSG00000130429_31 (sequence is synthesized)
ggattacaggcacctgctaccatgcccgggtttgcaagcacatcaagaagcccatccgctccaccgtc

SEQ ID NO: 285440 - DNA, 120 bp, Artificial Sequence
  ENSG00000130433_0 (sequence is synthesized)
ccaagtcctctgttctcaaactctgagcccaagggaaccccggccacatctcctccaaacacacacaggacctcaggtcccttcctgggtaccccaaactcttagccctagtggggtgct

SEQ ID NO: 285441 - DNA, 120 bp, Artificial Sequence
  ENSG00000130433_1 (sequence is synthesized)
cagatctctcaggaaaaccagtttcccttttgttaaccccccagcggggaccccaaagcagccccttggagctgcagggagcttcagcgggcaccagttctcattcctctggagctcttg

SEQ ID NO: 285442 - DNA, 120 bp, Artificial Sequence
  ENSG00000130433_2 (sequence is synthesized)
gggggactccctcctgggaagccgaattctatctctaaacctcagggtgggggccttgtttttcctctgggccccgtcttctttgccaagttcttgagggcaacctagaccctcctctga

SEQ ID NO: 285443 - DNA, 120 bp, Artificial Sequence
  ENSG00000130433_3 (sequence is synthesized)
accccagaggcttccccagccctggggatcatttttctcttctgaaccccagaagcaatctcgactttcgcatttgagattccagacaggactcggctctccctctttcatacccagggg

SEQ ID NO: 285444 - DNA, 120 bp, Artificial Sequence
  ENSG00000130433_4 (sequence is synthesized)
aaactgagtccctcacccccttcaagaccccaggccgctcctcgctcccgcccctcgaggcccttcgccggctctgcctcctcccccttcccgaccccaccggccataagatgatgtggt

SEQ ID NO: 285445 - DNA, 120 bp, Artificial Sequence
  ENSG00000130433_5 (sequence is synthesized)
ccaacttcttcctgcaagaggagaaccggcggcggggggccgcgggccggcggcgggcgcacgggcagggcaggtcggggctgacgcccgagcgcgaggggaaggtgaagctggcgctgc

SEQ ID NO: 285446 - DNA, 120 bp, Artificial Sequence
  ENSG00000130433_6 (sequence is synthesized)
tgctggccgccgtgggcgccacgctggcggtgctgtccgtgggcaccgagttctgggtggagctcaacacctacaaggccaacggcagcgccgtgtgcgaagcggcccacctggggctgt

SEQ ID NO: 285447 - DNA, 120 bp, Artificial Sequence
  ENSG00000130433_7 (sequence is synthesized)
acctgcggccccgcggagctgcccggagaagcaaactgcacctattttaaattcttcaccacgggggagaatgcacgcatctttcagagaaccacaaagaaagaggtgaatctggcagct

SEQ ID NO: 285448 - DNA, 120 bp, Artificial Sequence
  ENSG00000130433_8 (sequence is synthesized)
gcggtgatagcagtgctgggcctggcagtcatggccttggggtgcctctgtatcatcatggtgctcagtaaaggtgcagagttcctgctccgagttggagccgtctgctttggcctctca

SEQ ID NO: 285449 - DNA, 120 bp, Artificial Sequence
  ENSG00000130433_9 (sequence is synthesized)
ggcctgctgctcttggtgagcctggaggtgttccggcattccgtgagggccctgctgcagagagtcagcccggagcctcccccggccccacgcctcacctacgagtactcctggtccctg

SEQ ID NO: 285450 - DNA, 120 bp, Artificial Sequence
  ENSG00000130433_10 (sequence is synthesized)
ggctgcggcgtgggggccggcctgatcctgctgttgggggccggctgctttctgctgctcacactgccttcctggccctgggggtccctctgtcccaagcgggggcaccgggccacctag

SEQ ID NO: 285451 - DNA, 120 bp, Artificial Sequence
  ENSG00000130433_11 (sequence is synthesized)
agccacgcgtgagacttctctaagcaaccaccgagccctttgaccttctccattgtacccccaagatctttttgccccatctcctagagaaactgtgttctccctgctcgggggcccatg

SEQ ID NO: 285452 - DNA, 120 bp, Artificial Sequence
  ENSG00000130433_12 (sequence is synthesized)
tttttttacacgcctgcctcctgtccccttatcctttctccctctgtaaatacgtttttctctgtggctgtatgtgggttgcttgggggtgggatgggaagaggctctttgcaaacgagg

SEQ ID NO: 285453 - DNA, 120 bp, Artificial Sequence
  ENSG00000130433_13 (sequence is synthesized)
gtccccagagaagactggcggggacctgatggggtagctggggtgtggggttgggggatgaggtcagggggtcttgggtgggagttgggggccccttcatttcccaggtctggatcgatt

SEQ ID NO: 285454 - DNA, 120 bp, Artificial Sequence
  ENSG00000130433_14 (sequence is synthesized)
cacttgccgggagagactttttacaactcatctgcagctccgggtgcggttgggggagatagcgaagggtctggcctcgctgtgatctgatttgggattaaaggtttggaaatttaacaa

SEQ ID NO: 285455 - DNA, 80 bp, Artificial Sequence
  ENSG00000130449_0 (sequence is synthesized)
agaagcggcgcggtcatggcggagcgcggacagcagcctcctcccgcgaaacggctttgctgccggccgggcggcggcgg

SEQ ID NO: 285456 - DNA, 80 bp, Artificial Sequence
  ENSG00000130449_1 (sequence is synthesized)
cggcggcggcgtgcgggggcggcgcggcgctggggttgctgccgccgggcaagacccagagccccgagtcgctgctggac

SEQ ID NO: 285457 - DNA, 120 bp, Artificial Sequence
  ENSG00000130449_2 (sequence is synthesized)
tcgctgctggacatcgcggcgcgcagggtggcggagaagtggccgttccagcgcgtggaggagcgctttgagcgcatcccggagccggtgcagcgccgcatagtctattggtccttcccc

SEQ ID NO: 285458 - DNA, 120 bp, Artificial Sequence
  ENSG00000130449_3 (sequence is synthesized)
ctattggtccttcccccgcagcgagcgggagatctgcatgtactcgtccttcaacaccggcggcggcgccgcgggcggccccggcgacgacagcggtggcggcggcggcgcgggcggcgg

SEQ ID NO: 285459 - DNA, 120 bp, Artificial Sequence
  ENSG00000130449_4 (sequence is synthesized)
gcggcggacggcggcgacgagacgcggctgcctttccgccggggcatcgcgctgttggaaagcggctgcgtagacaacgtcctgcaagtcggtttccacttgagcggcacagtgacagaa

SEQ ID NO: 285460 - DNA, 120 bp, Artificial Sequence
  ENSG00000130449_5 (sequence is synthesized)
cctgcaatacaatcggagccagaaactgtttgcaacgtggccatcagctttgatcgttgcaagattacctcagtgacctgcagctgtggaaacaaggacatattttattgtgcccatgtt

SEQ ID NO: 285461 - DNA, 120 bp, Artificial Sequence
  ENSG00000130449_6 (sequence is synthesized)
gtggcactgtctttataccgcatccgcaagccagatcaggtcaaactgcatcttcctatttcagagactctctttcaaatgaatagagaccaactgcaaaagtttgtacagtatttgatc

SEQ ID NO: 285462 - DNA, 120 bp, Artificial Sequence
  ENSG00000130449_7 (sequence is synthesized)
acagtgcaccacacagaagttttgccaactgctcaaaaattagcagatgaaattctttcccaaaattcagaaatcaaccaagttcatggtgctcctgatccaacagcaggtgctagtata

SEQ ID NO: 285463 - DNA, 120 bp, Artificial Sequence
  ENSG00000130449_8 (sequence is synthesized)
gatgatgaaaactgctggcacttagatgaagagcaggttcaagaacaggttaaactgttcctttcccagggcgggtaccacggatcagggaagcagcttaatttgctctttgcaaaggtg

SEQ ID NO: 285464 - DNA, 120 bp, Artificial Sequence
  ENSG00000130449_9 (sequence is synthesized)
cgggagatgttaaagatgagggactccaatggggcccgcatgttgaccttgataacagagcaattcatggctgaccctcgcctgtcactttggcggcaacaaggcactgcaatgactgac

SEQ ID NO: 285465 - DNA, 120 bp, Artificial Sequence
  ENSG00000130449_10 (sequence is synthesized)
aaatacaggcagctctgggatgagctgggtgctctgtggatgtgtatagttttaaacccccactgcaagttggagcaaaaggccagttggctaaaacagctgaagaaatggaatagtgtt

SEQ ID NO: 285466 - DNA, 120 bp, Artificial Sequence
  ENSG00000130449_11 (sequence is synthesized)
gatgtctgtccatgggaagatggaaatcatggcagtgaattacccaacttaaccaatgctctgcctcagggtgcaaatgccaaccaagattcatcgaacaggccacatcggacagtgttc

SEQ ID NO: 285467 - DNA, 120 bp, Artificial Sequence
  ENSG00000130449_12 (sequence is synthesized)
acccgagccatcgaggcatgcgatctccactggcaggatagccacttgcagcacattatcagcagtgacctatacaccaactactgttaccatgacgacactgaaaactccctcttcgac

SEQ ID NO: 285468 - DNA, 120 bp, Artificial Sequence
  ENSG00000130449_13 (sequence is synthesized)
tcccgcgggtggcccctctggcatgaacatgttcctacagcctgtgcaagagtggacgcattacgttctcatgggtaccccagagaagcactgagactagcaatagctattgttaataca

SEQ ID NO: 285469 - DNA, 120 bp, Artificial Sequence
  ENSG00000130449_14 (sequence is synthesized)
ttaagacgacagcagcagaaacagttggaaatgttccgaacccaaaaaaaagagctaccccataaaaacataacctcgataaccaatctggagggctgggttggacatcccctggaccct

SEQ ID NO: 285470 - DNA, 120 bp, Artificial Sequence
  ENSG00000130449_15 (sequence is synthesized)
gtgggcactctcttcagtagccttatggaagcctgccgcattgatgatgagaacctctctgggttctcagattttacagagaatatgggacagtgcaagtctctggaataccagcatcta

SEQ ID NO: 285471 - DNA, 120 bp, Artificial Sequence
  ENSG00000130449_16 (sequence is synthesized)
cctgcacacaaattcttagaagaaggggaatcctatttaacgctggctgtggaagtagccctgatagggctaggacagcagcgtatcatgcctgatgggctgtacacacaagagaaagtt

SEQ ID NO: 285472 - DNA, 120 bp, Artificial Sequence
  ENSG00000130449_17 (sequence is synthesized)
tgccggaatgaggagcagctcatttctaagcttcaggaaattgaattggatgacacactggtgaaaatttttcgcaagcaagcagtcttcctattagaagccggaccatatagtggttta

SEQ ID NO: 285473 - DNA, 120 bp, Artificial Sequence
  ENSG00000130449_18 (sequence is synthesized)
ggtgaaataatccatcgggagagcgttccaatgcacacatttgccaagtatctcttcacctctctcctacctcacgatgctgaattggcatacaaaattgcactgagagcaatgcggtta

SEQ ID NO: 285474 - DNA, 120 bp, Artificial Sequence
  ENSG00000130449_19 (sequence is synthesized)
ctagtattggaatctactgctccatcaggagacctcacccgcccacaccacattgcatcagttgttcccaaccgctaccctcgctggttcactctaagccacattgagtcccagcagtgt

SEQ ID NO: 285475 - DNA, 120 bp, Artificial Sequence
  ENSG00000130449_20 (sequence is synthesized)
gagctggcatccaccatgctaactgcagccaaaggcgatgttcggaggctggaaacagtattagaatccatccagaaaaacattcactcctcatcacacatcttcaagcttgcccaagat

SEQ ID NO: 285476 - DNA, 120 bp, Artificial Sequence
  ENSG00000130449_21 (sequence is synthesized)
gggagatggtgaggtggctggtaacgtgtgctactgaagtcggggtttatgccctggacagcatcatgcagacctggtttacactctttactcccaccgaggccacaagtatagttgcaa

SEQ ID NO: 285477 - DNA, 120 bp, Artificial Sequence
  ENSG00000130449_22 (sequence is synthesized)
ctaccgtgatgtccaacagcaccatcgtccgcctccacctggactgccaccagcaggaaaagctggccagcagcgcccggacacttgcactgcagtgtgccatgaaggatccacagaact

SEQ ID NO: 285478 - DNA, 120 bp, Artificial Sequence
  ENSG00000130449_23 (sequence is synthesized)
gtgccctctctgcgctaaccctttgtgaaaaggatcacatagcttttgagacggcgtaccaaattgttctcgacgctgctacgactggcatgagctatacacagctctttacaatagcac

SEQ ID NO: 285479 - DNA, 120 bp, Artificial Sequence
  ENSG00000130449_24 (sequence is synthesized)
ggtacatggagcaccgcgggtaccccatgagggcctacaagctggccaccctggccatgacccatctcaacctgagctacaatcaggacacacaccctgccattaatgatgttttgtggg

SEQ ID NO: 285480 - DNA, 120 bp, Artificial Sequence
  ENSG00000130449_25 (sequence is synthesized)
cctgtgcgcttagccactcccttggtaaaaatgagcttgcagctataatacctctggtggtcaagagtgtcaagtgtgcaacggtactgtcagacattttgcgcagatgcactctgacca

SEQ ID NO: 285481 - DNA, 120 bp, Artificial Sequence
  ENSG00000130449_26 (sequence is synthesized)
ctcctggcatggtgggacttcatgggaggaggaactctggtaagctcatgtcactggacaaagcccccttgaggcaactcttggatgccacgatcggggcctacatcaacacaacgcact

SEQ ID NO: 285482 - DNA, 120 bp, Artificial Sequence
  ENSG00000130449_27 (sequence is synthesized)
cacggctcacacacatcagtcctcggcactatagtgagtttatagagttcctcagcaaagcccgagagaccttcttaatggcgcatgatggacacattcagtttacacagtttattgaca

SEQ ID NO: 285483 - DNA, 120 bp, Artificial Sequence
  ENSG00000130449_28 (sequence is synthesized)
acctgaaacaaatctacaaaggcaaaaagaaactgatgatgttggttcgggagaggtttggttgatagatcttgtatgaatggggtggggggtggggatgggagggatggtttgttttta

SEQ ID NO: 285484 - DNA, 120 bp, Artificial Sequence
  ENSG00000130449_29 (sequence is synthesized)
cttgagcctgcctttgtaccctttttaacttaaagaacagagccacaccggtattatatgtgtatagttatattgcgtttgcagactaaattgtcatgttgtgaaagtttgtgtgttttt

SEQ ID NO: 285485 - DNA, 120 bp, Artificial Sequence
  ENSG00000130449_30 (sequence is synthesized)
ttattattttttttaattttttttttctggttttgtatgagagagaggttaaaaaggtttggtttacactgagtatatgttgtcaagtggcaaaagtccacatagctctcctgttttctg

SEQ ID NO: 285486 - DNA, 120 bp, Artificial Sequence
  ENSG00000130449_31 (sequence is synthesized)
ggcaaaagtccacatagctctcctgttttctgtatacgttcacagcctcaaaaaaaataattgaaatggctttaaaaaccaaacaaaacacctccatcctgtgataagtacctcgaatgg

SEQ ID NO: 285487 - DNA, 120 bp, Artificial Sequence
  ENSG00000130449_32 (sequence is synthesized)
attcagctttactcctttgtaactcatctttacattttcagcatatttaaacaaaccaacaaaatgaaatactaatagtaaaaaggctgacccatgtggctttgcagtgctgttcgtcca

SEQ ID NO: 285488 - DNA, 120 bp, Artificial Sequence
  ENSG00000130449_33 (sequence is synthesized)
gaagcatggcacacgatgcttgtgcatgtggaaacttagcgactgtcaacatacattctcagggatttatccaaaaaaattaaaaaaagaatgagagcatttattgtactgtatatatat

SEQ ID NO: 285489 - DNA, 120 bp, Artificial Sequence
  ENSG00000130449_34 (sequence is synthesized)
tatagtatatgtctgaatattgaaaatataacattaactaatttataaaaaatattctatgtaatgcaaaatacttgaagctgcagtagcttggttttaaacaaaaacaaaaaaaaaact

SEQ ID NO: 285490 - DNA, 120 bp, Artificial Sequence
  ENSG00000130449_35 (sequence is synthesized)
gagagaaaacctatcagaaggactaaaagtacgccttgcttcagggttggctcaggtggtgaacttcatgctgggcatctatgcagagccaccttttggattgcatggttggactgagat

SEQ ID NO: 285491 - DNA, 120 bp, Artificial Sequence
  ENSG00000130449_36 (sequence is synthesized)
ctattgggagaaattatatatgtatatatatttatacaacttatgtatacatatatatatgtatacacacagacacacacacacaccaccaacaaccaccactacaccacacatgcttat

SEQ ID NO: 285492 - DNA, 120 bp, Artificial Sequence
  ENSG00000130449_37 (sequence is synthesized)
aacaggcactagaataaagagggacaacaaaatacacagccagagcagcaagccttagcattaagaatatacaatatgccggaattggggttcgtgcctcctagcctaggaaacttaaaa

SEQ ID NO: 285493 - DNA, 120 bp, Artificial Sequence
  ENSG00000130449_38 (sequence is synthesized)
gaaatatccttttgacacaaaacacaaaatgttttccaaaacaattgacataatgatacattacgcctttgcagtgagctaataataagctaacctttgtgcacaaataacattatatat

SEQ ID NO: 285494 - DNA, 120 bp, Artificial Sequence
  ENSG00000130449_39 (sequence is synthesized)
attatatatctattctgcataggtattttgactttgtgcaggacagaaagttgtgtaggtatgactgttctacttttcagttttctttttttttaatatattttattttctctagaaatt

SEQ ID NO: 285495 - DNA, 120 bp, Artificial Sequence
  ENSG00000130449_40 (sequence is synthesized)
actcaaacaaaagcagccttctatcttgccttgtcttaatgctttaaaataaccaaactggagatctaactaccaaactgttcattatattattaaataccaactttggttacagtatag

SEQ ID NO: 285496 - DNA, 120 bp, Artificial Sequence
  ENSG00000130449_41 (sequence is synthesized)
tgtctttactttagctgatggttctgtaaccttgtgctttttaaagcaatttttatgttttggtgcaaaagttgtccagtgtctcttgttcccttcactagagaacatgcttagaggtat

SEQ ID NO: 285497 - DNA, 120 bp, Artificial Sequence
  ENSG00000130449_42 (sequence is synthesized)
gtttgtaggtatttttgtttagaagaactatttcatgcgctccattttatttattataataggtaaaaagaaaaaaaaaggttgtaattcatcacccatgtaaacatgctcatgaagttg

SEQ ID NO: 285498 - DNA, 120 bp, Artificial Sequence
  ENSG00000130449_43 (sequence is synthesized)
catgctcatgaagttgaaagtaattaagatttgatacactgatatcaatttatttatgtaactaaatcactgttttataaacttgttaatgatcaacaatttttgttttgattaaaatta

SEQ ID NO: 285499 - DNA, 120 bp, Artificial Sequence
  ENSG00000130475_0 (sequence is synthesized)
cgcgccgcagccgcggagggaggggcggggcgggctccggtgtcagcgaccaagccgcaggtggcggcgagcgcggggctcggcccgagctcaggagactggcaatgactctgtagctca

SEQ ID NO: 285500 - DNA, 120 bp, Artificial Sequence
  ENSG00000130475_1 (sequence is synthesized)
aacttgcctctctcttcagacaggcactggacggggcctgcaggggtctccacagagaccatcaggatgtcgtattttggggagcatttttggggcgagaaaaatcatggctttgaggtc

SEQ ID NO: 285501 - DNA, 120 bp, Artificial Sequence
  ENSG00000130475_2 (sequence is synthesized)
ctgtaccacagcgtgaagcaggggcccatctccaccaaggagctggcggacttcatccgggagagggccaccatcgaggagacctactcgaaggcgatggcgaaactctccaagctggcc

SEQ ID NO: 285502 - DNA, 120 bp, Artificial Sequence
  ENSG00000130475_3 (sequence is synthesized)
agcaacgggacccccatggggaccttcgccccgctctgggaggtcttccgcgtctcctcggacaagctggcgctgtgccacctggaactgacacggaagttacaggatctcatcaaggac

SEQ ID NO: 285503 - DNA, 120 bp, Artificial Sequence
  ENSG00000130475_4 (sequence is synthesized)
gttctccgctacggcgaggaacagctcaagacccacaagaagtgcaaggaggaagtggtgagcaccttggatgctgtgcaggtactctcgggcgtcagccagctcctgcccaagtcccgc

SEQ ID NO: 285504 - DNA, 120 bp, Artificial Sequence
  ENSG00000130475_5 (sequence is synthesized)
gagaactacctgaaccgttgcatggaccaggagcggctgcggagggagagtaccagccagaaggagatggacaaggcggagactaaaaccaagaaggcggcagagagcctgcggcgctca

SEQ ID NO: 285505 - DNA, 120 bp, Artificial Sequence
  ENSG00000130475_6 (sequence is synthesized)
gtggaaaaatacaactcagcccgagctgactttgagcagaagatgctggactcagccctgcgcttccaagccatggaggagacacacctgaggcacatgaaggcactgctgggctcatat

SEQ ID NO: 285506 - DNA, 120 bp, Artificial Sequence
  ENSG00000130475_7 (sequence is synthesized)
gctcactcggtggaggacacgcacgtgcagattgggcaggtgcatgaggaatttaagcagaacatcgagaacgtcagcgtggagatgctactcaggaagtttgcagagagtaagggcaca

SEQ ID NO: 285507 - DNA, 120 bp, Artificial Sequence
  ENSG00000130475_8 (sequence is synthesized)
ggccgggagaagcctggacctctggacttcgaggcatacagtgcggctgccctgcaggaagcgatgaaacgtttgcggggagccaaggcctttcgccttccaggactaagccggcgggag

SEQ ID NO: 285508 - DNA, 120 bp, Artificial Sequence
  ENSG00000130475_9 (sequence is synthesized)
cgggagccagagccacctgcagctgtagatttcctggagcccgattcagggacatgtccagaggtggatgaagaaggtttcactgtccggcctgatgtgacccagaacagcacggccgag

SEQ ID NO: 285509 - DNA, 120 bp, Artificial Sequence
  ENSG00000130475_10 (sequence is synthesized)
ccctcccgtttctcgtccagcgactccgacttcgacgatgaagagccccgcaagttctatgtgcacatcaagcctgccccggcccgggctccagcctgcagccccgaggcagcagcggca

SEQ ID NO: 285510 - DNA, 120 bp, Artificial Sequence
  ENSG00000130475_11 (sequence is synthesized)
cagctcagggccaccgcgggcagcctcatccttcctcctggcccagggggcaccatgaaacgccattcttcacgggacgctgctgggaaaccccagagacctcggtctgcccccagaacc

SEQ ID NO: 285511 - DNA, 120 bp, Artificial Sequence
  ENSG00000130475_12 (sequence is synthesized)
cctccagcccctcccctttctcctcctcgtcgcccgaaaacgtggaggattccggcctggactctccgtcccacgcggcacctggcccctccccagattcctgggtcccccgcccaggca

SEQ ID NO: 285512 - DNA, 120 bp, Artificial Sequence
  ENSG00000130475_13 (sequence is synthesized)
ccccgcagagcccgcccagctgtagggcgccacccccagaggccaggggtatccgggcaccgcctctgccagactcgccgcagcccctcgcctcgtctccaggcccctgggggctggagg

SEQ ID NO: 285513 - DNA, 120 bp, Artificial Sequence
  ENSG00000130475_14 (sequence is synthesized)
ccttggccggaggagacctgatgcctgcacctgctgaccccacagccagggagggcctggcagccccacccaggagacttcgctctaggaaggtgtcctgccctctcacacgtagcaatg

SEQ ID NO: 285514 - DNA, 120 bp, Artificial Sequence
  ENSG00000130475_15 (sequence is synthesized)
gggacctgtctcgttccctgagcccctccccactgggctcttcagccgccagcactgccttggaacggcccagcttcttatcccagacaggacacggagtctcccggggtccgagccctg

SEQ ID NO: 285515 - DNA, 120 bp, Artificial Sequence
  ENSG00000130475_16 (sequence is synthesized)
tggtcctgggctcccaggatgccctgcccatagccacagccttcacagagtatgtccacgcctacttccgtggccacagccccagctgcctggctcgagtaactggggagctgaccatga

SEQ ID NO: 285516 - DNA, 120 bp, Artificial Sequence
  ENSG00000130475_17 (sequence is synthesized)
ccttccctgctggcatcgtgcgtgtgttcagcgggaccccaccaccacctgtcctcagcttccggcttgtacacacaaccgctattgagcacttccagcccaacgccgatctgctgttca

SEQ ID NO: 285517 - DNA, 120 bp, Artificial Sequence
  ENSG00000130475_18 (sequence is synthesized)
gtgacccctcccagagtgaccctgagaccaaagacttctggctcaacatggcagctctgaccgaagccctgcagcgccaggcagagcagaaccccactgcctcctactacaacgtggtgc

SEQ ID NO: 285518 - DNA, 120 bp, Artificial Sequence
  ENSG00000130475_19 (sequence is synthesized)
tgctgcgataccagttctcccgcccgggtccccagtctgtgcctctgcagctcagtgcccactggcagtgtggagccaccctcacccaggtctcagtggagtacggctaccggcccggtg

SEQ ID NO: 285519 - DNA, 120 bp, Artificial Sequence
  ENSG00000130475_20 (sequence is synthesized)
ccacggctgtgcccacaccactcacgaacgtccagatcctgctgcctgtgggggagcctgtgaccaacgtccgcttgcagccggctgccacctggaacctggaggagaagcggctcactt

SEQ ID NO: 285520 - DNA, 120 bp, Artificial Sequence
  ENSG00000130475_21 (sequence is synthesized)
ggaggcttccagatgtgtccgaggcaggcggttctggccgcctctctgccagctgggagccgctctcagggcccagcacacccagccccgtggctgcacagttcaccagcgaggggacca

SEQ ID NO: 285521 - DNA, 120 bp, Artificial Sequence
  ENSG00000130475_22 (sequence is synthesized)
ctctgtcgggcgtggacttggaactggtgggcagcggttaccgcatgtcgctggtgaagaggaggtttgccacagggatgtacctggtgagctgctgaacccgcaaatgctgctgcccca

SEQ ID NO: 285522 - DNA, 120 bp, Artificial Sequence
  ENSG00000130475_23 (sequence is synthesized)
gctctacactgcgccctggtgctggctgaccaccccctgccctcctgccggaccctggggcctcccaccccagcctccctgaggcccatactccacggagaggagccccatgcccagcct

SEQ ID NO: 285523 - DNA, 120 bp, Artificial Sequence
  ENSG00000130475_24 (sequence is synthesized)
ggctgagcccgagattcgctcctccccctcatgccaaccccacacaggtcccggccttttaatgttctttgaataaacactttattttctaataaaataaaaaaggaaaccttttcctgc

SEQ ID NO: 285524 - DNA, 120 bp, Artificial Sequence
  ENSG00000130475_25 (sequence is synthesized)
acacaagcctccaacttggtgctgacggaagtggcctcgtggctgtctcctggcgcctgccccgtcagacaggggccccatcccactcgctaccctgtccgatggggaaactgaggcacg

SEQ ID NO: 285525 - DNA, 120 bp, Artificial Sequence
  ENSG00000130475_26 (sequence is synthesized)
gagctggacagtgactcagacaccaggagctgcctggagtggagctgagagctcaggtctgggctcagccagtccagagtgcaaatctactgtcccttcctagctgtgtgatcttggcaa

SEQ ID NO: 285526 - DNA, 120 bp, Artificial Sequence
  ENSG00000130475_27 (sequence is synthesized)
gggcgggctccggtgtcagcgaccaagccgcaggtggcggcgagcgcggggctcggcccgagctcaggagatggggaaactgaggcacggagctggacagtgactcagacaccagacagg

SEQ ID NO: 285527 - DNA, 120 bp, Artificial Sequence
  ENSG00000130475_28 (sequence is synthesized)
agcgaccaagccgcaggtggcggcgagcgcggggctcggcccgagctcaggagatggggaaactgaggcacggagctggacagtgactcagacaccaggtgaacactggcttttgagggc

SEQ ID NO: 285528 - DNA, 120 bp, Artificial Sequence
  ENSG00000130475_29 (sequence is synthesized)
atttgtggagagggaagtcaccagaaggtgtagccttgggggcgtgcacaaggactttgaatgggggcccccctgaccttccctcgacgtggccgtggcctgcaggaggatgggcaggga

SEQ ID NO: 285529 - DNA, 120 bp, Artificial Sequence
  ENSG00000130475_30 (sequence is synthesized)
gggtgagttgcggttacagccttggacaggtagaggatctgcaagggatggaagttaaagtgggaagagtcaggctgggtttgaatccacacccaccccagacctcacaggccttacaac

SEQ ID NO: 285530 - DNA, 120 bp, Artificial Sequence
  ENSG00000130475_31 (sequence is synthesized)
cttgggcaagtcatagcttgtgtcatagggagaccaagggccagagtgggaacgtctaggcaacctgaagttgccccatgaaaaagtgcagagtcagtgctcaaacccagggccaaactg

SEQ ID NO: 285531 - DNA, 120 bp, Artificial Sequence
  ENSG00000130475_32 (sequence is synthesized)
aacttccaggacccagggtcattccagccagggaacttccacccccttcccatcctggagaattggggggttttcctgacctggcgtctcatggcctgtgcacccctccactgtccaggc

SEQ ID NO: 285532 - DNA, 120 bp, Artificial Sequence
  ENSG00000130475_33 (sequence is synthesized)
ggaagtggcctcgtggctgtctcctggcgcctgccccgtcagacaggggccccatcccactcgctaccctgtccgaatctcactctttcaaccaggttggagtgcagtggggcaatcttg

SEQ ID NO: 285533 - DNA, 120 bp, Artificial Sequence
  ENSG00000130475_34 (sequence is synthesized)
caggggtgaggcgtgggaggggtgccctgggtgttgctagagaggctggctggatgcattcgtgtgtgatgttgcccactttgtccacagggcaccatgaaacgccattcttcacgggac

SEQ ID NO: 285534 - DNA, 120 bp, Artificial Sequence
  ENSG00000130475_35 (sequence is synthesized)
actgcctgtccgtcccctgccgggcggcctgacccagcctcttgtgcagagacacctggggctccccggcaagatcccttctaagcattccttcttattttgcagatggggaaactgagg

SEQ ID NO: 285535 - DNA, 120 bp, Artificial Sequence
  ENSG00000130475_36 (sequence is synthesized)
gctcctacccactgctatgaactcttatacatgcctaaaaaccccacattccatgccccctcctccaatctagactccctcagctcttgtccctccacctagtccagttctgactctgtg

SEQ ID NO: 285536 - DNA, 120 bp, Artificial Sequence
  ENSG00000130475_37 (sequence is synthesized)
tgcagctgtgtgaggaagcacccctgcccggtctggcccaggctagaccgagatcccctcccctgcccaggctatcccagaagtcccctcctaggatagcccaggagtatccatattcca

SEQ ID NO: 285537 - DNA, 120 bp, Artificial Sequence
  ENSG00000130475_38 (sequence is synthesized)
caagctagtccagaattcttccttttgctaggttaggccaggaattgcctgtcccagagtaacgtagcatcttccctgcccaagctggcccaggattgttctgtttgccaaggctagccc

SEQ ID NO: 285538 - DNA, 120 bp, Artificial Sequence
  ENSG00000130475_39 (sequence is synthesized)
cgactttccctatcttcacaaggcagcccttcaaatgagttccaggattccttccctcccaggctgtttgagaacactctctactcagctaacttcagattcaaccccctccccaagcaa

SEQ ID NO: 285539 - DNA, 120 bp, Artificial Sequence
  ENSG00000130475_40 (sequence is synthesized)
gagctgccccagcttccatgtccagtgttgggggctgacagggggcaccagatgggctgcggaagctgacaccaacatctcttcctccatccccagagatttcctggagcccgattcagg

SEQ ID NO: 285540 - DNA, 120 bp, Artificial Sequence
  ENSG00000130475_41 (sequence is synthesized)
ctcagcgtgcagcacatacctgagccagtgccagcgctgtcccggggtggggtgagcctgatgaaccctgggtgtgaccttgcccgcccccaggaccttcgccccgctctgggaggtctt

SEQ ID NO: 285541 - DNA, 120 bp, Artificial Sequence
  ENSG00000130475_42 (sequence is synthesized)
agtggcctcgtggctgtctcctggcgcctgccccgtcagacaggggccccatcccactcgctaccctgtccgatggggaaactgaggcacggagctggacagtgactcagacaccagggc

SEQ ID NO: 285542 - DNA, 120 bp, Artificial Sequence
  ENSG00000130477_0 (sequence is synthesized)
atgtctctgctttgcgttggagtcaaaaaagccaagtttgatggtgcccaagagaaattcaacacgtacgtgaccctgaaagtgcagaatgtcaagagcacgaccatcgcggtgcggggc

SEQ ID NO: 285543 - DNA, 120 bp, Artificial Sequence
  ENSG00000130477_1 (sequence is synthesized)
agccagcccagctgggagcaggatttcatgttcgagattaaccgtctggatttgggactgacggtggaggtgtggaataagggtctcatctgggacacaatggtgggcactgtgtggatc

SEQ ID NO: 285544 - DNA, 120 bp, Artificial Sequence
  ENSG00000130477_2 (sequence is synthesized)
ccactgaggaccatccgccagtccaatgaggagggccctggagagtggctgacgctggactcccaggtcatcatggcagacagtgagatctgtggcaccaaggaccccaccttccaccgc

SEQ ID NO: 285545 - DNA, 120 bp, Artificial Sequence
  ENSG00000130477_3 (sequence is synthesized)
atcctcctggacacgcgctttgagctacccttagacattcctgaagaggaggctcgctactgggccaagaagctggagcagctcaatgctatgcgggaccaggatgaatattcgttccaa

SEQ ID NO: 285546 - DNA, 120 bp, Artificial Sequence
  ENSG00000130477_4 (sequence is synthesized)
gatgagcaagacaagcctctgcctgtccccagcaaccagtgctgcaactggaattattttggctggggtgagcagcacaacgatgaccccgacagtgcagtggatgatcgtgacagtgac

SEQ ID NO: 285547 - DNA, 120 bp, Artificial Sequence
  ENSG00000130477_5 (sequence is synthesized)
taccgcagtgaaacgagcaacagcatcccgccgccctattatactacgtcacaacccaacgcctcagtccaccaatattctgttcgcccaccacccctgggctcccgggagtcctacagt

SEQ ID NO: 285548 - DNA, 120 bp, Artificial Sequence
  ENSG00000130477_6 (sequence is synthesized)
gactccatgcacagttacgaggagttctctgagccacaagccctcagccccacgggtagcagccgctatgcctcttccggggagctgagccagggaagctctcagctgagcgaggacttc

SEQ ID NO: 285549 - DNA, 120 bp, Artificial Sequence
  ENSG00000130477_7 (sequence is synthesized)
gaccctgacgagcacagcctgcagggctccgacatggaggatgagcgggaccgggactcctaccactcctgccacagctcggtcagctaccacaaagactcgcctcgctgggaccaggat

SEQ ID NO: 285550 - DNA, 120 bp, Artificial Sequence
  ENSG00000130477_8 (sequence is synthesized)
gaggaagagctggaggaggacctggaggacttcctggaggaggaggagctgcctgaagatgaggaggagctggaggaggaggaggaggaggtgcctgacgatttgggcagctatgcccag

SEQ ID NO: 285551 - DNA, 120 bp, Artificial Sequence
  ENSG00000130477_9 (sequence is synthesized)
cgtgaagacgtagctgtggctgagcccaaagacttcaaacgcatcagcctcccgccagctgccccagggaaggaggacaaggccccagtggcacccaccgaggcccccgacatggccaag

SEQ ID NO: 285552 - DNA, 120 bp, Artificial Sequence
  ENSG00000130477_10 (sequence is synthesized)
gtggcccccaagccagccacgcccgacaaggtgcctgcagctgagcagatccctgaggctgagccacccaaggacgaggagagtttcaggccgagagaggatgaggaaggccaggagggg

SEQ ID NO: 285553 - DNA, 120 bp, Artificial Sequence
  ENSG00000130477_11 (sequence is synthesized)
caggactccatgtccagggccaaggccaactggctgcgtgccttcaacaaggtgcggatgcagctgcaggaggcccggggagaaggagagatgtctaaatccctatggttcaaaggcggc

SEQ ID NO: 285554 - DNA, 120 bp, Artificial Sequence
  ENSG00000130477_12 (sequence is synthesized)
ccagggggcggtctcatcatcatcgacagcatgccagacatccgcaagaggaaacctatcccactcgtgagcgacttggccatgtccctggtccagtccaggaaagcgggcatcacctcg

SEQ ID NO: 285555 - DNA, 120 bp, Artificial Sequence
  ENSG00000130477_13 (sequence is synthesized)
gccttggcctccagcacgttgaacaacgaggagctgaaaaaccacgtttacaagaagaccctgcaagccttaatctaccccatctcgtgcacgacgccacacaacttcgaagtgtggacg

SEQ ID NO: 285556 - DNA, 120 bp, Artificial Sequence
  ENSG00000130477_14 (sequence is synthesized)
gccaccacgcccacctactgctacgagtgcgaggggctgctgtggggcatcgcgaggcagggcatgcgctgcaccgagtgcggtgtcaagtgccacgagaagtgccaggacctgctcaac

SEQ ID NO: 285557 - DNA, 120 bp, Artificial Sequence
  ENSG00000130477_15 (sequence is synthesized)
gccgactgcctgcagcgggctgcggagaagagctccaagcacggggcggaggaccggacacagaacatcatcatggtgctcaaggaccgcatgaagatccgggagcgcaacaagcccgag

SEQ ID NO: 285558 - DNA, 120 bp, Artificial Sequence
  ENSG00000130477_16 (sequence is synthesized)
atcttcgagctcatccaggagatcttcgcggtgaccaagacggcgcacacgcagcagatgaaggcggtcaagcagagcgtgctggacggcacgtccaagtggtccgccaagatcagcatc

SEQ ID NO: 285559 - DNA, 120 bp, Artificial Sequence
  ENSG00000130477_17 (sequence is synthesized)
accgtggtctgcgcccagggcttgcaggcaaaggacaagacaggatccagtgacccctatgtcaccgtccaggtcgggaagaccaagaaacggacaaaaaccatctatgggaacctcaac

SEQ ID NO: 285560 - DNA, 120 bp, Artificial Sequence
  ENSG00000130477_18 (sequence is synthesized)
ccggtgtgggaggagaatttccactttgaatgtcacaattcctccgaccgcatcaaggtgcgcgtctgggacgaggatgacgacatcaaatcccgcgtgaaacagaggttcaagagggaa

SEQ ID NO: 285561 - DNA, 120 bp, Artificial Sequence
  ENSG00000130477_19 (sequence is synthesized)
tctgacgatttcctggggcagacgatcattgaggtgcggacgctcagcggcgagatggacgtgtggtacaacctggacaagcgaactgacaaatctgccgtgtcgggtgccatccggctc

SEQ ID NO: 285562 - DNA, 120 bp, Artificial Sequence
  ENSG00000130477_20 (sequence is synthesized)
cacatcagtgtggagatcaaaggcgaggagaaggtggccccgtaccatgtccagtacacctgtctgcatgagaacctgttccacttcgtgaccgacgtgcagaacaatggggtcgtgaag

SEQ ID NO: 285563 - DNA, 120 bp, Artificial Sequence
  ENSG00000130477_21 (sequence is synthesized)
atcccagatgccaagggtgacgatgcctggaaggtttactacgatgagacagcccaggagattgtggacgagtttgccatgcgctacggcgtcgagtccatctaccaagccatgacccac

SEQ ID NO: 285564 - DNA, 120 bp, Artificial Sequence
  ENSG00000130477_22 (sequence is synthesized)
tttgcctgcctctcctccaagtatatgtgcccaggggtgcctgccgtcatgagcaccctgctcgccaacatcaatgcctactacgcacacaccaccgcctccaccaacgtgtctgcctcc

SEQ ID NO: 285565 - DNA, 120 bp, Artificial Sequence
  ENSG00000130477_23 (sequence is synthesized)
gaccgcttcgccgcctccaactttgggaaagagcgcttcgtgaaactcctggaccagctgcataactccctgcggattgacctctccatgtaccggaataacttcccagccagcagcccg

SEQ ID NO: 285566 - DNA, 120 bp, Artificial Sequence
  ENSG00000130477_24 (sequence is synthesized)
gagagactccaggacctcaaatccactgtggaccttctcaccagcatcaccttctttcggatgaaggtacaagaactccagagcccgccccgagccagccaggtggtaaaggactgtgtg

SEQ ID NO: 285567 - DNA, 120 bp, Artificial Sequence
  ENSG00000130477_25 (sequence is synthesized)
aaagcctgccttaattctacctacgagtacatcttcaataactgccatgaactgtacagccgggagtaccagacagacccggccaagaagggggaagttctcccagaggaacaggggccc

SEQ ID NO: 285568 - DNA, 120 bp, Artificial Sequence
  ENSG00000130477_26 (sequence is synthesized)
agcatcaagaacctcgacttctggtccaagctgattaccctcatagtgtccatcattgaggaagacaagaattcctacactccctgcctcaaccagtttccccaggagctgaatgtgggt

SEQ ID NO: 285569 - DNA, 120 bp, Artificial Sequence
  ENSG00000130477_27 (sequence is synthesized)
aaaatcagcgctgaagtgatgtggaatctgtttgcccaagacatgaagtacgccatggaggagcacgacaagcatcgtctatgcaagagtgccgactacatgaacctccacttcaaggtg

SEQ ID NO: 285570 - DNA, 120 bp, Artificial Sequence
  ENSG00000130477_28 (sequence is synthesized)
aaatggctctacaatgagtatgtgacggaacttcccgccttcaaggaccgcgtgcctgagtaccctgcatggtttgaacccttcgtcatccagtggctggatgagaatgaggaggtgtcc

SEQ ID NO: 285571 - DNA, 120 bp, Artificial Sequence
  ENSG00000130477_29 (sequence is synthesized)
cgggatttcctgcacggtgccctggagcgagacaagaaggatgggttccagcagacctcagagcatgccctattctcctgctccgtggtggatgttttctcccaactcaaccagagcttt

SEQ ID NO: 285572 - DNA, 120 bp, Artificial Sequence
  ENSG00000130477_30 (sequence is synthesized)
gaaatcatcaagaaactcgagtgtcccgaccctcagatcgtggggcactacatgaggcgctttgccaagaccatcagtaatgtgctcctccagtatgcagacatcatctccaaggacttt

SEQ ID NO: 285573 - DNA, 120 bp, Artificial Sequence
  ENSG00000130477_31 (sequence is synthesized)
gcctcctactgctccaaggagaaggagaaagtgccctgcattctcatgaataacactcaacagctacgagttcagctggagaagatgttcgaagccatgggaggaaaggagctggatgct

SEQ ID NO: 285574 - DNA, 120 bp, Artificial Sequence
  ENSG00000130477_32 (sequence is synthesized)
gaagccagtgacatcctgaaggagcttcaggtgaaactcaataacgtcttggatgagctcagccgggtgtttgctaccagcttccagccgcacattgaagagtgtgtcaaacagatgggt

SEQ ID NO: 285575 - DNA, 120 bp, Artificial Sequence
  ENSG00000130477_33 (sequence is synthesized)
gacatccttagccaggttaagggcacaggcaatgtgccagccagtgcctgcagcagcgtggcccaggacgcggacaatgtgttgcagcccatcatggacctgctggacagcaacctgacc

SEQ ID NO: 285576 - DNA, 120 bp, Artificial Sequence
  ENSG00000130477_34 (sequence is synthesized)
ctctttgccaaaatctgtgagaagactgtgctgaagcgagtgctgaaggagctgtggaagctggttatgaacaccatggagaaaaccatcgtcctgccgcccctcactgaccagacgatg

SEQ ID NO: 285577 - DNA, 120 bp, Artificial Sequence
  ENSG00000130477_35 (sequence is synthesized)
atcgggaacctcttgagaaaacatggcaagggattagaaaagggcagggtgaaattgccaagccactcagacggaacccagatgatcttcaatgcagccaaggagctgggtcagctgtcc

SEQ ID NO: 285578 - DNA, 120 bp, Artificial Sequence
  ENSG00000130477_36 (sequence is synthesized)
aaactcaaggatcacatggtacgagaagaagccaagagcttgaccccaaagcagtgcgcggttgttgagttggccctggacaccatcaagcaatatttccacgcgggtggcgtgggcctc

SEQ ID NO: 285579 - DNA, 120 bp, Artificial Sequence
  ENSG00000130477_37 (sequence is synthesized)
aagaagaccttcctggagaagagcccggacctgcaatccttgcgctatgccctgtcgctctacacgcaggccaccgacctgctaatcaagacctttgtacagacgcaatcggcccagggc

SEQ ID NO: 285580 - DNA, 120 bp, Artificial Sequence
  ENSG00000130477_38 (sequence is synthesized)
ttgggtgtagaagaccctgtgggtgaagtctctgtccatgttgagctgttcactcatccaggaactggggaacacaaggtcacagtgaaagtggtggctgccaatgacctcaagtggcag

SEQ ID NO: 285581 - DNA, 120 bp, Artificial Sequence
  ENSG00000130477_39 (sequence is synthesized)
acttctggcatcttccggccgttcatcgaggtcaacatcattgggccccagctcagcgacaagaaacgcaagtttgcgaccaaatccaagaacaatagctgggctcccaagtacaatgag

SEQ ID NO: 285582 - DNA, 120 bp, Artificial Sequence
  ENSG00000130477_40 (sequence is synthesized)
tgcgtgagctggcccagcgcgggagcgccgcctgctggctgccgctcggccgccgcatccacatggacgacacgggcctcacggtgctgcgaatcctctcgcagcgcagcaacgacgagg

SEQ ID NO: 285583 - DNA, 120 bp, Artificial Sequence
  ENSG00000130477_41 (sequence is synthesized)
tggccaaggagttcgtgaagctcaagtcggacacgcgctccgccgaggagggcggtgccgcgcctgcgccttagcgcgggcggtcggccgagcggcactgcgcctgcgcggagggcgctg

SEQ ID NO: 285584 - DNA, 120 bp, Artificial Sequence
  ENSG00000130477_42 (sequence is synthesized)
ggcggggagggacggggcttgcgccttggtgggacctccccaggggcggggctcggggggctccacgccaagggtgggctgcgcctacgcccttgactcagctttcccttttggggaatt

SEQ ID NO: 285585 - DNA, 120 bp, Artificial Sequence
  ENSG00000130477_43 (sequence is synthesized)
aggaatggaggatgccccgccctctcgggaggccacgcccaagggcgcgacgaaggaaggagccacatccccaacttgaggccacgcccccagcacctagggggcattttgagctgggat

SEQ ID NO: 285586 - DNA, 120 bp, Artificial Sequence
  ENSG00000130477_44 (sequence is synthesized)
gggggaaacctcgtccctatggaggaggccacatcccggggctctggtaccgggaggcaccacctcatgtcccctggaaaagccataagatgggacccagacccctgggaccccagacca

SEQ ID NO: 285587 - DNA, 120 bp, Artificial Sequence
  ENSG00000130477_45 (sequence is synthesized)
attgccaagtatggaaatctcagctccctcgagggggggccctgggcaaggggtagggctctctggagcgcccctctaggtggcctggggactggagggaccaggatgctggttggaggg

SEQ ID NO: 285588 - DNA, 120 bp, Artificial Sequence
  ENSG00000130477_46 (sequence is synthesized)
ccccggaataccggagtccctttagatatttgtgcaaaaaataaatggggggaggggggaggatgggatttcaaaagcacatgcgcccttgggcgcccaaaccctgggggccgaggggac

SEQ ID NO: 285589 - DNA, 120 bp, Artificial Sequence
  ENSG00000130477_47 (sequence is synthesized)
ggctctggttccccacgctgcccctacttccctttgggagtttgcctctccctctcccccaacaaacccagtcctcatatcatagagttcaacacacccatttgacagatggcaaaactg

SEQ ID NO: 285590 - DNA, 120 bp, Artificial Sequence
  ENSG00000130477_48 (sequence is synthesized)
aggcttaaagagctgcttgagacttggccaaggttccaggtgccataccctctgtgcccctcccttaggcctgtgtgccccatggaagggtgggctgagatcgggatgacctgacacagc

SEQ ID NO: 285591 - DNA, 120 bp, Artificial Sequence
  ENSG00000130477_49 (sequence is synthesized)
tccctattgctgctaattccccctcggcctcctccaaggggtgggaattccaggccaagacccctacttcgcctttccttctccggctgccaagcaggacctttgccctcagccctttct

SEQ ID NO: 285592 - DNA, 120 bp, Artificial Sequence
  ENSG00000130477_50 (sequence is synthesized)
cctgggatctccatgggggatgccatgagggcctcccaccacaaaagagaatttgggatcccctggtcccaggtttctccatcccttcttccttttccagaattttccaaataggaaaga

SEQ ID NO: 285593 - DNA, 120 bp, Artificial Sequence
  ENSG00000130477_51 (sequence is synthesized)
acagaaggagaccagaaactctaggggggagaaagagaatgagagaaagagaatgagagagagagaaacacaaacacagtgacacagtgagagcttagtctccaagagcctattcattga

SEQ ID NO: 285594 - DNA, 120 bp, Artificial Sequence
  ENSG00000130477_52 (sequence is synthesized)
ttcaaacacccaagccacaggatacctcagatggccctcttgccagctggaagctctttctccaatgagcaaagttacagtgacctggctggagttacctggtgcacataggaccttagg

SEQ ID NO: 285595 - DNA, 120 bp, Artificial Sequence
  ENSG00000130477_53 (sequence is synthesized)
ggaaagttcagcgtggactacacttgctctgggatctgcttttccacatgtgtgtatggcacgcctttttctgctggattgggaaggacaagattttgctgtgctagggagaaatgaaaa

SEQ ID NO: 285596 - DNA, 120 bp, Artificial Sequence
  ENSG00000130477_54 (sequence is synthesized)
cggggtgagctgagtagctgggtttctggaggatagaacatcagatggggaggctttccgaggtgaagaatgagagggaaccacttactagagagaaaagagctccaggcctggggaaca

SEQ ID NO: 285597 - DNA, 120 bp, Artificial Sequence
  ENSG00000130477_55 (sequence is synthesized)
gcacgtgcgaaggccaggagagaagaactgttgaaacaacgagaagggtggcacggctggagctgagccagcaagggggatcgtgaggagccttggggttggggagatctgcagaagcat

SEQ ID NO: 285598 - DNA, 120 bp, Artificial Sequence
  ENSG00000130477_56 (sequence is synthesized)
cagaccaggcagggcctcgtacgcagtcctgaggagttttacttttattctaagacagttggggagctccaggagctgttttaagttggggagagactggattccagcctgcaaaagctg

SEQ ID NO: 285599 - DNA, 120 bp, Artificial Sequence
  ENSG00000130477_57 (sequence is synthesized)
ttttgtgaagactaaaaccagtgaggagaggtggaggtgctttggggacactgaaatggattcttggaaagattctgaaggctgtgttgaaaagacacctatagctgtggggacatgact

SEQ ID NO: 285600 - DNA, 69 bp, Artificial Sequence
  ENSG00000130477_58 (sequence is synthesized)
gctgtgttgaaaagacacctatagctgtggggacatgactataatcccagcatttggggagaccgaggc

SEQ ID NO: 285601 - DNA, 120 bp, Artificial Sequence
  ENSG00000130477_59 (sequence is synthesized)
gctactcaggagactgaggcgggagaattgtttgaaccctggaggcagaggttgtagtgagtcgtgatcacacaactgcactccagcctgggcaacagaacaatactccattccctcccc

SEQ ID NO: 285602 - DNA, 120 bp, Artificial Sequence
  ENSG00000130477_60 (sequence is synthesized)
agaacaatactccattccctcccctctaccccaccaaaaaaaaaaaaaaatcctgcccttagatgagctctagggctgctgagtacagttgtcccagttgcacagtgcccaagggtttgg

SEQ ID NO: 285603 - DNA, 120 bp, Artificial Sequence
  ENSG00000130477_61 (sequence is synthesized)
cattgctaagaaggccacgtgcaaatcctagatattgagtgttgtatgtttgtgacgttggtttcccgacatgtgaatggcccaagtgtctggaagaagtggcgccactttctaatttgc

SEQ ID NO: 285604 - DNA, 120 bp, Artificial Sequence
  ENSG00000130477_62 (sequence is synthesized)
ttggagatgttgcatgtcccttaaattcagacaggtgcaggtaactggaggttctgaaccaaaggttaaaatgcaaattctcatacagggttgggaagttgtagccagggataagcttat

SEQ ID NO: 285605 - DNA, 120 bp, Artificial Sequence
  ENSG00000130477_63 (sequence is synthesized)
gtgactgttatatggactgaggagcagatgtgaatttcgaaccatgacatggctgagggtaggggtcgggtggatggatgattcagggttgtaacccatagagcccaaaggggaagtgat

SEQ ID NO: 285606 - DNA, 120 bp, Artificial Sequence
  ENSG00000130477_64 (sequence is synthesized)
ctgtgacctggggtgagggtgatctggaagatttttggatggctggaaagaaatggggaagtcgagctgcctgagagagccaagttatttcccaaaagattccttaggagtctttctgtt

SEQ ID NO: 285607 - DNA, 120 bp, Artificial Sequence
  ENSG00000130477_65 (sequence is synthesized)
caagacctccgtgtgtgtgtgtgtgtgtttagggttccccagcaatggcccaggcatgtgaaggaaacaagcttcttcagggaatatttgttgaatgagttttcctgactcccaggctag

SEQ ID NO: 285608 - DNA, 120 bp, Artificial Sequence
  ENSG00000130477_66 (sequence is synthesized)
aactgtttttgcaatttccaccctcttttctttcccccagagaactcctattcgtccttcaaaacccatcacggaaacccctcttggagaaaaccctccttccttcccctcaggactttc

SEQ ID NO: 285609 - DNA, 120 bp, Artificial Sequence
  ENSG00000130477_67 (sequence is synthesized)
ccagccaccgtctctcctccagtccagcctgatgccatgggactgggggtttctctgtccagctctgtttctcccagactggggtctgaggactctcaggacccccaactttacctagca

SEQ ID NO: 285610 - DNA, 120 bp, Artificial Sequence
  ENSG00000130477_68 (sequence is synthesized)
caggctgggcacaagtgggtgacagggagtctacgcctagtggaattatgtattggggcagggtcagtgtgagaatacacatccgcatgcatgtctgtccatgtctgtccgtaccaacct

SEQ ID NO: 285611 - DNA, 120 bp, Artificial Sequence
  ENSG00000130477_69 (sequence is synthesized)
tccccttccacacggacctgggcacataggaggtgtctgagcctgacacatgggacagagagtggacatggctgagacacggacagagaaaagacaaggagtccagggggctgaaagcct

SEQ ID NO: 285612 - DNA, 120 bp, Artificial Sequence
  ENSG00000130477_70 (sequence is synthesized)
tttgaaatcaggaagttcctgtattggcagaacaaagcccagagaggagcagggctttcctcaacgccacccagcaagtggacacagagcccggccttggatgacacctccagggttctg

SEQ ID NO: 285613 - DNA, 120 bp, Artificial Sequence
  ENSG00000130477_71 (sequence is synthesized)
aaccctggacctcgctttatgcaaggagctggccccacatttccatgaatcggggaaacagcacaagaaggttggcctgtggcagggcaagggttaaaggggtgacattgagggatgcct

SEQ ID NO: 285614 - DNA, 120 bp, Artificial Sequence
  ENSG00000130477_72 (sequence is synthesized)
cagagtcaaagtcccctgaccaagaggaatagagtagaaaacacagagacagagggtgagatcacgccccgatgaggacggagagagacagagatggagagagacatagaggtggaaata

SEQ ID NO: 285615 - DNA, 120 bp, Artificial Sequence
  ENSG00000130477_73 (sequence is synthesized)
tacagagaaagataaatgcagagaccaaggcagggagtgtcgggggaagtaaagagggtgtcctgaagaaagaaggatctgttcactcttaccagtctgtcctcgaatgatttgcataaa

SEQ ID NO: 285616 - DNA, 120 bp, Artificial Sequence
  ENSG00000130477_74 (sequence is synthesized)
atgaggaggtgcctgtccacacccccaattcctctctcaggccccagagcctgagacctcaccatgcccccatcagagatgcaaaaaactaaacacccaactagaaatccttgggacctc

SEQ ID NO: 285617 - DNA, 120 bp, Artificial Sequence
  ENSG00000130477_75 (sequence is synthesized)
tctcggctgggatctcagagcctttctgtcccctacccctaccccatgtgctgtcgattttgcagatggggacaacctggggcctcccggaactctgccaccctggggaagttgggggag

SEQ ID NO: 285618 - DNA, 120 bp, Artificial Sequence
  ENSG00000130477_76 (sequence is synthesized)
ggccttagtcccggatcacaaccccgtctgctccccagaatcctttcctaagaatcgttgaggaccaaagttgtctttgctgacacgtgttgcttttctctttgccttttattgtttcag

SEQ ID NO: 285619 - DNA, 120 bp, Artificial Sequence
  ENSG00000130477_77 (sequence is synthesized)
agaaaaatcaagttgactgtgtcaagtaacaccccaccccttacccccgtccagccatagtggctctctggagacacaggtcacaggcggagggtcccctgatcatccccaaccacacag

SEQ ID NO: 285620 - DNA, 120 bp, Artificial Sequence
  ENSG00000130477_78 (sequence is synthesized)
ccagggggacttgacccctgtccacccctgtctcgtgctccctcagacccccacaaaccggccaagcagtccggggaggcttcccctccacacaactcttagcatgtgattgcagatgtg

SEQ ID NO: 285621 - DNA, 120 bp, Artificial Sequence
  ENSG00000130477_79 (sequence is synthesized)
aaatcaaaacgttgtttgttttttgttttgttttgattctaccccgtcggtccagtgtctgcacagacgccttcatttctctgtaaatatgtgacttggaacaaatgtttaacacaaacg

SEQ ID NO: 285622 - DNA, 120 bp, Artificial Sequence
  ENSG00000130477_80 (sequence is synthesized)
agaagtggtcatgaatgcatggtgttgagatgttttgcactattctgactttttggtctctgtaaaaatattttattaacagcagacattaaaaaaagaaaaaccacacacagccttgga

SEQ ID NO: 285623 - DNA, 80 bp, Artificial Sequence
  ENSG00000130477_81 (sequence is synthesized)
gcgctgtccgcgcccccggtgctgaaccaagatggccggtggcggccgggccccggcgtgagccaagcgcgggctgcagc

SEQ ID NO: 285624 - DNA, 120 bp, Artificial Sequence
  ENSG00000130477_82 (sequence is synthesized)
aagaaccaagatggtctctggggctggagtgtcagctgtagcacccctgccctcacccagctgtatgttgttacctgcagggaacccagatgatcttcaatgcagccaaggagctgggtc

SEQ ID NO: 285625 - DNA, 120 bp, Artificial Sequence
  ENSG00000130477_83 (sequence is synthesized)
gtgtatatctcggggtgagggcacacgccttcagtgtgtcactgtctggctgttgcaaatgaagccttcagggtgtgagctgcaaagctttgggctcttgcaggaaactctgctactccc

SEQ ID NO: 285626 - DNA, 120 bp, Artificial Sequence
  ENSG00000130477_84 (sequence is synthesized)
agagttcccagcccctctcatggaccccccaccaggcctggggtcgtgggattacttgagtcctccttgcccccaccagtccccagagatgcccgccccaacaacacgcccaggaacctg

SEQ ID NO: 285627 - DNA, 120 bp, Artificial Sequence
  ENSG00000130477_85 (sequence is synthesized)
agcacaaaagctcccttccatttgcaggtgaccccatgggaccccagcttcctccagacccagaccctgaaaccatcccaaggtccctggcggtgggtaggggaggctctggggagaggt

SEQ ID NO: 285628 - DNA, 120 bp, Artificial Sequence
  ENSG00000130477_86 (sequence is synthesized)
gtcactggatagttggatggctgagtagatggtggcatgaaggggatggaaagttgggtgggtaaataattggaaggattggtgagtaaatatttgtgtggatgaatgaatggtggatga

SEQ ID NO: 285629 - DNA, 120 bp, Artificial Sequence
  ENSG00000130477_87 (sequence is synthesized)
ataggtgacatgagggatgggtaggtgggtggacgcatggattaaaagataaatgtttagaaggatagagggaggatagatgttttaaaaagatggatgggtggatagttgggtaaatat

SEQ ID NO: 285630 - DNA, 120 bp, Artificial Sequence
  ENSG00000130477_88 (sequence is synthesized)
gtaacatgaagactgaattttgacaacatggcaatcaatggaataagaaaaaagaaaagaattgcattaggctcagagaggttaagcaatctacccaagatcacacagcaaggcagtaaa

SEQ ID NO: 285631 - DNA, 120 bp, Artificial Sequence
  ENSG00000130477_89 (sequence is synthesized)
aggccagaacccaggattcttggcttcccaagagcacctcccatcctggccccccatcagtgcctccctatcagggctgatgacctggtgccgccagcacaggtgggtgggaggccgtca

SEQ ID NO: 285632 - DNA, 120 bp, Artificial Sequence
  ENSG00000130479_0 (sequence is synthesized)
gagaacgccggggcggcccgaagatggcggcggtggctggatctggggctgccgcggctccgagctcactgctcctcgtggtgggcagcgagttcgggagcccggggctcctcacctacg

SEQ ID NO: 285633 - DNA, 120 bp, Artificial Sequence
  ENSG00000130479_1 (sequence is synthesized)
tcctggaggagctcgaaagaggcatccggtcttgggatgtcgatcctggcgtctgcaaccttgatgaacagctcaaggtctttgtgtcccgacactctgccaccttctccagcattgtga

SEQ ID NO: 285634 - DNA, 120 bp, Artificial Sequence
  ENSG00000130479_2 (sequence is synthesized)
aaggccagcggagcctgcaccaccgtggagacaacctggagaccctggtcctcctgaacccatcagacaagtccctgtatgatgagctccggaaccttctgttggaccctgcctctcaca

SEQ ID NO: 285635 - DNA, 120 bp, Artificial Sequence
  ENSG00000130479_3 (sequence is synthesized)
agctactggtgttggctgggccctgcctggaggagacgggggagctgctgctacagacagggggcttctcgcctcaccacttcctccaggtcctgaaggacagagagatccgggacatcc

SEQ ID NO: 285636 - DNA, 120 bp, Artificial Sequence
  ENSG00000130479_4 (sequence is synthesized)
tggccaccacgcccccacctgtgcagccgcccatactcaccatcacctgccccaccttcggtgactgggctcagctggcacccgctgtgcctggccttcagggggcgctccggctccagc

SEQ ID NO: 285637 - DNA, 120 bp, Artificial Sequence
  ENSG00000130479_5 (sequence is synthesized)
tgcggctgaaccccccggcgcagctgcccaactctgagggcctgtgcgaattcctggagtacgtggctgagtctctggagccaccgtcccccttcgagctgctggagcccccgacctccg

SEQ ID NO: 285638 - DNA, 120 bp, Artificial Sequence
  ENSG00000130479_6 (sequence is synthesized)
ggggcttcctcaggctgggccggccctgctgctacatcttccctggaggcctcggggatgccgccttcttcgccgtcaatggcttcactgtgctggtcaacggtggctcaaaccccaagt

SEQ ID NO: 285639 - DNA, 120 bp, Artificial Sequence
  ENSG00000130479_7 (sequence is synthesized)
ccagtttctggaagctggtgcggcacctggaccgcgtggatgccgtgctggtgacccaccctggcgccgacagcctccccggcctcaacagcctgctgcggcgcaaactggcggagcgct

SEQ ID NO: 285640 - DNA, 120 bp, Artificial Sequence
  ENSG00000130479_8 (sequence is synthesized)
ccgaggtggctgctggtgggggctcctgggacgacaggctgcgcaggctcatctcccccaacctgggggtcgtgttcttcaacgcctgcgaggccgcgtcgcggctggcgcgcggcgagg

SEQ ID NO: 285641 - DNA, 120 bp, Artificial Sequence
  ENSG00000130479_9 (sequence is synthesized)
atgaggcggagctggcgctgagcctcctggcgcagctgggcatcacgcctctgccactcagccgcggccccgtgccagccaaacccaccgtgctcttcgagaagatgggcgtgggccggc

SEQ ID NO: 285642 - DNA, 120 bp, Artificial Sequence
  ENSG00000130479_10 (sequence is synthesized)
tggacatgtatgtgctgcacccgccctccgccggcgccgagcgcacgctggcctctgtgtgcgccctgctggtgtggcaccccgccggccccggcgagaaggtggtgcgcgtgctgttcc

SEQ ID NO: 285643 - DNA, 120 bp, Artificial Sequence
  ENSG00000130479_11 (sequence is synthesized)
ccggttgcaccccgcccgcctgcctcctggacggcctggtccgcctgcagcacttgaggttcctgcgagagcccgtggtgacgccccaggacctggaggggccggggcgagccgagagca

SEQ ID NO: 285644 - DNA, 120 bp, Artificial Sequence
  ENSG00000130479_12 (sequence is synthesized)
aagagagcgtgggctcccgggacagctcgaagagagagggcctcctggccacccaccctagacctggccaggagcgccctggggtggcccgcaaggagccagcacgggctgaggccccac

SEQ ID NO: 285645 - DNA, 120 bp, Artificial Sequence
  ENSG00000130479_13 (sequence is synthesized)
ccaaaccgagtgtctcccggacccagccgcgggaggtgcgccgggcagcctcttctgtgcccaacctcaagaagacgaatgcccaggcggcacccaagccccgcaaagcgcccagcacgt

SEQ ID NO: 285646 - DNA, 120 bp, Artificial Sequence
  ENSG00000130479_14 (sequence is synthesized)
cccactctggcttcccgccggtggcaaatggaccccgcagcccgcccagcctccgatgtggagaagccagcccccccagtgcagcctgcggctctccggcctcccagctggtggccacgc

SEQ ID NO: 285647 - DNA, 120 bp, Artificial Sequence
  ENSG00000130479_15 (sequence is synthesized)
ccagcctggagctggggccgatcccagccggggaggagaaggcactggagctgcctttggccgccagctcaatcccaaggccacgcacaccctcccctgagtcccaccggagccccgcag

SEQ ID NO: 285648 - DNA, 120 bp, Artificial Sequence
  ENSG00000130479_16 (sequence is synthesized)
agggcagcgagcggctgtcgctgagcccactgcggggcggggaggccgggccagacgcctcacccacagtgaccacacccacggtgaccacgccctcactacccgcagaggtgggctccc

SEQ ID NO: 285649 - DNA, 120 bp, Artificial Sequence
  ENSG00000130479_17 (sequence is synthesized)
cgcactcgaccgaggtggacgagtccctgtcggtgtcctttgagcaggtgctgccgccatccgcccccaccagtgaggctgggctgagcctcccgctgcgtggcccccgggcgcggcgct

SEQ ID NO: 285650 - DNA, 120 bp, Artificial Sequence
  ENSG00000130479_18 (sequence is synthesized)
cggcttccccacacgatgtggacctgtgcctggtgtcaccctgtgaatttgagcatcgcaaggcggtgccaatggcaccggcacctgcgtcccccggcagctcgaatgacagcagtgccc

SEQ ID NO: 285651 - DNA, 120 bp, Artificial Sequence
  ENSG00000130479_19 (sequence is synthesized)
ggtcacaggaacgggcaggtgggctgggggccgaggagacgccacccacatcggtcagcgagtccctgcccaccctgtctgactcggatcccgtgcccctggcccccggtgcggcagact

SEQ ID NO: 285652 - DNA, 120 bp, Artificial Sequence
  ENSG00000130479_20 (sequence is synthesized)
cagacgaagacacagagggctttggagtccctcgccacgaccctttgcctgaccccctcaaggtccccccaccactgcctgacccatccagcatctgcatggtggaccccgagatgctgc

SEQ ID NO: 285653 - DNA, 120 bp, Artificial Sequence
  ENSG00000130479_21 (sequence is synthesized)
cccccaagacagcacggcaaacggagaacgtcagccgcacccggaagcccctggcccgccccaactcacgcgctgccgcccccaaagccactccagtggctgctgccaaaaccaaggggc

SEQ ID NO: 285654 - DNA, 120 bp, Artificial Sequence
  ENSG00000130479_22 (sequence is synthesized)
ttgctggtggggaccgtgccagccgaccactcagtgcccggagtgagcccagtgagaagggaggccgggcacccctgtccagaaagtcctcaacccccaagactgccactcgaggcccgt

SEQ ID NO: 285655 - DNA, 120 bp, Artificial Sequence
  ENSG00000130479_23 (sequence is synthesized)
cggggtcagccagcagccggcccggggtgtcagccaccccacccaagtccccggtctacctggacctggcctacctgcccagcgggagcagcgcccacctggtggatgaggagttcttcc

SEQ ID NO: 285656 - DNA, 120 bp, Artificial Sequence
  ENSG00000130479_24 (sequence is synthesized)
agcgcgtgcgcgcgctctgctacgtcatcagtggccaggaccagcgcaaggaggaaggcatgcgggccgtcctggacgcgctactggccagcaagcagcattgggaccgtgacctgcagg

SEQ ID NO: 285657 - DNA, 120 bp, Artificial Sequence
  ENSG00000130479_25 (sequence is synthesized)
tgaccctgatccccactttcgactcggtggccatgcatacgtggtacgcagagacgcacgcccggcaccaggcgctgggcatcacggtgttgggcagcaacagcatggtgtccatgcagg

SEQ ID NO: 285658 - DNA, 120 bp, Artificial Sequence
  ENSG00000130479_26 (sequence is synthesized)
atgacgccttcccggcctgcaaggtggagttctagccccatcgccgacacgccccccactcagcccagcccgcctgtccctagattcagccacatcagaaataaactgtgactacacttg

SEQ ID NO: 285659 - DNA, 120 bp, Artificial Sequence
  ENSG00000130479_27 (sequence is synthesized)
gagtcataggcgcacctgccaggttcacctgcagccacttggctcagtgggactggcgggcgtgatgcgcccgtgggtggagatgggtgttcatcccccatccctcggagcatctggacc

SEQ ID NO: 285660 - DNA, 120 bp, Artificial Sequence
  ENSG00000130479_28 (sequence is synthesized)
tggcgtttcattgcatgtaaaatgggacaggaacacgcacctcggttcatgtgcttgaggagtgtttagtgagcacctgctatgcgccaggcctttgggcagtggacacagggatatggc

SEQ ID NO: 285661 - DNA, 120 bp, Artificial Sequence
  ENSG00000130479_29 (sequence is synthesized)
ttttgatgagaaactgctatgactggtgtgtccagtggaagggaagggccccagtcaagacccagcagtggacagaacatctagaatgaaccgggcgcggtggcttacgcctctgatctc

SEQ ID NO: 285662 - DNA, 120 bp, Artificial Sequence
  ENSG00000130479_30 (sequence is synthesized)
agcactttgggaggccgcagcgggcggatcacttgaggccagcggagcctgcaccaccgtggagacaacctggagaccctggtcctcctgaacccatcagacaagtccctgtatgatgag

SEQ ID NO: 285663 - DNA, 120 bp, Artificial Sequence
  ENSG00000130479_31 (sequence is synthesized)
ggcatgagccactgcacccagccaagtcctcctgttcgtaattacttcgtgacctcagccgtgcccacctctccggggctcagtttctcctgtgaaatggaaactgacctcagtgttgaa

SEQ ID NO: 285664 - DNA, 120 bp, Artificial Sequence
  ENSG00000130479_32 (sequence is synthesized)
tgatagacaggttcagccctgccaacacaggtctggtttggggatggacccaaagcgagtgaggagatggaacaagcttccagctcacatggtgtcaggaaggatgagaaggctgcaagg

SEQ ID NO: 285665 - DNA, 120 bp, Artificial Sequence
  ENSG00000130479_33 (sequence is synthesized)
gcacgacgcgggcaaaggcggggtgcccgtgggtgcccgcggagaaagtggcatccgggcctgggctgggcagggctgccccgccccaactccgggtgaagataggggaggggacacggg

SEQ ID NO: 285666 - DNA, 120 bp, Artificial Sequence
  ENSG00000130479_34 (sequence is synthesized)
atgaatcttgtgtgtaaaatgatgaggtgtgctctgggtcccctggctcagctgcagcgagacctgaaggtgttgggtacttctgagtctccaagctgtgagtgaagggaggaggctggg

SEQ ID NO: 285667 - DNA, 120 bp, Artificial Sequence
  ENSG00000130479_35 (sequence is synthesized)
aatcaaagcttgttcaatgaaaaaaaaaatgaatgaatggtcacttgggagaggcggctcccaagcggacacccaggagtcggccaacccctttaacgcccgcatcccctgctctccacg

SEQ ID NO: 285668 - DNA, 120 bp, Artificial Sequence
  ENSG00000130479_36 (sequence is synthesized)
cttaaaataagattcactggagtcatgagcgcaccaggcctccccagaaaactctgagttcaggcctcctgctgaggagggagctgctctgagtggtgcaggtcgaacttggagcctcgg

SEQ ID NO: 285669 - DNA, 120 bp, Artificial Sequence
  ENSG00000130479_37 (sequence is synthesized)
accgttaggcgcacgacgcgggcaaaggcggggtgcccgtgggtgcccgcggagaaagtggcatccgggcctgggctgggcagggctgccccgccccaactccgggcatccggtcttggg

SEQ ID NO: 285670 - DNA, 120 bp, Artificial Sequence
  ENSG00000130487_0 (sequence is synthesized)
agaagcaggttggctgtgatgacagcacagagctcaggaacgctgcctgaggaccctggggcctacgaggaggagaagagggcaggagctggtggggtgcttgcagagaccctgggctcc

SEQ ID NO: 285671 - DNA, 120 bp, Artificial Sequence
  ENSG00000130487_1 (sequence is synthesized)
tatcctgccataagcctcgctgtctcctgatatctgcagccaggccctactgacacccccaggcctgagtgcaagcagagaccccaccattcccaggccctggaggactggtccacctta

SEQ ID NO: 285672 - DNA, 120 bp, Artificial Sequence
  ENSG00000130487_2 (sequence is synthesized)
actgggcagcccttggggcaggcgctggccggtgcctcagcccaggcctctgtgctctgcatgcactgccagcctgccatcaggcctctattgcagccctgaaccatgatccagggcacc

SEQ ID NO: 285673 - DNA, 120 bp, Artificial Sequence
  ENSG00000130487_3 (sequence is synthesized)
ttggagccagatggtcccctctggggctgggactgggacagtgacaatgactgggatagtgctgtgctggccctcctggcgctggctgtggtggctgccacagcgctggccttacactgg

SEQ ID NO: 285674 - DNA, 120 bp, Artificial Sequence
  ENSG00000130487_4 (sequence is synthesized)
tttggctccgggcacgatcaagaggcggcagaaccggtgtccacagccctcggggctcaacctcatcaggcaggaggagctgagctggccctgcaaccgaagtctaaggtcagtgatggc

SEQ ID NO: 285675 - DNA, 120 bp, Artificial Sequence
  ENSG00000130487_5 (sequence is synthesized)
agcgaggggcagagcccagggcaggggaaaccagagcccccaggacgcggccagcagagccctgtccctgctgcagcgccgggcgggggcctggccgccatggcccggcttccactcaag

SEQ ID NO: 285676 - DNA, 120 bp, Artificial Sequence
  ENSG00000130487_6 (sequence is synthesized)
acggctgtcgaggaggcccgcagagaggcattaggacagcaacggggcagtgccacccccgcggccccccgagcggaaggaaaggagcctcccaggccaggcactgccctcctgggcagg

SEQ ID NO: 285677 - DNA, 120 bp, Artificial Sequence
  ENSG00000130487_7 (sequence is synthesized)
agcgaagcaggggggatgtccgcccccctcctgatccacttcactcctcggagccctggcagcgaagcggaggcggagacaggtggtgtcagggcgtcctctcgccaggccgcaggcccc

SEQ ID NO: 285678 - DNA, 80 bp, Artificial Sequence
  ENSG00000130487_8 (sequence is synthesized)
ggccctcgggctcgatggggagaggccggggccggcggcggcggatggacgctggctcgggagacagagcccgccgcccc

SEQ ID NO: 285679 - DNA, 80 bp, Artificial Sequence
  ENSG00000130487_9 (sequence is synthesized)
cggaaactggacccgctccgcctgggcgccgcggggagcgtgtgggacgcggtggacggggccgccgccctggacgccca

SEQ ID NO: 285680 - DNA, 120 bp, Artificial Sequence
  ENSG00000130487_10 (sequence is synthesized)
cccgcactcccggcgctgcccgctccccgcgccctgcagcctgggtctcagacggaaggctctggggccaagggtggctggagcagggaggcctcgggggtccctgcccccggaggaggc

SEQ ID NO: 285681 - DNA, 120 bp, Artificial Sequence
  ENSG00000130487_11 (sequence is synthesized)
tggccctgggtcagcagggaggtcccgggcacccggagctttggcccagccccagactccacgcgcccctggctagagagtccgcctcaaggtcgcccactctcgtcccaagggccgggt

SEQ ID NO: 285682 - DNA, 120 bp, Artificial Sequence
  ENSG00000130487_12 (sequence is synthesized)
gccacaggggcctacgatgccggcgaggccggggctgacagctcccgagataacagtcctgccgctgacctggggcccacccggcccccggagcaagcaaagccggctgcagccggccac

SEQ ID NO: 285683 - DNA, 120 bp, Artificial Sequence
  ENSG00000130487_13 (sequence is synthesized)
agccgcgcgccctcccggagccgtgagcctcgcccgcgctccgcctccccgcccgcagctcccggcccggggttcccacctgaagccctgactctcccctctccttcagactttttgccc

SEQ ID NO: 285684 - DNA, 120 bp, Artificial Sequence
  ENSG00000130487_14 (sequence is synthesized)
ctggaggttacccaggatccttccgtgggcgaaaatctcagagcggcgccagccccaagttcagcctcagcccaagtcttaacttcagctccagcctcagtcctagccccagccctggct

SEQ ID NO: 285685 - DNA, 120 bp, Artificial Sequence
  ENSG00000130487_15 (sequence is synthesized)
tcatcccccagctcagcaccaacctcagccaccacctcaacctcatcccccacctcagccccagccccagctccaacctcagctccaacttcaaccccagccccagccccaagtccagct

SEQ ID NO: 285686 - DNA, 120 bp, Artificial Sequence
  ENSG00000130487_16 (sequence is synthesized)
gcagccgcaactccagccccagccccagtcccagtcccaaccctcacacccccatccccagccctaaccccagtcccaaccccagccctaagcccagctccaactccagccctaacccca

SEQ ID NO: 285687 - DNA, 120 bp, Artificial Sequence
  ENSG00000130487_17 (sequence is synthesized)
gccgcatccccagccctaaccccagtcccaaccccagccctaagcccagctccaactccagccccaaccccagccgcatcccctgccccagcccccacctcagccccaaccccaacccca

SEQ ID NO: 285688 - DNA, 120 bp, Artificial Sequence
  ENSG00000130487_18 (sequence is synthesized)
gccgcatcccctgccccagctgacgggtcaaagcctcaggagagtgtggctctccccaggcgctaccaggaggggcaggtctcagccagctggggaaaccttattgccatggttcttaga

SEQ ID NO: 285689 - DNA, 120 bp, Artificial Sequence
  ENSG00000130487_19 (sequence is synthesized)
agccaccccttccccaggcaagacaggccccaagggagtgtcccgagggcggttcccgggagccccgtgggtcccagcacttccacacactctgaggacagacacggcccctcttcttca

SEQ ID NO: 285690 - DNA, 120 bp, Artificial Sequence
  ENSG00000130487_20 (sequence is synthesized)
gtggggacagtcatagggacaggtacagggggcctggttgaggctggaggtcagccacagccaagaagctccgagaccaacggatcgcccagcccagaccctcccccaggcctaagagga

SEQ ID NO: 285691 - DNA, 120 bp, Artificial Sequence
  ENSG00000130487_21 (sequence is synthesized)
ctggccccgcggcctcctcctctgcgaggcgctcacagccggtaccccagctacggaaacgcagcaggtgcgaaatcgccccgagctcggagcaggaggtcaggccggccgcctcggggg

SEQ ID NO: 285692 - DNA, 120 bp, Artificial Sequence
  ENSG00000130487_22 (sequence is synthesized)
accctcaaggggaggcgccgggggaggggggcagccctgccggccgcagcggggcgctcacggaaaagcaggaggaggcccggaagctcatggtgtttctgcagaggcccgggggttggg

SEQ ID NO: 285693 - DNA, 120 bp, Artificial Sequence
  ENSG00000130487_23 (sequence is synthesized)
gaggggccccggaagcccagctcccgggccctggagcccgccacggcggcagccctgcggcggcggctggacctgggcagttgcctggacgtgctggcctttgcccagcagcacggagag

SEQ ID NO: 285694 - DNA, 120 bp, Artificial Sequence
  ENSG00000130487_24 (sequence is synthesized)
acggagagcccggcctggcgcaggagacctacgcgctgatgagcgacaacctgctgcgagtgctgggagacccgtgcctctaccgccggctgagcgcggccgaccgcgagcgcatcctca

SEQ ID NO: 285695 - DNA, 120 bp, Artificial Sequence
  ENSG00000130487_25 (sequence is synthesized)
ctcagcctgcggaccggccggggccgggcggtgctgggcgtcctcgtactgcccagcctctaccaggggggccgctcagggctccccaggggccctcgtggcgaggagcctcctgcggcg

SEQ ID NO: 285696 - DNA, 120 bp, Artificial Sequence
  ENSG00000130487_26 (sequence is synthesized)
ctgtgtccctgcctctacctgcgcacctgcatgtgttcaacccccgggagaacacctggcggcccctgacccaggtgcccgaggaggccccgcttcggggctgcggtctctgcaccatgc

SEQ ID NO: 285697 - DNA, 120 bp, Artificial Sequence
  ENSG00000130487_27 (sequence is synthesized)
acaactacctgtttctggcggggggcatccgtggctccggtgccaaggccgtctgctccaacgaggtcttctgctacaaccctctgaccaacatctggagccaggttcggcccatgcagc

SEQ ID NO: 285698 - DNA, 120 bp, Artificial Sequence
  ENSG00000130487_28 (sequence is synthesized)
aggcccgagcccagctcaagctggtggccctggacgggctgctctatgccatcggtggcgaatgcctgtacagcatggagtgctacgacccgcgaacagacgcctggaccccacgcgcgc

SEQ ID NO: 285699 - DNA, 120 bp, Artificial Sequence
  ENSG00000130487_29 (sequence is synthesized)
cactccccgcaggcaccttccctgtggcccacgaggctgtggcctgccgtggggacatctacgtcaccgggggtcacctcttctaccgcctgctcaggtacagccccgtgaaggatgctt

SEQ ID NO: 285700 - DNA, 120 bp, Artificial Sequence
  ENSG00000130487_30 (sequence is synthesized)
gggacgagtgcccatacagtgccagccaccggcgttccagcgacatcgtggcactggggggcttcctgtaccgcttcgacctgctgcggggcgtgggcgccgccgtgatgcgctacaaca

SEQ ID NO: 285701 - DNA, 120 bp, Artificial Sequence
  ENSG00000130487_31 (sequence is synthesized)
cagtgaccggctcctggagcagggctgcctccctgcccctgcccgcccccgccccactgcactgcaccaccctgggcaacaccatttactgcctcaacccccaggtcactgccaccttca

SEQ ID NO: 285702 - DNA, 120 bp, Artificial Sequence
  ENSG00000130487_32 (sequence is synthesized)
cggtctctggggggactgcccagttccaggccaaggagctgcagcccttccccttggggagcaccggggtcctcagtccattcatcctgactctgccccctgaggaccggctgcagacct

SEQ ID NO: 285703 - DNA, 120 bp, Artificial Sequence
  ENSG00000130487_33 (sequence is synthesized)
cactctgagtggcaggcagagaaccaaagctgcttcgctgctctccagggagaccctcctgggatgggcctgagaggccggggctcagggaaggggctgggatcggaacttcctgctctt

SEQ ID NO: 285704 - DNA, 120 bp, Artificial Sequence
  ENSG00000130487_34 (sequence is synthesized)
gtttctggacaactttccccttctgctttaaaggttgtcgattattttgaagcccagactccctcagcctctttctgcccctcactccacacccagactgtttcctgactcaattccgta

SEQ ID NO: 285705 - DNA, 120 bp, Artificial Sequence
  ENSG00000130487_35 (sequence is synthesized)
cctacttacagaccctctcagcttgctgacacccccctgtctgtgggactccctattccctagagccagggactgatgcgtctccacagacaaggacttggctcgctggagctctgctga

SEQ ID NO: 285706 - DNA, 120 bp, Artificial Sequence
  ENSG00000130487_36 (sequence is synthesized)
gccgagagaggagggggtagaaaacattcacacttcctatgctctgtcagcaggacagggagcaaaaacgtccccaggcaacgccctcgcctctgggactttctgcctgtcctaaggcct

SEQ ID NO: 285707 - DNA, 120 bp, Artificial Sequence
  ENSG00000130487_37 (sequence is synthesized)
ccccaggtaccaaccccgtagctatctgggtctgtttggcactgtggattctcaagggcctagaacccttgcctctgaaactggtccgctggtgcagccctgctgtctgcagctcctgcc

SEQ ID NO: 285708 - DNA, 120 bp, Artificial Sequence
  ENSG00000130487_38 (sequence is synthesized)
catacccccagcccacaccaggccaggcccactccgggctcaccaccctctgcagccttgtggggctctcccagcccctccagaagcccaccccacttctcgccaacccccgatctctaa

SEQ ID NO: 285709 - DNA, 120 bp, Artificial Sequence
  ENSG00000130487_39 (sequence is synthesized)
atgaggcctgagcgtcaccctagttctgcccctttttagctgtgtagacttggacgagacatttgacttccctttctccttgtctataaaatgtggacagtggacgtctgtcacccaaga

SEQ ID NO: 285710 - DNA, 120 bp, Artificial Sequence
  ENSG00000130487_40 (sequence is synthesized)
gagttgtgggagacaagatcacagctatgagcacctcgcacggtgtccaggatgcacagcacaatccatgatgcgttttctccccttacgcactttgaaacccatgctagaaaagtgaat

SEQ ID NO: 285711 - DNA, 120 bp, Artificial Sequence
  ENSG00000130487_41 (sequence is synthesized)
acatctgactgtgctccactccaacctccagcctggatgtccctgtctgggccctttttctgttttttattctatgttcagcaccactggcaccaaatacattttaattcaccgaaagca

SEQ ID NO: 285712 - DNA, 120 bp, Artificial Sequence
  ENSG00000130487_42 (sequence is synthesized)
gaggagctgagctggccctgcaaccgaagtctaagactttttgcccctggaggttacccaggatccttccgtgggcgaaaatctcagagcggcgccagccccaagttcagcctcagccca

SEQ ID NO: 285713 - DNA, 120 bp, Artificial Sequence
  ENSG00000130508_0 (sequence is synthesized)
gcagtcgggagccggccgtggtggctccgtgcgtccgagcgtccgtccgcgccgtcggccatggccaagcgctccaggggccccgggcgccgctgcctgttggcgctcgtgctgttctgc

SEQ ID NO: 285714 - DNA, 120 bp, Artificial Sequence
  ENSG00000130508_1 (sequence is synthesized)
gcctgggggacgctggccgtggtggcccagaagccgggcgcagggtgtccgagccgctgcctgtgcttccgcaccaccgtgcgctgcatgcatctgctgctggaggccgtgcccgccgtg

SEQ ID NO: 285715 - DNA, 120 bp, Artificial Sequence
  ENSG00000130508_2 (sequence is synthesized)
gcgccgcagacctccatcctagatcttcgctttaacagaatcagagagatccaacctggggcattcaggcggctgaggaacttgaacacattgcttctcaataataatcagatcaagagg

SEQ ID NO: 285716 - DNA, 120 bp, Artificial Sequence
  ENSG00000130508_3 (sequence is synthesized)
atacctagtggagcatttgaagacttggaaaatttaaaatatctctatctgtacaagaatgagatccagtcaattgacaggcaagcatttaagggacttgcctctctagagcaactatac

SEQ ID NO: 285717 - DNA, 120 bp, Artificial Sequence
  ENSG00000130508_4 (sequence is synthesized)
ctgcactttaatcagatagaaactttggacccagattcgttccagcatctcccgaagctcgagaggctatttttgcataacaaccggattacacatttagttccagggacatttaatcac

SEQ ID NO: 285718 - DNA, 120 bp, Artificial Sequence
  ENSG00000130508_5 (sequence is synthesized)
ttggaatctatgaagagattgcgactggactcaaacacacttcactgcgactgtgaaatcctgtggttggcggatttgctgaaaacctacgcggagtcggggaacgcgcaggcagcggcc

SEQ ID NO: 285719 - DNA, 120 bp, Artificial Sequence
  ENSG00000130508_6 (sequence is synthesized)
atctgtgaatatcccagacgcatccagggacgctcagtggcaaccatcaccccggaagagctgaactgtgaaaggccccggatcacctccgagccccaggacgcagatgtgacctcgggg

SEQ ID NO: 285720 - DNA, 120 bp, Artificial Sequence
  ENSG00000130508_7 (sequence is synthesized)
aacaccgtgtacttcacctgcagagccgaaggcaaccccaagcctgagatcatctggctgcgaaacaataatgagctgagcatgaagacagattcccgcctaaacttgctggacgatggg

SEQ ID NO: 285721 - DNA, 120 bp, Artificial Sequence
  ENSG00000130508_8 (sequence is synthesized)
accctgatgatccagaacacacaggagacagaccagggtatctaccagtgcatggcaaagaacgtggccggagaggtgaagacgcaagaggtgaccctcaggtacttcgggtctccagct

SEQ ID NO: 285722 - DNA, 120 bp, Artificial Sequence
  ENSG00000130508_9 (sequence is synthesized)
cgacccacttttgtaatccagccacagaatacagaggtgctggttggggagagcgtcacgctggagtgcagcgccacaggccaccccccgccgcggatctcctggacgagaggtgaccgc

SEQ ID NO: 285723 - DNA, 120 bp, Artificial Sequence
  ENSG00000130508_10 (sequence is synthesized)
acacccttgccagttgacccgcgggtgaacatcacgccttctggcgggctttacatacagaacgtcgtacagggggacagcggagagtatgcgtgctctgcgaccaacaacattgacagc

SEQ ID NO: 285724 - DNA, 120 bp, Artificial Sequence
  ENSG00000130508_11 (sequence is synthesized)
gtccatgccaccgctttcatcatcgtccaggctcttcctcagttcactgtgacgcctcaggacagagtcgttattgagggccagaccgtggatttccagtgtgaagccaagggcaacccg

SEQ ID NO: 285725 - DNA, 120 bp, Artificial Sequence
  ENSG00000130508_12 (sequence is synthesized)
ccgcccgtcatcgcctggaccaagggagggagccagctctccgtggaccggcggcacctggtcctgtcatcgggaacacttagaatctctggtgttgccctccacgaccagggccagtac

SEQ ID NO: 285726 - DNA, 120 bp, Artificial Sequence
  ENSG00000130508_13 (sequence is synthesized)
gaatgccaggctgtcaacatcatcggctcccagaaggtcgtggcccacctgactgtgcagcccagagtcaccccagtgtttgccagcattcccagcgacacaacagtggaggtgggcgcc

SEQ ID NO: 285727 - DNA, 120 bp, Artificial Sequence
  ENSG00000130508_14 (sequence is synthesized)
aatgtgcagctcccgtgcagctcccagggcgagcccgagccagccatcacctggaacaaggatggggttcaggtgacagaaagtggaaaatttcacatcagccctgaaggattcttgacc

SEQ ID NO: 285728 - DNA, 120 bp, Artificial Sequence
  ENSG00000130508_15 (sequence is synthesized)
atcaatgacgttggccctgcagacgcaggtcgctatgagtgtgtggcccggaacaccattgggtcggcctcggtgagcatggtgctcagtgtgaatgttcctgacgtcagtcgaaatgga

SEQ ID NO: 285729 - DNA, 120 bp, Artificial Sequence
  ENSG00000130508_16 (sequence is synthesized)
gatccgtttgtagctacctccatcgtggaagcgattgcgactgttgacagagctataaactcaacccgaacacatttgtttgacagccgtcctcgttctccaaatgatttgctggccttg

SEQ ID NO: 285730 - DNA, 120 bp, Artificial Sequence
  ENSG00000130508_17 (sequence is synthesized)
ttccggtatccgagggatccttacacagttgaacaggcacgggcgggagaaatctttgaacggacattgcagctcattcaggagcatgtacagcatggcttgatggtcgacctcaacgga

SEQ ID NO: 285731 - DNA, 120 bp, Artificial Sequence
  ENSG00000130508_18 (sequence is synthesized)
acaagttaccactacaacgacctggtgtctccacagtacctgaacctcatcgcaaacctgtcgggctgtaccgcccaccggcgcgtgaacaactgctcggacatgtgcttccaccagaag

SEQ ID NO: 285732 - DNA, 120 bp, Artificial Sequence
  ENSG00000130508_19 (sequence is synthesized)
taccggacgcacgacggcacctgtaacaacctgcagcaccccatgtggggcgcctcgctgaccgccttcgagcgcctgctgaaatccgtgtacgagaatggcttcaacacccctcggggc

SEQ ID NO: 285733 - DNA, 120 bp, Artificial Sequence
  ENSG00000130508_20 (sequence is synthesized)
atcaacccccaccgactgtacaacgggcacgcccttcccatgccgcgcctggtgtccaccaccctgatcgggacggagaccgtcacacccgacgagcagttcacccacatgctgatgcag

SEQ ID NO: 285734 - DNA, 120 bp, Artificial Sequence
  ENSG00000130508_21 (sequence is synthesized)
tggggccagttcctggaccacgacctcgactccacggtggtggccctgagccaggcacgcttctccgacggacagcactgcagcaacgtgtgcagcaacgaccccccctgcttctctgtc

SEQ ID NO: 285735 - DNA, 120 bp, Artificial Sequence
  ENSG00000130508_22 (sequence is synthesized)
atgatcccccccaatgactcccgggccaggagcggggcccgctgcatgttcttcgtgcgctccagccctgtgtgcggcagcggcatgacttcgctgctcatgaactccgtgtacccgcgg

SEQ ID NO: 285736 - DNA, 120 bp, Artificial Sequence
  ENSG00000130508_23 (sequence is synthesized)
gagcagatcaaccagctcacctcctacatagacgcatccaacgtgtacgggagcacggagcatgaggcccgcagcatccgcgacctggccagccaccgcggcctgctgcggcagggcatc

SEQ ID NO: 285737 - DNA, 120 bp, Artificial Sequence
  ENSG00000130508_24 (sequence is synthesized)
gtgcagcggtccgggaagccgctgctccccttcgccaccgggccgcccacggagtgcatgcgggacgagaacgagagccccatcccctgcttcctggccggggaccaccgcgccaacgag

SEQ ID NO: 285738 - DNA, 120 bp, Artificial Sequence
  ENSG00000130508_25 (sequence is synthesized)
cagctgggcctgaccagcatgcacacgctgtggttccgcgagcacaaccgcattgccacggagctgctcaagctgaacccgcactgggacggcgacaccatctactatgagaccaggaag

SEQ ID NO: 285739 - DNA, 120 bp, Artificial Sequence
  ENSG00000130508_26 (sequence is synthesized)
atcgtgggtgcggagatccagcacatcacctaccagcactggctcccgaagatcctgggggaggtgggcatgaggacgctgggagagtaccacggctacgaccccggcatcaatgctggc

SEQ ID NO: 285740 - DNA, 120 bp, Artificial Sequence
  ENSG00000130508_27 (sequence is synthesized)
atcttcaacgccttcgccaccgcggccttcaggtttggccacacgcttgtcaacccactgctttaccggctggacgagaacttccagcccattgcacaagatcacctcccccttcacaaa

SEQ ID NO: 285741 - DNA, 120 bp, Artificial Sequence
  ENSG00000130508_28 (sequence is synthesized)
agctgctgaacacggagctcacggagcggctgttctccatggcacacacggtggctctggacctggcggccatcaacatccagcggggccgggaccacgggatcccaccctaccacgact

SEQ ID NO: 285742 - DNA, 120 bp, Artificial Sequence
  ENSG00000130508_29 (sequence is synthesized)
acagggtctactgcaatctatcggcggcacacacgttcgaggacctgaaaaatgagattaaaaaccctgagatccgggagaaactgaaaaggttgtatggctcgacactcaacatcgacc

SEQ ID NO: 285743 - DNA, 120 bp, Artificial Sequence
  ENSG00000130508_30 (sequence is synthesized)
tgtttccggcgctcgtggtggaggacctggtgcctggcagccggctgggccccaccctgatgtgtcttctcagcacacagttcaagcgcctgcgagatggggacaggttgtggtatgaga

SEQ ID NO: 285744 - DNA, 120 bp, Artificial Sequence
  ENSG00000130508_31 (sequence is synthesized)
accctggggtgttctccccggcccagctgactcagatcaagcagacgtcgctggccaggatcctatgcgacaacgcggacaacatcacccgggtgcagagcgacgtgttcagggtggcgg

SEQ ID NO: 285745 - DNA, 120 bp, Artificial Sequence
  ENSG00000130508_32 (sequence is synthesized)
agttccctcacggctacggcagctgtgacgagatccccagggtagacctccgggtgtggcaggactgctgtgaagactgtaggaccagggggcagttcaatgccttttcctatcatttcc

SEQ ID NO: 285746 - DNA, 120 bp, Artificial Sequence
  ENSG00000130508_33 (sequence is synthesized)
gaggcagacggtctcttgagttcagctaccaggaggacaagccgaccaagaaaacaagaccacggaaaatacccagtgttgggagacagggggaacatctcagcaacagcacctcagcct

SEQ ID NO: 285747 - DNA, 120 bp, Artificial Sequence
  ENSG00000130508_34 (sequence is synthesized)
tcagcacacgctcagatgcatctgggacaaatgacttcagagagtttgttctggaaatgcagaagaccatcacagacctcagaacacagataaagaaacttgaatcacggctcagtacca

SEQ ID NO: 285748 - DNA, 120 bp, Artificial Sequence
  ENSG00000130508_35 (sequence is synthesized)
cagagtgcgtggatgccgggggcgaatctcacgccaacaacaccaagtggaaaaaagatgcatgcaccatttgtgaatgcaaagacgggcaggtcacctgcttcgtggaagcttgccccc

SEQ ID NO: 285749 - DNA, 120 bp, Artificial Sequence
  ENSG00000130508_36 (sequence is synthesized)
ctgccacctgtgctgtccccgtgaacatcccaggggcctgctgtccagtctgcttacagaagagggcggaggaaaagccctaggctcctgggaggctcctcagagtttgtctgctgtgcc

SEQ ID NO: 285750 - DNA, 120 bp, Artificial Sequence
  ENSG00000130508_37 (sequence is synthesized)
atcgtgagatcgggtggccgatggcagggagctgcggactgcagaccaggaaacacccagaactcgtgacatttcatgacaacgtccagctggtgctgttacagaaggcagtgcaggagg

SEQ ID NO: 285751 - DNA, 120 bp, Artificial Sequence
  ENSG00000130508_38 (sequence is synthesized)
cttccaaccagagcatctgcggagaaggaggcacagcaggtgcctgaagggaagcaggcaggagtcctagcttcacgttagacttctcaggtttttatttaattcttttaaaatgaaaaa

SEQ ID NO: 285752 - DNA, 120 bp, Artificial Sequence
  ENSG00000130508_39 (sequence is synthesized)
ttggtgctactattaaattgcacagttgaatcatttaggcgcctaaattgattttgcctcccaacaccatttctttttaaataaagcaggatacctctatatgtcagccttgccttgttc

SEQ ID NO: 285753 - DNA, 120 bp, Artificial Sequence
  ENSG00000130508_40 (sequence is synthesized)
agatgccaggagccggcagacctgtcacccgcaggtggggtgagtcttggagctgccagaggggctcaccgaaatcggggttccatcacaagctatgtttaaaaagaaaattggtgtttg

SEQ ID NO: 285754 - DNA, 120 bp, Artificial Sequence
  ENSG00000130508_41 (sequence is synthesized)
gcaaacggaacagaacctttgatgagagcgttcacagggacactgtctgggggtgcagtgcaagcccccggcctcttccctgggaacctctgaactcctccttcctctgggctctctgta

SEQ ID NO: 285755 - DNA, 120 bp, Artificial Sequence
  ENSG00000130508_42 (sequence is synthesized)
acatttcaccacacgtcagcatctaatcccaagacaaacattcccgctgctcgaagcagctgtatagcctgtgactctccgtgtgtcagctccttccacacctgattagaacattcataa

SEQ ID NO: 285756 - DNA, 120 bp, Artificial Sequence
  ENSG00000130508_43 (sequence is synthesized)
gccacatttagaaacaggtttgctttcagctgtcacttgcacacatactgcctagttgtgaaccaaatgtgaaaaaacctccttcatcccattgtgtatctgatacctgccgagggccaa

SEQ ID NO: 285757 - DNA, 120 bp, Artificial Sequence
  ENSG00000130508_44 (sequence is synthesized)
gggtgtgtgttgacaacgccgctcccagccggccctggttgcgtccacgtcctgaacaagagccgcttccggatggctcttcccaagggaggaggagctcaagtgtcgggaactgtctaa

SEQ ID NO: 285758 - DNA, 120 bp, Artificial Sequence
  ENSG00000130508_45 (sequence is synthesized)
cttcaggttgtgtgagtgcgttaaaaaaaaaaaaaaaaaagaatccctatacctcatttgtatttttaaaatgcgtgatgttttatgaaattgtgtccattttttaggtattagatatgg

SEQ ID NO: 285759 - DNA, 120 bp, Artificial Sequence
  ENSG00000130508_46 (sequence is synthesized)
cagaaaaaccatttccactatgcaaagttcttttagacgtcagtgaaaatcaactctcatacctcatggtctctctttaattgaccaaaaccttccatttttctctaaatacaaagcgat

SEQ ID NO: 285760 - DNA, 120 bp, Artificial Sequence
  ENSG00000130508_47 (sequence is synthesized)
ctgtgttctgagcaacctttccccgaacacacagcttcagtgcagcacgctgacctgagtatccaccatgtgccaggcacagtgctgggcacacgaggcaccaaggtccgggccacctgc

SEQ ID NO: 285761 - DNA, 120 bp, Artificial Sequence
  ENSG00000130508_48 (sequence is synthesized)
ccgcagcaaggcccagctgaggtggtggagggagcccctgaggtcaggggccgtttcggttcagggtggcaggtgtccagcactggggtatggcgtcgaggcttccatggggtgggggag

SEQ ID NO: 285762 - DNA, 120 bp, Artificial Sequence
  ENSG00000130508_49 (sequence is synthesized)
gccagcttccttctgacaggatgggcgcatacagtgcctggtgtgatttgtgcacaacccgtgttccaggtgcacatcctcccaaggagacacccagacccttccagcacgggccggcca

SEQ ID NO: 285763 - DNA, 120 bp, Artificial Sequence
  ENSG00000130508_50 (sequence is synthesized)
agttgctgcggcggaggcagcatttcagctgtgaggaaggtcattggattcatgtgttttatctgtaaaaatggttgtcttaacttcttaacctcatattggtaagtgattgataaaaat

SEQ ID NO: 285764 - DNA, 120 bp, Artificial Sequence
  ENSG00000130508_51 (sequence is synthesized)
tggttggtgtttcatgacatgtggacttcttttgaaatagcaagtcaaatgtagtgaccaaattgtggaagagatttctgtcaaataggaaatgtgtaagttcgtctaaaagctgatggt

SEQ ID NO: 285765 - DNA, 120 bp, Artificial Sequence
  ENSG00000130508_52 (sequence is synthesized)
tatgtaagttgctcaggcactcagatgacagcagattctgggttctgggagtgttctgtgcctcttacatgccctggaggcctcatggtctcagtgctgaggcggcacacctgtagcaca

SEQ ID NO: 285766 - DNA, 120 bp, Artificial Sequence
  ENSG00000130508_53 (sequence is synthesized)
cctgcgtaatgtgcggtctgggccagtcacaaggaattgtgttgtctaagccaaagggggaagctgactgtgatttaccaaaaaaaattctgtaattcaaaccaaaatgtctgcggaatc

SEQ ID NO: 285767 - DNA, 120 bp, Artificial Sequence
  ENSG00000130508_54 (sequence is synthesized)
accagtttgatactctctgtaatcagaacagtgggcagtgcctgggtgaacgtgtctagcagccactgtgcgggatcgctgtaacaggagtggaatgtacatatttatttacttttctaa

SEQ ID NO: 285768 - DNA, 120 bp, Artificial Sequence
  ENSG00000130508_55 (sequence is synthesized)
ctgctccaacagccaaatgccttttttatgaccattgtattcagttcattaccaaagaaatgtttgcactttgtaatgatgcctttcagttcaaataaatgggtcacattttcaaatgga

SEQ ID NO: 285769 - DNA, 120 bp, Artificial Sequence
  ENSG00000130508_56 (sequence is synthesized)
gacacaggttcgctcagctcccgtgtggatctaacttgtctcccaaacaaaggaagtcttctcttgtgtccacaaacatgctgtggacctgttaaggctaagacggccctggctgcggct

SEQ ID NO: 285770 - DNA, 120 bp, Artificial Sequence
  ENSG00000130508_57 (sequence is synthesized)
gtcagggtgacggagggaagtcctaccgctgaccattacatgcgtcctggcagcgagccccacctgtgagccagtaatgagctgagcatgaagacagattcccgcctaaacttgctggac

SEQ ID NO: 285771 - DNA, 120 bp, Artificial Sequence
  ENSG00000130508_58 (sequence is synthesized)
actgttgttggcagccttgacctggggcattgtgaccaacctgagtgggtgcgggaggggccctgacctctgctgggacggcgtcctcaggagcctggagcgccatgcagctgctgacac

SEQ ID NO: 285772 - DNA, 120 bp, Artificial Sequence
  ENSG00000130508_59 (sequence is synthesized)
tatactagtctgagcatgtgggtgtagctccctcagatacacatgaagagtctcccgccatccggtgcacagggagtcactgcagcatgggggaaccagccctgagaagcccagaagcct

SEQ ID NO: 285773 - DNA, 120 bp, Artificial Sequence
  ENSG00000130508_60 (sequence is synthesized)
cgcggccacagacgcaggaagcacacatttccactgtgcccaggcaaccccagcgtgttctggacagggctgagctgggactggattccacaggaccaaggcactgggaagcgcagaggt

SEQ ID NO: 285774 - DNA, 120 bp, Artificial Sequence
  ENSG00000130508_61 (sequence is synthesized)
gtctgcacatcccccgcggcttcctgtccatgcatggccgtccctcatggacatcatggcaggaaactctgagaagctctgtcattgcggaagagacttggggttcctgcctttgactcc

SEQ ID NO: 285775 - DNA, 120 bp, Artificial Sequence
  ENSG00000130508_62 (sequence is synthesized)
ctcacacctgccttgtttcagatagtctctaggatgtgcttttaagtagcctcttgaaggaatctatttgcatggaggatagaattttctggaaacagtcgaggaatatattgaaacaga

SEQ ID NO: 285776 - DNA, 120 bp, Artificial Sequence
  ENSG00000130508_63 (sequence is synthesized)
cgaatagcttttgctctgactttgcttcccagagccctcactgtcacctccccattcggcatcatgacctttcatcacattctttgcctacagtcctagccctctttcttcaatgggaaa

SEQ ID NO: 285777 - DNA, 120 bp, Artificial Sequence
  ENSG00000130508_64 (sequence is synthesized)
gtcgctgggcatgttactgcataaaggcacagcctggatgggggttggggtgagggcaggagctgaaactgctggagaaggagctacgcagacctcctggttcctgtcctgggatgcaag

SEQ ID NO: 285778 - DNA, 120 bp, Artificial Sequence
  ENSG00000130508_65 (sequence is synthesized)
cagtgaccctgagacatcctggccactccagcttgcaccaaatggccagcccatcccttcagccctctgaggggccccacccagggctcctgaaagtctttggggaggaggcttgtgcct

SEQ ID NO: 285779 - DNA, 120 bp, Artificial Sequence
  ENSG00000130508_66 (sequence is synthesized)
gcatcacacgccctggatttcccttttctcaggcagttatgggcaagaacaggagaggtttatcccggaaaggaacttgctggggcctcgcttggctcttcgtcatctccagcactcaat

SEQ ID NO: 285780 - DNA, 120 bp, Artificial Sequence
  ENSG00000130508_67 (sequence is synthesized)
cctctccctggttctcccagctggccatccaccccgctctgactccccgagtccccatgtcctcctggccccctgtgtagtgcttttccctctgttctctgccactgtcaacccctctgt

SEQ ID NO: 285781 - DNA, 120 bp, Artificial Sequence
  ENSG00000130508_68 (sequence is synthesized)
ctgagttacgggtgcagggacgttcaggtgtcaccatggtgtctgctggggaggcaaagatttgcttatgcagggccaggccaaattatccggcgccccgacccaggtggagacaagctt

SEQ ID NO: 285782 - DNA, 120 bp, Artificial Sequence
  ENSG00000130508_69 (sequence is synthesized)
tgtctgtttgttttgtttttgttttgttgcctcccacttcggatgaggaaggtatagtacattatgttgtagaaagtagccgtagaaatattaatagcaatgattatattttggggtact

SEQ ID NO: 285783 - DNA, 120 bp, Artificial Sequence
  ENSG00000130508_70 (sequence is synthesized)
attcctagggaagagttccagcattttctttcccactgtgcttatgaactgtgaaattatttccttaaactgtgattcctcttgagccctacagccctgtcgctctcactttggtttaat

SEQ ID NO: 285784 - DNA, 120 bp, Artificial Sequence
  ENSG00000130508_71 (sequence is synthesized)
aggaatctctgggggacgtgaagtcccttggagtgctgatcaggctacagcaggtccacctgccctgagtgggttatgccatcctggccagggtgggttatgcaagcccagtccctctgc

SEQ ID NO: 285785 - DNA, 120 bp, Artificial Sequence
  ENSG00000130508_72 (sequence is synthesized)
aacaaatgagccataagggaggacttggcagcgtgcttgctccctgagtgacgttgtgtcctgggaatgcggtgccacgcgtattaggagggttgttttggaagagtcccgggtctgtga

SEQ ID NO: 285786 - DNA, 120 bp, Artificial Sequence
  ENSG00000130508_73 (sequence is synthesized)
aaccagctgatgagatcacctcgggctggtgtggagatgctgttgggggaggtatgtcccccactcactctgctctggcactttgccgttgcccagtaaataacagatgcctttacatgt

SEQ ID NO: 285787 - DNA, 120 bp, Artificial Sequence
  ENSG00000130508_74 (sequence is synthesized)
ccacaatgctggacttccttccaccctcaggatgaacgggcagctccctgggtggcagcgctgggtctgagaaatgtggatgttccttgtgattttgcagctgctgacagcacagggtgt

SEQ ID NO: 285788 - DNA, 120 bp, Artificial Sequence
  ENSG00000130508_75 (sequence is synthesized)
gtgccgtctgtggtcatttccctgcaccccatgtgtgcagaggtgttcgtgtatcttggtgactgcagaggcacacacaggccggcgtggtcactgcttctctctggctgtgaattaaag

SEQ ID NO: 285789 - DNA, 120 bp, Artificial Sequence
  ENSG00000130508_76 (sequence is synthesized)
caggtcagccgcagacacagaggtgacatgcaggtcacctggaacctctgcagaccgtcctggctgccacccctaagtgctctctggcccctgtgccactgttcctgaggcttccttttt

SEQ ID NO: 285790 - DNA, 120 bp, Artificial Sequence
  ENSG00000130508_77 (sequence is synthesized)
ttttttttttcccccatggtttcagctagaaagttctaagctttgataacttaagtgccagttgctaatgaatgaggcatgcaggaaagatggctttcatttagaagccgtatctgaggc

SEQ ID NO: 285791 - DNA, 120 bp, Artificial Sequence
  ENSG00000130508_78 (sequence is synthesized)
atttcccaaagtgagtaactgtttggctagttaggtcctagatgtccagctgtcattatgaaatgcagatggtacggtgaggggacgtccacctttttcagcatgatgtgtgcataggtg

SEQ ID NO: 285792 - DNA, 120 bp, Artificial Sequence
  ENSG00000130508_79 (sequence is synthesized)
agacactgctgctgcacaggttggggaccacacacttatggctgacaggagatcaaagaagatgttttaattgacatgagtaagtgggtggcttgctgaagttattcacagccatcatca

SEQ ID NO: 285793 - DNA, 120 bp, Artificial Sequence
  ENSG00000130508_80 (sequence is synthesized)
gacagccttacctgtggctgagcatgctttatgaaggcttattagaagaattgggatatttatgataaataatttgtgttcatttcagacatcacagacagtttaggttcaaatgcaagg

SEQ ID NO: 285794 - DNA, 120 bp, Artificial Sequence
  ENSG00000130508_81 (sequence is synthesized)
gacggaaaactccaaatccaggatggttttaatgaggtgcgagtttacttttccctcagtcgtggagattgctggaccctccgcagtgcagggtccctgctgcagcttggtgctgtactg

SEQ ID NO: 285795 - DNA, 120 bp, Artificial Sequence
  ENSG00000130508_82 (sequence is synthesized)
tgggtggcctcttcccaaggtcacctcatggcccaggcatttccggccactgtcaccctgtctgccccccggccctgcaagatgcaagagagggtttgaggaaggagacccttccaggag

SEQ ID NO: 285796 - DNA, 120 bp, Artificial Sequence
  ENSG00000130508_83 (sequence is synthesized)
gcttctgctacccctgtgcatggcacagcggttggaaaggtcaccttgttatggggccccgtgcttccagagaaaagccagtggtgttgttactcggaaaataaggcagacttgactctg

SEQ ID NO: 285797 - DNA, 120 bp, Artificial Sequence
  ENSG00000130508_84 (sequence is synthesized)
gggattctgagtgatcatcgttcgttctggtggaagtgtaggtgcaggacgttctcgtcatctggttgaatcttgctcccacagtcctctgagaacgtcgcctttgtgactacggttttt

SEQ ID NO: 285798 - DNA, 120 bp, Artificial Sequence
  ENSG00000130508_85 (sequence is synthesized)
ggcgtgtggtcagctgccgccagtctaataaggacattggagattctgtaaaagttcttcagaaatattcccctcaaatgttgtttattttaaggcattattttcagtgaaataacatct

SEQ ID NO: 285799 - DNA, 120 bp, Artificial Sequence
  ENSG00000130508_86 (sequence is synthesized)
aaagatgcatgaccatcagagaccatggggccaggaggacttcacagggcagaggggttgccttcggcagactgtagagattgtgtagttctcatctactttgtgtttcacggccgcacg

SEQ ID NO: 285800 - DNA, 120 bp, Artificial Sequence
  ENSG00000130508_87 (sequence is synthesized)
gcgagtggatggcgtggcgttggcctgggctcgcctctgctgcccatccccagccgtgggacattccggaactgcgaggtctcttccctggaggaagctccttggattcaggtggaggct

SEQ ID NO: 285801 - DNA, 120 bp, Artificial Sequence
  ENSG00000130511_0 (sequence is synthesized)
gtttcccggaacagcccgcgcggaggaaagggaggaaaaaaagccaccctgcggccggggccggagctggagccgccgctgccgccgccgccgcggccgtctggagctcccccgcgcgga

SEQ ID NO: 285802 - DNA, 80 bp, Artificial Sequence
  ENSG00000130511_1 (sequence is synthesized)
cgatgcctgccgtgcccgcctggggctcggggcggtgaggcccggggcgcggggtagctatggcgacggcaagcgcggcc

SEQ ID NO: 285803 - DNA, 120 bp, Artificial Sequence
  ENSG00000130511_2 (sequence is synthesized)
cgtggagcagcatgtacgccaaggggggcaagggttcggccgtgccctccgacagccaggcccgcgagaagttggcgctgtacgtttatgagtacctgctgcacatcggtgcccagaagt

SEQ ID NO: 285804 - DNA, 120 bp, Artificial Sequence
  ENSG00000130511_3 (sequence is synthesized)
cagcccagaccttcctgtctgagatccgatgggagaagaacatcacgctgggggagccccctgggttcctgcactcctggtggtgcgtcttctgggacctgtactgcgcggcgcctgaca

SEQ ID NO: 285805 - DNA, 120 bp, Artificial Sequence
  ENSG00000130511_4 (sequence is synthesized)
gaagagaggcctgcgagcactccggcgaggccaaggccttccaggactatagtgctgcagccgcccccagccccgttatggggagtatggccccaggtgacacaatggccgcaggctcca

SEQ ID NO: 285806 - DNA, 120 bp, Artificial Sequence
  ENSG00000130511_5 (sequence is synthesized)
tggcggctggcttcttccagggcccccccggctcccagccgtccccccacaaccccaacgcccccatgatggggcctcacggtcagcccttcatgtcaccgcgcttcccagggggccccc

SEQ ID NO: 285807 - DNA, 120 bp, Artificial Sequence
  ENSG00000130511_6 (sequence is synthesized)
ggcccaccctgcggatgccgagtcagcctcccgcaggcctccctggctcccagcccctcctccctggcgccatggagccctccccacgagcccaggggcatccgagcatgggcggcccaa

SEQ ID NO: 285808 - DNA, 120 bp, Artificial Sequence
  ENSG00000130511_7 (sequence is synthesized)
agagctatggaggtggcatgcgacccccacccaactccctcgccggcccaggcctgcctgccatgaacatgggcccaggagttcgtggcccgtgggccagccccagtggaaactcgatcc

SEQ ID NO: 285809 - DNA, 120 bp, Artificial Sequence
  ENSG00000130511_8 (sequence is synthesized)
cctactcctcctcatcccccggcagctacaccggacccccaggaggaggtgggccccctggaacacccatcatgcctagccctggagattccaccaactccagcgaaaacatgtacacta

SEQ ID NO: 285810 - DNA, 120 bp, Artificial Sequence
  ENSG00000130511_9 (sequence is synthesized)
tcatgaaccccatcgggcagggcgccggcagggctaatttcccgctcggccctggcccggagggccccatggccgccatgagcgcgatggagcctcaccacgtgaacggatccctgggct

SEQ ID NO: 285811 - DNA, 120 bp, Artificial Sequence
  ENSG00000130511_10 (sequence is synthesized)
cgggcgacatggacgggttgccgaagagttcccccggcgccgtggccggcctgagcaacgccccgggcaccccgcgggacgacggcgagatggcggccgccgggaccttcctgcacccgt

SEQ ID NO: 285812 - DNA, 120 bp, Artificial Sequence
  ENSG00000130511_11 (sequence is synthesized)
tcccgagcgaaagctactcgccagggatgaccatgagcgtgtgatggggcggcagccccgggcctctctgcgggcctaggcttctgcccagcgcccctgctcagggcgaggggctgaggt

SEQ ID NO: 285813 - DNA, 120 bp, Artificial Sequence
  ENSG00000130511_12 (sequence is synthesized)
cacacctcgggcacctggactcctggccaatcaaggcttgcccagctgggaggccccacacgaaagactcttaccattttattaaaaacgcaaggacctcagagacgttcttttctgtat

SEQ ID NO: 285814 - DNA, 120 bp, Artificial Sequence
  ENSG00000130511_13 (sequence is synthesized)
ggacccttcctgccatttgtattttgtcccagagagaaaggctctttggggggcccctctccccaggacgtcagggggtggggcccataaataaatggaagctggttttggtttttggta

SEQ ID NO: 285815 - DNA, 120 bp, Artificial Sequence
  ENSG00000130511_14 (sequence is synthesized)
agccaggcccgcgagaagtattgcctgtctctgtctctcccctcaagaacatggcctccaggacaggggccgggtgtgtgcactgcgcaaaaggcacttcatggatgctggaggaactaa

SEQ ID NO: 285816 - DNA, 120 bp, Artificial Sequence
  ENSG00000130511_15 (sequence is synthesized)
gcggtggcctgtgtttagttgttccaggacggccactgtgagctgggtgtgtggcagtgtatgtgtgtcgctgggcgggctgtatgtgcggtggttcccacccttgctgagtgtgggtag

SEQ ID NO: 285817 - DNA, 120 bp, Artificial Sequence
  ENSG00000130511_16 (sequence is synthesized)
ctctgcggggtgagacacccaatgtcactgcctgaggctttatggggctatccgcagtcgttccagcagcggggtacacttttgctgtgtggagcgctatgttgagtgtcgctgcgaatg

SEQ ID NO: 285818 - DNA, 120 bp, Artificial Sequence
  ENSG00000130511_17 (sequence is synthesized)
accctgcggatgccgagtcagggcatccgagcatgggcggcccaatgcagagggtgacgcctcctcgtggcatggccagcgtggggccccagagctatggaggtggcatgcgacccccac

SEQ ID NO: 285819 - DNA, 120 bp, Artificial Sequence
  ENSG00000130511_18 (sequence is synthesized)
agcccttcatgtcaccgcgcttcccagggggcccccggcccaccctgcggatgccgagtcaggtgagaaagggatgaggggagggcgggcaggagctgggccggggagggagcaccccac

SEQ ID NO: 285820 - DNA, 120 bp, Artificial Sequence
  ENSG00000130511_19 (sequence is synthesized)
ttccccctgccgtcagcccgcctgccgggtggaggcgtctagtggcgtcctgagccccccgggggccgctcagtgacaggggctgccccgagctggagggggatccagcgaccaaaccag

SEQ ID NO: 285821 - DNA, 120 bp, Artificial Sequence
  ENSG00000130511_20 (sequence is synthesized)
caaaccagaggatgcactgaccgcccctcccccccaggcccaaccctccacctggcctcagtcccggggttcctggcgggctgtgcggggcgggggcgcgtcggcgggggcagcttgcga

SEQ ID NO: 285822 - DNA, 120 bp, Artificial Sequence
  ENSG00000130513_0 (sequence is synthesized)
agtcccagctcagagccgcaacctgcacagccatgcccgggcaagaactcaggacggtgaatggctctcagatgctcctggtgttgctggtgctctcgtggctgccgcatgggggcgccc

SEQ ID NO: 285823 - DNA, 120 bp, Artificial Sequence
  ENSG00000130513_1 (sequence is synthesized)
tgtctctggccgaggcgagccgcgcaagtttcccgggaccctcagagttgcactccgaagactccagattccgagagttgcggaaacgctacgaggacctgctaaccaggctgcgggcca

SEQ ID NO: 285824 - DNA, 120 bp, Artificial Sequence
  ENSG00000130513_2 (sequence is synthesized)
accagagctgggaagattcgaacaccgacctcgtcccggcccctgcagtccggatactcacgccagaagtgcggctgggatccggcggccacctgcacctgcgtatctctcgggccgccc

SEQ ID NO: 285825 - DNA, 120 bp, Artificial Sequence
  ENSG00000130513_3 (sequence is synthesized)
ttcccgaggggctccccgaggcctcccgccttcaccgggctctgttccggctgtccccgacggcgtcaaggtcgtgggacgtgacacgaccgctgcggcgtcagctcagccttgcaagac

SEQ ID NO: 285826 - DNA, 120 bp, Artificial Sequence
  ENSG00000130513_4 (sequence is synthesized)
cccaggcgcccgcgctgcacctgcgactgtcgccgccgccgtcgcagtcggaccaactgctggcagaatcttcgtccgcacggccccagctggagttgcacttgcggccgcaagccgcca

SEQ ID NO: 285827 - DNA, 120 bp, Artificial Sequence
  ENSG00000130513_5 (sequence is synthesized)
gggggcgccgcagagcgcgtgcgcgcaacggggaccactgtccgctcgggcccgggcgttgctgccgtctgcacacggtccgcgcgtcgctggaagacctgggctgggccgattgggtgc

SEQ ID NO: 285828 - DNA, 120 bp, Artificial Sequence
  ENSG00000130513_6 (sequence is synthesized)
tgtcgccacgggaggtgcaagtgaccatgtgcatcggcgcgtgcccgagccagttccgggcggcaaacatgcacgcgcagatcaagacgagcctgcaccgcctgaagcccgacacggtgc

SEQ ID NO: 285829 - DNA, 120 bp, Artificial Sequence
  ENSG00000130513_7 (sequence is synthesized)
cagcgccctgctgcgtgcccgccagctacaatcccatggtgctcattcaaaagaccgacaccggggtgtcgctccagacctatgatgacttgttagccaaagactgccactgcatatgag

SEQ ID NO: 285830 - DNA, 120 bp, Artificial Sequence
  ENSG00000130513_8 (sequence is synthesized)
cagtcctggtccttccactgtgcacctgcgcggaggacgcgacctcagttgtcctgccctgtggaatgggctcaaggttcctgagacacccgattcctgcccaaacagctgtatttatat

SEQ ID NO: 285831 - DNA, 120 bp, Artificial Sequence
  ENSG00000130513_9 (sequence is synthesized)
aagtctgttatttattattaatttattggggtgaccttcttggggactcgggggctggtctgatggaactgtgtatttatttaaaactctggtgataaaaataaagctgtctgaactgtt

SEQ ID NO: 285832 - DNA, 120 bp, Artificial Sequence
  ENSG00000130513_10 (sequence is synthesized)
agaaagcaactagcacagccatgcccaggccaggacccgtgacacagcgatgctctcagatgctgctgatgttacagatgttgttgggggcaccctgagggggcaccctgactctgcagg

SEQ ID NO: 285833 - DNA, 120 bp, Artificial Sequence
  ENSG00000130513_11 (sequence is synthesized)
tgagaaccttctggggttcctaggaccctcggacaagcactctgatccggatgactccaggtcccaggagttgcagaaacgccaccaggaccttcagagcaccagttagacaaggagagc

SEQ ID NO: 285834 - DNA, 120 bp, Artificial Sequence
  ENSG00000130513_12 (sequence is synthesized)
caggaggagctgggccccaacctcatccaaaagcacagactcccaggctggaatggtgtcctcatatcgaggaagaggatactgaggcccagaaatgtgccctagctttactaggagcgc

SEQ ID NO: 285835 - DNA, 120 bp, Artificial Sequence
  ENSG00000130513_13 (sequence is synthesized)
ccgagtcttggccttaactggctggcaacgtaaaacctgccctccacaaggacaagatgaaaacttggggatttggaggggacaacaaattagactcaatcacaatttcaaacttttgga

SEQ ID NO: 285836 - DNA, 120 bp, Artificial Sequence
  ENSG00000130513_14 (sequence is synthesized)
cttttggatgtcaatatatccatcaagaaattgaaaagaggcctggcatggtggccgatgcctgtcatcccagcactttgggagaccaacgtcggaggatcacttgaggtcaggagttcc

SEQ ID NO: 285837 - DNA, 120 bp, Artificial Sequence
  ENSG00000130513_15 (sequence is synthesized)
acatgcaacgagcgacttgttaggggaggaggagagtattttccccatctctgtgccctccatggaggctccaggggtgcagggcactggatgagtgcggctgggatccggcggccacct

SEQ ID NO: 285838 - DNA, 120 bp, Artificial Sequence
  ENSG00000130517_0 (sequence is synthesized)
ctcgcgcggccgagaggctgcagcggcagcagctgtcgcgccagtcgcaacagaagcaggtccgaggcacagcccgatcccgccatggagcagccgaggaaggcggtggtagtgacggga

SEQ ID NO: 285839 - DNA, 120 bp, Artificial Sequence
  ENSG00000130517_1 (sequence is synthesized)
tttggcccttttggggaacacaccgtgaacgccagttggattgcagttcaggagctagaaaagctaggccttggcgacagcgtggacctgcatgtgtacgagattccggttgagtaccaa

SEQ ID NO: 285840 - DNA, 120 bp, Artificial Sequence
  ENSG00000130517_2 (sequence is synthesized)
acagtccagagactcatccccgccctgtgggagaagcacagtccacagctggtggtgcatgtgggggtgtcaggcatggcgaccacagtcacactggagaaatgtggacacaacaagggc

SEQ ID NO: 285841 - DNA, 120 bp, Artificial Sequence
  ENSG00000130517_3 (sequence is synthesized)
tacaaggggctggacaactgccgcttttgccccggctcccagtgctgcgtggaggacgggcctgaaagcattgactccatcatcgacatggatgctgtgtgcaagcgagtcaccacgttg

SEQ ID NO: 285842 - DNA, 120 bp, Artificial Sequence
  ENSG00000130517_4 (sequence is synthesized)
ggcctggatgtgtcggtgaccatctcgcaggatgccggcagatatctctgcgactttacctactacacctctttgtaccagagtcacggtcgatcagccttcgtccacgtgcccccactg

SEQ ID NO: 285843 - DNA, 120 bp, Artificial Sequence
  ENSG00000130517_5 (sequence is synthesized)
gggaagccgtacaacgcggaccagctgggcagggcactgagagccatcattgaggagatgttggacctcctggagcagtcagagggcaaaatcaactattgccacaaacactgagggacg

SEQ ID NO: 285844 - DNA, 120 bp, Artificial Sequence
  ENSG00000130517_6 (sequence is synthesized)
ctcaggtctcctaagacctcatcctgctggggaccccacgaggggacatccaccctctggggtgtggccaggaaaagacaagctcttcagcttggggatccgatctggaagagagattct

SEQ ID NO: 285845 - DNA, 120 bp, Artificial Sequence
  ENSG00000130517_7 (sequence is synthesized)
gatctgcccacctcctcttcctccttctctacaaaagctccggttgattcgagggaagtggtgaaaatttttttttctcccattttcctccctgcatctggggacacagctgccgtgacc

SEQ ID NO: 285846 - DNA, 120 bp, Artificial Sequence
  ENSG00000130517_8 (sequence is synthesized)
agggaggccagcctgggaggtccagatgcccagggagaatcttggtctggtgaatccatgagctgcgataccacggctggggccatatgttcacctgctttcctgtccgttggtgaagga

SEQ ID NO: 285847 - DNA, 120 bp, Artificial Sequence
  ENSG00000130517_9 (sequence is synthesized)
atttcagaattcattttatatccaagactggcttttaccaaatttaaaagcctctcaatgcgtcctcgaccttgaactgtgctcaacagcctggccctttctggggccaccctgggatat

SEQ ID NO: 285848 - DNA, 120 bp, Artificial Sequence
  ENSG00000130517_10 (sequence is synthesized)
ttctttctttctttctttcttgctttctttctttcttgctttctttcttctctctctctctttttttttttttttaaatagtgctagtttgggcacagagtaatttatattccctttggt

SEQ ID NO: 285849 - DNA, 120 bp, Artificial Sequence
  ENSG00000130517_11 (sequence is synthesized)
agagtaatttatattccctttggttaaaatgcaggctttttagccaacaacaaaagtgttttccccccacccccactcgcccaccagggtgatgccacttttgcctcctgccctgaaaat

SEQ ID NO: 285850 - DNA, 66 bp, Artificial Sequence
  ENSG00000130517_12 (sequence is synthesized)
ccaccagggtgatgccacttttgcctcctgccctgaaaattggacttaagatgccatgggtgggcg

SEQ ID NO: 285851 - DNA, 89 bp, Artificial Sequence
  ENSG00000130517_13 (sequence is synthesized)
ttggacttaagatggcatgtctttgttttagggccaaaaatgaggcccccttgcttaaggcatggggtccgtggccaggcaacggggtg

SEQ ID NO: 285852 - DNA, 120 bp, Artificial Sequence
  ENSG00000130517_14 (sequence is synthesized)
cttgcttaaggcatggggtccgtggccaggcaacggggtgggactgctgccccagatgtggccatgggggtcgtggtcctttcaacaccaagctatgagctgtcgccatggagaccaggg

SEQ ID NO: 285853 - DNA, 120 bp, Artificial Sequence
  ENSG00000130517_15 (sequence is synthesized)
ccacctgtggaaaggcggattttgtctgcttttgacttttcttttttaatatgtaaaactccacatcagcggaaacccccccctacttctggcctggagcttcagggttttggtgctggg

SEQ ID NO: 285854 - DNA, 120 bp, Artificial Sequence
  ENSG00000130517_16 (sequence is synthesized)
acgagtttgttgttctccttagcggggtggcgcggggggctcaaaacgggggcgcgggggctggagttggcagagctctgcatgtcccggcatgtctgagcaggaggaattccgggcggc

SEQ ID NO: 285855 - DNA, 120 bp, Artificial Sequence
  ENSG00000130517_17 (sequence is synthesized)
caaagggttttatgtagattgcttttggacactcgcccaggagtcaggagttgatttttatctcacttcctggtaaccttgaacttaccaggcagggatgagatgacgtaaacttcctca

SEQ ID NO: 285856 - DNA, 120 bp, Artificial Sequence
  ENSG00000130517_18 (sequence is synthesized)
gatgatgtaagttcagccacatcttgctgcccattagggagagaggacgacccccacagtgaaagtaattgagtgaaatgcacgttctggaaatcagtttctattttggcctggaggaat

SEQ ID NO: 285857 - DNA, 120 bp, Artificial Sequence
  ENSG00000130517_19 (sequence is synthesized)
gtggctatactgcttccctgagtgtgacacagttggaatctaatcttgttggtttcccaacatctaggtttttgtttgtttgtttgtttttatgatagggtcttgttctgttgaccaggc

SEQ ID NO: 285858 - DNA, 64 bp, Artificial Sequence
  ENSG00000130517_20 (sequence is synthesized)
tgtttgtttttatgatagggtcttgttctgttgaccaggctggagtacagtagtgtgatcatgg

SEQ ID NO: 285859 - DNA, 65 bp, Artificial Sequence
  ENSG00000130517_21 (sequence is synthesized)
acacctggctaatttttaaattttttactgatcctcctttctcggcctcccaaagtgctgggatt

SEQ ID NO: 285860 - DNA, 120 bp, Artificial Sequence
  ENSG00000130517_22 (sequence is synthesized)
cactgcacccagcccagttctttcttaaaacagctgagagttttgttttcttcagcgttcaccttccttgtctccagttccgatgctggcagtggttcctacctctgttgggtttctaga

SEQ ID NO: 285861 - DNA, 120 bp, Artificial Sequence
  ENSG00000130517_23 (sequence is synthesized)
tagtttgggaacggggttgatgggtttctgtgaaacacattttccaagtcttgggctttctctggaggggaaggtggatgctggcgggtgacttgcagtgggcgcctggcagtgggtgtg

SEQ ID NO: 285862 - DNA, 120 bp, Artificial Sequence
  ENSG00000130517_24 (sequence is synthesized)
gactgtaactgacaggtggaaatgagtagggacactattgttccctccatgccagcttttttttttgctggaaatgccccctccacacccctggtagctctgtgtcctgagaaatccaga

SEQ ID NO: 285863 - DNA, 120 bp, Artificial Sequence
  ENSG00000130517_25 (sequence is synthesized)
gtgtgggagacatcactgcatctgtccccccagcttctgtgaagggaagctgtggcctcttttgaatgtggggaacaactgaagactcaggggtcacccagaggtctggtggaaagcaac

SEQ ID NO: 285864 - DNA, 120 bp, Artificial Sequence
  ENSG00000130517_26 (sequence is synthesized)
ttcaggtttcatcttgctctattcctcaaaggtctggtctgtgggcctctgaggagaaaacaggtctagccaagacagggacaaaatggggaaggggatgtgccaggcctgaactgagct

SEQ ID NO: 285865 - DNA, 120 bp, Artificial Sequence
  ENSG00000130517_27 (sequence is synthesized)
aagcacctgccccgggctccacacttccatctttcttttgtcttcatttcacctctgtgtttaaagcactgtgtgacatagctccttagagatataacctattgtctgctcattgtcacg

SEQ ID NO: 285866 - DNA, 120 bp, Artificial Sequence
  ENSG00000130517_28 (sequence is synthesized)
gtgtgtgtgtcatctttgtattcttgcagtggtttcacatttccttacccagtcaagccagtatcccatccttcctcataatgcacaacatttggctcattttatttttctcattgttat

SEQ ID NO: 285867 - DNA, 83 bp, Artificial Sequence
  ENSG00000130517_29 (sequence is synthesized)
atgcacaacatttggctcattttatttttctcattgttattttttatttttattttttgagatggattctcacactgttactc

SEQ ID NO: 285868 - DNA, 120 bp, Artificial Sequence
  ENSG00000130517_30 (sequence is synthesized)
ttacaggtgtgagctactgcgcctggccaagttttttacaaatatttttcttttggtggaactcatctgtgcactctctggtgtgtttttccacctttgttgggtcttggcttaaaatat

SEQ ID NO: 285869 - DNA, 120 bp, Artificial Sequence
  ENSG00000130517_31 (sequence is synthesized)
ttggtggaactcatctgtgcactctctggtgtgtttttccacctttgttgggtcttggcttaaaatatcctcatgtgggctaggtgtggttactcacacctgtaatcctagcactttggg

SEQ ID NO: 285870 - DNA, 80 bp, Artificial Sequence
  ENSG00000130517_32 (sequence is synthesized)
tgggaggttgaggcaggagaatcccttgatcccatatctaccaaaacatacaagaattagccagatgtggtggtgcatgc

SEQ ID NO: 285871 - DNA, 89 bp, Artificial Sequence
  ENSG00000130517_33 (sequence is synthesized)
ccagaatgcctgggaggttgaagccccagtgagccatgatcacaccactgtagtccagcccgggtgacacagcaagactctgtctcaaa

SEQ ID NO: 285872 - DNA, 120 bp, Artificial Sequence
  ENSG00000130517_34 (sequence is synthesized)
ggaaggaccaagtcccattccctcttgcctcattttcagagcctggggtaggggctacaggtggcataggaagggtctgcaaggtgggtgggacttggcaggtgttgggaagaggaatag

SEQ ID NO: 285873 - DNA, 120 bp, Artificial Sequence
  ENSG00000130517_35 (sequence is synthesized)
gggtggcaagtgtcaatggtgaaaagacaggctgaggggtgtggtgggaaggctgggggagaaaggtgagaagtgattgggggggcttccctgatgagtcctcatggagggtgctgaggc

SEQ ID NO: 285874 - DNA, 120 bp, Artificial Sequence
  ENSG00000130517_36 (sequence is synthesized)
agggaacaggggtgcagggacagtgatcagggcacctggtaccctgaccaacttgatgatggcatctcttttaagatgcccaagtctgcgcacttttattcctttattcggcccctagca

SEQ ID NO: 285875 - DNA, 120 bp, Artificial Sequence
  ENSG00000130517_37 (sequence is synthesized)
ccccctccccaccccaaagaaggtcagttgcatgcgtgtggggatgtagctcaaaaaagaaataagatggagtggaaaggaaagaaaggaagaagcaggaattcaaggtgggtgggctga

SEQ ID NO: 285876 - DNA, 120 bp, Artificial Sequence
  ENSG00000130517_38 (sequence is synthesized)
gcttggggccacctagcccacctgctccaatcaagggctggaacaaacctgaggccacttggagaggcagggctgggcagggacagggggtgggggccgaaatcacagcttccccatcag

SEQ ID NO: 285877 - DNA, 120 bp, Artificial Sequence
  ENSG00000130517_39 (sequence is synthesized)
cttccccatcagagccagatgtgtgaaggaaatgtcccagatggcagtagtttctcggcaaggaggggaatcctggagatggttcatgtctgtgatcccagtgctttgggaggctgaggt

SEQ ID NO: 285878 - DNA, 88 bp, Artificial Sequence
  ENSG00000130517_40 (sequence is synthesized)
tgagcccgggagttcgagaccagcgaaattaaaaaaaaaaattagccagttgtggtgtcaagcacctgtagtcccagctacttgggag

SEQ ID NO: 285879 - DNA, 82 bp, Artificial Sequence
  ENSG00000130517_41 (sequence is synthesized)
cttatctgagcccaggaggtgaaggctgcaatgagccatgattacactactgtaccccagcctgggcaacagagcaagaccc

SEQ ID NO: 285880 - DNA, 81 bp, Artificial Sequence
  ENSG00000130517_42 (sequence is synthesized)
caacagagcaagaccctgcctcaaaattaagaaaaaaaaaaggggggccaggcgcagtggctttgatcgcttgaggccagg

SEQ ID NO: 285881 - DNA, 120 bp, Artificial Sequence
  ENSG00000130517_43 (sequence is synthesized)
tctgtcacaaaaaaaaaaaaaaaaaagaattccctgctctgcttttctgctcgttgctggcatagaaacatctagaacagaaagtatccactctggggcagatgggagagctggaaaagt

SEQ ID NO: 285882 - DNA, 120 bp, Artificial Sequence
  ENSG00000130517_44 (sequence is synthesized)
aaagtatccactctggggcagatgggagagctggaaaagtagattcaagatgccttttagtcttggaagtttcttccaggaagcaagaccagctggtatgtttacacctgcactccagtg

SEQ ID NO: 285883 - DNA, 120 bp, Artificial Sequence
  ENSG00000130517_45 (sequence is synthesized)
ccctggggaggtgaccaggtggagggggatggctcatggaaatctgtcccgcacagctggcccccttttggctgccactgtctagactgttggcctttgacctctctgcctcttgtggcg

SEQ ID NO: 285884 - DNA, 120 bp, Artificial Sequence
  ENSG00000130517_46 (sequence is synthesized)
tctgaacctagacgtcccttttggagacagctggacaaagccctattctccgcagccccagcctctatcctgaggcctctgggagctgcgtgacggccagcatggggtgctgatcatggt

SEQ ID NO: 285885 - DNA, 120 bp, Artificial Sequence
  ENSG00000130517_47 (sequence is synthesized)
caaggaggcaggtctttgccaggttgccccatgcagccacccatcctcagcatcctaacttgagggggcaggagagggctttgtttttataatccggattaaatttcccttccctgggca

SEQ ID NO: 285886 - DNA, 120 bp, Artificial Sequence
  ENSG00000130517_48 (sequence is synthesized)
caagtgcctcatgagggcccggggctgctggttgggagggaaagcatccccgtttttgcagtgaggaggccggccgagggctggggttccacttagacccttggcagaatggctgttgag

SEQ ID NO: 285887 - DNA, 120 bp, Artificial Sequence
  ENSG00000130517_49 (sequence is synthesized)
gggcaggcgctgcccagtgcccacgtctggaaagctaattcccgggtggacgctgaacatacctgctgagagactctgtcccctggtttccaggacagttgtcacaagctgagtgggggg

SEQ ID NO: 285888 - DNA, 120 bp, Artificial Sequence
  ENSG00000130517_50 (sequence is synthesized)
ggactcccaggacttgagggacccagtcccaccccaaactgctccccctcccccaaattccctttctcctcctgctctttctccccgctgtgcctcccccagttacccacagaagtgcct

SEQ ID NO: 285889 - DNA, 120 bp, Artificial Sequence
  ENSG00000130517_51 (sequence is synthesized)
gcctctccagcgctcacagaacacacaaaaagggacaggaattggtcactgggtagtggccgtggctcctgacgatccagaccagcgtctggcccaagccattcagaggtggggtctggg

SEQ ID NO: 285890 - DNA, 120 bp, Artificial Sequence
  ENSG00000130517_52 (sequence is synthesized)
gcctgggggttttgtgtcgtgacactttgtctcaaggagattccacatagggatttgaattaggctttctgcttgccaaggcctgtggcatctgagcctggctgagggccgggcaagcct

SEQ ID NO: 285891 - DNA, 120 bp, Artificial Sequence
  ENSG00000130517_53 (sequence is synthesized)
cccctgagcctttggaagccgagttcactctctgcctgcccaggggagcaccggcttggttctgggggctcctctaacatctcaggtttttatcttgtcttaaatttctttctaggaaaa

SEQ ID NO: 285892 - DNA, 120 bp, Artificial Sequence
  ENSG00000130517_54 (sequence is synthesized)
aacccttccctgccaaaggtgactgtgttttctgccgccgaaggagggcccggtccctccaggctcagtgtggcttctccctgacccccgccctagaacttttgccagtgccttttctga

SEQ ID NO: 285893 - DNA, 120 bp, Artificial Sequence
  ENSG00000130517_55 (sequence is synthesized)
aactcctgtgtcccgggccccccaggcggagaaggatatgccggattctgcctggggctgggctctaggagaccccaaatttgacaccacagaaagcaaataaaacacttgaaatacgca

SEQ ID NO: 285894 - DNA, 120 bp, Artificial Sequence
  ENSG00000130517_56 (sequence is synthesized)
aacacaccgtgaacgccagttggattgcagttcagagatgggatctcactatattgccctggctggtcttgaacttccgggctcaaatgatccttccacctcggcctcccaaagaagctg

SEQ ID NO: 285895 - DNA, 120 bp, Artificial Sequence
  ENSG00000130517_57 (sequence is synthesized)
agggccctgtggggtgggagtgagtggggatttccctcctccacccactgagcctggtgtagaacaagccaagcgtgttgaccttggcctctttggaccaagcactcagtgtatactagg

SEQ ID NO: 285896 - DNA, 120 bp, Artificial Sequence
  ENSG00000130517_58 (sequence is synthesized)
cacagagccaagtatttgtacgtagcaggtgccgttggttctgctcctgggactcatggatctgcccacttctccccaccatcacggtccccaccaaggcccccagcatctcccacctgg

SEQ ID NO: 285897 - DNA, 120 bp, Artificial Sequence
  ENSG00000130517_59 (sequence is synthesized)
gaggacgggcctgaaagcattgactccatcatcgacatggatgctgtgtgcaagcgagtcaccacgttgggcctggatgtgtcggtgaccatctcgcaggatgccggcagccttggaagt

SEQ ID NO: 285898 - DNA, 120 bp, Artificial Sequence
  ENSG00000130517_60 (sequence is synthesized)
gagaggctgcagcggcagcagctgtcgcgccagtcgcaacagaagcaggtccgaggcacagcccgatcccgccatggagcagccgaggaaggcggtggtagtgacgggagctagaaaagc

SEQ ID NO: 285899 - DNA, 120 bp, Artificial Sequence
  ENSG00000130518_0 (sequence is synthesized)
aacttggctttgagtcacaaagctgctgcggcaccagggctccaagactggccgttcagactgctaggtttagcttcaggggcagcccagggcagtgttgctgcatattgcatggatgaa

SEQ ID NO: 285900 - DNA, 120 bp, Artificial Sequence
  ENSG00000130518_1 (sequence is synthesized)
aggctgaaggctgcctcctcttgcaggctggcttctgagattgcaccttcttctcctgctactcctccaaatctatgacccttcaaggcagagctgacctgtccggtaatcaaggcaatg

SEQ ID NO: 285901 - DNA, 120 bp, Artificial Sequence
  ENSG00000130518_2 (sequence is synthesized)
cagccggccgcctagctacagttcacgagccagttgtcacccagtgggcggtgcatcctccagcccccgctcaccccagtctcctggacaaaatggagaaagcgcctccacagccccagc

SEQ ID NO: 285902 - DNA, 120 bp, Artificial Sequence
  ENSG00000130518_3 (sequence is synthesized)
acgagggcctcaagtccaaggagcatcttccgcaacagcctgccgaaggcaagacggcgtcccgccgcgtcccacgcctccgggctgtggtcgagagccaggccttcaagaacatcctgg

SEQ ID NO: 285903 - DNA, 120 bp, Artificial Sequence
  ENSG00000130518_4 (sequence is synthesized)
tagacgagatggacatgatgcacgcccgtgcagccacgctcatccaagccaactggaggggctattggctccggcagaagctgatttcccagatgatggcggccaaggccatccaggagg

SEQ ID NO: 285904 - DNA, 120 bp, Artificial Sequence
  ENSG00000130518_5 (sequence is synthesized)
cctggcggcgcttcaacaagagacacatccttcactccagcaagtcgttggtaaagaaaacgagggcggaggagggggacataccttatcacgccccacagcaggtgcgcttccagcatc

SEQ ID NO: 285905 - DNA, 120 bp, Artificial Sequence
  ENSG00000130518_6 (sequence is synthesized)
cggaagagaaccgccttctgtccccgcccatcatggtgaacaaggagacccagttcccttcctgtgacaatctggtcctctgcagaccccagtcgtcccccctcctgcagcccccagcag

SEQ ID NO: 285906 - DNA, 120 bp, Artificial Sequence
  ENSG00000130518_7 (sequence is synthesized)
ctcagggtaccccagagccctgtgtgcagggtcctcatgctgccagagtccgggggctggccttcctgccacaccagacggtcaccatcagatttccctgcccagtgagtctggacgcaa

SEQ ID NO: 285907 - DNA, 120 bp, Artificial Sequence
  ENSG00000130518_8 (sequence is synthesized)
aatgccagccatgcctgctgaccagaaccatcagaagcacctgcctcgtccacatagagggtgactcagtgaagaccaaacgtgtaagtgcccggaccaacaaagccagggctccggaga

SEQ ID NO: 285908 - DNA, 120 bp, Artificial Sequence
  ENSG00000130518_9 (sequence is synthesized)
caccattgtccagaaggtatgaccaggcagttacgagaccatccagagcccaaacccagggccctgtgaaagcagagacccccaaagcccccttccagatatgtccagggcccatgatca

SEQ ID NO: 285909 - DNA, 120 bp, Artificial Sequence
  ENSG00000130518_10 (sequence is synthesized)
ccaagactctactccagacatatccagtggtctccgtgaccctgccacagacatatccagcgtccacgatgaccaccaccccacccaagactagcccagttcccaaagtaacaataatca

SEQ ID NO: 285910 - DNA, 120 bp, Artificial Sequence
  ENSG00000130518_11 (sequence is synthesized)
agaccccagcccagatgtatccggggcccacagtgaccaaaactgcacctcacacatgccccatgcccacaatgaccaagatccaggtacaccccacagcctccagaactggcaccccac

SEQ ID NO: 285911 - DNA, 120 bp, Artificial Sequence
  ENSG00000130518_12 (sequence is synthesized)
ggcagacatgccctgcgaccatcacggcaaagaaccgacctcaggtttcccttctggcttccatcatgaagagcctgccccaggtatgcccggggcctgcgatggcaaagaccccacccc

SEQ ID NO: 285912 - DNA, 120 bp, Artificial Sequence
  ENSG00000130518_13 (sequence is synthesized)
agatgcacccggtcaccaccccagccaaaaacccattgcaaacatgtctgtcagccacaatgtccaagacttcatcccagaggagcccagttggggtgaccaagccctcaccccagaccc

SEQ ID NO: 285913 - DNA, 120 bp, Artificial Sequence
  ENSG00000130518_14 (sequence is synthesized)
gcctgccagccatgataaccaagaccccagcccagttacgctcggtggccaccatcctcaagactctgtgtctggcctctccaacagtggcaaatgtcaaggctccaccccaagtggcgg

SEQ ID NO: 285914 - DNA, 120 bp, Artificial Sequence
  ENSG00000130518_15 (sequence is synthesized)
cctcatccccctcctatttggctgaggggaagatcaggtgcctggctcaaccacatccgggaactggggtccccagggctgcagctgagcttcctttggaagccgagaaaatcaagactg

SEQ ID NO: 285915 - DNA, 120 bp, Artificial Sequence
  ENSG00000130518_16 (sequence is synthesized)
gcacccagaaacaggcgaaaacagacatggcatttaagaccagtgtggcagtggaaatggctggggctccatcctggacaaaagttgctgaggaaggggacaagccacctcacgtgtatg

SEQ ID NO: 285916 - DNA, 120 bp, Artificial Sequence
  ENSG00000130518_17 (sequence is synthesized)
tgcctgtagacatggctgtcaccctgccccggggacagctggctgccccactgaccaatgcctcatcccagagacatccaccctgcctgtcccagagaccactggccgccccgctgacca

SEQ ID NO: 285917 - DNA, 120 bp, Artificial Sequence
  ENSG00000130518_18 (sequence is synthesized)
aggcctcatctcagggacatctgcccactgagctgaccaagaccccatccctggcccatctggacacctgtctgagcaagatgcattcccagacacatctggccacaggtgccgtgaagg

SEQ ID NO: 285918 - DNA, 120 bp, Artificial Sequence
  ENSG00000130518_19 (sequence is synthesized)
tccagtcccaagcgcctctagccacctgtctgaccaagacgcagtcccgggggcagccgatcacagacataaccacgtgcctcatcccagcgcaccaggctgctgatctcagcagcaaca

SEQ ID NO: 285919 - DNA, 120 bp, Artificial Sequence
  ENSG00000130518_20 (sequence is synthesized)
cccactcccaggtgctcctaacagggtccaaggtgtccaaccacgcctgccagcgcctcggtggcctcagcgccccaccctgggccaagccagaggacagacagacccagccacagcccc

SEQ ID NO: 285920 - DNA, 120 bp, Artificial Sequence
  ENSG00000130518_21 (sequence is synthesized)
acggacacgtgccggggaagaccactcaggggggaccatgcccggcagcctgtgaggtccagggtatgctggtgccgccgatggcacccaccggccattccacatgcaacgttgagtcct

SEQ ID NO: 285921 - DNA, 120 bp, Artificial Sequence
  ENSG00000130518_22 (sequence is synthesized)
ggggagacaacggagccacacgtgcccagccatcaatgcccggccaggcggtgccctgccaggaggacacgggccccgcggacgctggtgtggttggtggccaatcgtggaaccgcgcat

SEQ ID NO: 285922 - DNA, 120 bp, Artificial Sequence
  ENSG00000130518_23 (sequence is synthesized)
gggagccagccaggggtgctgcgtcctgggacacctggcgcaacaaggcggtggtgcctcccaggcggtccggggagccaatggtgtccatgcaggctgcagaggagatccgcatcctcg

SEQ ID NO: 285923 - DNA, 120 bp, Artificial Sequence
  ENSG00000130518_24 (sequence is synthesized)
cagtgatcactatccaggcgggcgtccgtggctacctggcgcgtcgcaggatccggctgtggcaccggggggccatggtcatccaagctacttggcgcggctaccgtgtgcggcggaacc

SEQ ID NO: 285924 - DNA, 120 bp, Artificial Sequence
  ENSG00000130518_25 (sequence is synthesized)
tggcacacctctgcagagccaccacgaccatccagtctgcctggcgcggctacagcacccgccgggaccaagcccggcactggcagatgctccaccccgtcacgtgggtggagctgggca

SEQ ID NO: 285925 - DNA, 120 bp, Artificial Sequence
  ENSG00000130518_26 (sequence is synthesized)
gccgggccggggtcatgtctgaccgaagctggttccaggatggcagagccaggacagtatctgaccatcgctgcttccagtcctgccaggcacacgcttgcagcgtctgccactccctga

SEQ ID NO: 285926 - DNA, 120 bp, Artificial Sequence
  ENSG00000130518_27 (sequence is synthesized)
gctccaggatcgggagcccgcccagcgtggtgatgctagtgggctccagccctcgcacctgtcatacctgtggacgcacacagcccacccgtgtggtgcagggcatgggccagggcactg

SEQ ID NO: 285927 - DNA, 120 bp, Artificial Sequence
  ENSG00000130518_28 (sequence is synthesized)
agggccccggggcagtgtcttgggcctccgcctaccagctggctgccctgagtcccaggcagccgcatcgccaggacaaagcggccacagccatccagtccgcctggaggggctttaaga

SEQ ID NO: 285928 - DNA, 120 bp, Artificial Sequence
  ENSG00000130518_29 (sequence is synthesized)
tccgccagcagatgaggcagcagcaaatggcagcgaagatagttcaagccacctggcgaggccaccatacccggagctgtctgaagaacacagaggcgctcttgggaccagcagacccct

SEQ ID NO: 285929 - DNA, 120 bp, Artificial Sequence
  ENSG00000130518_30 (sequence is synthesized)
cggccagctcacggcacatgcattggcctggcatctaggaccctggctccctgcagtggggacttcgtgggaggcactcatggctctctgggtctaatgaataaagtcctccacagccta

SEQ ID NO: 285930 - DNA, 120 bp, Artificial Sequence
  ENSG00000130518_31 (sequence is synthesized)
tgctggcctccttgtgtgctgaagtagctggtgtgctggcatcccaggaggatctccgcactctgttggccaaagccctctcccagggagaagtctgggcagctctgaaccaggccctgt

SEQ ID NO: 285931 - DNA, 120 bp, Artificial Sequence
  ENSG00000130518_32 (sequence is synthesized)
ccaaggaggtcctgggtgccactgtcaccaaagccctgccccagagcatgctgagcatggcgctggtgaaggcgctgtcctggagtgagctgcgcctgaccctgtcccgagccctgtccc

SEQ ID NO: 285932 - DNA, 120 bp, Artificial Sequence
  ENSG00000130518_33 (sequence is synthesized)
ggggcgagctgcgggcggaactcaccaaggtcatgcagggtaaattggccgaggtgcttagcaaggctttgacggaggaggagtgggtggctctgagccaggccctgtgtcagggtgagc

SEQ ID NO: 285933 - DNA, 120 bp, Artificial Sequence
  ENSG00000130518_34 (sequence is synthesized)
tgggtgctctcctgagccagtcttggtgtcgggtggccctgaggactggaaccatcctccccaaggccgcctcgaaatcaacaggaagcggggtgactaagacgccggccctggtgaagg

SEQ ID NO: 285934 - DNA, 120 bp, Artificial Sequence
  ENSG00000130518_35 (sequence is synthesized)
tggcctgcaggaggagtccatcggccgcatgggggccctccctgggccccgtgagaccacagaccagcaagggccccgcggacgctggtgtggttggtggccaatcgtggaaccgcgcat

SEQ ID NO: 285935 - DNA, 120 bp, Artificial Sequence
  ENSG00000130518_36 (sequence is synthesized)
gcacagccatctgtggtgactaggaggtccccaagccgaggacacccatcaaggacctttagagtggcctcagaccaaggtcaccaatcaatggctaactgggggtcccaaaacctagcc

SEQ ID NO: 285936 - DNA, 120 bp, Artificial Sequence
  ENSG00000130518_37 (sequence is synthesized)
cagccatctatggacagtggggagccctcaagcctagcccagccatctcaagcccctggggtaacctcaaatctggcccagccatctcaagcctttggggtgtctccaagtccagactac

SEQ ID NO: 285937 - DNA, 120 bp, Artificial Sequence
  ENSG00000130518_38 (sequence is synthesized)
ccatctcagtctgttggggagtacccaatgctggctcagccatttcagcccactgaggtgtccccaagtccaacctacccatctcaggccattagggagtacccaaccctggcacagcca

SEQ ID NO: 285938 - DNA, 120 bp, Artificial Sequence
  ENSG00000130518_39 (sequence is synthesized)
tttcagcccactgaggtatctccaagcccagcccacccatatcagctcactgaggtgtccccaagtgcagcctactcatatcagcccactgaggtgtccccaaacccaggctacctatct

SEQ ID NO: 285939 - DNA, 120 bp, Artificial Sequence
  ENSG00000130518_40 (sequence is synthesized)
atggccattgagatgtccccaagcccagaatacccatctgtggccactgaggtgtccccaagcccaacctacccatatcagcccactgagatatccccaagctcaggctacctatctgtg

SEQ ID NO: 285940 - DNA, 120 bp, Artificial Sequence
  ENSG00000130518_41 (sequence is synthesized)
gccactgaggtgtccccaagcccaggctacccatctcagctcactgaggtgtccccaagctcaggctacctatctgtggccactgaagtgtccccaagcccagactactcatctcagcct

SEQ ID NO: 285941 - DNA, 120 bp, Artificial Sequence
  ENSG00000130518_42 (sequence is synthesized)
actgagatgtccccaagctcaggctacctatctatggccactgaggtgtccccaagcccaggctacccatttcagcccactgaggtgtccccaagcccagactatccatgtgtggccact

SEQ ID NO: 285942 - DNA, 120 bp, Artificial Sequence
  ENSG00000130518_43 (sequence is synthesized)
ggggagtcccctagccttgcccagccatctcagcccactgaggtgtccccaagctcagcctacccatctgtggtcactggggagtctccaagcctggcccagtcatatcagcgcactgag

SEQ ID NO: 285943 - DNA, 120 bp, Artificial Sequence
  ENSG00000130518_44 (sequence is synthesized)
gtgttcccaagcccagcctacccatttatggccactgaggtgtccccaagcccaggcgacccatctgtggtcactggggagtccccaagcccagcctacccatctcagcccactgagatg

SEQ ID NO: 285944 - DNA, 120 bp, Artificial Sequence
  ENSG00000130518_45 (sequence is synthesized)
tccccaagcccagcctacccatctcagcccactggggagtctccaagcctgacccagccatctctgaccatcagagtgtccccaagcctagccatgtcatctcagactattggagtgtcc

SEQ ID NO: 285945 - DNA, 120 bp, Artificial Sequence
  ENSG00000130518_46 (sequence is synthesized)
ccaagcctagccatgccatctcagaccattggagtgtccccaagcctagccatgccatttcacaccattggagtgtccccaaccctagctcacccatctatggccattcgggagtctcca

SEQ ID NO: 285946 - DNA, 120 bp, Artificial Sequence
  ENSG00000130518_47 (sequence is synthesized)
agcctggcccagcctcctcagtccactggggaatccccaagcttgacctggccatctcaggccactggggtgtccccaagtgtagcccaccaatctgtggccagtagggtttcctcaagc

SEQ ID NO: 285947 - DNA, 120 bp, Artificial Sequence
  ENSG00000130518_48 (sequence is synthesized)
ctagcccagccatctcaagccagtgggatgtcccctagacaagattacccaccagtggcctccagggtgtccccaaaccaagctcacgcatctataaccagcaggatgtcccctagcaga

SEQ ID NO: 285948 - DNA, 120 bp, Artificial Sequence
  ENSG00000130518_49 (sequence is synthesized)
gctcatgcatctatgacctgtatggtgtccccaagccaggttcatcgatctatgcccagtgaggtgtccccaagccttgcccagctatctcaggccaccactgcagtgcccttaagacca

SEQ ID NO: 285949 - DNA, 120 bp, Artificial Sequence
  ENSG00000130518_50 (sequence is synthesized)
gctcatcaacctatggcctgtggtgtatccccaagcctagcccagccgtctcaagccacagggatgtcttcaaggctagcccaccaacctatgacctgtgtggtgtccttaagcccagcc

SEQ ID NO: 285950 - DNA, 120 bp, Artificial Sequence
  ENSG00000130518_51 (sequence is synthesized)
cagccatctcaagccattggtgtgtccccaagcctagcccacccatcaggaccccatgggttgtctccaagtctagctcacccatatgtggccagtggggcgggctccagcctagcccac

SEQ ID NO: 285951 - DNA, 120 bp, Artificial Sequence
  ENSG00000130518_52 (sequence is synthesized)
ccatctcagaccactgcagtatccccaaggcaagcccaaccatctgtggcctccagtccaggcaagacaaattcatcctgtaccctagcctccagcctagccgagccagctatagccccc

SEQ ID NO: 285952 - DNA, 120 bp, Artificial Sequence
  ENSG00000130518_53 (sequence is synthesized)
agcctattcccaccatctgtggcccacacggaagccctaagcctggctcagtcacccccggacactaggttggccccaagccgatcccagccatctgtggtcagtggtacatgtcatggc

SEQ ID NO: 285953 - DNA, 120 bp, Artificial Sequence
  ENSG00000130518_54 (sequence is synthesized)
ctcaatgagccatgctggggctctaggctggattcaaatctgcagtgttcaagggtggactcagtagccccgtgtctgtgtcacccatcagcgtttgtttcagttagcctgggtggacca

SEQ ID NO: 285954 - DNA, 120 bp, Artificial Sequence
  ENSG00000130518_55 (sequence is synthesized)
tatccctctgtggctggaaatatggaccagggtctgaaccagccatccctgggtactggggtgaacctatgtgaagaacctctgatggttagtgagatggtatccagccccccggacttc

SEQ ID NO: 285955 - DNA, 120 bp, Artificial Sequence
  ENSG00000130518_56 (sequence is synthesized)
aagttcaacgacgtgtcccttgggttccatcatccacccagggttggtgggaggcatgtgtgtccaccctctgtggttagtgtttcaacaccaaatctctctcatgctgatgaggaggcc

SEQ ID NO: 285956 - DNA, 120 bp, Artificial Sequence
  ENSG00000130518_57 (sequence is synthesized)
tgttgtgtaggccagtgaatcacgcctctgttcaggggtgtggctgtaagccatccccaggagcctttggctgatgctatgttccccagtgggtctcaggggaccacatctcctggccta

SEQ ID NO: 285957 - DNA, 120 bp, Artificial Sequence
  ENSG00000130518_58 (sequence is synthesized)
gctgggaatctcccctggagaaccatagcaactggcatgggccaaagtcaatgtcaggtggccaatggcatggcttcccttgcatcccaggtcttagaggcaggtggccctttgacacat

SEQ ID NO: 285958 - DNA, 120 bp, Artificial Sequence
  ENSG00000130518_59 (sequence is synthesized)
ccctctggaaccacagggatggcccccagcccctctctggcttcagtgcccaacagactggccgtgactcagtctaatctttccctgaacagcatggaccccagcagctcccagatcagt

SEQ ID NO: 285959 - DNA, 120 bp, Artificial Sequence
  ENSG00000130518_60 (sequence is synthesized)
gtggttattccaaaaaacatagactgctggcacccttctgaggcatccatggtcccacccagttaccagcagagagatgtgattccgcaggactctctgaagagcagggctggtcgtggt

SEQ ID NO: 285960 - DNA, 120 bp, Artificial Sequence
  ENSG00000130518_61 (sequence is synthesized)
gcggcaggaggttttgtagccagtagaatgagcacgggcgcagtcccaggcactctgcctggtggcataacctccagccttcccccgggctccaccatccgaggcatgggtcacagcctt

SEQ ID NO: 285961 - DNA, 120 bp, Artificial Sequence
  ENSG00000130518_62 (sequence is synthesized)
cccgcaggctctgtgtccagttgggtggctcccagtctgatggcagacagaaagaagccaagtctatctgtaagaccctccgctagcttagctgctccaaacttgctcccaggttcagta

SEQ ID NO: 285962 - DNA, 120 bp, Artificial Sequence
  ENSG00000130518_63 (sequence is synthesized)
gtgagtcgggtgagcccagttgtccccctggttctgtgccaatgatgggggcctctagtgtggctcagagctgctccaaggggcccatggtgattgacatcactgcccctccttacctca

SEQ ID NO: 285963 - DNA, 120 bp, Artificial Sequence
  ENSG00000130518_64 (sequence is synthesized)
aagcctggctggggagaggtctttagcccccttgcagatgccccacaccaccagtctggctccaggtcactcctcagccccggcagctagtggcacagtgaggagtctacaccgagtgcc

SEQ ID NO: 285964 - DNA, 120 bp, Artificial Sequence
  ENSG00000130518_65 (sequence is synthesized)
cacggttctatcaagagccttacaattgagccaagatgctaggataatgccatctggggtcacaggggaccaagccaagctaggagaattggatgaggctgtgttccaagtgtcaggatc

SEQ ID NO: 285965 - DNA, 120 bp, Artificial Sequence
  ENSG00000130518_66 (sequence is synthesized)
aagtggatccaatgacctattcagcaaagccagggtcactggtgcaacccagtggatgtactccagtcctctgggagctgatgggggccatgatcataggtccctgtctgagaaagggtc

SEQ ID NO: 285966 - DNA, 120 bp, Artificial Sequence
  ENSG00000130518_67 (sequence is synthesized)
tcttccccaagggaggtggctcccagccatgctagtggcatggtccctgtccctttccaggccccgggtttagccactaagtccccctcagtttatcaacaggggtctgtcactcacgtc

SEQ ID NO: 285967 - DNA, 120 bp, Artificial Sequence
  ENSG00000130518_68 (sequence is synthesized)
atacccccaaatcactctcagggtacagtggcttctaatgtagtctcaggatcaccccagctggcccgtggcagtactgaggctttcagattgctttcagtgtctgtgggcaggatgggg

SEQ ID NO: 285968 - DNA, 120 bp, Artificial Sequence
  ENSG00000130518_69 (sequence is synthesized)
aatcctagtcttcttcagaggtcagggaccaccagcatggtctcacatgtgccactatatccgtcctcggctagaagggcattgtccagtcccttccagacagaagctgtccccaatcca

SEQ ID NO: 285969 - DNA, 120 bp, Artificial Sequence
  ENSG00000130518_70 (sequence is synthesized)
ctccagaaaacagtgtctggaaacatggctccgagcagccgctgggacgccatgggccctaaaaattcctacagatccgtgcatggtaggattgttccagaactgctagaaagttctgtg

SEQ ID NO: 285970 - DNA, 120 bp, Artificial Sequence
  ENSG00000130518_71 (sequence is synthesized)
gccagggttaggcccttacagtatgtgcaaagacaaccatcccaggcctcagcccgaagtggtgcaaaccccacccacaggccctctgcagaggtaaggcccgtcatccgcactggggag

SEQ ID NO: 285971 - DNA, 120 bp, Artificial Sequence
  ENSG00000130518_72 (sequence is synthesized)
atgacacactcctcggtcattcctccgctggccccgggagttcggagggtgtctctaggctatgagtcttccccaagtggttccctgccacccctttttaaccaggagtcaccgtggaga

SEQ ID NO: 285972 - DNA, 120 bp, Artificial Sequence
  ENSG00000130518_73 (sequence is synthesized)
cggcaggactcctatagcccccagaatcctgccgttagtcacaaggcatccctgaactccactatactccagggccccgcggacgctggtgtggttggtggccaatcgtggaaccgcgca

SEQ ID NO: 285973 - DNA, 79 bp, Artificial Sequence
  ENSG00000130518_74 (sequence is synthesized)
ctcttgcaggctggcttctgagattgcaccttcttctcctgctactcctccaaatctatgacccttcaagaaaagtagc

SEQ ID NO: 285974 - DNA, 120 bp, Artificial Sequence
  ENSG00000130518_75 (sequence is synthesized)
aaaaaaaagaaaagaaaaaagaaaagcaggacctgctacaccctgaccaccccctgccgcccccacaggcagagctgacctgtccggtaatcaaggcaatgcagccggccgcctagctac

SEQ ID NO: 285975 - DNA, 120 bp, Artificial Sequence
  ENSG00000130520_0 (sequence is synthesized)
attacaagccgcggcactttacggctctcgtcctcgttcctccggcgggaacacggcccgccccgccctttcgcccagcgggccccgccctactccgcgtggattggttgaccgcccttc

SEQ ID NO: 285976 - DNA, 120 bp, Artificial Sequence
  ENSG00000130520_1 (sequence is synthesized)
gagcccggtgctgactggcttgcgtctctgccactttctttcagcttagtggcgcgcggcgcggcgacgaccgccgggagcgtgtgcagcggcggcggcggaagtggccggcgagcccgg

SEQ ID NO: 285977 - DNA, 120 bp, Artificial Sequence
  ENSG00000130520_2 (sequence is synthesized)
tccccgccggcaccatgcttcccttgtcactgctgaagacggctcagaatcaccccatgttggtggagctgaaaaatggggagacgtacaatggacacctggtgagctgcgacaactgga

SEQ ID NO: 285978 - DNA, 120 bp, Artificial Sequence
  ENSG00000130520_3 (sequence is synthesized)
tgaacattaacctgcgagaagtcatctgcacgtccagggacggggacaagttctggcggatgcccgagtgctacatccgcggcagcaccatcaagtacctgcgcatccccgacgagatca

SEQ ID NO: 285979 - DNA, 120 bp, Artificial Sequence
  ENSG00000130520_4 (sequence is synthesized)
tcgacatggtcaaggaggaggtggtggccaagggccgcggccgcggaggcctgcagcagcagaagcagcagaaaggccgcggcatgggcggcgctggccgaggtgtgtttggtggccggg

SEQ ID NO: 285980 - DNA, 120 bp, Artificial Sequence
  ENSG00000130520_5 (sequence is synthesized)
gccgaggtgggatcccgggcacaggcagaggccagccagagaagaagcctggcagacaggcgggcaaacagtgagcgcccacccagaccggctgctgcgccccctcctgccagggtggcg

SEQ ID NO: 285981 - DNA, 120 bp, Artificial Sequence
  ENSG00000130520_6 (sequence is synthesized)
attccgctccacagtctcggacggatctgctcagaaaggaagaggcaggcgccagggggaacccccttcgtgttttgtgaccctcccttttaggtgaagcccctttttcttgctaaaacc

SEQ ID NO: 285982 - DNA, 120 bp, Artificial Sequence
  ENSG00000130520_7 (sequence is synthesized)
gccctcgctctggttctcagggcagcattttccaggcgggtttgttttgcatttcttggagcctctccgagcagcaaccagacgggagatttttattttaagctgttcatgctgggactg

SEQ ID NO: 285983 - DNA, 120 bp, Artificial Sequence
  ENSG00000130520_8 (sequence is synthesized)
acagcctgcagggtttccttgggcgcggccccaaaattgccttcaaaacaaacccgggacggttgaaagccttcgaaccgtgcaggggatgcctcgggccctggcccttcgcttcctctc

SEQ ID NO: 285984 - DNA, 120 bp, Artificial Sequence
  ENSG00000130520_9 (sequence is synthesized)
ttgtgttatggaaataaaaacaaataaaactacacactgcacatccactgttccttttgagcttctgggtgcacctagcgggtctcctgccctctgtccatcgctggactctcaggaaat

SEQ ID NO: 285985 - DNA, 120 bp, Artificial Sequence
  ENSG00000130520_10 (sequence is synthesized)
ccccgttcccgtaagggaagcttccttttgagagttctcaccaggtgtcagcggcacagtgaggcactgatgtccttttacaaaaggcaagaccagcatctggacagtgggggctcttga

SEQ ID NO: 285986 - DNA, 120 bp, Artificial Sequence
  ENSG00000130520_11 (sequence is synthesized)
gagtccccggcgccccccacaccaggttgtcctataaccctctcccctctgtggagacgttaatgccaaggggtgtgtggggagggaagtcccaggcaggggccacgcatggtccccatc

SEQ ID NO: 285987 - DNA, 120 bp, Artificial Sequence
  ENSG00000130520_12 (sequence is synthesized)
accccctcctgggtggcctggactccatcatctatcctcatctgtccacactggcgttcacacagagaagacaggacaggaatcccctcggaagatgctcatggaagattctcacgaggc

SEQ ID NO: 285988 - DNA, 120 bp, Artificial Sequence
  ENSG00000130520_13 (sequence is synthesized)
tcctgccccctttctgagccaggccgggtttgccactcctcgggcgcgcacctgagacactgagtcagcgctttcgagaaaggctccgggtagcatctgtggaccgtgaagaaaccagag

SEQ ID NO: 285989 - DNA, 120 bp, Artificial Sequence
  ENSG00000130520_14 (sequence is synthesized)
ggaagccctgagccaggcagcggcccgtccccctgcatagccttctcttcagggtcctcgttcggagacctattttgagaggtgattggaataaaaggtcccgtccgtgaggaactcttt

SEQ ID NO: 285990 - DNA, 120 bp, Artificial Sequence
  ENSG00000130520_15 (sequence is synthesized)
catgggaggagtcagtgggggaggccgcctaggactgctcgtccttccaggggtcagtcaggagggacagggcagggtgagctaggccaccaagtctcccagtgtgccctggactttgac

SEQ ID NO: 285991 - DNA, 120 bp, Artificial Sequence
  ENSG00000130520_16 (sequence is synthesized)
cctgtgggagactttcctgctgtgtgtctgttggtgccacccctgacctggaaggacctaggactggggactccctgtggctcaggctggggcagccccctccaggggaggcccaagact

SEQ ID NO: 285992 - DNA, 120 bp, Artificial Sequence
  ENSG00000130520_17 (sequence is synthesized)
cccggactctgctgcctttagtccagcctggatgttgcctgcactctgcgggccatggtagtgtggccctgggatgtccgggatgcccaggtcacggtgggcaggagcagcgccagggcc

SEQ ID NO: 285993 - DNA, 120 bp, Artificial Sequence
  ENSG00000130520_18 (sequence is synthesized)
cctggggcgggaagacagccacacgtggcatccctccttcttggggttgcccttgcagcgctgcctcggagcctcccaaccctcccgggcccccctcctggtccttggccatgagccgag

SEQ ID NO: 285994 - DNA, 120 bp, Artificial Sequence
  ENSG00000130520_19 (sequence is synthesized)
gcccaggcagaggagccccgagacctgggactcagccctcctctcactgcgcctcctggcggtcctcagggcacatcaagtcacctccccaagcctcagtttcccctctgagagggtatg

SEQ ID NO: 285995 - DNA, 120 bp, Artificial Sequence
  ENSG00000130520_20 (sequence is synthesized)
gtggtgcccatctgtccaggccgctggcaactccacttggaacctggcgtggctctatccagagccaaggtcgcccgcccccaccggagatgatgaattggcataaaattccatttgtta

SEQ ID NO: 285996 - DNA, 120 bp, Artificial Sequence
  ENSG00000130520_21 (sequence is synthesized)
aatctgagaggcaggtgtgtgttccagggctgggcagagtgaggaaatggcatttccagtggggggtgattgacacgcactcctgtgccccctcaaccgcaccgcaccatctatgagtca

SEQ ID NO: 285997 - DNA, 80 bp, Artificial Sequence
  ENSG00000130522_0 (sequence is synthesized)
gcgggccccccgggaggccgcggccactcccccccgggccggcgcggcgggggaggcggaggatggaaacacccttctac

SEQ ID NO: 285998 - DNA, 120 bp, Artificial Sequence
  ENSG00000130522_1 (sequence is synthesized)
cggcgggggaggcggaggatggaaacacccttctacggcgatgaggcgctgagcggcctgggcggcggcgccagtggcagcggcggcagcttcgcgtccccgggccgcttgttccccggg

SEQ ID NO: 285999 - DNA, 120 bp, Artificial Sequence
  ENSG00000130522_2 (sequence is synthesized)
gcgcccccgacggccgcggccggcagcatgatgaagaaggacgcgctgacgctgagcctgagtgagcaggtggcggcagcgctcaagcctgcggccgcgccgcctcctacccccctgcgc

SEQ ID NO: 286000 - DNA, 120 bp, Artificial Sequence
  ENSG00000130522_3 (sequence is synthesized)
gccgacggcgcccccagcgcggcaccccccgacggcctgctcgcctctcccgacctggggctgctgaagctggcctcccccgagctcgagcgcctcatcatccagtccaacgggctggtc

SEQ ID NO: 286001 - DNA, 120 bp, Artificial Sequence
  ENSG00000130522_4 (sequence is synthesized)
accaccacgccgacgagctcacagttcctctaccccaaggtggcggccagcgaggagcaggagttcgccgagggcttcgtcaaggccctggaggatttacacaagcagaaccagctcggc

SEQ ID NO: 286002 - DNA, 80 bp, Artificial Sequence
  ENSG00000130522_5 (sequence is synthesized)
cacgggctccgcgccccccggcgagctggccccggcggcggccgcgcccgaagcgcctgtctacgcgaacctgagcagct

SEQ ID NO: 286003 - DNA, 120 bp, Artificial Sequence
  ENSG00000130522_6 (sequence is synthesized)
cgaagcgcctgtctacgcgaacctgagcagctacgcgggcggcgccgggggcgcggggggcgccgcgacggtcgccttcgctgccgaacctgtgcccttcccgccgccgccacccccagg

SEQ ID NO: 286004 - DNA, 120 bp, Artificial Sequence
  ENSG00000130522_7 (sequence is synthesized)
cgcctggctgcgctcaaggacgagccacagacggtgcccgacgtgccgagcttcggcgagagcccgccgttgtcgcccatcgacatggacacgcaggagcgcatcaaggcggagcgcaag

SEQ ID NO: 286005 - DNA, 120 bp, Artificial Sequence
  ENSG00000130522_8 (sequence is synthesized)
aaccgcatcgccgcctccaagtgccgcaagcgcaagctggagcgcatctcgcgcctggaagagaaagtgaagaccctcaagagtcagaacacggagctggcgtccacggcgagcctgctg

SEQ ID NO: 286006 - DNA, 120 bp, Artificial Sequence
  ENSG00000130522_9 (sequence is synthesized)
cgcgagcaggtggcgcagctcaagcagaaagtcctcagccacgtcaacagcggctgccagctgctgccccagcaccaggtgcccgcgtactgagtccgcgcgcggggcgcatgcgcggcc

SEQ ID NO: 286007 - DNA, 120 bp, Artificial Sequence
  ENSG00000130522_10 (sequence is synthesized)
ggccaccctccccaaggggcgggctcgcgggggggtgtcgtgggcgccccggacttggagagggtgcggccctggggaccccccctccccgagtgtgcccaggaactcagagagggcgcg

SEQ ID NO: 286008 - DNA, 120 bp, Artificial Sequence
  ENSG00000130522_11 (sequence is synthesized)
cccccccgagggtgcccaggactcgacaagctggaccccctgctcccgggggggcgagcgcatgacccccccgccctcgcgctgcctctttcccccgcgcggccgccccgtgttgcacaa

SEQ ID NO: 286009 - DNA, 120 bp, Artificial Sequence
  ENSG00000130522_12 (sequence is synthesized)
cgtgttgcacaaacccgcgcgtctcggctgcccctttgtacaccgcgccgcggaagggggctccgagggggcgcagcctcaaaccctgcctttcctttacttttactttttttttttttt

SEQ ID NO: 286010 - DNA, 120 bp, Artificial Sequence
  ENSG00000130522_13 (sequence is synthesized)
ctttggaagagagaagaacagagtgttcgattctgccctatttatgtttctactcgggaacaaacgttggttgtgtgtgtgtgtgttttcttgtgttggttttttaaagaaatgggaaga

SEQ ID NO: 286011 - DNA, 120 bp, Artificial Sequence
  ENSG00000130522_14 (sequence is synthesized)
agaaaaaaaaattctccgcccctttcctcgatctcgctccccccttcggttctttcgaccggtcccccctcccttttttgttctgttttgttttgttttgctacgagtccacattcctgt

SEQ ID NO: 286012 - DNA, 120 bp, Artificial Sequence
  ENSG00000130522_15 (sequence is synthesized)
ttgtaatccttggttcgcccggttttctgttttcagtaaagtctcgttacgccagctcggctctccgcctccttcttcccccgccggggcctggcgggctgggcggggcctggttcgctt

SEQ ID NO: 286013 - DNA, 120 bp, Artificial Sequence
  ENSG00000130528_0 (sequence is synthesized)
agagccaggcagcaaggaccagaggaaggtggacagagaccgaaaggacaaaggagagacacagagaaaaaaagagaccaaccccaaagggacaaagaccccaacgtttgtccacattgc

SEQ ID NO: 286014 - DNA, 120 bp, Artificial Sequence
  ENSG00000130528_1 (sequence is synthesized)
cgcagaggcagctggagccagtgctgcctgtccgtccccatgggccaccataggccatggctgcacgcttctgtcctctgggctggggtggccagcctgctcctccccccggccatgacc

SEQ ID NO: 286015 - DNA, 120 bp, Artificial Sequence
  ENSG00000130528_2 (sequence is synthesized)
cagcagctcagaggggatgggctaggcttcagaaaccggaacaacagcactggagtcgccgggctctccgaggaggcatcagcagagcttcgccaccacctccacagccctagagaccat

SEQ ID NO: 286016 - DNA, 120 bp, Artificial Sequence
  ENSG00000130528_3 (sequence is synthesized)
ccagatgagaacaaggatgtttccacagagaatgggcatcatttctggagccacccagaccgtgaaaaggaggatgaagatgtctccaaggaatatgggcacctactcccaggccacagg

SEQ ID NO: 286017 - DNA, 120 bp, Artificial Sequence
  ENSG00000130528_4 (sequence is synthesized)
tcccaagaccacaaagtcggagatgagggtgtctcaggtgaggaggtctttgcagagcatggtgggcaggcccgtgggcacagaggccacgggagtgaagacacggaagactcagctgag

SEQ ID NO: 286018 - DNA, 120 bp, Artificial Sequence
  ENSG00000130528_5 (sequence is synthesized)
cacaggcaccacctccccagccacaggagccacagccatcaagacgaggatgaggatgaagttgtgtccagtgagcatcaccatcatatcctcaggcatggacaccgaggccatgatggg

SEQ ID NO: 286019 - DNA, 120 bp, Artificial Sequence
  ENSG00000130528_6 (sequence is synthesized)
gaggaggaggaggaggaggaagaggaggcctccactgagtatggacaccaggcccacaggcaccgaggccatgggagtgaagaggatgaggatgtctcagatggacaccatcatcatggc

SEQ ID NO: 286020 - DNA, 120 bp, Artificial Sequence
  ENSG00000130528_7 (sequence is synthesized)
caccgaggccatgggagtgaagaggatgaggatgtctcagatggacaccatcatcatggccccagccacaggcaccaaggccatgaagaagatgacgatgatgatgatgatgatgatgat

SEQ ID NO: 286021 - DNA, 120 bp, Artificial Sequence
  ENSG00000130528_8 (sequence is synthesized)
caccaggctcacaggcaccaaggccacgggattgaagaggatgaagatgtctcagatggacaccatcatcgcgaccccagccacaggcaccgaagccatgaagaagatgacaatgatgat

SEQ ID NO: 286022 - DNA, 120 bp, Artificial Sequence
  ENSG00000130528_9 (sequence is synthesized)
aggtgaacaccaccatcatgtccctgaccacaggcaccaaggccacagagacgaggaagaagatgaggatgtgtccactgaacgttggcaccagggtccccaacatgtccaccatggcct

SEQ ID NO: 286023 - DNA, 120 bp, Artificial Sequence
  ENSG00000130528_10 (sequence is synthesized)
tgtagatgaggaagaggaagaagaggagatcacagtccagttcggccactatgttgcaagccaccaacctcgaggccacaagagtgatgaagaggacttccaagatgagtataaaacaga

SEQ ID NO: 286024 - DNA, 120 bp, Artificial Sequence
  ENSG00000130528_11 (sequence is synthesized)
agtccctcaccatcaccaccacagagtccccagggaggaagatgaggaggtctctgctgagcttggccaccaggcccccagccacaggcaaagccaccaagatgaagaaactggccatgg

SEQ ID NO: 286025 - DNA, 120 bp, Artificial Sequence
  ENSG00000130528_12 (sequence is synthesized)
tcaaagagggtccatcaaagagatgagccatcaccccccaggacacacagtggtcaaggatagaagccatttgaggaaggatgattctgaggaggaaaaggagaaggaagaggaccccgg

SEQ ID NO: 286026 - DNA, 120 bp, Artificial Sequence
  ENSG00000130528_13 (sequence is synthesized)
ctcccatgaggaagacgatgaaagttcagagcagggagagaaaggcacccatcatggcagccgggaccaggaagatgaggaggatgaggaggaaggtcatggcctcagcctgaaccagga

SEQ ID NO: 286027 - DNA, 120 bp, Artificial Sequence
  ENSG00000130528_14 (sequence is synthesized)
ggaggaagaagaggaagacaaggaggaggaggaggaggaagaagacgaggagaggagggaagagagggctgaggttggggccccactgagcccagaccacagcgaggaggaagaggagga

SEQ ID NO: 286028 - DNA, 120 bp, Artificial Sequence
  ENSG00000130528_15 (sequence is synthesized)
ggaggaggggctggaggaagatgagccccgcttcaccatcatccccaacccactggacaggagagaggaggctggaggtgcctccagcgaggaggaaagcggtgaggacacaggtccaca

SEQ ID NO: 286029 - DNA, 120 bp, Artificial Sequence
  ENSG00000130528_16 (sequence is synthesized)
ggatgctcaggagtatgggaactaccagccagggtccctgtgtggctactgctccttctgcaatcgatgcactgaatgtgagagctgtcactgtgatgaggagaacatgggtgagcactg

SEQ ID NO: 286030 - DNA, 120 bp, Artificial Sequence
  ENSG00000130528_17 (sequence is synthesized)
cgaccagtgccagcactgtcagttctgctatctctgcccgctggtctgcgaaacggtctgcgctccaggaagctacgttgactatttctcctcgtccctttatcaggccctggcagacat

SEQ ID NO: 286031 - DNA, 120 bp, Artificial Sequence
  ENSG00000130528_18 (sequence is synthesized)
gctggaaacgccggaaccctgacccagtcgctcgactgcgacgcaggtgtacctccccctgccttccaacccctttccacgagctatatttatttctccgaataaacgtgctccccgaaa

SEQ ID NO: 286032 - DNA, 120 bp, Artificial Sequence
  ENSG00000130528_19 (sequence is synthesized)
ggaactaccagccagggtccctgtgtggctactgctccttctgcaatcgatgcactgaatgtgagagctgtcactgtgatgaggagaacatgggtgagcactgcgaccagtgccaggtga

SEQ ID NO: 286033 - DNA, 120 bp, Artificial Sequence
  ENSG00000130528_20 (sequence is synthesized)
ccttgactccacaagcgatcctgactccaaccttaacctagacctagcctctggtccgggtctggtcccggccccatcctaactccgcccccggccacgccccacgctcactctctctcc

SEQ ID NO: 286034 - DNA, 120 bp, Artificial Sequence
  ENSG00000130528_21 (sequence is synthesized)
ccgtccccgcctccagcactgtcagttctgctatctctgcccgctggtctgcgaaacggtctgcgctccaggtgagcatgggcggggccctggaaaaacctgaggaaggtgccgggccca

SEQ ID NO: 286035 - DNA, 120 bp, Artificial Sequence
  ENSG00000130529_0 (sequence is synthesized)
gcgggtctggaagcagagccggcggagggagcgccggggccctgggctgcaggaggttgcggcggccgcggcagcatggtggtgccggagaaggagcagagctggatccccaagatcttc

SEQ ID NO: 286036 - DNA, 120 bp, Artificial Sequence
  ENSG00000130529_1 (sequence is synthesized)
aagaagaagacctgcacgacgttcatagttgactccacagatccgggagggaccttgtgccagtgtgggcgcccccggaccgcccaccccgcagtggccatggaggatgccttcggggca

SEQ ID NO: 286037 - DNA, 120 bp, Artificial Sequence
  ENSG00000130529_2 (sequence is synthesized)
gccgtggtgaccgtgtgggacagcgatgcacacaccacggagaagcccaccgatgcctacggagagctggacttcacgggggccggccgcaagcacagcaatttcctccggctctctgac

SEQ ID NO: 286038 - DNA, 120 bp, Artificial Sequence
  ENSG00000130529_3 (sequence is synthesized)
cgaacggatccagctgcagtttatagtctggtcacacgcacatggggcttccgtgccccgaacctggtggtgtcagtgctggggggatcggggggccccgtcctccagacctggctgcag

SEQ ID NO: 286039 - DNA, 120 bp, Artificial Sequence
  ENSG00000130529_4 (sequence is synthesized)
gacctgctgcgtcgtgggctggtgcgggctgcccagagcacaggagcctggattgtcactgggggtctgcacacgggcatcggccggcatgttggtgtggctgtacgggaccatcagatg

SEQ ID NO: 286040 - DNA, 120 bp, Artificial Sequence
  ENSG00000130529_5 (sequence is synthesized)
gccagcactgggggcaccaaggtggtggccatgggtgtggccccctggggtgtggtccggaatagagacaccctcatcaaccccaagggctcgttccctgcgaggtaccggtggcgcggt

SEQ ID NO: 286041 - DNA, 120 bp, Artificial Sequence
  ENSG00000130529_6 (sequence is synthesized)
gacccggaggacggggtccagtttcccctggactacaactactcggccttcttcctggtggacgacggcacacacggctgcctggggggcgagaaccgcttccgcttgcgcctggagtcc

SEQ ID NO: 286042 - DNA, 120 bp, Artificial Sequence
  ENSG00000130529_7 (sequence is synthesized)
tacatctcacagcagaagacgggcgtgggagggactggaattgacatccctgtcctgctcctcctgattgatggtgatgagaagatgttgacgcgaatagagaacgccacccaggctcag

SEQ ID NO: 286043 - DNA, 120 bp, Artificial Sequence
  ENSG00000130529_8 (sequence is synthesized)
ctcccatgtctcctcgtggctggctcagggggagctgcggactgcctggcggagaccctggaagacactctggccccagggagtgggggagccaggcaaggcgaagcccgagatcgaatc

SEQ ID NO: 286044 - DNA, 120 bp, Artificial Sequence
  ENSG00000130529_9 (sequence is synthesized)
aggcgtttctttcccaaaggggaccttgaggtcctgcaggcccaggtggagaggattatgacccggaaggagctcctgacagtctattcttctgaggatgggtctgaggaattcgagacc

SEQ ID NO: 286045 - DNA, 120 bp, Artificial Sequence
  ENSG00000130529_10 (sequence is synthesized)
atagttttgaaggcccttgtgaaggcctgtgggagctcggaggcctcagcctacctggatgagctgcgtttggctgtggcttggaaccgcgtggacattgcccagagtgaactctttcgg

SEQ ID NO: 286046 - DNA, 120 bp, Artificial Sequence
  ENSG00000130529_11 (sequence is synthesized)
ggggacatccaatggcggtccttccatctcgaagcttccctcatggacgccctgctgaatgaccggcctgagttcgtgcgcttgctcatttcccacggcctcagcctgggccacttcctg

SEQ ID NO: 286047 - DNA, 120 bp, Artificial Sequence
  ENSG00000130529_12 (sequence is synthesized)
accccgatgcgcctggcccaactctacagcgcggcgccctccaactcgctcatccgcaaccttttggaccaggcgtcccacagcgcaggcaccaaagccccagccctaaaagggggagct

SEQ ID NO: 286048 - DNA, 120 bp, Artificial Sequence
  ENSG00000130529_13 (sequence is synthesized)
gcggagctccggccccctgacgtggggcatgtgctgaggatgctgctggggaagatgtgcgcgccgaggtacccctccgggggcgcctgggaccctcacccaggccagggcttcggggag

SEQ ID NO: 286049 - DNA, 120 bp, Artificial Sequence
  ENSG00000130529_14 (sequence is synthesized)
agcatgtatctgctctcggacaaggccacctcgccgctctcgctggatgctggcctcgggcaggccccctggagcgacctgcttctttgggcactgttgctgaacagggcacagatggcc

SEQ ID NO: 286050 - DNA, 120 bp, Artificial Sequence
  ENSG00000130529_15 (sequence is synthesized)
atgtacttctgggagatgggttccaatgcagtttcctcagctcttggggcctgtttgctgctccgggtgatggcacgcctggagcctgacgctgaggaggcagcacggaggaaagacctg

SEQ ID NO: 286051 - DNA, 120 bp, Artificial Sequence
  ENSG00000130529_16 (sequence is synthesized)
ctggggggatgccacttgcctccagctggccatgcaagctgacgcccgtgccttctttgcccaggatggggtacagtctctgctgacacagaagtggtggggagatatggccagcactac

SEQ ID NO: 286052 - DNA, 120 bp, Artificial Sequence
  ENSG00000130529_17 (sequence is synthesized)
acccatctgggccctggttctcgccttcttttgccctccactcatctacacccgcctcatcaccttcaggaaatcagaagaggagcccacacgggaggagctagagtttgacatggatag

SEQ ID NO: 286053 - DNA, 120 bp, Artificial Sequence
  ENSG00000130529_18 (sequence is synthesized)
tgtcattaatggggaagggcctgtcgggacggcggacccagccgagaagacgccgctgggggtcccgcgccagtcgggccgtccgggttgctgcgggggccgctgcggggggcgccggtg

SEQ ID NO: 286054 - DNA, 120 bp, Artificial Sequence
  ENSG00000130529_19 (sequence is synthesized)
cctacgccgctggttccacttctggggcgcgccggtgaccatcttcatgggcaacgtggtcagctacctgctgttcctgctgcttttctcgcgggtgctgctcgtggatttccagccggc

SEQ ID NO: 286055 - DNA, 120 bp, Artificial Sequence
  ENSG00000130529_20 (sequence is synthesized)
gccgcccggctccctggagctgctgctctatttctgggctttcacgctgctgtgcgaggaactgcgccagggcctgagcggaggcgggggcagcctcgccagcgggggccccgggcctgg

SEQ ID NO: 286056 - DNA, 120 bp, Artificial Sequence
  ENSG00000130529_21 (sequence is synthesized)
ccatgcctcactgagccagcgcctgcgcctctacctcgccgacagctggaaccagtgcgacctagtggctctcacctgcttcctcctgggcgtgggctgccggctgaccccgggtttgta

SEQ ID NO: 286057 - DNA, 120 bp, Artificial Sequence
  ENSG00000130529_22 (sequence is synthesized)
ccacctgggccgcactgtcctctgcatcgacttcatggttttcacggtgcggctgcttcacatcttcacggtcaacaaacagctggggcccaagatcgtcatcgtgagcaagatgatgaa

SEQ ID NO: 286058 - DNA, 120 bp, Artificial Sequence
  ENSG00000130529_23 (sequence is synthesized)
ggacgtgttcttcttcctcttcttcctcggcgtgtggctggtagcctatggcgtggccacggaggggctcctgaggccacgggacagtgacttcccaagtatcctgcgccgcgtcttcta

SEQ ID NO: 286059 - DNA, 120 bp, Artificial Sequence
  ENSG00000130529_24 (sequence is synthesized)
ccgtccctacctgcagatcttcgggcagattccccaggaggacatggacgtggccctcatggagcacagcaactgctcgtcggagcccggcttctgggcacaccctcctggggcccaggc

SEQ ID NO: 286060 - DNA, 120 bp, Artificial Sequence
  ENSG00000130529_25 (sequence is synthesized)
gggcacctgcgtctcccagtatgccaactggctggtggtgctgctcctcgtcatcttcctgctcgtggccaacatcctgctggtcaacttgctcattgccatgttcagttacacattcgg

SEQ ID NO: 286061 - DNA, 120 bp, Artificial Sequence
  ENSG00000130529_26 (sequence is synthesized)
caaagtacagggcaacagcgatctctactggaaggcgcagcgttaccgcctcatccgggaattccactctcggcccgcgctggccccgccctttatcgtcatctcccacttgcgcctcct

SEQ ID NO: 286062 - DNA, 120 bp, Artificial Sequence
  ENSG00000130529_27 (sequence is synthesized)
gctcaggcaattgtgcaggcgaccccggagcccccagccgtcctccccggccctcgagcatttccgggtttacctttctaaggaagccgagcggaagctgctaacgtgggaatcggtgca

SEQ ID NO: 286063 - DNA, 120 bp, Artificial Sequence
  ENSG00000130529_28 (sequence is synthesized)
taaggagaactttctgctggcacgcgctagggacaagcgggagagcgactccgagcgtctgaagcgcacgtcccagaaggtggacttggcactgaaacagctgggacacatccgcgagta

SEQ ID NO: 286064 - DNA, 120 bp, Artificial Sequence
  ENSG00000130529_29 (sequence is synthesized)
cgaacagcgcctgaaagtgctggagcgggaggtccagcagtgtagccgcgtcctggggtgggtggccgaggccctgagccgctctgccttgctgcccccaggtgggccgccaccccctga

SEQ ID NO: 286065 - DNA, 120 bp, Artificial Sequence
  ENSG00000130529_30 (sequence is synthesized)
cctgcctgggtccaaagactgagccctgctggcggacttcaaggagaagcccccacaggggattttgctcctagagtaaggctcatctgggcctcggcccccgcacctggtggccttgtc

SEQ ID NO: 286066 - DNA, 120 bp, Artificial Sequence
  ENSG00000130529_31 (sequence is synthesized)
cttgaggtgagccccatgtccatctgggccactgtcaggaccacctttgggagtgtcatccttacaaaccacagcatgcccggctcctcccagaaccagtcccagcctgggaggatcaag

SEQ ID NO: 286067 - DNA, 120 bp, Artificial Sequence
  ENSG00000130529_32 (sequence is synthesized)
gcctggatcccgggccgttatccatctggaggctgcagggtccttggggtaacagggaccacagacccctcaccactcacagattcctcacactggggaaataaagccatttcagaggaa

SEQ ID NO: 286068 - DNA, 120 bp, Artificial Sequence
  ENSG00000130529_33 (sequence is synthesized)
caactccgcactcctcacatatccctgcgccatccccttaaattcccttacctctcccttcacaccctcaccctactccttcccatccctgtcacataactaactcctctgccccagacc

SEQ ID NO: 286069 - DNA, 120 bp, Artificial Sequence
  ENSG00000130529_34 (sequence is synthesized)
accaggggctgggtctgggatagcgtgcgtgttctgagggtgtcggaaggggcagctgggattgggaaggggcgtggcctgagccctttgactccgcccgcccctgcaggggtttacctt

SEQ ID NO: 286070 - DNA, 120 bp, Artificial Sequence
  ENSG00000130529_35 (sequence is synthesized)
gcatcagcctgtgcatctccagcctctgttcctgtatttttgcgtgtttttctctctcggcacctttccagtgtccctgggtcactctcttggtctcctttgagccttttgtactctcgc

SEQ ID NO: 286071 - DNA, 120 bp, Artificial Sequence
  ENSG00000130529_36 (sequence is synthesized)
agcggaagctgctaacgtgggaatcggtgcataaggagaactttctgctggcacgcgctagggacaagcgggagagcgactccgagcgtctgaagcgcacgtcccagaagtccagcagtg

SEQ ID NO: 286072 - DNA, 120 bp, Artificial Sequence
  ENSG00000130529_37 (sequence is synthesized)
aagaagaagacctgcacgacgttcatagttgactccacagatccggggtgaggagttcgcccctggactgaccccagagggtccgcggcccgctgaccccgcccgcggatggtcacgccc

SEQ ID NO: 286073 - DNA, 120 bp, Artificial Sequence
  ENSG00000130529_38 (sequence is synthesized)
cagccctgctccttccccattcctggactcggggaccttcccaagggcgttccttgccgacgctctccctctaggagcgtttgggtctgtgtagacacccctcattccccattcgccatt

SEQ ID NO: 286074 - DNA, 120 bp, Artificial Sequence
  ENSG00000130529_39 (sequence is synthesized)
ctcccgctcagggtcagtgtagacgctccagggctcggttctgcttctttcctccccgatgtctcttctatgtgcttctgtctcttcgtgtcactttctgtgtctctgtctttccctttt

SEQ ID NO: 286075 - DNA, 120 bp, Artificial Sequence
  ENSG00000130529_40 (sequence is synthesized)
ttcattcattcattcattcattcatccatccatgcaagaaaccctcactcagcgctcccaaggtccctttagcctaattcaacggccctgccagggttccaatttcccctgggacacgtg

SEQ ID NO: 286076 - DNA, 120 bp, Artificial Sequence
  ENSG00000130529_41 (sequence is synthesized)
ttccaatttcccctgggacacgtgctgtgtggcttcgggcaaatcatttcacctctctgggtcccgtttctcatctgggcatcaaaagaggcttgatctcctggggttattatgagaatt

SEQ ID NO: 286077 - DNA, 120 bp, Artificial Sequence
  ENSG00000130529_42 (sequence is synthesized)
aaacaagttaatgcttgtgatattcctggcacagcgcccagcacaggacgctgggaaatatctgcagctcccactgggaggtggcaattattaccgcgggcgggccctgtcttggtggcc

SEQ ID NO: 286078 - DNA, 120 bp, Artificial Sequence
  ENSG00000130529_43 (sequence is synthesized)
tcttggtggccggggacaccaattgagctagatagggtgtgtgcgtccgcgaggagctcccgcccttcagtgacggcctctcaagcggatccaggctttctagttttttttttttttttt

SEQ ID NO: 286079 - DNA, 85 bp, Artificial Sequence
  ENSG00000130529_44 (sequence is synthesized)
ttgtattttagtagagacgggatttcaccctgttgcccaggttggtcttgaactcttgatctcaggcaatgcacctgccttggct

SEQ ID NO: 286080 - DNA, 120 bp, Artificial Sequence
  ENSG00000130529_45 (sequence is synthesized)
cagtttttggggtgcgggaagtatccacattcctacttcagtgtgtattttgttatgactatatattagtgcagtatggcttgtaaatgatggataaataaacagatatgcgcttgttgg

SEQ ID NO: 286081 - DNA, 120 bp, Artificial Sequence
  ENSG00000130538_0 (sequence is synthesized)
atgtgtcccttgaccttgcaggtcactggcctaatgaatgtctctgagccaaattccagctttgcttttgtaaatgaatttatactccaaggtttctcttgtgagtggacaattcagatc

SEQ ID NO: 286082 - DNA, 120 bp, Artificial Sequence
  ENSG00000130538_1 (sequence is synthesized)
ttcctcttctcactctttactacaacatatgcactgactataacagggaatggagccattgcttttgtcctgtggtgtgaccggcgacttcacactcccatgtacatgttcctgggaaat

SEQ ID NO: 286083 - DNA, 120 bp, Artificial Sequence
  ENSG00000130538_2 (sequence is synthesized)
ttctcctttttagagatatggtatgtctcttctacagttcccaagatgttggtcaacttcctttcagagaaaaaaaacatctcctttgctggatgttttctccagttttatttcttcttc

SEQ ID NO: 286084 - DNA, 120 bp, Artificial Sequence
  ENSG00000130538_3 (sequence is synthesized)
tctttgggtacatcagaatgcttgcttttgactgtgatggcctttgatcagtaccttgctatctgccgtcccttgctctatcctaatatcatgactgggcatctctatgccaaactggtc

SEQ ID NO: 286085 - DNA, 120 bp, Artificial Sequence
  ENSG00000130538_4 (sequence is synthesized)
tttctgtggttcctgatccccattgttctcatctctcagatgcccttctgtggcccaaacattattgaccatgttgtgtgtgacccagggccacgatttgcattggattgtgtttctgcc

SEQ ID NO: 286086 - DNA, 120 bp, Artificial Sequence
  ENSG00000130538_5 (sequence is synthesized)
ccaagaatccaactgttttgctacactctaagctcattagttatttttggtaacttcctctttattattggatcctatactcttgtcctgaaagctatgttgggtatgccttcaagcact

SEQ ID NO: 286087 - DNA, 120 bp, Artificial Sequence
  ENSG00000130538_6 (sequence is synthesized)
gggagacataaggccttctctacctgtgggtctcatttggctgtggtatcactgtgctatagctctcttatggtcatgtatgtgagcccaggactcggacattctacagggatgcagaaa

SEQ ID NO: 286088 - DNA, 120 bp, Artificial Sequence
  ENSG00000130538_7 (sequence is synthesized)
attgaaactttgttctatgctatggtgaccccactcttcaatccccttatctatagcctccagaataaggagataaaggcagccctgaggaaagttctggggagttccaacataatctaa

SEQ ID NO: 286089 - DNA, 80 bp, Artificial Sequence
  ENSG00000130540_0 (sequence is synthesized)
cgtgcgggctgcgagccgggaggcggcggcggcgacggcgacggcggcggcatggcggagagcgaggccgagacccccag

SEQ ID NO: 286090 - DNA, 120 bp, Artificial Sequence
  ENSG00000130540_1 (sequence is synthesized)
acggcggcggcatggcggagagcgaggccgagacccccagcaccccgggggagttcgagagcaagtacttcgagttccatggcgtgcggctgccgcccttctgccgcgggaagatggagg

SEQ ID NO: 286091 - DNA, 120 bp, Artificial Sequence
  ENSG00000130540_2 (sequence is synthesized)
agatcgccaacttcccggtgcggcccagcgacgtgtggatcgtcacctaccccaagtccggcaccagcttgctgcaggaggtggtctacttggtgagccagggcgctgaccccgatgaga

SEQ ID NO: 286092 - DNA, 120 bp, Artificial Sequence
  ENSG00000130540_3 (sequence is synthesized)
tcggcttgatgaacatcgacgagcagctcccggtcctggagtacccacagccgggcctggacatcatcaaggaactgacctctccccgcctcatcaagagccacctgccctaccgctttc

SEQ ID NO: 286093 - DNA, 120 bp, Artificial Sequence
  ENSG00000130540_4 (sequence is synthesized)
tgccctctgacctccacaatggagactccaaggtcatctatatggctcgcaaccccaaggatctggtggtgtcttattatcagttccaccgctctctgcggaccatgagctaccgaggca

SEQ ID NO: 286094 - DNA, 120 bp, Artificial Sequence
  ENSG00000130540_5 (sequence is synthesized)
cctttcaagaattctgccggaggtttatgaatgataagctgggctacggctcctggtttgagcacgtgcaggagttctgggagcaccgcatggactcgaacgtgctttttctcaagtatg

SEQ ID NO: 286095 - DNA, 120 bp, Artificial Sequence
  ENSG00000130540_6 (sequence is synthesized)
aagacatgcatcgggacctggtgacgatggtggagcagctggccagattcctgggggtgtcctgtgacaaggcccagctggaagccctgacggagcactgccaccagctggtggaccagt

SEQ ID NO: 286096 - DNA, 120 bp, Artificial Sequence
  ENSG00000130540_7 (sequence is synthesized)
gctgcaacgctgaggccctgcccgtgggccggggaagagttgggctgtggaaggacatcttcaccgtctccatgaatgagaagtttgacttggtgtataaacagaagatgggaaagtgtg

SEQ ID NO: 286097 - DNA, 120 bp, Artificial Sequence
  ENSG00000130540_8 (sequence is synthesized)
acctcacgtttgacttttatttataataacagaaacaacaacctgcatgctcacaatacccagacagtctactagccaaaagtcctgtatgcattcatttattccttgctggacaaactc

SEQ ID NO: 286098 - DNA, 120 bp, Artificial Sequence
  ENSG00000130540_9 (sequence is synthesized)
tggaagcagcgtgtgaaacagcgggggaagggaagagcggcgtgagcggagggagtgtgatgattcccaaccgaaagcagctgtctcgcctttagaacgtgcagcctctccatgtctgat

SEQ ID NO: 286099 - DNA, 120 bp, Artificial Sequence
  ENSG00000130540_10 (sequence is synthesized)
tgccttttcaaccccgtattattgtattttatagagcttttcactggaaatctacataaatgtcagtaaaccaaataaaagttcatttccaaggggaatcaggagcgagccacacccgaa

SEQ ID NO: 286100 - DNA, 120 bp, Artificial Sequence
  ENSG00000130540_11 (sequence is synthesized)
tggtagaaagatctcagggttaactctttatttttgtagttttattatctaaggcacagccattctgttctcacttggttctgagatagtggtgagaacagaggatgagttgggtctgtt

SEQ ID NO: 286101 - DNA, 120 bp, Artificial Sequence
  ENSG00000130540_12 (sequence is synthesized)
ggggggaatctggacacttgtttattctgacggagttcacttcttcagaaccttcctgaaatgagcagaaattgttcactaggtcttcagaatggacgtccttctgccagagacttccag

SEQ ID NO: 286102 - DNA, 120 bp, Artificial Sequence
  ENSG00000130540_13 (sequence is synthesized)
cgggcggctccaaaggcccaatgcagaggagcccgcggagcatgtgctgagggaagtctgcctggtgaggctggcaggtgggagtctaatgcagtcaggagcatttgcatgcagtgggtg

SEQ ID NO: 286103 - DNA, 120 bp, Artificial Sequence
  ENSG00000130540_14 (sequence is synthesized)
gagagtcggccaccaaaggaccgagttgcgctcggaatttgagctgaattccacagccttactttgtttcctgaagtgatagcctactaatgctggcaagcagatgcttaatagtaaatt

SEQ ID NO: 286104 - DNA, 120 bp, Artificial Sequence
  ENSG00000130540_15 (sequence is synthesized)
tctaaaatccccgggtctttatcattcagtttgttctgtgcacctgaggcgctcagccgtgggaggaccattttgcgagtgtagccctgtttcactcggatcaggttggcacggccgcct

SEQ ID NO: 286105 - DNA, 120 bp, Artificial Sequence
  ENSG00000130540_16 (sequence is synthesized)
gcgtgtctgtccacctcatccctccgtgtatctgagggagtaaaggtgaggtctttattgcttcactgcctaattttctcacccacattcgctgaagcgatggagagtcgggggccagta

SEQ ID NO: 286106 - DNA, 120 bp, Artificial Sequence
  ENSG00000130540_17 (sequence is synthesized)
gccagccaaccccgtggggaccggggttgtctgtcatttatgtggctggaaagcacccaaagtggtggtcaggagggtcgctgctgtggaaggggtctccgttcttggtgctgtatttga

SEQ ID NO: 286107 - DNA, 120 bp, Artificial Sequence
  ENSG00000130540_18 (sequence is synthesized)
aacgggtgtagagagaagcttgtgtttttgtttgtaatggggagaagcgtggccaggcaggtggcacgtggcatcgcatggtgggctcggcagcaccttgcctgtgtttctgtgagggag

SEQ ID NO: 286108 - DNA, 120 bp, Artificial Sequence
  ENSG00000130540_19 (sequence is synthesized)
gctgctttctgtgaaatttcatttatatttttctatttttagtactgtatggatgttactgagcactacacatgatccttctgtgcttgcttgcatctttaataaagacatgttcccggc

SEQ ID NO: 286109 - DNA, 120 bp, Artificial Sequence
  ENSG00000130540_20 (sequence is synthesized)
ctttgctcggaagatcttcttgagttggtgagaatgcagggccgagtagccagctgcattgcttagatttgattcatgtcacagcataaattgtcttgattccaaatcctaaaccaggaa

SEQ ID NO: 286110 - DNA, 120 bp, Artificial Sequence
  ENSG00000130540_21 (sequence is synthesized)
ctgcctcccgcccaggcactccccaccccagccaggctgctttctctgcctgcttagggagccgagtccggtccctgttgccctccctgctctccttttacagcagtctgtagctggccc

SEQ ID NO: 286111 - DNA, 120 bp, Artificial Sequence
  ENSG00000130540_22 (sequence is synthesized)
atggcctgtgctctgttagctggtgcccatggatggcacagtgctcatggagtgacggagtaccctgcccgctggtgtttgcattgcctccaagcaaacagtgttttgacttgaaaaagt

SEQ ID NO: 286112 - DNA, 120 bp, Artificial Sequence
  ENSG00000130544_0 (sequence is synthesized)
gtcttgtgagaagagccgcgcttgcagcgtctgggagaatctttcggtctccgcgagaggtgcttcattccacgaaaaaagtataattcaagctcagatttgtgttgaaaccagcctcaa

SEQ ID NO: 286113 - DNA, 120 bp, Artificial Sequence
  ENSG00000130544_1 (sequence is synthesized)
gtttcacctatcctcactgatccgtggacttctgtatgatcagggtgctgtcctgagagcgctgcgggataaaggaggagcgtcctgcttcccggctgccctgttgctgtcggagtcaca

SEQ ID NO: 286114 - DNA, 120 bp, Artificial Sequence
  ENSG00000130544_2 (sequence is synthesized)
ggatggcggctgtcgtcctgcccccaactgccgctctgtcttccctgttcccagcctctcagcgagaaggacacacagagggcggagagctggttaatgagctcctgaaaagctggctaa

SEQ ID NO: 286115 - DNA, 120 bp, Artificial Sequence
  ENSG00000130544_3 (sequence is synthesized)
agggcttggtgacctttgaggatgtggccgtggagttcacccaggaggagtgggcattgctggaccctgcccaaaggacactgtacagggacgtgatgctggagaactgcaggaacctgg

SEQ ID NO: 286116 - DNA, 120 bp, Artificial Sequence
  ENSG00000130544_4 (sequence is synthesized)
cctcactggggaaccaagttgataaacctaggctgatctcccagctggagcaagaagataaagtgatgacagaagagagaggaattctctcaggtacctgtccagatgtggagaatccat

SEQ ID NO: 286117 - DNA, 120 bp, Artificial Sequence
  ENSG00000130544_5 (sequence is synthesized)
ttaaagccaaagggttaactcctaagctgcatgtttttcgaaaagaacaatctagaaatatgaaaatggagaggaatcatcttggagcaacactcaacgaatgtaatcagtgttttaaag

SEQ ID NO: 286118 - DNA, 120 bp, Artificial Sequence
  ENSG00000130544_6 (sequence is synthesized)
tcttcagcacaaaatcttcccttacacggcacaggaagattcatactggagaaagaccctatggctgcagtgaatgtgggaaatcctacagcagtagatcttaccttgctgttcataaga

SEQ ID NO: 286119 - DNA, 120 bp, Artificial Sequence
  ENSG00000130544_7 (sequence is synthesized)
gaatccacaatggggagaaaccctatgaatgcaatgactgtgggaaaaccttcagcagcagatcttaccttactgttcataagagaatccacaatggggagaaaccctacgaatgcagtg

SEQ ID NO: 286120 - DNA, 120 bp, Artificial Sequence
  ENSG00000130544_8 (sequence is synthesized)
actgtgggaaaaccttcagcaattcctcatacctcagaccgcacttgagaattcacactggagaaaaaccgtacaaatgtaaccagtgttttcgtgagttccgcactcagtcaatcttca

SEQ ID NO: 286121 - DNA, 120 bp, Artificial Sequence
  ENSG00000130544_9 (sequence is synthesized)
caaggcacaagagagttcatacgggggagggtcattatgtatgtaatcagtgtggaaaggctttcggcacgaggtcatctctttcttcgcactatagcattcatacaggggagtaccctt

SEQ ID NO: 286122 - DNA, 120 bp, Artificial Sequence
  ENSG00000130544_10 (sequence is synthesized)
acgaatgccacgattgtgggagaaccttcaggaggaggtcgaatctgacacagcacataagaactcatactggagaaaaaccctacacatgtaatgagtgtgggaaatcctttaccaata

SEQ ID NO: 286123 - DNA, 120 bp, Artificial Sequence
  ENSG00000130544_11 (sequence is synthesized)
gcttttctcttacaattcacaggagaatacataatggagagaaatcctatgagtgcagtgattgtggaaaatcctttaatgttctctcatccgttaagaaacacatgagaactcacactg

SEQ ID NO: 286124 - DNA, 120 bp, Artificial Sequence
  ENSG00000130544_12 (sequence is synthesized)
gaaaaaaaccctatgaatgtaattattgcgggaaatccttcacaagtaactcctacctttctgtgcatacgagaatgcataataggcaaatgtgaattcaataactgtgggaaaagcatt

SEQ ID NO: 286125 - DNA, 120 bp, Artificial Sequence
  ENSG00000130544_13 (sequence is synthesized)
cattgatctttcatgcctcagataacatgagcaaactctaacaagatgtatgaatcacctgctactgtgtaacaaattaccccccaaaattttgtggcttcaaacaaaaacacttgttat

SEQ ID NO: 286126 - DNA, 120 bp, Artificial Sequence
  ENSG00000130544_14 (sequence is synthesized)
ctcaaaatttttgtaggtcaggaattcagaaacaacatagctctatagttcttcaggatatctcaagaggttacagtccagatgtcagcagaactgtaatcatccagaattgttactggt

SEQ ID NO: 286127 - DNA, 120 bp, Artificial Sequence
  ENSG00000130544_15 (sequence is synthesized)
gaagggaccacttccaaatggcttacaagcccgacaagtgcatgctagctgtttccaagggagctgcgcttccaaatcacgtaggcctctcaacagggctgagtttctttatggaagcaa

SEQ ID NO: 286128 - DNA, 120 bp, Artificial Sequence
  ENSG00000130544_16 (sequence is synthesized)
cttctccccaaagccagtgatctaaaggagccaacacagaaagcataatgtcttttatgacctagcttcagtgagatatgttttcatgtccctgttacattggtcatacacaccaatcct

SEQ ID NO: 286129 - DNA, 120 bp, Artificial Sequence
  ENSG00000130544_17 (sequence is synthesized)
gatacaatgtggaagaacaccacaggaggtatgaacagtagacatttggaaccatctggaaaacttgccatgaaatcagtggaggaaagccttcagctgaccctcattttttttttttta

SEQ ID NO: 286130 - DNA, 120 bp, Artificial Sequence
  ENSG00000130544_18 (sequence is synthesized)
gtgtgatcacagctcactgcagcctctacttcctgggatcaagtaattctcctgccccagcctccaatgtagctgggactacaggtgcatgacaccatgtctggctaatttgtttttttt

SEQ ID NO: 286131 - DNA, 120 bp, Artificial Sequence
  ENSG00000130544_19 (sequence is synthesized)
acaggtgcatgacaccatgtctggctaatttgtttttttttaaactagagggagggttttgccatgttgcccagactagtctcaaactcctaggttcaagcagtcctttcatcttggcct

SEQ ID NO: 286132 - DNA, 120 bp, Artificial Sequence
  ENSG00000130544_20 (sequence is synthesized)
ggattacaggcatgaaccaccatgcccagccaacttctaaactgatcaatatgggagtagcattcaatcacccacaggttaactcactctagagagaaatcttgtgagtgtaatctgtat

SEQ ID NO: 286133 - DNA, 120 bp, Artificial Sequence
  ENSG00000130544_21 (sequence is synthesized)
tgtaatctgtatggtaaaactttgagctcaaactttccccctaccaaaaaaaaagtatctactggggagctgcccaggtaatgcagtagctgtaggaaagccttcagtgatggcttcagg

SEQ ID NO: 286134 - DNA, 120 bp, Artificial Sequence
  ENSG00000130544_22 (sequence is synthesized)
gagtcacatgacaactcacaataaggggaaaccctgtgtgtggcatcaaaaatggaaaaccaggggacactcattccttaagtcacatttcggagatcatacaacagaggaatatgttga

SEQ ID NO: 286135 - DNA, 120 bp, Artificial Sequence
  ENSG00000130544_23 (sequence is synthesized)
atactagaaaaaccattgaattccatcagtattagaatgtcatttttccacatttttaggaacctaactcagtgtaagataacaatttatacaatttattttttgagacagggtttcatc

SEQ ID NO: 286136 - DNA, 120 bp, Artificial Sequence
  ENSG00000130544_24 (sequence is synthesized)
atacaatttattttttgagacagggtttcatctgtgcccaggctgtagtgcagtggtgcaatcttggcttattgtaacctctgcctcccaggcttaagggatcctcccacctcagcctcc

SEQ ID NO: 286137 - DNA, 81 bp, Artificial Sequence
  ENSG00000130544_25 (sequence is synthesized)
cagcctcccaagtagctgggactgtaggcatgcaccaccatgcctgtctagtttttgtaaagatggggattcaccatgttt

SEQ ID NO: 286138 - DNA, 120 bp, Artificial Sequence
  ENSG00000130544_26 (sequence is synthesized)
ctaccactctcagccagaacttcttaagataaaggatgagggaatgttttcagtgatacctcttatattaggaaaaatatgtaaatgttccttggatgcaatactcacgagtgtattaat

SEQ ID NO: 286139 - DNA, 120 bp, Artificial Sequence
  ENSG00000130544_27 (sequence is synthesized)
ttcagaaaaattttcagtgattcctccctttatgcatgagagaattcatttagaggaagccctaggaacgtaatcaatgttaggatgcctcatctcttaactgagtggccacgcagtaac

SEQ ID NO: 286140 - DNA, 120 bp, Artificial Sequence
  ENSG00000130544_28 (sequence is synthesized)
ttagaacaaaaggtgtaagtgctatgaatgtggaattaccttcatcaatgtctcatttgtaggttgggccactagctcgttcattttcagtcttttaatataaacatttatggctatagt

SEQ ID NO: 286141 - DNA, 120 bp, Artificial Sequence
  ENSG00000130544_29 (sequence is synthesized)
ggtcctgaaaatcttactacctcgttttatatacagtgtatttattataattctaaaacatcaatacaccaaatattcagaaaggtatttccaaacagctcctgagtgatctagtttgtt

SEQ ID NO: 286142 - DNA, 120 bp, Artificial Sequence
  ENSG00000130544_30 (sequence is synthesized)
tgttataatagaaattagacatttgccaggtgtggtggctcacacctataaacctagcattttgggaggctgaggcgggcagatcaccggaggtaaggagcttgagaccagcctggccaa

SEQ ID NO: 286143 - DNA, 120 bp, Artificial Sequence
  ENSG00000130544_31 (sequence is synthesized)
catgccacttcactccagcctgggcaaaagagtgcaactctgtctcaaaaaaaaaaaaatcagacaatatttgatatatttttttctaatttaatagtattttgccagagtacatggact

SEQ ID NO: 286144 - DNA, 120 bp, Artificial Sequence
  ENSG00000130544_32 (sequence is synthesized)
atttgatatatttttttctaatttaatagtattttgccagagtacatggactttgtgattttggttgttttctctttgtgtcctaatatagcaaatactgtttctttttttttttttttt

SEQ ID NO: 286145 - DNA, 76 bp, Artificial Sequence
  ENSG00000130544_33 (sequence is synthesized)
agacggagtcttgctctgttgtccaggctagaatgcagtggcgcgattgtggctcactgcaagctctgcctcccag

SEQ ID NO: 286146 - DNA, 120 bp, Artificial Sequence
  ENSG00000130544_34 (sequence is synthesized)
ccatgcccggcacaaatactgtttcttaatgttcattctccctacttaaagaaaaagataagttgtcaatgagcagtattgaaaatgtacagtggggccaggcgccatggctcatgcctg

SEQ ID NO: 286147 - DNA, 120 bp, Artificial Sequence
  ENSG00000130544_35 (sequence is synthesized)
acagagtgagactccatctcaaaaaaagatgtacagtgtactaggctttcctgaagcttagacaggctttatcccactctgctggctaaaagaagtaggaataacgcactgggtgagaca

SEQ ID NO: 286148 - DNA, 120 bp, Artificial Sequence
  ENSG00000130544_36 (sequence is synthesized)
aggaataacgcactgggtgagacaccgtctggcttattctcatctattttcttttcattcttttggaaagtggacacaaagcatagagttaaaagagctttttttttttttttttttttt

SEQ ID NO: 286149 - DNA, 68 bp, Artificial Sequence
  ENSG00000130544_37 (sequence is synthesized)
tcgagaccagcctgatcaacatggagaaaacctgtctctcctaaaaatacaaaattaaccgagcatgt

SEQ ID NO: 286150 - DNA, 87 bp, Artificial Sequence
  ENSG00000130544_38 (sequence is synthesized)
agtgccgaaaaatcacaatgatttgagttcttcaaaaacctttgattggctgcattggctctgttctgcatattactagacttctta

SEQ ID NO: 286151 - DNA, 120 bp, Artificial Sequence
  ENSG00000130544_39 (sequence is synthesized)
tcaaaaacctttgattggctgcattggctctgttctgcatattactagacttcttacatgatcacaagtaaccactaattggttaaaaccaaagagagagagagagagagtgtgtgtgtg

SEQ ID NO: 286152 - DNA, 120 bp, Artificial Sequence
  ENSG00000130544_40 (sequence is synthesized)
tggggggtgttgtgttagcttccaggtgaatgcattatctgttaatcctgtttattgatctgtttttataagtgctccatgattctctgaaaacagtatactatgtatctaatttttgga

SEQ ID NO: 286153 - DNA, 120 bp, Artificial Sequence
  ENSG00000130544_41 (sequence is synthesized)
tacaggatggacatacgtactcaaactgtgtttttcaatttgtactgtatttgtttctctcgacctgacttagtgatagaggtatattaaagtcttccactagcatggtagattaacaaa

SEQ ID NO: 286154 - DNA, 120 bp, Artificial Sequence
  ENSG00000130545_0 (sequence is synthesized)
acggaccgagggttcgagggagggacacggaccaggaacctgagctaggtcaaagacgcccgggccaggtgccccgtcgcaggtgcccctggccggagatgcggtaggaggggcgagcgc

SEQ ID NO: 286155 - DNA, 120 bp, Artificial Sequence
  ENSG00000130545_1 (sequence is synthesized)
gagaagccccttcctcggcgctgccaacccgccacccagcccatggcgaaccccgggctggggctgcttctggcgctgggcctgccgttcctgctggcccgctggggccgagcctggggg

SEQ ID NO: 286156 - DNA, 120 bp, Artificial Sequence
  ENSG00000130545_2 (sequence is synthesized)
caaatacagaccacttctgcaaatgagaatagcactgttttgccttcatccaccagctccagctccgatggcaacctgcgtccagaagccatcactgctatcatcgtggtcttctccctc

SEQ ID NO: 286157 - DNA, 120 bp, Artificial Sequence
  ENSG00000130545_3 (sequence is synthesized)
tcctggctgtggggctggcactgttggtgcggaagcttcgggagaagcggcagacggagggcacctaccggcccagtagcgaggagcagttctcccatgcagccgaggcccgggcccctc

SEQ ID NO: 286158 - DNA, 120 bp, Artificial Sequence
  ENSG00000130545_4 (sequence is synthesized)
aggactccaaggagacggtgcagggctgcctgcccatctaggtcccctctcctgcatctgtctcccttcattgctgtgtgaccttggggaaaggcagtgccctctctgggcagtcagatc

SEQ ID NO: 286159 - DNA, 120 bp, Artificial Sequence
  ENSG00000130545_5 (sequence is synthesized)
cacccagtgcttaatagcagggaagaaggtacttcaaagactctgcccctgaggtcaagagaggatggggctattcacttttatatatttatataaaattagtagtgagatgtaacaaaa

SEQ ID NO: 286160 - DNA, 120 bp, Artificial Sequence
  ENSG00000130545_6 (sequence is synthesized)
gttgtctctcctgtgggcctgcgccggggtccccaccccgatcccaacgcctgggcctctccttctcctgtccccaggtgccccgtcgcaggtgcccctggccggagatgcggtaggagg

SEQ ID NO: 286161 - DNA, 120 bp, Artificial Sequence
  ENSG00000130545_7 (sequence is synthesized)
cgccggaagagcggctcatctgaacgctggggcctgctgcagccaccaacactgcccaggactgcgggttgctggcttgtacaccgcagctgccaccgagacaccagcctctgatggctc

SEQ ID NO: 286162 - DNA, 62 bp, Artificial Sequence
  ENSG00000130545_8 (sequence is synthesized)
ttatttatttatttattttttgtagagaatgaggcctcgctgtgttgcccaggctggtctcg

SEQ ID NO: 286163 - DNA, 120 bp, Artificial Sequence
  ENSG00000130545_9 (sequence is synthesized)
cgtgagccattgcgcctgggcaggtattttttctcattaagcgctccccatccaagtctgccctaggcaggagtgcctagtgcacgggtacatacataccccgtgcgtctccacacctgt

SEQ ID NO: 286164 - DNA, 120 bp, Artificial Sequence
  ENSG00000130545_10 (sequence is synthesized)
gcgctcccacagatatgctcgcaatgcaggtgtaaggtccccctcacacctgcgcgcttccgcggtctccctccccgcatccccattaagggactggggtcccgttacaggtgcgcccac

SEQ ID NO: 286165 - DNA, 120 bp, Artificial Sequence
  ENSG00000130545_11 (sequence is synthesized)
agcgcggccccgcccccttcttgactccgccctctcagcgaggctcaggtgcacaagccggaagtgcgctctcccaggtgccccgtcgcaggtgcccctggccggagatgcggtaggagg

SEQ ID NO: 286166 - DNA, 120 bp, Artificial Sequence
  ENSG00000130545_12 (sequence is synthesized)
ctggggctcgggacccacccccctgcttgcggaaccaacttttctctgtgtgtccagcaggccccacaaccccctctcctttctttcagttctcccatgcagccgaggcccgggcccctc

SEQ ID NO: 286167 - DNA, 80 bp, Artificial Sequence
  ENSG00000130558_0 (sequence is synthesized)
cgcggtgcccgccgcctgaaggccgcctgggcgcgggagccggtgccagctcggagcgggcgctggaggcagctcgaggc

SEQ ID NO: 286168 - DNA, 120 bp, Artificial Sequence
  ENSG00000130558_1 (sequence is synthesized)
ctcgaggcgcgatgtcggtgccgctgctcaagatcggggtcgtgctgagcaccatggccatgatcactaactggatgtcccagacgctgccctcgctggtgggcctcaacaccaccaagc

SEQ ID NO: 286169 - DNA, 120 bp, Artificial Sequence
  ENSG00000130558_2 (sequence is synthesized)
tctcggcggccggcggcgggacgctggaccgcagcaccggcgtgctgcccaccaaccctgaggagagctggcaggtgtacagctctgcccaggacagcgagggcaggtgtatctgcacag

SEQ ID NO: 286170 - DNA, 120 bp, Artificial Sequence
  ENSG00000130558_3 (sequence is synthesized)
tggtcgctccacagcagaccatgtgttcacgggatgcccgcacaaaacagctgaggcagctactggagaaggtgcagaacatgtctcaatccatagaggtcttggacaggcggacccaga

SEQ ID NO: 286171 - DNA, 120 bp, Artificial Sequence
  ENSG00000130558_4 (sequence is synthesized)
gagacttgcagtacgtggagaagatggagaaccaaatgaaaggactggagtccaagttcaaacaggtggaggagagtcataagcaacacctggccaggcagtttaaggcgataaaagcga

SEQ ID NO: 286172 - DNA, 120 bp, Artificial Sequence
  ENSG00000130558_5 (sequence is synthesized)
aaatggatgaacttaggcctttgatacctgtgttggaagagtacaaggccgatgccaaattggtattgcagtttaaagaggaggtccagaatctgacgtcagtgcttaacgagctgcaag

SEQ ID NO: 286173 - DNA, 120 bp, Artificial Sequence
  ENSG00000130558_6 (sequence is synthesized)
aggaaattggcgcctatgactacgatgaacttcagagcagagtgtccaatcttgaagaaaggctccgtgcatgcatgcaaaaactagcttgcgggaagttgacgggcatcagtgaccccg

SEQ ID NO: 286174 - DNA, 120 bp, Artificial Sequence
  ENSG00000130558_7 (sequence is synthesized)
tgactgtcaagacctccggctcgaggttcggatcctggatgacagaccctctcgcccctgaaggcgataaccgggtgtggtacatggacggctatcacaacaaccgcttcgtacgtgagt

SEQ ID NO: 286175 - DNA, 120 bp, Artificial Sequence
  ENSG00000130558_8 (sequence is synthesized)
acaagtccatggttgacttcatgaacacggacaatttcacctcccaccgtctcccccacccctggtcgggcacggggcaggtggtctacaacggttctatctacttcaacaagttccaga

SEQ ID NO: 286176 - DNA, 120 bp, Artificial Sequence
  ENSG00000130558_9 (sequence is synthesized)
aagacccgcagcctggactatgccggttacaacaacatgtaccactacgcctggggtggccactcggacatcgacctcatggtggacgagagcgggctgtgggccgtgtacgccaccaac

SEQ ID NO: 286177 - DNA, 120 bp, Artificial Sequence
  ENSG00000130558_10 (sequence is synthesized)
cagaacgctggcaacatcgtggtcagtaggctggaccccgtgtccctgcagaccctgcagacctggaacacgagctaccccaagcgcagcgccggggaggccttcatcatctgcggcacg

SEQ ID NO: 286178 - DNA, 120 bp, Artificial Sequence
  ENSG00000130558_11 (sequence is synthesized)
ctgtacgtcaccaacggctactcagggggtaccaaggtccactatgcataccagaccaatgcctccacctatgaatacatcgacatcccattccagaacaaatactcccacatctccatg

SEQ ID NO: 286179 - DNA, 120 bp, Artificial Sequence
  ENSG00000130558_12 (sequence is synthesized)
ctggactacaaccccaaggaccgggccctgtatgcctggaacaacggccaccagatcctctacaacgtgaccctcttccacgtcatccgctccgacgagttgtagctccctcctcctgga

SEQ ID NO: 286180 - DNA, 120 bp, Artificial Sequence
  ENSG00000130558_13 (sequence is synthesized)
agccaagggcccacgtcctcaccacaaagggactcctgtgaaactgctgccaaaaagataccaataacactaacaataccgatcttgaaaaatcatcagcagtgcggattctgacatcga

SEQ ID NO: 286181 - DNA, 120 bp, Artificial Sequence
  ENSG00000130558_14 (sequence is synthesized)
gggatggcattacctccgtgtttctccctttcgagccggcgggccacagacgtcggaagaaactcccgtatttgcagctggaactgcagcccacggcgccccggttttcctccccgccct

SEQ ID NO: 286182 - DNA, 120 bp, Artificial Sequence
  ENSG00000130558_15 (sequence is synthesized)
gtccctctctggtcaaacaacatactaaagaggcgaggcaatgactgttggccagttctcaccggggaaaaacccactgttaggatggcatgaacatttccttagatcgtggtcagctcc

SEQ ID NO: 286183 - DNA, 120 bp, Artificial Sequence
  ENSG00000130558_16 (sequence is synthesized)
gaggaatgtggcgtccaggctctttgagagccatgggctgcacccggccgtaggctagtgtaactcgcatcccattgcagtgccgtttcttgactgtgttgctgtctcttagattaaccg

SEQ ID NO: 286184 - DNA, 120 bp, Artificial Sequence
  ENSG00000130558_17 (sequence is synthesized)
tgctgaggctccacatagctcctggacctgtgtctagtacatactgaagcgatggtcagagtgtgtagagtgaagttgctgtgcccacattgtttgaactcgcgtaccccgtagatacat

SEQ ID NO: 286185 - DNA, 120 bp, Artificial Sequence
  ENSG00000130558_18 (sequence is synthesized)
tgtgcaacgttcttctgttattcccttgaggtggtaacttcgtatgttcagtttatgcgatgattgttgtaaatgcaatgccgtagtttggattaataagtggatggtttttgtttctaa

SEQ ID NO: 286186 - DNA, 120 bp, Artificial Sequence
  ENSG00000130558_19 (sequence is synthesized)
gctgcactaaaactgtttttcttttaagctccctggaatcctgttgaatattaaagttccatcttgaggctagactcaattcagatctgcctgtaaagatgtaaaacagcgattcttcat

SEQ ID NO: 286187 - DNA, 120 bp, Artificial Sequence
  ENSG00000130558_20 (sequence is synthesized)
cagtccactcccatgtaaccatgaaagagagccagagagctttttgcaccatgcatttttactattattttccaatacttagcaccatttcactaaggaaccttgaatacaaccaggatc

SEQ ID NO: 286188 - DNA, 120 bp, Artificial Sequence
  ENSG00000130558_21 (sequence is synthesized)
ctcctttgcatgcgactgtagctgcatttcatgaatagtttgaacccttgtcaatgcattttttgaaaaagaaagaaaaaaaaaacttcgtgtatgtgactcaaagcatgtaaccttaag

SEQ ID NO: 286189 - DNA, 120 bp, Artificial Sequence
  ENSG00000130558_22 (sequence is synthesized)
cgtccacgcagccgccggccggccagcacccagggccctgcatgccaggtcgttggaggtggcagcgagacatgcacccggcccggaagctcctcagcctcctcttcctcatcctgatgg

SEQ ID NO: 286190 - DNA, 120 bp, Artificial Sequence
  ENSG00000130558_23 (sequence is synthesized)
gcactgaactcactcaagactccgctgcccccgactccctgctgagaagttcaaagggcagcacgagggggtctttggctgctattgtcatctggagggggaagagtgagagccggatag

SEQ ID NO: 286191 - DNA, 120 bp, Artificial Sequence
  ENSG00000130558_24 (sequence is synthesized)
aacgctgcccttgggggctccagaaacaggcggtggggattgtgccgctgagacctggaagggcagccagcgtgccggccagctgtgtgcattgctggcttaatatgcagggcttggggg

SEQ ID NO: 286192 - DNA, 120 bp, Artificial Sequence
  ENSG00000130558_25 (sequence is synthesized)
gctgtggccacatgcccggcaggaggtgagtgaggagccctgtggcgtgctggtgtggggatcgtgggcatttcaaacgggcttgtcgtaccctgaacaatgtatcaatagagaaaggtc

SEQ ID NO: 286193 - DNA, 120 bp, Artificial Sequence
  ENSG00000130558_26 (sequence is synthesized)
gggacgcgataaatatgcagagcggaggcttcgcgcagcagagcccgcgcgccgcccgctccgggtgctgaatccaggcgtggggacacgagccaggcgccgccgccggagccagcggag

SEQ ID NO: 286194 - DNA, 120 bp, Artificial Sequence
  ENSG00000130558_27 (sequence is synthesized)
ccttatagagacatagtcaagttcatgttgataataatcaaaggaattactctcttcttgttaaattagctaaatcatgtaaccgcagataggaagggctcgcctggggaaactctggtt

SEQ ID NO: 286195 - DNA, 120 bp, Artificial Sequence
  ENSG00000130558_28 (sequence is synthesized)
tccgatgggacaggaaagtcatacgggcaacagtatgcggaaagtacgttttttaagtaaaaaacaaaggcaaactttgtactatccagttatctaaggaacaataaaaacattaggaga

SEQ ID NO: 286196 - DNA, 120 bp, Artificial Sequence
  ENSG00000130558_29 (sequence is synthesized)
gtagtgagtgatctggaggattctttccttcccaaatggctgggaaagcttaatggaaggccccggaggaagtggctttcatctccgattagaagccttctgtaaatgcaaaagccctat

SEQ ID NO: 286197 - DNA, 120 bp, Artificial Sequence
  ENSG00000130558_30 (sequence is synthesized)
gaatcaccgcggaaaagggctccagtaggcaggacggcgccgtctctctgccggcaacctttgccccaaagcggaccctctgcggggatcggagagggatgccccggcgtgaggatggga

SEQ ID NO: 286198 - DNA, 120 bp, Artificial Sequence
  ENSG00000130558_31 (sequence is synthesized)
ccgcagtcttcccccacacgtggatggcctctgaactcgtgtgctcgtgcaagcccaccgagggtgccacgcagacctaggaggtcacaggcgggcttggccgggagggacagggcaggg

SEQ ID NO: 286199 - DNA, 120 bp, Artificial Sequence
  ENSG00000130558_32 (sequence is synthesized)
tgcggggacttgtggtggaggggcccttcctctaccctccccaggaaagccacccacttcccatccagggtccctgttagaatcaggagcgtttggcccttcagagggcggccgaggctc

SEQ ID NO: 286200 - DNA, 120 bp, Artificial Sequence
  ENSG00000130558_33 (sequence is synthesized)
gtgcattctggaagagctgcgtggctgcgcagacacaccggcctccgggcaggaggagttctgttcctgtgcagtgggtgtggaagccgccctgagccctcgggggtgtggggggctcca

SEQ ID NO: 286201 - DNA, 120 bp, Artificial Sequence
  ENSG00000130558_34 (sequence is synthesized)
gcctcagtccaaatcaccgggtggcccgggtgtgtccctcctcacctccatggtcctctgtgagacgggagggctgctgagatcacatccaggatcccatccgccctggtgcgctccagc

SEQ ID NO: 286202 - DNA, 120 bp, Artificial Sequence
  ENSG00000130558_35 (sequence is synthesized)
ttgggctcctcccactggcagaagcaaccggctcacgcctgtgggagaagcgcgcaggctcttcctgcgggaaggcagctgtggcctttgtcccgggtcagttccggggcggctggtggt

SEQ ID NO: 286203 - DNA, 120 bp, Artificial Sequence
  ENSG00000130558_36 (sequence is synthesized)
gctgctgctccatcgtgggacagggcctgcctggatgcagtgtctcacactgggcctgactgtgccccacgcgggctgggctgtcagggcatgacctctaatgcccttgggggtggagcc

SEQ ID NO: 286204 - DNA, 120 bp, Artificial Sequence
  ENSG00000130558_37 (sequence is synthesized)
gctgcgttcccatctccaagagaagaaaattgagtcttggcaaagctgaccccctctcctagaggtgctgctccagcacccccatccccaggccatgggtccagcaggctgaggaggcgt

SEQ ID NO: 286205 - DNA, 120 bp, Artificial Sequence
  ENSG00000130558_38 (sequence is synthesized)
gaagcctgggagggcggccgtctgcccacggctcttccctgctatcctggccacagctgctctgttttggggaggaggtggcttttccgagagtgggggagttgtctgtgaaaacaaggg

SEQ ID NO: 286206 - DNA, 120 bp, Artificial Sequence
  ENSG00000130558_39 (sequence is synthesized)
cgtgagcagctttccacagtaccccagaccccgagggcaagaggagaagccgccacatggcacgtgtgctctgggcagtcgaggtcagggtcatcaccgcgggccggggcccccgccctc

SEQ ID NO: 286207 - DNA, 120 bp, Artificial Sequence
  ENSG00000130558_40 (sequence is synthesized)
aagcccacgctggctccctggctctgcccaggatgtgcagtccaaatcccaatccagcagtggggttatgtcgtcccgcttaccctcagagcccttctcctggtgctgcccagacgatca

SEQ ID NO: 286208 - DNA, 120 bp, Artificial Sequence
  ENSG00000130558_41 (sequence is synthesized)
gccagtccctcctggagaggttctgcatggcctctaggagaggttttcttggccccaggaaggcctggtggagggtggtggttgtgcactgttgctggacagatgcattcattcatgtgc

SEQ ID NO: 286209 - DNA, 120 bp, Artificial Sequence
  ENSG00000130558_42 (sequence is synthesized)
acacacacacacacacatgcacacacaggggagcagatacctgcagagaagagccaaccaggtcctgattagtggcaagctgccccacaaagggctatgcctgtgtcttattgagacacc

SEQ ID NO: 286210 - DNA, 120 bp, Artificial Sequence
  ENSG00000130558_43 (sequence is synthesized)
ttggcaaagagatggctgattctgggtggtcctggacatggccgcacccaagggccctccaagccttaatggcaccctgaagcctccatgcccaggccaaaagatgcttttcctccctaa

SEQ ID NO: 286211 - DNA, 80 bp, Artificial Sequence
  ENSG00000130559_0 (sequence is synthesized)
gagcgcgctcccgctccttggccaccgcctcagccgctgtcgccgccgccgccgctcacccgggaccgcgcacgcgctgc

SEQ ID NO: 286212 - DNA, 80 bp, Artificial Sequence
  ENSG00000130559_1 (sequence is synthesized)
cgggctcggcacctcctccgctcgggctcagcgcccgcagcatgcagcagccgcgggggcggcgacggcggcggctgtga

SEQ ID NO: 286213 - DNA, 80 bp, Artificial Sequence
  ENSG00000130559_2 (sequence is synthesized)
caccgggcccggcgcggcgaggggcggcggcgcctttgttgcggccgggccgccgcctcagccctttgtctgcagatggt

SEQ ID NO: 286214 - DNA, 120 bp, Artificial Sequence
  ENSG00000130559_3 (sequence is synthesized)
gccgccgcctcagccctttgtctgcagatggtggacgcgagcggccgcgccgccgccgagggctggaggaagatggaggccccgccggacggcgccgccgacctcgtgcccctggaccgc

SEQ ID NO: 286215 - DNA, 120 bp, Artificial Sequence
  ENSG00000130559_4 (sequence is synthesized)
tacgacgcggcgcgcgccaagatcgccgccaacctgcagtggatctgcgccaaggcctacggccgagataacatccctgaggacctcagagaccctttctacgttgaccagtatgagcag

SEQ ID NO: 286216 - DNA, 120 bp, Artificial Sequence
  ENSG00000130559_5 (sequence is synthesized)
gagcacattaagccgcctgttatcaagcttctcctgtccagcgagctgtactgccgtgtctgcagcctcatcctgaaaggggaccaggtggccgccttacagggacaccagtctgtcatc

SEQ ID NO: 286217 - DNA, 120 bp, Artificial Sequence
  ENSG00000130559_6 (sequence is synthesized)
caggccctgtcccggaaagggatctatgtgatggagagtgatgacacccccgtgacagagtccgacctcagtcgcgcacccataaaaatgagtgcccacatggcaatggtggatgccctg

SEQ ID NO: 286218 - DNA, 120 bp, Artificial Sequence
  ENSG00000130559_7 (sequence is synthesized)
atgatggcctacactgtggagatgatcagcatcgagaaggtggtggccagtgtcaagcgcttctcaacgttcagtgcctcgaaagaacttccgtacgacctcgaggatgccatggtgttc

SEQ ID NO: 286219 - DNA, 120 bp, Artificial Sequence
  ENSG00000130559_8 (sequence is synthesized)
tggatcaacaaggtaaatcttaaaatgagagagataacagagaaagaagttaaattaaaacaacagttattggaaagtccagctcatcaaaaggtccgctatcgacgagagcacctttct

SEQ ID NO: 286220 - DNA, 120 bp, Artificial Sequence
  ENSG00000130559_9 (sequence is synthesized)
gctaggcagtcaccctacttcccgttgttggaggatttgatgagagacggcagtgatggtgctgctctcttagctgtgattcactattattgcccagagcagatgaaactggatgatata

SEQ ID NO: 286221 - DNA, 120 bp, Artificial Sequence
  ENSG00000130559_10 (sequence is synthesized)
tgcttaaaggaggtaacgtcgatggccgacagtctgtataatattcggcttctgagagaattctccaatgaatatcttaataaatgtttttatctcaccttggaagatatgctgtatgcg

SEQ ID NO: 286222 - DNA, 120 bp, Artificial Sequence
  ENSG00000130559_11 (sequence is synthesized)
ccattagtgttgaagccgaatgttatggtttttattgcggagcttttttggtggttcgagaatgtcaagccagattttgttcagcccagggatgttcaggagctgaaagacgcgaaaaca

SEQ ID NO: 286223 - DNA, 120 bp, Artificial Sequence
  ENSG00000130559_12 (sequence is synthesized)
gtgttacaccagaagagcagccggcctcctgtaccgatctccaacgcgaccaaacgcagtttcctaggcagccctgctgcagggaccctggctgagctgcagccccccgtgcagctgccg

SEQ ID NO: 286224 - DNA, 120 bp, Artificial Sequence
  ENSG00000130559_13 (sequence is synthesized)
gcggaaggctgtcacaggcactacctgcacccggaagaacctgaatacctcgggaaaggaactgctgccttcagcccatcccatcctttattgccactgagacagaaacagcagaaatcc

SEQ ID NO: 286225 - DNA, 120 bp, Artificial Sequence
  ENSG00000130559_14 (sequence is synthesized)
atacagggagaggacatccctgatcagcgacatcgatcgaattctttgacccgagttgatggtcagcctcgaggagcagcaatagcctggccagaaaaaaaaaccaggcctgcgtcccag

SEQ ID NO: 286226 - DNA, 120 bp, Artificial Sequence
  ENSG00000130559_15 (sequence is synthesized)
ccaacaccttttgctctacatcacgctgcgagttgtgaagtggatcccagctctggcgacagcatcagcttggcccgctccatcagcaaagacagtttggcatccaacattgttaatctg

SEQ ID NO: 286227 - DNA, 120 bp, Artificial Sequence
  ENSG00000130559_16 (sequence is synthesized)
accccacagaaccagccacaccccacggccacgaagagccacgggaagagcctcctgagcaatgtcagtattgaggatgaggaagaggagcttgtggctattgttagagcagacgtggtt

SEQ ID NO: 286228 - DNA, 120 bp, Artificial Sequence
  ENSG00000130559_17 (sequence is synthesized)
ccccagcaggctgacccggagttccccagggcctcaccccgggccttaggccttacagcaaatgcccggtctccccaaggacagctggacacctcggaaagtaagcctgacagttttttc

SEQ ID NO: 286229 - DNA, 120 bp, Artificial Sequence
  ENSG00000130559_18 (sequence is synthesized)
ttggagcctttgatgccagcagttcttaagccagcgaaagagaagcaggtgatcaccaaggaggatgaacggggggaagggagaccgaggagcatcgtgtctaggaggcccagcgagggc

SEQ ID NO: 286230 - DNA, 120 bp, Artificial Sequence
  ENSG00000130559_19 (sequence is synthesized)
ccccagcctttggtacgaaggaaaatgactggcagtcgcgacttgaataggacttttaccccgattccatgctcagaattccccatgggcatcgaccccaccgagacaggaccactgtca

SEQ ID NO: 286231 - DNA, 120 bp, Artificial Sequence
  ENSG00000130559_20 (sequence is synthesized)
gtggaaaccgcaggagaggtctgtggtgggcctctggcccttggcggattcgatccgttcccccagggaccatccacggatggcttcttccttcatgtaggcagggccgatgaagacacc

SEQ ID NO: 286232 - DNA, 120 bp, Artificial Sequence
  ENSG00000130559_21 (sequence is synthesized)
gagggaaggttatatgttagttgttcaaaaagccccaactcccacgattcagagccgtggactctcctcaggcaggattctgactcggatgtggtggacatagaggaagccgagcacgat

SEQ ID NO: 286233 - DNA, 120 bp, Artificial Sequence
  ENSG00000130559_22 (sequence is synthesized)
ttcatgggtgaggcccatcctgtggttttcagcagatacattggggaggaagagtcggccaaactgcaggaggacatgaaggtgaaggaacatgaagacaaagatgacgccagcggccgc

SEQ ID NO: 286234 - DNA, 120 bp, Artificial Sequence
  ENSG00000130559_23 (sequence is synthesized)
tcgagcccctgcctgagcacagcctctcagatgagcagtgtctccatggcgagtgggagcgtgaagatgaccagctttgcggagaggaagctccagagactcaacagctgtgagaccaag

SEQ ID NO: 286235 - DNA, 120 bp, Artificial Sequence
  ENSG00000130559_24 (sequence is synthesized)
tccagcaccagcagctcccagaagaccacgccagatgcgtctgagagctgcccagcccctctgacgacgtggaggcagaagagggagcagagtccgagccagcatggcaaggatcccgcc

SEQ ID NO: 286236 - DNA, 120 bp, Artificial Sequence
  ENSG00000130559_25 (sequence is synthesized)
agcctcctggcatctgagctggtacagctgcacatgcagctggaggagaagcgcagggccatcgaggcccagaagaagaagatggaggcgctgtcggcaaggcagcgcctgaagctcggc

SEQ ID NO: 286237 - DNA, 120 bp, Artificial Sequence
  ENSG00000130559_26 (sequence is synthesized)
aaggctgcattcctgcatgtggtgaagaagggcaaggccgaggctgccccacccctcaggccggagcactttgcaaaggagtactctcagcacaacggggaggactgtggggacgctgtt

SEQ ID NO: 286238 - DNA, 120 bp, Artificial Sequence
  ENSG00000130559_27 (sequence is synthesized)
tccaaaaccgaagactttctcgtgaaggaggagcagagagaggagctccttcacgagccacaggatgtggacaaagagagcctggcctttgctcagcaacataaagcaaaagaccctgtg

SEQ ID NO: 286239 - DNA, 120 bp, Artificial Sequence
  ENSG00000130559_28 (sequence is synthesized)
gctctgcacgagctggagagaaataaggtgatctccgctgccctcctggaggacactgttggggaggttgtcgacgtgaatgaatgtgacctttccatcgagaagcttaacgaaaccatc

SEQ ID NO: 286240 - DNA, 120 bp, Artificial Sequence
  ENSG00000130559_29 (sequence is synthesized)
agtacgctgcagcaggccatcctgaaaatctctcagcagcaagagcagcttctgatgaagtcccccacagtcccagtgccaggctctaagaataactcgcaggaccacaaagtgaaggca

SEQ ID NO: 286241 - DNA, 120 bp, Artificial Sequence
  ENSG00000130559_30 (sequence is synthesized)
ccagtccacttcgtggagccactctctcccacgggcgtggctggccaccgcaaagccccccggctgggtcaaggccggaattcccgttccggaaggccggcggagctgaaggtcccaaaa

SEQ ID NO: 286242 - DNA, 120 bp, Artificial Sequence
  ENSG00000130559_31 (sequence is synthesized)
gacaggccacagggctcctcccgaagtaaaaccccaacgcccagtgtagagacgctcccgcacttgagacccttccctgccagcagccaccctcggacgcccacggaccctggcctggac

SEQ ID NO: 286243 - DNA, 120 bp, Artificial Sequence
  ENSG00000130559_32 (sequence is synthesized)
agtgccctggagcccagtggtgacccacatgggaagtgtctcttcgacagttacaggctccatgatgaaagcaatcagcggacacttactctgtcctcttccaaagatgccaacattctt

SEQ ID NO: 286244 - DNA, 120 bp, Artificial Sequence
  ENSG00000130559_33 (sequence is synthesized)
ggagcctctgaggagcagggccagcctcattgaagtggacctctccgacctgaaggcccccgacgaggatggggagctggtaagcctcgatggctcggcggaccttgtcagcgaaggcga

SEQ ID NO: 286245 - DNA, 120 bp, Artificial Sequence
  ENSG00000130559_34 (sequence is synthesized)
ccagaagccgggggtcggcttcttcttcaaggatgaacagaaagcggaagatgagctcgccaagaagcgggcggccttcctcctgaagcagcagcgcaaggccgaggaggcccgcgtgcg

SEQ ID NO: 286246 - DNA, 120 bp, Artificial Sequence
  ENSG00000130559_35 (sequence is synthesized)
caagcagcagctggaagcggaggtggagctcaagcgtgacgaagcccggcgcaaagctgaggaagaccgggtgcggaaggaggaggagaaggcgcggcgcgagctcatcaagcaggagta

SEQ ID NO: 286247 - DNA, 120 bp, Artificial Sequence
  ENSG00000130559_36 (sequence is synthesized)
cctgcggaggaagcagcagcagatcctagaggagcaggggctcggcaagcccaagtcaaagccgaagaagccgcggccgaagtcggtgcaccgggaagagtcgtgcagcgactccggcac

SEQ ID NO: 286248 - DNA, 120 bp, Artificial Sequence
  ENSG00000130559_37 (sequence is synthesized)
caagtgctcctccacccctgataacttgagccggactcagtcaggctccagcctgtccttggcctctgcggcgacgacagaacccgagagcgttcattccgggggcacaccctctcagcg

SEQ ID NO: 286249 - DNA, 120 bp, Artificial Sequence
  ENSG00000130559_38 (sequence is synthesized)
agtggaatcgatggaagccctgcccatactgagccgtaacccaagcaggagcacagaccgagactgggagaccgcgtcggcggcatcttccctggcctcagtggccgagtacacaggtcc

SEQ ID NO: 286250 - DNA, 120 bp, Artificial Sequence
  ENSG00000130559_39 (sequence is synthesized)
caagctctttaaggagcccagtagtaaatcaaacaagccgattattcacaatgccatatcccattgctgcctggctggaaaagtgaacgaaccccacaagaattccatattggaggagct

SEQ ID NO: 286251 - DNA, 120 bp, Artificial Sequence
  ENSG00000130559_40 (sequence is synthesized)
ggagaagtgtgatgccaatcactacatcatactgtttcgtgatgctggctgccagttcagggcgctttactgctactatcctgatactgaggaaatctacaaactcactggcacggggcc

SEQ ID NO: 286252 - DNA, 120 bp, Artificial Sequence
  ENSG00000130559_41 (sequence is synthesized)
aaagaacatcaccaagaaaatgatcgacaaactgtataaatacagctcagaccgaaaacagtttaacttgatcccagccaaaaccatgtctgtcagtgtggacgcactcacaatccacaa

SEQ ID NO: 286253 - DNA, 120 bp, Artificial Sequence
  ENSG00000130559_42 (sequence is synthesized)
ccacctgtggcagcccaagcggcctgcagtgccaaagaaggcccagactcgtaaatgaccccggtgcagctggcgtccaaagggtgacccagactcgtaaatgatgcccttgtggctggc

SEQ ID NO: 286254 - DNA, 120 bp, Artificial Sequence
  ENSG00000130559_43 (sequence is synthesized)
atccagagggtgccacggggtccttatttattgttttcatctatttgggtacgaagtgtgcaaagtcacagaccttttgcaaagaggtttctagacagcagaagaaaacccctctctcag

SEQ ID NO: 286255 - DNA, 120 bp, Artificial Sequence
  ENSG00000130559_44 (sequence is synthesized)
cgctcatctcacgcagaggatgccaggcagggtgaggatgggggagtagatgccgcttttgcagtggctcgcactgctgtggccactgctgaccactgaggctcccagcggagggtgttc

SEQ ID NO: 286256 - DNA, 120 bp, Artificial Sequence
  ENSG00000130559_45 (sequence is synthesized)
acagccaggtcccgggccacggagctcccttacttgaagttctccttcagcatagattagacgtgatccactttgctttcttgcttctcacctcgcccccttgcacattgcctgacaccc

SEQ ID NO: 286257 - DNA, 120 bp, Artificial Sequence
  ENSG00000130559_46 (sequence is synthesized)
tcatattggccagctgtaatctcgtgactatgggactgaggctcaatcttggcttggggtgtttgaatgtctatagcaaaggaattcataatgggaaatctttttcatttgagaaattgt

SEQ ID NO: 286258 - DNA, 120 bp, Artificial Sequence
  ENSG00000130559_47 (sequence is synthesized)
atgatatttattggttgtgtctactgccaacatttatatccaattctaagatttctgaaaaaaaattcttatcccttgctgctcagaaaaagtttacggaaaacaccagttcactaaaag

SEQ ID NO: 286259 - DNA, 120 bp, Artificial Sequence
  ENSG00000130559_48 (sequence is synthesized)
caccgaaatctgcaaagcctgtcttccgctagaacaacgtctacaaatgtgaagatgatgacttctggcacgcggtcatgagggtggggaatggcactaggagctgatgtttgcctcatt

SEQ ID NO: 286260 - DNA, 120 bp, Artificial Sequence
  ENSG00000130559_49 (sequence is synthesized)
taaagtaggcaagccgagccaactgcagccatcattcattaagttttgggtagtgctctaatggtttgttcactttaataaagacagattttggtaaagtagaatatttttcattctgag

SEQ ID NO: 286261 - DNA, 120 bp, Artificial Sequence
  ENSG00000130559_50 (sequence is synthesized)
catgtttgtcccaaaaggtgatgcacttaagctgacagtcccttcagtggttttgttaggtcacggcttgtcctgtctggattctgcatctggaagcgctgcatgctctcagaggagcgt

SEQ ID NO: 286262 - DNA, 120 bp, Artificial Sequence
  ENSG00000130559_51 (sequence is synthesized)
gccgtttcccctgtagatggatacttttgttttgttgcctatttaaaaacaattaagtggttatttgcagttatttcagaactccaagtaagtggatggctttgggttctttctgccttg

SEQ ID NO: 286263 - DNA, 120 bp, Artificial Sequence
  ENSG00000130559_52 (sequence is synthesized)
gtcccaatggtgttgatgcttctgtggagcgcggacattcccaggagcaggtgcgtgccagccatggctgccagacactgctgcaactgaccagctgccggaagattctggagccactaa

SEQ ID NO: 286264 - DNA, 120 bp, Artificial Sequence
  ENSG00000130559_53 (sequence is synthesized)
cattagttttgcacatattttcttgggagtgttacttgaatctatctcaaactgcagaaaaaatcaaaagatcaataattgggagaaaaagagacaaatttaactgttacataattttag

SEQ ID NO: 286265 - DNA, 120 bp, Artificial Sequence
  ENSG00000130559_54 (sequence is synthesized)
atagacaaaaaacatgagtgagtcgtgtacataaggagggaacatggtacagaaggctagaaggaattataggtcttattcccctttcctcagtcctttgaagagaagtacagtctcttg

SEQ ID NO: 286266 - DNA, 120 bp, Artificial Sequence
  ENSG00000130559_55 (sequence is synthesized)
cgattttgtatatatcgtgttcgacacagccgctctctgtcctgtaaatagggaactaaaggctgtatgatttctcaagtgctgagttacacagtcctgagtgagctttctgttaccata

SEQ ID NO: 286267 - DNA, 120 bp, Artificial Sequence
  ENSG00000130559_56 (sequence is synthesized)
ctttcacacgtgggctttatttctcactgtatgtttgatatgatattactgtatttattttaagaaagcactaagatgtaataaagtgatgaactaatttgctttacattgaatcgtatg

SEQ ID NO: 286268 - DNA, 120 bp, Artificial Sequence
  ENSG00000130559_57 (sequence is synthesized)
tgtgaggttgctgtggctcatttcgctgaccaggcgacaccaactccttgctttataggagtttcacattgttctttaccatggccctatcgaagtcagtggaattggattctttttaat

SEQ ID NO: 286269 - DNA, 120 bp, Artificial Sequence
  ENSG00000130559_58 (sequence is synthesized)
gaagagctagaaaatatctggcatagagctggaaaattgcattcccatgggacgtctgaatcaattctggattttctccatggaatgagtcagtgtgtggaacatcctgaaacttgtcct

SEQ ID NO: 286270 - DNA, 120 bp, Artificial Sequence
  ENSG00000130559_59 (sequence is synthesized)
taagcgtgtagttttcactgttcgttgcgagtaagcactaatgtggcatggacattcctgatgtcccaagtccccaggccagtgttcgcctaatgattgacagaagcgtccctgcgttct

SEQ ID NO: 286271 - DNA, 120 bp, Artificial Sequence
  ENSG00000130559_60 (sequence is synthesized)
tcatgcttggacacagcaacccttttaattagtcttgaaaagtttcagacacaggattaattttcgtggtggtgcttttgggcctttctggcttgggtggtggtaaagtcatgattttgc

SEQ ID NO: 286272 - DNA, 120 bp, Artificial Sequence
  ENSG00000130559_61 (sequence is synthesized)
agttgataacactgacttataactctgtttatcaatgtctcctatattcaaagcccctgcagtggtatttgtgtctcgttgcaaatttctttcagcggaaagcttgcacaactttcgttg

SEQ ID NO: 286273 - DNA, 120 bp, Artificial Sequence
  ENSG00000130559_62 (sequence is synthesized)
tgtctcagaattctaaccttgttatttaagacaagctgctctacccatttaggatataactttgtaaagaaagtgtaaaccaaatgattcaatgtatgatgaagtttatgtgtaaatcct

SEQ ID NO: 286274 - DNA, 120 bp, Artificial Sequence
  ENSG00000130559_63 (sequence is synthesized)
tggtaatgctagaattctgggagcccagaagggttgaaagagaaatgaaacttgcgtgagtcccattattttacgcatgtatgtgcagatacgttctacccacacgtgtgcgtgcacatg

SEQ ID NO: 286275 - DNA, 120 bp, Artificial Sequence
  ENSG00000130559_64 (sequence is synthesized)
gctgtgtgcgtgcaccaaagatggactgctttccatgtgtccttttgactttctgcacgtgtcactgcggtgcagtctcttagcagacttcaggcccaaactgtattcttcactcaggca

SEQ ID NO: 286276 - DNA, 120 bp, Artificial Sequence
  ENSG00000130559_65 (sequence is synthesized)
aaattgaaaagtggaataattctaaattacttctaggttatacttttacctccctgaaattgtagttgtcacttggagggcaaaatatttattgaaataaaattttctgttaaaaattca

SEQ ID NO: 286277 - DNA, 120 bp, Artificial Sequence
  ENSG00000130559_66 (sequence is synthesized)
aagtctccctccaagtggtattggaagttagtgcctgtaagtgaaccccaagccgccagctgccatctacagagccatcctgtcgcgatcacttgcttccattaaaaactgctcgcaccc

SEQ ID NO: 286278 - DNA, 120 bp, Artificial Sequence
  ENSG00000130559_67 (sequence is synthesized)
gagagcctagagtatcagaaagcactctccagtggttccatgtttctcgcacagcagagttcttggaagagcctgtggagtcagaatcccagggacgggcgtgagagtttggggaaaggc

SEQ ID NO: 286279 - DNA, 120 bp, Artificial Sequence
  ENSG00000130559_68 (sequence is synthesized)
tttctaagtgattttgatgaactattcggttacgaatcacagctctaaaaattgcacaactctaaaagttccaggatggctgttctcacctccagaatgaacaaactgaaaaaaaaaaaa

SEQ ID NO: 286280 - DNA, 120 bp, Artificial Sequence
  ENSG00000130559_69 (sequence is synthesized)
tgcagggcgaggtgaggggaacaggtacaggggacaggtacttgtctgtcggaatccgttcatgaaccgtcgtctgtttctgtctctggcagctgataacttgagccggactcagtcagg

SEQ ID NO: 286281 - DNA, 120 bp, Artificial Sequence
  ENSG00000130559_70 (sequence is synthesized)
gtgttgggcggctttgagactggggtgtctgtccccagagctcagagcagaggtggggcggtaactccatgcccgcgggcacaggcggggtcactgagtgaggagaatggctcgaggctg

SEQ ID NO: 286282 - DNA, 120 bp, Artificial Sequence
  ENSG00000130559_71 (sequence is synthesized)
agccgtccctcacatggggccagcgtggacacttggcgtcctcccttcggtctttgcgtgtctgttgttgagccgtgtgtgtgtgtgtgtgtgtgctggtgcccgtgtacacgctgctct

SEQ ID NO: 286283 - DNA, 120 bp, Artificial Sequence
  ENSG00000130560_0 (sequence is synthesized)
gggcggtctggccccgccccctccccgcccgccttcccggtgaccttcaggggcccgggtggcgggcgcaggcccctgcggcggcggcgggatgttcgtgcaggaggagaagatcttcgc

SEQ ID NO: 286284 - DNA, 120 bp, Artificial Sequence
  ENSG00000130560_1 (sequence is synthesized)
gggcaaggtgctgcggctgcacatctgcgcgtccgacggcgccgagtggctggaggaggccaccgaggacacctcggtggagaagctcaaggagcgctgcctcaagcactgtgctcatgg

SEQ ID NO: 286285 - DNA, 120 bp, Artificial Sequence
  ENSG00000130560_2 (sequence is synthesized)
gagcttagaagatcccaaaagtataacccatcataaattaatccacgctgcctcagagagggtgctgagtgatgccaggaccatcctggaagagaacatccaggaccaagatgtcctatt

SEQ ID NO: 286286 - DNA, 120 bp, Artificial Sequence
  ENSG00000130560_3 (sequence is synthesized)
attgataaaaaagcgtgctccatcaccacttcccaagatggctgatgtctcagcagaagaaaagaaaaaacaagaccagaaagctccagataaagaggccatactgcgggccaccgccaa

SEQ ID NO: 286287 - DNA, 120 bp, Artificial Sequence
  ENSG00000130560_4 (sequence is synthesized)
cctgccctcctacaacatggaccgggccgcggtccagaccaacatgagagacttccagacagaactccggaagatactggtgtctctcatcgaggtggcgcagaagctgttagcgctgaa

SEQ ID NO: 286288 - DNA, 120 bp, Artificial Sequence
  ENSG00000130560_5 (sequence is synthesized)
cccagatgcagtggaattgtttaagaaggcgaatgcaatgctggacgaggacgaggatgagcgtgtggacgaggctgccctgcggcagctcacggagatgggctttccggagaacagagc

SEQ ID NO: 286289 - DNA, 120 bp, Artificial Sequence
  ENSG00000130560_6 (sequence is synthesized)
acacgcagaagacccgaccatagacacgcctcttcctggccaagctcccccagaggccgagggggccacagcagctgcctccgaggctgccgcgggagccagcgccaccgatgaggaggc

SEQ ID NO: 286290 - DNA, 120 bp, Artificial Sequence
  ENSG00000130560_7 (sequence is synthesized)
cagagatgagctgacggaaatcttcaagaagatccggaggaaaagggagtttcgggctgatgctcgggccgtcatttccctgatggagatggggttcgacgagaaagaggtgatagatgc

SEQ ID NO: 286291 - DNA, 120 bp, Artificial Sequence
  ENSG00000130560_8 (sequence is synthesized)
cctcagagtgaacaacaaccagcagaatgccgcgtgcgagtggctgctgggggaccggaagccctctccggaggagctggacaagggcatcgaccccgacagtcctctctttcaggccat

SEQ ID NO: 286292 - DNA, 120 bp, Artificial Sequence
  ENSG00000130560_9 (sequence is synthesized)
cctggataacccggtggtgcagctgggcctgaccaacccgaaaacattgctagcatttgaagacatgctggagaacccactgaacagcacccagtggatgaatgatccagaaacggggcc

SEQ ID NO: 286293 - DNA, 120 bp, Artificial Sequence
  ENSG00000130560_10 (sequence is synthesized)
tgtcatgctgcagatctctagaatcttccagacactaaatcgcacgtaggtggcgttgttccactcggctatcaggccacagcagccccctggtgcggcccgagaccgggcagagtggac

SEQ ID NO: 286294 - DNA, 120 bp, Artificial Sequence
  ENSG00000130560_11 (sequence is synthesized)
ctcacctggaaactcaccttcagcgcctcagccctggactgttagaggtgctgcagctgctcctgctctctgatcttattgcttataaactttggtgacggtagtgtgtaaggccgtatt

SEQ ID NO: 286295 - DNA, 120 bp, Artificial Sequence
  ENSG00000130560_12 (sequence is synthesized)
tttagcatctgacaggtgtttacaaaaaagtggttgtcgcactgggaagtggagtgatggcctcgtctccagtgctcctctgggctcttgagttgctgcttgaattgccgtgtagacatt

SEQ ID NO: 286296 - DNA, 120 bp, Artificial Sequence
  ENSG00000130560_13 (sequence is synthesized)
tgcttggagagtccacttgttatttgacggaggtaggtttcaacccagagttaatgtcaagcatgctaatttaactagtcactcacagatgacttttctttaataaagtcccttttccta

SEQ ID NO: 286297 - DNA, 120 bp, Artificial Sequence
  ENSG00000130560_14 (sequence is synthesized)
gtgtgggggattgctgtgggggggttcctgcggggcggggcagcaagaggagattctctgggaggatttggggaagccggtgagcgggtctgtaggactgcactattttgcattttttct

SEQ ID NO: 286298 - DNA, 120 bp, Artificial Sequence
  ENSG00000130560_15 (sequence is synthesized)
gtaaatcaaaaattatttccaagtaagagttggaaagccatctgaaggcaggattgaaaagatagatacccctgggaaaacgtcaatccggccctgagtttggcaaaacgtttagataga

SEQ ID NO: 286299 - DNA, 120 bp, Artificial Sequence
  ENSG00000130560_16 (sequence is synthesized)
atccggaggaaaagggagtttcgggctgatgctcggggagccaagtttacatctgatcctggaagcctgtccaagtggagcagtcactctccagctgggtcccttgtgctctgaggttgg

SEQ ID NO: 286300 - DNA, 120 bp, Artificial Sequence
  ENSG00000130560_17 (sequence is synthesized)
cagctcatcaaggagtttacacctctggctcctaaaggagacggagtctttcttgggcagagctccgctgattcagttgtcatcgtctttttgctgctcttacgttcacctcagactttc

SEQ ID NO: 286301 - DNA, 120 bp, Artificial Sequence
  ENSG00000130560_18 (sequence is synthesized)
gtgctgggattacagatgggagccactgcgcccggccgaatccctgctgttctgttctcagggcatccagcaccctttatgccattttgtggatatgaagtgataaccagtgtgttggat

SEQ ID NO: 286302 - DNA, 120 bp, Artificial Sequence
  ENSG00000130560_19 (sequence is synthesized)
cgtgttgttttttctagatgtcctattattgataaaaaagcgtgctccatcaccacttcccaagatggctgatgtctcagcagaagaaaagaaaaaacaagaccagaaagctccagataa

SEQ ID NO: 286303 - DNA, 120 bp, Artificial Sequence
  ENSG00000130560_20 (sequence is synthesized)
atgagaactcaaggtgaatcccgttcgtagcagggacacggcctctaacagtcttctcaggattcccgtgtgagttacttgccctgcttctgtgttcagatctaaaatgaataatccgag

SEQ ID NO: 286304 - DNA, 120 bp, Artificial Sequence
  ENSG00000130560_21 (sequence is synthesized)
atccaggggcagccgggggcagttccccctgtggtccctatctaagccctcagcagatatctctgggtccgcttgcctctccttagacatgggcttctgattctgcccagggtctcaagg

SEQ ID NO: 286305 - DNA, 120 bp, Artificial Sequence
  ENSG00000130560_22 (sequence is synthesized)
tagtctgaggcaaggaccagcgcttccgtcgcacctgtgttcattcaggttcttgttataagggtcaccagctgatgctggagaagtcactaccatagcagaggctcttcttgggaatgg

SEQ ID NO: 286306 - DNA, 120 bp, Artificial Sequence
  ENSG00000130561_0 (sequence is synthesized)
gagacctggatgctgggcatcctcgctagatcccctacaaattccccacatacgtaggccaggagcctcagcggtgccccttcaggctcatctggcaagacggtaccagcttgctcagaa

SEQ ID NO: 286307 - DNA, 120 bp, Artificial Sequence
  ENSG00000130561_1 (sequence is synthesized)
caggggctggctattcatcatctcagagcatagagaccctctccttgccacccggcccttcccacctggttggtgacaaatcacaaggtggtagaagttgccagggacagataacatggc

SEQ ID NO: 286308 - DNA, 120 bp, Artificial Sequence
  ENSG00000130561_2 (sequence is synthesized)
agccagcgggaagaccagcaagtccgaaccgaaccatgttatcttcaagaagatctcccgggacaaatcggtgaccatctacctggggaacagagactacatagaccatgtcagccaagt

SEQ ID NO: 286309 - DNA, 120 bp, Artificial Sequence
  ENSG00000130561_3 (sequence is synthesized)
ccagcctgtggatggtgtcgtgttggttgatcctgatcttgtgaagggaaagaaagtgtatgtcactctgacctgcgccttccgctatggccaagaggacattgacgtgatcggcttgac

SEQ ID NO: 286310 - DNA, 120 bp, Artificial Sequence
  ENSG00000130561_4 (sequence is synthesized)
cttccgcagggacctgtacttctcccgggtccaggtgtatcctcctgtgggggccgcgagcacccccacaaaactgcaagagagcctgcttaaaaagctggggagcaacacgtacccctt

SEQ ID NO: 286311 - DNA, 120 bp, Artificial Sequence
  ENSG00000130561_5 (sequence is synthesized)
tctcctgacgtttcctgactacttgccctgttcagtgatgttgcagccagctccacaagattcagggaagtcctgtggggttgactttgaggtcaaagcattcgccacagacagcaccga

SEQ ID NO: 286312 - DNA, 120 bp, Artificial Sequence
  ENSG00000130561_6 (sequence is synthesized)
gcgattactgatccgcaaagtacagcatgccccacttgagatgggtccccagccccgagctgaggcggcctggcagttcttcatgtctgacaagcccctgcaccttgcggtctctctcaa

SEQ ID NO: 286313 - DNA, 120 bp, Artificial Sequence
  ENSG00000130561_7 (sequence is synthesized)
caaagagatctatttccatggggagcccatccctgtgaccgtgactgtcaccaataacacagagaagaccgtgaagaagattaaagcattcgtggaacaggtggccaatgtggttctcta

SEQ ID NO: 286314 - DNA, 120 bp, Artificial Sequence
  ENSG00000130561_8 (sequence is synthesized)
ctcgagtgattattacgtcaagcccgtggctatggaggaagcgcaagaaaaagtgccaccaaacagcactttgaccaagacgctgacgctgctgcccttgctggctaacaatcgagaaag

SEQ ID NO: 286315 - DNA, 120 bp, Artificial Sequence
  ENSG00000130561_9 (sequence is synthesized)
gagaggcattgccctggatgggaaaatcaagcacgaggacacaaaccttgcctccagcaccatcattaaggagggcatagaccggaccgtcctgggaatcctggtgtcttaccagatcaa

SEQ ID NO: 286316 - DNA, 120 bp, Artificial Sequence
  ENSG00000130561_10 (sequence is synthesized)
ggtgaagctcacagtgtcaggctttctgggagagctcacctccagtgaagtcgccactgaggtcccattccgcctcatgcaccctcagcctgaggacccagctaaggaaagttatcagga

SEQ ID NO: 286317 - DNA, 120 bp, Artificial Sequence
  ENSG00000130561_11 (sequence is synthesized)
tgcaaatttagtttttgaggagtttgctcgccataatctgaaagatgcaggagaagctgaggaggggaagagagacaagaatgacgttgatgagtgaagatgtcggctcaggatgccgga

SEQ ID NO: 286318 - DNA, 120 bp, Artificial Sequence
  ENSG00000130561_12 (sequence is synthesized)
aaatgacctgtagttaccagtgcaacgagcaaagccccacagtttagtcctttggagttatgctgcgtatgaaaggatgagtcttcttccgagaaataaagcttgtttgttctcccctgg

SEQ ID NO: 286319 - DNA, 120 bp, Artificial Sequence
  ENSG00000130561_13 (sequence is synthesized)
agagaagagacgacctccaccttgtctctgtgggacagacctcttcccatagggctggcacggctggggtaccatctgcatgtgggatggaggtcaaaggttgatcatttttggggaaaa

SEQ ID NO: 286320 - DNA, 120 bp, Artificial Sequence
  ENSG00000130561_14 (sequence is synthesized)
aaaagaaaacaagaaaatgacagggaagttagcaacctccagggctcacgtaagccccgaaaagctcccgggtttcccctttgttgaagttttgttgttgttgtttgtttgtttgtttgt

SEQ ID NO: 286321 - DNA, 88 bp, Artificial Sequence
  ENSG00000130561_15 (sequence is synthesized)
ttgtttgtttgtttgtttgttttttgtggtaaaatgtacacaacatgaagtttgccattttaaccaatggagcctcgctctgtccccc

SEQ ID NO: 286322 - DNA, 120 bp, Artificial Sequence
  ENSG00000130561_16 (sequence is synthesized)
cggcccattttaaccacttttaaatgtaccattcagtggcttaagtacattccgaatgttgtgtagccttcaccgctgtctatacccaaaactttcccattgcctgagcaggaactctac

SEQ ID NO: 286323 - DNA, 120 bp, Artificial Sequence
  ENSG00000130561_17 (sequence is synthesized)
aaccattgagcctaccgctccatccttcccattctcccaccccctgtgctgttttttttttacctaaacaagatttccgcctggcccttcgcactgtctccttgtgccccatgtacacat

SEQ ID NO: 286324 - DNA, 120 bp, Artificial Sequence
  ENSG00000130561_18 (sequence is synthesized)
ctctggaggcgcaggatagtgagctgcagtaatggagctcgcatgtatatggcagctattccatgaggcccttgacgccctcacaccttagccttgctgacaggaggcagagctgggaat

SEQ ID NO: 286325 - DNA, 120 bp, Artificial Sequence
  ENSG00000130561_19 (sequence is synthesized)
ccacggagcctaaggggctaagcttggccctcgggatgttgcctggccccacagcttcccccacagggaagggaccaggacccagacccccaggctcttccaccgtcagggctgcctcag

SEQ ID NO: 286326 - DNA, 120 bp, Artificial Sequence
  ENSG00000130561_20 (sequence is synthesized)
gctctgaccagtgtcgttgccctcttcccgtccaccctgtctccatggggagcattcctggagaatctccatgtgacagtggggagagaacagaagcctccctaaagcggcctgggtgcc

SEQ ID NO: 286327 - DNA, 120 bp, Artificial Sequence
  ENSG00000130561_21 (sequence is synthesized)
cagccccagcccttaactacatgggtgccttgcaaggaagcttgtttctaggataaagcaccaacatgcgtaagtgactggcctgttttcacagcctggagctggtcagcatggtcctta

SEQ ID NO: 286328 - DNA, 120 bp, Artificial Sequence
  ENSG00000130561_22 (sequence is synthesized)
gaggaggacggaactggcttgcgttccacccactggctgtcccgagggactggggaaggaaggggcgctgcttttcacatacctgccccccagctgtccttgtcctgtccacctccatgg

SEQ ID NO: 286329 - DNA, 120 bp, Artificial Sequence
  ENSG00000130561_23 (sequence is synthesized)
gccttgttcactcatggagcatcaatagctgtggtatcccaaattcttcacttcctgggaaatttaagttttgcagaaaccatgtgggatggcagtgtcacctgtgatgtcatctcttag

SEQ ID NO: 286330 - DNA, 120 bp, Artificial Sequence
  ENSG00000130561_24 (sequence is synthesized)
gggtgtcatggtgggaaaaggtgagagctgctggccaaggctggctctggttcctctggtcagcagtcagccatttgtgcactgtgtgtatacacgtgtgtgggtgtgccaggggctgtg

SEQ ID NO: 286331 - DNA, 120 bp, Artificial Sequence
  ENSG00000130561_25 (sequence is synthesized)
ttacacgggctctgctgggtgggatgccagcacttggctttcccagtggtttcctttcacttcactcatcctgcccccataacctcctgacccctggcctcctccgatgtgatgatcgga

SEQ ID NO: 286332 - DNA, 120 bp, Artificial Sequence
  ENSG00000130561_26 (sequence is synthesized)
actctgttcccctccccagcttcccacagatgggtggaatgtgtttcaggcccttccttagaagaaatgtattgctatcacttcatcttccttaaattctgccgcttttattccagtgaa

SEQ ID NO: 286333 - DNA, 120 bp, Artificial Sequence
  ENSG00000130561_27 (sequence is synthesized)
agcgcagtgagtagctgttggggtttccgtttcctgggcgtctcagccttctgtgtcaagtttctcgccgtttattgctgaagaaggaactagaatgttcagctagctcgccagccttcc

SEQ ID NO: 286334 - DNA, 120 bp, Artificial Sequence
  ENSG00000130561_28 (sequence is synthesized)
acttccttcctctttctcccttcgagggctgcacagaaagttagcatcttagctctgcatctaccacacccctctgtgcccatcttacaggagttctgaggattaatgcaagccaaagaa

SEQ ID NO: 286335 - DNA, 120 bp, Artificial Sequence
  ENSG00000130561_29 (sequence is synthesized)
atttatccttggaatgaattgttaggaatttggtactatttccacctcccagaagatggtcaaatgaactgtcagcccaggctaggattccctatcttttgatctcaaattgaaatctta

SEQ ID NO: 286336 - DNA, 120 bp, Artificial Sequence
  ENSG00000130561_30 (sequence is synthesized)
taccagtgacaactggattagaatatatctgttcttagcctgttgttgtgaatgacttttcccctttgttagaatcaaaaacaaatgagaatcctgccatggttcctttatgctggcctg

SEQ ID NO: 286337 - DNA, 120 bp, Artificial Sequence
  ENSG00000130561_31 (sequence is synthesized)
agagacctgcccagctttgctgtgtgccacaaagtcaaatagattcatttaatacatggcttggagtggggggcgatgatctcccacctccagccccccgagaggatagctcgaccaggt

SEQ ID NO: 286338 - DNA, 120 bp, Artificial Sequence
  ENSG00000130561_32 (sequence is synthesized)
cttaactctttgccttgctggcatgttctaagcaccgttgtatgtaaaaaatattatcagggttagaggaaggttagggtaggggaatgatgaaagacaactgattccttaagataatat

SEQ ID NO: 286339 - DNA, 67 bp, Artificial Sequence
  ENSG00000130561_33 (sequence is synthesized)
acccaggttcgagccattctcctgactcagtctcccaagtagctggaattacaggagcccgccacca

SEQ ID NO: 286340 - DNA, 89 bp, Artificial Sequence
  ENSG00000130561_34 (sequence is synthesized)
tgcaacctccaccacccaggttcgagccattctcctgactcagtctcccaagtagctggaattacaggagccttttttttttgagacgg

SEQ ID NO: 286341 - DNA, 120 bp, Artificial Sequence
  ENSG00000130561_35 (sequence is synthesized)
gcacctggcctatatgggaatatttaaaaggcaactttaggagaaactattactgttattcaaaacagattcaaactgtaggtctacaagggagggagacaggaaagaaccaccactcac

SEQ ID NO: 286342 - DNA, 120 bp, Artificial Sequence
  ENSG00000130561_36 (sequence is synthesized)
tgcctcctttctgccaagattgggctctgttctgcctttaggggatcctcgcacatccctgtgccctggaggggtcttggccctggttcacctttcctcatgtgctcagcaacatgggag

SEQ ID NO: 286343 - DNA, 120 bp, Artificial Sequence
  ENSG00000130561_37 (sequence is synthesized)
caaaggatcctggctgagttttcccctaatatgtattccatcacctggtcctctttcaaagtgttgggtgcattttgggtcaaagattcccaggaaactggaaagcattccaaagtcccc

SEQ ID NO: 286344 - DNA, 120 bp, Artificial Sequence
  ENSG00000130561_38 (sequence is synthesized)
caaaggctggaggagcctgggagctggactggaccatgctgacaagtctgaagctagaggccactcagaaagctgcagagcaggagccatcgtcccagagccctgtggcttctggggctt

SEQ ID NO: 286345 - DNA, 120 bp, Artificial Sequence
  ENSG00000130561_39 (sequence is synthesized)
tagtgggcaggcttccacggaaccaggacagacctgactcccaagctgctccccaccatccaaacccacatcctgaagctctggggagtggccccagagccttggcatagtcctttggca

SEQ ID NO: 286346 - DNA, 120 bp, Artificial Sequence
  ENSG00000130561_40 (sequence is synthesized)
agctctgcacaaacacaaaaagtccatcctctgagcccaaccccaagggccctcttcctattccagccatctttacaatgctgtttctgcttttttcaatgctcaaattacgctcattaa

SEQ ID NO: 286347 - DNA, 120 bp, Artificial Sequence
  ENSG00000130561_41 (sequence is synthesized)
gagaggttccaccaggacccagatggtaggatgtgggccaccttgggctctggcagatttctgtaaagagcttcctgtagacactggaggcaggataggggacagctgcttttacctatc

SEQ ID NO: 286348 - DNA, 120 bp, Artificial Sequence
  ENSG00000130561_42 (sequence is synthesized)
cagggaaacttgattagggaaaggaagtcctttcccagagaggcagttcagacttccagctgtctcaggacagccttagaatggtcctgatgctggccacaccccaccttgttctggcta

SEQ ID NO: 286349 - DNA, 120 bp, Artificial Sequence
  ENSG00000130561_43 (sequence is synthesized)
ggcacaggatggagggtgtgcttccggcacgaatgggctctgctgtcagagagtgtgcagccacgtgactgtgggcacacttcccgtctggaaaatggggatcttggagcacctgcttgg

SEQ ID NO: 286350 - DNA, 120 bp, Artificial Sequence
  ENSG00000130561_44 (sequence is synthesized)
tatggggttgatgagggtaaggtgagagttttgaggacaggccttagcacttggcctggcacacagcatgcacgtgagtggaggagccaactctccagccgcagaggctgcttcatgatc

SEQ ID NO: 286351 - DNA, 120 bp, Artificial Sequence
  ENSG00000130561_45 (sequence is synthesized)
ctggccatgctgccgtgtgtctgcctggagaaacacacattgctgtgtccccagctggatcccagacccgcctgttggcacagggtctccgccatctgtcagatgttgagaaatctatac

SEQ ID NO: 286352 - DNA, 120 bp, Artificial Sequence
  ENSG00000130561_46 (sequence is synthesized)
cccgactgatgatgaagaagatccagtagagaaagagcatgtgctgctttggacccaagctattcggtctgtgtgatccacaaattgtgggtccctgcgttgcccctctagacaacttac

SEQ ID NO: 286353 - DNA, 120 bp, Artificial Sequence
  ENSG00000130561_47 (sequence is synthesized)
cacacagtcacactgtgacccccttatagtgacagtttttggtgacaagaggctttctggcctggactcgttgctgacaccaaccagaaggttctgcaggccaccgtgtggttcacaaag

SEQ ID NO: 286354 - DNA, 120 bp, Artificial Sequence
  ENSG00000130561_48 (sequence is synthesized)
tctcaggaggaggctgtggtctctgactcttgagccagtttgtctcattaactccatagaacattctagaaattcagcaattcagaataggctgagttgcttgaagaaatatcctcctgt

SEQ ID NO: 286355 - DNA, 120 bp, Artificial Sequence
  ENSG00000130561_49 (sequence is synthesized)
aattcagcaattcagaataggctgagttgcttgaagaaatatcctcctgttgctgccagcccaccctgagatttcacaagcactgttctgcttctcgtaagtcaagttcccaggctcttg

SEQ ID NO: 286356 - DNA, 120 bp, Artificial Sequence
  ENSG00000130561_50 (sequence is synthesized)
aacccaccttcccaggaggtccatcaggggatgtggatcctggaaaatgcctaatgtcaaataggggctcatggggtccatggcagctttgatggttataaatctcctctgttcttcttc

SEQ ID NO: 286357 - DNA, 120 bp, Artificial Sequence
  ENSG00000130561_51 (sequence is synthesized)
tgaacttctaggactttggaagctcagtgagttcaccagtccctggagaacctccatgacggcatgcctgcctcgaatggaaaggctgcccatctgctcttcaccctcctctgctctcca

SEQ ID NO: 286358 - DNA, 120 bp, Artificial Sequence
  ENSG00000130561_52 (sequence is synthesized)
ccgcatctcagagcatgggagtggccaggtgtaagagattccatgtgatctacaaggtgaatagtctggggggaagggagggcccatctgttcagcgctgagccgggtagattatccacc

SEQ ID NO: 286359 - DNA, 120 bp, Artificial Sequence
  ENSG00000130561_53 (sequence is synthesized)
ttcagctggagtctgcaagatgtagcatccttgctcttggacagggacaatctcgtgaggttttatcatgaatgatttaagagcagaagctctgctgtcaacagacctggatttagaatt

SEQ ID NO: 286360 - DNA, 120 bp, Artificial Sequence
  ENSG00000130561_54 (sequence is synthesized)
aaagatgatttaggtaaaaacttaattttagagcacgaggattttgcatttcatttggaaacaaaaggcctcatgtttcatttgaaagcattaacagacatttaaaagaagataattttt

SEQ ID NO: 286361 - DNA, 120 bp, Artificial Sequence
  ENSG00000130561_55 (sequence is synthesized)
cccagtctggagtgcagtggtgtgatcaagcttactacagcctcaacctcctgggctcaacccaccctcctacctcagcttctgaagtagctggaactacaggcataccaccacccttag

SEQ ID NO: 286362 - DNA, 120 bp, Artificial Sequence
  ENSG00000130561_56 (sequence is synthesized)
agctggaactacaggcataccaccacccttagctaatgtttttgatttttagtagagatgaggtcttgccatgttgctcaggctagtcttgaactcctgagctcaagtgatctttctgcc

SEQ ID NO: 286363 - DNA, 70 bp, Artificial Sequence
  ENSG00000130561_57 (sequence is synthesized)
ggctagtcttgaactcctgagctcaagtgatctttctgcctcagataactgtttttttttggggtttttt

SEQ ID NO: 286364 - DNA, 120 bp, Artificial Sequence
  ENSG00000130561_58 (sequence is synthesized)
tcacggcgcccggcctgaagataactatttttgacagtggcagttatggtaagaatacagaaaatactagaaaagagggtcaggctgggttcctgacacctcagctcatttgaattataa

SEQ ID NO: 286365 - DNA, 120 bp, Artificial Sequence
  ENSG00000130561_59 (sequence is synthesized)
atctactggctcttgtatggatgcgaaatgatgcaatagttgtatgactctgaaaacatataaaaaccactagactgtcgactgtgaaaaggtaaattgtatgatatatgaatttgatct

SEQ ID NO: 286366 - DNA, 120 bp, Artificial Sequence
  ENSG00000130561_60 (sequence is synthesized)
ttctgaagaaacattctctgcatcgaggcagcttagttgacgggaaagaaaaacagatctgtctaaatgagaactctccgtaggtataggaataagggatattttaagtaaaagtggtat

SEQ ID NO: 286367 - DNA, 120 bp, Artificial Sequence
  ENSG00000130561_61 (sequence is synthesized)
aaacaagcagggtttatttttctcatactttacaaatagcttttctatattggtagtgaaatgccgtttaaacattagaatgagcccccactattcattttaggttttgtctcaacagta

SEQ ID NO: 286368 - DNA, 120 bp, Artificial Sequence
  ENSG00000130561_62 (sequence is synthesized)
ctttgtttcaaaatagctcttccaaatactttggattcagatcctcaatgaacttttccaaaactgtcccttggagaaaaatgtagtccagctatatgttttcagttcatttatgcttgt

SEQ ID NO: 286369 - DNA, 120 bp, Artificial Sequence
  ENSG00000130561_63 (sequence is synthesized)
gtcattaaaatgttactttttcatggtgtgggattaagatgctttctggttcctttcaaggacattaaaaagatagtcacttgaggagatgtcatagtttatgttgggttgttttctgga

SEQ ID NO: 286370 - DNA, 84 bp, Artificial Sequence
  ENSG00000130561_64 (sequence is synthesized)
ttgaggagatgtcatagtttatgttgggttgttttctggaactttgagtagactttatgccttaattttttttttttgagacat

SEQ ID NO: 286371 - DNA, 77 bp, Artificial Sequence
  ENSG00000130561_65 (sequence is synthesized)
ttaatttttttaaattcttttccatatacaactttcacgttccagtcattatggccttaacagtgaacatatcacaa

SEQ ID NO: 286372 - DNA, 120 bp, Artificial Sequence
  ENSG00000130561_66 (sequence is synthesized)
cgttccagtcattatggccttaacagtgaacatatcacaatgtcaggatgaaacaatgatcttttgtactgtgagatttctgggagcaaaggttaagacaaatcaccccatggttacaaa

SEQ ID NO: 286373 - DNA, 120 bp, Artificial Sequence
  ENSG00000130561_67 (sequence is synthesized)
attctgatttctagagatatgagatagatatgagatagatgagatttctagagataaatgtcatctctcctgtcttctctgcctagttctcggctccctgagtctaggctggtaggattc

SEQ ID NO: 286374 - DNA, 120 bp, Artificial Sequence
  ENSG00000130561_68 (sequence is synthesized)
taagcagagaaagcataagctatatgtagttaagccctgctggagcctggggaccaagtaatttgtgtgtaataagtgctgtgacatgctaccaagtttttattgtcccctgtcaagggc

SEQ ID NO: 286375 - DNA, 120 bp, Artificial Sequence
  ENSG00000130561_69 (sequence is synthesized)
atctttactgaatccgaagatgctgatttgattcttccttgttgtctacctctgcaaggctgatggtcccgcttagtgtaatttcttcgctgagcactgtgggccgcagggtatttcttg

SEQ ID NO: 286376 - DNA, 120 bp, Artificial Sequence
  ENSG00000130561_70 (sequence is synthesized)
ctcaggggatgttttgacaagctagcctctctagggcccctgtacgtagcgaccctcatagacactccctcccagtgctggcttccaggtgggcaccagaggcgagagtaggggctcacc

SEQ ID NO: 286377 - DNA, 120 bp, Artificial Sequence
  ENSG00000130561_71 (sequence is synthesized)
atcaaatcgccgctgtgctccccaaaactaggtgggcagaaagctaaaaaagtacaaaaaccattcaaattaatagcagttagtctggggatacaacacatgtgaaaacataactcaaca

SEQ ID NO: 286378 - DNA, 120 bp, Artificial Sequence
  ENSG00000130561_72 (sequence is synthesized)
acaacaaaatcaatatgttaacagaaattgaaaactttgcggctgggggttggtcctcaagctttaatgcacactctaaccctggggtgctggtgaacgtcaagtcccaggtctcaggcc

SEQ ID NO: 286379 - DNA, 120 bp, Artificial Sequence
  ENSG00000130561_73 (sequence is synthesized)
tctgaagcctgacagatggaggtgccagggtgcacatgctcacggcaccctggcgaccctgacctcaatggggtcccgaggacatggaaggagaaatactttgaaaggcgaagcaactgg

SEQ ID NO: 286380 - DNA, 71 bp, Artificial Sequence
  ENSG00000130561_74 (sequence is synthesized)
gacatggaaggagaaatactttgaaaggcgaagcaactggctgggcagggaggccaaggcgggcaccccgt

SEQ ID NO: 286381 - DNA, 120 bp, Artificial Sequence
  ENSG00000130561_75 (sequence is synthesized)
tgccatctcaaataaataaataagaaaggagaagcgacatcagagggggcaaggctgatcagggaaagcatcctagagttgagactgggggggtttcatgtgaggaggtgaaggctgtgg

SEQ ID NO: 286382 - DNA, 74 bp, Artificial Sequence
  ENSG00000130561_76 (sequence is synthesized)
gagactgggggggtttcatgtgaggaggtgaaggctgtggcacattgtaaaggaagcagtgatttaaaatgcaa

SEQ ID NO: 286383 - DNA, 80 bp, Artificial Sequence
  ENSG00000130561_77 (sequence is synthesized)
gagtttgagaccagcctggccaacatagttgaaaccccttctctactacagatacaaaaattagccaggcataacacgag

SEQ ID NO: 286384 - DNA, 120 bp, Artificial Sequence
  ENSG00000130561_78 (sequence is synthesized)
gaaaccaggaggcaaaggttgcagtgagcagagattgtggcactgcattccagcctgggtgacagagagagacagtctcaaataaaataaaataataaaataaaatataaaataaataaa

SEQ ID NO: 286385 - DNA, 120 bp, Artificial Sequence
  ENSG00000130561_79 (sequence is synthesized)
gtggagggaaaccatcatcagagaggagagaccagcgtgtaccctgggaggccgcagggaaagtgcacgtgttgggggaccagtgctgaccaccggactcccgtcttccccttgcagtgg

SEQ ID NO: 286386 - DNA, 120 bp, Artificial Sequence
  ENSG00000130561_80 (sequence is synthesized)
atgtgccactggaatacgtcagctatggggccatcagcattgagggggcatggctgaaatggggccccaaacggccccctctgtcctctccaccttcctcctgggtgccctgctcctctc

SEQ ID NO: 286387 - DNA, 120 bp, Artificial Sequence
  ENSG00000130561_81 (sequence is synthesized)
tggaccaggaggcatctggtttgagccccgaaagcccaagtccttgaccagagaagggcgcctgttctcagggaaagccactgcacaggacagctgtcaaaccacgtggtctctgggcac

SEQ ID NO: 286388 - DNA, 120 bp, Artificial Sequence
  ENSG00000130561_82 (sequence is synthesized)
ggcaaaattctcaaccaacagctaccacgcacttggcggggccgcctctcgtgctttatatttgagaaatatgtgcttcgtgtcttttttagaaggtgtagtgaacttcatacaattctt

SEQ ID NO: 286389 - DNA, 120 bp, Artificial Sequence
  ENSG00000130561_83 (sequence is synthesized)
ctggtctactgggcgcacacttcagtgtatgtcactctgacctgcgccttccgctatggccaagaggacattgacgtgatcggcttgaccttccgcagggacctgtacttctcccgggtc

SEQ ID NO: 286390 - DNA, 120 bp, Artificial Sequence
  ENSG00000130561_84 (sequence is synthesized)
gttgatcctgatcttgtgaagggaaagaaaggtgagatgaagccccttgtctcaggctggtttctgggcggagtggactgctctctgggcggctctgggaaggggcatttacatggaagg

SEQ ID NO: 286391 - DNA, 120 bp, Artificial Sequence
  ENSG00000130561_85 (sequence is synthesized)
agagacaggaaggcagaggcagcgctcttgcacatggaaccagtgccaggcccactgacccacactcctgtacctaattcacgtgacataggtcctgttgacaccagagctcactcgctc

SEQ ID NO: 286392 - DNA, 120 bp, Artificial Sequence
  ENSG00000130584_0 (sequence is synthesized)
ccctcccggcggcggcggcgatcaccggcgccggcccggcggccgcggcgcccgccctcgcccgcgccccatggggtcacagagtctgtagaagaggcgacaccagggcttccaaatgaa

SEQ ID NO: 286393 - DNA, 120 bp, Artificial Sequence
  ENSG00000130584_1 (sequence is synthesized)
tctgtagaagaggcgacaccagggcttccaaatgaacaaccgaaaggaagatatggaaatcacgtcccactaccggcacctgctgcgggagctcaacgagcagaggcagcacggcgtcct

SEQ ID NO: 286394 - DNA, 120 bp, Artificial Sequence
  ENSG00000130584_2 (sequence is synthesized)
gtgcgacgtctgcgtggtcgtggagggcaaggtcttcaaggcgcacaagaacgtcctgctgggcagcagccgctacttcaagacgctctactgccaggtgcagaagacgtcggagcaggc

SEQ ID NO: 286395 - DNA, 120 bp, Artificial Sequence
  ENSG00000130584_3 (sequence is synthesized)
cacggtcacgcacctggacatcgtcacggcccagggcttcaaggccatcatcgacttcatgtactcagcgcacctggcgctcaccagcaggaacgtcatcgaggtgatgtcagccgccag

SEQ ID NO: 286396 - DNA, 120 bp, Artificial Sequence
  ENSG00000130584_4 (sequence is synthesized)
cttcctgcagatgacggacatcgtgcaagcctgccacgacttcatcaaggcggcgctggacatcagcatcaagtcggacgcctcagatgagcttgcggagttcgagatcggcgcctcgtc

SEQ ID NO: 286397 - DNA, 120 bp, Artificial Sequence
  ENSG00000130584_5 (sequence is synthesized)
cagcagcagcacggaagctctcatctcggccgtgatggctgggaggagcatctccccgtggctggcacggcgaacgagtcctgccaattcttccggagactcggccatcgccagctgtca

SEQ ID NO: 286398 - DNA, 120 bp, Artificial Sequence
  ENSG00000130584_6 (sequence is synthesized)
cgacggagggagcagctacgggaaagaggatcaggagcccaaggccgatggccctgatgatgtttcttcacagcctctatggcctggagacgtgggctacgggcctctgcgcatcaagga

SEQ ID NO: 286399 - DNA, 120 bp, Artificial Sequence
  ENSG00000130584_7 (sequence is synthesized)
agagcaggtttcaccgtctcagtacggagggagcgagctgccttctgccaaggacggtgcagtacagaactctttctcagagcagagtgctggtgatgcctggcagcccacgggccgaag

SEQ ID NO: 286400 - DNA, 120 bp, Artificial Sequence
  ENSG00000130584_8 (sequence is synthesized)
gaagaatcggaaaaacaaagagaccgtccggcacatcacacagcaggtggaagatgacagccgggccagctccccggtgccgtccttcctgccgacgtcggggtggccgttcagcagccg

SEQ ID NO: 286401 - DNA, 120 bp, Artificial Sequence
  ENSG00000130584_9 (sequence is synthesized)
agactcaaatgcggacctgtccgtcaccgaagccagcagctccgacagccgaggagagagggccgagctctatgcacaggtggaggagggtctcctgggaggagaagccagctatctggg

SEQ ID NO: 286402 - DNA, 120 bp, Artificial Sequence
  ENSG00000130584_10 (sequence is synthesized)
ccctcccctcaccccagagaaggacgacgccctgcatcaggccaccgcggtggccaacctgcgcgcggcgctcatgagtaagaacagcctgctgtcgctgaaggccgacgtgctggggga

SEQ ID NO: 286403 - DNA, 120 bp, Artificial Sequence
  ENSG00000130584_11 (sequence is synthesized)
tgacggctccctgctgttcgagtacctgcccagaggggcccactcgctgtccctgaatgagttcacggtgatcaggaagaagttcaagtgtccgtactgcagcttctcggccatgcacca

SEQ ID NO: 286404 - DNA, 120 bp, Artificial Sequence
  ENSG00000130584_12 (sequence is synthesized)
gtgcatcctcaagcgacacatgcgctcgcacacgggagagcggccctacccctgcgagatctgcgggaagaagttcacgcggcgcgagcacatgaagcgccacacgctggtccacagcaa

SEQ ID NO: 286405 - DNA, 120 bp, Artificial Sequence
  ENSG00000130584_13 (sequence is synthesized)
ggacaagaagtatgtgtgcaaggtgtgcagccgcgtcttcatgtccgccgccagcgtgggcatcaggcatggctccaggcgccacggtgtgtgcaccgactgtgctggccgcggcatggc

SEQ ID NO: 286406 - DNA, 120 bp, Artificial Sequence
  ENSG00000130584_14 (sequence is synthesized)
cgggcccctggaccatggcggcggaggcggcgagggctctccagaggcgctgttcccaggcgacgggccctatctggaggaccctgaggacccacgaggggaggcggaggagctgggcga

SEQ ID NO: 286407 - DNA, 120 bp, Artificial Sequence
  ENSG00000130584_15 (sequence is synthesized)
ggacgacgagggcctggcccctgaggatgcgctgttggcggacgacaaggatgaggaagactcgccgcggccgcgcagccccccaggaggccctgacaaggacttcgcctggctctccta

SEQ ID NO: 286408 - DNA, 120 bp, Artificial Sequence
  ENSG00000130584_16 (sequence is synthesized)
ggcccgcccgccggcagggtcggtggctgcctcgctccgtccacccgtgtgtgtgtccggtgggtctccactgcggggccagggccacgctcacccctctcgcggcccctcctctgcttc

SEQ ID NO: 286409 - DNA, 120 bp, Artificial Sequence
  ENSG00000130584_17 (sequence is synthesized)
cccctgaacccaccccccacggaaaccagccctgcgggctaagcaggtgcgaccccagcaagaggggtgctctgggaccagacatgaagtgagttgggggagggcacagggtgggtttga

SEQ ID NO: 286410 - DNA, 120 bp, Artificial Sequence
  ENSG00000130584_18 (sequence is synthesized)
gtgaagggagagcacggtcctaagtccccagcaggtggtgcgggtgtgtgagtggcccctgtgatggccagcctggcttggacacgtgatgggcctgtggccgggtccagtgggcactgg

SEQ ID NO: 286411 - DNA, 120 bp, Artificial Sequence
  ENSG00000130584_19 (sequence is synthesized)
gcggggtggtgtgttcggcccagaggcccctggcctgagcaggtgcagagttttacagacacccggtcagcccggctggagcccgccctcccctcccctagcagccaggtcactgcctgt

SEQ ID NO: 286412 - DNA, 120 bp, Artificial Sequence
  ENSG00000130584_20 (sequence is synthesized)
ggctgcagccgtggcccgtggtgcagccgtggcccatggcagcctgtagaatccaggtgcacagagagccctgccaccgtcttacctctgggctttggtgcttaacacacaacacagctg

SEQ ID NO: 286413 - DNA, 120 bp, Artificial Sequence
  ENSG00000130584_21 (sequence is synthesized)
ccaggtgctatcttaggtggacacagccctgggggctccttccaggaggggaccctcagccctgtgccccccaccacttcaggccacaccaggttccctctgcaagggcctcggctcagt

SEQ ID NO: 286414 - DNA, 120 bp, Artificial Sequence
  ENSG00000130584_22 (sequence is synthesized)
cgtgtgcacttcctcggagagccttgggctgccacgtccaccccgggctctgcccgtcctgttctgcccatggcccagcccggccgctcctgctgacccctcctggacgggctggagctg

SEQ ID NO: 286415 - DNA, 120 bp, Artificial Sequence
  ENSG00000130584_23 (sequence is synthesized)
ggctcctgcctttgctgctaacactggaggcggtgttcctaactgcagtgtgctgcttacacctccccgcgtgggtaaccaaatttttaagtagtcagagacatatcgaggtagttacat

SEQ ID NO: 286416 - DNA, 120 bp, Artificial Sequence
  ENSG00000130584_24 (sequence is synthesized)
aaaattattttgtttggcattatttttctcactcgaagaaactatatagggttgtttttcctttagcttgtgctcaagtcctcttgctgtgttttcagaagcactcacatgttctttctt

SEQ ID NO: 286417 - DNA, 120 bp, Artificial Sequence
  ENSG00000130584_25 (sequence is synthesized)
ttcctgagtgaaaagcaaaggtcccacggtgtgtgctgtggtgcaccgcctggctttgggggtcccggaggcaggctgcctagactcacagcctcgggaccgttgccacggcctgtcttc

SEQ ID NO: 286418 - DNA, 120 bp, Artificial Sequence
  ENSG00000130584_26 (sequence is synthesized)
tcgttcaggcctgcctctgacagcactcaccatgaggacattccatccttcaccccctcctctggcacaggccaccactgcggtgctgtgccttcagatgggaggtgggcgcggtggcct

SEQ ID NO: 286419 - DNA, 120 bp, Artificial Sequence
  ENSG00000130584_27 (sequence is synthesized)
cctccttccctccaggacctgcccgtgtgaagaccccccggagtgctgagcttcagggctgcgtggaaagagtttttactctctttttctagcctgtataccaggcttttccccacattg

SEQ ID NO: 286420 - DNA, 120 bp, Artificial Sequence
  ENSG00000130584_28 (sequence is synthesized)
tcaggtagagcaccagcttccctgaccgctgctgctcggggagggctggggctggccgggggtcctgtggaggagtacatggaggactccaggtacagcgcaggagtcacggcttttgtt

SEQ ID NO: 286421 - DNA, 120 bp, Artificial Sequence
  ENSG00000130584_29 (sequence is synthesized)
ttttgacattggcccccggttctaccaatgacagggtgccctggctggagctgtcatcacacacacccctcagctcggaggctgtgggctcctcaaagctggagaaagaggccaagattt

SEQ ID NO: 286422 - DNA, 120 bp, Artificial Sequence
  ENSG00000130584_30 (sequence is synthesized)
ttctgcacacggagtgtggggataggagccgggccaagcgctggcccctcagcggtgagccctgcccactcttaccgagcaaggtgggtggctctggcacgagtcccccagggggagagc

SEQ ID NO: 286423 - DNA, 120 bp, Artificial Sequence
  ENSG00000130584_31 (sequence is synthesized)
atggctaccagggagctgcagcggagccctccagccctcaccccaggccagccccaccccggcctctttgagaattctcagaactttgtacctttcccctgatttttaaaccctttttct

SEQ ID NO: 286424 - DNA, 120 bp, Artificial Sequence
  ENSG00000130584_32 (sequence is synthesized)
aaacagactgactttcttacaaaatgcatttggaaaccagacctttgctacccaccaatgtctctgggttttgtaccagtccctgctctcaggccaccctgcccaggacccaggcccgcc

SEQ ID NO: 286425 - DNA, 120 bp, Artificial Sequence
  ENSG00000130584_33 (sequence is synthesized)
tccccctccacactcaggatgtcctgctccatctggccggctcactccgtgtggcctgcctttgctgaccgttttggggttccccgccggagctacaggggcattttcttccctaaaacc

SEQ ID NO: 286426 - DNA, 120 bp, Artificial Sequence
  ENSG00000130584_34 (sequence is synthesized)
aacagtgtcccactgacctccccaagtgtttgctgcgtggcagatttcctgttcttgttcgcagtttgccgactgaagagtgtgggatttccgaggcccaggtgagcacgtccatctcag

SEQ ID NO: 286427 - DNA, 120 bp, Artificial Sequence
  ENSG00000130584_35 (sequence is synthesized)
gaggcgtggagggaaaagacatgtcatgaagggttttttttatgtgactgatttttttttaaatcgatgttcaaactaataaatatttttttatgaagaggaaaaatgtgtagattacat

SEQ ID NO: 286428 - DNA, 120 bp, Artificial Sequence
  ENSG00000130584_36 (sequence is synthesized)
ttcacattttgtatttttgtttgtgtctgtttgtattttggtgtttacaacaccaaagtgggaaatacagtccattggggatggtgttatttgggggcggggagggggcagggacaccac

SEQ ID NO: 286429 - DNA, 120 bp, Artificial Sequence
  ENSG00000130584_37 (sequence is synthesized)
gatttttctgtcaagctctggatcctgaccaggttgtacactggggctctctgagctttgggacacaggacactgccagggctacgtagggaactgactcagaagacgcagcttactgct

SEQ ID NO: 286430 - DNA, 120 bp, Artificial Sequence
  ENSG00000130584_38 (sequence is synthesized)
tccaactttgcacatcttcctctttaaaaaactgagaaaatgcaaaaactggaactttttgcaatattataaaagaagtaatcttattttagctcattctgtgacatgtgcgactcttaa

SEQ ID NO: 286431 - DNA, 120 bp, Artificial Sequence
  ENSG00000130584_39 (sequence is synthesized)
gaaagccatacttaatggtggtggttttttttagatcttatattgtgttttgtatgcagcccttttagaactacttgtagtgagggtgctgtgtgtgcttttcttaaatatttatttttt

SEQ ID NO: 286432 - DNA, 120 bp, Artificial Sequence
  ENSG00000130584_40 (sequence is synthesized)
tcaacatgctttcaacctgtcaacaaaaacaaaacacacaaaaaaagggcagtgtttgaagattgttgatttttttctggggataatctatattatattgacttcctattacttattata

SEQ ID NO: 286433 - DNA, 120 bp, Artificial Sequence
  ENSG00000130584_41 (sequence is synthesized)
aacctgtgtttgtattggagatgtgtctactattgggggaagaggttctcgtaatcgctcggtgggaaatcatggctctgccgtcctgcctctctgtggccgtgggttcacgtggcctct

SEQ ID NO: 286434 - DNA, 120 bp, Artificial Sequence
  ENSG00000130584_42 (sequence is synthesized)
gcggtgagtctccaagtttctgcctaggcgcctgtgcgtttcctttctgtgacgggattagcttagacatccttgcaaagcgatcactttcaataaattgggaaattgctgctccagcag

SEQ ID NO: 286435 - DNA, 120 bp, Artificial Sequence
  ENSG00000130584_43 (sequence is synthesized)
gatgggctctcgcgtgggtcgtcctcccactggccgcactctgtgccccatggccctcctgcgccccgcccggcgtcctctcacggcctctgtctgtgctgagcttgggtaactcttgtt

SEQ ID NO: 286436 - DNA, 120 bp, Artificial Sequence
  ENSG00000130584_44 (sequence is synthesized)
ccaccctcagagccacaggatgagctctggggaaccgccagacccagcccagggagccggcacagcctcccccagctcagatggctgttgacaggctgtcttagtagtgattggacaaca

SEQ ID NO: 286437 - DNA, 120 bp, Artificial Sequence
  ENSG00000130584_45 (sequence is synthesized)
tcccagatcgacacctctcatggcgtggagagctgggcggagcagtcctcttccagagttggctcccgctggcatgagggtgggtttctgcagggcctgtggcctgtccaggatgcctga

SEQ ID NO: 286438 - DNA, 120 bp, Artificial Sequence
  ENSG00000130584_46 (sequence is synthesized)
ggagtcttcttccagcccaggcctggatggacttgcccagccctggatggacttgcccagccctgggggcagccagtgccaggacggcttggcctcgcctggagctccttgggcgctgac

SEQ ID NO: 286439 - DNA, 120 bp, Artificial Sequence
  ENSG00000130584_47 (sequence is synthesized)
agctttaccctgaggccagctaaggagctctgtgaagcaagtgacagcagcgaaggcacctcccctgctggaagtggtttgggacagaactgcgggtgcctctggtctgtgcgctggagc

SEQ ID NO: 286440 - DNA, 120 bp, Artificial Sequence
  ENSG00000130584_48 (sequence is synthesized)
cggcgtttgctttgacctcagtgctgcggccagagctttggcgtccgggtcccgggctccagctgggtgcagctgcccaggcgagagagctctcaagtgtgtgggagcaggaggggaact

SEQ ID NO: 286441 - DNA, 120 bp, Artificial Sequence
  ENSG00000130584_49 (sequence is synthesized)
gggtgaccgaacagccgcgtcggagggggatatctgcggagagctgtgactgggagccggtgtgtgcctttctgtggtcatttctcgagtcctctgccggctgctgccaggtgaaggcat

SEQ ID NO: 286442 - DNA, 120 bp, Artificial Sequence
  ENSG00000130584_50 (sequence is synthesized)
ctccatgcccagccggtgggcagctggggcgggtggacctccagcttctgcccgacggggttcagatgaccgagatcctacgggattgccaatgtgtggggacggggggctttcaggggc

SEQ ID NO: 286443 - DNA, 120 bp, Artificial Sequence
  ENSG00000130584_51 (sequence is synthesized)
tgccgacgtcggggtggccgttcagcagccgagactcaagctgtggcccaagtcaaggaaggatatttggagttgggtgtggtgttgcctgtgcctgtacttcagctacttgggaggctg

SEQ ID NO: 286444 - DNA, 120 bp, Artificial Sequence
  ENSG00000130584_52 (sequence is synthesized)
aggcgggaggatggcttgagcccaagatgtccaggctgcagtgagccgtgattgcactgctgccctccagcctggacgacagagccagaccctgtctcttaattaaaggaaagaagaaat

SEQ ID NO: 286445 - DNA, 120 bp, Artificial Sequence
  ENSG00000130584_53 (sequence is synthesized)
ggaggttcctccaggatgaagcctggaaatgaacgtgggagggcgtgagtggacagaggaggacgaaagacagcaagccgcagggtgggaggccctgaaaaatgtcgcagatgccgtgtg

SEQ ID NO: 286446 - DNA, 120 bp, Artificial Sequence
  ENSG00000130584_54 (sequence is synthesized)
tgggtggcgcagtgggagacgctgcctgcccccctggctggagggcttcctgggcagggcgggtgtggcctcttctcctgaccctggtccctcctctccgtcgctgagagatctgcgaga

SEQ ID NO: 286447 - DNA, 120 bp, Artificial Sequence
  ENSG00000130584_55 (sequence is synthesized)
gccgggagtgaacacagctcgataatacgttaacttttatcattgtggtagaacatacataatgtaaaccttaccattttaaccattttcaaatgtacatttcactggcattaaagtcac

SEQ ID NO: 286448 - DNA, 120 bp, Artificial Sequence
  ENSG00000130584_56 (sequence is synthesized)
ccgggtcgcgcaggggccgggggtctttgtgctccagagacgggctcgggcgccccctgccggcccctctgtcgccttcgtgctgaggctcgtttcgcgcaagggagatgggggcggccg

SEQ ID NO: 286449 - DNA, 120 bp, Artificial Sequence
  ENSG00000130589_0 (sequence is synthesized)
gtttgtggggcgtgggcagccgtgctggcgtggggagtcccgctgccagtttgcacacagcgccgtggagatggctgtgtgggaggccgagcagctgggtggcctccagcggggggacct

SEQ ID NO: 286450 - DNA, 120 bp, Artificial Sequence
  ENSG00000130589_1 (sequence is synthesized)
gctcacaccccctgcccctgatggcgacgggcgcacggccccccttggccagccccctggggcccagctgtactgcccggcctgcttggtcacctgccactctcaggaggccttcgagaa

SEQ ID NO: 286451 - DNA, 120 bp, Artificial Sequence
  ENSG00000130589_2 (sequence is synthesized)
ccactgcgcatcctcggagcacgcacagatggtggccttcgaccaggccctgccctgggagcaccgttccccacccccgggactctccaagttcgagctctgcccaaagcctgacctctg

SEQ ID NO: 286452 - DNA, 120 bp, Artificial Sequence
  ENSG00000130589_3 (sequence is synthesized)
tgagtatggggacgcctgcaccaaggcacactcagcacaggagctgcaggagtgggtccggcgcacgcaggctgtggagctgcgggggcaggcggcctggcaggacgggctggtgcccta

SEQ ID NO: 286453 - DNA, 120 bp, Artificial Sequence
  ENSG00000130589_4 (sequence is synthesized)
ccaggagcggctgctggccgagtaccagcgcagcagcagtgaggtccttgtgctggcagagacccttgatggagtgcgtgtcacctgcaaccagcccctgatgtaccaggcccaggagag

SEQ ID NO: 286454 - DNA, 120 bp, Artificial Sequence
  ENSG00000130589_5 (sequence is synthesized)
gaagacccagtacagctggacgtttgccgtccactctgaggagcccctgctacacgtggccctgctgaagcaggagccaggagccgacttctctctggtggctcccggcctcccgccagg

SEQ ID NO: 286455 - DNA, 120 bp, Artificial Sequence
  ENSG00000130589_6 (sequence is synthesized)
ccggctctacgcacggggtgagcgcttccgtgtgcccagctccactgccgacttccaggtgggagtgcgtgtgcaggctgcctcgttcggcacctttgagcaatgggtggtcttcgactt

SEQ ID NO: 286456 - DNA, 120 bp, Artificial Sequence
  ENSG00000130589_7 (sequence is synthesized)
tggccgccggccggtgctgctacaaaagctggggctgcagctgggccaggggcgtcgcccaggaccctgcaggaatctggcgctcggccaccctgaggagatggagcgctggcacactgg

SEQ ID NO: 286457 - DNA, 120 bp, Artificial Sequence
  ENSG00000130589_8 (sequence is synthesized)
caaccgccacgtggtgcctggcgtggagcggacggccgagcagacggccctgatggccaagtacaagggccctgccctggccctggagttcaaccgcagcagcgtggcctcgggccccat

SEQ ID NO: 286458 - DNA, 120 bp, Artificial Sequence
  ENSG00000130589_9 (sequence is synthesized)
ctcaccaaccaactatcggcagaggatgcaccagtttctctatgaggaggaggcggctcagcagcagctggtggccaagctgaccctgcggggccaggtgttcctgaagacggcattgca

SEQ ID NO: 286459 - DNA, 120 bp, Artificial Sequence
  ENSG00000130589_10 (sequence is synthesized)
gacgccagcgctgaacatgctcttcgcgcctccgggagcactgtacgcagaggtccccgtcccctcctccctgatgccagacacagaccagggcttcctgctgggccgggcggtcagcac

SEQ ID NO: 286460 - DNA, 120 bp, Artificial Sequence
  ENSG00000130589_11 (sequence is synthesized)
agccctggtggcccctgtacctgcacccgacaatacggtgttcgaggtgcggctggagaggcgggccagctcagagcaggcgctgtggctgctgcttccggcccgctgctgcttggccct

SEQ ID NO: 286461 - DNA, 120 bp, Artificial Sequence
  ENSG00000130589_12 (sequence is synthesized)
ggggctgcagcctgaggcccgcctggtcctggaggtgcagttccagattgacccgatgaccttccgcctctggcaccaggcagtggacacactgcctgaggagcagctggtggtgcccga

SEQ ID NO: 286462 - DNA, 120 bp, Artificial Sequence
  ENSG00000130589_13 (sequence is synthesized)
cttgcccacctgcgccctgcccagaccttggtctgtcccacccttgcggcgtggcaaccgcaagcaggagctggccgtggcgctcatcgcgggctggggccctggggatgggaggcgtgt

SEQ ID NO: 286463 - DNA, 120 bp, Artificial Sequence
  ENSG00000130589_14 (sequence is synthesized)
ccccccgctactcatctatggcccctttggcaccggcaagacctacacgctggccatggcctccctggaggtcatccggaggcctgaaaccaaggtgctcatctgcacacacaccaacag

SEQ ID NO: 286464 - DNA, 120 bp, Artificial Sequence
  ENSG00000130589_15 (sequence is synthesized)
tgccgccgacatctacatccgggagtatttccacagccacgtcagcggcggccaccccgaggccactcctctccgtgtgatgtacacggaccggccgctgagccagacggacccagtcac

SEQ ID NO: 286465 - DNA, 120 bp, Artificial Sequence
  ENSG00000130589_16 (sequence is synthesized)
gctgcagtactgttgcctgaccgacgaccgccaggctttccgcccgcccacacgggcagagctggcgcggcaccgcgtggtggtcaccaccacctcccaggcccgtgagctcagggtgcc

SEQ ID NO: 286466 - DNA, 120 bp, Artificial Sequence
  ENSG00000130589_17 (sequence is synthesized)
ggtcggcttcttctcccacattctcatcgatgaggcggcccagatgctggagtgcgaggccctcaccccgctggcctatgcctcgcacggcacccgcctcgtgctggcgggcgaccacat

SEQ ID NO: 286467 - DNA, 120 bp, Artificial Sequence
  ENSG00000130589_18 (sequence is synthesized)
gcaggtcacaccccggctgttcagtgtggccagggcccgggcggccgagcacacgctgctgcaccgcctcttcctgtgctaccagcaggagactcacgaggtggcgcggcagagccgcct

SEQ ID NO: 286468 - DNA, 120 bp, Artificial Sequence
  ENSG00000130589_19 (sequence is synthesized)
ggtcttccacgagaactaccgctgcacggacgccattgtcagcttcatctcgcggcacttctacgtggccaagggcaaccccatccacgccaggggcaaggttccgccccacccccggca

SEQ ID NO: 286469 - DNA, 120 bp, Artificial Sequence
  ENSG00000130589_20 (sequence is synthesized)
ctacccgctcatgttctgccacgtggcgggcagcccagaccgggacatgtccatggcgtcctggctgaatctggctgagattgcgcaggtcgtcgagaaggtgcaggaggcctacaacac

SEQ ID NO: 286470 - DNA, 120 bp, Artificial Sequence
  ENSG00000130589_21 (sequence is synthesized)
ctggcccagctgctggggcggccgcgagcagaggtgcatctgtgtcgtttcccacggtgcccaggtcagtgcactgaggcaggagctgaggaggcgggacctaggccaggtgtctgtcgg

SEQ ID NO: 286471 - DNA, 120 bp, Artificial Sequence
  ENSG00000130589_22 (sequence is synthesized)
cagttttgagatcctgccagggcggcagttccgggtcgtggtgctcagcactgtgcacacctgccagagcctgctcagccctggggcactggcccctgagttcttcaccgacgcccgcgt

SEQ ID NO: 286472 - DNA, 120 bp, Artificial Sequence
  ENSG00000130589_23 (sequence is synthesized)
gctcaacaccgtcctgacccgcgcccagtcccagctggtggtagtgggggacgccgtggccctctgctccttcggggcctgcggcaagctctgggagagcttcatccgtgagtgcgtgga

SEQ ID NO: 286473 - DNA, 120 bp, Artificial Sequence
  ENSG00000130589_24 (sequence is synthesized)
gcggcacagtgtctgccccgagggcctgtccatggagcaggtcgagcagggtgtggcgcagagacggcgctggcctccccgaggcacacaggctggggcagcggggaactgggaggctgc

SEQ ID NO: 286474 - DNA, 120 bp, Artificial Sequence
  ENSG00000130589_25 (sequence is synthesized)
cccagagccagtaggggacctggccgaggagcaggcggctgtggtgacggccatggtgaaggcagagccgggagatgaggctctgagcccagcatcccgtgacatcacggcaaccacagc

SEQ ID NO: 286475 - DNA, 120 bp, Artificial Sequence
  ENSG00000130589_26 (sequence is synthesized)
gcagacggaggctgcggcagcaccagcaggagacgcagtgaaggaagacgtggtgcccggggcctgtgcggcaggagcggctgctgcagcgggcgtggagtccacggaggctgaggatgc

SEQ ID NO: 286476 - DNA, 120 bp, Artificial Sequence
  ENSG00000130589_27 (sequence is synthesized)
agaggctgacttctggccgtgggacggggagctcaacgctgacgacgccatcctacgggagcttctggacgagagccagaaggtgatggtgaccgtcggggaggacgggctgctggacac

SEQ ID NO: 286477 - DNA, 120 bp, Artificial Sequence
  ENSG00000130589_28 (sequence is synthesized)
tgtcgccaggcccgagtccctgcagcaggcccggctgtacgagaacctgcccccggctgcgctacggaagctgctgcacgcggagcccgagcggtaccgccactgctctttcgtgccaga

SEQ ID NO: 286478 - DNA, 120 bp, Artificial Sequence
  ENSG00000130589_29 (sequence is synthesized)
gaccttcgagcgggcgtcagccatcccgctggacgatgcctcctcgggccccatccaggtcaggggccgcctggactgtgggatggccttcgccggggatgaggtgctggtgcagctcct

SEQ ID NO: 286479 - DNA, 120 bp, Artificial Sequence
  ENSG00000130589_30 (sequence is synthesized)
ttcgggagacaaggcgcccgaggggcggcttcggggccgcgtgctgggcgtgctgaagaggaagaggcacgagctggcgtttgtgtgccgcatggacacgtgggacccgcgcatcatggt

SEQ ID NO: 286480 - DNA, 120 bp, Artificial Sequence
  ENSG00000130589_31 (sequence is synthesized)
ccccatcaatggctccgtgaccaagatcttcgtggccgagctgaaggacccatcgcaggtccccatctacagcctccggaagggccggctgcagcgtgtggggcttgagaggctcaccgc

SEQ ID NO: 286481 - DNA, 120 bp, Artificial Sequence
  ENSG00000130589_32 (sequence is synthesized)
cgaggcccggcacagccggctcttctgggtccaaattgtcctgtggcggcaaggcttctactacccgctgggcatcgtccgggaggtgctgcctgaggccagcacctgggagcagggcct

SEQ ID NO: 286482 - DNA, 120 bp, Artificial Sequence
  ENSG00000130589_33 (sequence is synthesized)
cttgagggtgcccccgtcggaccaggccaccatcaccaaggtgctgcagaaataccacacggagcttggccgggttgccggccgccgagaggactgccgcgccttcttgaccttcactgt

SEQ ID NO: 286483 - DNA, 120 bp, Artificial Sequence
  ENSG00000130589_34 (sequence is synthesized)
ggacccccagggcgcctgcaacctcgatgatgccctcagtgtccgagacctgggtcccaggtgcgaggtggctgtgcacatcactgatgtggccagcttcgtgcccagggacggggtgct

SEQ ID NO: 286484 - DNA, 120 bp, Artificial Sequence
  ENSG00000130589_35 (sequence is synthesized)
ggacgtggaggcgcgaaggcagggcgctgcgttctatgcccccggcagggagccagtgcccatgctgccggccagcctctgccaggacgtcctcagcctcctgcctggccgggaccgcct

SEQ ID NO: 286485 - DNA, 120 bp, Artificial Sequence
  ENSG00000130589_36 (sequence is synthesized)
ggccatctccctgttcctcaccatggagaaggccagtggccagctgaagagcctgcgctttgcaccctccgtggtccagtctgaccgccagctgtcctacgaggaggcggaggaggtgat

SEQ ID NO: 286486 - DNA, 120 bp, Artificial Sequence
  ENSG00000130589_37 (sequence is synthesized)
caggcagcacccgggtgccggccgtgagctgccggcccgcctggactccgtggacgcctgcgtcgtggccgcgtgctacttctctcggctgctgcgccggcaccgcctgcggtccgactg

SEQ ID NO: 286487 - DNA, 120 bp, Artificial Sequence
  ENSG00000130589_38 (sequence is synthesized)
cttctatgagcagccggacgaggacggcaccctgggcttccgcgcggcccacatcatggtgaaggagtacatgattcagtttaataggctcgtggctgagttcctggtgggcagcgagtg

SEQ ID NO: 286488 - DNA, 120 bp, Artificial Sequence
  ENSG00000130589_39 (sequence is synthesized)
cacgcggacggtcacgcctctgcggtggcagccagcaccccgcagccagcagctcaaggccctgtgtgagaagcatggggaccgggtgcccctgtcactgcacctcggccaccacctgca

SEQ ID NO: 286489 - DNA, 120 bp, Artificial Sequence
  ENSG00000130589_40 (sequence is synthesized)
cggcggcgggggcagtccccccgacacgcggctgcacctcctggcctccctctggaagcaggtccagtttgctgcccgcacccaggactacgaacagatggtggacttggtcaccacgga

SEQ ID NO: 286490 - DNA, 120 bp, Artificial Sequence
  ENSG00000130589_41 (sequence is synthesized)
cgacatgcacccattcctggctcctgcaggccgcgacctccgcaaggccctggagcgctcggcgttcggccgctgcgcccggggccaccagcagcagggcggccactactcgctgcaggt

SEQ ID NO: 286491 - DNA, 120 bp, Artificial Sequence
  ENSG00000130589_42 (sequence is synthesized)
ggactggtacacgtgggccacctcgcccatccgcaggtacctggacgtggtgttgcagcggcagatcctgctggcgctgggccatgggggctctgcctactctgccagggacatcgatgg

SEQ ID NO: 286492 - DNA, 120 bp, Artificial Sequence
  ENSG00000130589_43 (sequence is synthesized)
gctctgccaggccttcagcctccagcacgcacttgcccagagctatcagcggcgggcgcgcagcctgcacctggccgtgcagctcaaggcccagcctctggacaagctgggcttcgtggt

SEQ ID NO: 286493 - DNA, 120 bp, Artificial Sequence
  ENSG00000130589_44 (sequence is synthesized)
ggacgtggaggcgggctcccgctgcttccggctgctcttccccagcaaccgggagacgctgcctgacccctgccccgtcccctacggctccctgcagctggccgagcacccccacgccct

SEQ ID NO: 286494 - DNA, 120 bp, Artificial Sequence
  ENSG00000130589_45 (sequence is synthesized)
ggcaggccggccgggcctgcggctcctgtggcggcgccgtgtctactcagcgcagggatccagcccgcccctgccactgcctggcactgtgccggacccacacaccctggccgtggagac

SEQ ID NO: 286495 - DNA, 120 bp, Artificial Sequence
  ENSG00000130589_46 (sequence is synthesized)
ggccctgtggaagcagctgctggagctggtggagctgcagcgctggccggaggcggctgctctcatccaggagaagggcgaggcgtcccagcggcgggagctggtgcaggtgcagcggag

SEQ ID NO: 286496 - DNA, 120 bp, Artificial Sequence
  ENSG00000130589_47 (sequence is synthesized)
ccactgtggccatttcctggaggtggcccgggagctgggcagtggggacaccctgcaggtgcagctcggcaccagcctgcagcacggcttcctggtaccgagccctcagctctggacggt

SEQ ID NO: 286497 - DNA, 120 bp, Artificial Sequence
  ENSG00000130589_48 (sequence is synthesized)
ggcaccgggcttcagcctctgcctggagcacgtggagcggcccggagactgcttctcaggccgtgtgtaccgggccccgagggaccggtaccgcgacgtggatgagtacgcctgcgtgtg

SEQ ID NO: 286498 - DNA, 120 bp, Artificial Sequence
  ENSG00000130589_49 (sequence is synthesized)
ggaaccattctgcgccctggagtcggccaccggcgcggttgccgagaatgactccgtcacacttcagcacctgagtgtctcctgggaggcgtcacggacgccgcaggggcagctgcaggg

SEQ ID NO: 286499 - DNA, 120 bp, Artificial Sequence
  ENSG00000130589_50 (sequence is synthesized)
cgccttccgcctggaggccgccttcctcgaggagaactgtgccgacatcaacttcagctgctgctacctctgcatccggctcgaggggctgccggctcccacggccagcccacgccctgg

SEQ ID NO: 286500 - DNA, 120 bp, Artificial Sequence
  ENSG00000130589_51 (sequence is synthesized)
gcccagcagcctcggccctggcctgaatgttgaccccggcacgtatacctgggtggcccacgggcagacgcaggactgggaccaggagcgccgggcagaccggcaggaggctcccagacg

SEQ ID NO: 286501 - DNA, 120 bp, Artificial Sequence
  ENSG00000130589_52 (sequence is synthesized)
ggtgcacctcttcgtccaccacatgggcatggagaaggttccggaagaggtgctgaggccgggcaccctgttcaccgttgagctgctgcccaagcagcttcctgatctccgcaaggagga

SEQ ID NO: 286502 - DNA, 120 bp, Artificial Sequence
  ENSG00000130589_53 (sequence is synthesized)
agccgtgcgtggactagaggaggcgtccccgctggtcaccagcatcgcactgggccggcctgtcccgcagcccctctgcagagtgatccccagcaggttcctggagcggcagacctacaa

SEQ ID NO: 286503 - DNA, 120 bp, Artificial Sequence
  ENSG00000130589_54 (sequence is synthesized)
catccccggaggccgccacaagctgaaccccagccagaacgtggcggtcagggaggctctggagaagcctttcacggtcattcagggcccaccaggtacagggaagacgatcgtgggcct

SEQ ID NO: 286504 - DNA, 120 bp, Artificial Sequence
  ENSG00000130589_55 (sequence is synthesized)
ccacatcgtattctggtttcataaatcaaaccaggagcaggtgcagcccggaggccccccccgtggggagaagcggctggggggtccctgcatcttgtactgcggcccctccaacaagtc

SEQ ID NO: 286505 - DNA, 120 bp, Artificial Sequence
  ENSG00000130589_56 (sequence is synthesized)
ggtggatgtcctggcaggactgctcctgagaaggatggagctgaagcccctccgtgtgtacagtgagcaggctgaggccagcgagttcccagtgccgcgtgtgggcagcaggaagctgct

SEQ ID NO: 286506 - DNA, 120 bp, Artificial Sequence
  ENSG00000130589_57 (sequence is synthesized)
caggaagagcccccgggaggggaggccgaaccagagcctcaggagcatcaccctgcaccaccggatccggcaggcccccaacccttactcgtcggaaatcaaggcctttgacacccggct

SEQ ID NO: 286507 - DNA, 120 bp, Artificial Sequence
  ENSG00000130589_58 (sequence is synthesized)
gcagagaggggagctcttctccagggaggacctggtctggtacaagaaggtcttgtgggaggctcggaagttcgagctggaccggcatgaggtcatcctctgcacctgctcctgtgcagc

SEQ ID NO: 286508 - DNA, 120 bp, Artificial Sequence
  ENSG00000130589_59 (sequence is synthesized)
ctctgccagcctcaaaatcctggacgtgaggcagatccttgttgacgaggcaggcatggccacggaacctgaaaccctcatccccctggtgcagttcccacaggccgagaaggtggttct

SEQ ID NO: 286509 - DNA, 120 bp, Artificial Sequence
  ENSG00000130589_60 (sequence is synthesized)
tctcggagaccacaagcagctgcggcctgtggtcaagaatgagcggctgcaaaacctgggtctggaccggtctctgttcgagcggtaccacgaggacgcacatatgctggacactcagta

SEQ ID NO: 286510 - DNA, 120 bp, Artificial Sequence
  ENSG00000130589_61 (sequence is synthesized)
ccgcatgcatgagggcatctgtgccttcccctctgtggcgttctacaagagcaagctgaagacgtggcagggcctgaggaggccgcccagtgtcctgggccacgctggcaaggagagctg

SEQ ID NO: 286511 - DNA, 120 bp, Artificial Sequence
  ENSG00000130589_62 (sequence is synthesized)
ccctgtcatctttggccacgtgcagggccacgagcggagcctgctggtgtccacggacgaagggaatgagaactccaaggccaacctggaggaggtggctgaggtggtccgtatcaccaa

SEQ ID NO: 286512 - DNA, 120 bp, Artificial Sequence
  ENSG00000130589_63 (sequence is synthesized)
gcagctgaccctggggaggaccgtagagccccaggacatcgccgtcctcacgccctacaacgcgcaggcctctgagatcagcaaggcccttcggcgagagggcatcgccggggtggccgt

SEQ ID NO: 286513 - DNA, 120 bp, Artificial Sequence
  ENSG00000130589_64 (sequence is synthesized)
gtcctccatcaccaagagccaggggagcgagtggcgctatgtgctggtgagcaccgtccgcacctgtgccaagagcgacctggaccagcggcccaccaagagctggctcaagaagtttct

SEQ ID NO: 286514 - DNA, 120 bp, Artificial Sequence
  ENSG00000130589_65 (sequence is synthesized)
gggcttcgttgtggaccccaaccaagtgaatgtggctgtcacgcgggcccaggaggggctctgcctgatcggagaccacctccttctgcgctgctgccccctctggcgtagcctcctgga

SEQ ID NO: 286515 - DNA, 120 bp, Artificial Sequence
  ENSG00000130589_66 (sequence is synthesized)
cttctgcgaggctcagcagaccctcgtgcctgccggccaggtgcgcgtctgcaggaggccaactatgccttcctgaagagccctctccacctgcaaggtgccaggactgggagggaaagt

SEQ ID NO: 286516 - DNA, 120 bp, Artificial Sequence
  ENSG00000130589_67 (sequence is synthesized)
gtttttcgtttttatagaaacacagatctttgtcctaaccacaaggttcccctttggtttatgtggtttcctctggttcctgccaccaccacctccccaggccggggccttcccatccct

SEQ ID NO: 286517 - DNA, 120 bp, Artificial Sequence
  ENSG00000130589_68 (sequence is synthesized)
gcccagtggggagtgggaggaagagcctgggacagtggccatacgtcccgggctgatttctggattgggggttctggggaccagggaggtgcaggtgtctgcagtgtcagaggagccgct

SEQ ID NO: 286518 - DNA, 120 bp, Artificial Sequence
  ENSG00000130589_69 (sequence is synthesized)
gggctcgcccaggtgttgcctgaagccctccgtggcctcttgccccttggactcctgacaggagggacaccagtgtttgctgctcacctctgacagccagacaagggctgtgctcagggg

SEQ ID NO: 286519 - DNA, 120 bp, Artificial Sequence
  ENSG00000130589_70 (sequence is synthesized)
tcagcctgcctgggccagcctgcctcctggcctcaggatctccctggggcaggaagtgggtggacttggaggaggaacggcaagggccggtccccacactcttgctcctcctgggcatct

SEQ ID NO: 286520 - DNA, 120 bp, Artificial Sequence
  ENSG00000130589_71 (sequence is synthesized)
ggggacaggaacacctctcagggtggccaagaggggcttccttgggaccagtgcaaggaagttctgctgtccctgggaagtctcagaaccaggaaggaaaccctgtggaggctgcccttt

SEQ ID NO: 286521 - DNA, 120 bp, Artificial Sequence
  ENSG00000130589_72 (sequence is synthesized)
gacctttggacgccacctgtaatcactctggatggtgtctgtggagttcaggtttattttctatttaaatgaactaaaagccagcatcctgccgggcgtggtggctcacgcccataatcc

SEQ ID NO: 286522 - DNA, 69 bp, Artificial Sequence
  ENSG00000130589_73 (sequence is synthesized)
gaggctgaggcaggagaatcgcttgactccaggaggcgcaggctgcagtgagctctgatgaaaaacaaa

SEQ ID NO: 286523 - DNA, 120 bp, Artificial Sequence
  ENSG00000130589_74 (sequence is synthesized)
ccctgtcttaaaaaaaaaaacaaaacaaaaccagcatctgttactggaacagagacctcagcccaagctcaggacaaggaggcctccctgggagagggggcctttctcccaccatcaccg

SEQ ID NO: 286524 - DNA, 120 bp, Artificial Sequence
  ENSG00000130589_75 (sequence is synthesized)
cctgtgtccttcaggggctgctggagggcagcccaaagccaggggcccaccccgccccaccccaccccaccccaccctctgaaatgtgaaaagcctgcactcttcctgtgggctgcgcag

SEQ ID NO: 286525 - DNA, 120 bp, Artificial Sequence
  ENSG00000130589_76 (sequence is synthesized)
tgggctcgggggttggggggtgccggggcgatgcttccaccctggactgagtgttcggggcagcctgctcggctgtatgtttctcgcacgctcacccgcttcagtgcggctctgtccctg

SEQ ID NO: 286526 - DNA, 120 bp, Artificial Sequence
  ENSG00000130589_77 (sequence is synthesized)
ctgccgcctccagtcctgagggaggggcttgccccaccttctacattccaatttttatatctttgaattatgtgattagatattaatttaatgataaaaccactctgaaagctcttctca

SEQ ID NO: 286527 - DNA, 120 bp, Artificial Sequence
  ENSG00000130589_78 (sequence is synthesized)
agaatcgaaactgagagctcctgggcaggctcggcagggcaggcagctccaggagggcttcgaaccgtggccaacagttccagtggactgcgtggacccgtgagctcaggagcctcagac

SEQ ID NO: 286528 - DNA, 120 bp, Artificial Sequence
  ENSG00000130589_79 (sequence is synthesized)
gcctccctggagagccaagctggtgttcgaggtggcgcctccagggtccaccctgctgcccaacagccccgcggccaccagagggccgtccctggcccggctgtgtgccctggtggacct

SEQ ID NO: 286529 - DNA, 120 bp, Artificial Sequence
  ENSG00000130589_80 (sequence is synthesized)
gtgtctgggctgctcccgctgcacccagcggctcaatgaaagcacctacgtcctccgtagggtggagcatgactgctcccgcgagatcctgctggcccgctttaagcaggccaccaagag

SEQ ID NO: 286530 - DNA, 120 bp, Artificial Sequence
  ENSG00000130589_81 (sequence is synthesized)
caaggtctggcgcgtggtgggctgccggcccaccttcccaaggcccctgtgctaccaagtctgccactactacagccctgggctcggctgccggcgccaccgaaaccggtgcacctttgc

SEQ ID NO: 286531 - DNA, 120 bp, Artificial Sequence
  ENSG00000130589_82 (sequence is synthesized)
ccgcagtcgcgaggaggccctggtctggaccttcgagcgtcagcacaacctccagcgcctatggctgaaggcggaggtgcagggcagcggggcccagggaggggcaggccgggcggccga

SEQ ID NO: 286532 - DNA, 120 bp, Artificial Sequence
  ENSG00000130589_83 (sequence is synthesized)
cgccatccttacggagtttggcggccgcttcgagctgctttgctccctctgcttcaggcgctgtcccccatgcatctgtcgcgtggacccccaggggcagtgccctgagcacggagcctg

SEQ ID NO: 286533 - DNA, 120 bp, Artificial Sequence
  ENSG00000130589_84 (sequence is synthesized)
cggagaacagctccgactgggcggagggagccctggggaagtggtgacttcagcccgggcagacgtcaacagcctgggtcatggagctaataccgaggcactgccgctcagcacctgcgt

SEQ ID NO: 286534 - DNA, 120 bp, Artificial Sequence
  ENSG00000130589_85 (sequence is synthesized)
gacctgcagcaggtcccttagcctctctgcctcagtctcctcacctagagacagggggccaggacagtcccaccttggcagggttattctatggagtatatgggttaaaacaaggatttg

SEQ ID NO: 286535 - DNA, 120 bp, Artificial Sequence
  ENSG00000130589_86 (sequence is synthesized)
atactcgaggcaggagcttggagtagggcaggagcccaccataggcagaaccagaggttcccaggagcttggagtggggcaggagcccaccacaggcagagccagaggctcccaggagct

SEQ ID NO: 286536 - DNA, 70 bp, Artificial Sequence
  ENSG00000130589_87 (sequence is synthesized)
gaggctcccaggagcttggagttagcgcaggagcccaccacaggcagagccagaggctcccaggagcttg

SEQ ID NO: 286537 - DNA, 89 bp, Artificial Sequence
  ENSG00000130589_88 (sequence is synthesized)
ttcccaggagcttggagcggggcaggagcccactgtaggcagagccagagactcccaggagcttggagcggggcaggagcccaccacag

SEQ ID NO: 286538 - DNA, 87 bp, Artificial Sequence
  ENSG00000130589_89 (sequence is synthesized)
gcttggagcggggcaggagcccactgtaggcagagccagagactcccaggagcttggagcggggcaggagcccaccacagggcagga

SEQ ID NO: 286539 - DNA, 87 bp, Artificial Sequence
  ENSG00000130589_90 (sequence is synthesized)
gcccaccgtaggcagagccagaggttcccaggagcttggagcagggcaggagcccaccacagggcaggagcccaccgtaggcagagc

SEQ ID NO: 286540 - DNA, 85 bp, Artificial Sequence
  ENSG00000130589_91 (sequence is synthesized)
aggagcccaccacggcaggagcccaccacaggcagagccagaggttcccaggagcttggagcggggcaggagcccaccacaggca

SEQ ID NO: 286541 - DNA, 85 bp, Artificial Sequence
  ENSG00000130589_92 (sequence is synthesized)
tggagcggggcaggagcccaccacaggcagagccagaggttcccaggagcttggagcggggcaggagcccaccacggcaggagcc

SEQ ID NO: 286542 - DNA, 120 bp, Artificial Sequence
  ENSG00000130589_93 (sequence is synthesized)
accgtaggcagagccagaggctcccaggttcagtggacgggggcctccctgccacctgctgagggctaaagccatgtggcctctgaggacccggataagggaggttcatgtttgggaact

SEQ ID NO: 286543 - DNA, 120 bp, Artificial Sequence
  ENSG00000130589_94 (sequence is synthesized)
tgtttgggaactgcttgagccaggccttgtcccgggagcacaggagtgggtgggacgaataaagcccctgctccctacagaggccagtattgggctgaggggtcccggcctttgaactca

SEQ ID NO: 286544 - DNA, 120 bp, Artificial Sequence
  ENSG00000130590_0 (sequence is synthesized)
gcacccgcgggccccatgttcaccgagctgaggtccaagctgagccccccgcgtggccgcgccggggccgtgcgcgcgggcttcggggagcgccgggatgtggacgccactgcccacttc

SEQ ID NO: 286545 - DNA, 120 bp, Artificial Sequence
  ENSG00000130590_1 (sequence is synthesized)
cttcggggagcgccgggatgtggacgccactgcccacttcagcttctgccggaccctcctggagcacacggtgtcagctgagagcatcccctgccacttgcctcggacacctggcaccag

SEQ ID NO: 286546 - DNA, 120 bp, Artificial Sequence
  ENSG00000130590_2 (sequence is synthesized)
cctcacgtggcatgactcccgcagccagagggcggccagcagcaggccaatcaagctcctgcagcagcccggcacagacaccccccagggccggctgtactctgaccactatggcctgta

SEQ ID NO: 286547 - DNA, 120 bp, Artificial Sequence
  ENSG00000130590_3 (sequence is synthesized)
ccatacaagcccctcgctgggtggcctgacccggcccgtggtcctgtggagtcagcaggacgtctgcaagtggctcaagaagcactgtccccacaactacctcgtctacgtggaggcctt

SEQ ID NO: 286548 - DNA, 120 bp, Artificial Sequence
  ENSG00000130590_4 (sequence is synthesized)
ctcccagcatgccatcaccggccgggcactgctgcggctgaatgcggagaagctgcagcggatggggctggcccaggaggcccagaggcaggaggtgctgcagcaggtgctccgcctgca

SEQ ID NO: 286549 - DNA, 120 bp, Artificial Sequence
  ENSG00000130590_5 (sequence is synthesized)
ggtgcgtgaggaggggcggagcctgcagctgctcagccaagcttccttcgggaaaatgtcctagctgctgctgaggcttgaacccagaccccagcactgtgatgggagtccacggctagg

SEQ ID NO: 286550 - DNA, 120 bp, Artificial Sequence
  ENSG00000130590_6 (sequence is synthesized)
gaggaggccaagctggccccgcagcgcctcttggaccctgcgggatgccggggcggccaggctggcccaacggacagacaggaccaggatcacacctccaggcgcctctggttggacatt

SEQ ID NO: 286551 - DNA, 120 bp, Artificial Sequence
  ENSG00000130590_7 (sequence is synthesized)
ccaggtcgtgccctggggctgggtgggtagggggctgcttgagtgtggccccacctcctgggacctgagcccaagccctcccctggtgcagctggcagcatgtggggcagctgcctggag

SEQ ID NO: 286552 - DNA, 120 bp, Artificial Sequence
  ENSG00000130590_8 (sequence is synthesized)
tcccccctagactcccagggagtctgtttatttacattcccctctccacgtgatgtcggtcccccatcgcctgctgagtcacttgtctgtccacccacccagcccagttctaggtcgttc

SEQ ID NO: 286553 - DNA, 120 bp, Artificial Sequence
  ENSG00000130590_9 (sequence is synthesized)
cccagcacctccaggttggcccacacaggtaccataagctgcctcggctccctgtggcttgtgcccatgcacctgccagggcccagcaggccaacccatcatctagagtagtggccatca

SEQ ID NO: 286554 - DNA, 120 bp, Artificial Sequence
  ENSG00000130590_10 (sequence is synthesized)
gcacccgcctaacgggcaccatgccaagcactttcatcattatttatacatcgtcaccacaccccctctattcatgagaagtaaagctgagaaaggaccagattgaccaagcgccagaga

SEQ ID NO: 286555 - DNA, 120 bp, Artificial Sequence
  ENSG00000130590_11 (sequence is synthesized)
caaaatgtggcacaacgagaaccccagccctgtccaggtggctccgcgcccagggcccaggcttagcagtgctccctgccctatctttgggaaaatcttgcttttatggtcttcccccct

SEQ ID NO: 286556 - DNA, 120 bp, Artificial Sequence
  ENSG00000130590_12 (sequence is synthesized)
cgccctcaagaacaagggccttgtgcgtgggccttcccattgctgctttcccaagaaggcctggattcaggggagaggccttcccagggccactccccttacaccctcccagaggcctga

SEQ ID NO: 286557 - DNA, 120 bp, Artificial Sequence
  ENSG00000130590_13 (sequence is synthesized)
gcaacccctctctgggtggtttggggctggtgctgcctggcggaaggacagtgagggcggccctagccgcctccaccctcttgcgcctctgccctctcccagtccccctgtggcttctga

SEQ ID NO: 286558 - DNA, 120 bp, Artificial Sequence
  ENSG00000130590_14 (sequence is synthesized)
aaatctcagggacagatgaggctgagcccctagtcccctctgtgtgctttgagcctccagactcgaggctggtcactgcaggtcccaggtggaatttggacaactggcctggccgctccc

SEQ ID NO: 286559 - DNA, 120 bp, Artificial Sequence
  ENSG00000130590_15 (sequence is synthesized)
atcctgtaagcccccaccacggggagaccctcatccctgcccctgtgtggctgcgcaagtattctgcccgcctcccaccatcagccttcgcccaaggggcccttctgcctctgcttccct

SEQ ID NO: 286560 - DNA, 120 bp, Artificial Sequence
  ENSG00000130590_16 (sequence is synthesized)
cccttctcctctgtcttgccctggcccacgcacgcctgtctcgtcttccttgttttgctgcactcacttttttatactctgacaaaaaaaaaaaatcagaaataaagctggttcccaagt

SEQ ID NO: 286561 - DNA, 120 bp, Artificial Sequence
  ENSG00000130590_17 (sequence is synthesized)
cgggatgtggacggctctgttcacttgcagataccatacagagccttcattcattcattcattgacaatgaatgtggggtgcccctctgtaaccagacctggatcaagacgcctgcctcc

SEQ ID NO: 286562 - DNA, 120 bp, Artificial Sequence
  ENSG00000130590_18 (sequence is synthesized)
tggggtgggcggtaagcaagagtcaagctggtttctccggggaagcgggtgcctatttgaaggcgagtaaagacgtaggagaccgaggaaagtgtgtgggaggcgttgacctgccccttg

SEQ ID NO: 286563 - DNA, 120 bp, Artificial Sequence
  ENSG00000130592_0 (sequence is synthesized)
acaccctgacccaagccgagacaggttccaaacctcaacctgcagccggaagggggaagtgaaactcggctgggggtgggggctcagaagccgccccagaaagcactgaaagccacagca

SEQ ID NO: 286564 - DNA, 120 bp, Artificial Sequence
  ENSG00000130592_1 (sequence is synthesized)
cgtacacccactccagggatctgccagcaccctgtggggcccagactacaggctgatggcggaggcttcgagtgacccgggtgccgaggagcgggaagagttgctggggcccactgctca

SEQ ID NO: 286565 - DNA, 120 bp, Artificial Sequence
  ENSG00000130592_2 (sequence is synthesized)
gtggagcgtggaggacgaggaggaggccgtccacgagcaatgccagcatgagagagacaggcagcttcaggcccaggacgaggagggaggcggccatgtccccgagcggccgaagcagga

SEQ ID NO: 286566 - DNA, 120 bp, Artificial Sequence
  ENSG00000130592_3 (sequence is synthesized)
gatgctcctcagcctgaagccctcggaggcccctgaactggatgaggacgagggctttggcgactggtcccagaggccagagcagcggcagcagcacgagggggcgcagggcgccttgga

SEQ ID NO: 286567 - DNA, 120 bp, Artificial Sequence
  ENSG00000130592_4 (sequence is synthesized)
cagcggagagcccccccagtgcaggagtcctgagggggagcaagaggacaggcccggcctgcatgcctacgaaaaggaggacagtgatgaagtccacctggaggagttgagtctgagcaa

SEQ ID NO: 286568 - DNA, 120 bp, Artificial Sequence
  ENSG00000130592_5 (sequence is synthesized)
ggaggggccaggcccagaggacactgtccaggacaacctgggggccgcaggggctgaggaggaacaggaggagcaccagaaatgtcagcagcccaggacacccagccccttggtcttgga

SEQ ID NO: 286569 - DNA, 120 bp, Artificial Sequence
  ENSG00000130592_6 (sequence is synthesized)
ggggaccatcgaacagagctcgcctcccctgagccctaccaccaaactcatcgacaggaccgagtccctaaaccgctccatagagaagagtaacagtgtgaagaaatcccagccagactt

SEQ ID NO: 286570 - DNA, 120 bp, Artificial Sequence
  ENSG00000130592_7 (sequence is synthesized)
cagtggctggaacaatacacccaggccatcgagaccgctggccggacccccaagctagcccgccaggcctccatagagctgcccagcatggctgtggccagtaccaagagtcggtgggag

SEQ ID NO: 286571 - DNA, 120 bp, Artificial Sequence
  ENSG00000130592_8 (sequence is synthesized)
acgggtgaggtacaggctcagtctgcggccaagactccgtcctgcaaggatattgtggctggagacatgagcaagaaaagcctctgggagcagaagggaggctccaagacctcatcaaca

SEQ ID NO: 286572 - DNA, 120 bp, Artificial Sequence
  ENSG00000130592_9 (sequence is synthesized)
attaagagcaccccatctgggaagaggtataagtttgtggccaccgggcatgggaagtatgagaaggtgcttgtggaagggggcccggctccctaggcgtcccatctcgcttcctgggtc

SEQ ID NO: 286573 - DNA, 120 bp, Artificial Sequence
  ENSG00000130592_10 (sequence is synthesized)
tgcaggtccagccggctggcaccctccatgtacccaggggagattccagccagacacccgccccccggccctggctaagaagttgcttcctgttgccagcatgacctaccctcgcctctt

SEQ ID NO: 286574 - DNA, 120 bp, Artificial Sequence
  ENSG00000130592_11 (sequence is synthesized)
tgatgccatccgctgccacctccttttgctcctggaccctttagcctctctgcccttccactctctgaccaccgcccccgccctccccacccagctccgcttcttgttacttgggggagg

SEQ ID NO: 286575 - DNA, 120 bp, Artificial Sequence
  ENSG00000130592_12 (sequence is synthesized)
aaagaaactcctgatcattggccaaagggacttacccctggagaggccaagtgccttctaggaagttaggaggttgaggcacagcctgtgcagagagggtgggtcacccccccagatcca

SEQ ID NO: 286576 - DNA, 120 bp, Artificial Sequence
  ENSG00000130592_13 (sequence is synthesized)
aggagaaactgcaggtcaagggctgataacggccatgcaggatgcttgatgctgcgtcccccgctgcttgccgccccccaccccgccattttgtataataaagctccctgtgtattctca

SEQ ID NO: 286577 - DNA, 120 bp, Artificial Sequence
  ENSG00000130592_14 (sequence is synthesized)
ggtcaggccaggtcgccgcctgagcagaggctgcagcctgggcagtcccgggcttctgaggaggaactctagcagacagggcctggatacctcttgagatgcagagagatggctccgatc

SEQ ID NO: 286578 - DNA, 120 bp, Artificial Sequence
  ENSG00000130592_15 (sequence is synthesized)
tggtccccacctggcagggtctccggctgtcacctgagttcaggaccagcaccaggatctgcagtgggcccctggctgggcacacctcatcccagcctccccctacccctggccccccat

SEQ ID NO: 286579 - DNA, 120 bp, Artificial Sequence
  ENSG00000130592_16 (sequence is synthesized)
aagcctcctcctcctgggcttccaggctctgctggtcagacctccctccctgcccaacgggaatgtgttttcccaggggacgctgctgtccaccaggagctctgtggcctgggatttgag

SEQ ID NO: 286580 - DNA, 120 bp, Artificial Sequence
  ENSG00000130592_17 (sequence is synthesized)
gagtgcctggggtcaatcccccaggctcaccagtgctacttaacaaatgggcccaagagaaggaagtgcagcccccggaggaggggcagagcccctgcctggctgtgcggtggctcaccc

SEQ ID NO: 286581 - DNA, 120 bp, Artificial Sequence
  ENSG00000130592_18 (sequence is synthesized)
gggctggaagtcggtcttcggacagagcccgtcctgcccagaagcccaggcgagccagcagcaggggtgcagggaccgagtggcccagccccctgggcagggtgtcagggccagagccca

SEQ ID NO: 286582 - DNA, 120 bp, Artificial Sequence
  ENSG00000130592_19 (sequence is synthesized)
gaggacggcggttcaggcttcagtcccagccggcgaaccagagctgggcagagcggccagcaagcggcagccagggtgccctgggcactcgacccccagatgcccctgctggaaccgtaa

SEQ ID NO: 286583 - DNA, 120 bp, Artificial Sequence
  ENSG00000130592_20 (sequence is synthesized)
ataccccattttgcaaacaggaaagctgaggctcagggaggcaccaaagcttactcccatcctggggcttggcagggggtgcccgcagcacccggggacatacaccggggagtctcctgg

SEQ ID NO: 286584 - DNA, 120 bp, Artificial Sequence
  ENSG00000130592_21 (sequence is synthesized)
gaaagaagtgccggcccaggggcagactcttttctgctctgccatgtcttccctgcacccccagggatgatgagtctgggaggggctggtcagccatgaaagcttcggggaggggccggt

SEQ ID NO: 286585 - DNA, 120 bp, Artificial Sequence
  ENSG00000130592_22 (sequence is synthesized)
ggccaggccgggcaccccagagctccacaggcagacatggtgtgggggtgtcaggaagagggcctggctgctgggtgctacggtaggaagatcccggtgctgtgggagtggagcaggtgg

SEQ ID NO: 286586 - DNA, 120 bp, Artificial Sequence
  ENSG00000130592_23 (sequence is synthesized)
ttgaatgccaggctggcttggtccttctctctgggtgccggctgtggctcccgcccaggtgggcaccacgtctgaataatgtatgaagcctctggttgcgtggaggatgggagcgcttcg

SEQ ID NO: 286587 - DNA, 120 bp, Artificial Sequence
  ENSG00000130592_24 (sequence is synthesized)
ggcagcatctgtgggcagagacttcagggatgtgaggtacatctgggcatggctagctgggaaggaaagaggatggcagagcctcgagccgttgccagggactggttgcgtgtcccagaa

SEQ ID NO: 286588 - DNA, 120 bp, Artificial Sequence
  ENSG00000130592_25 (sequence is synthesized)
cgtgccaaaagcctgcctcgtgagcacggcaagagctctgccagggcagtcccagctggcccaggcgccgcagcgctcccgagggccgtcgagcaaaggcgggaggcgcagccgggctgt

SEQ ID NO: 286589 - DNA, 120 bp, Artificial Sequence
  ENSG00000130592_26 (sequence is synthesized)
cggtggacctgtaggtatcagggctccttggtcccctcctgcgggaagcaggcaccgagtggggctgcatgtagacgcatgcgagggtgagagctgcggcggaggacgctgatcgcggag

SEQ ID NO: 286590 - DNA, 120 bp, Artificial Sequence
  ENSG00000130592_27 (sequence is synthesized)
tgcaggcgagggccccagaaaggtcccgcaggtcgcctcgctcgtggcacgggctcggcagcgttgtggttagtgacacggaggaagacagaaagccatatgcacagcacgcagaacagg

SEQ ID NO: 286591 - DNA, 120 bp, Artificial Sequence
  ENSG00000130592_28 (sequence is synthesized)
aggaggggggaagaaagagcaggcacggggcaggcagagccgcagccacgccgccgggatgcagcaggcagggccacccacgagcagggcggggccctaacctccgacccaggctggtcg

SEQ ID NO: 286592 - DNA, 120 bp, Artificial Sequence
  ENSG00000130592_29 (sequence is synthesized)
gagcctcctcactccccaggaccccagagaggacggaccctctccagccgccctctgggctcaggacagccgggtggggcagccacaggagctgcctgcagggggcagagtcgggacggg

SEQ ID NO: 286593 - DNA, 120 bp, Artificial Sequence
  ENSG00000130592_30 (sequence is synthesized)
acagcctcacccttgcttccctcagtgttcccaaggtgctgcgcaaccccaactccctggcctggccagggtcatgatagctggggaggcaagaggtggctgttctccttgaatgtaggg

SEQ ID NO: 286594 - DNA, 120 bp, Artificial Sequence
  ENSG00000130592_31 (sequence is synthesized)
acagagggtggcatgggcagatgagtgcccgtgcacagatggtggcccaggactaattgggtggccagcggccggcagatctggctctggttctggctgtgccaggccctcactctgtga

SEQ ID NO: 286595 - DNA, 120 bp, Artificial Sequence
  ENSG00000130592_32 (sequence is synthesized)
gggagtcacaaggtagagatctggagaccgaggggggctctgggagaggcttgggcaggttgggagaagccttgtgggagacatggggcctgacacatcttctaccctccagtaacagtg

SEQ ID NO: 286596 - DNA, 120 bp, Artificial Sequence
  ENSG00000130592_33 (sequence is synthesized)
ttttctccaagtcagcagccttgggcagagtggggttcagcggtcaccatagtcaggcccttggccacccccaccaagggccccagctatccaggggctccccctgccacatgggaggcc

SEQ ID NO: 286597 - DNA, 120 bp, Artificial Sequence
  ENSG00000130592_34 (sequence is synthesized)
tgagaagtcggggcttaggaggacctcatgtagggtcctcatgtggggaccagggcagcccttggggagccccaggatgatgggggaggcacagccctgccctagggagccccagactga

SEQ ID NO: 286598 - DNA, 120 bp, Artificial Sequence
  ENSG00000130592_35 (sequence is synthesized)
tgggggaagcacagccctgctgttagggagccacaggctgacgggggaggcccagccctgccctagcgagtcccagagtgatgggggaggcacagccctgctcttagggagccacaggct

SEQ ID NO: 286599 - DNA, 120 bp, Artificial Sequence
  ENSG00000130592_36 (sequence is synthesized)
gacaggggaggcacagccctgtcctcagggagccctacactgatcgaagaggcacagccttaccctcagggagccccaaactgatgagggaggcatagccctgccctcaggtagccccag

SEQ ID NO: 286600 - DNA, 120 bp, Artificial Sequence
  ENSG00000130592_37 (sequence is synthesized)
gctgatggaggaggcatagccctgctgagcctcaaggagtcctggactgatggaggaagcacagttctcaggctgccccagaactgacgggggaggcatagccctgccctcaggtattct

SEQ ID NO: 286601 - DNA, 120 bp, Artificial Sequence
  ENSG00000130595_0 (sequence is synthesized)
agtgcctgcagccggtgctgtccacagggagctccagcccttctcacactcgacccgcagaaaccacccaccttcaccatgtctgacgaggaagttgaacaggtggaggagcagtacgaa

SEQ ID NO: 286602 - DNA, 120 bp, Artificial Sequence
  ENSG00000130595_1 (sequence is synthesized)
gaagaagaggaagcccaggaggaagaggaagttcaagaagacaccgcagaggaggacgcggaagaggagaaaccgagacccaaactcactgctcctaagatcccagaaggggagaaagtg

SEQ ID NO: 286603 - DNA, 120 bp, Artificial Sequence
  ENSG00000130595_2 (sequence is synthesized)
gacttcgatgacatccagaagaagcgtcagaacaaagacctaatggagctccaggccctcatcgacagccactttgaagcccggaagaaggaggaggaggagctggtcgctctcaaagag

SEQ ID NO: 286604 - DNA, 120 bp, Artificial Sequence
  ENSG00000130595_3 (sequence is synthesized)
agaatcgagaagcgccgtgcagagagagcggagcagcagaggattcgtgcagagaaggagagggagcgccagaacagactggcggaggaaaaggccagaagggaggaggaggatgccaag

SEQ ID NO: 286605 - DNA, 120 bp, Artificial Sequence
  ENSG00000130595_4 (sequence is synthesized)
acagcccgggaaatgaagaagaagattctggctgagagacgcaagccgctcaacatcgatcaccttggtgaagacaaactgagggacaaggccaaggagctctgggagaccctgcaccag

SEQ ID NO: 286606 - DNA, 120 bp, Artificial Sequence
  ENSG00000130595_5 (sequence is synthesized)
ctggagattgacaagttcgagtttggggagaagctgaaacgccagaaatatgacatcaccacgctcaggagccgcattgaccaggcccagaagcacagcaagaaggctgggaccccagcc

SEQ ID NO: 286607 - DNA, 120 bp, Artificial Sequence
  ENSG00000130595_6 (sequence is synthesized)
aagggcaaagtcggcgggcgctggaagtagagaggccagaaaggcccctcgaggcagagaccctccgccctcttgcacaccagggccgctcgtgggactccacatcctccagcccccaca

SEQ ID NO: 286608 - DNA, 120 bp, Artificial Sequence
  ENSG00000130595_7 (sequence is synthesized)
atcctgtcaggggctccctgacagtcctgggggtggagaggccatcccggggcgtcccccgcgtctgtgtccttgctgccttcatcccctggggcctgtgaataaagctgcagaaccccc

SEQ ID NO: 286609 - DNA, 120 bp, Artificial Sequence
  ENSG00000130595_8 (sequence is synthesized)
gcctgcagccggtgctgtccacagggagctccagcccttctcacactcgacccgcagaaaccacccaccttcaccatgtctgacgaggaagttgaacaggtggaggaggaagcccaggag

SEQ ID NO: 286610 - DNA, 120 bp, Artificial Sequence
  ENSG00000130595_9 (sequence is synthesized)
acactcgacccgcagaggatggccctagaggagtctgtggcgtttggggcctgaaccagctgggaggacagcacgaggggctggtgggcagcctgggactgggtcacaccgggggcctgg

SEQ ID NO: 286611 - DNA, 120 bp, Artificial Sequence
  ENSG00000130595_10 (sequence is synthesized)
acaacactggctcgtggggctgaggactgaggagagcctggcccagccgtggcagttacaagaggcttaacctgaggggcagcagagtctcaggaagagattctgggataggaaaaagct

SEQ ID NO: 286612 - DNA, 120 bp, Artificial Sequence
  ENSG00000130595_11 (sequence is synthesized)
cccccatcctacacccaggcagctcgtaactctctttccatcctctctctctctctctctctgaatctctctctgcagaaaccacccaccttcaccatgtctgacgaggaagttgaacag

SEQ ID NO: 286613 - DNA, 120 bp, Artificial Sequence
  ENSG00000130595_12 (sequence is synthesized)
cccccatcctacacccaggcagctcgtaactctctttccatcctctctctctctctctctctgaatctctctctgcagaaaccacccaccttcaccatgtctgacgaggaagtaggaagc

SEQ ID NO: 286614 - DNA, 120 bp, Artificial Sequence
  ENSG00000130595_13 (sequence is synthesized)
gggctggccagagatgcaggactgagccccatctttcacccctgccaagcgagccccaggccctcttctcccggccagccggcctcctgtccttgcggcctgagtacactctgatcactg

SEQ ID NO: 286615 - DNA, 120 bp, Artificial Sequence
  ENSG00000130595_14 (sequence is synthesized)
tctctgttccctgtctccctcaaccccgccttctcctgctcctggcttctccggctctcagaggaagcccaggaggaagctgcagaagtccatgaggaagttcatgaaccagaggaagtt

SEQ ID NO: 286616 - DNA, 120 bp, Artificial Sequence
  ENSG00000130595_15 (sequence is synthesized)
tctccctgcgtccctaccaaactctggacctgcccaccccagggacctggaccctgagaggcccaaacaggctgttgccacggacccctggctgaggctgctttcctgctggggactgtg

SEQ ID NO: 286617 - DNA, 120 bp, Artificial Sequence
  ENSG00000130595_16 (sequence is synthesized)
gccagagcccgtcctcctggctggccatgcagcgccctgagcgatgaacctggcccctttgggcggccttggttacccctgccaaaaggactgtcgtggcagagcagccatggccaagtg

SEQ ID NO: 286618 - DNA, 120 bp, Artificial Sequence
  ENSG00000130595_17 (sequence is synthesized)
gactcagggttcattttcggaacccctttaagcttatagaaagtccccatcatcacccagctcggccccggggcaccgagtccgtctggtgtggggcgtcctttcgacagagcctcctcc

SEQ ID NO: 286619 - DNA, 120 bp, Artificial Sequence
  ENSG00000130595_18 (sequence is synthesized)
acaaacccagactctggcttccaccagggccccggacacctgcttcctcagggcagacagagaggggtgacacactgcaccctgtggctgggaaaaggggcctgggactgtgcccgtctg

SEQ ID NO: 286620 - DNA, 120 bp, Artificial Sequence
  ENSG00000130595_19 (sequence is synthesized)
ggacggagcagagccaccatcccatgcaggcactatcaccgcaggcaaagctgggactggggaaggcagcctgcccgggcggcctcagggactggggtacaatgtgggagctagggtgga

SEQ ID NO: 286621 - DNA, 120 bp, Artificial Sequence
  ENSG00000130595_20 (sequence is synthesized)
cactaagtcagggaggccagggcgggcagcccattcatcgtcctcaccgcgctgttccttccgggcccttggctggaacgctcaggatgccccaccgctcactcccggtgcacatgtgcc

SEQ ID NO: 286622 - DNA, 120 bp, Artificial Sequence
  ENSG00000130595_21 (sequence is synthesized)
ccaaggcatccggaacgggtgacctcaggcccacctgcaaaaccaagagcgctggcgggctctctgtggtgtgcagggggctcccaggcaaccgagaggagaaaccgagacccaaactca

SEQ ID NO: 286623 - DNA, 120 bp, Artificial Sequence
  ENSG00000130598_0 (sequence is synthesized)
atgggagatgaggagaagcggaacagggccatcacggcccgcaggcagcacctgaagagtgtgatgctgcagatagcggccacggagctggagaaggaggagagccgccgtgaggcagag

SEQ ID NO: 286624 - DNA, 120 bp, Artificial Sequence
  ENSG00000130598_1 (sequence is synthesized)
aagcagaactacctggcggagcactgcccgccgctgcatatcccgggctccatgtctgaagtgcaggagctctgcaaacagctgcacgccaagatcgatgcggctgaagaggagaagtac

SEQ ID NO: 286625 - DNA, 120 bp, Artificial Sequence
  ENSG00000130598_2 (sequence is synthesized)
ttcaagcggcccccactgcggagggtgcgcatgtcggccgatgccatgctcaaggccctgctgggctcgaagcacaaggtgtgcatggacctgagggccaacctgaagcaggtcaagaag

SEQ ID NO: 286626 - DNA, 120 bp, Artificial Sequence
  ENSG00000130598_3 (sequence is synthesized)
gaggacacagagaaggagcgggacctgcgagacgtgggtgactggaggaagaacatcgaggagaagtctggcatggagggccggaagaagatgtttgagtccgagtcctaggccactcgc

SEQ ID NO: 286627 - DNA, 120 bp, Artificial Sequence
  ENSG00000130598_4 (sequence is synthesized)
tgcccctacgcctgccccggtgcccggctcccagcagaacatactagggagatgcacccagagcctgccagggagggctggcctcaccaccaccgtcaataaaggatttgaatccccatg

SEQ ID NO: 286628 - DNA, 120 bp, Artificial Sequence
  ENSG00000130598_5 (sequence is synthesized)
agcaccatgtcccagtgcaaggtctggggccagggaggcccagcctgcccatcatggcctcaggagcccccaggctctgctggtcccggagccggagcccctgacctggccagggagcgt

SEQ ID NO: 286629 - DNA, 120 bp, Artificial Sequence
  ENSG00000130598_6 (sequence is synthesized)
gcccgccgctgcatatcccgggctccatgtctgaagtgcaggtaccagcccctccccggccaccccgcctccccagcagcaggcctgcctgctaactcagtttccccacttgtcaagagg

SEQ ID NO: 286630 - DNA, 120 bp, Artificial Sequence
  ENSG00000130635_0 (sequence is synthesized)
ggaaaaaagtgctccgcgccgaaggcgaggtccgcactctccgtccccgcggctggcgcaggacctcactcgagcggagcgcccacggggagcgggtcgcggggcggcggcggcgaggag

SEQ ID NO: 286631 - DNA, 120 bp, Artificial Sequence
  ENSG00000130635_1 (sequence is synthesized)
gaggcgagaaggagttggaggaggaggaggaggaggcgagggcgagctagcccagcggggtcccggccgccccgcgggccaaagtcgagccctcccgcccgtgggcgagcgcgccagccg

SEQ ID NO: 286632 - DNA, 120 bp, Artificial Sequence
  ENSG00000130635_2 (sequence is synthesized)
ccccttccagaacagccgccgccacaaagaagaacggggggtgccgaggtccccatgacctcctaaagtggtgcggtccctgctgagtgcgctgcccgggccgtgacccgcgcccctgtg

SEQ ID NO: 286633 - DNA, 80 bp, Artificial Sequence
  ENSG00000130635_3 (sequence is synthesized)
cgtccccgcgcgcctccgagcgcccctgtgcgccccggcccgcgccccgccggcatggacgtccatacccgctggaaagc

SEQ ID NO: 286634 - DNA, 120 bp, Artificial Sequence
  ENSG00000130635_4 (sequence is synthesized)
ctgctgctgctgctgctgtgggcgccgcctccgagccgcgcagctcagccagcagatctcctgaaggttctagattttcacaacttgcctgatggaataacaaagacaacaggcttttgc

SEQ ID NO: 286635 - DNA, 120 bp, Artificial Sequence
  ENSG00000130635_5 (sequence is synthesized)
gccacgcggcgatcttccaaaggcccggatgtcgcttacagagtcaccaaagacgcgcagctcagcgcacccaccaagcagctgtaccctgcgtctgcatttcccgaggacttctccatc

SEQ ID NO: 286636 - DNA, 120 bp, Artificial Sequence
  ENSG00000130635_6 (sequence is synthesized)
ctaacaactgtgaaagccaagaaaggcagccaggccttcctggtctccatctacaacgagcagggtatccagcagattgggctggagctgggccgctctcccgtcttcctctacgaggac

SEQ ID NO: 286637 - DNA, 120 bp, Artificial Sequence
  ENSG00000130635_7 (sequence is synthesized)
cacacggggaagcctggcccggaagactaccccctcttccggggcatcaacctgtcagatggcaagtggcacagaattgctctcagcgtccacaagaaaaatgtcaccttgatcctcgac

SEQ ID NO: 286638 - DNA, 120 bp, Artificial Sequence
  ENSG00000130635_8 (sequence is synthesized)
tgtaaaaagaagaccaccaaattcctcgaccgcagcgaccaccccatgatcgacatcaatggcatcatcgtgtttggcacccggatcctggatgaggaggtgtttgagggtgacatccag

SEQ ID NO: 286639 - DNA, 120 bp, Artificial Sequence
  ENSG00000130635_9 (sequence is synthesized)
cagctgctctttgtctcggaccaccgggcagcttatgattactgtgagcactacagccctgactgtgacaccgcagtacctgacaccccacagtcgcaggaccccaatccagatgaatat

SEQ ID NO: 286640 - DNA, 120 bp, Artificial Sequence
  ENSG00000130635_10 (sequence is synthesized)
tacacggaaggagacggcgagggtgagacctattactacgaatacccctactacgaagaccccgaagacctagggaaggagcccacccccagcaagaagcccgtggaagctgccaaagaa

SEQ ID NO: 286641 - DNA, 120 bp, Artificial Sequence
  ENSG00000130635_11 (sequence is synthesized)
accacagaggtccccgaggagctgaccccgacccccacggaagctgctcccatgcctgaaaccagtgaaggggctgggaaggaagaggacgtcggcatcggggactatgactacgtgccc

SEQ ID NO: 286642 - DNA, 120 bp, Artificial Sequence
  ENSG00000130635_12 (sequence is synthesized)
agtgaggactactacacgccctcaccgtatgatgacctcacctatggcgagggggaggagaaccccgaccagcccacagacccaggcgctggggccgaaattcccaccagcaccgccgac

SEQ ID NO: 286643 - DNA, 120 bp, Artificial Sequence
  ENSG00000130635_13 (sequence is synthesized)
acctccaactcctccaatccagctccgcctccaggggaaggtgcggatgacttggagggggagttcactgaggaaacgatccggaaccttgacgagaactactacgacccctactacgac

SEQ ID NO: 286644 - DNA, 120 bp, Artificial Sequence
  ENSG00000130635_14 (sequence is synthesized)
cccaccagctccccgtcggagatcgggccgggaatgccggcgaaccaggataccatctatgaagggattggaggacctcggggcgagaaaggccaaaagggagaaccagcgattatcgag

SEQ ID NO: 286645 - DNA, 120 bp, Artificial Sequence
  ENSG00000130635_15 (sequence is synthesized)
ccgggcatgctcatcgagggcccgcctggcccagaaggccccgcgggtcttcccggacctccaggaaccatgggtcccactggccaagtcggggaccctggagaaaggggcccccctgga

SEQ ID NO: 286646 - DNA, 120 bp, Artificial Sequence
  ENSG00000130635_16 (sequence is synthesized)
cgcccaggccttcctggggccgatggcctgcccggtcctccaggaaccatgctcatgctgcccttccggtttggaggtggcggcgatgcgggctccaaaggccccatggtctcagcccag

SEQ ID NO: 286647 - DNA, 120 bp, Artificial Sequence
  ENSG00000130635_17 (sequence is synthesized)
gagtcccaggcgcaagccattctccagcaggccaggttggcactgaggggaccagctggcccgatgggtctcacagggagacctggccctgtgggtccccctgggagcggaggtttgaag

SEQ ID NO: 286648 - DNA, 120 bp, Artificial Sequence
  ENSG00000130635_18 (sequence is synthesized)
ggcgagccgggagacgtggggcctcagggtcctcgaggtgtgcaaggcccgcctggtccggccgggaagcccggaagacggggtcgggctgggagtgatggagccagaggaatgcctgga

SEQ ID NO: 286649 - DNA, 120 bp, Artificial Sequence
  ENSG00000130635_19 (sequence is synthesized)
caaactggccccaagggtgaccggggtttcgacggcctggctgggttgccaggcgagaagggccacaggggtgaccctggtccttccggcccaccaggacctccgggagacgatggagaa

SEQ ID NO: 286650 - DNA, 120 bp, Artificial Sequence
  ENSG00000130635_20 (sequence is synthesized)
aggggtgacgacggagaagttgggcccagggggctgcctggggagcccgggccacgtggtctgcttgggccgaaggggcccccaggtcctcccggacctcccggtgtcacgggtatggac

SEQ ID NO: 286651 - DNA, 120 bp, Artificial Sequence
  ENSG00000130635_21 (sequence is synthesized)
ggccagccggggccaaaaggaaatgtgggtccccagggagagcctggccccccaggacagcagggtaatccaggcgcccagggtcttccaggcccccagggtgcaattggtcctccagga

SEQ ID NO: 286652 - DNA, 120 bp, Artificial Sequence
  ENSG00000130635_22 (sequence is synthesized)
gaaaagggtcccttggggaaaccaggccttccaggaatgcccggtgctgacggacccccgggacaccctggcaaagaaggccctccaggagagaaaggaggtcagggtccacctggcccc

SEQ ID NO: 286653 - DNA, 120 bp, Artificial Sequence
  ENSG00000130635_23 (sequence is synthesized)
cagggtccgattggctacccaggtcctcgaggagtcaagggggccgatggcatccgtggtctgaagggcacaaagggcgagaagggtgaagacggctttcctgggtttaaaggagacatg

SEQ ID NO: 286654 - DNA, 120 bp, Artificial Sequence
  ENSG00000130635_24 (sequence is synthesized)
ggcatcaagggtgatcggggggagatcggcccacccggtcccaggggagaagatggccctgaaggcccaaagggtcgcggaggtcccaatggtgaccccggtcctctgggaccccctggg

SEQ ID NO: 286655 - DNA, 120 bp, Artificial Sequence
  ENSG00000130635_25 (sequence is synthesized)
gagaagggaaaactcggagtcccagggttaccagggtatccaggaagacaaggaccaaagggctctattggattccctggatttcctggcgccaatggagagaagggcggcagggggacc

SEQ ID NO: 286656 - DNA, 120 bp, Artificial Sequence
  ENSG00000130635_26 (sequence is synthesized)
cctggaaagccaggaccgcgggggcagcgaggcccaacgggtccgaggggtgaaagaggcccccggggcatcactgggaagcctggccccaagggcaactccggaggtgacggcccagct

SEQ ID NO: 286657 - DNA, 120 bp, Artificial Sequence
  ENSG00000130635_27 (sequence is synthesized)
ggccctcctggtgaacggggacccaatggaccccaaggacccacaggatttcctggaccaaagggcccccctggccctccaggcaaggatggactcccaggacaccctggacagagaggc

SEQ ID NO: 286658 - DNA, 120 bp, Artificial Sequence
  ENSG00000130635_28 (sequence is synthesized)
gagactggtttccaaggcaagaccggccctccaggcccccccggcgtggtcggccctcagggtcccacgggagaaacgggcccaatgggtgagcgtggccaccctgggccccctggaccc

SEQ ID NO: 286659 - DNA, 120 bp, Artificial Sequence
  ENSG00000130635_29 (sequence is synthesized)
cccggtgaacaggggcttccgggccttgctggaaaagaagggacgaagggtgacccaggccctgcaggcctccctgggaaagatggccctccaggattacgtggtttccctggggaccga

SEQ ID NO: 286660 - DNA, 120 bp, Artificial Sequence
  ENSG00000130635_30 (sequence is synthesized)
gggcttcctggtccagtgggagctcttggactgaaaggcaatgaagggccccctggcccaccaggccctgcgggatctccaggggagagaggtccagctggagccgctgggcccatcgga

SEQ ID NO: 286661 - DNA, 120 bp, Artificial Sequence
  ENSG00000130635_31 (sequence is synthesized)
attccagggagacctgggccccagggacccccagggccggcaggagagaaaggggctcctggcgagaaaggcccacaaggcccagctggccgagacggtctccaggggcctgtggggctc

SEQ ID NO: 286662 - DNA, 120 bp, Artificial Sequence
  ENSG00000130635_32 (sequence is synthesized)
ccgggtccagctggccctgtgggtccccctggagaagacggagataagggagagatcggggagccggggcagaaaggaagcaagggggacaaaggagaacagggtcctcctgggcctaca

SEQ ID NO: 286663 - DNA, 120 bp, Artificial Sequence
  ENSG00000130635_33 (sequence is synthesized)
ggtcctcaaggccccatcggacagccaggcccctctggagctgacggcgagccggggcctcggggccagcagggccttttcgggcagaaaggtgatgaaggtcccagaggctttcctgga

SEQ ID NO: 286664 - DNA, 120 bp, Artificial Sequence
  ENSG00000130635_34 (sequence is synthesized)
ccccctgggccagtggggctgcagggtttgccaggacctccaggcgagaagggtgagacaggagacgtgggccagatgggccccccgggtccccctggcccccgaggaccctccggagct

SEQ ID NO: 286665 - DNA, 120 bp, Artificial Sequence
  ENSG00000130635_35 (sequence is synthesized)
gcctggcgaagcaggtgagcctggccttccgggagaaggcggccccccgggacccaaaggagaaaggggagagaagggcgagtcaggcccttcaggtgctgccggaccccctggacccaa

SEQ ID NO: 286666 - DNA, 120 bp, Artificial Sequence
  ENSG00000130635_36 (sequence is synthesized)
aggccctcccggagatgatggtcccaaaggcagccctggcccagtgggttttcctggagatcctggcccccccggagagcctggccccgcgggtcaagatggtccccctggtgacaaagg

SEQ ID NO: 286667 - DNA, 120 bp, Artificial Sequence
  ENSG00000130635_37 (sequence is synthesized)
agatgatggtgaacccgggcagacgggatcccccggccctactggtgaaccaggtccatcggggcctccaggaaaaaggggtcccccaggccccgcaggccccgaaggcagacagggaga

SEQ ID NO: 286668 - DNA, 120 bp, Artificial Sequence
  ENSG00000130635_38 (sequence is synthesized)
gaaaggggccaagggagaagccggcttggaaggccctcctgggaagactggccccatcggcccccagggggcccctgggaagcccggaccggatggccttcgagggatccctggccctgt

SEQ ID NO: 286669 - DNA, 120 bp, Artificial Sequence
  ENSG00000130635_39 (sequence is synthesized)
gggagaacaaggtctcccaggatccccaggcccggacggtccccccggccccatgggtcccccaggacttcccggcctcaaaggagattctggtcccaaaggtgaaaagggtcatccagg

SEQ ID NO: 286670 - DNA, 120 bp, Artificial Sequence
  ENSG00000130635_40 (sequence is synthesized)
cctgatcgggctcatcggtcctccgggtgaacagggtgagaagggcgaccgtggtctccctggcccccagggctcctccggtcctaagggagaacagggtatcactggtccttctggccc

SEQ ID NO: 286671 - DNA, 120 bp, Artificial Sequence
  ENSG00000130635_41 (sequence is synthesized)
gattgggcctcctgggccccctggcctgccgggtccgcctggtccaaaaggtgctaagggctcctcgggtccaactggcccgaagggtgaggcaggccacccaggacccccaggcccccc

SEQ ID NO: 286672 - DNA, 120 bp, Artificial Sequence
  ENSG00000130635_42 (sequence is synthesized)
gggccccccgggagaggtcatccagcccctgccaatccaggcatccaggacgcggcggaacatcgacgccagccagctgctggacgacgggaatggcgagaactacgtggactacgcgga

SEQ ID NO: 286673 - DNA, 120 bp, Artificial Sequence
  ENSG00000130635_43 (sequence is synthesized)
cggcatggaagagatcttcggctctctcaactctctgaagctggagattgagcagatgaaacggcccctgggcacgcagcagaaccccgcccgcacctgcaaggacctgcagctctgcca

SEQ ID NO: 286674 - DNA, 120 bp, Artificial Sequence
  ENSG00000130635_44 (sequence is synthesized)
ccccgacttcccagatggtgaatactgggtcgatcctaaccaaggatgctccagggattccttcaaggtttactgcaacttcacagccggggggtcgacatgcgtcttccctgacaagaa

SEQ ID NO: 286675 - DNA, 120 bp, Artificial Sequence
  ENSG00000130635_45 (sequence is synthesized)
gtccgaaggggccagaatcacttcttggcccaaagaaaacccgggctcctggttcagtgaattcaagcgtgggaaactgctctcctatgtggacgccgagggcaaccctgtgggtgtggt

SEQ ID NO: 286676 - DNA, 120 bp, Artificial Sequence
  ENSG00000130635_46 (sequence is synthesized)
acagatgaccttcctgcggctgctgagcgcctctgcccaccagaacgtcacctaccactgctaccagtcagtggcctggcaggacgcagccacgggcagctacgacaaggccctccgctt

SEQ ID NO: 286677 - DNA, 120 bp, Artificial Sequence
  ENSG00000130635_47 (sequence is synthesized)
cctgggctccaacgacgaggagatgtcctatgacaacaacccctacatccgcgccctggtggacggctgtgctaccaagaaaggctaccagaagacggttctggagatcgacacccccaa

SEQ ID NO: 286678 - DNA, 120 bp, Artificial Sequence
  ENSG00000130635_48 (sequence is synthesized)
agtggagcaggtgcccatcgtggacatcatgttcaatgacttcggtgaagcgtcacagaaatttggatttgaagtggggccggcttgcttcatgggctaggagccgccgagcccgggctc

SEQ ID NO: 286679 - DNA, 120 bp, Artificial Sequence
  ENSG00000130635_49 (sequence is synthesized)
ccgagagcaacctcgtgacctcagcatgccattcgttcgtgagtgtcccgtgcacgtcctgaccctggacagtgaaggcttctccctcccctcccacctgacttcatctacgcctcggca

SEQ ID NO: 286680 - DNA, 120 bp, Artificial Sequence
  ENSG00000130635_50 (sequence is synthesized)
ccacggggtgtgggaccccagcccggagagaacagagggaaggagccgcgcccccacctggagctgaatcacatgacctagctgcaccccagcgcctgggcccgccccacgctctgtcca

SEQ ID NO: 286681 - DNA, 120 bp, Artificial Sequence
  ENSG00000130635_51 (sequence is synthesized)
cacccacgcgccccgggagcggggccatgcctccagccccccagctcgcccgacccatcctgttcgtgaataggtctcaggggttgggggagggactgccagatttggacactatatttt

SEQ ID NO: 286682 - DNA, 120 bp, Artificial Sequence
  ENSG00000130635_52 (sequence is synthesized)
tttctaaattcaacttgaagatgtgtatttcccctgaccttcaaaaaatgttccaaggtaagcctcgtaaaggtcatcccaccatcaccaaagcctccgtttttaacaacctccaacacg

SEQ ID NO: 286683 - DNA, 120 bp, Artificial Sequence
  ENSG00000130635_53 (sequence is synthesized)
atccatttagaggccaaatgtcattctgcaggtgccttcccgatggattaaaggtgcttatgtttttgtgagttttaagtaaatatttgtattgtattgttataaatgttaagtgtgcct

SEQ ID NO: 286684 - DNA, 120 bp, Artificial Sequence
  ENSG00000130635_54 (sequence is synthesized)
ggctttcaatcatgcacggaaacccagtctcagtcccacggacagaatgggcgaggcatggattctgggttgcagtaccgttctgattagaaataggaagtctccccacccccgccctgg

SEQ ID NO: 286685 - DNA, 120 bp, Artificial Sequence
  ENSG00000130635_55 (sequence is synthesized)
ccaagaacgtgcaataaattggaagtttgccccggggcagcaagaatttatgctgccattgaaaagcaggtaccagtgccccttttcagacagtttttgattcgctctagactttttttt

SEQ ID NO: 286686 - DNA, 120 bp, Artificial Sequence
  ENSG00000130635_56 (sequence is synthesized)
tttttaatagggaaaaaatttgataattttcttttttctacatgcacttaagactaaaacacaggtttggattaattttatttgcttcctttttccgcttttcttcccgcagagcctgat

SEQ ID NO: 286687 - DNA, 120 bp, Artificial Sequence
  ENSG00000130635_57 (sequence is synthesized)
gggagaatgtccagggcagggaaaccacattttttgtaggtgataactcaatgaaaattggtgcttattttttacacttctctcttgtggctctcttgtggtgctatctatctgttttaa

SEQ ID NO: 286688 - DNA, 120 bp, Artificial Sequence
  ENSG00000130635_58 (sequence is synthesized)
ggtctccttgaaggcgcactggggaccctggccatgcctcgttctccctgctttctttatcctgttattgcctccacagtctgttgccaaggactctaagatcaatgcacgtcactttcc

SEQ ID NO: 286689 - DNA, 120 bp, Artificial Sequence
  ENSG00000130635_59 (sequence is synthesized)
tttccactgggcaggatagccaagcacactccctcctgcgctctcccgccccggtgcgtccactcccgagggctgttatgaggactgggttgtgcctacttgatttgaaaacacacacaa

SEQ ID NO: 286690 - DNA, 120 bp, Artificial Sequence
  ENSG00000130635_60 (sequence is synthesized)
gcaataaaaagcctcttcctgcattgtctgtggtgtgaccatagcagattatatttggttcctgaatgtttgtggtgctaatttctgtgtttgttccaagccgttcagtcatgccatgcg

SEQ ID NO: 286691 - DNA, 120 bp, Artificial Sequence
  ENSG00000130635_61 (sequence is synthesized)
ctgcctcggtagatggagtaatgtacaatgaactccatgagtctctccagggctgcctgcagcacgtcttttccaagtagcctatttggattcccatctcaaatgtcctggatgcgagcg

SEQ ID NO: 286692 - DNA, 120 bp, Artificial Sequence
  ENSG00000130635_62 (sequence is synthesized)
tcagcggctccagagctcggggcgggtgaggtcccctttggggaaccctttcctggccatcgaggtcggggggctgccgtctgtgggcaggaggacccgaggggcagccaggaaaggcga

SEQ ID NO: 286693 - DNA, 120 bp, Artificial Sequence
  ENSG00000130635_63 (sequence is synthesized)
tctcttcactgtgaaaagttgcccgggtgcagcgccttttccttctaccatgggaaatgcaggctgggcccttggggtgagcctgcggggctctggtgctgtccccgacccccaccacca

SEQ ID NO: 286694 - DNA, 120 bp, Artificial Sequence
  ENSG00000130635_64 (sequence is synthesized)
ccagaatgcagttccagcttaggaagccacaaacaagccacccaggaggaacaaaacaccgccagcgtggattttccaaatttccctggaaagtaagtctcgctcttgccaaagaaaagt

SEQ ID NO: 286695 - DNA, 120 bp, Artificial Sequence
  ENSG00000130635_65 (sequence is synthesized)
ctggcttggagagtctctggagcccaggatgccagcatgtgccaatgactgtcaccttcatctcttcaaaagaaaagccatagccgaggactgtcccgcgacccccgtggactgcgtcta

SEQ ID NO: 286696 - DNA, 120 bp, Artificial Sequence
  ENSG00000130635_66 (sequence is synthesized)
ggtcatgtgattctgttttcatttctcatcccatccaatttgtccttttctcctgtcattttcttcctctgtggtcccttcaaagttgttataatttgtactgaacttcaaaatgtgtcc

SEQ ID NO: 286697 - DNA, 120 bp, Artificial Sequence
  ENSG00000130635_67 (sequence is synthesized)
cgttctccccagaccactctagccacagtatattgcaataaaattacttcttatatttgcagaaattcttttggtgtaattttattttttcctctcaatatatataattggacaaacgct

SEQ ID NO: 286698 - DNA, 120 bp, Artificial Sequence
  ENSG00000130635_68 (sequence is synthesized)
ggcaaaaagaaaaaaatggtaagcaaaaaacccaagataaagtttcgaggacatcaggccttttgaaatacaatgtcaaatgacacattgtacggtttcaaaaaatccgctagacatgtc

SEQ ID NO: 286699 - DNA, 120 bp, Artificial Sequence
  ENSG00000130635_69 (sequence is synthesized)
ataagttttaactgtaatgcccaggaaaggatatcttaaaatattctaaacttgtgtaacaaaggaataattaactgtaatagtttttcaataaatcgagttgggtgtttccaccgtaaa

SEQ ID NO: 286700 - DNA, 120 bp, Artificial Sequence
  ENSG00000130635_70 (sequence is synthesized)
ccttgggtaggggatgttctggactgtgatggagggggcgggataggtgctgatcaaagccggtcctgcacccaagctctgggcatctcagtgctggtcagtttcacctgggatgaaaag

SEQ ID NO: 286701 - DNA, 120 bp, Artificial Sequence
  ENSG00000130635_71 (sequence is synthesized)
cagctcagagctatcgaggcggaggcggagtcccctttgaggggtggaggagaggatgtaaatggcccattccgtgtaaaagatgcgcgcggcagtggtagggaatagttaacacgtggt

SEQ ID NO: 286702 - DNA, 120 bp, Artificial Sequence
  ENSG00000130635_72 (sequence is synthesized)
cgtacctctctgcgtctgttatgcaaccgtttggagtaagtttacagaagctgttgaaacatggaatactgtttatgaaactttatcaagggaatgaaataaaacagcactgtgctgaaa

SEQ ID NO: 286703 - DNA, 120 bp, Artificial Sequence
  ENSG00000130635_73 (sequence is synthesized)
atggcccgctggcccaaagagcagccttccacctggtatagtcagtacaagcgggggtccctggtaagtggccacctcggcccggccacctcggcactgcctgcttgcggcacggctggc

SEQ ID NO: 286704 - DNA, 120 bp, Artificial Sequence
  ENSG00000130635_74 (sequence is synthesized)
tcgcggctctgcatggcacccatcgctgccatgtgtgccacaccgctcttgccaaaccgctccacatcacgtgacagcaagactcagctaggtgtggagtcctctccccagcccccgcca

SEQ ID NO: 286705 - DNA, 120 bp, Artificial Sequence
  ENSG00000130635_75 (sequence is synthesized)
tctcgtggctgcgtctgaaagcgtggagttcgccgatagccctgggactgcagcgtgttccctcgcccctgggaaggcccaggccccaggccagctgctcactttgggctttttctagtg

SEQ ID NO: 286706 - DNA, 120 bp, Artificial Sequence
  ENSG00000130635_76 (sequence is synthesized)
actcactcatctccaaagcaaagaccccactatccggcaggtcttagggagcagggagaccctgggggtgggggtgagcttccagagaaggggtttcccatgggtttggccatgagattc

SEQ ID NO: 286707 - DNA, 120 bp, Artificial Sequence
  ENSG00000130635_77 (sequence is synthesized)
tgctgttgttgatgttcttattatgggaaggctcagacacagcgcagcaaaggtcgtgttctgcctggggccacagggaccagcccacagccaaccccgttccagccagaggccagccca

SEQ ID NO: 286708 - DNA, 120 bp, Artificial Sequence
  ENSG00000130635_78 (sequence is synthesized)
gcattagctctaagatacagcatccaagttgtccctgtcacccagtcgtggggcggcacctgccacagttaattaaaccctctgggcttatctggacgtgattaacgagctgttgatgga

SEQ ID NO: 286709 - DNA, 120 bp, Artificial Sequence
  ENSG00000130635_79 (sequence is synthesized)
gaacctcatcgccttgacccagccacttgctcatggcctggactaaaatgagctcctctttctgattcagatgagaaagggacgggggatgtagggcagcgtctgcatttcccgaggact

SEQ ID NO: 286710 - DNA, 120 bp, Artificial Sequence
  ENSG00000130635_80 (sequence is synthesized)
gctgtctccttagcatccactggtgctttctgtaggatccacctccgctgtctcaggccacctgtgtggcagcccagaccccaccctggcagtgctgaggcagcccctggcagcggaaca

SEQ ID NO: 286711 - DNA, 120 bp, Artificial Sequence
  ENSG00000130635_81 (sequence is synthesized)
ccagcaggtgaagggcagaggccccttgtcgtgtcttcagctctgcctgctttgctgagacctcctcttgcccctggaagggacaaggacattgcactctgcatgatctcctgggactgc

SEQ ID NO: 286712 - DNA, 120 bp, Artificial Sequence
  ENSG00000130635_82 (sequence is synthesized)
tgcaaccaactgtcacagcccggtggcaaacagcagagatttatcctctcccagctctgggccagaattccaagatcgaggtgtgggcggggccgtgctccctctgaagcttccagcggg

SEQ ID NO: 286713 - DNA, 120 bp, Artificial Sequence
  ENSG00000130635_83 (sequence is synthesized)
ggactctgcctgccgcttccagccccgggtggccccagacactccttggcttgtggccacgtcgccccagcttctgcctccgtctttacacagcctctctcttccccctgtgtctctctg

SEQ ID NO: 286714 - DNA, 120 bp, Artificial Sequence
  ENSG00000130635_84 (sequence is synthesized)
tgtgacccacaaggacatttgtcgttggatttagggcccatcctaatctaggatgttcccatttccagatccttcattccatctgcagtgatcttatttctggacaaggtcacctgtgga

SEQ ID NO: 286715 - DNA, 120 bp, Artificial Sequence
  ENSG00000130635_85 (sequence is synthesized)
tctagattctgggagttccgacctggacccatccctcggggccatgattcagccacttccctacaccagcgtggaaaaggggtttttcgtctcttaaattgccacagagcacgtgtgctt

SEQ ID NO: 286716 - DNA, 120 bp, Artificial Sequence
  ENSG00000130635_86 (sequence is synthesized)
agtgtggattaattgaagcgatgcaccagaagttcatggtccaggggcgggctcagagtcggccctcagtggccctggctgaaatccattaggactgtggggacggtcaccctcaccaac

SEQ ID NO: 286717 - DNA, 120 bp, Artificial Sequence
  ENSG00000130635_87 (sequence is synthesized)
tcccacttcctgccagcggatccctctcttgggtaatgagctggtggggggatgttcccaggttggagccacgtttgacctgagatcttctgtattctctagggcgagaaaggcccacaa

SEQ ID NO: 286718 - DNA, 120 bp, Artificial Sequence
  ENSG00000130635_88 (sequence is synthesized)
cccccaggtcccggggggcctcgtcgcaggctgtaggccgtgtgccatgcacgttctcttccaacgttgctgatgactagcgggacatgctgtgaaaatctcccgtgcatgtgtgttccc

SEQ ID NO: 286719 - DNA, 120 bp, Artificial Sequence
  ENSG00000130638_0 (sequence is synthesized)
gccgtctcctcctcccgcctgaggcgagtctgggctcagcctagagctctccggcggcggcgcagcttcagggcagcgcgggctgcagcggcggcggcggttagggctgtgtagggcgag

SEQ ID NO: 286720 - DNA, 120 bp, Artificial Sequence
  ENSG00000130638_1 (sequence is synthesized)
gcctcccccttcctcctcgccatcctactcctccctcctcgtcatcctcccccttcgtcctcctcgccttcctcctcctcgtcaggctcgacccagctgtgagcggcaagatggcggcgc

SEQ ID NO: 286721 - DNA, 120 bp, Artificial Sequence
  ENSG00000130638_2 (sequence is synthesized)
ccaggccgccgcctgccaggctgtcgggcgtcatggtgccggcgcccatccaagacctggaggccctgcgcgcgctcacggcgctcttcaaagagcagcggaaccgagaaacagcaccca

SEQ ID NO: 286722 - DNA, 120 bp, Artificial Sequence
  ENSG00000130638_3 (sequence is synthesized)
ggactatcttccaaagagttctggatatcctaaagaaatcttctcatgctgttgagcttgcctgcagagatccatcccaagtggaaaacctggcttccagtctgcagttaataacagaat

SEQ ID NO: 286723 - DNA, 120 bp, Artificial Sequence
  ENSG00000130638_4 (sequence is synthesized)
gcttcaggtgtcttcgcaatgcttgcatagagtgttctgtgaaccagaattcaatcaggaacttggatacgattggtgttgctgttgatttgattcttctgtttcgtgaactgcgagtgg

SEQ ID NO: 286724 - DNA, 120 bp, Artificial Sequence
  ENSG00000130638_5 (sequence is synthesized)
aacaggaatctctgttgacagcttttcgctgtggcctgcagtttttaggcaacattgcctcacggaatgaagattcccagtctattgtttgggtgcatgctttcccagaactgtttttgt

SEQ ID NO: 286725 - DNA, 120 bp, Artificial Sequence
  ENSG00000130638_6 (sequence is synthesized)
cttgcttaaatcatccggacaaaaaaattgttgcctactcttcaatgattttgtttacatcccttaatcatgaaagaatgaaagaactggaggagaacctcaatattgcaattgatgtca

SEQ ID NO: 286726 - DNA, 120 bp, Artificial Sequence
  ENSG00000130638_7 (sequence is synthesized)
tagatgcttaccaaaaacatcctgaatcagaatggccgttcttgattattacagacctctttctgaaaagcccggaattggtacaagccatgtttcccaaactgaacaatcaagaaagag

SEQ ID NO: 286727 - DNA, 120 bp, Artificial Sequence
  ENSG00000130638_8 (sequence is synthesized)
ttacactgttagaccttatgatagccaagataacgagtgatgagccactcaccaaggatgacatccctgtgtttttgcggcatgctgagttgattgcaagcacctttgtggatcagtgca

SEQ ID NO: 286728 - DNA, 120 bp, Artificial Sequence
  ENSG00000130638_9 (sequence is synthesized)
agactgtgctcaagctggcctctgaggagcctcctgatgatgaggaggcactggctacaattaggcttctcgacgtcctgtgcgaaatgactgtgaatactgagctgctcggctatctgc

SEQ ID NO: 286729 - DNA, 120 bp, Artificial Sequence
  ENSG00000130638_10 (sequence is synthesized)
aggttttccctggcttgctggaaagagtgattgatcttttgcgggtgattcatgtagctggaaaagaaaccacaaacatcttcagtaattgtggttgcgtgagagcagaaggtgacatct

SEQ ID NO: 286730 - DNA, 120 bp, Artificial Sequence
  ENSG00000130638_11 (sequence is synthesized)
ccaatgtggccaatgggtttaagtctcatctcattcgtctgattggaaatctgtgttacaagaataaagataaccaagacaaggtaaatgagctggatggtatcccgttgatcctggaca

SEQ ID NO: 286731 - DNA, 120 bp, Artificial Sequence
  ENSG00000130638_12 (sequence is synthesized)
actgcaacatcagtgacagtaacccctttctgacccagtgggtgatatatgccatccgaaaccttaccgaagacaacagccaaaaccaagatttgattgcaaagatggaggaacaggggc

SEQ ID NO: 286732 - DNA, 120 bp, Artificial Sequence
  ENSG00000130638_13 (sequence is synthesized)
aaaagctgatcctgaaatctactagagacacccctaagccatgaatgaactacatccaaatacctgaatttttggaatctgtttcatggatttttcatcttctaccgtatgtgaaattgc

SEQ ID NO: 286733 - DNA, 120 bp, Artificial Sequence
  ENSG00000130638_14 (sequence is synthesized)
aagtgtttgaagatttataagtacaaatttgggaacatacaaatcttttaggtagtagagtttaacgtgtataagctaaaagtgaaagtaactgagtgttctcttgtttctttgcattaa

SEQ ID NO: 286734 - DNA, 120 bp, Artificial Sequence
  ENSG00000130638_15 (sequence is synthesized)
tgtaactgtgtggtttgcctttgtccccctggatagaacgtgcatttaaagaatatattgtacttactgtgacagcagataataaaccagtctcttggagggcacaacccttatttgaca

SEQ ID NO: 286735 - DNA, 120 bp, Artificial Sequence
  ENSG00000130638_16 (sequence is synthesized)
aaacttggatgttggcttgactgtgtttgtcccttcagatggcaagtcagcatcattctttatattcctcttctcattgggttttctgaactctggcaggcggttgaagtagtttctcac

SEQ ID NO: 286736 - DNA, 120 bp, Artificial Sequence
  ENSG00000130638_17 (sequence is synthesized)
tgtgattaattctagcaatctcttttcacccctctgcctttccaaaacattgacaagactcatttccagttaattaattcgagaaccctccctcttcattttgggtactgggctgtcttg

SEQ ID NO: 286737 - DNA, 120 bp, Artificial Sequence
  ENSG00000130638_18 (sequence is synthesized)
tcactgagccctatccctttggaatgtggcagggagtgaggttggtgagagaacatgtgggcacttaactcttcatgttccagttcatcccagaagtagacatcccaggacccattctgt

SEQ ID NO: 286738 - DNA, 120 bp, Artificial Sequence
  ENSG00000130638_19 (sequence is synthesized)
gtcaaggtgaatgcctgtgtcctccccagcttcatgcctctgtcatgggggaaggaatagcttatgttctgctctggtgcagtgccgtagattaaaggtacatttctatcttctttgatt

SEQ ID NO: 286739 - DNA, 120 bp, Artificial Sequence
  ENSG00000130638_20 (sequence is synthesized)
taaaaagcaccagtctcataaaggtgccactcagttttagccatgtcttcactgaaattgcaaaagtacttttagggagcaggagtttatttgacatctagttatctgtctgtctgttca

SEQ ID NO: 286740 - DNA, 120 bp, Artificial Sequence
  ENSG00000130638_21 (sequence is synthesized)
tctatctatctgtctgctgtatgagaggtaggactggattaaatgaccactgaactcactgaatccagatcattcatatcatcaacaaaagctctagggggaggtcacgttgtgaatgct

SEQ ID NO: 286741 - DNA, 120 bp, Artificial Sequence
  ENSG00000130638_22 (sequence is synthesized)
taaaacatattattttcttcaacaaccatatcgctaaactaatatatccagagattttgcacaattcgtgttgaaccttccaaaacaaaaataaagacctgtccaaaagttttgacaaaa

SEQ ID NO: 286742 - DNA, 120 bp, Artificial Sequence
  ENSG00000130638_23 (sequence is synthesized)
atactgattgctcccaaataaagtgcttctaagctttgtgtagacatagtttaactgatttgtaaaaatagcttaagcatgttgagaatgaagtaaaagttttcccatgtgctgtctaat

SEQ ID NO: 286743 - DNA, 120 bp, Artificial Sequence
  ENSG00000130638_24 (sequence is synthesized)
gtactctgtgtaactctgaagacacatcagcttctaggattgcagcaatctatgaataacattttttctctcatttatgactttccatcagtaaagaagccattgcagaatttaaaatta

SEQ ID NO: 286744 - DNA, 120 bp, Artificial Sequence
  ENSG00000130638_25 (sequence is synthesized)
cacaaaggagtcattctctcctgggacataaagagttaaagctctgtcctctaaatagaagcctggccaaagggagaaaacagtgggagtcccttttcccttttaacaagtttgcaatag

SEQ ID NO: 286745 - DNA, 120 bp, Artificial Sequence
  ENSG00000130638_26 (sequence is synthesized)
acacttctttttttcctgtctcaatggatgtgtgcacaccagtggaatcgcacaaacttgtcggtatgagctatataataacaaacacaaataaataaaagggagccttgtgagaataca

SEQ ID NO: 286746 - DNA, 120 bp, Artificial Sequence
  ENSG00000130638_27 (sequence is synthesized)
gttacaagaataaagataaccaagacaagagctcttttcatctgctttagtttgttggagccttatgatacctctgtggaaagggctgaaaagatatttccaccatcattttctaaatga

SEQ ID NO: 286747 - DNA, 120 bp, Artificial Sequence
  ENSG00000130638_28 (sequence is synthesized)
ctggagaagacagtcgctttagtggtggaatgacacatgtccactaggagctgtagcaaaagtccgtgtggtgaggcctgtcagaaaggaacaggggggtgatgtgtcctctgggctggc

SEQ ID NO: 286748 - DNA, 120 bp, Artificial Sequence
  ENSG00000130638_29 (sequence is synthesized)
tgtgccaggagcatttctctctaaggacaggcactggactgccaggagcatggtatcaactggaaggatggtcatctttctttgagatacttgtctttgggcaagatttaagagaatcaa

SEQ ID NO: 286749 - DNA, 120 bp, Artificial Sequence
  ENSG00000130638_30 (sequence is synthesized)
gtcccttgcctcatgttcattcatgccaccatccagtccacacttgcatcattgctggccctgaacttcggcagtgacttcctaactcatctttcagtttctgctcctgctgggtccagg

SEQ ID NO: 286750 - DNA, 120 bp, Artificial Sequence
  ENSG00000130638_31 (sequence is synthesized)
ccatctccctaggcggcttcttgagtgtcccgtctccctcactgccaatccccagatgtaacttctgttctgacttctatgatgttttaatgaataaaaattcccaattttaatgtaaaa

SEQ ID NO: 286751 - DNA, 120 bp, Artificial Sequence
  ENSG00000130638_32 (sequence is synthesized)
tttgctccaagaagacacataatgacacataatcttgcattcttgatggcagatgtctgctgttagtgaaaatgatgagtcgtgaggcactggctacaattaggcttctcgacgtcctgt

SEQ ID NO: 286752 - DNA, 80 bp, Artificial Sequence
  ENSG00000130638_33 (sequence is synthesized)
cctggacccaggcgccgcccccgcctcgctggagacgcggagggcgaggcctgcgcgggctgcctgagcgccacccaggc

SEQ ID NO: 286753 - DNA, 80 bp, Artificial Sequence
  ENSG00000130638_34 (sequence is synthesized)
tgcctgagcgccacccaggcctcccgactcccaggcaccgcctcgtgctcgtgggtccccgcggggcctggggcgggcgc

SEQ ID NO: 286754 - DNA, 120 bp, Artificial Sequence
  ENSG00000130638_35 (sequence is synthesized)
gattagccgctgttcaagctctggcatgcatggtatatatggatacatccaaggtcaccagggcactatgtggagctgttcccctagactctgaagatacaagtgttagtcttctgttgt

SEQ ID NO: 286755 - DNA, 120 bp, Artificial Sequence
  ENSG00000130638_36 (sequence is synthesized)
attttaggcagctattgcttcagaagtcacagtctgttccaccagcctttgccaaggatgcaggtgccacagcatctcaagagaagtcaccaatcacacagctccatgctgaggccctct

SEQ ID NO: 286756 - DNA, 120 bp, Artificial Sequence
  ENSG00000130638_37 (sequence is synthesized)
attatacatgtatggcttcatttagaatatagtccttggaagacattcactcttttggagtgaaagcttgaggtgcttagaaagtagcttggatagagagatatatattttatatgaata

SEQ ID NO: 286757 - DNA, 120 bp, Artificial Sequence
  ENSG00000130640_0 (sequence is synthesized)
ggagaacatattgtgatgttcgtgcctcagagctaaaactatgagtgaatttcggattcaccatgacgtcaatgaactgcttagcctgctgcgtgtccacggaggagatggggctgaggt

SEQ ID NO: 286758 - DNA, 120 bp, Artificial Sequence
  ENSG00000130640_1 (sequence is synthesized)
ctacattgacctgcttcaaaagaacaggaccccgtacgtcactaccactgtctctgctcacagtgccaaggttaaaattgcagagttttctcgtactccagaagactttctaaagaaata

SEQ ID NO: 286759 - DNA, 120 bp, Artificial Sequence
  ENSG00000130640_2 (sequence is synthesized)
tgatgaactgaaatctaaaaatacaaggaaccttgacccgctggtgtacctgttgtcaaagctcacggaagacaaagagactctgcagtacttacaacagaatgcaaaagaaagagctga

SEQ ID NO: 286760 - DNA, 120 bp, Artificial Sequence
  ENSG00000130640_3 (sequence is synthesized)
gcttgcagccgctgctgtgggcagcagtaccaccagcatcaacgtccctgccgcggcctccaagatctccatgcaggagcttgaggaactgaggaagcagcttggcagcgtggccacagg

SEQ ID NO: 286761 - DNA, 120 bp, Artificial Sequence
  ENSG00000130640_4 (sequence is synthesized)
ctccacgctgcagcagtctctggaacttaaaagaaagatgcttcgagacaagcagaacaaaaaaaattcaggccagcacctccccatcttcccagcatgggtgtatgagagacctgccct

SEQ ID NO: 286762 - DNA, 120 bp, Artificial Sequence
  ENSG00000130640_5 (sequence is synthesized)
gatcggggatttcctgattggtgctggcatcagcacagacaccgctttgccgataggcacgttgcccctggcctcgcaggagtcggccgtggtggaggacctgctgtacgtgctggtggg

SEQ ID NO: 286763 - DNA, 120 bp, Artificial Sequence
  ENSG00000130640_6 (sequence is synthesized)
cgtggacgggaggtacgtcagtgctcagcccctggctgggaggcagagccggaccttcctcgtggaccccaacctggacctgtccatcagggagctggtgcacaggatcctcccagtggc

SEQ ID NO: 286764 - DNA, 120 bp, Artificial Sequence
  ENSG00000130640_7 (sequence is synthesized)
cgccagctactccgctgtgaccaggttcattgaagagaagtcttccttcgagtacgggcaggtgaaccacgccctggcggccgccatgcgcaccctggtgaaggagcacctgattctggt

SEQ ID NO: 286765 - DNA, 120 bp, Artificial Sequence
  ENSG00000130640_8 (sequence is synthesized)
gtcacagctggagcagctgcacaggcagggcctcctttcgctgcagaagctctggttctacatccagccagccatgcgcaccatggacatcctggcctccctcgccacctcggtggacaa

SEQ ID NO: 286766 - DNA, 120 bp, Artificial Sequence
  ENSG00000130640_9 (sequence is synthesized)
aggcgaatgtcttggggggtccacgctgagcctgctccacgacaggagcttcagctacacaggggacagccaggcgcaggagctatgcctgtacctaaccaaggcggccagtgctcccta

SEQ ID NO: 286767 - DNA, 120 bp, Artificial Sequence
  ENSG00000130640_10 (sequence is synthesized)
cttcgaggttctggagaagtggatctacaggggcatcatccacgacccatacagtgagtttatggtcgaggagcacgagctgcggaaggagaggatccaggaggattacaacgacaagta

SEQ ID NO: 286768 - DNA, 120 bp, Artificial Sequence
  ENSG00000130640_11 (sequence is synthesized)
ctgggaccagcggtacaccatcgtccagcagcagatcccgtccttcctgcagaaaatggcggacaagatcctcagcacaggaaaatatctaaatgtggtcagagagtgtggccatgacgt

SEQ ID NO: 286769 - DNA, 120 bp, Artificial Sequence
  ENSG00000130640_12 (sequence is synthesized)
cacctgcccggtggctaaagagatcatctacacgttaaaagagcgggcgtatgtggagcagatcgagaaggcgtttaactacgccagcaaggtgctgctggacttcctgatggaggagaa

SEQ ID NO: 286770 - DNA, 120 bp, Artificial Sequence
  ENSG00000130640_13 (sequence is synthesized)
ggagctggtggctcacctcaggtccatcaagcgctacttcctcatggaccagggcgacttcttcgtgcacttcatggacctcgcggaggaggagctccggaagccggtggaggacatcac

SEQ ID NO: 286771 - DNA, 120 bp, Artificial Sequence
  ENSG00000130640_14 (sequence is synthesized)
gccccctcgcctggaagcgctcctggagctggcgctgcgcatgagcacggccaacactgaccccttcaaggacgacctcaagatcgacctgatgccccatgacctcatcactcagctctt

SEQ ID NO: 286772 - DNA, 120 bp, Artificial Sequence
  ENSG00000130640_15 (sequence is synthesized)
gcgcgtcctggccatcgagaccaagcaggagaaggcgatggcgcacgccgaccccacggagctggcgctgagcggcctggaggccttctctttcgactacatcgtcaagtggcccctttc

SEQ ID NO: 286773 - DNA, 120 bp, Artificial Sequence
  ENSG00000130640_16 (sequence is synthesized)
caggcacatgttctactgcaagcacgtggagcggcagctctgcagcgtctggatcagcaacaaaaccgccaagcagcactcgctgcactccgcccagtggtttgctggggctttcactct

SEQ ID NO: 286774 - DNA, 120 bp, Artificial Sequence
  ENSG00000130640_17 (sequence is synthesized)
gcggcagcgaatgctcaacttcgtccagaatattcaatactacatgatgtttgaagtgatggaaccgacctggcacatcctggagaaaaacctgaaatccgcctccaacattgacgacgt

SEQ ID NO: 286775 - DNA, 120 bp, Artificial Sequence
  ENSG00000130640_18 (sequence is synthesized)
ccttggccaccacacaggcttcctggacacctgcctgaaggactgcatgctcaccaaccccgagctgctgaaggtcttctccaagctcatgtctgtgtgcgtcatgttcaccaactgcat

SEQ ID NO: 286776 - DNA, 120 bp, Artificial Sequence
  ENSG00000130640_19 (sequence is synthesized)
gcagaaatttacacagagcatgaaattagatggcgagctgggcgggcagacgctggagcacagcaccgtcctggggctgcccgcaggggccgaggagcgggcccggaaggagctcgccag

SEQ ID NO: 286777 - DNA, 120 bp, Artificial Sequence
  ENSG00000130640_20 (sequence is synthesized)
gaagcacctggctgagcacgcagacactgtgcagctggtgtccggcttcgaggccaccatcaacaagtttgacaagaacttctcagcccacctgctggacctcctggcccggctgagcat

SEQ ID NO: 286778 - DNA, 120 bp, Artificial Sequence
  ENSG00000130640_21 (sequence is synthesized)
ctatagcaccagtgactgtgagcacggcatggccagcgtcatctccaggcttgacttcaatggtttctacacggagcgcctggagcgcctgtctgcagagaggagccagaaggccacccc

SEQ ID NO: 286779 - DNA, 120 bp, Artificial Sequence
  ENSG00000130640_22 (sequence is synthesized)
ccaagtgcctgtcctgcgggggcccccggctcctgcacccagggtcgcagtcaccgcacagtgagccctggctgtgacaggaaggaagggtgtggggtcagcagggactggtgcaaatgg

SEQ ID NO: 286780 - DNA, 120 bp, Artificial Sequence
  ENSG00000130640_23 (sequence is synthesized)
gtccagaattttcaaatcgaatgctctgtgttctgtctttgcagtttaaatataaagcaggaatgattgactcagctcactttgtttctcaaggcgctgggtttcgttttatagaagctg

SEQ ID NO: 286781 - DNA, 120 bp, Artificial Sequence
  ENSG00000130640_24 (sequence is synthesized)
cccaggcagggtggatgtctccctggatttgctaatctgtttgctttttgaaattacactatcacctttttgggtgtttttggcctcaaagtggaaatacatggtgtttaagccaggagc

SEQ ID NO: 286782 - DNA, 120 bp, Artificial Sequence
  ENSG00000130640_25 (sequence is synthesized)
aagcaaagatgcatgtggggtaagatccaggcctggtgtccacatctttccgggtgagctggggccgggcttcctgaggtctgtcggaaccgggacaagcctctggaaacggtcagggag

SEQ ID NO: 286783 - DNA, 120 bp, Artificial Sequence
  ENSG00000130640_26 (sequence is synthesized)
ttgtggaaacccaccgggcatcgggtgtcgggtttgctttggccccagaggcagccccgttccttctcctgaggactcacccgcctccacgaccctcctcctgctgctgctccaactggt

SEQ ID NO: 286784 - DNA, 120 bp, Artificial Sequence
  ENSG00000130640_27 (sequence is synthesized)
ccagggcaggaggccacagacagggccctcaggcaccctgggagcccacacctccccctccgtgggagtgggtcgaggggcaggctctgctgctggctggaaaccccaccccgccctatc

SEQ ID NO: 286785 - DNA, 120 bp, Artificial Sequence
  ENSG00000130640_28 (sequence is synthesized)
cggtaccgccttgttacgtagaacttactcagcagactgacacccaatccccctcgggcgatcatctgccctgtcttcccacctccagggctacagtgggcagcaccgccatccccagtg

SEQ ID NO: 286786 - DNA, 120 bp, Artificial Sequence
  ENSG00000130640_29 (sequence is synthesized)
tgacagggccctgggagcctcagggctgcccggccaggttggtctgctctggttacattctggccaagctgccccttcctgctgacctgcatgtgtattgttgtcaccttcagctctcag

SEQ ID NO: 286787 - DNA, 120 bp, Artificial Sequence
  ENSG00000130640_30 (sequence is synthesized)
cacctcggcccccttgggcagtgaggaagggccctggaggcgaggttgggagaaaggatagctagaacaggatcctgcggggaacaagggttgtgggcagctctcacccggggctgcctc

SEQ ID NO: 286788 - DNA, 120 bp, Artificial Sequence
  ENSG00000130640_31 (sequence is synthesized)
actgagagcaccgccgagtgggggtgggggtgtccaactctccagccacaaaccgcttcctccttgtctgcaggctgtgcaggtctggcctgtgagtaaacacatttatcagcaacccaa

SEQ ID NO: 286789 - DNA, 120 bp, Artificial Sequence
  ENSG00000130640_32 (sequence is synthesized)
ctcgccgccgtaggccccactggatcctacaactactttttccctcttttgctcacgcacctcgaagaactggtgctcccgcgggaagcgcacggggcgcgcaacgaagcgaaagggcgc

SEQ ID NO: 286790 - DNA, 80 bp, Artificial Sequence
  ENSG00000130640_33 (sequence is synthesized)
gggatcccgctctacaggcagcggctccgccgccccgggccccgcagcgaggcgggcgcacagcgcggggggcaactgca

SEQ ID NO: 286791 - DNA, 120 bp, Artificial Sequence
  ENSG00000130640_34 (sequence is synthesized)
gtcggccaccgtccgcgagccgagccggacgtgacgtcacgctcacttccgccgccgtcgggggctgcgcgggggctgtggctccgggactgcggttaaaattgcagagttttctcgtac

SEQ ID NO: 286792 - DNA, 72 bp, Artificial Sequence
  ENSG00000130640_35 (sequence is synthesized)
agagacctgccctgatcggggatttcctgattggtgctggcatcagcacagacaccgctttgccgatagttc

SEQ ID NO: 286793 - DNA, 120 bp, Artificial Sequence
  ENSG00000130640_36 (sequence is synthesized)
tgtgcagggtgagcactgttcctgggtcagggtggtgcagggtgagcccacccctgggtcagggtgcagggtgagcgccgttcctgggtcagggtggtacagggtgagcaccattcctgg

SEQ ID NO: 286794 - DNA, 120 bp, Artificial Sequence
  ENSG00000130640_37 (sequence is synthesized)
gtgagggtgcagggtgagcccacccctgggtcagggtgcaggatgaacactgttcctggatcaggatggtgcagggtgaacccacccctcagtccatgtgcaggatgagcgtcgtccctg

SEQ ID NO: 286795 - DNA, 120 bp, Artificial Sequence
  ENSG00000130640_38 (sequence is synthesized)
ggtcagggtgcatgatgagcaccgcccctgggtcagggtgcagggtgagcgccacctctggtgcagggggcagggtgagcgccacctctggtgcagggtgcagggtgagcgccacctctg

SEQ ID NO: 286796 - DNA, 120 bp, Artificial Sequence
  ENSG00000130640_39 (sequence is synthesized)
cagggctgtgtaccgtgcaagatgcagggtgagtgcccgttcctgggtggcctcaatggtaccggcaacgatggcagacagcacttggtctgtgtgtgtgttcagctctgattctcctga

SEQ ID NO: 286797 - DNA, 120 bp, Artificial Sequence
  ENSG00000130640_40 (sequence is synthesized)
ctccccccagcagctcctgtgattcaccccactgtgcagatgagtaaatggaggcctatggagaaagctgggcctagaaccctccctcttccccactctgtcccctgcagccatgaggtg

SEQ ID NO: 286798 - DNA, 83 bp, Artificial Sequence
  ENSG00000130640_41 (sequence is synthesized)
cctccctcttccccactctgtcccctgcagccatgaggtgggagagtcctgacatgtgcattcctgtggataaaaagggaggg

SEQ ID NO: 286799 - DNA, 61 bp, Artificial Sequence
  ENSG00000130640_42 (sequence is synthesized)
tactcgggtcgtgccactgcattccagcctgggcgtcagagtgagactctgtctcaaaaaa

SEQ ID NO: 286800 - DNA, 120 bp, Artificial Sequence
  ENSG00000130640_43 (sequence is synthesized)
tggcacgatcttgtcttactgcagtctcaacctcccaggctgatgtgatcctcccatctcagcttcccaagtagtgaccacaggcaagtgccaccacgcctcgctaatttttgaatcttt

SEQ ID NO: 286801 - DNA, 84 bp, Artificial Sequence
  ENSG00000130640_44 (sequence is synthesized)
caggcaagtgccaccacgcctcgctaatttttgaatctttttgtagaaatggggttttgttattgtctaccagcctcggcctcc

SEQ ID NO: 286802 - DNA, 120 bp, Artificial Sequence
  ENSG00000130640_45 (sequence is synthesized)
agtttaacacaatatggagatgagttttgttagtttatttcagagggataattatttaacctacccaatttaattccattggcttattgtgttcaattttcgtaaaggtttttttttaca

SEQ ID NO: 286803 - DNA, 120 bp, Artificial Sequence
  ENSG00000130640_46 (sequence is synthesized)
ctggtggggtctgtcggcttctcttcagtgcgatatatttaaatggataaaaatatgttagttcccaaagaattgtattatgtctattacgtcaagataccgttgttgaaatattttcaa

SEQ ID NO: 286804 - DNA, 120 bp, Artificial Sequence
  ENSG00000130640_47 (sequence is synthesized)
aaaatacattagtgatgtggaaatgttatttctttactaatggaccaaataaaatctggtataatgggcacctttaaagaaagcaccttcacacttgaagtgcgtaaatgatgtttgaag

SEQ ID NO: 286805 - DNA, 120 bp, Artificial Sequence
  ENSG00000130640_48 (sequence is synthesized)
ttgttcagatgatgacgtggagatgtctggtttctgtcaatgttggccccgcctaccccacacgagcatcattttgggtgtcagggccccacgcaccccacacgagcatcattttgttgc

SEQ ID NO: 286806 - DNA, 120 bp, Artificial Sequence
  ENSG00000130640_49 (sequence is synthesized)
ctgggctcatcatggaaggaaatgctaaattccaaaaagaggtgggtgcagataaagacaaatcagtttcccacctatctctgcggaccgtacattctccctgagcccaggttaaatact

SEQ ID NO: 286807 - DNA, 77 bp, Artificial Sequence
  ENSG00000130640_50 (sequence is synthesized)
ctgcggaccgtacattctccctgagcccaggttaaatactccgttccagagcgaggtttgtaggcagagtctcgctc

SEQ ID NO: 286808 - DNA, 120 bp, Artificial Sequence
  ENSG00000130640_51 (sequence is synthesized)
acaggcgtgagccaccgtgcccggcccctaggttcgttttagcccacagttgagaagtaactggtagattaggctcggcccttgtggaacgttacttggaagtgtgctggcctctgttaa

SEQ ID NO: 286809 - DNA, 120 bp, Artificial Sequence
  ENSG00000130640_52 (sequence is synthesized)
tgctggcctctgttaatgtccctgcgcgctgccggcctggagaagtgtcgcctgcctcaggcgcccttgctttgcctgtgaccgaagcgctccctgtggttttagtgagtttatggtcga

SEQ ID NO: 286810 - DNA, 120 bp, Artificial Sequence
  ENSG00000130640_53 (sequence is synthesized)
taaaatcaactttaactagaaaggcagacggcacaggtgacgctagaaaggcagacagtacaggtcatgctagaaaggcagacggcacaggtcatgctaggaaggcagacggcacaggtg

SEQ ID NO: 286811 - DNA, 120 bp, Artificial Sequence
  ENSG00000130640_54 (sequence is synthesized)
acgctagaaacgcagacggcacaggtgacgctagaaacgcagacggcacaggtgatgctattaaggcagacgcctgggttgtgactgaagcaactgcaagtgagactctttccatcccac

SEQ ID NO: 286812 - DNA, 120 bp, Artificial Sequence
  ENSG00000130640_55 (sequence is synthesized)
tcagacaatgaggaaaagtgagtggtgcttggcattcctgcgcttcaatggctcaaaaacagagtatgcgagagaaactaagttattcacaggacctgagatatctggactttcttctct

SEQ ID NO: 286813 - DNA, 120 bp, Artificial Sequence
  ENSG00000130640_56 (sequence is synthesized)
ggcggaagccgattttcttacccagcgttacctttctgaattcagtatgagaagagctgcggcccaggtgcagcccagaatcctcagcaccgaacacatgttgagaacgggtttcagaaa

SEQ ID NO: 286814 - DNA, 120 bp, Artificial Sequence
  ENSG00000130640_57 (sequence is synthesized)
gagctcagacactgacctatgtctgtagatccgcctctcacctgccggtgcaggggaggctgccacaggctcagagcagatttccatggcctccccttctgaccgctctccactgtcccc

SEQ ID NO: 286815 - DNA, 120 bp, Artificial Sequence
  ENSG00000130643_0 (sequence is synthesized)
atccacatccgcatcgtcgtcctccccgaccgcgtcctgcagcagctgccagtggagccgcctgacaaggactgccatccaccatggtgaagctgggctgcagcttctctgggaagccag

SEQ ID NO: 286816 - DNA, 120 bp, Artificial Sequence
  ENSG00000130643_1 (sequence is synthesized)
gtaaagaccctggggaccaggatggggctgccatggacagtgtgcctctgatcagccccttggacatcagccagctccagccgccactccctgaccaggtggtcatcaagacacagacag

SEQ ID NO: 286817 - DNA, 120 bp, Artificial Sequence
  ENSG00000130643_2 (sequence is synthesized)
aataccagctgtcctccccagaccagcagaatttccctgacctggagggccagaggctgaactgcagccacccagaggaagggcgcaggctgcccaccgcacggatgatcgccttcgcca

SEQ ID NO: 286818 - DNA, 120 bp, Artificial Sequence
  ENSG00000130643_3 (sequence is synthesized)
tggcgctactgggctgcgtgctgatcatgtacaaggccatctggtacgaccagttcacctgccccgacggcttcctgctgcggcacaagatctgcacgccgctgaccctggagatgtact

SEQ ID NO: 286819 - DNA, 120 bp, Artificial Sequence
  ENSG00000130643_4 (sequence is synthesized)
acacggagatggaccccgagcgccaccgcagcatcctggcggccatcggggcctacccgctgagccgcaagcacggcacggagacgccggcggcctggggggacggctaccgcgcagcca

SEQ ID NO: 286820 - DNA, 80 bp, Artificial Sequence
  ENSG00000130643_5 (sequence is synthesized)
ggcggccaccgaaccccccgggaagccgtcggccaaggcggagaaggaggcggcgcggaaggcggccgggagcgcggcgc

SEQ ID NO: 286821 - DNA, 120 bp, Artificial Sequence
  ENSG00000130643_6 (sequence is synthesized)
ccccgcccgcgcagtgacgtctccagccccgcagcccggcccgggcgtcctccgccagctcctgtgaccagcgcgtctcccgatgctctccgccgtgttcgtgtccccaggcgccctcgc

SEQ ID NO: 286822 - DNA, 120 bp, Artificial Sequence
  ENSG00000130643_7 (sequence is synthesized)
tgcagccccgcccccgtgggtctctgactctgtcgcttttctctaagtaaagatttcacgtccaccggaggcttccatctctcctgcgcgtcctctgccgggctggcctttctcccgccc

SEQ ID NO: 286823 - DNA, 120 bp, Artificial Sequence
  ENSG00000130643_8 (sequence is synthesized)
cccaccccgccagttgtgagtgaggccggcattgtgctccccccagggacccccgaaggacccaggagagaccccgtggggggcagctcccaggaagccgtggtgcgcccaggcggagca

SEQ ID NO: 286824 - DNA, 120 bp, Artificial Sequence
  ENSG00000130643_9 (sequence is synthesized)
ccctatccgctgcccagccccttgtcctgctggttccccgaccccccgcccccatctacctggtgctgggcctgggccccgggcgttccccctctgacaggagtgtctgcctcccggggg

SEQ ID NO: 286825 - DNA, 120 bp, Artificial Sequence
  ENSG00000130643_10 (sequence is synthesized)
acccctggttctgggcggcacccatgagcagctcctgcctcctagatgtgtggcccacaggcataaatgaccaagtgaagaaaggagtgaatgggggcgtctgagtggggagtggggcct

SEQ ID NO: 286826 - DNA, 120 bp, Artificial Sequence
  ENSG00000130643_11 (sequence is synthesized)
gatgaggggtgagctctggttcctgggggctggggtctcccgtgtccctggagccagatgaaagatggtgaggctgaaacgccaggggagcctggagctgccatgagtctcccccagcat

SEQ ID NO: 286827 - DNA, 120 bp, Artificial Sequence
  ENSG00000130643_12 (sequence is synthesized)
ccccaccccagccccagcatccccaccccagccccagcatccccaccccagccccagccaactcccggcactgaacactacagggaatggacttccggcagatctcacccaccacctgca

SEQ ID NO: 286828 - DNA, 120 bp, Artificial Sequence
  ENSG00000130643_13 (sequence is synthesized)
ccaccccagccagcagcagctctgcagccccgcccaccccagccagcagcagctctgcagccccgcccaccccagccagcagcagctctgcagccccgcccaccccagccaattgcagca

SEQ ID NO: 286829 - DNA, 120 bp, Artificial Sequence
  ENSG00000130643_14 (sequence is synthesized)
ctgcagccccgcccaccccagccaattgcagcactgcagccccgcccaccccagccagcagcggctctgcagccccgcccaccccagcccccgaccattggtggatggaagccccccacc

SEQ ID NO: 286830 - DNA, 120 bp, Artificial Sequence
  ENSG00000130643_15 (sequence is synthesized)
attggctcccaggcttgctggctaggtgcgggtctaggcagcttcccagctcagtgggactggcctgctttggaacagcggcagtgcccaggaagcctgtgaactgggcctgccagggaa

SEQ ID NO: 286831 - DNA, 120 bp, Artificial Sequence
  ENSG00000130643_16 (sequence is synthesized)
gccatggtgagctggaagccagccaggtggggtcagggaaggcagggccatgcacaccacacccttcactgctgggcttctaagggcattggccagatgaacaagcacacgcagaactga

SEQ ID NO: 286832 - DNA, 120 bp, Artificial Sequence
  ENSG00000130643_17 (sequence is synthesized)
attggccctgatggcctgcaagggaggggggcccggggcctggggcgtcagctgggatatatgggggcagggagtctctgcatggccgatgtttgaattaaaatacagctttcccctgta

SEQ ID NO: 286833 - DNA, 120 bp, Artificial Sequence
  ENSG00000130643_18 (sequence is synthesized)
acaacgcgcgacctcctgctccatgcccctccagggccctgagttctgaactggaggctgatcttcggtgtcctgaagccatggctccattacaaactgtccgcagtgtccccaaccgca

SEQ ID NO: 286834 - DNA, 120 bp, Artificial Sequence
  ENSG00000130643_19 (sequence is synthesized)
cccgcccggccgcgaagcgtctggaaccgcatcctccgcatccacatccgcatcgtcgtcctccccgaccgcgtcctgcagcagctgccagtggagccgcctgactgccatccaccatgg

SEQ ID NO: 286835 - DNA, 120 bp, Artificial Sequence
  ENSG00000130643_20 (sequence is synthesized)
agagggtggcagtgagtcatcccgcccagagctggccccaccggctgccctgcacccaccaggccccctcccgaggctgcaggtgcagactgaccaaacagtggcgctcctgagatgttt

SEQ ID NO: 286836 - DNA, 120 bp, Artificial Sequence
  ENSG00000130643_21 (sequence is synthesized)
ttctttctgggaagtgcccgcgagtgctgcttgcttgtttgcccagtgggtcattgtctcatcttcagtgacttacgggctttctatgtaatacttcctttctgcagtatatctggcaaa

SEQ ID NO: 286837 - DNA, 120 bp, Artificial Sequence
  ENSG00000130643_22 (sequence is synthesized)
tatcttctctcatcctcttgtttaaatctgtcaatgttactaatgatagctttagtcatttttagtggactgtttccaaagccttccattctccagtagacagatctgctagggctcccc

SEQ ID NO: 286838 - DNA, 120 bp, Artificial Sequence
  ENSG00000130649_0 (sequence is synthesized)
ctcccgggctggcagcagggccccagcggcaccatgtctgccctcggagtcaccgtggccctgctggtgtgggcggccttcctcctgctggtgtccatgtggaggcaggtgcacagcagc

SEQ ID NO: 286839 - DNA, 120 bp, Artificial Sequence
  ENSG00000130649_1 (sequence is synthesized)
tggaatctgcccccaggccctttcccgcttcccatcatcgggaacctcttccagttggaattgaagaatattcccaagtccttcacccggttggcccagcgcttcgggccggtgttcacg

SEQ ID NO: 286840 - DNA, 120 bp, Artificial Sequence
  ENSG00000130649_2 (sequence is synthesized)
ctgtacgtgggctcgcagcgcatggtggtgatgcacggctacaaggcggtgaaggaagcgctgctggactacaaggacgagttctcgggcagaggcgacctccccgcgttccatgcgcac

SEQ ID NO: 286841 - DNA, 120 bp, Artificial Sequence
  ENSG00000130649_3 (sequence is synthesized)
agggacaggggaatcatttttaataatggacctacctggaaggacatccggcggttttccctgaccaccctccggaactatgggatggggaaacagggcaatgagagccggatccagagg

SEQ ID NO: 286842 - DNA, 120 bp, Artificial Sequence
  ENSG00000130649_4 (sequence is synthesized)
gaggcccacttcctgctggaagcactcaggaagacccaaggccagcctttcgaccccaccttcctcatcggctgcgcgccctgcaacgtcatagccgacatcctcttccgcaagcatttt

SEQ ID NO: 286843 - DNA, 120 bp, Artificial Sequence
  ENSG00000130649_5 (sequence is synthesized)
gactacaatgatgagaagtttctaaggctgatgtatttgtttaatgagaacttccacctactcagcactccctggctccagctttacaataattttcccagctttctacactacttgcct

SEQ ID NO: 286844 - DNA, 120 bp, Artificial Sequence
  ENSG00000130649_6 (sequence is synthesized)
tgcctgctcgtggaaatggagaaggaaaagcacagtgcagagcgcttgtacacaatggacggtatcaccgtgactgtggccgacctgttctttgcggggacagagaccaccagcacaact

SEQ ID NO: 286845 - DNA, 120 bp, Artificial Sequence
  ENSG00000130649_7 (sequence is synthesized)
ctgagatatgggctcctgattctcatgaaataccctgagatcgaagagaagctccatgaagaaattgacagggtgattgggccaagccgaatccctgccatcaaggataggcaagagatg

SEQ ID NO: 286846 - DNA, 120 bp, Artificial Sequence
  ENSG00000130649_8 (sequence is synthesized)
ccctacatggatgctgtggtgcatgagattcagcggttcatcaccctcgtgccctccaacctgccccatgaagcaacccgagacaccattttcagaggatacctcatccccaagggcaca

SEQ ID NO: 286847 - DNA, 120 bp, Artificial Sequence
  ENSG00000130649_9 (sequence is synthesized)
gtcgtagtgccaactctggactctgttttgtatgacaaccaagaatttcctgatccagaaaagtttaagccagaacacttcctgaatgaaaatggaaagttcaagtacagtgactatttc

SEQ ID NO: 286848 - DNA, 120 bp, Artificial Sequence
  ENSG00000130649_10 (sequence is synthesized)
aagccattttccacaggaaaacgagtgtgtgctggagaaggcctggctcgcatggagttgtttcttttgttgtgtgccattttgcagcattttaatttgaagcctctcgttgacccaaag

SEQ ID NO: 286849 - DNA, 120 bp, Artificial Sequence
  ENSG00000130649_11 (sequence is synthesized)
gatatcgacctcagccctatacatattgggtttggctgtatcccaccacgttacaaactctgtgtcattccccgctcatgagtgtgtggaggacaccctgaaccccccgctttcaaacaa

SEQ ID NO: 286850 - DNA, 120 bp, Artificial Sequence
  ENSG00000130649_12 (sequence is synthesized)
gttttcaaattgtttgaggtcaggatttctcaaactgattcctttctttgcatatgagtatttgaaaataaatattttcccagaatataaataaatcatcacatgattattttaactata

SEQ ID NO: 286851 - DNA, 120 bp, Artificial Sequence
  ENSG00000130649_13 (sequence is synthesized)
acttccgggttgtttgctcccggagccataaccgcagctcagcgtgcgggcagagccggctgacaggagacaggacacagcacagagccccgcgccctctgaggcgggaggcttcgttcc

SEQ ID NO: 286852 - DNA, 120 bp, Artificial Sequence
  ENSG00000130649_14 (sequence is synthesized)
tctaatgccaggaacaaactatcacaaccagccctggggttaatcctgtgagaagattagggctttcatcttcatttagacctgacccctgactgctttctatctaatccttcactaagc

SEQ ID NO: 286853 - DNA, 120 bp, Artificial Sequence
  ENSG00000130649_15 (sequence is synthesized)
aactccttcaactggaaatatactatcctatatagcataatattcaaaactacattcttcactgggggtttccagatgaaagcccacattttgttaacatgactcactgagacagtcttt

SEQ ID NO: 286854 - DNA, 120 bp, Artificial Sequence
  ENSG00000130649_16 (sequence is synthesized)
gcgcaggctgacggcgggcgggggtcgcctgctccagctcgggctcccgcgccagaaccgggtccagaaccttgattccggaagcgggcaacggggtggttggtgggcgcgcctgaggga

SEQ ID NO: 286855 - DNA, 120 bp, Artificial Sequence
  ENSG00000130649_17 (sequence is synthesized)
agggacgtgaggagccggagtccgcggagttgccgcggagttgtccgcggagtccaggcgggtggggagcagagcagctggaaccccccgagcgccctgcagacgcagcagcctcttgag

SEQ ID NO: 286856 - DNA, 120 bp, Artificial Sequence
  ENSG00000130649_18 (sequence is synthesized)
gggagggtctcccccacctcgggctggacaaagacagcttttccccacgtccctctgggttctctagagcaacagcaatacccgcccggcaggggtgtggcttagagccccgcacctcct

SEQ ID NO: 286857 - DNA, 120 bp, Artificial Sequence
  ENSG00000130649_19 (sequence is synthesized)
aacagtattatggccagaggactcagaccacagctgcatccctgtgaggcacagactctccagggcacgcgggtcccgcctgggatgtgcacactcagttaacttgagaaagtggaatcg

SEQ ID NO: 286858 - DNA, 120 bp, Artificial Sequence
  ENSG00000130649_20 (sequence is synthesized)
aggcccacttcctgctggaagcactcaggaagacccaaggtgcgtatctgctgcctagcagggcccagtcctcttgcagaccagcggtgtggggagccctggctgggactcctagactgc

SEQ ID NO: 286859 - DNA, 120 bp, Artificial Sequence
  ENSG00000130649_21 (sequence is synthesized)
atctgaaccacagggacctacggacaaggagagggtctcgtgagtccccagatactgcattttacaactctaggttccagctacacagttcagggagcaagggtggccattaaacacgtg

SEQ ID NO: 286860 - DNA, 120 bp, Artificial Sequence
  ENSG00000130649_22 (sequence is synthesized)
acttgtatcctaaatactgttgaaaagcaaaggaaactcaaacaggttcagacattcactatctttcgtaaactggcagttttcagggcaccttctcacaggccttggtgaacctcagtg

SEQ ID NO: 286861 - DNA, 120 bp, Artificial Sequence
  ENSG00000130649_23 (sequence is synthesized)
ccagacctcctgggcccactgtgagagcgtctcgggcctgcatccctctgcctgcggacccagaagaagctggcaggtaccagagatgagcaatccagagaccaggaggttaaggaagca

SEQ ID NO: 286862 - DNA, 120 bp, Artificial Sequence
  ENSG00000130649_24 (sequence is synthesized)
tttattgaaaacctgtgatgtacctctggcccagaccaagaggcagagtcaagccaaggcttcaatcagtcacaggagactggggatcttgggcctgacccctactcctcaccagtagac

SEQ ID NO: 286863 - DNA, 120 bp, Artificial Sequence
  ENSG00000130649_25 (sequence is synthesized)
ttagctgtatcaaaatagctcctttatttcctgaaagccccttgggctaaggtcggggtggagtgtgtcctcctggcctatgaggacatcaggccctgcttggtgtgcagctccaggtct

SEQ ID NO: 286864 - DNA, 120 bp, Artificial Sequence
  ENSG00000130649_26 (sequence is synthesized)
ttctccttttaggggcttgggactggcctgcaggaggttagtgtccagggtgggaatttacacccatccccatggccacatggtcccctcctgccccatcaccaccttgggtggacccag

SEQ ID NO: 286865 - DNA, 120 bp, Artificial Sequence
  ENSG00000130649_27 (sequence is synthesized)
tatgggaaaggccctccccatagaccatcctctgaggagtcccaggaccccctcccttgtcctcccgccccttccgctgtcccttcagtagctgtttctgttccctgacgcccacttctg

SEQ ID NO: 286866 - DNA, 120 bp, Artificial Sequence
  ENSG00000130649_28 (sequence is synthesized)
gggcttaccacatctcctgggccagcctcttcctcttgtgtgctctgggcttgggcagggacttgcattccatgcttttccagctcttccttcagcctggacaggaagaggtaggatggg

SEQ ID NO: 286867 - DNA, 120 bp, Artificial Sequence
  ENSG00000130649_29 (sequence is synthesized)
ggaaggaagaggaggaaagggtggaggagggacaagaggttttcaagagtcagagagacagaaggtggagagaggagatacaacatcagtcatcttcctggtgggggttgcggggacagg

SEQ ID NO: 286868 - DNA, 120 bp, Artificial Sequence
  ENSG00000130649_30 (sequence is synthesized)
gcctccacacgcacctctgccgcttctgctgctgttgttggcacttctgctgcagctgctggtggcgctgggcagcagctgctaggagctcctcagccttcctgtgctcttcctgaaaca

SEQ ID NO: 286869 - DNA, 120 bp, Artificial Sequence
  ENSG00000130649_31 (sequence is synthesized)
gctgcctggggggcccagtagggggtggtcagcaccggccactccctcctcccaccctcttcccctccacatcttacactgtggctgcagcctcctggctgcggagaaagagtccctcat

SEQ ID NO: 286870 - DNA, 120 bp, Artificial Sequence
  ENSG00000130649_32 (sequence is synthesized)
caagggtggaggggccctcagccccacacagggagcacagctgatgcttcacgtcttccagtgtcgccttgaccagcttctctgcagcacaaaggggcaggtgagcacatgaaggcacgt

SEQ ID NO: 286871 - DNA, 120 bp, Artificial Sequence
  ENSG00000130649_33 (sequence is synthesized)
gaggtcagatatgggccatccaccttccctggtctcaccttccttgagcagctgctccttgctgctgtccagggcacaaatctcctttgccagccgctctggcatctgaggggcagaaaa

SEQ ID NO: 286872 - DNA, 120 bp, Artificial Sequence
  ENSG00000130649_34 (sequence is synthesized)
gaggcctgtccactcctcttggctttcccccatgcctcaaagaaggctatctggatcttgtttcatacttactcactatgcctcacttccaacaactctgcccctctgtgcacaccagct

SEQ ID NO: 286873 - DNA, 120 bp, Artificial Sequence
  ENSG00000130649_35 (sequence is synthesized)
acagtacagcctcagggccatggcactggccattccctccctgtgcacttctgtcatcccacatctctgcggtactgcagtggggatgctcatggattgttatttacaacagataaacct

SEQ ID NO: 286874 - DNA, 120 bp, Artificial Sequence
  ENSG00000130649_36 (sequence is synthesized)
gcaagcactgtgagtcttggctgttttctggaggatcaggtaccggtttagctctgcagctcctccccactcccctctgtcctggtgtgacctcctcactgagcccttccttcctgacac

SEQ ID NO: 286875 - DNA, 120 bp, Artificial Sequence
  ENSG00000130649_37 (sequence is synthesized)
tcactgtctattttcttgttcagtgcctaggatcctcctgggggacaaacacgggctgcttatcctcgttgtctcctttgtgcccgtgatggtcccagacacatccacggacagtgatgg

SEQ ID NO: 286876 - DNA, 120 bp, Artificial Sequence
  ENSG00000130649_38 (sequence is synthesized)
aagacttgaccttggtctcatcagagatccccctgaccactgagcagcagggtcacaaggaggtgacaagggactggattcaggcaatgtcgatcttagcaccaccagggcttgcttggc

SEQ ID NO: 286877 - DNA, 120 bp, Artificial Sequence
  ENSG00000130649_39 (sequence is synthesized)
gactggttgtggcaggtgagaggaagaagtgaccgtttgggcctggtgctgctagggaagatgtggaagggggaggagtggctttgagggactcacgtggaagtcccagaggtccttgtg

SEQ ID NO: 286878 - DNA, 120 bp, Artificial Sequence
  ENSG00000130649_40 (sequence is synthesized)
ctggcccatcagatcttccagctgttcctcgaatgccaacctgggaaccaaccacaggcatgaggggatatgggctgaaatcaccaccttcacagcctgtccaagtctgtggttcttcag

SEQ ID NO: 286879 - DNA, 120 bp, Artificial Sequence
  ENSG00000130649_41 (sequence is synthesized)
gcagattttggggtgctttgcccatggtctctgctccactgggaacatcttcaccaccttgaatctccatggctcagtgtagccagcttttctaacccccatctttgacattatatccca

SEQ ID NO: 286880 - DNA, 120 bp, Artificial Sequence
  ENSG00000130649_42 (sequence is synthesized)
actactggccatccaaaccccctgcctcagatgctaaggtttacctcagctgtctctgtttgttcttctcttcttcaatctgcaagttcagggcagaaattctctccttgcactcctgca

SEQ ID NO: 286881 - DNA, 120 bp, Artificial Sequence
  ENSG00000130649_43 (sequence is synthesized)
ttaaggtccttctctgtaacatgtggtaagtagggagtgacatgaccatttgccccctggaagtattgttgtcaggttaagagagattaatgtggacatggttaagtgagcaaatgcaca

SEQ ID NO: 286882 - DNA, 120 bp, Artificial Sequence
  ENSG00000130649_44 (sequence is synthesized)
cacatcttagtatcatctcgttttcccaaagagctgaaatctcagtgtgccagggcctggggcctctggtaacaaatgagctaaatcaggaggtggagaaatggatggacaaatcgatgg

SEQ ID NO: 286883 - DNA, 120 bp, Artificial Sequence
  ENSG00000130649_45 (sequence is synthesized)
gtggatgaaaagataatggatgaatggagagagaatggacaaatggttggctcaatgcctaaatgaacagacagatgagtgaatagacatccaaggagtatgacaaagagtaaaaggcaa

SEQ ID NO: 286884 - DNA, 120 bp, Artificial Sequence
  ENSG00000130649_46 (sequence is synthesized)
aaaataaaaaccagctgaagaaatttaattgacaatttagcaaatgaatgtcttgccattgagagagtttcccttaacactactgccagctgttggagccgaaggggaaagacattcttt

SEQ ID NO: 286885 - DNA, 120 bp, Artificial Sequence
  ENSG00000130649_47 (sequence is synthesized)
ggactctccattgtttagagggaaacaatgagagctgtgggtctcagattcatcttcctgcctctttctgctctaccagaataaagaggtagtgcagagttaggctcagctggaagctct

SEQ ID NO: 286886 - DNA, 120 bp, Artificial Sequence
  ENSG00000130649_48 (sequence is synthesized)
tacctgtgtgcctcactttccttttcctggcaatgcagccggaggatcctcagggtctctgtagggagagcaacagggccctatgagaacctgtcaaggtattgggttttggcaggggga

SEQ ID NO: 286887 - DNA, 120 bp, Artificial Sequence
  ENSG00000130649_49 (sequence is synthesized)
acacagccagatcatgtcaggtctgtggacacctgattgagctttaacatttactacatgtctggtggaagccacaggagagaggcaagctgggacaggtttcaaaaggcttcagctgcc

SEQ ID NO: 286888 - DNA, 120 bp, Artificial Sequence
  ENSG00000130649_50 (sequence is synthesized)
atagggagagtgggcttctgtgggttggcaaaggcacaagcctggagacaggggagcggcaaataccttgttttttgctcaagatctccttcaggtgtactttctctccatgcactagaa

SEQ ID NO: 286889 - DNA, 120 bp, Artificial Sequence
  ENSG00000130649_51 (sequence is synthesized)
aacagtgacacattttggcatcagggactatgcactgcaccctcagggatggggcttgctcacggtcacatgggaagctgggcacagccttggccccaacccaaatgtgaacccttgagg

SEQ ID NO: 286890 - DNA, 120 bp, Artificial Sequence
  ENSG00000130649_52 (sequence is synthesized)
tgagcccctccctaccctctggtgcccacattccttgtaagcaccaaagggccttcacatttacagagggtggctgtgagggccctggaggatgctcgtgcttttacatggggaggagag

SEQ ID NO: 286891 - DNA, 120 bp, Artificial Sequence
  ENSG00000130649_53 (sequence is synthesized)
aaaaaataccaacacccacgaagtgggataagggctataaagaaacacatcaaataggatggggcatgtgaccagatggaggcagggtgccatctttaaatgggatgattggggaatgcc

SEQ ID NO: 286892 - DNA, 120 bp, Artificial Sequence
  ENSG00000130649_54 (sequence is synthesized)
agtcatcctgtctggggacattctaacttagagctgatgatgtgaggaaagaggaacctgtattatctgaggaagcacagacagcgtctggcaaaagccctgaggtgggaatgaggttgg

SEQ ID NO: 286893 - DNA, 120 bp, Artificial Sequence
  ENSG00000130649_55 (sequence is synthesized)
agggtgtttcctgaacactcccacaagcagagaggagagggggagattggcaggacatgaggctagagagggtacaggacccttggccatggcaaggatgctgattatctggaatacagg

SEQ ID NO: 286894 - DNA, 120 bp, Artificial Sequence
  ENSG00000130649_56 (sequence is synthesized)
gttaggggaggcttaagacactgtggggacctctgggtgacccccggctctcttacgcgagtccagttccttctgcagggcctcacagatggtccgggcctctcctaggtctttattggc

SEQ ID NO: 286895 - DNA, 120 bp, Artificial Sequence
  ENSG00000130649_57 (sequence is synthesized)
tttcttttttgcttcaccaaagagcagaaaaacattgtgtgagtgcagcctctattctcttcccaacagtgacatttctcatttgccttcaggtaaatctatagtggcctagattttata

SEQ ID NO: 286896 - DNA, 120 bp, Artificial Sequence
  ENSG00000130649_58 (sequence is synthesized)
gagtaggaaacgaggcttccagctctccttgccaggctctgctgatagcagggccaggatcatgggcatgtaactatggcagtcgcatgctgaaatgccctgtacttaatttaaggctct

SEQ ID NO: 286897 - DNA, 120 bp, Artificial Sequence
  ENSG00000130649_59 (sequence is synthesized)
gctgttgctgttgtgaataaccagtaactttggaacaagggaccctgcattctcacttggcactgagccccgcaaaccatgcagctggtcctagctggcagccaaggcccctgaactcac

SEQ ID NO: 286898 - DNA, 120 bp, Artificial Sequence
  ENSG00000130649_60 (sequence is synthesized)
cttgctggacctcattaatccggttaatcaggacctcaactcggggctctaggcttcccactgcacggaggaaaggaggttgagttgacagggcaggcagagttggggcggttgccagcc

SEQ ID NO: 286899 - DNA, 120 bp, Artificial Sequence
  ENSG00000130649_61 (sequence is synthesized)
ttgtgtctctgctgctttcacgcaacacagatctattgagtacctcctgcaagcaggtgctctgtggggccctcacggggctcacgttctgggtgggcaagactgggaacagacacaata

SEQ ID NO: 286900 - DNA, 120 bp, Artificial Sequence
  ENSG00000130649_62 (sequence is synthesized)
agataccgaatggggctgcggtaaccgtgttcaagagaaatgaagtaggccaagggaggctaaagagcaaaggagtgggaagtgctcctgagatatgggaagggacctgagggccccaaa

SEQ ID NO: 286901 - DNA, 120 bp, Artificial Sequence
  ENSG00000130649_63 (sequence is synthesized)
tcaagtggtggggggcaggccctgcagcaatttgggtggggttgggaggtagtcagtgcaaagacccatcatgaggtgggaacatggctggcaggagcctagcgagcaaagagggagtag

SEQ ID NO: 286902 - DNA, 120 bp, Artificial Sequence
  ENSG00000130649_64 (sequence is synthesized)
cgggtgagggggaaggaagggaagtgaaggcggcaacttctggatctaatggactgcagtggagccagatgggtgaccagcgagaggtttgggacagggttttgggaaaacattttgcct

SEQ ID NO: 286903 - DNA, 120 bp, Artificial Sequence
  ENSG00000130649_65 (sequence is synthesized)
tctatacccttttgcttctttaattttgaaacatggggccctatttttagtttaagtaattaagttttaaaagaaagagaaggtgaagaggattatttcccaaattcgtacattgtgggg

SEQ ID NO: 286904 - DNA, 120 bp, Artificial Sequence
  ENSG00000130649_66 (sequence is synthesized)
cctgaaattaaacccacatctgcctggccccaaacctcaggctgtgcctcacacaaaggagacacacgacctttctgcagcttttgcaccatttccatcaagtcttcaattttctgtgag

SEQ ID NO: 286905 - DNA, 120 bp, Artificial Sequence
  ENSG00000130649_67 (sequence is synthesized)
gacgtgtcctgccctgtggagacaaaaccaaacatttcagaatcaagcagggcgagaggccacccctgggctgagactgaggcaggctgagggcaggtctccagccagagtggtgcccct

SEQ ID NO: 286906 - DNA, 120 bp, Artificial Sequence
  ENSG00000130649_68 (sequence is synthesized)
tcttcttgtcctgaggtggacagtacactagatgaatcgggctcctccatggtcagcttttccctataaggtaaaattataccagatatcctctttgtaaaactctgggtgagggcaggg

SEQ ID NO: 286907 - DNA, 120 bp, Artificial Sequence
  ENSG00000130649_69 (sequence is synthesized)
gtgcactctcactgctgaggctgttcaaagtaagatcaaagctcctgatataattcaagaaaaaaaatgagggtataaaaaactggagcaaggagtcaaaaatcactgtaactggcagat

SEQ ID NO: 286908 - DNA, 120 bp, Artificial Sequence
  ENSG00000130649_70 (sequence is synthesized)
gacataatctaggaagttcttagagagttttctacaaaaccataaggattagtaacaaaatgcattaagatgttaggttaaaaacatatataaatacaaacaagctttcctacatacaac

SEQ ID NO: 286909 - DNA, 120 bp, Artificial Sequence
  ENSG00000130649_71 (sequence is synthesized)
caatactaaccctgaaatttccccataaaatatttcatgttaattttttataatcactattggaacctatttttaacactaaaattagtagatctaagaaattactatttatggcattaa

SEQ ID NO: 286910 - DNA, 120 bp, Artificial Sequence
  ENSG00000130649_72 (sequence is synthesized)
aaaattagtagatctaagaaattactatttatggcattaacattgtgaaaggaaaataaatctttttataaataaatctttgaaaataaatcaattcaaagtcatccctctgctcactga

SEQ ID NO: 286911 - DNA, 120 bp, Artificial Sequence
  ENSG00000130649_73 (sequence is synthesized)
tctgattgcctcctttggaaaggctaatcggaaactcaaaagaatacaaccatttgtcttttatctacttatgaccttgaagcaaacccccctgcttcaagttgtctcatcattgctttg

SEQ ID NO: 286912 - DNA, 120 bp, Artificial Sequence
  ENSG00000130649_74 (sequence is synthesized)
agcaaacccccctgcttcaagttgtctcatcattgctttgagttgtcccacctttccagatcgaaccaatgttcatcttacatatgttgatttgtgtctcatgtctccctaaaaagcata

SEQ ID NO: 286913 - DNA, 120 bp, Artificial Sequence
  ENSG00000130649_75 (sequence is synthesized)
aaaccaacctgtgctctgaccaccctgccaccctgggcacaggtcatcaggacctcctgaggccgtgtcacaggcatgcatccctaactttggtaaaataaacttcctaaattgactgag

SEQ ID NO: 286914 - DNA, 120 bp, Artificial Sequence
  ENSG00000130653_0 (sequence is synthesized)
aaaagacagcttttcttcctggagaacagactttttcagcaggattttcctttcagtgaaacataatttgacttgaaaggaacccagggaaaagtgtccaggtgtgagcatgagcgggta

SEQ ID NO: 286915 - DNA, 120 bp, Artificial Sequence
  ENSG00000130653_1 (sequence is synthesized)
gaggtgtgcccttgtttgcttcaggctgtctgcttttcgcccctgactgttttttctgtttctggccatggaggaagagaaagatgacagcccacagctgacggggattgcagttggagc

SEQ ID NO: 286916 - DNA, 120 bp, Artificial Sequence
  ENSG00000130653_2 (sequence is synthesized)
cctcctggccctggccttggttggtgtcctcatccttttcatgttcagaaggcttagacaatttcgacaagcacagcccactcctcagtaccggttccggaagagagacaaagtgatgtt

SEQ ID NO: 286917 - DNA, 120 bp, Artificial Sequence
  ENSG00000130653_3 (sequence is synthesized)
ttacggccggaagatcatgaggaaggtgaccacactccccaacacccttgtggagaacactgccctgccccggcagcgggccaggaagaggaccaaggtgctgtctttggccaagaggat

SEQ ID NO: 286918 - DNA, 120 bp, Artificial Sequence
  ENSG00000130653_4 (sequence is synthesized)
tctgcgtttcaagaaggaatacccggccctgcagcccaaggagcccccgccctccctgctggaggccgacctcacggagtttgacgtgaagaattctcacctgccatcggaagttctgta

SEQ ID NO: 286919 - DNA, 120 bp, Artificial Sequence
  ENSG00000130653_5 (sequence is synthesized)
catgctgaaaaacgttcgggtcctgggccactttgagaagccgctgttcctggagctttgcaaacacatcgtctttgtgcagctgcaggaaggggagcacgtcttccagcccagggagcc

SEQ ID NO: 286920 - DNA, 120 bp, Artificial Sequence
  ENSG00000130653_6 (sequence is synthesized)
ggaccccagcatctgtgtggtgcaggacgggcggctggaggtctgcatccaggacactgacggcaccgaggtggtggtgaaagaggttctggcgggagacagcgtccacagcctgctcag

SEQ ID NO: 286921 - DNA, 120 bp, Artificial Sequence
  ENSG00000130653_7 (sequence is synthesized)
catcctggacatcatcaccggccatgctgcaccttacaaaacggtctccgtccgcgcggccatcccgtccaccatcctccggcttccagctgcggcttttcatggagtttttgagaaata

SEQ ID NO: 286922 - DNA, 120 bp, Artificial Sequence
  ENSG00000130653_8 (sequence is synthesized)
tccggaaactctggtgagggtggtgcagatcatcatggtgcggctgcagagggtgacctttctggctctgcacaactacctcggcctgaccacagagctcttcaacgctgagagccaggc

SEQ ID NO: 286923 - DNA, 120 bp, Artificial Sequence
  ENSG00000130653_9 (sequence is synthesized)
catccctctcgtgtctgtagccagtgtggctgccgggaaggccaagaagcaggtgttctatggcgaagaagagcggcttaaaaagccaccgcggctccaggagtcctgtgactcagatca

SEQ ID NO: 286924 - DNA, 120 bp, Artificial Sequence
  ENSG00000130653_10 (sequence is synthesized)
cgggggcggccgcccggcagctgctgggcccctgctgaagaggagccactccgtccccgcgccttccattcgcaaacagatcttggaggagctggagaagcccggggcaggtgaccctga

SEQ ID NO: 286925 - DNA, 120 bp, Artificial Sequence
  ENSG00000130653_11 (sequence is synthesized)
cccttcggccccacaagggggcccaggcagtgccacttctgatctggggatggcatgtgaccgtgccagggtcttcctgcactcggacgagcaccccgggagctccgtggccagcaagtc

SEQ ID NO: 286926 - DNA, 120 bp, Artificial Sequence
  ENSG00000130653_12 (sequence is synthesized)
caggaaaagcgtgatggttgcagagataccctccacggtctcccagcactcagagagtcacacggatgagaccctggccagcaggaagtcggatgccatcttcagagctgccaagaagga

SEQ ID NO: 286927 - DNA, 120 bp, Artificial Sequence
  ENSG00000130653_13 (sequence is synthesized)
cctgctcaccctgatgaagctggaagactcatctctgttggatggccgggtggcgcttctgcacgttcctgcaggcacggtggtgtcaaggcagggagaccaggacgccagcatcctgtt

SEQ ID NO: 286928 - DNA, 120 bp, Artificial Sequence
  ENSG00000130653_14 (sequence is synthesized)
cgtggtctcggggctgctgcacgtgtaccagcggaagatcggcagccaggaggacacctgcttgttcctcacgcgccccggggagatggtgggccagctggccgtgctcaccggggagcc

SEQ ID NO: 286929 - DNA, 120 bp, Artificial Sequence
  ENSG00000130653_15 (sequence is synthesized)
tctcatcttcaccgtcaaggccaacagggactgcagcttcctgtccatctccaaggcccacttctatgaaatcatgcggaagcagccgaccgtcgtcctgggtgtggcgcacactgtggt

SEQ ID NO: 286930 - DNA, 120 bp, Artificial Sequence
  ENSG00000130653_16 (sequence is synthesized)
gaagaggatgtcgtccttcgtgcggcaaatcgactttgccctggactgggtggaggtggaggccgggcgagcaatatacaggcagggggacaagtccgactgcacgtacatcatgctcag

SEQ ID NO: 286931 - DNA, 120 bp, Artificial Sequence
  ENSG00000130653_17 (sequence is synthesized)
cggccggctgcgctctgtgatccggaaggatgatgggaagaagcgcctggccggggagtacggccgaggagacctcgtcggcgtggtggagacactgacccaccaggcccgggcgaccac

SEQ ID NO: 286932 - DNA, 120 bp, Artificial Sequence
  ENSG00000130653_18 (sequence is synthesized)
ggtgcatgccgttcgggactcagaattggccaagctgccggcaggagccctcacgtccatcaagcgcaggtacccacaggtggtgactcggctgattcatctcttgggtgagaagatcct

SEQ ID NO: 286933 - DNA, 120 bp, Artificial Sequence
  ENSG00000130653_19 (sequence is synthesized)
tgtgacaggccaccagcttgggctccccacggagggcagcaagtgggacttggggaacccggctgtcaacctgtccacggtggcagtgatgcccgtgtcagaggaagtgcccctcaccgc

SEQ ID NO: 286934 - DNA, 120 bp, Artificial Sequence
  ENSG00000130653_20 (sequence is synthesized)
cttcgccctggagctggagcatgccctcagcgccatcggcccgaccctgctgctgactagtgacaacataaaacggcgccttggctccgctgccctggacagtgttcacgagtaccggct

SEQ ID NO: 286935 - DNA, 120 bp, Artificial Sequence
  ENSG00000130653_21 (sequence is synthesized)
gtccagctggctggggcagcaggaggacacccacaggatcgtgctctaccaggcagatggcacgctcacaccctggacccagcgctgcgtgcgccaggccgactgcatcctcatcgtggg

SEQ ID NO: 286936 - DNA, 120 bp, Artificial Sequence
  ENSG00000130653_22 (sequence is synthesized)
cctgggtgaccaggagcccacagtgggcgagctggagcggatgctggagagcacagctgtgcgtgcccagaagcagctgatcctgctgcacagggaggagggcccggcgccagcgcgcac

SEQ ID NO: 286937 - DNA, 120 bp, Artificial Sequence
  ENSG00000130653_23 (sequence is synthesized)
cgtggagtggctcaacatgcggagctggtgctccggccacctgcacctctgctgcccgcgccgcgtcttctccaggaggagcctgcccaagctggtggagatgtacaagcatgtcttcca

SEQ ID NO: 286938 - DNA, 120 bp, Artificial Sequence
  ENSG00000130653_24 (sequence is synthesized)
gcggcccccggaccgacactcagacttctcccgcctggcgagggtgctgacgggcaacgccattgccctggtgcttgggggagggggagcaagaggctgtgcccaggtgggcgttctcaa

SEQ ID NO: 286939 - DNA, 120 bp, Artificial Sequence
  ENSG00000130653_25 (sequence is synthesized)
ggccttggcggagtgcggcatccctgtggacatggtgggaggcacgtccatcggggccttcgtgggtgccctgtactctgaggagcggaactacagccagatgcggatccgggccaagca

SEQ ID NO: 286940 - DNA, 120 bp, Artificial Sequence
  ENSG00000130653_26 (sequence is synthesized)
gtgggccgagggcatgacgtccttgatgaaggccgcgctggacctcacctaccccatcacgtccatgttctccggagccggcttcaacagcagcatcttcagcgtcttcaaggaccagca

SEQ ID NO: 286941 - DNA, 120 bp, Artificial Sequence
  ENSG00000130653_27 (sequence is synthesized)
gatcgaggacctgtggattccttatttcgccatcaccaccgacatcacagcctcggccatgcgggtccacaccgacggctccctgtggtggtacgtgcgtgccagcatgtccctgtccgg

SEQ ID NO: 286942 - DNA, 120 bp, Artificial Sequence
  ENSG00000130653_28 (sequence is synthesized)
ttacatgccccctctctgtgacccgaaggacggacacctgctgatggacgggggctacatcaacaacctcccagcggatgtggcccggtccatgggggcaaaagtggtgatcgccattga

SEQ ID NO: 286943 - DNA, 120 bp, Artificial Sequence
  ENSG00000130653_29 (sequence is synthesized)
cgtgggcagccgagatgagacggacctcaccaactatggggatgcgctgtctgggtggtggctgctgtggaaacgctggaaccccttggccacgaaagtcaaggtgttgaacatggcaga

SEQ ID NO: 286944 - DNA, 120 bp, Artificial Sequence
  ENSG00000130653_30 (sequence is synthesized)
gattcagacgcgcctggcctacgtgtgttgcgtgcggcagctggaggtggtgaagagcagtgactactgcgagtacctgcgcccccccatcgacagctacagcaccctggacttcggcaa

SEQ ID NO: 286945 - DNA, 120 bp, Artificial Sequence
  ENSG00000130653_31 (sequence is synthesized)
gttcaacgagatctgcgaagtgggctaccagcacgggcgcacggtgtttgacatctggggccgcagcggcgtgctggagaagatgctccgcgaccagcaggggccgagcaagaagcccgc

SEQ ID NO: 286946 - DNA, 120 bp, Artificial Sequence
  ENSG00000130653_32 (sequence is synthesized)
gagtgcggtcctcacctgtcccaacgcctccttcacggaccttgccgaaattgtgtctcgcattgagcccgccaagcccgccatggtggatgacgaatctgactaccagacggagtacga

SEQ ID NO: 286947 - DNA, 120 bp, Artificial Sequence
  ENSG00000130653_33 (sequence is synthesized)
ggaggagctgctggacgtccccagggatgcatacgcagacttccagagcacctcagcccagcagggctcagacttggaggacgagtcctcactgcggcatcgacaccccagtctggcttt

SEQ ID NO: 286948 - DNA, 120 bp, Artificial Sequence
  ENSG00000130653_34 (sequence is synthesized)
cccaaaactgtctgagggctcctctgaccaggacgggtagaggcctctgctaaagagcccggatgcagcgtcttccgtgggactgtccccaaggctgaggctcctgccaagtcctagggg

SEQ ID NO: 286949 - DNA, 120 bp, Artificial Sequence
  ENSG00000130653_35 (sequence is synthesized)
cctctgtacctgccctgctggaagccctgacttccccggggccccaggctgtgttagggttctctgggcctcttctttgtaccagcagccctgcatacagggccctgtgagcccccctgc

SEQ ID NO: 286950 - DNA, 120 bp, Artificial Sequence
  ENSG00000130653_36 (sequence is synthesized)
agtcctgtgaggcccctgaagctctgtgaggcccctgaagctctgtgaaccccctgcagccctgtgaggccccccgaagccctgtgaggccccccgaagccctgtgaaccacctgctgcc

SEQ ID NO: 286951 - DNA, 120 bp, Artificial Sequence
  ENSG00000130653_37 (sequence is synthesized)
ctgtgaggcccccaaagccctgtgaactgcctgctgtcctgtgaactgcctgctgccctgtgaggtgtgggagccctgatgctgccgtgtgatgtttcaataaaggtggatctcactgtt

SEQ ID NO: 286952 - DNA, 120 bp, Artificial Sequence
  ENSG00000130653_38 (sequence is synthesized)
gtggacggatggacccctgccgtcagagcttcggcagcgccaaggcagaccaggccacagccaagttgctttgcagaacccaggagctgctcccggggtcctgccctcagaccctctgtg

SEQ ID NO: 286953 - DNA, 120 bp, Artificial Sequence
  ENSG00000130653_39 (sequence is synthesized)
gagcctgcccaagctggtgaggcggggagaggaggctgcctgcccgtggctccgtggttcatttcctcgaacgttcgaagcattcttcacattccccacctgattccctgacacctgcgc

SEQ ID NO: 286954 - DNA, 120 bp, Artificial Sequence
  ENSG00000130653_40 (sequence is synthesized)
tcctgggcccttcctgtgcttgtgaacgtgaccctgcctcacgtctccttcatcttgccctttgggcctctggtggccacggctaggaagcagccggtgcagtgggggcaggcacagggc

SEQ ID NO: 286955 - DNA, 120 bp, Artificial Sequence
  ENSG00000130653_41 (sequence is synthesized)
ggccatcgggctgggggctcagcgaaccccggggatgggcctgaatcagggggctcagcaaaccctggggatgggcctgacgtcaggggggctcagtgaaccctgggggatgggcctcat

SEQ ID NO: 286956 - DNA, 120 bp, Artificial Sequence
  ENSG00000130653_42 (sequence is synthesized)
gtcagggctgctcagggctgaggctgaggcccccacatccagctgatgagggtgtcctcaggccagcgctgctccctcctttgggcagaaggccctgagacttttaattccggtgtcctc

SEQ ID NO: 286957 - DNA, 120 bp, Artificial Sequence
  ENSG00000130653_43 (sequence is synthesized)
aggcagcccaggggcctgagagtgaggggtgtggggagtctgctcatgctcacggcccccagcccacagctctgtccagaaacccacgccctgaaggcaccatctgctgcaggatagagg

SEQ ID NO: 286958 - DNA, 120 bp, Artificial Sequence
  ENSG00000130653_44 (sequence is synthesized)
gaccccagtgggaacagctctgaggatgccttctggccccccacccgggcccactctctggccccccacccgggcccactctcttgcccacgtaccctctgccagtgtcctccccccagt

SEQ ID NO: 286959 - DNA, 120 bp, Artificial Sequence
  ENSG00000130653_45 (sequence is synthesized)
agctgagctgtctctggggcccggtccgggcactgaggtgctgaccagtcgtatcaggcagggcctgctgcatgctggagaggatttggggtcagtttgggtcagaagtggaggaaactc

SEQ ID NO: 286960 - DNA, 120 bp, Artificial Sequence
  ENSG00000130653_46 (sequence is synthesized)
ccaccctcaggagcccatgcagcccccagtgcctgtcccctcctggccccccacctcttggccctgggtcagcctccccagacacaggacaggagcgtgatgggagagggcccatctgag

SEQ ID NO: 286961 - DNA, 120 bp, Artificial Sequence
  ENSG00000130653_47 (sequence is synthesized)
ggctcctgggtcacgccgccccacggcccctgccacagctgcctccgctccaagaagcctgggctggaacacgttttccttagagtatgccaagggaaaatgtcaggctggcatcagagc

SEQ ID NO: 286962 - DNA, 120 bp, Artificial Sequence
  ENSG00000130653_48 (sequence is synthesized)
tccgagaacatgcacacgcgtgtacatgcacacgcaggcaccggcagcatgtgctccagcatatggccctgtttgtcagctcagcagcatgcagaacaaaggccaagtcgaggaactggg

SEQ ID NO: 286963 - DNA, 120 bp, Artificial Sequence
  ENSG00000130653_49 (sequence is synthesized)
agcaattaagccccatctgtgcccacagtcagaaactaacagcctgcaggtgtcgagcttgctgggggccaggccaggccactcctgtcacctgtgggatatacggtcagaaaggcccag

SEQ ID NO: 286964 - DNA, 120 bp, Artificial Sequence
  ENSG00000130653_50 (sequence is synthesized)
gacacagccgtgtgcccacagctgcccatcgagctgggcatgtgggtcttctgcctctagaaggtgtaatggcggagaggagaccccacaacccccacgtcagggctcggagaggcaggc

SEQ ID NO: 286965 - DNA, 120 bp, Artificial Sequence
  ENSG00000130653_51 (sequence is synthesized)
cacctgtcctgcggcaggggagtgggggtcgctcctgggctctgaggccagcaggtctggggccacccctcaccacccctgcctgagcccaactcgggcgaaggaaggcacgaggccgga

SEQ ID NO: 286966 - DNA, 120 bp, Artificial Sequence
  ENSG00000130653_52 (sequence is synthesized)
cgggcctgaaggctgtggcagcccgcagggaggacccccggccgggtgctgctaccctctccccccagaacctacctaccccagaggatgggtccccagaacctgtcctgcgccacgggc

SEQ ID NO: 286967 - DNA, 120 bp, Artificial Sequence
  ENSG00000130653_53 (sequence is synthesized)
gcgggcggaggcactctggtggctgcccctcctcgcttcccccttttgagaacacaggaagtggggggctccccacacctcctgacggggccctgggggtgtgcacaggaagtgggctac

SEQ ID NO: 286968 - DNA, 120 bp, Artificial Sequence
  ENSG00000130653_54 (sequence is synthesized)
cagcacgggcgcacggtgtttgacatctggggccgcagcggcgtgctggagaagatgctccgcgaccagcaggggccgagcaagaagcccgcgagtgcggtgagtacgggcgtccggacc

SEQ ID NO: 286969 - DNA, 120 bp, Artificial Sequence
  ENSG00000130653_55 (sequence is synthesized)
acgcccagctccccggaccgcgcccagttcttcgggccacgcccacgcccagttcatcaggccacgcccagctcctcaggccacaggccctgcccccctggccaaagactccagggccag

SEQ ID NO: 286970 - DNA, 120 bp, Artificial Sequence
  ENSG00000130653_56 (sequence is synthesized)
gacaaggattgctcaggactgcgcatctccccggtccctgcccttacttggggggcaggcggaggctgcagagagggcgcagggtgggtggggcctccccacaggaagcaggctggggac

SEQ ID NO: 286971 - DNA, 120 bp, Artificial Sequence
  ENSG00000130653_57 (sequence is synthesized)
cgccatggtggatggtgagtggaggcgcaagacgaagccgtggagacgtgcgtgacctcctgatgctgtgttgggcttgaacccccccaccccagaggcccacggcctcccctcccgccc

SEQ ID NO: 286972 - DNA, 120 bp, Artificial Sequence
  ENSG00000130653_58 (sequence is synthesized)
acgtccacgcccaggctccagcagctggggtgcttggtggcactcctccgtcccgggcaccacgtgttcccacagcagtgggactgtgaccaccccgggtcacccagcccctgcccttca

SEQ ID NO: 286973 - DNA, 120 bp, Artificial Sequence
  ENSG00000130653_59 (sequence is synthesized)
ttcacctcaactcccagccacacctcaggcctgaagtagaaccacgttttgcctcccaccccacccagtgggaaatgggaatgaaggctgcttgttggaggggccgcaggacaagaaggg

SEQ ID NO: 286974 - DNA, 120 bp, Artificial Sequence
  ENSG00000130653_60 (sequence is synthesized)
cgggtccactaccctccatgctccatccagggccctgcgcttgggccttcagccagtggcctcctcacagcagaactggacattctcctgggagacgtcttcatggctgccgcaggccga

SEQ ID NO: 286975 - DNA, 120 bp, Artificial Sequence
  ENSG00000130653_61 (sequence is synthesized)
gagggccctgggcaaggcagcccctatccacagttgccaggtctggggtgctggagccctcagggtgcttggctgacaaggggaggagtgtctgcccgctccttgtccttgtggaagacc

SEQ ID NO: 286976 - DNA, 120 bp, Artificial Sequence
  ENSG00000130653_62 (sequence is synthesized)
cacgaagtgatgtgctggggcaaagctggagccagacagaaccaggggtggtgtgcagggctgccctgggaccaggtggctgcgtgtagggccccgggccaccttggaggcgggggtggg

SEQ ID NO: 286977 - DNA, 120 bp, Artificial Sequence
  ENSG00000130653_63 (sequence is synthesized)
catctgtggccggttctgcctctgagtgtggctatgctgggtacggtcccttccttgggaggggactgacgcagccctaccctcggtgccagacgaatctgactaccagacggagtacga

SEQ ID NO: 286978 - DNA, 120 bp, Artificial Sequence
  ENSG00000130653_64 (sequence is synthesized)
ctcctcgctgaccctccagccacgggcatgggcaggccttgccccagagctgagcaggcaaagccgaggaggccccaggcatgggggcgctgcagagcctgcgagggtagggccagcgag

SEQ ID NO: 286979 - DNA, 120 bp, Artificial Sequence
  ENSG00000130653_65 (sequence is synthesized)
ggcttagggatcaggaagggaccgagggtgggctgtgtcctggctttcaggccctggggcgaccaccagcctctgctcactctgaggctccagccagggcgccaagcctcaggaccgtgg

SEQ ID NO: 286980 - DNA, 120 bp, Artificial Sequence
  ENSG00000130653_66 (sequence is synthesized)
gtggggcccaaggacactctggacccccgttccattcatgagaggccctcagcacgccacgtgtctgctgtggcagcccgcagggagggtggaagccttctgtaaattccacatgtggcc

SEQ ID NO: 286981 - DNA, 120 bp, Artificial Sequence
  ENSG00000130653_67 (sequence is synthesized)
acagacaccagcgtctactcctcagcctcatccgactgctgtggctgctccatgcctgtgctgtgcatcatgggccacaagcctcatgtgactgttgacacctaaactcactcatgccag

SEQ ID NO: 286982 - DNA, 120 bp, Artificial Sequence
  ENSG00000130653_68 (sequence is synthesized)
ctaaactcattcacgccagttaaactcattcatactagctaaactcatttgtaccagctaaactcactcacaccagttaaactcactcacaccagttaaactcattcgtaccagctaaac

SEQ ID NO: 286983 - DNA, 120 bp, Artificial Sequence
  ENSG00000130653_69 (sequence is synthesized)
tcactcatgccagctaaactcactcacgccggctaaactcactcgtaccagctaaactcattcgtaccagctaaactcattcataccagctaaactcactcatgccagctaaactcactc

SEQ ID NO: 286984 - DNA, 120 bp, Artificial Sequence
  ENSG00000130653_70 (sequence is synthesized)
acgccggctaaactcactcataccggctaaactcattcgtactagctaaactcattcgtaccagctaaactcactcgtaccagctaaactcactcacaccagctaaactcacttgtacca

SEQ ID NO: 286985 - DNA, 120 bp, Artificial Sequence
  ENSG00000130653_71 (sequence is synthesized)
gctaaactcactcatgccagctaaactcactcatgccagctaaattcacgccagctaaactcactcgtacccgctaaactcactcataccagttaaactcactcatgccagctaactcac

SEQ ID NO: 286986 - DNA, 120 bp, Artificial Sequence
  ENSG00000130653_72 (sequence is synthesized)
tcatgtcagctaaactcactcatgccagctaaactcactcatgccaattaaactcattcgtaccagctaaactcactcatgccagccacacttcaggtgctcactggccgcccatggtta

SEQ ID NO: 286987 - DNA, 120 bp, Artificial Sequence
  ENSG00000130653_73 (sequence is synthesized)
gcggccacttccggcccagcatgtgctgctctctgtcttctggtgggcgtgcagtggaggctgcctgtgctctgattctgtcttcttgatgaactgtgaggccgagcaccttggatagcc

SEQ ID NO: 286988 - DNA, 120 bp, Artificial Sequence
  ENSG00000130653_74 (sequence is synthesized)
ttctttgtcttttgcccattttcctcttagctttcattttcttattattaataggaattctttatatattctctgtatgattcctttgtcaagtatgtatattaaaaatattttctattc

SEQ ID NO: 286989 - DNA, 120 bp, Artificial Sequence
  ENSG00000130653_75 (sequence is synthesized)
gccccgggtctcactctccccagcctgcccctcaacgagcctcagcctctgggcttaactgcagcctctgcgtgactgcctaggccctgaataactcactgcgaactagcgatggcagga

SEQ ID NO: 286990 - DNA, 120 bp, Artificial Sequence
  ENSG00000130653_76 (sequence is synthesized)
agtgctgggcagggaggggaaggggcagcggctggtgctggcctctgctgcctctttgccccggggacatgtgctaagagtgccaggcccctgcggagtagtgaggtactccctctgcgt

SEQ ID NO: 286991 - DNA, 120 bp, Artificial Sequence
  ENSG00000130653_77 (sequence is synthesized)
gctggaggtctgcatccaggacactgtgcctgctgctctcatggcgcctcagaggtgcaggcccgtggccccactgccctgggctgggctgagcctccgccaggccccgcggtcgcagcc

SEQ ID NO: 286992 - DNA, 120 bp, Artificial Sequence
  ENSG00000130656_0 (sequence is synthesized)
agactctggccaacaccccctgtaaggccacaggagaggaacaggagtgatagcccccaaaccccagtcccaccaggccctgagggcccctttgtcactggatctgataagaaacaccac

SEQ ID NO: 286993 - DNA, 120 bp, Artificial Sequence
  ENSG00000130656_1 (sequence is synthesized)
ccctgcagccccctcccctcacctgaccaatggccacagcctggctgggcccagctccctgtatataaggggaccctgggggctgagcactaccaaggccagtcctgagcaggcccaact

SEQ ID NO: 286994 - DNA, 120 bp, Artificial Sequence
  ENSG00000130656_2 (sequence is synthesized)
ccagtgcagctgcccaccctgccgccatgtctctgaccaagactgagaggaccatcattgtgtccatgtgggccaagatctccacgcaggccgacaccatcggcaccgagactctggaga

SEQ ID NO: 286995 - DNA, 120 bp, Artificial Sequence
  ENSG00000130656_3 (sequence is synthesized)
cgcacggctccaaggtggtggccgccgtgggcgacgcggtgaagagcatcgacgacatcggcggcgccctgtccaagctgagcgagctgcacgcctacatcctgcgcgtggacccggtca

SEQ ID NO: 286996 - DNA, 120 bp, Artificial Sequence
  ENSG00000130656_4 (sequence is synthesized)
acttcaagctcctgtcccactgcctgctggtcaccctggccgcgcgcttccccgccgacttcacggccgaggcccacgccgcctgggacaagttcctatcggtcgtatcctctgtcctga

SEQ ID NO: 286997 - DNA, 120 bp, Artificial Sequence
  ENSG00000130656_5 (sequence is synthesized)
ccgagaagtaccgctgagcgccgcctccgggacccccaggacaggctgcggcccctcccccgtcctggaggttccccagccccacttaccgcgtaatgcgccaataaaccaatgaacgaa

SEQ ID NO: 286998 - DNA, 120 bp, Artificial Sequence
  ENSG00000130656_6 (sequence is synthesized)
gaggtcctgggtgcgtccctgccctcgaagcagcactctggatcccagcgccaccctcatgtccatgtttgcacctcattggctgtgacagaaatgagacatcattgtcacacgctggcc

SEQ ID NO: 286999 - DNA, 120 bp, Artificial Sequence
  ENSG00000130656_7 (sequence is synthesized)
tgagggtcagtgggccttgctttggacctcagtttccccaccagtaacagggttcagagcagatggtccctgagtgagtcccagctctaagttctcccagggtctcctggacaatgaagc

SEQ ID NO: 287000 - DNA, 120 bp, Artificial Sequence
  ENSG00000130669_0 (sequence is synthesized)
ttcaacatggcggcgggagtgtccgcggtggtggcggtgcaagagagctgagggaggcgcgagggcgcggagttccaggtcgagcagttaggccgcgagcgactgcggcgccgagccggc

SEQ ID NO: 287001 - DNA, 120 bp, Artificial Sequence
  ENSG00000130669_1 (sequence is synthesized)
cgcaccgagtccccggcaccatgtttgggaagaggaagaagcgggtggagatctccgcgccgtccaacttcgagcaccgcgtgcacacgggcttcgaccagcacgagcagaagttcacgg

SEQ ID NO: 287002 - DNA, 120 bp, Artificial Sequence
  ENSG00000130669_2 (sequence is synthesized)
ggctgccccgccagtggcagagcctgatcgaggagtcggctcgccggcccaagcccctcgtcgaccccgcctgcatcacctccatccagcccggggcccccaagaccatcgtgcggggca

SEQ ID NO: 287003 - DNA, 120 bp, Artificial Sequence
  ENSG00000130669_3 (sequence is synthesized)
gcaaaggtgccaaagatggggccctcacgctgctgctggacgagtttgagaacatgtcggtgacacgctccaactccctgcggagagacagcccgccgccgcccgcccgtgcccgccagg

SEQ ID NO: 287004 - DNA, 120 bp, Artificial Sequence
  ENSG00000130669_4 (sequence is synthesized)
aaaatgggatgccagaggagccggccaccacggccagagggggcccagggaaggcaggcagccgaggccggttcgccggtcacagcgaggcgggtggcggcagtggtgacaggcgacggg

SEQ ID NO: 287005 - DNA, 120 bp, Artificial Sequence
  ENSG00000130669_5 (sequence is synthesized)
cggggccagagaagaggcccaagtcttccagggagggctcagggggtccccaggagtcctcccgggacaaacgccccctctccgggcctgatgtcggcaccccccagcctgctggtctgg

SEQ ID NO: 287006 - DNA, 120 bp, Artificial Sequence
  ENSG00000130669_6 (sequence is synthesized)
ccagtggggcgaaactggcagctggccggccctttaacacctacccgagggctgacacggaccacccatcccggggtgcccagggggagcctcatgacgtggcccctaacgggccatcag

SEQ ID NO: 287007 - DNA, 120 bp, Artificial Sequence
  ENSG00000130669_7 (sequence is synthesized)
cggggggcctggccatcccccagtcctcctcctcctcctcccggcctcccacccgagcccgaggtgcccccagccctggagtgctgggaccccacgcctcagagccccagctggcccctc

SEQ ID NO: 287008 - DNA, 120 bp, Artificial Sequence
  ENSG00000130669_8 (sequence is synthesized)
cagcctgcacccccgccgcccctgctgttcctgggccccctggcccccgctcaccacagcgggagccacagcgagtatcccatgagcagttccgggctgccctgcagctggtggtggacc

SEQ ID NO: 287009 - DNA, 120 bp, Artificial Sequence
  ENSG00000130669_9 (sequence is synthesized)
caggcgacccccgctcctacctggacaacttcatcaagattggcgagggctccacgggcatcgtgtgcatcgccaccgtgcgcagctcgggcaagctggtggccgtcaagaagatggacc

SEQ ID NO: 287010 - DNA, 120 bp, Artificial Sequence
  ENSG00000130669_10 (sequence is synthesized)
tgcgcaagcagcagaggcgcgagctgctcttcaacgaggtggtaatcatgagggactaccagcacgagaatgtggtggagatgtacaacagctacctggtgggggacgagctctgggtgg

SEQ ID NO: 287011 - DNA, 120 bp, Artificial Sequence
  ENSG00000130669_11 (sequence is synthesized)
ccctgtcggtgctccacgcccagggcgtcatccaccgggacatcaagagcgactcgatcctgctgacccatgatggcagggtgaagctgtcagactttgggttctgcgcccaggtgagca

SEQ ID NO: 287012 - DNA, 120 bp, Artificial Sequence
  ENSG00000130669_12 (sequence is synthesized)
aggaagtgccccgaaggaagtcgctggtcggcacgccctactggatggccccagagctcatctcccgccttccctacgggccagaggtagacatctggtcgctggggataatggtgattg

SEQ ID NO: 287013 - DNA, 120 bp, Artificial Sequence
  ENSG00000130669_13 (sequence is synthesized)
agatggtggacggagagcccccctacttcaacgagccacccctcaaagccatgaagatgattcgggacaacctgccaccccgactgaagaacctgcacaaggtgtcgccatccctgaagg

SEQ ID NO: 287014 - DNA, 120 bp, Artificial Sequence
  ENSG00000130669_14 (sequence is synthesized)
gcttcctggaccgcctgctggtgcgagaccctgcccagcgggccacggcagccgagctgctgaagcacccattcctggccaaggcagggccgcctgccagcatcgtgcccctcatgcgcc

SEQ ID NO: 287015 - DNA, 120 bp, Artificial Sequence
  ENSG00000130669_15 (sequence is synthesized)
agaaccgcaccagatgaggcccagcgcccttcccctcaaccaaagagccccccgggtcacccccgccccactgaggccagtagggggccaggcctcccactcctcccagcccgggagatg

SEQ ID NO: 287016 - DNA, 120 bp, Artificial Sequence
  ENSG00000130669_16 (sequence is synthesized)
ctccgcgtggcaccaccctccttgctgggggtagatgagaccctactactgaactccagttttgatctcgtgacttttagaaaaacacagggactcgtgggagcaagcgaggctcccagg

SEQ ID NO: 287017 - DNA, 120 bp, Artificial Sequence
  ENSG00000130669_17 (sequence is synthesized)
acccccaccctctgggacaggccctcccccatgttcttctgtctccaggaagggcagcggccctcccatcactggaagtctgcagtgggggtcgctgggggtggagagaacactaagagg

SEQ ID NO: 287018 - DNA, 120 bp, Artificial Sequence
  ENSG00000130669_18 (sequence is synthesized)
tgaacatgtatgagtgtgtgcacgcgtgtgagtgtgcatgtgtgtgtgtgcaaaggtccagccaccccgtcctccagcctgcaaggggtgtctggcgccttgcctgacacccagccccct

SEQ ID NO: 287019 - DNA, 120 bp, Artificial Sequence
  ENSG00000130669_19 (sequence is synthesized)
ctccccctgagccattgtgggggtcgatcatgaatgtccgaagagtggccttttcccgtagccctgcgccccctttctgtggctggatggggagacaggtcagggccccccaccctctcc

SEQ ID NO: 287020 - DNA, 120 bp, Artificial Sequence
  ENSG00000130669_20 (sequence is synthesized)
agcccctgcagcaaatgactactgcacctggacagcctcctcttttctagaagtctatttatattgtcattttataacactctagcccctgcccttattgggggacagatggtccctgtc

SEQ ID NO: 287021 - DNA, 120 bp, Artificial Sequence
  ENSG00000130669_21 (sequence is synthesized)
ctgcggggtggccctggcagaaccactgcctgaagaaccaggttcctgcccggtcagcgcagccccagcccgcccacccctgcctcgagttagttttacaattaaaacattgtcttgttt

SEQ ID NO: 287022 - DNA, 120 bp, Artificial Sequence
  ENSG00000130669_22 (sequence is synthesized)
ccatctttctccaggctctctatgggatgccgccatcagaatgtctcttcctcagcccctttgttttttaaagtggctttggtcgaccatttgctctgtgcttggtactgtgtcaagggc

SEQ ID NO: 287023 - DNA, 120 bp, Artificial Sequence
  ENSG00000130669_23 (sequence is synthesized)
gcacattgtgtctgaagccaaggaatgacgcaggcagacgcccctgctcgccctcctgctgtgccagctcctctgaccccactgcctctgccctgtcccaggtgaagctgtcagactttg

SEQ ID NO: 287024 - DNA, 120 bp, Artificial Sequence
  ENSG00000130669_24 (sequence is synthesized)
gccttcctgctgcccaccccgcgtccctccagactgggtcccgtgctcccgtcccccagccctgaccaccctgggcagctgctgcatggggacagatgagtaacccgaagcccctagagg

SEQ ID NO: 287025 - DNA, 120 bp, Artificial Sequence
  ENSG00000130669_25 (sequence is synthesized)
atctgggagcaaaccacgattccagccaaggcagggcaagggtggggtggggagtggggagttcaggtcatagcagccagtaagctcccccagcctgccactccccagaatggggcagga

SEQ ID NO: 287026 - DNA, 120 bp, Artificial Sequence
  ENSG00000130669_26 (sequence is synthesized)
ttgtccccacccctggaagcagccagtttgccacagtccatgtgcagactgatcccagtttgccaaatctgcaatttcctggaaccttttaaaggctgtcttgagcgcgtttggtgagta

SEQ ID NO: 287027 - DNA, 120 bp, Artificial Sequence
  ENSG00000130669_27 (sequence is synthesized)
ggagctaacccaagttagtaaattgaaggccatttggcaaattggtcagtgggcagatgggcttttggggattgactgaggctgactggcctggagctgctggcttcggagagacaccct

SEQ ID NO: 287028 - DNA, 120 bp, Artificial Sequence
  ENSG00000130669_28 (sequence is synthesized)
agctgcatcctggcactttgcgcctcaggccctgttgggctccactttctgcatcctccccagcccccagggaggcagtggagtggggagagagccaggagtgagcctccgtccccaaag

SEQ ID NO: 287029 - DNA, 120 bp, Artificial Sequence
  ENSG00000130669_29 (sequence is synthesized)
ccagccaggcgtcatcagcaccagagacctcagcctggtcctctcgggaagtgagtggccagggcagagattccaggttagtccacgcctcccacccttcacaggtcctgaccccaagaa

SEQ ID NO: 287030 - DNA, 120 bp, Artificial Sequence
  ENSG00000130669_30 (sequence is synthesized)
tcagagcactgtgtgtgtggcagggcctatgccaagtgcaaacacagcctagatggatcatcacagagtgaaacccagcggtgcaagcagctgtgctctctgcgatgtattggaggctta

SEQ ID NO: 287031 - DNA, 120 bp, Artificial Sequence
  ENSG00000130669_31 (sequence is synthesized)
ggtgaggtggatgcctttctggaaaaaaaaaaaatgctaacattggcaaaagaagaaatagaaaacaagaccaaaataactgtctcctcactgcacacacactccagaataaataaaagg

SEQ ID NO: 287032 - DNA, 69 bp, Artificial Sequence
  ENSG00000130669_32 (sequence is synthesized)
tgtctcctcactgcacacacactccagaataaataaaaggtttcaggcttgaatgcactttcaaatgag

SEQ ID NO: 287033 - DNA, 69 bp, Artificial Sequence
  ENSG00000130669_33 (sequence is synthesized)
atgaggtttaccagactttgaaggagcaggtaattccttctaccttgtgaacaagttgttccagaaaga

SEQ ID NO: 287034 - DNA, 120 bp, Artificial Sequence
  ENSG00000130669_34 (sequence is synthesized)
gtaattccttctaccttgtgaacaagttgttccagaaagatagcagctcaggaggcctctgtgaccatggttccagacccagataaggacggcaaagaacagagcatctcagaaacgcaa

SEQ ID NO: 287035 - DNA, 120 bp, Artificial Sequence
  ENSG00000130669_35 (sequence is synthesized)
ggctcacagccagggtgcccggcgaccccacgggcactgagaacagctagctctaggagctccactctcctgctgaagaaaccacgggctcagagacggggagctccctcgcccagccac

SEQ ID NO: 287036 - DNA, 120 bp, Artificial Sequence
  ENSG00000130669_36 (sequence is synthesized)
atctgtgaccccacggtaactctgctggttttggtgccttcagtcactcactgcaggtttgttttgttttgttttgttttgagtttttttgttttttgttttttgtttttagagacaaga

SEQ ID NO: 287037 - DNA, 120 bp, Artificial Sequence
  ENSG00000130669_37 (sequence is synthesized)
ttgttttttgttttttgtttttagagacaagatgttgctatgttgcctaggctggtttcgaactcctggcctcaagggatcctccctccttggccccgcaaagtgctgggattacaggcg

SEQ ID NO: 287038 - DNA, 120 bp, Artificial Sequence
  ENSG00000130669_38 (sequence is synthesized)
ttgaaggcatggctttgggtggcgtggggtgaaagctgcccgaggccccgttcctccccacgtggctgcctcctgccagagccagtcaggaaaacagaccccaactagagttgtttcaaa

SEQ ID NO: 287039 - DNA, 120 bp, Artificial Sequence
  ENSG00000130669_39 (sequence is synthesized)
tggcagggatttggtaccggtggttggatcatgacaaagctctgagaaggctggaggagccacagagtgccaagtgcccagcaatcattagaggaaggaggctgctgccacctgtgtggc

SEQ ID NO: 287040 - DNA, 120 bp, Artificial Sequence
  ENSG00000130669_40 (sequence is synthesized)
tagaggaacagaggggccaatggcattccccaaaccccactctcgcctctgtctggccagagcagaatggcttcttccagcttcccaccctggactcccacccaggagcctcctcctggc

SEQ ID NO: 287041 - DNA, 120 bp, Artificial Sequence
  ENSG00000130669_41 (sequence is synthesized)
agacccttcctgaccccaccggcccggggggtctacagatccatgtttcaggcgtccgcctggagcggaacaggggagtgcttaggacaagggtggtgccagaggatccactctgcccac

SEQ ID NO: 287042 - DNA, 120 bp, Artificial Sequence
  ENSG00000130669_42 (sequence is synthesized)
atttagttgaccagctgaggcactccacgggaatgaatgactctcgacaggtgccggaggtgaggaggggcccggaggcccaggaggggcacagggatggattcgtccgcctgggggctg

SEQ ID NO: 287043 - DNA, 120 bp, Artificial Sequence
  ENSG00000130669_43 (sequence is synthesized)
gaggtgtgtttacagagccccaaaataaacaatgcaaccaggtcagaccagcggttctcacagtgtggttcccagaccagcagcatcactgggagcttactggacacgcaaataaatccc

SEQ ID NO: 287044 - DNA, 120 bp, Artificial Sequence
  ENSG00000130669_44 (sequence is synthesized)
tgtgtgccaccccagctgcatcagatgctggtggggcccagtgatctgtatttaacacaccctccgggggatgccggtgcccactcacgtttgagaacccctgcgatccacgactgccct

SEQ ID NO: 287045 - DNA, 120 bp, Artificial Sequence
  ENSG00000130669_45 (sequence is synthesized)
cccgtgtaaaaggcccacctctgtgggactccaagtcatcagcaccctagggtccttccgtctttttccttcctcctgggacacctgcctctcccatgtcgtattagagaattccttatg

SEQ ID NO: 287046 - DNA, 120 bp, Artificial Sequence
  ENSG00000130669_46 (sequence is synthesized)
ctcccaagtgggcacggggagaggaaggcactcctctttaaggaccgacccagaggttttgccattgcttcactggccagagcttagtcacgcagcctcacccagaggcaagggaggttg

SEQ ID NO: 287047 - DNA, 120 bp, Artificial Sequence
  ENSG00000130669_47 (sequence is synthesized)
gaaaatgtagtgtttgtgtgtgtctaacacaaattctattaccatgcagtcaggattctccactcttgctctttcattagatttgctgggcttcaccctggactttctgatttagtgaca

SEQ ID NO: 287048 - DNA, 120 bp, Artificial Sequence
  ENSG00000130669_48 (sequence is synthesized)
ttctgatttagtgacagaacagagaacccagaggcagacccagatgtgtacaagggcttcatatacaatcaggagatttaataatcatgctaggggccgggtgcagtggctcacgcctgt

SEQ ID NO: 287049 - DNA, 120 bp, Artificial Sequence
  ENSG00000130669_49 (sequence is synthesized)
atagagcccaggcagccctcctcggtgggtgcccatgttgagggcctggggagccctggatctactctgctttcccagctggaagcctgtctgtccacaggcccgccccattgagggtgg

SEQ ID NO: 287050 - DNA, 120 bp, Artificial Sequence
  ENSG00000130669_50 (sequence is synthesized)
ggcgggagtgtccgcggtggtggcggtgcaagagagctgagggaggcgcgagggcgcggagttccaggtcgagcagttaggccgcgagcgactgcggcgccgagccgagacgaggtctcc

SEQ ID NO: 287051 - DNA, 85 bp, Artificial Sequence
  ENSG00000130669_51 (sequence is synthesized)
agcctcgtgatgaaatcttgagccatcccactctgtcccgcccgggacgtgaatcacctttcttaccccacatatccatggtgta

SEQ ID NO: 287052 - DNA, 120 bp, Artificial Sequence
  ENSG00000130669_52 (sequence is synthesized)
gacgtgaatcacctttcttaccccacatatccatggtgtatgtgctacccatctgtggctactcagtagctttctcggttctcacatccactgttgccgtatcacagtgcttatgttcag

SEQ ID NO: 287053 - DNA, 120 bp, Artificial Sequence
  ENSG00000130675_0 (sequence is synthesized)
tgagggctgcagcgcaaagaaccgggctcccgggcccggacgcggggaagcactcgcgtgggagtttgtgcgagcgcggcccggggcggggcccgcacggaggaggcgccgggaccatgg

SEQ ID NO: 287054 - DNA, 120 bp, Artificial Sequence
  ENSG00000130675_1 (sequence is synthesized)
gggcccgcacggaggaggcgccgggaccatggtcaccctcggctgagtttccggcggcgactttgattattggcaaataaccaccataacaataccgagcccccgggcttgcaccgcacg

SEQ ID NO: 287055 - DNA, 120 bp, Artificial Sequence
  ENSG00000130675_2 (sequence is synthesized)
cactgactccgcgagcccgcacacggccgcgtcgcccgccaccgggccctgagcgccagccccaaacgagccgatggaaaaatccaaaaatttccgcatcgacgccctgctggcggtgga

SEQ ID NO: 287056 - DNA, 120 bp, Artificial Sequence
  ENSG00000130675_3 (sequence is synthesized)
catcgacgccctgctggcggtggaccccccacgagccgcctctgcgcagagcgcgccgctggccttggtcacgtcgctcgccgccgccgcatctggcaccggaggtggcggcggcggcgg

SEQ ID NO: 287057 - DNA, 80 bp, Artificial Sequence
  ENSG00000130675_4 (sequence is synthesized)
accgcctgcgcgccgagagcccgtcgccgccgcgcctgctggccgcgcactgcgcgctgctgcccaagccgggcttcctg

SEQ ID NO: 287058 - DNA, 80 bp, Artificial Sequence
  ENSG00000130675_5 (sequence is synthesized)
gcgggcctcccggcgcaggcggcgctctacggccacccggtctacggctactccgcggcggcggcggcggctgcgctggc

SEQ ID NO: 287059 - DNA, 120 bp, Artificial Sequence
  ENSG00000130675_6 (sequence is synthesized)
gggccagcacccggcgctctcctactcgtacccgcaggtgcaaggcgcgcaccccgcgcaccccgccgaccccatcaagctgggcgccggcaccttccagctggaccagtggctgcgcgc

SEQ ID NO: 287060 - DNA, 120 bp, Artificial Sequence
  ENSG00000130675_7 (sequence is synthesized)
gtccaccgcgggcatgatcctgcctaagatgcccgacttcaactcccaggcgcagtcgaacctcctggggaagtgccgccggccgcgcaccgccttcaccagccagcagctgctggagct

SEQ ID NO: 287061 - DNA, 120 bp, Artificial Sequence
  ENSG00000130675_8 (sequence is synthesized)
tacctgtcgcggcccaagcgcttcgaggtggccacctcgctcatgctcaccgagacccaggtgaagatttggttccagaaccggcggatgaaatggaaacgcagcaaaaaggccaaagag

SEQ ID NO: 287062 - DNA, 120 bp, Artificial Sequence
  ENSG00000130675_9 (sequence is synthesized)
ccaaagagcaggcggcgcaggaagcggagaaacagaagggcggcggcgggggcgcggggaagggcggcgcggaggagccgggagccgaggagctgctggggccgccagcgcccggagaca

SEQ ID NO: 287063 - DNA, 120 bp, Artificial Sequence
  ENSG00000130675_10 (sequence is synthesized)
ggacgccgcctgcgggacttgagggacagtgaccccgaggaggacgaggacgaggacgacgaggaccatttcccctacagcaacggcgccagcgtccacgccgcctcctccgactgctcc

SEQ ID NO: 287064 - DNA, 80 bp, Artificial Sequence
  ENSG00000130675_11 (sequence is synthesized)
ctcctcggaggacgactcgccgcccccgcggcccagccaccagcccgcgccccagtaggagccccgcggcccagcaggtg

SEQ ID NO: 287065 - DNA, 120 bp, Artificial Sequence
  ENSG00000130675_12 (sequence is synthesized)
cgcacccacccggcccggccccgagagcaggctcgaccgccgccccatggacccctcgcccaggccggggctggagggattcggccgcggctccggtcctgggcgcttcccttttaagca

SEQ ID NO: 287066 - DNA, 120 bp, Artificial Sequence
  ENSG00000130675_13 (sequence is synthesized)
tttaagcaagggcgcctcacctgctcttcaagaaacagcgagagggagacccagggggctgaaacttgaactctggttcttttaaaattaattttggttggtgttgggggaggcgcgagt

SEQ ID NO: 287067 - DNA, 120 bp, Artificial Sequence
  ENSG00000130675_14 (sequence is synthesized)
gcgtgtgagaagaaccgacccaccccgcgcaaggggaagcctcctgtctcccctttccccgcgtccgagaaggcggaaacccacagtgttacctgacttatgaaacttgaaaccgcctct

SEQ ID NO: 287068 - DNA, 120 bp, Artificial Sequence
  ENSG00000130675_15 (sequence is synthesized)
ggagccgccattctgcagagtatttggaaaaagaaaaaagggtttatgcttacgtctctggggtcggggggattatgtcacgagcgttcaaactgctggaaatctcaaaactgtactgtc

SEQ ID NO: 287069 - DNA, 120 bp, Artificial Sequence
  ENSG00000130675_16 (sequence is synthesized)
tttatttttgtatattgtatttatatataaaaagaaacgtctacgtatgcatgctaaattattatttagcttctcccatcgcccacgatggaatgtaaaataaattggttttgtactgga

SEQ ID NO: 287070 - DNA, 120 bp, Artificial Sequence
  ENSG00000130675_17 (sequence is synthesized)
tctcttaacgggaaggggcagttggaggtgtgagactgagatctaatgattaacccgaaggctgcaggagaaggaagtcgccgggggaaggcgagccgagagcgccctgaattaggcagg

SEQ ID NO: 287071 - DNA, 120 bp, Artificial Sequence
  ENSG00000130675_18 (sequence is synthesized)
cccgggaatgggggtcagggcttatcaccggggaaaggaacttgggccaggtcccccactggggcgttagagagacccgcggcccctccagggagagggagtgcttcaggagcagcaaac

SEQ ID NO: 287072 - DNA, 120 bp, Artificial Sequence
  ENSG00000130675_19 (sequence is synthesized)
aagagaaatgggcttcggaggcccggggaggcaaggccaaggcccagggaacccccggctcttaccagggcgctgccctcctctggaagggcgttggatccggggtgcgatggccgaggc

SEQ ID NO: 287073 - DNA, 120 bp, Artificial Sequence
  ENSG00000130675_20 (sequence is synthesized)
aggtggcctggcttgaaccagctatggggggactctcaacagtaggtgcctgccctggaatcctgggcgcccaacaagcccaggcgcagtcgaacctcctggggaagtgccgccggccgc

SEQ ID NO: 287074 - DNA, 120 bp, Artificial Sequence
  ENSG00000130675_21 (sequence is synthesized)
acagacaccctcacctcctgcactctaggcagcttccagaattgactaaaaatatcccgagagctttccaggaagccgcagggagccctcgacctgtttgaatctctggctgccggtgga

SEQ ID NO: 287075 - DNA, 120 bp, Artificial Sequence
  ENSG00000130675_22 (sequence is synthesized)
gggcttcgggcagcttcctctccatccgggcgggacacctcgccagaggcctgggcccctcaggctttcctggcacacgcggactctccgggctggggctccggggctctggctctctgg

SEQ ID NO: 287076 - DNA, 120 bp, Artificial Sequence
  ENSG00000130675_23 (sequence is synthesized)
ggctctggctctccccgctcgccccatcggggtcagctacttatgagtcgggccgagcagatgtatatggctcaacgctttcagccgccgaacacccaaacaaagagaccccattgtttc

SEQ ID NO: 287077 - DNA, 120 bp, Artificial Sequence
  ENSG00000130675_24 (sequence is synthesized)
tgtctgagtggatttgtttagactggggagatgcaggcagagcaggggaaaagcaaaaaagaaaacagaaataaacactccagaattcagattcctttgctggaagctgtggttgtgact

SEQ ID NO: 287078 - DNA, 120 bp, Artificial Sequence
  ENSG00000130675_25 (sequence is synthesized)
cagagaaaatctaggaccccagaggctggagaagtcacaagagggtgagaagaatccctgcagaaggctgtttgcccacagccgccccaggctttcctagctcagctccaagaaggcccc

SEQ ID NO: 287079 - DNA, 120 bp, Artificial Sequence
  ENSG00000130675_26 (sequence is synthesized)
tcagacacgtctgcgtctgcgaatcccctgccagcctgggcttaaacccagggtgccgacccagggcccatcccttctgatagaaagccaccaatatgacctgcatttcccagagccaag

SEQ ID NO: 287080 - DNA, 120 bp, Artificial Sequence
  ENSG00000130675_27 (sequence is synthesized)
gacgctaagttgcccacggagggggctggccagccccgggggcccgtggtcctaggcctcctaggggtgctttctggagcttcgtggagcccagggtcactcagaaaatttattaaagtg

SEQ ID NO: 287081 - DNA, 120 bp, Artificial Sequence
  ENSG00000130675_28 (sequence is synthesized)
agacaccttgcctatttctgattccaaatgttgacctagagttggccaaattttaaacacaaccagtcttaagttcagaagaggtatctgcacctggcaatccaaaagggcaggcataac

SEQ ID NO: 287082 - DNA, 120 bp, Artificial Sequence
  ENSG00000130675_29 (sequence is synthesized)
cgtgccaaagacggcggaatgtgttctgagaagtcctcctcgctggtccggggaaaacctgtttggtttctttaattggttgtctctgcctgttggatggcatttcccaaatggtccctc

SEQ ID NO: 287083 - DNA, 120 bp, Artificial Sequence
  ENSG00000130675_30 (sequence is synthesized)
cggagccagtggtttaattaaagttctaatgtattgtcaagttgggaattcggggccttgtttgactaaagcagggggcgtgggccatcctctaaagcaaactgcccatcccgggggacc

SEQ ID NO: 287084 - DNA, 120 bp, Artificial Sequence
  ENSG00000130675_31 (sequence is synthesized)
tgagctcatccaggcctggggctggcctcctttctttcctttgctttctttcttttattgtccaacacttgtcaggctcctgggaaatcaagggaagtctcgttttgaggtcataaaatt

SEQ ID NO: 287085 - DNA, 120 bp, Artificial Sequence
  ENSG00000130675_32 (sequence is synthesized)
ctctgtgatgtaaccgtgcgaaattatgtaaataaagccgggcaggcctccttgaacacacagagaaccggatcctgcctgcgcctctgcctgtaatttgcgtaatgagaattgtcctga

SEQ ID NO: 287086 - DNA, 120 bp, Artificial Sequence
  ENSG00000130684_0 (sequence is synthesized)
gcagagcgttccagatccctgggcgtcagcgagccgtgagatgcgtggtccaccatcggtgacctcaccgcctcggttcgccctcagccgccccgattggccatctgcaagcttcccttc

SEQ ID NO: 287087 - DNA, 120 bp, Artificial Sequence
  ENSG00000130684_1 (sequence is synthesized)
tccgtggagagcaggaagacagtcatgggacctcagggagccaggagacaggctttcttggcatttggggatgtcactgtggatttcacccagaaggaatggaggctgctgagccctgct

SEQ ID NO: 287088 - DNA, 120 bp, Artificial Sequence
  ENSG00000130684_2 (sequence is synthesized)
cagagggccctgtacagggaggtgacactggagaactacagccacctggtctcactaggaattctccattctaaaccagaactcatcaggcggctagagcaaggggaagtgccctgggga

SEQ ID NO: 287089 - DNA, 120 bp, Artificial Sequence
  ENSG00000130684_3 (sequence is synthesized)
gaagagagaagacgccggccaggcccctgtgcaggaatatatgcagaacatgtcctgcggcccaagaatcttggacttgcacatcagaggcaacagcaactacaattttctgatcaaagc

SEQ ID NO: 287090 - DNA, 120 bp, Artificial Sequence
  ENSG00000130684_4 (sequence is synthesized)
ttccagagtgacacagctgaaggtcaagagaaagaaaaaagcactaagcccatggcattttccagcccacccctaagacatgcagtaagctcaaggaggaggaacagtgtagtggaaata

SEQ ID NO: 287091 - DNA, 120 bp, Artificial Sequence
  ENSG00000130684_5 (sequence is synthesized)
gagtctagtcaaggccagagggaaaatcctacagaaatagacaaagtattgaaaggaatagaaaattcaagatggggagcattcaagtgtgcagagcgtgggcaagacttcagccggaag

SEQ ID NO: 287092 - DNA, 120 bp, Artificial Sequence
  ENSG00000130684_6 (sequence is synthesized)
atgatggtaatcatacacaaaaaagcacattccaggcagaaactttttacatgcagggagtgtcaccagggctttagagatgagtcagcattgctcttgcaccagaacacacacacagga

SEQ ID NO: 287093 - DNA, 120 bp, Artificial Sequence
  ENSG00000130684_7 (sequence is synthesized)
gagaagtcctatgtgtgcagtgtgtgtgggcgaggcttcagcctcaaggccaacctcctcagacaccagaggacacactcaggagagaagccttttctgtgcaaggtgtgtggacgaggc

SEQ ID NO: 287094 - DNA, 120 bp, Artificial Sequence
  ENSG00000130684_8 (sequence is synthesized)
tataccagtaagtcatacctcactgtgcatgagagaacacacacaggagagaagccttatgaatgccaggagtgtgggcgaaggtttaacgataagtcctcatacaacaagcacttgaag

SEQ ID NO: 287095 - DNA, 120 bp, Artificial Sequence
  ENSG00000130684_9 (sequence is synthesized)
gcgcattcaggggagaagccttttgtgtgcaaggagtgtgggcgaggctatactaataagtcatacttcgttgtgcacaagagaatacactcaggagagaagccttacagatgccaggag

SEQ ID NO: 287096 - DNA, 120 bp, Artificial Sequence
  ENSG00000130684_10 (sequence is synthesized)
tgtggccgaggctttagcaataagtcacaccttatcacacaccagaggacacactcaggggagaagccctttgcgtgcaggcagtgtaagcaaagttttagcgtgaaaggaagtctcctc

SEQ ID NO: 287097 - DNA, 120 bp, Artificial Sequence
  ENSG00000130684_11 (sequence is synthesized)
agacaccagagaacacactcaggggagaagccttttgtgtgcaaggattgtgagcgaagctttagccaaaagtcaactcttgtctaccaccagagaacacactcaggggagaaacctttt

SEQ ID NO: 287098 - DNA, 120 bp, Artificial Sequence
  ENSG00000130684_12 (sequence is synthesized)
gtttgtagagaatgtgggcaaggatttattcagaagtcaacccttgtgaaacatcagatcacacactcagaggagaagccttttgtgtgcaaggactgtggacgaggctttatccaaaag

SEQ ID NO: 287099 - DNA, 120 bp, Artificial Sequence
  ENSG00000130684_13 (sequence is synthesized)
tcaaccttcactttacaccagaggacacactcagaggagaagccttatggatgtcgggagtgtgggcgaaggtttcgggataagtcctcctataacaagcacctgagggcacacttgggt

SEQ ID NO: 287100 - DNA, 120 bp, Artificial Sequence
  ENSG00000130684_14 (sequence is synthesized)
gagaaacgttttttctgcagggattgtgggcgaggctttaccttgaagccaaatctcaccatacatcagaggacacactcaggagagaagcccttcatgtgcaagcagtgtgagaaaagt

SEQ ID NO: 287101 - DNA, 120 bp, Artificial Sequence
  ENSG00000130684_15 (sequence is synthesized)
tttagtttgaaggcaaatcttcttagacatcagtggacacactcgggggaaaggccatttaattgcaaggattgcgggcgaggcttcatcctaaaatcaactctcctcttccaccagaag

SEQ ID NO: 287102 - DNA, 120 bp, Artificial Sequence
  ENSG00000130684_16 (sequence is synthesized)
acacactcaggggagaagcctttcatctgtagtgaatgtgggcaaggatttatctggaagtcaaatcttgtgaaacaccagcttgcacattctggcaagcagccttttgtatgcaaggag

SEQ ID NO: 287103 - DNA, 120 bp, Artificial Sequence
  ENSG00000130684_17 (sequence is synthesized)
cacaccagaggacacactcaggggagaagcccttcgtgtgtaatgtgtgtgggcaaggcttcagctggaagagaagtctcaccagacaccactggcggatacactcaaaggagaagcctt

SEQ ID NO: 287104 - DNA, 120 bp, Artificial Sequence
  ENSG00000130684_18 (sequence is synthesized)
ttgtttgccaggagtgtaagcgaggctataccagtaagtcagacctcactgtgcatgaaagaatacacacaggagagaggccttatgaatgccaagagtgtggacgaaagtttagcaata

SEQ ID NO: 287105 - DNA, 120 bp, Artificial Sequence
  ENSG00000130684_19 (sequence is synthesized)
agtcatactacagtaagcacttaaagagacacttacgtgagaagcgtttttgtacagggagtgtgggtgaggcttcatcttgaagttatatctcaccatccatcagaggacacactcagg

SEQ ID NO: 287106 - DNA, 120 bp, Artificial Sequence
  ENSG00000130684_20 (sequence is synthesized)
agagtaactttgctttgttacaagctttagttgaggctgcataacttgttcgtgaagatataacagaggcagacagaatccagagggctacagagaacctgaattcaacccatgtgtccc

SEQ ID NO: 287107 - DNA, 120 bp, Artificial Sequence
  ENSG00000130684_21 (sequence is synthesized)
caagagattcagagaaaagaggtcaatgtttagggaacagagatgccagttgaggggagggcattacctgggctattggggaaatgtggtctctttcctactgagcacatattcttgttg

SEQ ID NO: 287108 - DNA, 120 bp, Artificial Sequence
  ENSG00000130684_22 (sequence is synthesized)
tatttgtgccaggctgtgctttctaaggactgctcttagccagtgactgcagagcagggataccaaggcaggcctgttacactctccccaacctccttggactgcaaacaatctaggaca

SEQ ID NO: 287109 - DNA, 120 bp, Artificial Sequence
  ENSG00000130684_23 (sequence is synthesized)
cctccaccaaacctcctcttgcactttccctctggcttccctcccagccttccttggtttggatgttttgtcccctccttaatttatgttgaaactctacataaactgtttactgttgaa

SEQ ID NO: 287110 - DNA, 120 bp, Artificial Sequence
  ENSG00000130684_24 (sequence is synthesized)
acagtgtaagtattaggaggtgggacctttgggaagtgattaagtcaagtcacgaagatagagctttgcgaatgggatcaggtgcccttatgaaaaggcttgatagagggagtttgtcct

SEQ ID NO: 287111 - DNA, 120 bp, Artificial Sequence
  ENSG00000130684_25 (sequence is synthesized)
gtggcccttctattttctgctctgtgaggacacaatgctcctcccttccaaaagatgcagcatgaaggcatcatcttggaaacagacatgagccctcaacagacaactgcacctactgat

SEQ ID NO: 287112 - DNA, 120 bp, Artificial Sequence
  ENSG00000130684_26 (sequence is synthesized)
gttttgatgttgaacttcccagcctccagaactctgggaaaataaagtcctctttatacatttcctagtcagtggtattttattataacagctcaaatagactaagtaactgctcccctc

SEQ ID NO: 287113 - DNA, 120 bp, Artificial Sequence
  ENSG00000130684_27 (sequence is synthesized)
atcattctctcacagtcatatctggaaataaaatctctgtatatgcagtcccatattggtctttgcagagaactccctccaacacagctgataccaagaacagtctgacaaaacaagtgg

SEQ ID NO: 287114 - DNA, 120 bp, Artificial Sequence
  ENSG00000130684_28 (sequence is synthesized)
taaaatagggatctggggaccactcacctgcctggcaggagtaaagcatgttggctggtggggcacaggtaggtggttagctgcaaaatatttcacaggtgatttcctgagaaaatgcct

SEQ ID NO: 287115 - DNA, 120 bp, Artificial Sequence
  ENSG00000130684_29 (sequence is synthesized)
caatgatagagaatgctgtggcagatgtgatgatgcaggcctttgaaaatgtagggaaagtgcctacaaagagcagagtagactgattatcgccgatctgcattaccacctgcagaagga

SEQ ID NO: 287116 - DNA, 120 bp, Artificial Sequence
  ENSG00000130684_30 (sequence is synthesized)
ccttgagaaattgaagacttcattcagccattagcaaacagttaatggttaagtaaaccaggactccctggtgagtgcttacaaggcctttatcttcttggatagaaggcagaattattg

SEQ ID NO: 287117 - DNA, 120 bp, Artificial Sequence
  ENSG00000130684_31 (sequence is synthesized)
cccaaatatgtgggctgaaggcctgtagcagagctctacagatgttggaatgctcagccaatgcatgtctattttgtagaggtcagacccttcgtaaggaaaatctgggatcctgaaaaa

SEQ ID NO: 287118 - DNA, 120 bp, Artificial Sequence
  ENSG00000130684_32 (sequence is synthesized)
tgacaccggaacatctccatggatgcccaagattgcctctgccatgctcccagccacagaccatctgggtgtgtagagatggcccatccttccttaggaatagcatttccaccattcatt

SEQ ID NO: 287119 - DNA, 120 bp, Artificial Sequence
  ENSG00000130684_33 (sequence is synthesized)
accacagaaccttcacaattaaggccagcttaatgagcatgtgccctacatagctgcacacaacccttgtccagcacagggaagatacatgcaatatgcctatccttttgtaaatggtat

SEQ ID NO: 287120 - DNA, 120 bp, Artificial Sequence
  ENSG00000130684_34 (sequence is synthesized)
ttgtgatgcttgcccttcaacttccataactttcctcatactcattttgagtttcactgcacattgtgggttcaccagaattctgtgctcctcttccatattaaacacatttacatctga

SEQ ID NO: 287121 - DNA, 120 bp, Artificial Sequence
  ENSG00000130684_35 (sequence is synthesized)
cacactccccatgctattaatttgttaaaggctttggtgttgtacagtactgaataactgccaatgccatctgcctgtggccttctcaagtttgtctgcacctgtggttatcctgacttc

SEQ ID NO: 287122 - DNA, 120 bp, Artificial Sequence
  ENSG00000130684_36 (sequence is synthesized)
aaacccggggagacagaggctagaagaggcagacagctcttgtgtattctgtccagtgcaaagaacacctggaactctgagccctaaccttaaatgcaagacctcatctgcaggtgttcc

SEQ ID NO: 287123 - DNA, 120 bp, Artificial Sequence
  ENSG00000130684_37 (sequence is synthesized)
tcatccttttagcccctcagtgatgtaagcaacaaacgtcacccagctcctggggcacacttcactcccagatgagcttgtcctggatttgcagggagcctggctccctagaccttttgg

SEQ ID NO: 287124 - DNA, 120 bp, Artificial Sequence
  ENSG00000130684_38 (sequence is synthesized)
ccagatccccacaggggaattgtgcaggtgcgccctccccagatccccagttggtattggaatcacaccaactgtcacacatggggagggcagctgcacccagccaccctctgacttctc

SEQ ID NO: 287125 - DNA, 120 bp, Artificial Sequence
  ENSG00000130684_39 (sequence is synthesized)
agccaggagacagcaggtgactggcctgtgggtgtcactcatcaagtagtgatctgtgtacagatggcagaacctggaatcctccaactgcgtgagtgcaacactgtccctggtgagcat

SEQ ID NO: 287126 - DNA, 120 bp, Artificial Sequence
  ENSG00000130695_0 (sequence is synthesized)
gcaacggccgttagaggagctgagggagggaaccaccgctcaccgcagacgtggtggctgcagtcagtcttcccgagtgagggatttcgccgcccgctttcaggcccgtttggcttaaat

SEQ ID NO: 287127 - DNA, 120 bp, Artificial Sequence
  ENSG00000130695_1 (sequence is synthesized)
aactgtgattgatggccatgcaggagaaatatccaactgaggggatctctcacgtcacttcaccgagttccgatgtgattcagaagggcagttccctggggactgaatggcagaccccag

SEQ ID NO: 287128 - DNA, 120 bp, Artificial Sequence
  ENSG00000130695_2 (sequence is synthesized)
ttatctcggagccctttcggagccgcttcagccgctgttcaagtgtagccgacagtggggacacagccattggtacatcatgctcagatattgcggaggatttttgcagctcaagtggca

SEQ ID NO: 287129 - DNA, 120 bp, Artificial Sequence
  ENSG00000130695_3 (sequence is synthesized)
gtcctcctttccagcccatcaaaagccacgtaaccattccaacagcccatgtgatgccttctactttagggacctctcctgccaagccaaattctacacctgttggaccctcttcctcta

SEQ ID NO: 287130 - DNA, 120 bp, Artificial Sequence
  ENSG00000130695_4 (sequence is synthesized)
aactccctttgtcagggttggctgaaagtgtgggaatgacaagaaatggagacctcggtgcaatgaaacattctccaggcctatctagagatctcatgtatttctctggtgctactggag

SEQ ID NO: 287131 - DNA, 120 bp, Artificial Sequence
  ENSG00000130695_5 (sequence is synthesized)
aaaatggaattgagcagtcctggtttccagcagtgggccatgaaagacaagaagaggcgaggaagtttgatattcctagcatggaatctaccctcaatcagtcggcaatgatggagacac

SEQ ID NO: 287132 - DNA, 120 bp, Artificial Sequence
  ENSG00000130695_6 (sequence is synthesized)
tttattcagatcctcaccaccgagtccgcttccacaacccaagaaccagcacaagtaaggagttgtacagagtgttgcctgaggccaagaaggcaccgggcagcggggcagtgtttgagc

SEQ ID NO: 287133 - DNA, 120 bp, Artificial Sequence
  ENSG00000130695_7 (sequence is synthesized)
ggaatggaccacattctaatagcagtggggtcctccctttgggactccagcctgctcccgggctctccaagcctctgccctctcaggtgtggcagccgagtcctgacacttggcatcccc

SEQ ID NO: 287134 - DNA, 120 bp, Artificial Sequence
  ENSG00000130695_8 (sequence is synthesized)
gagagcaatcttgtgaactcagcacttgtcggcagcagctggaattgattcgtttacagatggagcaaatgcagcttcagaatggagccatctgccaccatcctgctgcttttggtcctt

SEQ ID NO: 287135 - DNA, 120 bp, Artificial Sequence
  ENSG00000130695_9 (sequence is synthesized)
cactgcccatcttagagccagcacagtggatcagcatcttgaacagtaatgaacaccttctgaaggaaaaagagcttctcattgacaagcagaggaaacacatctctcagctggagcaga

SEQ ID NO: 287136 - DNA, 120 bp, Artificial Sequence
  ENSG00000130695_10 (sequence is synthesized)
aagtgcgagagagcgaactgcaagtccacagtgccctcttgggccgccctgccccctttggtgatgtctgcttgctgaggctacaggaattgcagcgagaaaacactttcttacgtgcac

SEQ ID NO: 287137 - DNA, 120 bp, Artificial Sequence
  ENSG00000130695_11 (sequence is synthesized)
agtttgcacagaagacagaagccttgagcagagaaaagattgaccttgaaaagaaactctctgcttctgaagttgaagtccagctcatcagagagtcgctcaaagtggcgttgcagaagc

SEQ ID NO: 287138 - DNA, 120 bp, Artificial Sequence
  ENSG00000130695_12 (sequence is synthesized)
attctgaggaagtgaagaaacaggaagaaagggtcaaaggtcgtgataaacatatcaataatttgaaaaagaaatgccagaaggaatcagagcagaaccgggagaagcagcagcgtattg

SEQ ID NO: 287139 - DNA, 120 bp, Artificial Sequence
  ENSG00000130695_13 (sequence is synthesized)
agaccttggagcgctacctggctgacctgcccacactggaagaccatcagaagcagagccagcagcttaaggattctgagttgaagagcacagagctgcaggagaaagtgactgagctgg

SEQ ID NO: 287140 - DNA, 120 bp, Artificial Sequence
  ENSG00000130695_14 (sequence is synthesized)
agagtttgctggaggagacccaggcaatctgcagagagaaggagattcaactggaaagcctgaggcagagagaagcagaattctcctccgctggacatagcctgcaagataaacagtctg

SEQ ID NO: 287141 - DNA, 120 bp, Artificial Sequence
  ENSG00000130695_15 (sequence is synthesized)
tggaggagaccagtggagaaggtccagaagtggaaatggagtcctggcagaagcgatacgattcgctccaaaagattgtggagaagcagcagcagaagatggatcagttgcgctcacaag

SEQ ID NO: 287142 - DNA, 120 bp, Artificial Sequence
  ENSG00000130695_16 (sequence is synthesized)
cgcacagccgtgaaggagctttcagtgcaaaaccaggacttgattgagaagaatctgacactccaggaacacctgcgccaggcccaaccagggtctccaccttcaccagacacggcccag

SEQ ID NO: 287143 - DNA, 120 bp, Artificial Sequence
  ENSG00000130695_17 (sequence is synthesized)
ctggcacttgagctgcaccaggagttggccagttgccttcaagatctgcaggctgtctgtagcattgtgacccagagggcccagggccatgaccccaatctctccctgctcctgggcatt

SEQ ID NO: 287144 - DNA, 120 bp, Artificial Sequence
  ENSG00000130695_18 (sequence is synthesized)
cactcagcacagcacccagagactcagctagatttgcagaagccagatgtgatcaagaggaaactagaagaggttcaacagctgcgtcgtgacattgaggacttaaggaccaccatgtca

SEQ ID NO: 287145 - DNA, 120 bp, Artificial Sequence
  ENSG00000130695_19 (sequence is synthesized)
gacagatatgcccaggacatgggagaaaactgtgtcacacagtgaggaattctgggggattcccccagggaggagctgggctgctgagagcctagtccagcaggtttctgccctgacatt

SEQ ID NO: 287146 - DNA, 120 bp, Artificial Sequence
  ENSG00000130695_20 (sequence is synthesized)
ctcttgtctgctattcccagagaggtctcagaggggaggggagagcctgcatctgggggccaagggctgattagggaactgtgtcctacccacactggcatgttggattacgtttgtcct

SEQ ID NO: 287147 - DNA, 120 bp, Artificial Sequence
  ENSG00000130695_21 (sequence is synthesized)
gttaattcactctagacggtgagttactaattaacttttggcaggtacaacagataagtcctcacaaactgttcccagccctaggctgacatgagagacgaacaggctgtccacctttct

SEQ ID NO: 287148 - DNA, 120 bp, Artificial Sequence
  ENSG00000130695_22 (sequence is synthesized)
tctccatccaatgggatggatccatgttcattcccacttcacaccttggtcctgctgattagagagctcatcagaggggcctggaaaggctgagcaagtaccagtgacaatggccattta

SEQ ID NO: 287149 - DNA, 120 bp, Artificial Sequence
  ENSG00000130695_23 (sequence is synthesized)
agaattctcaggccccatgtgccagccttcttgggaactgagctggctttctgggttttctcatgcctggtcttactgcttcttcctcagggctcttgttctcccagaagcctcagggta

SEQ ID NO: 287150 - DNA, 120 bp, Artificial Sequence
  ENSG00000130695_24 (sequence is synthesized)
atgtgttggttagcacgtaactactaggattggggccctagggattatagccaggactctaatctgcctaccatgccatttaacaagagatcccactctccagctgccttgtgtccctag

SEQ ID NO: 287151 - DNA, 120 bp, Artificial Sequence
  ENSG00000130695_25 (sequence is synthesized)
ggtcctggccatgtgtttagtgtgctaaactttctcctttgttctcaggccttccaggtagtccccttcctggacttaagagtgcaaactcttctctgtggttctagccttgggcagaat

SEQ ID NO: 287152 - DNA, 120 bp, Artificial Sequence
  ENSG00000130695_26 (sequence is synthesized)
tatatcccagagaccacagagcaactgtcaagctgcttaccccctcacccagggctacagcctgtgcccagccctctaatttgtgcctctcttgtgttgggggtggtgggggttattcct

SEQ ID NO: 287153 - DNA, 120 bp, Artificial Sequence
  ENSG00000130695_27 (sequence is synthesized)
ttccctttcctgctctggcctccttgaaagttcagagtacccagtacaagtcagctttaaagtacagcttttagtgtttcctgggttgtttctctggggctttagtgagggacctttgcc

SEQ ID NO: 287154 - DNA, 120 bp, Artificial Sequence
  ENSG00000130695_28 (sequence is synthesized)
ctctggtttttcttgcctcctggtttagggagcatctcacacttgttagtatctggttgttgggccagccgtgcctcctctagatctggagccaggccaggcaggggccacgtgtgggcc

SEQ ID NO: 287155 - DNA, 120 bp, Artificial Sequence
  ENSG00000130695_29 (sequence is synthesized)
agtcagccactacaagatttttgctaagctttgggctgttggcagcatcttggacctcatgcctgggcctgaatgaggctctttcttaagtgtttttacaagtttgtgttttatttatgg

SEQ ID NO: 287156 - DNA, 120 bp, Artificial Sequence
  ENSG00000130695_30 (sequence is synthesized)
agtgacttatcccttccattcagagcagccccacccagccagcccttcagcctctgggctcctgctgcttaaaggcagagccgcctggttggtctccaccctgtgcattgggagcccagc

SEQ ID NO: 287157 - DNA, 120 bp, Artificial Sequence
  ENSG00000130695_31 (sequence is synthesized)
caccatgctgacgggtatttttcctcataaagtttataaccagttatttatatgaatctttgttatgtccatttgtttgtattgcgtattttgattataaaataaagtatcttaacagac

SEQ ID NO: 287158 - DNA, 120 bp, Artificial Sequence
  ENSG00000130695_32 (sequence is synthesized)
ctggtttcttaattcagcaaagacgagagagccaggggccggctggtgaaactgactgcaggttagtaaaaaaaaaagaagacccataaatgattcaaagaaaccaggcctatttagggt

SEQ ID NO: 287159 - DNA, 120 bp, Artificial Sequence
  ENSG00000130695_33 (sequence is synthesized)
cccttcttggataatcagtacgaccagagctgtaaataacaacaaccatcatagtgctagaaatggcaagcttcattagactgaatttttagccatgtccttgtaccaaagaacaagagt

SEQ ID NO: 287160 - DNA, 120 bp, Artificial Sequence
  ENSG00000130695_34 (sequence is synthesized)
ttgcactggctgtttataaaattgattccactggcctgcagttattagggtgagagttccctttcccccagtagtggttatgtgttcacactacattcctgtataaacctttgtgattgg

SEQ ID NO: 287161 - DNA, 120 bp, Artificial Sequence
  ENSG00000130695_35 (sequence is synthesized)
atagccagaccacatgtcctagtgcagcccccttgccctctgtcctcaccgtcagccttgtgctcgcagccttccttgataactttgcctttcagattgtggagaagcagcagcagaaga

SEQ ID NO: 287162 - DNA, 120 bp, Artificial Sequence
  ENSG00000130695_36 (sequence is synthesized)
ctgcagaaagtaaaaattgccttgctgaggaaattaaatatagcttaaggattctgagttgaagagcacagagctgcaggagaaagtgactgagctggagagtttgctggaggagaccca

SEQ ID NO: 287163 - DNA, 120 bp, Artificial Sequence
  ENSG00000130695_37 (sequence is synthesized)
agtcaggtttggggtatgggagagagaacagaatcctgcctcagatgccatactccctgtcctgcatactgagcaagactgtctagttcgcttcattcttcagatagtttggactcgttg

SEQ ID NO: 287164 - DNA, 120 bp, Artificial Sequence
  ENSG00000130695_38 (sequence is synthesized)
gccatgcaggttgctcagtgttagggatacaaaaagaatgagacccagtcagtgcttttgagccttgctgagaggacacaaatatagtagggagtttcagcacagtactgtgagagcagt

SEQ ID NO: 287165 - DNA, 120 bp, Artificial Sequence
  ENSG00000130695_39 (sequence is synthesized)
ccccacagtatcctgggggagtgcaggagagtcagtgggaggaagggaggtaaaagagaggtttctggagatcctgaacctacaaggatgaggagttagccaggcaaacaagaggagctg

SEQ ID NO: 287166 - DNA, 120 bp, Artificial Sequence
  ENSG00000130699_0 (sequence is synthesized)
atggcggcgggctcggatctgctggacgaggtcttcttcaacagcgaggtggacgagaaagtggtgagcgacctggtgggctcgctggagtcgcagctggcggccagcgcggcccaccac

SEQ ID NO: 287167 - DNA, 80 bp, Artificial Sequence
  ENSG00000130699_1 (sequence is synthesized)
caccacctcgcgccgcgcacgcccgaggtgcgggccgcggccgccggcgcgctcgggaaccatgttgtgagcggcagccc

SEQ ID NO: 287168 - DNA, 80 bp, Artificial Sequence
  ENSG00000130699_2 (sequence is synthesized)
ccccggccccggccctggccctggcaagcccgccggccccggcgccgcgcaaactttgaatgggagcgccgcgctgctga

SEQ ID NO: 287169 - DNA, 120 bp, Artificial Sequence
  ENSG00000130699_3 (sequence is synthesized)
agcgccgcgctgctgaactcgcaccacgccgccgcacctgctgtcagcctggtcaacaacgggcccgccgcgctgctgccgctgcccaagcccgccgcccccggcactgtcatccagacg

SEQ ID NO: 287170 - DNA, 80 bp, Artificial Sequence
  ENSG00000130699_4 (sequence is synthesized)
cggcgccgggggtcaaggccgagtcgcccaagagggtggtgcaggcggcgcccccggcggcgcagaccctggcggccagc

SEQ ID NO: 287171 - DNA, 80 bp, Artificial Sequence
  ENSG00000130699_5 (sequence is synthesized)
ctggcggccagcggcccggccagcacggcggccagcatggtcatcgggccaactatgcaaggggcgctgcccagcccggc

SEQ ID NO: 287172 - DNA, 120 bp, Artificial Sequence
  ENSG00000130699_6 (sequence is synthesized)
gctgcccaaaggcgcggccggcgcagtgacccagagcctgtcccggacgcccacggccaccaccagcgggattcgggccaccctgacgcccaccgtgctggccccccgcttgccgcagcc

SEQ ID NO: 287173 - DNA, 120 bp, Artificial Sequence
  ENSG00000130699_7 (sequence is synthesized)
cagaacccgaccaacatccagaacttccagctgcccccaggaatggtcctcgtccgaagtgagaatgggcagttgttaatgattcctcagcaggccttggcccagatgcaggcgcaggcc

SEQ ID NO: 287174 - DNA, 120 bp, Artificial Sequence
  ENSG00000130699_8 (sequence is synthesized)
catgcccagcctcagaccaccatggcgcctcgccctgccacccccacaagtgcccctcccgtccagatctccaccgtacaggcacctggaacacctatcattgcacggcaggtgacccca

SEQ ID NO: 287175 - DNA, 120 bp, Artificial Sequence
  ENSG00000130699_9 (sequence is synthesized)
actaccataattaagcaagtgtctcaggcccagacaacggtgcagcccagtgcaaccctgcagcgctcgcccggcgtccagcctcagctcgttctgggtggcgctgcccagacggcttca

SEQ ID NO: 287176 - DNA, 120 bp, Artificial Sequence
  ENSG00000130699_10 (sequence is synthesized)
cttgggacggcgacggctgttcagacggggactcctcagcgcacggtaccaggggcgaccaccacttcctcagctgccacggaaactatggaaaacgtgaagaaatgtaaaaatttccta

SEQ ID NO: 287177 - DNA, 120 bp, Artificial Sequence
  ENSG00000130699_11 (sequence is synthesized)
tctacgttaataaaactggcttcatctggcaagcagtctacagagacagcagctaatgtgaaagagctcgtgcagaatttactggatggaaaaatagaagcagaagatttcacaagcagg

SEQ ID NO: 287178 - DNA, 120 bp, Artificial Sequence
  ENSG00000130699_12 (sequence is synthesized)
ttataccgagaacttaattcttcacctcaaccttaccttgtgcctttcctgaagaggagcttacccgccttgagacagctgacccccgactccgcggccttcatccagcagagccagcag

SEQ ID NO: 287179 - DNA, 120 bp, Artificial Sequence
  ENSG00000130699_13 (sequence is synthesized)
cagccgccaccgcccacctcgcaggccaccactgcgctcacggccgtggtgctgagtagctcggtccagcgcacggccgggaagacggcggccaccgtgaccagtgccctccagccccct

SEQ ID NO: 287180 - DNA, 120 bp, Artificial Sequence
  ENSG00000130699_14 (sequence is synthesized)
gtgctcagcctcacgcagcccacgcaggtcggcgtcggcaagcaggggcaacccacaccgctggtcatccagcagcctccgaagccaggagccctgatccggcccccgcaggtgacgttg

SEQ ID NO: 287181 - DNA, 120 bp, Artificial Sequence
  ENSG00000130699_15 (sequence is synthesized)
ccagctgaacccactgcagccagtccctgtggtgaaacccgccgtgttacctggaaccaaagccctttctgctgtctcggcacaagcagctgctgcacagaaaaataaactcaaggagcc

SEQ ID NO: 287182 - DNA, 120 bp, Artificial Sequence
  ENSG00000130699_16 (sequence is synthesized)
tgggggaggttcgtttcgggacgatgatgacattaatgatgttgcatcgatggctggagtaaacttgtcagaagaaagtgcaagaatattagccacgaactctgaattggtgggcacgct

SEQ ID NO: 287183 - DNA, 120 bp, Artificial Sequence
  ENSG00000130699_17 (sequence is synthesized)
aacgcggtcctgtaaagatgaaaccttcctcctccaagcgcctttgcagagaagaatattagaaataggtaaaaaacatggtataacggaattacatccagatgtagtaagttatgtatc

SEQ ID NO: 287184 - DNA, 120 bp, Artificial Sequence
  ENSG00000130699_18 (sequence is synthesized)
acatgccacgcaacaaaggctacagaatcttgtagagaaaatatcagaaacagctcagcagaagaacttttcttacaaggatgacgacagatatgagcaggcgagtgacgtccgggcaca

SEQ ID NO: 287185 - DNA, 120 bp, Artificial Sequence
  ENSG00000130699_19 (sequence is synthesized)
gctcaagttttttgaacagcttgatcaaatcgaaaagcagaggaaggatgagcaggagcgggagatcctgatgagggcagcaaagtctcggtcaagacaagaagatccagaacagttaag

SEQ ID NO: 287186 - DNA, 120 bp, Artificial Sequence
  ENSG00000130699_20 (sequence is synthesized)
gctgaaacagaaggcaaaggagatgcagcaacaggaactggcacaaatgagacagcgggacgccaacctcacagcactagcagcgatcgggcccaggaaaaagaggaaagtggactgtcc

SEQ ID NO: 287187 - DNA, 120 bp, Artificial Sequence
  ENSG00000130699_21 (sequence is synthesized)
ggggccgggctcaggagcagaggggtcgggccccggctcagtggtcccaggcagctcgggtgtcggaacccccagacagttcacgcgacaaagaatcacgcgggtcaacctcagggacct

SEQ ID NO: 287188 - DNA, 120 bp, Artificial Sequence
  ENSG00000130699_22 (sequence is synthesized)
catattttgtttagaaaatgaacgtgagacaagccattcactgctgctctacaaagcattccttaagtgacacaggaggacgcctggggactttttatatatttgcagattacgcctttt

SEQ ID NO: 287189 - DNA, 120 bp, Artificial Sequence
  ENSG00000130699_23 (sequence is synthesized)
tgtaacgagcaaatgggatattgtttaaaaaacagccacctctttacaatggaacagttttatattcctgtttctaaatcagctcttcagtgtgaaagaaaacacgtttctgtaacagag

SEQ ID NO: 287190 - DNA, 120 bp, Artificial Sequence
  ENSG00000130699_24 (sequence is synthesized)
agaacacaaaggcctgtggatactcttaaaggacaattaaatcttaactcatcttgattgagtggccttcctgccaaacaagccatatataaagactgatggaatcgttagcaaataatt

SEQ ID NO: 287191 - DNA, 120 bp, Artificial Sequence
  ENSG00000130699_25 (sequence is synthesized)
agctgccctctgtcaactcatagcagtttctgcattatttgtgcattttggtttagttctacctaacttactatgtaggtgtatgtctacagccgatgacctcatttcgtttattttatt

SEQ ID NO: 287192 - DNA, 120 bp, Artificial Sequence
  ENSG00000130699_26 (sequence is synthesized)
tttgtaatagtcagttggcaaagcaaactgattttttagactatttatcttccttcccttcccctcccaccccgctctcctctctgccccctgccctcccctcccctcccttcccctcca

SEQ ID NO: 287193 - DNA, 120 bp, Artificial Sequence
  ENSG00000130699_27 (sequence is synthesized)
ctccgctgagaatcctggaggaatacacaattcatcgttgcacccccacctcagagtgtaatcgcatttctgcttggtagaggccgagcccagcaaaggtggctccttctgaatgtgtgg

SEQ ID NO: 287194 - DNA, 120 bp, Artificial Sequence
  ENSG00000130699_28 (sequence is synthesized)
tcagcatctgtacaaatgcattttatttgctatagtttgtaaagctgtaaagttaaaagagatgaaaaccttttcagcataaatatattttacttgcactgtgttttttagctaaaagtg

SEQ ID NO: 287195 - DNA, 120 bp, Artificial Sequence
  ENSG00000130699_29 (sequence is synthesized)
aaaacctagattaaataaaatcaaagttgagaagaatcatcaaaagactgtttctcggtgtgaatcaagtgttgaaaaatggttggtgtattttgtcagtaattgtacataacttttggc

SEQ ID NO: 287196 - DNA, 120 bp, Artificial Sequence
  ENSG00000130699_30 (sequence is synthesized)
acatgacatagaaatggctatgtaaactataattattttgctaagagactgtatgcaagccttgggccgactttacagacgtccagagcaaagccccttctttgtacctatttttttatt

SEQ ID NO: 287197 - DNA, 120 bp, Artificial Sequence
  ENSG00000130699_31 (sequence is synthesized)
acaaatatactaattggttctttctattttcagaggttattgtatgaaattgtctattgatagtacttttatgactgtaaatactctggctttctccgtgtgaattctcacattagactt

SEQ ID NO: 287198 - DNA, 120 bp, Artificial Sequence
  ENSG00000130699_32 (sequence is synthesized)
taattcgagcgcgtgtgaactgaacgctgatcagtattttttatcaacacctgagaactgttacaccttttattttgtcttttaggaaatccctgtctttccattttttcatgtaaattt

SEQ ID NO: 287199 - DNA, 120 bp, Artificial Sequence
  ENSG00000130699_33 (sequence is synthesized)
tgcacagttacttgttcatatgtaaatattttactttcagaaatgaagtttttaattgctattgttttatataggattgaaagaaaattaactcctttattaaaaacaaatttatctgta

SEQ ID NO: 287200 - DNA, 120 bp, Artificial Sequence
  ENSG00000130699_34 (sequence is synthesized)
gatctggccctcttgctctgggctcccttttgtctgactgtagactctgggcaccctggccgcttgcaggggtgagcacagctgtcatctgctcctgaaggcgcggatgccctgactgtg

SEQ ID NO: 287201 - DNA, 120 bp, Artificial Sequence
  ENSG00000130699_35 (sequence is synthesized)
tggatcctgtctgtgtggcccctggcacgctgtgacctcctgcagcaccgcacttgcagtgctggctttgataatggagttacttttaggctgatctgcctcctagcaaaatgcctgaca

SEQ ID NO: 287202 - DNA, 120 bp, Artificial Sequence
  ENSG00000130699_36 (sequence is synthesized)
ggggacggggggatgctgggcaccagggggacctgtgggccagctggccctgggcttgtgcttggggagtgaatgatgggttctgacccccatgcacccctgtgggcccctggcatcact

SEQ ID NO: 287203 - DNA, 120 bp, Artificial Sequence
  ENSG00000130699_37 (sequence is synthesized)
ggccccatccttcacccctgccaaccacgcttgccctgtgcctctgaagctcccccactaagggggtggagtctaattccctgccccttgactgtgggttcagccatgtgacttgctttg

SEQ ID NO: 287204 - DNA, 120 bp, Artificial Sequence
  ENSG00000130699_38 (sequence is synthesized)
tttgtctcctagtttttgaggttctgatttgaggtgatgattttcatatccttaagtgcacacttaagcagattttcctgtattgagagtgttgttaattttcttgttgttccagggtag

SEQ ID NO: 287205 - DNA, 120 bp, Artificial Sequence
  ENSG00000130699_39 (sequence is synthesized)
gtttttctctgatgtgtgtggagcccccattttttgactcttctctgactttcccgtggctctgggtggctttaccgcctctgtccctttgccctggtggccttggggtatttgccacat

SEQ ID NO: 287206 - DNA, 120 bp, Artificial Sequence
  ENSG00000130699_40 (sequence is synthesized)
ctgtggtttcctggtgccgtctgctggccacatggggaagtccaggtcttgagcgggtccttgctggtgtgcaggacggaagttgtcctccagttctcccggccctttcctgcaggaccc

SEQ ID NO: 287207 - DNA, 120 bp, Artificial Sequence
  ENSG00000130699_41 (sequence is synthesized)
agaacttccccctttccttcttttctgcctcaccacccagtggccaaagggctcctctcaggacatgctgtgttgccttgacaaccccttcccgtcttgtgctcagtggtccctgccctg

SEQ ID NO: 287208 - DNA, 120 bp, Artificial Sequence
  ENSG00000130699_42 (sequence is synthesized)
tggtctgcactgaccttcctggacacctctcaggccctgggacttggggtggcttagcctttcagcagtggcttcccacagacccctgtcccaccccgccccaccgcggccttgcagggg

SEQ ID NO: 287209 - DNA, 120 bp, Artificial Sequence
  ENSG00000130699_43 (sequence is synthesized)
agagactggggggtcaggctcaggcgtgtgttgactctgcgccgacttgcagtgattttgaagtctaggcgccctcgtccagtgcagacggcgatgctggtgtaaacctgcgttccttgc

SEQ ID NO: 287210 - DNA, 120 bp, Artificial Sequence
  ENSG00000130699_44 (sequence is synthesized)
ttgtgctgaactgtgtttggaagagaggctgggagacatcagctcggcagccacgttgtcttcggcctcccggaagtgatgctaactttctaagctgtgtgtctgagtgtttttcgctac

SEQ ID NO: 287211 - DNA, 120 bp, Artificial Sequence
  ENSG00000130699_45 (sequence is synthesized)
tactgctgttcttcaaaacgtgctgccagtgacctggccttgtgtgtgtgacaccccgtaaatggttaggcacggagagggcacgtacgcgttcggggcggaggtggctggagtgtgtgc

SEQ ID NO: 287212 - DNA, 120 bp, Artificial Sequence
  ENSG00000130699_46 (sequence is synthesized)
cccgccccgggagcagacgcgctcctcccggacagcccccaggtgctgaccgtgtggggcctgacgtttgggtggcgcagaccctgcaccgggcggttccgcggacggcgactctgcatt

SEQ ID NO: 287213 - DNA, 120 bp, Artificial Sequence
  ENSG00000130699_47 (sequence is synthesized)
tggcttcgatactgagtgtctatggcacatatgcggtggagagacctcctcctttcatttgatccttttgagagccctgtgatggggcgagggctgtctgcagcgccatgcgtcagaggc

SEQ ID NO: 287214 - DNA, 120 bp, Artificial Sequence
  ENSG00000130699_48 (sequence is synthesized)
tccatgaccagtccctgcctgacccctctggctgctacgcccaccatgggcacagcccgtgaggggtttggatgaatctagggaggaaagccactgccactgccgtgtgggttgggcaca

SEQ ID NO: 287215 - DNA, 120 bp, Artificial Sequence
  ENSG00000130699_49 (sequence is synthesized)
gaaggccttggtccgctggcagccccagtcctgagaagagagggggaggttcctacgagatctccactccatcttcagagcagtttagcaacaaactctctgcgggagccaaaatccaca

SEQ ID NO: 287216 - DNA, 120 bp, Artificial Sequence
  ENSG00000130699_50 (sequence is synthesized)
tagaattctgcaagcaaagaccctatgggaaagacagggagtctggacccctcctgcctggggcgaagtgggctggggagaagcgggagtgtgccatgtagagaaaggcaattggagtat

SEQ ID NO: 287217 - DNA, 120 bp, Artificial Sequence
  ENSG00000130699_51 (sequence is synthesized)
ccgggaggcctgtgccagcagggagagctcctctggaaggctgcaggcgaaggggaggggtgcacacgtgtcgaaggcgtgtgtggcctagctaaggagactccttcctggggctgggtg

SEQ ID NO: 287218 - DNA, 120 bp, Artificial Sequence
  ENSG00000130699_52 (sequence is synthesized)
ctttttgtttgttttcttgaacacattttggacatttgctatcaggaataatcccacttagtgggagggcaggatggggtcctggcccttgacatccagacatgctgccgtgagggccaa

SEQ ID NO: 287219 - DNA, 120 bp, Artificial Sequence
  ENSG00000130699_53 (sequence is synthesized)
gatccatcttacttagctcaaaagctttctgtaaaagttgatatttctgaatttttaagcaaggaaaaccgacgcatgagcagccgcctgacccctcgtgtctgtctttccacccagagg

SEQ ID NO: 287220 - DNA, 120 bp, Artificial Sequence
  ENSG00000130699_54 (sequence is synthesized)
ccgctggtatggaaggggcgcctgactggtctgcacagcccaccgtgcctctgctcccgcccgcttcttagataaattggccacggctcagaaaccttttccaagcatgcaggaagcctc

SEQ ID NO: 287221 - DNA, 120 bp, Artificial Sequence
  ENSG00000130699_55 (sequence is synthesized)
ctgctagaggaagcttgggtattaccttaaatagttaaaatagaaaccagaggttgaggccctgggatgttgtattttgtctcagtaaaatgaaatagttgagttggctttgaaccaccg

SEQ ID NO: 287222 - DNA, 120 bp, Artificial Sequence
  ENSG00000130699_56 (sequence is synthesized)
gcacgtccccgccctgccttgtctggggatgttactggtgtaaatgaatgcagcgtgcttttagaggatcttgtagatagatgttctcttggattaggagcagcggtccaagcgtaagac

SEQ ID NO: 287223 - DNA, 120 bp, Artificial Sequence
  ENSG00000130699_57 (sequence is synthesized)
acgggcacctgcgtgggacaggtgggcaggagactggaggcagggtagcagctcacagcacagggtggatttaggtgagtcccgggaggcgaagccgcggctgctcatagcggttcactt

SEQ ID NO: 287224 - DNA, 120 bp, Artificial Sequence
  ENSG00000130699_58 (sequence is synthesized)
atgtgcagtttggatctggctttcttggttttatagtcatgacgtttgctctgcagctagagaaaggatgtctttgccagaagaattacattttgagcacattccctttcatgggcagag

SEQ ID NO: 287225 - DNA, 120 bp, Artificial Sequence
  ENSG00000130699_59 (sequence is synthesized)
ggattcaccaaacgtagaggggcagttttaaaaaaatttcagaggtgttttcttcctctaaagacagcttaaacaacaaaatggtgcgggctccctcatcatgagctggtatgtgttgtg

SEQ ID NO: 287226 - DNA, 120 bp, Artificial Sequence
  ENSG00000130699_60 (sequence is synthesized)
cttgataatagcgaggagaacagggtgaaatggcatggagggagggtgtcccttataaaggccagggaagggctgagcgcctgtgtaaagagagggcttccttgcctgccttttgactcc

SEQ ID NO: 287227 - DNA, 120 bp, Artificial Sequence
  ENSG00000130699_61 (sequence is synthesized)
agagggaaagagatgtgccgtgcctcttgctttagtgtaaggacagaacttccctgttcactagtcagtggagctactttacccaaaaaggtgggttctgtttaagcaggcacagcctgt

SEQ ID NO: 287228 - DNA, 120 bp, Artificial Sequence
  ENSG00000130699_62 (sequence is synthesized)
gggcaatcattttcttgccaagttttgacctctggtgcttagtcacacacaagcagcatgggtgtttttagaattaggtgctgtgtttggcagcaggatcacctctgcattctgcttccc

SEQ ID NO: 287229 - DNA, 120 bp, Artificial Sequence
  ENSG00000130699_63 (sequence is synthesized)
tgggctcctcctgaccacgtgtgagtctgcagagcacagccagtgggatccagggcatccaatccattgcctgcaccctgaagcctgtggaggcagaacccaggcttctccctgattcga

SEQ ID NO: 287230 - DNA, 120 bp, Artificial Sequence
  ENSG00000130699_64 (sequence is synthesized)
tgacaggctccctgcaccgcagggcctggcccgggcatttgatggcaggttccctgcgccgcagggcctggcctgagcattgcctgagctgcctgaggctcttcctgtccagtgtgggtg

SEQ ID NO: 287231 - DNA, 120 bp, Artificial Sequence
  ENSG00000130699_65 (sequence is synthesized)
ttcctgtttcgttggagacatgtttgcattataggccgcttccccaggtccccacacatgttctgcagcatagagtttacctgccagggcacctttgcaaaatggtagcgactaaattct

SEQ ID NO: 287232 - DNA, 120 bp, Artificial Sequence
  ENSG00000130699_66 (sequence is synthesized)
gaagcacctgggcccagaggtttgaggccaggccttatggacttgagcattggcttttgacaaggatgccagtgtctctaggccccagcatcctggggacagggccagagcataggccat

SEQ ID NO: 287233 - DNA, 120 bp, Artificial Sequence
  ENSG00000130699_67 (sequence is synthesized)
ggtcagtgctgccaggttttggatctctgccttgtgccggaggtgagagtgagaggcaggatgacagcagagctgggcagaccctgccacgaggggcccagcaggggctgggcggacaga

SEQ ID NO: 287234 - DNA, 120 bp, Artificial Sequence
  ENSG00000130699_68 (sequence is synthesized)
gctggccatgctgggagcagtgggtggaggcccttgagggccaagttcaggcaggacttaggaactctaaccccactccagtagaaaagccctcagccgccttacagaaaattcagaaag

SEQ ID NO: 287235 - DNA, 120 bp, Artificial Sequence
  ENSG00000130699_69 (sequence is synthesized)
gtagaaaagccctcagccgccttacagaaaattcagaaagggagctgggtttggtagctcatgcctgtaattcagcactttgggaggtcaaagtgggaggatcgcttgagcctaggagtt

SEQ ID NO: 287236 - DNA, 120 bp, Artificial Sequence
  ENSG00000130699_70 (sequence is synthesized)
aagcaagtgtctcaggcccagacaacggtgcagcccagtgcaaccctgcagcgctcgcccggcgtccagtcacacagaatttaacaccagcagcactgttcaagctttccaccatgttgg

SEQ ID NO: 287237 - DNA, 120 bp, Artificial Sequence
  ENSG00000130699_71 (sequence is synthesized)
aagcattaaaactatgtccttactagtacttgatcataaggcatgtctgaagcagaagcagcctgcggcacatggaccgtaactttcaccgcaccctgggaagcagatgacatcgctccc

SEQ ID NO: 287238 - DNA, 120 bp, Artificial Sequence
  ENSG00000130699_72 (sequence is synthesized)
ccacgccacgctgccacctgccgctcacatccctcgtctgtagtgagagcatcgttctagaagggttctgtatccaccctggtggccgctggtttctagaacagcgttttcatctgcaga

SEQ ID NO: 287239 - DNA, 120 bp, Artificial Sequence
  ENSG00000130699_73 (sequence is synthesized)
gaggagcgtgtcccagagcagcctcagctcgttctgggtggcgctgcccagacggcttcacttgggacggcgacggctgttcagacggggactcctcagcgcacggtaccaggggcgacc

SEQ ID NO: 287240 - DNA, 120 bp, Artificial Sequence
  ENSG00000130700_0 (sequence is synthesized)
agtcttcggcccgccggtcgccgacccaccgccaccgccgtgccctgccgccctccctgcccgctggtcaagaccacgcctgggaggatgtaccagagcctggcgctggccgcgagcccc

SEQ ID NO: 287241 - DNA, 120 bp, Artificial Sequence
  ENSG00000130700_1 (sequence is synthesized)
cgccaggccgcctacgccgactcgggctccttcctgcacgctccgggcgccggctctccgatgtttgtgccgccggcgcgcgtcccctcgatgctgtcctacctgtccgggtgtgagccg

SEQ ID NO: 287242 - DNA, 120 bp, Artificial Sequence
  ENSG00000130700_2 (sequence is synthesized)
tcctacctgtccgggtgtgagccgagcccgcagccccccgagctcgctgcgcgccccggctgggcgcagacagccaccgcggattcgtcggccttcggcccgggcagtccgcacccccca

SEQ ID NO: 287243 - DNA, 120 bp, Artificial Sequence
  ENSG00000130700_3 (sequence is synthesized)
gccttccctttcgcgcacagcccctcggggcccggcagcggcggcagcgcggggggccgagacggcagtgcctaccagggcgcgctgttgcctcgagaacagttcgcggccccgcttggg

SEQ ID NO: 287244 - DNA, 120 bp, Artificial Sequence
  ENSG00000130700_4 (sequence is synthesized)
cggccggtggggacctcgtactccgccacctacccggcctacgtgagccccgacgtggcccagtcctggactgccgggcccttcgatggcagcgtcctgcacggcctcccaggccgcagg

SEQ ID NO: 287245 - DNA, 120 bp, Artificial Sequence
  ENSG00000130700_5 (sequence is synthesized)
cccaccttcgtgtccgacttcttggaggagttcccgggtgagggtcgtgagtgtgtcaactgcggggccctgtccacaccgctgtggcgccgagacggcaccggccactacctgtgcaat

SEQ ID NO: 287246 - DNA, 120 bp, Artificial Sequence
  ENSG00000130700_6 (sequence is synthesized)
gcctgcggcctctaccacaagatgaatggcgtcaaccggccgctcgttcggcctcagaagcgcctgtcctcgtcccgccgcgccggcctctgctgcaccaactgccacacgaccaacacc

SEQ ID NO: 287247 - DNA, 120 bp, Artificial Sequence
  ENSG00000130700_7 (sequence is synthesized)
acgctgtggcggcggaactcggagggggagcccgtgtgcaatgcctgcggcctctacatgaagctgcacggggtgccgcggcctctggctatgaagaaggaaagcatccagacacggaag

SEQ ID NO: 287248 - DNA, 120 bp, Artificial Sequence
  ENSG00000130700_8 (sequence is synthesized)
cggaagccaaagaccatcgccaaggccaggggctcctcaggatccacaaggaatgcctcggcctccccatctgctgtcgccagcactgacagctcagcagccacttcgaaagccaagccc

SEQ ID NO: 287249 - DNA, 120 bp, Artificial Sequence
  ENSG00000130700_9 (sequence is synthesized)
agcctggcgtccccagtgtgccctgggcccagcatggccccccaggcctctggccaggaggatgactctcttgcccccggccacttggagttcaagttcgagcctgaggactttgccttc

SEQ ID NO: 287250 - DNA, 120 bp, Artificial Sequence
  ENSG00000130700_10 (sequence is synthesized)
tcaggggaacagcctggaacagaccacccactgagtcacctccgtgcctgctttgctccagcacagcagagaccagcaggccccccaacccagagactgggtctgctggagtctccacac

SEQ ID NO: 287251 - DNA, 120 bp, Artificial Sequence
  ENSG00000130700_11 (sequence is synthesized)
agtggtggggaggccttctggacagacggcagtcgggccccagagcaagaaggctggtgagggaagggctcagcttcccaccccacgtacagcaagggactccccaggtgcggcccaagg

SEQ ID NO: 287252 - DNA, 120 bp, Artificial Sequence
  ENSG00000130700_12 (sequence is synthesized)
ctccggaccacactggccccctgcggcggaggccaacgcagggcaccaccaccaccaacttgaattccgtcatcaatgctcaccgtcaatatgtttacaagttgtagcagttgggggaaa

SEQ ID NO: 287253 - DNA, 120 bp, Artificial Sequence
  ENSG00000130700_13 (sequence is synthesized)
acagtcaacctcccagtgtaaaaccaagattcccagtgaagcacctgaggccaagcaggggagaggaatgaggggagcagctggacatgggcctcctgaggcctcggggctgtccttcat

SEQ ID NO: 287254 - DNA, 120 bp, Artificial Sequence
  ENSG00000130700_14 (sequence is synthesized)
tgcccacatggatagacggagctgtggtgcagagaacttttcccgcaacaggtgcaggactgccagggatcggagtgcgggccgcgcacggtgccaggattccgccgaggggaagccgct

SEQ ID NO: 287255 - DNA, 120 bp, Artificial Sequence
  ENSG00000130700_15 (sequence is synthesized)
cacattgcagtcatcacagacttacgcacttgtttggacagtttttccagaggggatgggaaagggccttgttctagctgaatctgtgtatcatgaccatttctgacaggcagaatgaat

SEQ ID NO: 287256 - DNA, 120 bp, Artificial Sequence
  ENSG00000130700_16 (sequence is synthesized)
tgtctggtagccctgtcctgacccatccaagcgctgttggggctggtggtgacgtggtcacatgtcctggcatatctggggccacgcagtttagtctcttgtcccaggagaattgttagt

SEQ ID NO: 287257 - DNA, 120 bp, Artificial Sequence
  ENSG00000130700_17 (sequence is synthesized)
gacccctctttctcttgcaagccccctccacactgggttggatgataccttaatgagtgacgctggcgagaggcaccctacccgacgcagctgtgaatggccggtgatgtatgtcaggag

SEQ ID NO: 287258 - DNA, 120 bp, Artificial Sequence
  ENSG00000130700_18 (sequence is synthesized)
gccacagggagcagaggagcggggcaggcagccacagggccctgcggggagcacatcctcgcctccgtccggctgctgcccttcaacaacaagccctgatttttccagcaatgccagaaa

SEQ ID NO: 287259 - DNA, 120 bp, Artificial Sequence
  ENSG00000130700_19 (sequence is synthesized)
cctggattttaagtcttccaatttgattcaaaaatatttttaacattgtgagccagctagacccccagtgcaccaccccatattgaaaaacagttgtctggcatcagcttcaggagcggg

SEQ ID NO: 287260 - DNA, 120 bp, Artificial Sequence
  ENSG00000130700_20 (sequence is synthesized)
tccggtcattctgaaactgtccctccagaggttcttccagccccacttctatgcgatgtcatcttttctaaaagagacaaatgaagccacagggaaagtgaaataaagccttgaacctca

SEQ ID NO: 287261 - DNA, 120 bp, Artificial Sequence
  ENSG00000130701_0 (sequence is synthesized)
gctcacttctctctccctgtgaagagcgtgggggactccgcgcagaggtcgacagaggttgaggcagggccaggagccatgatggacacagaggggcagtagaggctgcaggcgtctcca

SEQ ID NO: 287262 - DNA, 120 bp, Artificial Sequence
  ENSG00000130701_1 (sequence is synthesized)
caaccccagcgcagaggggcccgggccagggccacagggagccatggagagcttcatggagtcgctgaacaggctgaaggagatccacgagaaggaagtcctgggcctgcagaacaagct

SEQ ID NO: 287263 - DNA, 120 bp, Artificial Sequence
  ENSG00000130701_2 (sequence is synthesized)
tctggaactgaactcagagaggtgccgggacgcccagaggatcgaggagctcttctccaagaaccaccagctccgggaacagcagaagacactgaaggagaacctgcgggtgctggagaa

SEQ ID NO: 287264 - DNA, 120 bp, Artificial Sequence
  ENSG00000130701_3 (sequence is synthesized)
caggctgcgggccggcctgtgcgaccgctgcatggtcacccaggagctggccaggaagcggcagcaggagttcgagagctcccacctgcagaacctgcagcgcatcttcatcctcaccaa

SEQ ID NO: 287265 - DNA, 120 bp, Artificial Sequence
  ENSG00000130701_4 (sequence is synthesized)
cgagatgaacgggctgaaggaagagaacgagaccttgaaggaggaggtgaagcggcttcggggcctgggagacaggcccaagccccgggccaaggagggcacctcggaccccccctcacc

SEQ ID NO: 287266 - DNA, 120 bp, Artificial Sequence
  ENSG00000130701_5 (sequence is synthesized)
cctgctgctcccctcccctggtggctggaaggccatcacagagaagccaccgggaggccacgaggaggctgaggaagaccaccagggcgtgggcctacggggagaagaaaagccagcagg

SEQ ID NO: 287267 - DNA, 120 bp, Artificial Sequence
  ENSG00000130701_6 (sequence is synthesized)
gcacaggacatctccagtggccaaaatctccccaggggccaccctgcctgagtcgcgagccccagacatgagcccccagcgcatctccaaccagctgcacgggaccattgccgtggtgcg

SEQ ID NO: 287268 - DNA, 120 bp, Artificial Sequence
  ENSG00000130701_7 (sequence is synthesized)
gcctgggtcccaggcttgccctgccgaccgaggccccgccaatgggacgcccccaccactgcccgccaggagcagcccacccagcccagcgtatgagcgtggcctctccctggacagctt

SEQ ID NO: 287269 - DNA, 120 bp, Artificial Sequence
  ENSG00000130701_8 (sequence is synthesized)
cctgcgggcctcccggccctccgccatgacccatgaggccccgaagctctccccgaaggtggaccggctctgcctcctaaaccgccccctgtccctgcaccttcagagcccccacagcag

SEQ ID NO: 287270 - DNA, 120 bp, Artificial Sequence
  ENSG00000130701_9 (sequence is synthesized)
ccccctggcccctgctgcagcccccagcgacccccggctccaggacctgaaggccagagaagcagaggcctgggaggagcccacagaactgctggggctgcccagtgccctggcgggcat

SEQ ID NO: 287271 - DNA, 120 bp, Artificial Sequence
  ENSG00000130701_10 (sequence is synthesized)
gcaggaccttcgcctggagggggcactgcacctgctcctggcccagcagcagctgcgggctagggccagggcaggcagtgtcaggccaaggggccagcccacacccggggagatgctgcc

SEQ ID NO: 287272 - DNA, 120 bp, Artificial Sequence
  ENSG00000130701_11 (sequence is synthesized)
tgaggggaccagggcagctctggccgcagcaggcctgtctggagggcggcacacacagcctgcaggcccgggccgcgcccagaggacagaggctgcagccacgcaggactgtgccctaga

SEQ ID NO: 287273 - DNA, 120 bp, Artificial Sequence
  ENSG00000130701_12 (sequence is synthesized)
caagcccctggacctctcggagtggggccgggcccggggccaggacactcccaagccggccggccagcatgggtcactcagccctgccgctgcccacactgccagccccgagccacccac

SEQ ID NO: 287274 - DNA, 120 bp, Artificial Sequence
  ENSG00000130701_13 (sequence is synthesized)
ccagtccggacccctgactcgcagtccccaggcactcagcaatggcaccaaggggaccagagtgccagagcaggaggaggcttccactcccatggacccctcacgcccacttccagggtc

SEQ ID NO: 287275 - DNA, 120 bp, Artificial Sequence
  ENSG00000130701_14 (sequence is synthesized)
ccagctcagcctgtcctctccaggcagtacagaagatgaagacacagggaggcctctgccacctccccacccacagccgcctccccacccacagccgcctgacctggacggccacccaga

SEQ ID NO: 287276 - DNA, 120 bp, Artificial Sequence
  ENSG00000130701_15 (sequence is synthesized)
gcccagcaaggctgaagtgctgagaccagagtccgacgaactggatgagacagacaccccaggcagcgaggtgggcctgagctcccaggcggaggccactacgagcacgaccggggaggg

SEQ ID NO: 287277 - DNA, 120 bp, Artificial Sequence
  ENSG00000130701_16 (sequence is synthesized)
gcctgagtgcatctgcacccaggagcacgggcagggtccaccacggaagaggaagcgggcctcggagcctggggacaaagcctccaaaaagccatccagagggagaaggaaactgacagc

SEQ ID NO: 287278 - DNA, 120 bp, Artificial Sequence
  ENSG00000130701_17 (sequence is synthesized)
cactgaggggcccgggagcccaagggacgccgaggaccacagtccctcccccaacagcagcccctgggaggagacctagccagcctgcaccagggtccacagcgagcccggggcagccct

SEQ ID NO: 287279 - DNA, 120 bp, Artificial Sequence
  ENSG00000130701_18 (sequence is synthesized)
ccacctgcccaccagggcctggagagggcacaccatccaaccagcaggcagccctgcacagaaccctgggagaagacctagccagcctcagctgaacccacagtgagcccagggcagctc

SEQ ID NO: 287280 - DNA, 120 bp, Artificial Sequence
  ENSG00000130701_19 (sequence is synthesized)
tctgcctgctcaccacagcctggagagggcacaccacccaaccagcaggcaaccccgaagagccggtgacgggcacatcctggcccacttcaagaggggctggaggaccgagaggggtct

SEQ ID NO: 287281 - DNA, 120 bp, Artificial Sequence
  ENSG00000130701_20 (sequence is synthesized)
caggctggcgattcaccccgtctccacccacctgggaaatgctctgcggcccctcccacagcccagcacctgctccctgaggggtgtggggactggaggcgggatcactcaggctccagc

SEQ ID NO: 287282 - DNA, 120 bp, Artificial Sequence
  ENSG00000130701_21 (sequence is synthesized)
ccagccctacccctgctgtgcactgcagccgttcccaggcagtgcccacgctctgggaggcaacggaccactcggacccccacccctgcccgccaagctccaagcacaatcttggacgcc

SEQ ID NO: 287283 - DNA, 120 bp, Artificial Sequence
  ENSG00000130701_22 (sequence is synthesized)
ccctcgtgggctgacagcaaacagatgtctggcagtgagggtggagggagacagtgggcggcagcaccctcgaagaccgggtcccctgagtgacggagaataaacacttgaagaaccgtg

SEQ ID NO: 287284 - DNA, 80 bp, Artificial Sequence
  ENSG00000130702_0 (sequence is synthesized)
agacccgccgggctcccgccgcgcgcgctgtccctggagctcggggacgcggcccggagccgggaagatggcgaagcggc

SEQ ID NO: 287285 - DNA, 80 bp, Artificial Sequence
  ENSG00000130702_1 (sequence is synthesized)
gcggcgcgggcgcgggaggaggcgggcggcggcttcagcctgcacccgccctacttcaacctggccgagggcgcccgcat

SEQ ID NO: 287286 - DNA, 120 bp, Artificial Sequence
  ENSG00000130702_2 (sequence is synthesized)
cgccgcctccgcgacctgcggagaggaggccccggcgcgcggctccccgcgccccaccgaggacctttactgcaagctggtagggggccccgtggccggcggcgaccccaaccagaccat

SEQ ID NO: 287287 - DNA, 120 bp, Artificial Sequence
  ENSG00000130702_3 (sequence is synthesized)
ccggggccagtactgtgacatctgcacggctgccaacagcaacaaggcacaccccgcgagcaatgccatcgatggcacggagcgctggtggcagagtccaccgctgtcccgcggcctgga

SEQ ID NO: 287288 - DNA, 120 bp, Artificial Sequence
  ENSG00000130702_4 (sequence is synthesized)
gtacaacgaggtcaacgtcaccctggacctgggccaggtcttccacgtggcctacgtcctcatcaagtttgccaactcaccccggccggacctctgggtgctggagcggtccatggactt

SEQ ID NO: 287289 - DNA, 120 bp, Artificial Sequence
  ENSG00000130702_5 (sequence is synthesized)
cggccgcacctaccagccctggcagttctttgcctcctccaagagggactgtctggagcggttcgggccacagacgctggagcgcatcacacgggacgacgcggccatctgcaccaccga

SEQ ID NO: 287290 - DNA, 120 bp, Artificial Sequence
  ENSG00000130702_6 (sequence is synthesized)
gtactcacgcatcgtgcccctggagaacggagagatcgtggtgtccctggtgaacggacgtccgggcgccatgaatttctcctactcgccgctgctacgtgagttcaccaaggccaccaa

SEQ ID NO: 287291 - DNA, 120 bp, Artificial Sequence
  ENSG00000130702_7 (sequence is synthesized)
cgtccgcctgcgcttcctgcgtaccaacacgctgctgggccatctcatggggaaggcgctgcgggaccccacggtcacccgccggtattattacagcatcaaggatatcagcatcggagg

SEQ ID NO: 287292 - DNA, 120 bp, Artificial Sequence
  ENSG00000130702_8 (sequence is synthesized)
ccgctgtgtctgccacggccacgcggatgcctgcgatgccaaagaccccacggacccgttcaggctgcagtgcacctgccagcacaacacctgcgggggcacctgcgaccgctgctgccc

SEQ ID NO: 287293 - DNA, 120 bp, Artificial Sequence
  ENSG00000130702_9 (sequence is synthesized)
cggcttcaatcagcagccgtggaagcctgcgactgccaacagtgccaacgagtgccagtcctgtaactgctacggccatgccaccgactgttactacgaccctgaggtggaccggcgccg

SEQ ID NO: 287294 - DNA, 120 bp, Artificial Sequence
  ENSG00000130702_10 (sequence is synthesized)
cgccagccagagcctggatggcacctatcagggtgggggtgtctgtatcgactgccagcaccacaccaccggcgtcaactgtgagcgctgcctgcccggcttctaccgctctcccaacca

SEQ ID NO: 287295 - DNA, 120 bp, Artificial Sequence
  ENSG00000130702_11 (sequence is synthesized)
ccctctcgactcgccccacgtctgccgccgctgcaactgcgagtccgacttcacggatggcacctgcgaggacctgacgggtcgatgctactgccggcccaacttctctggggagcggtg

SEQ ID NO: 287296 - DNA, 120 bp, Artificial Sequence
  ENSG00000130702_12 (sequence is synthesized)
tgacgtgtgtgccgagggcttcacgggcttcccaagctgctacccgacgccctcgtcctccaatgacaccagggagcaggtgctgccagccggccagattgtgaattgtgactgcagcgc

SEQ ID NO: 287297 - DNA, 120 bp, Artificial Sequence
  ENSG00000130702_13 (sequence is synthesized)
ggcagggacccagggcaacgcctgccggaaggacccaagggtgggacgctgtctgtgcaaacccaacttccaaggcacccattgtgagctctgcgcgccagggttctacggccccggctg

SEQ ID NO: 287298 - DNA, 120 bp, Artificial Sequence
  ENSG00000130702_14 (sequence is synthesized)
ccagccctgccagtgttccagccctggagtggccgatgaccgctgtgaccctgacacaggccagtgcaggtgccgagtgggcttcgagggggccacatgtgatcgctgtgcccccggcta

SEQ ID NO: 287299 - DNA, 120 bp, Artificial Sequence
  ENSG00000130702_15 (sequence is synthesized)
ctttcacttccctctctgccagttgtgtggctgcagccctgcaggaaccttgcccgagggctgcgatgaggccggccgctgcctatgccagcctgagtttgctggacctcattgtgaccg

SEQ ID NO: 287300 - DNA, 120 bp, Artificial Sequence
  ENSG00000130702_16 (sequence is synthesized)
gtgccgccctggctaccatggtttccccaactgccaagcatgcacctgcgaccctcggggagccctggaccagctctgtggggcgggaggtttgtgccgctgccgccccggctacacagg

SEQ ID NO: 287301 - DNA, 120 bp, Artificial Sequence
  ENSG00000130702_17 (sequence is synthesized)
cactgcctgccaggaatgcagccccggctttcacggcttccccagctgtgtcccctgccactgctctgctgaaggctccctgcacgcagcctgtgacccccggagtgggcagtgcagctg

SEQ ID NO: 287302 - DNA, 120 bp, Artificial Sequence
  ENSG00000130702_18 (sequence is synthesized)
ccggccccgtgtgacggggctgcggtgtgacacatgtgtgcccggtgcctacaacttcccctactgcgaagctggctcttgccaccctgccggtctggccccagtggatcctgcccttcc

SEQ ID NO: 287303 - DNA, 120 bp, Artificial Sequence
  ENSG00000130702_19 (sequence is synthesized)
tgaggcacaggttccctgtatgtgccgggctcacgtggaggggccgagctgtgaccgctgcaaacctgggttctggggactgagccccagcaaccccgagggctgtacccgctgcagctg

SEQ ID NO: 287304 - DNA, 120 bp, Artificial Sequence
  ENSG00000130702_20 (sequence is synthesized)
cgacctcaggggcacactgggtggagttgctgagtgccagccgggcaccggccagtgcttctgcaagccccacgtgtgcggccaggcctgcgcgtcctgcaaggatggcttctttggact

SEQ ID NO: 287305 - DNA, 120 bp, Artificial Sequence
  ENSG00000130702_21 (sequence is synthesized)
ggatcaggctgactattttggctgccgcagctgccggtgtgacattggcggtgcactgggccagagctgtgaaccgaggacgggcgtctgccggtgccgccccaacacccagggccccac

SEQ ID NO: 287306 - DNA, 120 bp, Artificial Sequence
  ENSG00000130702_22 (sequence is synthesized)
ctgcagcgagcctgcgagggaccactacctcccggacctgcaccacctgcgcctggagctggaggaggctgccacacctgagggtcacgccgtgcgctttggcttcaaccccctcgagtt

SEQ ID NO: 287307 - DNA, 120 bp, Artificial Sequence
  ENSG00000130702_23 (sequence is synthesized)
cgagaacttcagctggaggggctacgcgcagatggcacctgtccagcccaggatcgtggccaggctgaacctgacctcccctgaccttttctggctcgtcttccgatacgtcaaccgggg

SEQ ID NO: 287308 - DNA, 120 bp, Artificial Sequence
  ENSG00000130702_24 (sequence is synthesized)
ggccatgagtgtgagcgggcgggtctctgtgcgagaggagggcaggtcggccacctgcgccaactgcacagcacagagtcagcccgtggccttcccacccagcacggagcctgccttcat

SEQ ID NO: 287309 - DNA, 120 bp, Artificial Sequence
  ENSG00000130702_25 (sequence is synthesized)
caccgtgccccagaggggcttcggagagccctttgtgctgaaccctggcacctgggccctgcgtgtggaggccgaaggggtgctcctggactacgtggttctgctgcctagcgcatacta

SEQ ID NO: 287310 - DNA, 120 bp, Artificial Sequence
  ENSG00000130702_26 (sequence is synthesized)
cgaggcggcgctcctgcagctgcgggtgactgaggcctgcacataccgtccctctgcccagcagtctggcgacaactgcctcctctacacacacctccccctggatggcttcccctcggc

SEQ ID NO: 287311 - DNA, 120 bp, Artificial Sequence
  ENSG00000130702_27 (sequence is synthesized)
cgccgggctggaggccctgtgtcgccaggacaacagcctgccccggccctgccccacggagcagctcagcccgtcgcacccgccactgatcacctgcacgggcagtgatgtggacgtcca

SEQ ID NO: 287312 - DNA, 120 bp, Artificial Sequence
  ENSG00000130702_28 (sequence is synthesized)
gcttcaagtggcagtgccacagccaggccgctatgccctagtggtggagtacgccaatgaggatgcccgccaggaggtgggcgtggccgtgcacaccccacagcgggccccccagcaggg

SEQ ID NO: 287313 - DNA, 120 bp, Artificial Sequence
  ENSG00000130702_29 (sequence is synthesized)
gctgctctccctgcacccctgcctgtacagcaccctgtgccggggcactgcccgggatacccaggaccacctggctgtcttccacctggactcggaggccagcgtgaggctcacagccga

SEQ ID NO: 287314 - DNA, 120 bp, Artificial Sequence
  ENSG00000130702_30 (sequence is synthesized)
acaggcacgcttcttcctgcacggggtcactctggtgcccattgaggagttcagcccggagttcgtggagccccgggtcagctgcatcagcagccacggcgcctttggccccaacagtgc

SEQ ID NO: 287315 - DNA, 120 bp, Artificial Sequence
  ENSG00000130702_31 (sequence is synthesized)
cgcctgtctgccctcgcgcttcccaaagccgccccagcccatcatcctcagggactgccaggtgatcccgctgccgcccggcctcccgctgacccacgcgcaggatctcactccagccat

SEQ ID NO: 287316 - DNA, 120 bp, Artificial Sequence
  ENSG00000130702_32 (sequence is synthesized)
gtccccagctggaccccgacctcggccccccaccgctgtggaccctgatgcagagcccaccctgctgcgtgagccccaggccaccgtggtcttcaccacccatgtgcccacgctgggccg

SEQ ID NO: 287317 - DNA, 120 bp, Artificial Sequence
  ENSG00000130702_33 (sequence is synthesized)
ctatgccttcctgctgcacggctaccagccagcccaccccaccttccccgtggaagtcctcatcaacgccggccgcgtgtggcagggccacgccaacgccagcttctgtccacatggcta

SEQ ID NO: 287318 - DNA, 120 bp, Artificial Sequence
  ENSG00000130702_34 (sequence is synthesized)
cggctgccgcaccctggtggtgtgtgagggccaggccctgctggacgtgacccacagcgagctcactgtgaccgtgcgtgtgcccaagggccggtggctctggctggattatgtactcgt

SEQ ID NO: 287319 - DNA, 120 bp, Artificial Sequence
  ENSG00000130702_35 (sequence is synthesized)
ggtccctgagaacgtctacagctttggctacctccgggaggagcccctggataaatcctatgacttcatcagccactgcgcagcccagggctaccacatcagccccagcagctcatccct

SEQ ID NO: 287320 - DNA, 120 bp, Artificial Sequence
  ENSG00000130702_36 (sequence is synthesized)
gttctgccgaaacgctgctgcttccctctccctcttctataacaacggagcccgtccatgtggctgccacgaagtaggtgctacaggccccacgtgtgagcccttcgggggccagtgtcc

SEQ ID NO: 287321 - DNA, 120 bp, Artificial Sequence
  ENSG00000130702_37 (sequence is synthesized)
ctgccatgcccatgtcattggccgtgactgctcccgctgtgccaccggatactggggcttccccaactgcaggccctgtgactgcggtgcccgcctctgtgacgagctcacgggccagtg

SEQ ID NO: 287322 - DNA, 120 bp, Artificial Sequence
  ENSG00000130702_38 (sequence is synthesized)
catctgcccgccacgcaccatcccgcccgactgcctgctgtgccagccccagacctttggctgccaccccctggtcggctgtgaggagtgtaactgctcagggcccggcatccaggagct

SEQ ID NO: 287323 - DNA, 120 bp, Artificial Sequence
  ENSG00000130702_39 (sequence is synthesized)
cacagaccctacctgtgacacagacagcggccagtgcaagtgcagacccaacgtgactgggcgccgctgtgatacctgctctccgggcttccatggctacccccgctgccgcccctgtga

SEQ ID NO: 287324 - DNA, 120 bp, Artificial Sequence
  ENSG00000130702_40 (sequence is synthesized)
ctgtcacgaggcgggcactgcgcctggcgtgtgtgaccccctcacagggcagtgctactgtaaggagaacgtgcagggccccaaatgtgaccagtgcagccttgggaccttctcactgga

SEQ ID NO: 287325 - DNA, 120 bp, Artificial Sequence
  ENSG00000130702_41 (sequence is synthesized)
tgctgccaaccccaaaggttgcacccgctgcttctgctttggggccacggagcgctgccggagctcgtcctacacccgccaggagttcgtggatatggagggatgggtgctgctgagcac

SEQ ID NO: 287326 - DNA, 120 bp, Artificial Sequence
  ENSG00000130702_42 (sequence is synthesized)
tgaccggcaggtggtgccccacgagcggcagccagggacggagatgctccgtgcagacctgcggcacgtgcctgaggctgtgcccgaggctttccccgagctgtactggcaggccccacc

SEQ ID NO: 287327 - DNA, 120 bp, Artificial Sequence
  ENSG00000130702_43 (sequence is synthesized)
ctcctacctgggggaccgggtgtcatcctacggtgggaccctccgttatgaactgcactcagagacccagcggggagatgtctttgtccccatggagagcaggccggatgtggtgctgca

SEQ ID NO: 287328 - DNA, 120 bp, Artificial Sequence
  ENSG00000130702_44 (sequence is synthesized)
gggcaaccagatgagcatcacattcctggagccggcataccccacgcctggccacgttcaccgtgggcagctgcagctggtggaggggaacttccggcatacggagacgcgcaacactgt

SEQ ID NO: 287329 - DNA, 120 bp, Artificial Sequence
  ENSG00000130702_45 (sequence is synthesized)
gtcccgcgaggagctcatgatggtgctggccagcctggagcagctgcagatccgtgccctcttctcacagatctcctcggctgtcttcctgcgcagggtggcactggaggtggccagccc

SEQ ID NO: 287330 - DNA, 120 bp, Artificial Sequence
  ENSG00000130702_46 (sequence is synthesized)
agcaggccagggggccctggccagcaatgtggagctgtgcctgtgccccgccagctaccggggggactcatgccaggaatgtgcccccggcttctatcgggacgtcaaaggtctcttcct

SEQ ID NO: 287331 - DNA, 120 bp, Artificial Sequence
  ENSG00000130702_47 (sequence is synthesized)
atggacactcagaccgctgcctccctggctctggcgtctgtgtggactgccagcacaacaccgaaggggcccactgtgagcgctgccaggctggcttcgtgagcagcagggacgacccca

SEQ ID NO: 287332 - DNA, 120 bp, Artificial Sequence
  ENSG00000130702_48 (sequence is synthesized)
gcgccccctgtgtcagctgcccctgccccctctcagtgccttccaacaacttcgccgagggctgtgtcctgcgaggcggccgcacccagtgcctctgcaaacctggttatgcaggtgcct

SEQ ID NO: 287333 - DNA, 120 bp, Artificial Sequence
  ENSG00000130702_49 (sequence is synthesized)
cctgcgagcggtgtgcgcccggattctttgggaacccactggtgctgggcagctcctgccagccatgcgactgcagcggcaacggtgaccccaacttgctcttcagcgactgcgaccccc

SEQ ID NO: 287334 - DNA, 120 bp, Artificial Sequence
  ENSG00000130702_50 (sequence is synthesized)
tgacgggcgcctgccgtggctgcctgcgccacaccactgggccccgctgcgagatctgtgcccccggcttctacggcaacgccctgctgcccggcaactgcacccggtgcgactgtaccc

SEQ ID NO: 287335 - DNA, 120 bp, Artificial Sequence
  ENSG00000130702_51 (sequence is synthesized)
catgtgggacagaggcctgcgacccccacagcgggcactgcctgtgcaaggcgggcgtgactgggcggcgctgtgaccgctgccaggagggacattttggtttcgatggctgcgggggct

SEQ ID NO: 287336 - DNA, 120 bp, Artificial Sequence
  ENSG00000130702_52 (sequence is synthesized)
gccgcccgtgtgcttgtggaccggccgccgagggctccgagtgccacccccagagcggacagtgccactgccgaccagggaccatgggaccccagtgccgcgagtgtgcccctggctact

SEQ ID NO: 287337 - DNA, 120 bp, Artificial Sequence
  ENSG00000130702_53 (sequence is synthesized)
gggggctccctgagcagggctgcaggcgctgccagtgccctgggggccgctgtgaccctcacacgggccgctgcaactgccccccggggctcagcggggagcgctgcgacacctgcagcc

SEQ ID NO: 287338 - DNA, 120 bp, Artificial Sequence
  ENSG00000130702_54 (sequence is synthesized)
agcagcatcaggtgcctgttccaggcgggcctgtgggccacagcatccactgtgaagtgtgtgaccactgtgtggtcctgctcctggatgacctggaacgggccggcgccctcctccccg

SEQ ID NO: 287339 - DNA, 120 bp, Artificial Sequence
  ENSG00000130702_55 (sequence is synthesized)
ccattcacgagcaactgcgtggcatcaatgccagctccatggcctgggcccgtctgcacaggctgaacgcctccatcgctgacctgcagagccagctccggagccccctgggcccccgcc

SEQ ID NO: 287340 - DNA, 120 bp, Artificial Sequence
  ENSG00000130702_56 (sequence is synthesized)
atgagacggcacagcagctggaggtgctggagcagcagagcacaagcctcgggcaggacgcacggcggctaggcggccaggccgtggggacccgagaccaggcgagccaattgctggccg

SEQ ID NO: 287341 - DNA, 120 bp, Artificial Sequence
  ENSG00000130702_57 (sequence is synthesized)
gcaccgaggccacactgggccatgcgaagacgctgttggcggccatccgggctgtggaccgcaccctgagcgagctcatgtcccagacgggccacctggggctggccaatgcctcggctc

SEQ ID NO: 287342 - DNA, 120 bp, Artificial Sequence
  ENSG00000130702_58 (sequence is synthesized)
catcaggtgagcagctgctccggacactggccgaggtggagcggctgctctgggagatgcgggcccgggacctgggggccccgcaggcagcagctgaggctgagttggctgcagcacaga

SEQ ID NO: 287343 - DNA, 120 bp, Artificial Sequence
  ENSG00000130702_59 (sequence is synthesized)
gattgctggcccgggtgcaggagcagctgagcagcctctgggaggagaaccaggcactggccacacaaacccgcgaccggctggcccagcacgaggccggcctcatggacctgcgagagg

SEQ ID NO: 287344 - DNA, 120 bp, Artificial Sequence
  ENSG00000130702_60 (sequence is synthesized)
ctttgaaccgggcagtggacgccacacgggaggcccaggagctcaacagccgcaaccaggagcgcctggaggaagccctgcaaaggaagcaggagctgtcccgggacaatgccaccctgc

SEQ ID NO: 287345 - DNA, 120 bp, Artificial Sequence
  ENSG00000130702_61 (sequence is synthesized)
aggccactctgcatgcggctagggacaccctggccagcgtcttcagattgctgcacagcctggaccaggctaaggaggagctggagcgcctcgccgccagcctggatggggctcggaccc

SEQ ID NO: 287346 - DNA, 120 bp, Artificial Sequence
  ENSG00000130702_62 (sequence is synthesized)
cactgctgcagaggatgcagaccttctccccggcgggcagcaagctgcgtctagtggaggccgccgaggcccacgcacagcagctgggccagctggcactcaatctgtccagcatcatcc

SEQ ID NO: 287347 - DNA, 120 bp, Artificial Sequence
  ENSG00000130702_63 (sequence is synthesized)
tggacgtcaaccaggaccgcctcacccagagggccatcgaggcctccaacgcctacagccgcatcctgcaggccgtgcaggctgccgaggatgctgctggccaggccctgcagcaggcgg

SEQ ID NO: 287348 - DNA, 120 bp, Artificial Sequence
  ENSG00000130702_64 (sequence is synthesized)
accacacgtgggcgacggtggtgcggcagggcctggtggaccgagcccagcagctcctggccaacagcactgcactagaagaggccatgctccaggaacagcagaggctgggccttgtgt

SEQ ID NO: 287349 - DNA, 120 bp, Artificial Sequence
  ENSG00000130702_65 (sequence is synthesized)
gggctgccctccagggtgccaggacccagctccgagatgtccgggccaagaaggaccagctggaggcgcacatccaggcggcgcaggccatgcttgccatggacacagacgagacaagca

SEQ ID NO: 287350 - DNA, 120 bp, Artificial Sequence
  ENSG00000130702_66 (sequence is synthesized)
agaagatcgcacatgccaaggctgtggctgctgaagcccaggacaccgccacccgtgtgcagtcccagctgcaggccatgcaggagaatgtggagcggtggcagggccagtacgagggcc

SEQ ID NO: 287351 - DNA, 120 bp, Artificial Sequence
  ENSG00000130702_67 (sequence is synthesized)
tgcggggccaggacctgggccaggcagtgcttgacgcaggccactcagtgtccaccctggagaagacgctgccccagctgctggccaagctgagcatcctggagaaccgtggggtgcaca

SEQ ID NO: 287352 - DNA, 120 bp, Artificial Sequence
  ENSG00000130702_68 (sequence is synthesized)
acgccagcctggccctgtccgccagcattggccgcgtgcgagagctcattgcccaggcccggggggctgccagtaaggtcaaggtgcccatgaagttcaacgggcgctcaggggtgcagc

SEQ ID NO: 287353 - DNA, 120 bp, Artificial Sequence
  ENSG00000130702_69 (sequence is synthesized)
tgcgcaccccacgggatcttgccgaccttgctgcctacactgccctcaagttctacctgcagggcccagagcctgagcctgggcagggtaccgaggatcgctttgtgatgtacatgggca

SEQ ID NO: 287354 - DNA, 120 bp, Artificial Sequence
  ENSG00000130702_70 (sequence is synthesized)
gccgccaggccactggggactacatgggtgtgtctctgcgtgacaagaaggtgcactgggtgtatcagctgggtgaggcgggccctgcagtcctaagcatcgatgaggacattggggagc

SEQ ID NO: 287355 - DNA, 120 bp, Artificial Sequence
  ENSG00000130702_71 (sequence is synthesized)
agttcgcagctgtcagcctggacaggactctccagtttggccacatgtccgtcacagtggagagacagatgatccaggaaaccaagggtgacacggtggcccctggggcagaggggctgc

SEQ ID NO: 287356 - DNA, 120 bp, Artificial Sequence
  ENSG00000130702_72 (sequence is synthesized)
tcaacctgcggccagacgacttcgtcttctacgtcggggggtaccccagtaccttcacgccccctcccctgcttcgcttccccggctaccggggctgcatcgagatggacacgctgaatg

SEQ ID NO: 287357 - DNA, 120 bp, Artificial Sequence
  ENSG00000130702_73 (sequence is synthesized)
aggaggtggtcagcctctacaacttcgagaggaccttccagctggacacggctgtggacaggccttgtgcccgctccaagtcgaccggggacccgtggctcacggacggctcctacctgg

SEQ ID NO: 287358 - DNA, 120 bp, Artificial Sequence
  ENSG00000130702_74 (sequence is synthesized)
acggcaccggcttcgcccgcatcagcttcgacagtcagatcagcaccaccaagcgcttcgagcaggagctgcggctcgtgtcctacagcggggtgctcttcttcctgaagcagcagagcc

SEQ ID NO: 287359 - DNA, 120 bp, Artificial Sequence
  ENSG00000130702_75 (sequence is synthesized)
agttcctgtgcttggccgtgcaagaaggcagcctcgtgctgttgtatgactttggggctggcctgaaaaaggccgtcccactgcagcccccaccgcccctgacctcggccagcaaggcga

SEQ ID NO: 287360 - DNA, 120 bp, Artificial Sequence
  ENSG00000130702_76 (sequence is synthesized)
tccaggtgttcctgctggggggcagccgcaagcgtgtgctggtgcgtgtggagcgggccacggtgtacagcgtggagcaggacaatgatctggagctggccgacgcctactacctggggg

SEQ ID NO: 287361 - DNA, 120 bp, Artificial Sequence
  ENSG00000130702_77 (sequence is synthesized)
gcgtgccgcccgaccagctgcccccgagcctgcgacggctcttccccaccggaggctcagtccgtggctgcgtcaaaggcatcaaggccctgggcaagtatgtggacctcaagcggctga

SEQ ID NO: 287362 - DNA, 120 bp, Artificial Sequence
  ENSG00000130702_78 (sequence is synthesized)
acacgacaggcgtgagcgccggctgcaccgccgacctgctggtggggcgcgccatgactttccatggccacggcttccttcgcctggcgctctcgaacgtggcaccgctcactggcaacg

SEQ ID NO: 287363 - DNA, 120 bp, Artificial Sequence
  ENSG00000130702_79 (sequence is synthesized)
tctactccggcttcggcttccacagcgcccaggacagtgccctgctctactaccgggcgtccccggatgggctatgccaggtgtccctgcagcagggccgtgtgagcctacagctcctga

SEQ ID NO: 287364 - DNA, 120 bp, Artificial Sequence
  ENSG00000130702_80 (sequence is synthesized)
ggactgaagtgaaaactcaagcgggcttcgccgatggtgccccccattacgtcgccttctacagcaatgccacgggagtctggctgtatgtcgatgaccagctccagcagatgaagcccc

SEQ ID NO: 287365 - DNA, 120 bp, Artificial Sequence
  ENSG00000130702_81 (sequence is synthesized)
accggggaccaccccccgagctccagccgcagcctgaggggcccccgaggctcctcctgggaggcctgcctgagtctggcaccatttacaacttcagtggctgcatcagcaacgtcttcg

SEQ ID NO: 287366 - DNA, 120 bp, Artificial Sequence
  ENSG00000130702_82 (sequence is synthesized)
tgcagcggctcctgggcccacagcgcgtatttgatctgcagcagaacctgggcagcgtcaatgtgagcacgggctgtgcacccgccctgcaagcccagaccccgggcctggggcctagag

SEQ ID NO: 287367 - DNA, 120 bp, Artificial Sequence
  ENSG00000130702_83 (sequence is synthesized)
gactgcaggccaccgcccggaaggcctcccgccgcagccgtcagcccgcccggcatcctgcctgcatgctgcccccacacctcaggaccacccgagactcctaccagtttgggggttccc

SEQ ID NO: 287368 - DNA, 120 bp, Artificial Sequence
  ENSG00000130702_84 (sequence is synthesized)
tgtccagtcacctggagtttgtgggcatcctggcccgacataggaactggcccagtctctccatgcacgtcctcccgcgaagctcccgaggcctcctcctcttcactgcccgtctgaggc

SEQ ID NO: 287369 - DNA, 120 bp, Artificial Sequence
  ENSG00000130702_85 (sequence is synthesized)
ccggcagcccctccctggcgctcttcctgagcaatggccacttcgttgcacagatggaaggcctcgggactcggctccgcgcccagagccgccagcgctcccggcctggccgctggcaca

SEQ ID NO: 287370 - DNA, 120 bp, Artificial Sequence
  ENSG00000130702_86 (sequence is synthesized)
aggtctccgtgcgctgggagaagaaccggatcctgctggtgacggacggggcccgggcctggagccaggaggggccgcaccggcagcaccagggggcagagcacccccagccccacaccc

SEQ ID NO: 287371 - DNA, 120 bp, Artificial Sequence
  ENSG00000130702_87 (sequence is synthesized)
tctttgtgggcggcctcccggccagcagccacagctccaaacttccggtgaccgtcgggttcagcggctgtgtgaagagactgaggctgcacgggaggcccctgggggcccccacacgga

SEQ ID NO: 287372 - DNA, 120 bp, Artificial Sequence
  ENSG00000130702_88 (sequence is synthesized)
tggcaggggtcacaccctgcatcttgggccccctggaggcgggcctgttcttcccaggcagcgggggagttatcactttagacctcccaggagctacactgcctgatgtgggcctggaac

SEQ ID NO: 287373 - DNA, 120 bp, Artificial Sequence
  ENSG00000130702_89 (sequence is synthesized)
tggaggtgcggcccctggcagtcaccggactgatcttccacttgggccaggcccggacgcccccctacttgcagttgcaggtgaccgagaagcaagtcctgctgcgggcggatgacggag

SEQ ID NO: 287374 - DNA, 120 bp, Artificial Sequence
  ENSG00000130702_90 (sequence is synthesized)
caggggagttctccacgtcagtgacccgcccctcagtgctgtgtgatggccagtggcaccggctagcggtgatgaaaagcgggaatgtgctccggctggaggtggacgcgcagagcaacc

SEQ ID NO: 287375 - DNA, 120 bp, Artificial Sequence
  ENSG00000130702_91 (sequence is synthesized)
acaccgtgggccccttgctggcggctgcagctggtgccccagcccctctgtacctcgggggcctgcctgagcccatggccgtgcagccctggccccccgcctactgcggctgcatgagga

SEQ ID NO: 287376 - DNA, 120 bp, Artificial Sequence
  ENSG00000130702_92 (sequence is synthesized)
ggctggcggtgaaccggtcccccgtcgccatgactcgctctgtggaggtccacggggcagtgggggccagtggctgcccagccgcctaggacacagccaaccccggcccctggtcaggcc

SEQ ID NO: 287377 - DNA, 120 bp, Artificial Sequence
  ENSG00000130702_93 (sequence is synthesized)
cctgcagctgcctcacaccgccccttgtgctcgcctcataggtgtctatttggactctaagctctacgggtgacagatcttgtttctgaagatggtttaagttatagcttcttaaacgaa

SEQ ID NO: 287378 - DNA, 120 bp, Artificial Sequence
  ENSG00000130702_94 (sequence is synthesized)
agaataaaatactgcaaaatgtttttatatttggcccttccacccatttttaattgtgagagatttgtcaccaatcatcactggttcctccttaaaaattaaaaagtaacttctgtgtaa

SEQ ID NO: 287379 - DNA, 120 bp, Artificial Sequence
  ENSG00000130702_95 (sequence is synthesized)
gccgcgggttcttttggtatcttgcctcagtccgtcctgctgtagtctgaagtccccttggtccatcctggaggggaggcgcctcaggccaggtgccctgacccagccctgtgcccacag

SEQ ID NO: 287380 - DNA, 120 bp, Artificial Sequence
  ENSG00000130702_96 (sequence is synthesized)
atgactttggggctggcctgaaaaaggccgtcccactgcagcccccaccgcccctgacctcggccagcaaggcggtagggccagggtggggaccagggtggcagggagaggagatggaac

SEQ ID NO: 287381 - DNA, 120 bp, Artificial Sequence
  ENSG00000130702_97 (sequence is synthesized)
tgtgtgcccggtgcctacaacttcccctactgcgaaggtgctgtgtggtgggatggcacgtccgttgctgcggagggagcagggaggtgcgtgttttcaggccgtccatgtggatgagag

SEQ ID NO: 287382 - DNA, 120 bp, Artificial Sequence
  ENSG00000130702_98 (sequence is synthesized)
gccaaggatggcagggctggggtcttgggcttggaagccagcaggcagaggtgcactagtacgggcggccccaggctctgacgaacccctgccccacagagctcatgtcccagacgggcc

SEQ ID NO: 287383 - DNA, 120 bp, Artificial Sequence
  ENSG00000130702_99 (sequence is synthesized)
cctagaaggagtggaaagagtaggccctggtccacatggagtgggtggtcaccagccccaaggcctggtcattcccgagacaggacatccgtgtggctttgagagctatgtcctcaaaca

SEQ ID NO: 287384 - DNA, 120 bp, Artificial Sequence
  ENSG00000130702_100 (sequence is synthesized)
gcagccaggtgctggcccacctccagccggccgaggccaggagttcctgaccagcctctgacccagcggtgaccatgctccacgggttcccagtgcctcgtgcctgcaggatccctgagg

SEQ ID NO: 287385 - DNA, 120 bp, Artificial Sequence
  ENSG00000130702_101 (sequence is synthesized)
ggctgtctcttctgagcctctattgtttcatctgtacaatggggacagctatgcctgcagtgggaccagaggccttcagggaacagaggctacgctgagactcaacacctccccacaggc

SEQ ID NO: 287386 - DNA, 120 bp, Artificial Sequence
  ENSG00000130702_102 (sequence is synthesized)
taagggactccatgtctgagtgtccctgtccatctgtctgctgtgtgtcagccttggtcctcctggggtcagaagggtggaggtgggctgcaattgtatactgggggtgaagctgcctgg

SEQ ID NO: 287387 - DNA, 120 bp, Artificial Sequence
  ENSG00000130702_103 (sequence is synthesized)
cccaccccgcggtggccgtcggagcagttgggactggggtgtctggaatgagtctgggtccccaggccggccggctgacctggctgccgtccccaggatgggctatgccaggtgtccctg

SEQ ID NO: 287388 - DNA, 120 bp, Artificial Sequence
  ENSG00000130702_104 (sequence is synthesized)
gggtgctggcatcccaggcctcagcagggcagggcagggggctccaggaggttctggggaggggccccccctttcttctccatcacaacccctccccgcagacctcccaggagctacact

SEQ ID NO: 287389 - DNA, 120 bp, Artificial Sequence
  ENSG00000130702_105 (sequence is synthesized)
cacaacgccagcctggccctgtccgccagcattggccgcgtgcgagagctcattgcccaggcccggggggctgccagtaaggtgggtgagagtcccaggggaaggtggacatcagggagg

SEQ ID NO: 287390 - DNA, 120 bp, Artificial Sequence
  ENSG00000130702_106 (sequence is synthesized)
ctcatctgggaaggccggaaggggtcccagtgctgctgtgcccattctccgtggtggaaaacagcccaggagcagaagcggggtgggggctggggaggtccccacacccattgtcagata

SEQ ID NO: 287391 - DNA, 120 bp, Artificial Sequence
  ENSG00000130702_107 (sequence is synthesized)
ccagcatcctccctgtgttcccttccttgctgcctccacttcctgtcaccctactcacctctcttcctgcccctgcttttcacaggctgctggccaactcatgggcctgcctgtcccctg

SEQ ID NO: 287392 - DNA, 120 bp, Artificial Sequence
  ENSG00000130702_108 (sequence is synthesized)
tccagtcaagcagggaccaaggcccaggacggggatggcagggtgggggcagccaacaccccacatctgctgtgccctgtgtgcctgctttcgggggcagccgagggcactgcagagcat

SEQ ID NO: 287393 - DNA, 120 bp, Artificial Sequence
  ENSG00000130702_109 (sequence is synthesized)
cctcccgggagcccctcacaggatgggcagcagccctggtgctggcaccggcacattcctgggcctcacccagagtcctcagtaaggctgcagtgcacctgccagcacaacacctgcggg

SEQ ID NO: 287394 - DNA, 90 bp, Artificial Sequence
  ENSG00000130702_110 (sequence is synthesized)
atgtgtgcctgtagttcgagctactcctggaaggccgaagctgcagtgagccatgatcacaccacagcactccagcctgggcaacagagt

SEQ ID NO: 287395 - DNA, 120 bp, Artificial Sequence
  ENSG00000130702_111 (sequence is synthesized)
atctggaaccggcctggacagaggcaccaaactcttcctggggtgaccgttttccgttgttaggtcaaataactaactgtctctgggaccctacagcagctccccacgctagcacctgtc

SEQ ID NO: 287396 - DNA, 120 bp, Artificial Sequence
  ENSG00000130702_112 (sequence is synthesized)
gaccgaactggcacatgagggggcccagctgccccgaggccaaggctgcgctgaacatgcccagggcctgcaagaagagccaggcgagggctgagctccaacccgggctgcaccccagag

SEQ ID NO: 287397 - DNA, 120 bp, Artificial Sequence
  ENSG00000130702_113 (sequence is synthesized)
ccacactgctcagctgccagctctgcgggtcaggcacatgaagcactggccatggtgaaggtggggcagggcctcctcctcccccctgcccactccctgagcacacagtggaggacaccc

SEQ ID NO: 287398 - DNA, 120 bp, Artificial Sequence
  ENSG00000130702_114 (sequence is synthesized)
tgggcccggcctctacctgctggaactggggcgaggtcagggtattctggatctcatccgcggtctgcggcagcgactccccagatggcaagtagggaagcaggcgctcctggacatccg

SEQ ID NO: 287399 - DNA, 120 bp, Artificial Sequence
  ENSG00000130702_115 (sequence is synthesized)
cgttggcgaggatgggagccattatctccggcgtcagcacactggccaggtccactggggcacaagaacacggccatcagctcgatgacagcctaagtgcccacatggaaggcatgcaag

SEQ ID NO: 287400 - DNA, 120 bp, Artificial Sequence
  ENSG00000130703_0 (sequence is synthesized)
agtcggcgaggcggcgggccgcacttccgcctcggtgtcagtgggtcgcgggcctacggggcgggggcggggcggcagtgagctcggccggcaaccgagggacccgcgtccagatcttca

SEQ ID NO: 287401 - DNA, 120 bp, Artificial Sequence
  ENSG00000130703_1 (sequence is synthesized)
gtgtctattggatttttccaagagaaagtttgtaaaattccttacactgtagatgtggatcagatacgatgattcagtagaagagcacatgtcaggggcagtggaggctggctgctgaag

SEQ ID NO: 287402 - DNA, 120 bp, Artificial Sequence
  ENSG00000130703_2 (sequence is synthesized)
gatgaacggagaggaagaattctttgatgccgtcacaggctttgattctgataactcttctggggaattttcagaggcaaatcagaaagtcacgggaatgattgacttagacaccagcaa

SEQ ID NO: 287403 - DNA, 120 bp, Artificial Sequence
  ENSG00000130703_3 (sequence is synthesized)
aaataataggattgggaaaactggggagaggccctctcaagagaacggaattcagaaacacaggacatcgctgccggctcccatgttcagcagaagcgacttcagcgtgtggaccatcct

SEQ ID NO: 287404 - DNA, 120 bp, Artificial Sequence
  ENSG00000130703_4 (sequence is synthesized)
gaagaagtgtgttggcctggagctgtccaagatcacgatgccaatcgccttcaacgagcctctgagcttcttgcagcggatcacggagtacatggagcacgtgtacctcatccacagggc

SEQ ID NO: 287405 - DNA, 120 bp, Artificial Sequence
  ENSG00000130703_5 (sequence is synthesized)
ctcctgccagccccagcccctggagaggatgcagtctgtggctgcttttgctgtttcggctgtggcttcccagtgggagaggaccggcaaaccatttaatccactcttgggagaaacgta

SEQ ID NO: 287406 - DNA, 120 bp, Artificial Sequence
  ENSG00000130703_6 (sequence is synthesized)
tgaattaatcagggaagatttaggattcagatttatatcggaacaggtcagtcaccacccccccatcagtgcgttccactcggaaggtctcaaccatgacttcctgttccatggctccat

SEQ ID NO: 287407 - DNA, 120 bp, Artificial Sequence
  ENSG00000130703_7 (sequence is synthesized)
ctaccccaagctcaagttctggggcaaaagcgtggaggcggagccccgaggcaccatcaccctggagctgctcaaacataatgaagcctacacctggaccaaccccacctgctgcgtcca

SEQ ID NO: 287408 - DNA, 120 bp, Artificial Sequence
  ENSG00000130703_8 (sequence is synthesized)
caacgtcatcatcgggaagctgtggatagagcagtatgggacagtggagattttaaaccacagaactggacataagtgtgtgcttcactttaaaccgtgtggattatttggaaaagaact

SEQ ID NO: 287409 - DNA, 120 bp, Artificial Sequence
  ENSG00000130703_9 (sequence is synthesized)
tcacaaggtggaaggacacattcaagacaaaaacaaaaagaagctctttatgatctatggcaaatggacggaatgtttgtggggcatagatcctgtttcgtatgaatccttcaagaagca

SEQ ID NO: 287410 - DNA, 120 bp, Artificial Sequence
  ENSG00000130703_10 (sequence is synthesized)
ggagaggagaggtgaccacctgagaaaggccaagctggatgaagactccgggaaggctgacagcgacgtggctgacgacgtgcctgtggcccaggagaccgtgcaggtcattcctggcag

SEQ ID NO: 287411 - DNA, 120 bp, Artificial Sequence
  ENSG00000130703_11 (sequence is synthesized)
caagctgctctggaggatcaacacccggccccccaactctgcccagatgtataatttcaccagtttcactgtgagcctcaacgagctggagacaggcatggagaagaccctgccacccac

SEQ ID NO: 287412 - DNA, 120 bp, Artificial Sequence
  ENSG00000130703_12 (sequence is synthesized)
ggactgccgcctgcgccctgacatccgcggcatggagaatggcaacatggatctggccagccaggagaaggagcggctggaggagaagcagagagaagcacggagggagcgggccaagga

SEQ ID NO: 287413 - DNA, 120 bp, Artificial Sequence
  ENSG00000130703_13 (sequence is synthesized)
ggaggcagagtggcagacgaggtggttctacccaggcaataacccctacactgggacccccgactggttgtatgcaggggattactttgagcggaatttctccgactgcccagatatcta

SEQ ID NO: 287414 - DNA, 120 bp, Artificial Sequence
  ENSG00000130703_14 (sequence is synthesized)
ctgagggcctggaggggcctggggcccgggaccggaggctgacgaggctggacttcctcgagtggccactgtgagcctcgtcacagcagaaaccaacttttctaacgactgagttcgcgg

SEQ ID NO: 287415 - DNA, 120 bp, Artificial Sequence
  ENSG00000130703_15 (sequence is synthesized)
agatagcatcatccctgatcaaggatgtaattctaattaactgttgattgccaaacatttcactctgctgtgccgtctcttcataaagcttcacttgggatcatcgtcttcattaaggtt

SEQ ID NO: 287416 - DNA, 120 bp, Artificial Sequence
  ENSG00000130703_16 (sequence is synthesized)
gggcttgtttagcttccagcacactctcagtcatagcatgtgtagctaaaggaagtaatgggaaggggttcatgttctctttataatgcagtggcaaaaggttctgaaagccttttaaac

SEQ ID NO: 287417 - DNA, 120 bp, Artificial Sequence
  ENSG00000130703_17 (sequence is synthesized)
tcgaaccagtgggggaaagatggatcttgaagctaatcctgcagagagttttatagaggccagggattgccttctaaattatgataaaacagaagtgaagagtttcagagcatcagattg

SEQ ID NO: 287418 - DNA, 120 bp, Artificial Sequence
  ENSG00000130703_18 (sequence is synthesized)
agtgaaaagttgtcagattctgtattttttaacaatcttcaataatgtaaagattacttttaaaatatttaagttaaaactacttgaatagtattttgctgaagagcaagatatgcatta

SEQ ID NO: 287419 - DNA, 120 bp, Artificial Sequence
  ENSG00000130703_19 (sequence is synthesized)
atcaccggttttatactgtccaaaatgaagcatccccgtgacaaaccagagtgggcagaagcatcgagagcgtgacaggaaatcccaagactgcttccgcctcagaggcgtcccggctgc

SEQ ID NO: 287420 - DNA, 120 bp, Artificial Sequence
  ENSG00000130703_20 (sequence is synthesized)
gattcgctgccctgttgtcagtgaggcctggctgtcaccgcacaccgcgtccgtgtctccagggggttcctttcttctcacacgtcgcgtgtacccatagcactcttgtgtttctgtttt

SEQ ID NO: 287421 - DNA, 120 bp, Artificial Sequence
  ENSG00000130703_21 (sequence is synthesized)
tcccagtatgcatgtttaaaatagaagtgacaagaatcacatccggttgtgtcctgtgggagggtcagaggcagaatctacttacagtggtgtaattaaagttatttaaccaaaaatagg

SEQ ID NO: 287422 - DNA, 82 bp, Artificial Sequence
  ENSG00000130703_22 (sequence is synthesized)
cttacagtggtgtaattaaagttatttaaccaaaaataggtatgtgtccatctcagcattcacctttatcaagtgactgaga

SEQ ID NO: 287423 - DNA, 68 bp, Artificial Sequence
  ENSG00000130703_23 (sequence is synthesized)
aggcacgcgccaccacacctggctgattttgtatttttagtagaagtctgcctgcctcaacctcccaa

SEQ ID NO: 287424 - DNA, 120 bp, Artificial Sequence
  ENSG00000130703_24 (sequence is synthesized)
gactgattttttttcatgtagaattgtcaacacgagagatcacagtggagcactttgaaagaccgtcggttgtgtgcacgcacgcacacactcatgcacacgctgacacgcggttgcatg

SEQ ID NO: 287425 - DNA, 120 bp, Artificial Sequence
  ENSG00000130703_25 (sequence is synthesized)
gagtccaggttactcaggccggcacttctgagtgacaggtgccacctgcgtgtgtcttggcgtccacatcacacctgtgacggaagcacttctggaagtgaacactcgttttgaaagctt

SEQ ID NO: 287426 - DNA, 120 bp, Artificial Sequence
  ENSG00000130703_26 (sequence is synthesized)
gattttgtagctttggaagctggaagcgatggtgtttggtgccgagtcctgtgtcatcctcggggcctatgagctccgtaccagccactcaaaagtgtctgaacagaaccgctccgtgac

SEQ ID NO: 287427 - DNA, 120 bp, Artificial Sequence
  ENSG00000130703_27 (sequence is synthesized)
tggtagctgggtctgaggattcaggattgtggcgttattcaaagaggagactttgaaattccccgatggctggaatgtggagcccaggtgcctctggtggagggtcatctgcttttccag

SEQ ID NO: 287428 - DNA, 120 bp, Artificial Sequence
  ENSG00000130703_28 (sequence is synthesized)
actgtggttgtgaaccggctccttctccaagaaaggttgcaagctgagaacatccagaggtgagactcagacacattgaaagtgactgcatttagggaggtttaacgagttcttactgat

SEQ ID NO: 287429 - DNA, 120 bp, Artificial Sequence
  ENSG00000130703_29 (sequence is synthesized)
cattccacttgttactggttaagataatttgcccacgggtttgtttccaagtcctcttctaggaccaggctcctggtatttcaggggctggttggctgcacagacagcccctcttctgct

SEQ ID NO: 287430 - DNA, 120 bp, Artificial Sequence
  ENSG00000130703_30 (sequence is synthesized)
gtccttgaggacagacaccaaaccagaggtggaggaagaacggtaggaaggctgatggcaaaagcggctgtgtgtcgaggttattttaactttttactactttttgttactgtttctgca

SEQ ID NO: 287431 - DNA, 120 bp, Artificial Sequence
  ENSG00000130703_31 (sequence is synthesized)
aatgctaacacataaaccatgacctaacttttgtcaccttggatatctattgaatgttaaacatctctaataaagatggccaccacttaatgtgtggaaagtgatggccttctcgtgggc

SEQ ID NO: 287432 - DNA, 120 bp, Artificial Sequence
  ENSG00000130703_32 (sequence is synthesized)
gagctcggccggcaaccgagggacccgcgtccagattcagaaaagaacttgggatcattcagcagaatgtcacagcatccacattctttccgctggagcttctgctgatgcaaatcctgt

SEQ ID NO: 287433 - DNA, 120 bp, Artificial Sequence
  ENSG00000130703_33 (sequence is synthesized)
tgtgtgtgtgtctgttgccagcgttaggccaagtgcgatgtcgtgtttgtgtgtgtgtctgttgccaacattaggccaagtgcgatgtcgtgtttgtgtgtatgtctgttgccaacatta

SEQ ID NO: 287434 - DNA, 120 bp, Artificial Sequence
  ENSG00000130703_34 (sequence is synthesized)
ggccaagtgcgatgtcatgtttgtgtgtgtgttgccaacgttaggccaagtgtgatgtcatgtttgtgtgtgtgtctgttgccaacattaggccaagtgcgatgtcatgtttatgtgtgt

SEQ ID NO: 287435 - DNA, 120 bp, Artificial Sequence
  ENSG00000130703_35 (sequence is synthesized)
gttgccaacgttaggccgagtgcgatgtcatgtttgtgtgtgtgtctgttgccaacgttaggccgagtgcgatgtcatgtttgtgtgtgtgtctgttgccaatgttaggccaagtgcgat

SEQ ID NO: 287436 - DNA, 120 bp, Artificial Sequence
  ENSG00000130703_36 (sequence is synthesized)
gtcatgtttgtgtgtgtgttgccaacgttaggccaagtgcaatgtcatgtttgtgtgtgtgtgtctgttgccaacattaggccaagtgcgatgtcatgtttgtgtgtgtgttgccaacgt

SEQ ID NO: 287437 - DNA, 120 bp, Artificial Sequence
  ENSG00000130703_37 (sequence is synthesized)
taggccgagtgcgatgtcatgtttgtgtgtgtgttgccaacgttaggccgagtgcgatatcgtgtttgtgtgtgtgtctgttgccgttaggccgagtgcgatgtcatgtttgtgtgtgtg

SEQ ID NO: 287438 - DNA, 120 bp, Artificial Sequence
  ENSG00000130703_38 (sequence is synthesized)
tttgttgccaacgttaggccaagtgcaatgtcatgtttgtgtgtgtgtgtctgttgccaacgttaggccaagtgcgatgtcatgtttgtgtgtgtgtctgttgccaacgttaggccaagt

SEQ ID NO: 287439 - DNA, 120 bp, Artificial Sequence
  ENSG00000130703_39 (sequence is synthesized)
gcaatgtcggagaggtggtgttgggtgtttccgccacatgttgtggcatggagggcccctgcttcccagcgtcctgtgaggggctccacatgatgtctgagctgccctttcttttatttt

SEQ ID NO: 287440 - DNA, 120 bp, Artificial Sequence
  ENSG00000130703_40 (sequence is synthesized)
gcagtatgggacagtggagattttaaaccacaggtgacagcaccccaccgttgggtgagagcgcgaggctccgggtggggatgggcgagccggggagcgtgagcatccgtgctcctggtg

SEQ ID NO: 287441 - DNA, 120 bp, Artificial Sequence
  ENSG00000130703_41 (sequence is synthesized)
ggttttagctcagcctcacgagctgctgccgtgtccccgccagcccaggcatagcagctgcctagacttgactctgaccggtgttggccatgaatgctcctcgttcaagacctcgttttt

SEQ ID NO: 287442 - DNA, 120 bp, Artificial Sequence
  ENSG00000130703_42 (sequence is synthesized)
cgtcacggttgttactttaaggctttgagctatgctgaagagctgtgtcattgccaggtgcagcgcagtggccgtccacggccgttggccactgtctaggcttgaatgccctattcctgg

SEQ ID NO: 287443 - DNA, 120 bp, Artificial Sequence
  ENSG00000130703_43 (sequence is synthesized)
aagctcatgactggtgggctttgccttttcaccactttagtgaggtataatcgatgcatcataagactcgcccattctgaatggacacttaagtgatttttagtaaattgaccgaatcat

SEQ ID NO: 287444 - DNA, 120 bp, Artificial Sequence
  ENSG00000130703_44 (sequence is synthesized)
ggagccgtccccacagcccatttcaaacacttccatcgccccaaaggcccaccacacccatttgcagtcaccccccgcctgccccaggggcctccaccgcgcttctcctgttacagagtt

SEQ ID NO: 287445 - DNA, 120 bp, Artificial Sequence
  ENSG00000130703_45 (sequence is synthesized)
ggtggaaggacacattcaagacaaaaagtaggtccttgccaagtgttcatggggcaccactacagcctgtgtgtccacgttagaagggctcaggtgctcctgggcctgcgtgtgcctacg

SEQ ID NO: 287446 - DNA, 120 bp, Artificial Sequence
  ENSG00000130703_46 (sequence is synthesized)
tgcatgagacgcgggtacaccagtgccatctgttcatggtccagaagtatgactcttttttgttttggaaagacattttgttattgagcataaaaggaaataaagggtatttttgaatgt

SEQ ID NO: 287447 - DNA, 120 bp, Artificial Sequence
  ENSG00000130703_47 (sequence is synthesized)
ctgctgccccgctgagcaggaagtggggacgggcgcacctgctcgcggcctcgccctctctcaccacctcaccgggaacagggaaggatttcgtgcgcatttagggcgatcctgtagatc

SEQ ID NO: 287448 - DNA, 120 bp, Artificial Sequence
  ENSG00000130703_48 (sequence is synthesized)
taggacctccatcagcagctaggatctccctcagcacctaggacctccatcagcagctaggacctccatcggcacctaggacctccatcggcacctaggacctccatcggcacctaggac

SEQ ID NO: 287449 - DNA, 120 bp, Artificial Sequence
  ENSG00000130703_49 (sequence is synthesized)
ctccatcggcagctaggacctccatcggcagctaggacctccatcggcagcgaagacctccatcagcaaaggctgggtctagacccccatgggctccagattccacccaactcccagcca

SEQ ID NO: 287450 - DNA, 120 bp, Artificial Sequence
  ENSG00000130703_50 (sequence is synthesized)
tctgcccagaccgacccacacccacctcctgcagatgccctgggcattactgaacccctatttcctgaagccagccagcgagtgggagcaccggccagcatggtcctccctggccccagg

SEQ ID NO: 287451 - DNA, 120 bp, Artificial Sequence
  ENSG00000130703_51 (sequence is synthesized)
gatctcccagccctgggacatgggacccctgggcagactgccttcccccagcttgtgcaggctggcaccaggcacagaagcccagcacagggcctcttatcagcccctccatctcttccc

SEQ ID NO: 287452 - DNA, 120 bp, Artificial Sequence
  ENSG00000130703_52 (sequence is synthesized)
cagaacaggcccagcctgcttgcccagcctgtcaccatgcctggcagggatggcatcacccagccggctgtgtgcaactgctgaaaccccgtgggccctgcttccagtgccgcaccctcc

SEQ ID NO: 287453 - DNA, 120 bp, Artificial Sequence
  ENSG00000130703_53 (sequence is synthesized)
tcgcccaggatggctgcaggatttaccaggtcctccgcacagtgaaaatgtgagctccttgccccaagatgatgaagaatttcaagacggcaatggtagattggtaaattaacctcaggt

SEQ ID NO: 287454 - DNA, 120 bp, Artificial Sequence
  ENSG00000130703_54 (sequence is synthesized)
gccatgtgacagcacaggttgggtgctgtgagccatgcatgaagctcctggtgggtacagctctgcctcatgggtcacccctctctaccgtgaccacgaggactgggctgggtatgcagt

SEQ ID NO: 287455 - DNA, 120 bp, Artificial Sequence
  ENSG00000130703_55 (sequence is synthesized)
gccctgctgtgacccctgacacacagacccctagccatcccctccaccccctccctgacctcctctcccagggatgcaactgggggagcacacccatccccagaagaaccccaaatctct

SEQ ID NO: 287456 - DNA, 120 bp, Artificial Sequence
  ENSG00000130703_56 (sequence is synthesized)
ggctggctgtctcttacccaacccccatccccagctccagctgaggggcaagcgtgctgctgggctgctcctgaggagaaacccatggcgccaccctcaggcccccggtggctcctcaac

SEQ ID NO: 287457 - DNA, 120 bp, Artificial Sequence
  ENSG00000130703_57 (sequence is synthesized)
ctgggccccatctctgccccccatcttggctcctcaggcatatttaaactttgcccctcccacccccgtgcctggcggatcccctggcactgaggcccagccagtggctccagccaacgc

SEQ ID NO: 287458 - DNA, 120 bp, Artificial Sequence
  ENSG00000130703_58 (sequence is synthesized)
acttggctcccgcagcaagttaaatctaacccagcccagctgtctctcctccggctcccacctgcccctcccgttccctgcagggatgtgcccacaccctgccaaccctacatgggccct

SEQ ID NO: 287459 - DNA, 120 bp, Artificial Sequence
  ENSG00000130703_59 (sequence is synthesized)
caggaagggtgcagaggtcccccagggtcccccactttcccacactaggaaagccctttgcctagcagcctctggggtgggtgccctgcttctggaggtaccccggcacccagggtgggg

SEQ ID NO: 287460 - DNA, 120 bp, Artificial Sequence
  ENSG00000130703_60 (sequence is synthesized)
ccagcagagtgcagcaggttttcaacaggtatttcaagaaggagcaggaacccacttcccatcagtcagggtgcagccaggaagagggaaactccagggccaacgctgaagtggccgctg

SEQ ID NO: 287461 - DNA, 120 bp, Artificial Sequence
  ENSG00000130703_61 (sequence is synthesized)
cgctggggcacggagttggagtacagcccttgtgccacaggcgtgccagggaatgtgtgccaggcgctctgtcttgcatctggggctgtcggttcttctgaggcagggcactcatgggtc

SEQ ID NO: 287462 - DNA, 120 bp, Artificial Sequence
  ENSG00000130703_62 (sequence is synthesized)
gcttctggagatgtccacatttctgggtctgggactgtctaggcctggctttggggccatctgtaatctgctccccgtagccccatgttttgtttaggctggaagtgcactcagctaaaa

SEQ ID NO: 287463 - DNA, 120 bp, Artificial Sequence
  ENSG00000130703_63 (sequence is synthesized)
tgccgttatcctaccaaaagtggcataggatggagttctggccagtgagatgtgagcagaagtgctgggtgtgtcttcagggacagatcctcaaagggagctgactcatctagggggcag

SEQ ID NO: 287464 - DNA, 120 bp, Artificial Sequence
  ENSG00000130703_64 (sequence is synthesized)
cacttttgctcttcctcttttccttcctcctttctggtcaggtatgcttgtgatggctggagcatcagcagctgttttgggccatgaggtgacactgaggctggaagccagcactaggag

SEQ ID NO: 287465 - DNA, 120 bp, Artificial Sequence
  ENSG00000130703_65 (sequence is synthesized)
agtgatacagtaagcagagaagccagggctgtcacgtcgcagaggagactggagagctgcggcggggaggggtcagctgcggccacgtgagggccaggcccctctctgactgcccaggct

SEQ ID NO: 287466 - DNA, 120 bp, Artificial Sequence
  ENSG00000130703_66 (sequence is synthesized)
gcatccacacagaagattccatggctttccataaaagagagtgggagaatgtcctctctaaaggcctggggagtgcctggggagaggagacagcctcagctggggctcaccagccagcag

SEQ ID NO: 287467 - DNA, 120 bp, Artificial Sequence
  ENSG00000130703_67 (sequence is synthesized)
ctgccagccaggccagcaatgccaaggcacccggcgttcctggaagccaagccctgtttgatctaatggggcagctgtgggtgcagacccagataaagagataaacccagacccagaaac

SEQ ID NO: 287468 - DNA, 120 bp, Artificial Sequence
  ENSG00000130703_68 (sequence is synthesized)
ctgggggaggaggtgggagcaacaacctctcttccgcctccttcaccgtgagaggaaaggaagcgggatgacatagttgtggctgggactgctggaccccgcatgccagccctgggaggt

SEQ ID NO: 287469 - DNA, 120 bp, Artificial Sequence
  ENSG00000130703_69 (sequence is synthesized)
atgtgggtcatgaaatccacccactggtgacctcccccatggtgagggagggagagagcttctcccctccttggctaagaggacagagggaggatcctacaaattctgtcaggaagcaga

SEQ ID NO: 287470 - DNA, 120 bp, Artificial Sequence
  ENSG00000130703_70 (sequence is synthesized)
aatttggtctgagagcagtgaaggtgggagcagacaccccccaaatcacctgcaggatgagcatttctcaggctctagagagcatgtgtgggacacagccgccagcccacctggtgcggg

SEQ ID NO: 287471 - DNA, 120 bp, Artificial Sequence
  ENSG00000130703_71 (sequence is synthesized)
ggtccagcagccacagccatgggaactcctgggcctgttgttcgtgtgcggatcctggtccgggagcctggatgcggctctgccttgccgacaagctcctgggccaggcctggtccacca

SEQ ID NO: 287472 - DNA, 120 bp, Artificial Sequence
  ENSG00000130703_72 (sequence is synthesized)
gacctccctatgcttggagtgcctgcttgttgtgcctggagctgtgctgggcccttcctcattgcagggctgggggagtcacttaacctgtctggggctcagtcttctcatctgtaaagt

SEQ ID NO: 287473 - DNA, 120 bp, Artificial Sequence
  ENSG00000130703_73 (sequence is synthesized)
gggaatgatggcacctggtacccacttgattggctgttgcaaacatgaaaccagatgggcctgtaaatcacagggcactcggccgccatcaccatcatcatcatcaacatcatcatcctc

SEQ ID NO: 287474 - DNA, 120 bp, Artificial Sequence
  ENSG00000130703_74 (sequence is synthesized)
atcatcatggccccagctcatccatctttgttgccttctccacccccatcttccatccttggagaactgtgcctcttgaattggcctcgtgacctagtaaagatcataacaaagacgcct

SEQ ID NO: 287475 - DNA, 120 bp, Artificial Sequence
  ENSG00000130703_75 (sequence is synthesized)
ctgagggctgccaggccgctgctgcctttagctcacctgttggggtcccagggaacctttgggccccaccaggagagatgaatgtgcagaatttgtctgtccagatgaaccatatattgt

SEQ ID NO: 287476 - DNA, 120 bp, Artificial Sequence
  ENSG00000130703_76 (sequence is synthesized)
ctgtccagatgaaccatatattgtgggttccagtatcagtgagggggtttatctgtatttctttccattttttttttttttcccctccaggcagggtctccctctgttgcccaggctgga

SEQ ID NO: 287477 - DNA, 120 bp, Artificial Sequence
  ENSG00000130703_77 (sequence is synthesized)
ctgcaacctccagctaccaggctcaagcaatcctccctccttagcctcccaagtggctaggactataggcatgtaccaccatgcctgactaatttttattttttttagagatggggtctt

SEQ ID NO: 287478 - DNA, 79 bp, Artificial Sequence
  ENSG00000130703_78 (sequence is synthesized)
ataggcatgaaccacaacacccagccggcatatctgtattttggttgcacggaggctgctgctataaaccgtgggcacc

SEQ ID NO: 287479 - DNA, 120 bp, Artificial Sequence
  ENSG00000130703_79 (sequence is synthesized)
tttggttgcacggaggctgctgctataaaccgtgggcaccagtgcccacgagtcatacataattgctggcccccatggctggaagtatctgagggaacctcaggcaaggccgtttctttt

SEQ ID NO: 287480 - DNA, 120 bp, Artificial Sequence
  ENSG00000130703_80 (sequence is synthesized)
ctggaagctccaagttctgggtccttcttaataaatcttctcgctttctttgagttagcctagacatattgttaaaaatcaagtgaatttcaattttttgtttttagttgtgagtaccag

SEQ ID NO: 287481 - DNA, 120 bp, Artificial Sequence
  ENSG00000130703_81 (sequence is synthesized)
gttgttcttgaacttaaaaataaaagggatagttcaaaagaggtgtcctattttctacataatgaattggaatgtaccaaacctgaaatgttcaatatttatttaacggaaacattcagc

SEQ ID NO: 287482 - DNA, 120 bp, Artificial Sequence
  ENSG00000130703_82 (sequence is synthesized)
ctcctccggatcccaagtgttttttatgttgttgtattcatttgtgctgttagacaccttttctaatcaccctcttttatttaaaaaggaaaattctgcttacacactagacagacctag

SEQ ID NO: 287483 - DNA, 120 bp, Artificial Sequence
  ENSG00000130703_83 (sequence is synthesized)
aagggtaaatccatttagcgatgtcttttgatgctttcctgctccttgaggtgacctagaaacgggagttttctgtgaatccttgtccttgagctgcggctctccctcgccccagcctcg

SEQ ID NO: 287484 - DNA, 120 bp, Artificial Sequence
  ENSG00000130703_84 (sequence is synthesized)
ggccatggtgcctacagccagtgtgaatacagctagtgcaggaagccctgggctttgactcgcttgttttcagtggtctccctgaagagctgcttctggaatcattcccttttctaggac

SEQ ID NO: 287485 - DNA, 120 bp, Artificial Sequence
  ENSG00000130703_85 (sequence is synthesized)
ccatttattttgagaagcaatgtggcaggttttgtcttttcatcagggtgtagagagcctgaaacccccacacaggagccacttcttgatgggggcaaagctgcgctatctagaaagctc

SEQ ID NO: 287486 - DNA, 120 bp, Artificial Sequence
  ENSG00000130703_86 (sequence is synthesized)
tcagtcccagaacctgccttctggagaggcgccatgtgtgtgaatgaacctgctgtttggaaggcaccgctgtgtcgtcgcactcagactccatgaagccaccgctgtgtcgtcgcactc

SEQ ID NO: 287487 - DNA, 120 bp, Artificial Sequence
  ENSG00000130703_87 (sequence is synthesized)
agactccatgaagtgctgtttcgcgtgcaccgcttctcccgaagggaaacacgcctggccactgacttccttcatctccacgaagggaaacgcctggccactgacttccttcgtctctgc

SEQ ID NO: 287488 - DNA, 120 bp, Artificial Sequence
  ENSG00000130703_88 (sequence is synthesized)
gaagggaaacgcctggccactgacctcctgtcgtcacccgaagggaaacacgcctggccgctgaccttctgtcatctccgtgaagggaaacacgcctggccactgacctctgtcgtctct

SEQ ID NO: 287489 - DNA, 120 bp, Artificial Sequence
  ENSG00000130703_89 (sequence is synthesized)
gtgaagggaaacacgcctggccactgacctctgtcgtctccactctgggtgtccgttagaacagacagcacagccctacgaagggagtgtgagctgctttagggactggggcccagctcc

SEQ ID NO: 287490 - DNA, 120 bp, Artificial Sequence
  ENSG00000130703_90 (sequence is synthesized)
actggggcccagctcctctccgtacagtgatggacagacagtgtcatagactggagaggaaattctattttctccttagtttaagaaaaaaaaggccgggtgtggtggcttacgcctgta

SEQ ID NO: 287491 - DNA, 120 bp, Artificial Sequence
  ENSG00000130703_91 (sequence is synthesized)
acatcgctgccggctcccatgttcagcagaagcgacttcagcgtgtggaccatcctgaagaagtgtgttggcctgacttacggaaaatcacaaaatagcacagagcattcctgtagaccc

SEQ ID NO: 287492 - DNA, 120 bp, Artificial Sequence
  ENSG00000130703_92 (sequence is synthesized)
tggtctcccgatcacagaacctgttgtctgtggcattccagccacagtgagacatgccaactagagatctaggtgcatagggggtggcggggtgcggttctaaggtctctgtctgaccta

SEQ ID NO: 287493 - DNA, 120 bp, Artificial Sequence
  ENSG00000130703_93 (sequence is synthesized)
gtcctgctgagatccgcttcctgcagaaactgaaatgggtgctggtgatgtggagggaaagcttccttcaggaggaaaccctgtcatttttctcctgaggtggggacctccccacagcag

SEQ ID NO: 287494 - DNA, 120 bp, Artificial Sequence
  ENSG00000130703_94 (sequence is synthesized)
caccctggagctgctcaatgtcaaccaaagacacctcagagcaaaacacaagtctccaacaaatgccggccgctaagacccgacagacacagaccggatgctggcgtcctcctgggccac

SEQ ID NO: 287495 - DNA, 120 bp, Artificial Sequence
  ENSG00000130703_95 (sequence is synthesized)
accctggagctgctcaagtgagtgtcgtgtcaaccaaagacacctcagagcaaaacacaagtctccaacaaatgccggccgctaagacccgacagacacagaccggatgctggcgtcctc

SEQ ID NO: 287496 - DNA, 120 bp, Artificial Sequence
  ENSG00000130703_96 (sequence is synthesized)
ctgggccaccagttctgagacgtgagtcttgccaagccactgcctgcagtcttgttgtaggcagcaggtcctaacaaatacatacagaaataagtaataaacgacaccttgcctgatgaa

SEQ ID NO: 287497 - DNA, 120 bp, Artificial Sequence
  ENSG00000130703_97 (sequence is synthesized)
gctgtttctctttgcttgccttctgttttcagtggaacactcgcttgatgtattttgagaaacaaactctgggatcagtcctgttgagctagtggctggctccatagtttggggcctgaa

SEQ ID NO: 287498 - DNA, 120 bp, Artificial Sequence
  ENSG00000130703_98 (sequence is synthesized)
tggaggggcaggacacagcagctttgctttgttcttctggagcctgtggcagactcatctgcgtgtggggtccgaccacagttgtctacctgaccctcccgggcttgtgcccctcacgtg

SEQ ID NO: 287499 - DNA, 120 bp, Artificial Sequence
  ENSG00000130703_99 (sequence is synthesized)
gagccctcagaccctggaagcactgggtggttgccggctgctgcaggcccagagcccccatggaataaactcatcgcggggacccagcccccactccacccggctctggagcagaacttg

SEQ ID NO: 287500 - DNA, 120 bp, Artificial Sequence
  ENSG00000130706_0 (sequence is synthesized)
gaggaagagcgagcccggacggcgcctctcgaacgagtgtgggcgcgaggcaggatgacgacctcaggcgcgctctttccaagcctggtgccaggctctcggggcgcctccaacaagtac

SEQ ID NO: 287501 - DNA, 120 bp, Artificial Sequence
  ENSG00000130706_1 (sequence is synthesized)
ttggtggagtttcgggcgggaaagatgtccctgaaggggaccaccgtgactccggataagcggaaagggctggtgtacattcagcagacggacgactcgcttattcacttctgctggaag

SEQ ID NO: 287502 - DNA, 120 bp, Artificial Sequence
  ENSG00000130706_2 (sequence is synthesized)
gacaggacgtccgggaacgtggaagacgacttgatcatcttccctgacgactgtgagttcaagcgggtgccgcagtgccccagcgggagggtctacgtgctgaagttcaaggcagggtcc

SEQ ID NO: 287503 - DNA, 120 bp, Artificial Sequence
  ENSG00000130706_3 (sequence is synthesized)
aagcggcttttcttctggatgcaggaacccaagacagaccaggatgaggagcattgccggaaagtcaacgagtatctgaacaaccccccgatgcctggggcgctgggggccagcggaagc

SEQ ID NO: 287504 - DNA, 120 bp, Artificial Sequence
  ENSG00000130706_4 (sequence is synthesized)
agcggccacgaactctctgcgctaggcggtgagggtggcctgcagagcctgctgggaaacatgagccacagccagctcatgcagctcatcggaccagccggccttggaggactgggtggg

SEQ ID NO: 287505 - DNA, 120 bp, Artificial Sequence
  ENSG00000130706_5 (sequence is synthesized)
gagcagctcctcctccagctcccggagccagtcggcagcggtcaccccgtcatccaccacctcttccacccgtgccaccccagccccttctgctccagcagctgcctcagcaactagccc

SEQ ID NO: 287506 - DNA, 120 bp, Artificial Sequence
  ENSG00000130706_6 (sequence is synthesized)
gagccccgcgcccagttccgggaatggagccagcacagcagccagcccgacccagcccatccagctgagcgacctccagagcatcctggccacgatgaacgtaccagccgggccagcagg

SEQ ID NO: 287507 - DNA, 120 bp, Artificial Sequence
  ENSG00000130706_7 (sequence is synthesized)
cggccagcaagtggacctggccagtgtgctgacgccggagataatggctcccatcctcgccaacgcggatgtccaggagcgcctgcttccctacttgccatctggggagtcgctgccgca

SEQ ID NO: 287508 - DNA, 120 bp, Artificial Sequence
  ENSG00000130706_8 (sequence is synthesized)
gaccgcggatgagatccagaataccctgacctcgccccagttccagcaggccctgggcatgttcagcgcagccttggcctcggggcagctgggccccctcatgtgccagttcggtctgcc

SEQ ID NO: 287509 - DNA, 120 bp, Artificial Sequence
  ENSG00000130706_9 (sequence is synthesized)
tgcagaggctgtggaggccgccaacaagggcgatgtggaagcgtttgccaaagccatgcagaacaacgccaagcccgagcagaaagagggcgacacgaaggacaagaaggacgaagagga

SEQ ID NO: 287510 - DNA, 120 bp, Artificial Sequence
  ENSG00000130706_10 (sequence is synthesized)
ggacatgagcctggactgagccacgcgccgtcctccgaggaactgggcgcttgcagtgcgttgcacaccctcacctcccacccactgattattaataaagtcttttcttttacctgccaa

SEQ ID NO: 287511 - DNA, 120 bp, Artificial Sequence
  ENSG00000130706_11 (sequence is synthesized)
cgactgccgcctttttaccctgtggcctttcccatccaggcgtccagagggttagagccggctgcgcggcttacggggctcaatcggcggcgagagcggcaggcggggcgggccgaacgc

SEQ ID NO: 287512 - DNA, 120 bp, Artificial Sequence
  ENSG00000130706_12 (sequence is synthesized)
ccggggtggcgcgtcgaggctggtgccccgcggagacggcgtcaagcctagggccggccccactaggcttggcggggctgccccggcccagcgccgagtgcgggcggtgcgatcgtcgtg

SEQ ID NO: 287513 - DNA, 120 bp, Artificial Sequence
  ENSG00000130706_13 (sequence is synthesized)
cagcgccgagtgcgggcggtgcgatcgtcgtgagcggggcaaacgcggaaaggcagcccggcgtgtctgagtctgccttaggcagctctgggcgcaggccccctgctcgcaaacacccca

SEQ ID NO: 287514 - DNA, 120 bp, Artificial Sequence
  ENSG00000130706_14 (sequence is synthesized)
ttgagagcagttcagcgttgactttttaactactctgggaatgttgtttccagcacgtctcagaaaccccgttgccatctgaaaggcccctttccctgctctctcccccggccttgcctt

SEQ ID NO: 287515 - DNA, 120 bp, Artificial Sequence
  ENSG00000130706_15 (sequence is synthesized)
tcatgggctgtctctgaccctggcttctctgccttgtggagaccctgccagcgaggggtctggcggcttagctgccccttgcgcaccccacccggttagacccagggctcagtacgctct

SEQ ID NO: 287516 - DNA, 120 bp, Artificial Sequence
  ENSG00000130707_0 (sequence is synthesized)
cctgctctgccgcctgccaccgctgcccgagcccgacgctatgtccagcaaaggctccgtggttctggcctacagtggcggcctggacacctcgtgcatcctcgtgtggctgaaggaaca

SEQ ID NO: 287517 - DNA, 120 bp, Artificial Sequence
  ENSG00000130707_1 (sequence is synthesized)
aggctatgacgtcattgcctatctggccaacattggccagaaggaagacttcgaggaagccaggaagaaggcactgaagcttggggccaaaaaggtgttcattgaggatgtcagcaggga

SEQ ID NO: 287518 - DNA, 120 bp, Artificial Sequence
  ENSG00000130707_2 (sequence is synthesized)
gtttgtggaggagttcatctggccggccatccagtccagcgcactgtatgaggaccgctacctcctgggcacctctcttgccaggccctgcatcgcccgcaaacaagtggaaatcgccca

SEQ ID NO: 287519 - DNA, 120 bp, Artificial Sequence
  ENSG00000130707_3 (sequence is synthesized)
gcgggagggggccaagtatgtgtcccacggcgccacaggaaaggggaacgatcaggtccggtttgagctcagctgctactcactggccccccagataaaggtcattgctccctggaggat

SEQ ID NO: 287520 - DNA, 120 bp, Artificial Sequence
  ENSG00000130707_4 (sequence is synthesized)
gcctgaattctacaaccggttcaagggccgcaatgacctgatggagtacgcaaagcaacacgggattcccatcccggtcactcccaagaacccgtggagcatggatgagaacctcatgca

SEQ ID NO: 287521 - DNA, 120 bp, Artificial Sequence
  ENSG00000130707_5 (sequence is synthesized)
catcagctacgaggctggaatcctggagaaccccaagaaccaagcgcctccaggtctctacacgaagacccaggacccagccaaagcccccaacacccctgacattctcgagatcgagtt

SEQ ID NO: 287522 - DNA, 120 bp, Artificial Sequence
  ENSG00000130707_6 (sequence is synthesized)
cgggcaagcatggcgtgggccgtattgacatcgtggagaaccgcttcattggaatgaagtcccgaggtatctacgagaccccagcaggcaccatcctttaccatgctcatttagacatcg

SEQ ID NO: 287523 - DNA, 120 bp, Artificial Sequence
  ENSG00000130707_7 (sequence is synthesized)
aggccttcaccatggaccgggaagtgcgcaaaatcaaacaaggcctgggcttgaaatttgctgagctggtgtataccggtttctggcacagccctgagtgtgaatttgtccgccactgca

SEQ ID NO: 287524 - DNA, 120 bp, Artificial Sequence
  ENSG00000130707_8 (sequence is synthesized)
tcgccaagtcccaggagcgagtggaagggaaagtgcaggtgtccgtcctcaagggccaggtgtacatcctcggccgggagtccccactgtctctctacaatgaggagctggtgagcatga

SEQ ID NO: 287525 - DNA, 120 bp, Artificial Sequence
  ENSG00000130707_9 (sequence is synthesized)
acgtgcagggtgattatgagccaactgatgccaccgggttcatcaacatcaattccctcaggctgaaggaatatcatcgtctccagagcaaggtcactgccaaatagacccgtgtacaat

SEQ ID NO: 287526 - DNA, 120 bp, Artificial Sequence
  ENSG00000130707_10 (sequence is synthesized)
gaggagctggggcctcctcaatttgcagatcccccaagtacaggcgctaattgttgtgataatttgtaattgtgacttgttctccccggctggcagcgtagtggggctgccaggccccag

SEQ ID NO: 287527 - DNA, 120 bp, Artificial Sequence
  ENSG00000130707_11 (sequence is synthesized)
ctttgttccctggtccccctgaagcctgcaaacgttgtcatcgaagggaagggtggggggcagctgcggtggggagctataaaaatgacaattaaaagagacactagtcttttatttcta

SEQ ID NO: 287528 - DNA, 120 bp, Artificial Sequence
  ENSG00000130707_12 (sequence is synthesized)
ctgctctgccgcctgccaccgctgcccgagcccggtgggcggcggcactgcgtgctggggaagcacagattcttgtgccctctgtgaccttgagcctgccactgacctctctgagccctg

SEQ ID NO: 287529 - DNA, 120 bp, Artificial Sequence
  ENSG00000130707_13 (sequence is synthesized)
ctggctgcctccccaataggaatgacaactcctacttcatgaggttgtagtgggggctcaggggcacagggagatcccgctgaggctcccagggccctgcctggtgcttggcaaggagca

SEQ ID NO: 287530 - DNA, 120 bp, Artificial Sequence
  ENSG00000130707_14 (sequence is synthesized)
gttctgatgggggatgtgtcagctgccagaggctcagagccaaggcccctcccacatctcctgcctgcgtgcattcctcacatcctggccttgggccaaactgctcagcctcagccgcct

SEQ ID NO: 287531 - DNA, 120 bp, Artificial Sequence
  ENSG00000130707_15 (sequence is synthesized)
tccctcgatgctggaggatcaggtccaagagatgcctctccccgaccagcctaggactgcagtcagcattcccaggccccagtgtggtctgtggggctgtgtgcagagtgtgcgagacgc

SEQ ID NO: 287532 - DNA, 120 bp, Artificial Sequence
  ENSG00000130707_16 (sequence is synthesized)
cccggtaaggagccctcggcccctctcgctgcccactccctagccgagagcacccgcttcccgggcccagaggaggaggcgtagaagacgcccgccccggggcccgcggaggcagagggc

SEQ ID NO: 287533 - DNA, 120 bp, Artificial Sequence
  ENSG00000130707_17 (sequence is synthesized)
ggaccccgatcgccactcgccggggactgggaccgaggcaggagggaaggggctcccgatgctcaaacgcctggcaccggattccagacgctatgtccagcaaaggctccgtggttctgg

SEQ ID NO: 287534 - DNA, 120 bp, Artificial Sequence
  ENSG00000130707_18 (sequence is synthesized)
cttgctcctccaaagtcacactttttcctgcctgacttgttcctctccagctattctacctccagctgtgggggcgtcgaagaaaaagatgagatcaagttgaggggaaaaattgtctga

SEQ ID NO: 287535 - DNA, 120 bp, Artificial Sequence
  ENSG00000130707_19 (sequence is synthesized)
tttctccagccctttgtttcccaggcctctggcaagcgaggctggtgctaggctgagggctggggaccgggggatctgccggaccccaccagctggtggggaaatggacagaggagaggg

SEQ ID NO: 287536 - DNA, 120 bp, Artificial Sequence
  ENSG00000130707_20 (sequence is synthesized)
ctgcatcagacgagaggcccattttccaacacgcccaagaaaaaatatacataaaggttgatgtgttttcaaatgggtttttgctttgctcttctcttttctccctaaccaagcgcctcc

SEQ ID NO: 287537 - DNA, 120 bp, Artificial Sequence
  ENSG00000130707_21 (sequence is synthesized)
cccccttctcaccccaacacaccaccattctgccatggagtgcaggctccgtccagccagccccggtgagggagtctgtgtccttcccctccttcatggggctccctctcaccctcacaa

SEQ ID NO: 287538 - DNA, 120 bp, Artificial Sequence
  ENSG00000130707_22 (sequence is synthesized)
cagcatcctctctggggacatgctggagacccccatgggcccctcccaggagaggccagctctgcagcttacaggccaggggaagcccacagctcggccctcccggctctgaccccttgt

SEQ ID NO: 287539 - DNA, 120 bp, Artificial Sequence
  ENSG00000130707_23 (sequence is synthesized)
tcatgtacctgaacgaagtcgcgtgagtgtctgcagccctgtccggcctcttgggaaccgccgtctcgggcgagcacgagcctggaccgttgcagctaatggttgtggctgaggctcagg

SEQ ID NO: 287540 - DNA, 120 bp, Artificial Sequence
  ENSG00000130711_0 (sequence is synthesized)
ggccgtcccccggcgccggggagctccgggccgcccatgatgggctccgtgctcccggctgaggccctggtgctcaagaccgggctgaaggcgccgggactggcgctggccgaggttatc

SEQ ID NO: 287541 - DNA, 120 bp, Artificial Sequence
  ENSG00000130711_1 (sequence is synthesized)
ggactggcgctggccgaggttatcacctccgacatcctgcacagcttcctgtacggccgctggcgcaacgtgctcggggagcagctcttcgaggacaagagccaccacgccagccccaag

SEQ ID NO: 287542 - DNA, 120 bp, Artificial Sequence
  ENSG00000130711_2 (sequence is synthesized)
acagccttcaccgccgaggtgctggcgcagtccttctccggcgaagtgcagaagctgtccagcctggtgctgcctgcggaggtgatcatcgctcagagctccatccctggcgagggcctc

SEQ ID NO: 287543 - DNA, 120 bp, Artificial Sequence
  ENSG00000130711_3 (sequence is synthesized)
ggcatcttctccaagacgtggatcaaggcgggaaccgagatgggccccttcaccggccgcgtgatcgccccggagcacgtggacatctgcaagaacaacaacctcatgtgggaggtgttc

SEQ ID NO: 287544 - DNA, 120 bp, Artificial Sequence
  ENSG00000130711_4 (sequence is synthesized)
aatgaggatggcacggtgcgctacttcatcgatgccagccaggaggaccaccggagctggatgacctacatcaagtgtgcacgtaacgaacaggagcagaacctggaggtggtccagatc

SEQ ID NO: 287545 - DNA, 120 bp, Artificial Sequence
  ENSG00000130711_5 (sequence is synthesized)
ggcaccagcatcttctacaaggccattgagatgatcccacctgaccaggaactgctggtgtggtacggaaactcacacaacaccttcctggggatcccaggtgtgcccgggctagaggag

SEQ ID NO: 287546 - DNA, 120 bp, Artificial Sequence
  ENSG00000130711_6 (sequence is synthesized)
gaccagaaaaagaacaagcatgaggacttccacccggcggactcggcggctggccccgcgggccgcatgcgatgcgtcatctgccaccgcggcttcaactcgcgcagcaacctgcgctcg

SEQ ID NO: 287547 - DNA, 120 bp, Artificial Sequence
  ENSG00000130711_7 (sequence is synthesized)
cacatgcgcatccacacgctggacaagcccttcgtgtgccgcttctgcaaccgccgcttcagccagtcgtccacgctgcgcaaccacgtgcgcctgcacacgggcgagcgcccctacaag

SEQ ID NO: 287548 - DNA, 120 bp, Artificial Sequence
  ENSG00000130711_8 (sequence is synthesized)
caagtgccaggtgtgccagagcgcctactcgcagctggccggcctgcgcgcccaccagaagagcgcgcggcaccggccgcccagcaccgcgctgcaggcacactcgcccgcgctgcccgc

SEQ ID NO: 287549 - DNA, 120 bp, Artificial Sequence
  ENSG00000130711_9 (sequence is synthesized)
gcgcgctggggttgcgccccggaggcggatctcaggcacccccgccttggcccgtgtcgcagatgaggacactgagggcggcgtccctcacccaggccacgcagctggtgcggctgttcg

SEQ ID NO: 287550 - DNA, 120 bp, Artificial Sequence
  ENSG00000130711_10 (sequence is synthesized)
gccgcctcctctgggagggggtccccctgcctggcctcgcccccgagtctccctgctgctgtagagccgggcgcccaggccggcatccccctcgtgggtggcaggagagcggacttagag

SEQ ID NO: 287551 - DNA, 120 bp, Artificial Sequence
  ENSG00000130711_11 (sequence is synthesized)
cccccgagggcccctcagcagaggaaggggagtcccctcctccgccaccgagagtcctgtgcttcggaatgaagggagggcgacctccttgtccgggtgtggtcgggcgcgggggttgtg

SEQ ID NO: 287552 - DNA, 120 bp, Artificial Sequence
  ENSG00000130711_12 (sequence is synthesized)
ggggcgccatctcctcttccggcccctgggactggtgtcctgaagtgtcgggagtccttacgcaaccttgacatgtgcgggctactggggtccatcggcagcgggaagagacccggagag

SEQ ID NO: 287553 - DNA, 120 bp, Artificial Sequence
  ENSG00000130711_13 (sequence is synthesized)
atgcatcttctgggcccttctctcctttaggccagcttacccccaaacctggctcctggggacggatgaggaaggagctctttgcagtgcaccaggcacgttgagagtggaggcacaatg

SEQ ID NO: 287554 - DNA, 120 bp, Artificial Sequence
  ENSG00000130711_14 (sequence is synthesized)
gaaatcctctgtgggaccccgagcaagaccctgcacctctttgggcctcagtttccccatctgtaaaatgaaggagttggaccaatgccccctccccttcagctgtgacatcgtgcctgg

SEQ ID NO: 287555 - DNA, 120 bp, Artificial Sequence
  ENSG00000130711_15 (sequence is synthesized)
gaaggcgaaatatacccccagccccttccaacacacacactccagcgagaggagggcaagactggaaccgctgcccgagaggttaaggtggcttctgtggccacgaagcgcttccgagct

SEQ ID NO: 287556 - DNA, 120 bp, Artificial Sequence
  ENSG00000130711_16 (sequence is synthesized)
gtgcccagtcccgggaattccgcccagtctgcccacacttccctcggtccctgcccgtttcctcaaattcgggccgtgcgcgccctctggtgtcgcctctcacactttgcagtcatttac

SEQ ID NO: 287557 - DNA, 120 bp, Artificial Sequence
  ENSG00000130711_17 (sequence is synthesized)
caggattcccgtagggcgttttgtaaaataaactataatattaatgaaaagtataaaatgtatagagttttcaagaaactgcgttctacttccagaagatggtcactttaaccttgtaaa

SEQ ID NO: 287558 - DNA, 120 bp, Artificial Sequence
  ENSG00000130711_18 (sequence is synthesized)
cagaagatggtcactttaaccttgtaaatatttatctaaaatgatatttacaaaactgtaatatattattatttgattgtatatgtacaactgtaaatacatttgtacctctcttgtatt

SEQ ID NO: 287559 - DNA, 120 bp, Artificial Sequence
  ENSG00000130713_0 (sequence is synthesized)
attggcgccaagatggcgatggagatgaggcttccagtggctcgcaagcctcttagcgagagactgggccgcgacactaagaaacatctagtggtgccgggggatacaatcactacggac

SEQ ID NO: 287560 - DNA, 120 bp, Artificial Sequence
  ENSG00000130713_1 (sequence is synthesized)
acaggattcatgcggggccatggaacgtatatgggagaagagaagctcattgcatctgttgctggctctgtggagagagtaaacaagttgatctgtgtgaaagctttgaaaaccagatac

SEQ ID NO: 287561 - DNA, 120 bp, Artificial Sequence
  ENSG00000130713_2 (sequence is synthesized)
attggtgaagtaggagacatcgtagtgggacgaatcacagaggttcaacagaagaggtggaaggtggagaccaactccaggctggattcggtcttgctgctctcgtccatgaaccttcct

SEQ ID NO: 287562 - DNA, 120 bp, Artificial Sequence
  ENSG00000130713_3 (sequence is synthesized)
ggaggagagctgaggagaagatctgcagaagatgagcttgcaatgagaggtttcttacaggaaggggaccttatcagtgctgaggtccaggcagtgttctctgacggagctgtctctttg

SEQ ID NO: 287563 - DNA, 120 bp, Artificial Sequence
  ENSG00000130713_4 (sequence is synthesized)
cacacgaggagcctgaaatatggaaaactaggtcagggggttttggtccaggtttccccctccctggtgaaacggcagaagacccactttcatgatttgccatgtggtgcctcagtgatt

SEQ ID NO: 287564 - DNA, 120 bp, Artificial Sequence
  ENSG00000130713_5 (sequence is synthesized)
ctcggtaacaacggcttcatctggatttacccaacacctgagcacaaagaagaggaagcagggggcttcattgcaaacctggagcctgtctctcttgctgatcgagaggtgatatcccgg

SEQ ID NO: 287565 - DNA, 120 bp, Artificial Sequence
  ENSG00000130713_6 (sequence is synthesized)
cttcggaactgcatcatctcgctggtaactcagaggatgatgctgtatgataccagcatcctgtactgctatgaagcatcccttccacatcagatcaaagacatcttaaagccagaaata

SEQ ID NO: 287566 - DNA, 120 bp, Artificial Sequence
  ENSG00000130713_7 (sequence is synthesized)
atggaggagattgtgatggaaacacgccagaggcttttggaacaggagggataaggaggtgctccagaagcacgggactgtggaccttgcaggagtgaagactgtgatgtgtggtcccca

SEQ ID NO: 287567 - DNA, 120 bp, Artificial Sequence
  ENSG00000130713_8 (sequence is synthesized)
cctaacaccaagcctgggtggcagatgaacagtgcttccttgggttgccagctgagtcccggtattagggaatagtttcagctctttcaaagtgcacagtgttacagtcgaatgggctcc

SEQ ID NO: 287568 - DNA, 120 bp, Artificial Sequence
  ENSG00000130713_9 (sequence is synthesized)
catcctggaataatatggagaatcctttgtcttccactcactgtcattcacaaggcacagtgccccatgaaattgccccaatagaaaacatggcatccctgacctccaaatggtctgttt

SEQ ID NO: 287569 - DNA, 120 bp, Artificial Sequence
  ENSG00000130713_10 (sequence is synthesized)
gacctccaaatggtctgttttggcctccattcctatatcctttaaatgactgagaatgcagctggtaaagttggaagaataaagttaaccaagcaggccaggcacggtggctcacgccta

SEQ ID NO: 287570 - DNA, 120 bp, Artificial Sequence
  ENSG00000130713_11 (sequence is synthesized)
gaaaaaaaaaaacaagcagccttttgcttggttggaatctgattttctgttgcgtgttccttgtagccatagatgtgattatgtccacaccgggctgccttaatctgtcctgcttggaga

SEQ ID NO: 287571 - DNA, 120 bp, Artificial Sequence
  ENSG00000130713_12 (sequence is synthesized)
gtgacttgtaagatgctgaattattcatgataatacagtgaatgttctgggtccatgtactcagataaacatgaagaaaataagcaaagaaaaatggagactgggaaagcaaagctgttt

SEQ ID NO: 287572 - DNA, 120 bp, Artificial Sequence
  ENSG00000130713_13 (sequence is synthesized)
tcatcctataattgaagtagtgtggagcattaacttgtggatgattcagagttaaaagataaaaagacgccagagttctcgctgaagaatgtgagaattcctgtgcattgttttttctga

SEQ ID NO: 287573 - DNA, 120 bp, Artificial Sequence
  ENSG00000130713_14 (sequence is synthesized)
tgggaaatgggccttccattgtatgtctctgacggaagaaccatgtcatccttgcagggatccgagtcttagaccaagtgtcgggctctgctgcatcctttctcagtctccttaattcag

SEQ ID NO: 287574 - DNA, 120 bp, Artificial Sequence
  ENSG00000130713_15 (sequence is synthesized)
gctgactccccagctcttgttgggacctgctgctaagtcatttctttgggtcttgtaacttacggtggcctgtgctttagactaggcttttgttaatggtgttaacttttagcgcaggga

SEQ ID NO: 287575 - DNA, 120 bp, Artificial Sequence
  ENSG00000130713_16 (sequence is synthesized)
ggtgagaacaaaagatacattggtgaagtaggagacatcgtagtgggacgaatcacagaggtaacgtcgatatcagattggtgtttacaaagtcgaggcaggctggcgatttcattcatg

SEQ ID NO: 287576 - DNA, 120 bp, Artificial Sequence
  ENSG00000130713_17 (sequence is synthesized)
ggacagtcattccacttgtagttacatgaaaaaggcattcattgcatttggccgttgtgtggcttctgatgtaaatatgtggcttgttcgatttcagattactggttcatgttttttttt

SEQ ID NO: 287577 - DNA, 120 bp, Artificial Sequence
  ENSG00000130713_18 (sequence is synthesized)
acaggcgtgagccaccacatctggccttactggttatttatgatatgacacatgaacatggagcatgtgtccaggtgtggaacttggcttataggttcaacagaagaggtggaaggtgga

SEQ ID NO: 287578 - DNA, 120 bp, Artificial Sequence
  ENSG00000130713_19 (sequence is synthesized)
tgaaatatggaaaaacccactttcatgatttgccatgtggtgcctcagtgattctcggtaacaacggcttcatctggatttacccaacacctgagcacaaagaagaggaagcagggggct

SEQ ID NO: 287579 - DNA, 120 bp, Artificial Sequence
  ENSG00000130713_20 (sequence is synthesized)
tttgttccttcatcaccctggccaggctgaggtccaggcagtgttctctgacggagctgtctctttgcacacgaggagcctgaaatatggaaaagtaagtcgggctcttgatgttcctgt

SEQ ID NO: 287580 - DNA, 120 bp, Artificial Sequence
  ENSG00000130713_21 (sequence is synthesized)
ttgctgactgagactacaaggctatttttgaatccccatagctctctggaattctggcctaaagaaccccagtagctaagcattaatagaggctggcatcccacaaactgatcgtgttcc

SEQ ID NO: 287581 - DNA, 120 bp, Artificial Sequence
  ENSG00000130713_22 (sequence is synthesized)
ttaaacgtaacatcaggacggtcagggttcacagggtcatgggtcagtagccttgtaaagaacaagttttatcctttttctccaaggagactgactttcaccagaagagcccctccaact

SEQ ID NO: 287582 - DNA, 120 bp, Artificial Sequence
  ENSG00000130713_23 (sequence is synthesized)
gtgggctgggaggtgcagctgtctctcttcctccagggggcgctgcagctcagcactggggctgaggctgtcctgggaacaaaggcaggctgggtctggttaaacagcccttagacaaac

SEQ ID NO: 287583 - DNA, 120 bp, Artificial Sequence
  ENSG00000130713_24 (sequence is synthesized)
gtccaatcagtccagtggatgttattgctggcaaagcttgctctgtcatctgagcctctaaatggaatttcactgcttttcttgtacgaggttgcattattgaagctatttactatttta

SEQ ID NO: 287584 - DNA, 120 bp, Artificial Sequence
  ENSG00000130713_25 (sequence is synthesized)
aggagagcatacttcctaaaacaaattaggatttactagtctcttagctttatctgggtgaacgtttttattttctgagtggaacaaaaacctcttcccttaatggagtggctgcagaca

SEQ ID NO: 287585 - DNA, 120 bp, Artificial Sequence
  ENSG00000130713_26 (sequence is synthesized)
gccacgttgatgtacatggagtaggcagaggactgctgcagtatgctgactttcacaaccctgggtcctgcggactcttccttggcaggacgtggacttgagctgtcctgccaggaccag

SEQ ID NO: 287586 - DNA, 120 bp, Artificial Sequence
  ENSG00000130713_27 (sequence is synthesized)
acatggatttgcacccagctccacccatctccttacctacccagaggcacacatctcacaggcaagatgagtgtttggggttcaggtatgagctagggtcatggaacaacgcagtgctcc

SEQ ID NO: 287587 - DNA, 120 bp, Artificial Sequence
  ENSG00000130713_28 (sequence is synthesized)
tgggccagcaggaggctccagctcacttcctcattggcttcagcttctctaatgtctggcacatgagttctggcttagagtgcaaggaagactgcaaagggaaatgacagagaagagtat

SEQ ID NO: 287588 - DNA, 120 bp, Artificial Sequence
  ENSG00000130713_29 (sequence is synthesized)
tgaaggtcaccttctgctgggatgtatgaatagcctctgagtcccaaagcgttctctgcaaaaatgtgtactatgtgtatgcatgtaggcgacagcaattataaacaggaaggacaccaa

SEQ ID NO: 287589 - DNA, 120 bp, Artificial Sequence
  ENSG00000130714_0 (sequence is synthesized)
gaacgttgagcagggcggtgggtggtgcggagtgccgagcggcctcacccccaaccgtcggcccagtcggacggttccgaggcgttgccgggagccgggcgcggctctgtgtggactcgg

SEQ ID NO: 287590 - DNA, 120 bp, Artificial Sequence
  ENSG00000130714_1 (sequence is synthesized)
agaaacgcggggcgtctgcctgagcccgcttttctacaagatgtggggatttttgaagcgccctgtagtggtgacggctgacatcaacttgagccttgtggccctgactgggatggggtt

SEQ ID NO: 287591 - DNA, 120 bp, Artificial Sequence
  ENSG00000130714_2 (sequence is synthesized)
actgagccggctgtggcgactcacctacccgcgggctgtggtttttgacgaagtatattatgggcagtacatctctttttacatgaaacaaatcttcttcttggatgacagtgggccgcc

SEQ ID NO: 287592 - DNA, 120 bp, Artificial Sequence
  ENSG00000130714_3 (sequence is synthesized)
atttggccacatggtgctggccttgggaggttatttaggaggattcgatggcaattttttgtggaacagaattggagcagaatacagtagcaacgtgcctgtgtggtccctgcgcctgct

SEQ ID NO: 287593 - DNA, 120 bp, Artificial Sequence
  ENSG00000130714_4 (sequence is synthesized)
gccagcactcgcgggggccttgtcggtccccatggcctaccagatagtgttggagctccacttttctcattgtgccgccatgggagctgctctgttgatgcttatcgagaatgctctcat

SEQ ID NO: 287594 - DNA, 120 bp, Artificial Sequence
  ENSG00000130714_5 (sequence is synthesized)
cactcagtcaaggctaatgcttttggaatcagtgttaatatttttcaatctattggccgtgttgtcctacctgaagttcttcaactgccaaaagcacagccctttttctctgagctggtg

SEQ ID NO: 287595 - DNA, 120 bp, Artificial Sequence
  ENSG00000130714_6 (sequence is synthesized)
gttctggctaacactgacaggggtcgcttgttcctgtgcagtgggcatcaagtacatgggtgtgttcacgtacgtgctcgtgctgggtgttgcagctgtccatgcctggcacctgcttgg

SEQ ID NO: 287596 - DNA, 120 bp, Artificial Sequence
  ENSG00000130714_7 (sequence is synthesized)
agaccagactttgtccaatgtctgtgtgttctgtcacttgctcgcccgagcagtggctttgctggtcatcccggtcgtcctgtacttactgttcttctacgtccacttgattctagtctt

SEQ ID NO: 287597 - DNA, 120 bp, Artificial Sequence
  ENSG00000130714_8 (sequence is synthesized)
ccgctctgggccccacgaccaaatcatgtccagtgccttccaggccagcttagagggaggactagctcggatcactcagggtcagccactggaggtggcctttgggtcccaggtcactct

SEQ ID NO: 287598 - DNA, 120 bp, Artificial Sequence
  ENSG00000130714_9 (sequence is synthesized)
gaggaacgtctttgggaaacctgtgccctgctggcttcattcccaccaggacacctaccccatgatatatgagaacggccgaggcagctcccaccagcaacaggtgacctgttacccctt

SEQ ID NO: 287599 - DNA, 120 bp, Artificial Sequence
  ENSG00000130714_10 (sequence is synthesized)
caaagatgtcaataactggtggattgtaaaggatcccaggaggcaccagctggtggtgagcagccctccgagacctgtgaggcacggggacatggtgcagctggtccacggcatgaccac

SEQ ID NO: 287600 - DNA, 120 bp, Artificial Sequence
  ENSG00000130714_11 (sequence is synthesized)
ccgctccctgaacacgcatgatgttgcagcccccctgagcccccattcacaggaggtctcctgctacattgactataacatctccatgcccgcccagaacctctggagactggaaattgt

SEQ ID NO: 287601 - DNA, 120 bp, Artificial Sequence
  ENSG00000130714_12 (sequence is synthesized)
tctcagaggtccgctttgtgcacgtgaacacttccgctgtcttaaagctgagcggggctcacctccctgactgggggtatcggcaactggagatcgtcggggagaagctgtcccggggct

SEQ ID NO: 287602 - DNA, 120 bp, Artificial Sequence
  ENSG00000130714_13 (sequence is synthesized)
accacgggagcacggtgtggaacgtggaggagcaccgatacggcgcgagccaggagcagagggagcgggaacgggagctgcactcacctgcgcaggtggacgtcagcaggaacctcagct

SEQ ID NO: 287603 - DNA, 120 bp, Artificial Sequence
  ENSG00000130714_14 (sequence is synthesized)
tcatggcgagattctcggagctgcagtggaggatgctggcgctgagaagtgatgactcggaacacaagtacagctccagcccactggagtgggtcaccctggacaccaatattgcctact

SEQ ID NO: 287604 - DNA, 120 bp, Artificial Sequence
  ENSG00000130714_15 (sequence is synthesized)
ggctgcaccccaggaccagcgctcagatccacctacttggaaacatagtgatctgggtttcgggcagcctcgctctggccatctacgccctgctgtccttgtggtacctgctccgacggc

SEQ ID NO: 287605 - DNA, 120 bp, Artificial Sequence
  ENSG00000130714_16 (sequence is synthesized)
gaagaaatgtccatgacctccctcaggatgcctggctgcgctgggtgctggctggggcgctgtgtgccggtggctgggcagtgaactacctcccgttcttcctgatggagaagacactct

SEQ ID NO: 287606 - DNA, 120 bp, Artificial Sequence
  ENSG00000130714_17 (sequence is synthesized)
tcctctaccactacctgcccgcactcaccttccaaatccttctgctccctgtggtcctgcagcacatcagcgaccacctgtgcaggtcccagctccagaggagcatcttcagcgccctgg

SEQ ID NO: 287607 - DNA, 120 bp, Artificial Sequence
  ENSG00000130714_18 (sequence is synthesized)
tggtggcctggtactcctccgcgtgccacgtgtccaacacgctgcgcccactcacctacggggacaagtcactctcgccacatgaactcaaggcccttcgctggaaagacagctgggaca

SEQ ID NO: 287608 - DNA, 120 bp, Artificial Sequence
  ENSG00000130714_19 (sequence is synthesized)
tcttgatccgaaaacactagaacaagagtgtggcaaagaacacccgtgctggggtcgggatgaggttgaagggtcttggtcaatgtacgtaatgagcagggtgggccccacgctgggagg

SEQ ID NO: 287609 - DNA, 120 bp, Artificial Sequence
  ENSG00000130714_20 (sequence is synthesized)
acacgggctgggctgagcagggcctctagtggaacacatgggggtctcattgaaaagctctctgatgagcacctccttttgtgcaaagttaattttttctcgacaataaagatattccgt

SEQ ID NO: 287610 - DNA, 120 bp, Artificial Sequence
  ENSG00000130714_21 (sequence is synthesized)
gtctttacccctgaactaagacacagggagtatttcagaggccagcgtaggagtcattgacaacaaaaagccgagaacccagggccagcagtggagcctcagcagaccagggcctggtcc

SEQ ID NO: 287611 - DNA, 120 bp, Artificial Sequence
  ENSG00000130714_22 (sequence is synthesized)
ttgctaactgctgcagggtggagtttgatctggcagacccgatcctccttcatgaacacccagcaacctgagcaagtcccggccctgccctcagcgagcccggcaggcgtcctgggacag

SEQ ID NO: 287612 - DNA, 120 bp, Artificial Sequence
  ENSG00000130714_23 (sequence is synthesized)
ctcagtgttggagggccacctgaaccacgagccagggctggggcttgcatgtcattgtctatgacagcgtcaagactggcccttggcaccgtgctgtgtggaaaccctcccctctgagac

SEQ ID NO: 287613 - DNA, 120 bp, Artificial Sequence
  ENSG00000130714_24 (sequence is synthesized)
tccactgagacgtggctgagtgaaatcttcctcgtcagtggtcaaggtgtgtcatccatacagctccatgcctttgtcttttttaaatgtaattaaaaaaggaaccaactggcgtttgta

SEQ ID NO: 287614 - DNA, 120 bp, Artificial Sequence
  ENSG00000130714_25 (sequence is synthesized)
ggtccctggcttgcggacgggctggggccgggggcgtccccgtctttccggagctgggggcggggttcgggcccgggcagatgcggcgttcgggcggccgagccccgaagtaagaactcc

SEQ ID NO: 287615 - DNA, 120 bp, Artificial Sequence
  ENSG00000130714_26 (sequence is synthesized)
accagactttgtccaatgtaggtgctgatgtccagtgctgcatgaggccggcctgtatggggcagatgcagatgtcacagggggtacttggtgaaaagactccaatcctcaatgttttag

SEQ ID NO: 287616 - DNA, 120 bp, Artificial Sequence
  ENSG00000130714_27 (sequence is synthesized)
aagcaggcaggcctgggcagcctcgcctcttggcctctgcaggtgcctctgtatgggaggccagagtttctgtcactaactttttctaagctcacaatgtctagaggtgggtacgctttt

SEQ ID NO: 287617 - DNA, 120 bp, Artificial Sequence
  ENSG00000130714_28 (sequence is synthesized)
attagcacttgaatcaaaacatgaagaatccacatccatatttctttttttggtgggggggatggagtcttactctgtcacccaaactccgcctcctggcttcaagcgattctcctacct

SEQ ID NO: 287618 - DNA, 81 bp, Artificial Sequence
  ENSG00000130714_29 (sequence is synthesized)
ctcctggctattacaagcacctgcaaccacacccagctaatttttttgttttgttggtagagatggggtttcaccatgttg

SEQ ID NO: 287619 - DNA, 120 bp, Artificial Sequence
  ENSG00000130714_30 (sequence is synthesized)
ataggcgtgagccaccgcgcctggcagctgggagcattttaaagtcaagtcttacaaaccctgggcagtttcacccgccttaaggaccacactcaactgtgaccttcattcctatgaacc

SEQ ID NO: 287620 - DNA, 120 bp, Artificial Sequence
  ENSG00000130714_31 (sequence is synthesized)
taaggaccacactcaactgtgaccttcattcctatgaacctcgcagcagtggtagaaggtatcagtagaggtggtcaggactgtggttcctgaagtcagccaagcctgccgacggccagt

SEQ ID NO: 287621 - DNA, 120 bp, Artificial Sequence
  ENSG00000130714_32 (sequence is synthesized)
gctgtagtgctgtgtgtttcagcaagttgtttggctcaccctagtcttggttttctcatctcttagacagacatcatcattgctcttacctcattggatgcttgtaaggactgaataggg

SEQ ID NO: 287622 - DNA, 120 bp, Artificial Sequence
  ENSG00000130714_33 (sequence is synthesized)
tgcgcgtggaaggctgaactgagtgcctggcccagaggcagcatttgatcagacttagtgctcattatggttctataatgtaacgtgatgtgattaaatgggagatcattaccactgtta

SEQ ID NO: 287623 - DNA, 120 bp, Artificial Sequence
  ENSG00000130714_34 (sequence is synthesized)
caagaatggccaccagcctaaacatcaccccagagggaggagtggccatcgggaaggctggcttagggtcatttttctttctgtctctcactcatcaaccttctgcttctgtctcaggga

SEQ ID NO: 287624 - DNA, 120 bp, Artificial Sequence
  ENSG00000130714_35 (sequence is synthesized)
cccatgatgtaaggtgatggttttactttgaagataattaaatgctttatttgctcgtagatttgcttatcttagcaactttccctttctttgaggaagtttgtttgcaggacagaaaga

SEQ ID NO: 287625 - DNA, 120 bp, Artificial Sequence
  ENSG00000130714_36 (sequence is synthesized)
agttgagcagcccgggtgctgattgccagtgagcttcgtggttcccgggtgttgctggagggacttggcgtgtggcagggcccagggtcggccccagctctgtggctgtggctgacctca

SEQ ID NO: 287626 - DNA, 120 bp, Artificial Sequence
  ENSG00000130714_37 (sequence is synthesized)
gcactgcctgcctgaatcatctgatttcggctccttgtctgtggtatcttcattttccctgaaaccccttgctaggttgtatttgttgaaatctgcttccctttgcagaaactttaggag

SEQ ID NO: 287627 - DNA, 120 bp, Artificial Sequence
  ENSG00000130714_38 (sequence is synthesized)
gcagaaactttaggagaaaggcgtgtgggcccgatcgatgacccacttccagatacgtttctttccctttcttttctttttctcataaatagacacagggtctcactatgttgcccaggc

SEQ ID NO: 287628 - DNA, 90 bp, Artificial Sequence
  ENSG00000130714_39 (sequence is synthesized)
tcagatacatctctttgttgacttcacacagatatgagaacggccgaggcagctcccaccagcaacaggtgacctgttaccccttcaaag

SEQ ID NO: 287629 - DNA, 120 bp, Artificial Sequence
  ENSG00000130714_40 (sequence is synthesized)
gtggctttttttttcctttcatacctagtcccacagaaactgtgccttattaatctgagtccagaaaataataaattggttggatacaaatgaaagacttctggaaagtctggttaaaat

SEQ ID NO: 287630 - DNA, 120 bp, Artificial Sequence
  ENSG00000130714_41 (sequence is synthesized)
cttactgttcagttgcagtcattatttcagcccttgtcgttggtacacgtatcacagagcgtctgattgtgatgatcggttgtacatgtgaattttgtccattgccacaatgtttttgaa

SEQ ID NO: 287631 - DNA, 120 bp, Artificial Sequence
  ENSG00000130714_42 (sequence is synthesized)
tggcgaggaggagggtgcacttccccagcgaccctcggagcagcccggggtgctgtgggcattgggaaggaaggccagtaccagccccttatagcttccctcacttggggacttgtccct

SEQ ID NO: 287632 - DNA, 120 bp, Artificial Sequence
  ENSG00000130714_43 (sequence is synthesized)
acaggcatgtgccaccacacccggctggcatcagtgcttttaatgaaaggtctgagtaggagcagacctgtccacagtagtagtaaggcctagtggatgctaggctgtgcctggcgtttt

SEQ ID NO: 287633 - DNA, 120 bp, Artificial Sequence
  ENSG00000130714_44 (sequence is synthesized)
gcctggcgttttttcactctgctaaagtagtgcgtgcatctgaattcctttcctgtgttctcttctcttccctccctgagcagagggcaggtggctaacagcatctcccatgttccctta

SEQ ID NO: 287634 - DNA, 120 bp, Artificial Sequence
  ENSG00000130714_45 (sequence is synthesized)
acacatggggtgcagcgaacctcacccatttcacgttacactgacatcctccgggtccctccggggaatgggtgaggttcagaagagatgcccagatgaggcactgcaggaacccagagg

SEQ ID NO: 287635 - DNA, 120 bp, Artificial Sequence
  ENSG00000130714_46 (sequence is synthesized)
gagaagtcgcggctgacagagatgaaagcggagtgggtggggagacggggaggggatgaagagatgtgggtggcctggaggattcgggagcagggagcaaggcccaggagcctggggtgt

SEQ ID NO: 287636 - DNA, 80 bp, Artificial Sequence
  ENSG00000130717_0 (sequence is synthesized)
tggggaaggggcgggcgcggggacccgatgcgcgggagcggaggccgagatggcttcggcgggaggcgaagactgcgaga

SEQ ID NO: 287637 - DNA, 120 bp, Artificial Sequence
  ENSG00000130717_1 (sequence is synthesized)
gccccgcgccggaggccgaccgtccgcaccagcggcccttcctgataggggtgagcggcggcactgccagcgggaagtcgaccgtgtgtgagaagatcatggagttgctgggacagaacg

SEQ ID NO: 287638 - DNA, 120 bp, Artificial Sequence
  ENSG00000130717_2 (sequence is synthesized)
aggtggaacagcggcagcggaaggtggtcatcctgagccaggacaggttctacaaggtcctgacggcagagcagaaggccaaggccttgaaaggacagtacaattttgaccatccagatg

SEQ ID NO: 287639 - DNA, 120 bp, Artificial Sequence
  ENSG00000130717_3 (sequence is synthesized)
cctttgataatgatttgatgcacaggactctgaagaacatcgtggagggcaaaacggtggaggtgccgacctatgattttgtgacacactcaaggttaccagagaccacggtggtctacc

SEQ ID NO: 287640 - DNA, 120 bp, Artificial Sequence
  ENSG00000130717_4 (sequence is synthesized)
ctgcggacgtggttctgtttgagggcatcttggtgttctacagccaggagatccgggacatgttccacctgcgcctcttcgtggacaccgactccgacgtcaggctgtctcgaagagttc

SEQ ID NO: 287641 - DNA, 120 bp, Artificial Sequence
  ENSG00000130717_5 (sequence is synthesized)
tccgggacgtgcgccgagggagggacctggagcagattctgacgcagtacaccaccttcgtgaagccggccttcgaggagttctgcctgccgacaaagaagtatgccgatgtgatcatcc

SEQ ID NO: 287642 - DNA, 120 bp, Artificial Sequence
  ENSG00000130717_6 (sequence is synthesized)
cgcgaggagtggacaatatggttgccatcaacctgatcgtgcagcacatccaggacattctgaatggtgacatctgcaaatggcaccgaggagggtccaatgggcggagctacaagcgga

SEQ ID NO: 287643 - DNA, 120 bp, Artificial Sequence
  ENSG00000130717_7 (sequence is synthesized)
ccttttctgagccaggggaccaccctgggatgctgacctctggcaaacggtcacatttggagtccagcagcagaccccactgaggggctgccgagcctcagggcaggtctcccgcccggc

SEQ ID NO: 287644 - DNA, 120 bp, Artificial Sequence
  ENSG00000130717_8 (sequence is synthesized)
atgtgtgttcagggactgagcctggggacgcccacccacacccactgcttcctctcggcgcaccccaggggagtgttagcagcgaggccttcctcactcaggagtggaaactcagatgtg

SEQ ID NO: 287645 - DNA, 120 bp, Artificial Sequence
  ENSG00000130717_9 (sequence is synthesized)
actcagactcaacttgctgggacactgacaggcgttcctgaggttttcagccacttaggctcgttgcggtttaaagatccctctaggtcactgagaaatgccacagaatgtgcaggaagc

SEQ ID NO: 287646 - DNA, 120 bp, Artificial Sequence
  ENSG00000130717_10 (sequence is synthesized)
ctgggaggcttctgtgaggaatgtgaggcacattattggggaaattgaggagacagcctagacactggctggcctgatgttttgttgacagtgaacccacagtgggagagagttttttcc

SEQ ID NO: 287647 - DNA, 120 bp, Artificial Sequence
  ENSG00000130717_11 (sequence is synthesized)
agtctgatctggttcttacacactcacacacataactcaaaagttttgtgaacaagtactttccttttttacatgttacatgtcctcatgttttctgttttctgtttcataacacaaggc

SEQ ID NO: 287648 - DNA, 120 bp, Artificial Sequence
  ENSG00000130717_12 (sequence is synthesized)
tggttgtggcctacaaacctaatttcatgacccagtggtttgcagtccagcgtggcctacacggatatggggagccactgagggatgttttccccccttgcttgtgccttaaaggcagag

SEQ ID NO: 287649 - DNA, 120 bp, Artificial Sequence
  ENSG00000130717_13 (sequence is synthesized)
aagcgaggcggatgccctggaagcacccagcatcacacccaggcttgtgcggggccaggctgggagcccatgcagtagggcagaaggcagcggaggccaggtctgtcccggctggagaac

SEQ ID NO: 287650 - DNA, 120 bp, Artificial Sequence
  ENSG00000130717_14 (sequence is synthesized)
agcgtccacgcagtcctgcctggggtcaggccctcactgaccctcaggggagcccccaaggtgctgtctgtctagacaggctgtcccaccccagggtggctagtggccatatgcagggaa

SEQ ID NO: 287651 - DNA, 120 bp, Artificial Sequence
  ENSG00000130717_15 (sequence is synthesized)
tggtgcttctggctgtggcacgcactggatcacccaggtcccagcagacatggccgcccaaagtcagcaagcctcctttgtgctatgtggagctcacagcctcacatgtgaacacccgtg

SEQ ID NO: 287652 - DNA, 120 bp, Artificial Sequence
  ENSG00000130717_16 (sequence is synthesized)
tctgggttgcctggggtgatcctccctcctgcgtggtggctgtctctggaaagcatcccttgccgctgccatgggcagccccagcccccgtccgtccaggctcacccacagtagtgatgc

SEQ ID NO: 287653 - DNA, 120 bp, Artificial Sequence
  ENSG00000130717_17 (sequence is synthesized)
agacgtgacgtgggggaagggggctgagccctgtggctgggttctgacaactgtaacggttttgtcgagcttaggcccctttggagggagaatcaataaataacaaacaccaactacaaa

SEQ ID NO: 287654 - DNA, 120 bp, Artificial Sequence
  ENSG00000130717_18 (sequence is synthesized)
cttggatcatggcctctcacacctggctgatgactgagtctgtgtcccccatttgccgatgacaccagcacctctgagcaccccagggccgcccctcctgctgttgcatctgtttctgag

SEQ ID NO: 287655 - DNA, 120 bp, Artificial Sequence
  ENSG00000130717_19 (sequence is synthesized)
ccgagatggcttcggcgggaggcgaagactgcgagagccccgcgccggaggccgaccgtccgcaccagcggcccttcctgatagggtcgaccgtgtgtgagaagatcatggagttgctgg

SEQ ID NO: 287656 - DNA, 120 bp, Artificial Sequence
  ENSG00000130717_20 (sequence is synthesized)
cccgatgcgcgggagcggaggccgagatggcttcggcgggaggcgaagactgcgagagccccgcgccggaggccgaccgtccgcaccagcggcccttcctgataggggacgagcggttcc

SEQ ID NO: 287657 - DNA, 120 bp, Artificial Sequence
  ENSG00000130717_21 (sequence is synthesized)
tttcccctttcacaaggacacatgggacccagtactgtgagagggcttagtgctgggtgacagtgatctgattgaaaaaaaggagaagaatttggctcattatggccacataccctggga

SEQ ID NO: 287658 - DNA, 120 bp, Artificial Sequence
  ENSG00000130720_0 (sequence is synthesized)
gccctcggggcccgccccgcgcatggtgacttgtgtgagtccggtccgggaggaagtttgtgcagaggcgccgccggggggctctcaggcccctccgggagccagcaggagccgggccgc

SEQ ID NO: 287659 - DNA, 120 bp, Artificial Sequence
  ENSG00000130720_1 (sequence is synthesized)
ccgcggctgtttgctgccctccggccggccgcgttatctgggggccagttcggcctcctttccctaggtcttttcggaggcggagtttagtatccaagtccgcgggtgtgagcgcgcgcg

SEQ ID NO: 287660 - DNA, 120 bp, Artificial Sequence
  ENSG00000130720_2 (sequence is synthesized)
tgtgtgtgagtgtgtcgggggaggccgaggggagcaataaaaagcaaagagagtccgagaccagaaaagatgcggagattgagaaggagggaggagggacgagggaggagagagaggagc

SEQ ID NO: 287661 - DNA, 120 bp, Artificial Sequence
  ENSG00000130720_3 (sequence is synthesized)
gagaaggagggaggagggacgagggaggagagagaggagcgcgccggggaggcgccggagccgggagcggggacggcgcgcagcgcgagcggcgggcgttgggctggcggctttcgcgct

SEQ ID NO: 287662 - DNA, 80 bp, Artificial Sequence
  ENSG00000130720_4 (sequence is synthesized)
cacagaggcggggacccggcggacagagcgcgccccgcgcccgcgcccgcgcccaccccgtctcctttgcgctccgcagc

SEQ ID NO: 287663 - DNA, 120 bp, Artificial Sequence
  ENSG00000130720_5 (sequence is synthesized)
ggcgcgcctcgcccggcgcccccgccagtcctgccggaagatggtcaacgaccggtggaagaccatgggcggcgctgcccaacttgaggaccggccgcgcgacaagccgcagcggccgag

SEQ ID NO: 287664 - DNA, 120 bp, Artificial Sequence
  ENSG00000130720_6 (sequence is synthesized)
ctgcggctacgtgctgtgcaccgtgctgctggccctggctgtgctgctggctgtagctgtcaccggtgccgtgctcttcctgaaccacgcccacgcgccgggcacggcgcccccacctgt

SEQ ID NO: 287665 - DNA, 120 bp, Artificial Sequence
  ENSG00000130720_7 (sequence is synthesized)
cgtcagcactggggctgccagcgccaacagcgccctggtcactgtggaaagggcggacagctcgcacctcagcatcctcattgacccgcgctgccccgacctcaccgacagcttcgcacg

SEQ ID NO: 287666 - DNA, 120 bp, Artificial Sequence
  ENSG00000130720_8 (sequence is synthesized)
cctggagagcgcccaggcctcggtgctgcaggcgctgacagagcaccaggcccagccacggctggtgggcgaccaggagcaggagctgctggacacgctggccgaccagctgccccggct

SEQ ID NO: 287667 - DNA, 120 bp, Artificial Sequence
  ENSG00000130720_9 (sequence is synthesized)
gctggcccgagcctcagagctgcagacggagtgcatggggctgcggaaggggcatggcacgctgggccagggcctcagcgccctgcagagtgagcagggccgcctcatccagcttctctc

SEQ ID NO: 287668 - DNA, 120 bp, Artificial Sequence
  ENSG00000130720_10 (sequence is synthesized)
tgagagccagggccacatggctcacctggtgaactccgtcagcgacatcctggatgccctgcagagggaccgggggctgggccggccccgcaacaaggccgaccttcagagagcgcctgc

SEQ ID NO: 287669 - DNA, 120 bp, Artificial Sequence
  ENSG00000130720_11 (sequence is synthesized)
ccggggaacccggccccggggctgtgccactggctcccggccccgagactgtctggacgtcctcctaagcggacagcaggacgatggcgtctactctgtctttcccacccactacccggc

SEQ ID NO: 287670 - DNA, 120 bp, Artificial Sequence
  ENSG00000130720_12 (sequence is synthesized)
cggcttccaggtgtactgtgacatgcgcacggacggcggcggctggacggtgtttcagcgccgggaggacggctccgtgaacttcttccggggctgggatgcgtaccgagacggctttgg

SEQ ID NO: 287671 - DNA, 120 bp, Artificial Sequence
  ENSG00000130720_13 (sequence is synthesized)
caggctcaccggggagcactggctagggctcaagaggatccacgccctgaccacacaggctgcctacgagctgcacgtggacctggaggactttgagaatggcacggcctatgcccgcta

SEQ ID NO: 287672 - DNA, 120 bp, Artificial Sequence
  ENSG00000130720_14 (sequence is synthesized)
cgggagcttcggcgtgggcttgttctccgtggaccctgaggaagacgggtacccgctcaccgtggctgactattccggcactgcaggcgactccctcctgaagcacagcggcatgaggtt

SEQ ID NO: 287673 - DNA, 120 bp, Artificial Sequence
  ENSG00000130720_15 (sequence is synthesized)
tctaccgcggtgcctggtggtaccgcaactgccacacgtccaacctcaatgggcagtacctgcgcggtgcgcacgcctcctatgccgacggcgtggagtggtcctcctggaccggctggc

SEQ ID NO: 287674 - DNA, 120 bp, Artificial Sequence
  ENSG00000130720_16 (sequence is synthesized)
agtactcactcaagttctctgagatgaagatccggccggtccgggaggaccgctagactggtgcaccttgtccttggccctgctggtccctgtcgccccatccccgaccccacctcactc

SEQ ID NO: 287675 - DNA, 120 bp, Artificial Sequence
  ENSG00000130720_17 (sequence is synthesized)
tttcgtgaatgttctccacccacctgtgcctggcggacccactctccagtagggaggggccgggccatccctgacacgaagctccctgggccggtgaagtcacacatcgccttctcgccg

SEQ ID NO: 287676 - DNA, 120 bp, Artificial Sequence
  ENSG00000130720_18 (sequence is synthesized)
tccccaccccctccatttggcagctcactgatctcttgcctctgctgatgggggctggcaaacttgacgaccccaactcctgcctgcccccactgtgactccggtgctgtttgccgtccc

SEQ ID NO: 287677 - DNA, 120 bp, Artificial Sequence
  ENSG00000130720_19 (sequence is synthesized)
ctggccaggatggtggagtctgccccaggcaccctctgccctgcccggccaaatacccggcattatggggacagagagcagggggcagacagcacccctggagtcctcctagcagatcgt

SEQ ID NO: 287678 - DNA, 120 bp, Artificial Sequence
  ENSG00000130720_20 (sequence is synthesized)
ggggaacgtcaggtctctctgaggtcaggtctgaggccagtatcctccagccctcccaatgccaacccccaccccgtttccctggtgcccagagaacccacctctcccccaagggcctca

SEQ ID NO: 287679 - DNA, 120 bp, Artificial Sequence
  ENSG00000130720_21 (sequence is synthesized)
gcctggctgtgggctgggtggccccatcctaccaggccctgaggtcaggatggggagctgctgcctttggggacccacgctccaaggctgagaccagttccctggaggccacccaccctg

SEQ ID NO: 287680 - DNA, 120 bp, Artificial Sequence
  ENSG00000130720_22 (sequence is synthesized)
tgccccggcaggcctggggtctgcagtcctcttacctgctgtgcccacctgctctctgtctcaaatgaggcccaacccatcccccacccagctcccggccgtcctcctacctggggcagc

SEQ ID NO: 287681 - DNA, 120 bp, Artificial Sequence
  ENSG00000130720_23 (sequence is synthesized)
tggggctgccatcccatttctcctgcctctggaaggtgggtggggccctgcaccgtggggctggactgcgctaatgggaagctcttggttttctgggctggggcctaggcagggctggga

SEQ ID NO: 287682 - DNA, 120 bp, Artificial Sequence
  ENSG00000130720_24 (sequence is synthesized)
tgaggcttgtacaacccccaccaccaatttcccagggactccagggtcctgaggcctcccaggagggccttgggggtgatgaccccttccctgaggtggctgtctccatgaggaggccaa

SEQ ID NO: 287683 - DNA, 120 bp, Artificial Sequence
  ENSG00000130720_25 (sequence is synthesized)
cccttgccattgaccgtggccacctggacccaggccaggcccggcccggcgagtggtcaagggacagggaccacctcaccgggcaaatggggtcggggggactggggcaccagaccaggc

SEQ ID NO: 287684 - DNA, 120 bp, Artificial Sequence
  ENSG00000130720_26 (sequence is synthesized)
accacctggacactttcttgttgaatcctcccaacacccagcacgctgtcatccccactccttgtgtgcacacatgcagaggtgagacccgcaggctcccaggaccagcagccacaaggg

SEQ ID NO: 287685 - DNA, 120 bp, Artificial Sequence
  ENSG00000130720_27 (sequence is synthesized)
cagggctggagccgggtcctcagctgtctgctcagcagccctggacccgcgtgcgttacgtcaggcccagatgcagggcggcttttccaaggcctcctgatggggggcctccgaaagggc

SEQ ID NO: 287686 - DNA, 120 bp, Artificial Sequence
  ENSG00000130720_28 (sequence is synthesized)
tggagtcagccttggggagctgcctagcagcctctcctcgggcaggaggggaggtggcttcctccaaaggacacccgatggcaggtgcctagggggtgtggggttccgttctcccttccc

SEQ ID NO: 287687 - DNA, 120 bp, Artificial Sequence
  ENSG00000130720_29 (sequence is synthesized)
ctcccactgaagtttgtgcttaaaaaacaataaatttgacttggcaccactgggggttggtgggagaggccgtgtgacctggctctctgtcccagtgccaccaggtcatccacatgcgca

SEQ ID NO: 287688 - DNA, 120 bp, Artificial Sequence
  ENSG00000130720_30 (sequence is synthesized)
tttgaagcttcagacaagaggcaaggcctttcctgtggccactgtcagaagaaagagagaacactgcttgccctggttcccttgggcctgccctctcctgggccagccttctctcctccc

SEQ ID NO: 287689 - DNA, 120 bp, Artificial Sequence
  ENSG00000130720_31 (sequence is synthesized)
gggcgctaccctgtgccaggcacctggtcctgaacctgaccccctgaatctcctctgcatccttccctttagccagggccctgcatacagtaggggatcaataaagattcatctcctgca

SEQ ID NO: 287690 - DNA, 120 bp, Artificial Sequence
  ENSG00000130723_0 (sequence is synthesized)
gcagatcgggagcggtgccgagaaaaatttccttactagatgacatttcatcgcaatgtccgatcgtttggggcaaattaccaagggcaaggatgggaaaagcaagtactcgactctcag

SEQ ID NO: 287691 - DNA, 120 bp, Artificial Sequence
  ENSG00000130723_1 (sequence is synthesized)
cctgtttgataagtataaaggaaaatcagtagacgcgattagatcctcagttattcctagacatggcttacagagtcttgggaaagttgctgcagcccggcgcatgccaccgcctgcaaa

SEQ ID NO: 287692 - DNA, 120 bp, Artificial Sequence
  ENSG00000130723_2 (sequence is synthesized)
cctgccaagcttgaagtctgaaaacaaaggaaacgaccccaacatcgtgatagtacccaaggacgggacgggatgggcaaacaagcaggatcagcaagacccaaagagttccagtgcgac

SEQ ID NO: 287693 - DNA, 120 bp, Artificial Sequence
  ENSG00000130723_3 (sequence is synthesized)
ggcctctcagccgccggagtcgctgccgcagccgggtttgcagaaatctgtctccaatttgcagaaaccgacacagtcaatcagtcaggagaatacaaattcagtgccaggtggaccaaa

SEQ ID NO: 287694 - DNA, 120 bp, Artificial Sequence
  ENSG00000130723_4 (sequence is synthesized)
gtcatgggcacagctgaatggaaagccagtaggacacgaaggtggtttaaggggctcaagccgactgttatccttctctcccgaggaatttccgacgctgaaagcagctggagggcagga

SEQ ID NO: 287695 - DNA, 120 bp, Artificial Sequence
  ENSG00000130723_5 (sequence is synthesized)
caaggctggcaaagaaaagggcgtcttagatctgtcgtatgggccaggaccaagcctccgccctcagaatgtgacaagctggagggagggcggtgggcgacacataatttctgccacgtc

SEQ ID NO: 287696 - DNA, 120 bp, Artificial Sequence
  ENSG00000130723_6 (sequence is synthesized)
tctgagcacctccccaactgagctgggcagcaggaactcgagtacgggagatggagccccctcctcggcatgtaccagcgattctaaggacccctctctccgcccggctcagcctgtccg

SEQ ID NO: 287697 - DNA, 120 bp, Artificial Sequence
  ENSG00000130723_7 (sequence is synthesized)
aaaaggggcttcacagttcatgggaaatgtataccacccacctacataccatgacatgcttcctgcttttatgtgttcgccgaagtcatcagaaaaccagggtacagtggaacgaggctc

SEQ ID NO: 287698 - DNA, 120 bp, Artificial Sequence
  ENSG00000130723_8 (sequence is synthesized)
ttttccccttcctcagctccgccttgaacctcgagttccttttagacagttccagatgaatgaccaagacggaaaagaaaacaggctgggattgtctcgcccactccgcccactaaggca

SEQ ID NO: 287699 - DNA, 120 bp, Artificial Sequence
  ENSG00000130723_9 (sequence is synthesized)
gctggtggagcgggcaccacggcccaccattatcaatgcggaaaacctgaagggccttgacgatctggacgccgatgccgatgatggctgggcaggcctccatgaagaagtggactattc

SEQ ID NO: 287700 - DNA, 120 bp, Artificial Sequence
  ENSG00000130723_10 (sequence is synthesized)
tgagaaactgaagttcagtgatgatgaagaggaggaagaagttgtgaaggacggcaggccaaagtggaacagttgggaccctaggaggcagcggcagttgtcaatgagctctgcagacag

SEQ ID NO: 287701 - DNA, 120 bp, Artificial Sequence
  ENSG00000130723_11 (sequence is synthesized)
tgcggacgctaagcggactcgagaggaagggaaggactgggctgaagcagtgggtgcgtcccgtgtggtccgaaaggcgccagaccctcagccaccgcccaggaagcttcatggctgggc

SEQ ID NO: 287702 - DNA, 120 bp, Artificial Sequence
  ENSG00000130723_12 (sequence is synthesized)
accaggccctgactaccagaagtcatcaatgggcagcatgttccggcaacagtccatcgaggacaaggaggacaagcccccaccaaggcagaagttcattcagtcagagatgtccgaggc

SEQ ID NO: 287703 - DNA, 120 bp, Artificial Sequence
  ENSG00000130723_13 (sequence is synthesized)
ggtggagcgagcccgaaagcgccgggaagaagaggagcgccgagcccgggaggagaggctggccgcctgtgctgccaaactcaagcagctggaccagaagtgtaagcaggcacgaaaggc

SEQ ID NO: 287704 - DNA, 120 bp, Artificial Sequence
  ENSG00000130723_14 (sequence is synthesized)
aggtgaggcccggaagcaggcagagaaggaagtgccctggtctccaagtgctgagaaggcatctccccaggaaaacggccctgctgtccacaaaggctccccagaattccctgcccaaga

SEQ ID NO: 287705 - DNA, 120 bp, Artificial Sequence
  ENSG00000130723_15 (sequence is synthesized)
gacccccaccacattcccagaagaggcacccacagtgtccccagcagtggcacagagcaacagcagtgaggaagaggccagagaggctgggtcccctgcacaggagttcaagtatcagaa

SEQ ID NO: 287706 - DNA, 120 bp, Artificial Sequence
  ENSG00000130723_16 (sequence is synthesized)
gtcccttcctccccgattccagcgccagcagcagcaacaacagcaggagcagctgtacaagatgcagcactggcagccggtgtaccccccgccgtcccacccccagcgcaccttttaccc

SEQ ID NO: 287707 - DNA, 120 bp, Artificial Sequence
  ENSG00000130723_17 (sequence is synthesized)
acaccacccccagatgttgggcttcgatcccaggtggatgatgatgccttcctacatggacccacgtatcacgcccactcggaccccggtggacttctacccctccgccctgcatccctc

SEQ ID NO: 287708 - DNA, 120 bp, Artificial Sequence
  ENSG00000130723_18 (sequence is synthesized)
aggactgatgaagcccatgatgccccaggagtccctcaatgggacaggctgtcgctctgaggatcagaactgtgtgcccccactccaagaaagaaaagtgacccccatcgactcaccccc

SEQ ID NO: 287709 - DNA, 120 bp, Artificial Sequence
  ENSG00000130723_19 (sequence is synthesized)
tgtgtggagcccagagggctacatggcactgcagagcaagggctacccgctcccgcacccgaagtcgagtgacaccttggctatggacatgcgtgtcaggaatgaaagctctttctctgc

SEQ ID NO: 287710 - DNA, 120 bp, Artificial Sequence
  ENSG00000130723_20 (sequence is synthesized)
ctcactcggaagggcagggggcgtaagtgctcagcgcgatctctttgaggagagaggggaggagtacttgagtgcttttgacaagaaggcccaagcagactttgacagctgtatctcttc

SEQ ID NO: 287711 - DNA, 120 bp, Artificial Sequence
  ENSG00000130723_21 (sequence is synthesized)
tcaaagaataggccaggagcttttgtttccaccccaagaaaatgttcaggatgcaggtgctcctgggggtcacacccaaaacctcaggtgttccccattggagcctgactttgtcccaga

SEQ ID NO: 287712 - DNA, 120 bp, Artificial Sequence
  ENSG00000130723_22 (sequence is synthesized)
tgagaaaaagccagagtgtggcagttgggatgttagccaccagccagagaccgctgacacagcccatggtgttgagcgggagacaccccgggaggggacggcctttaacatctcctcctg

SEQ ID NO: 287713 - DNA, 120 bp, Artificial Sequence
  ENSG00000130723_23 (sequence is synthesized)
ggacaagaacgggagccccaacaaacagccatcctcggagcctgaatggactcccgagccccggagctccagcagccagcacccggagcagacgggcaggacccggaggtcgggacccat

SEQ ID NO: 287714 - DNA, 120 bp, Artificial Sequence
  ENSG00000130723_24 (sequence is synthesized)
caagaaaccagtcctgaaagccctcaaggtggaagacaaggagaaggagcttgagaagattaagcaggagctaggggaggagagtacccggctggccaaggagaaggagcagagccccac

SEQ ID NO: 287715 - DNA, 120 bp, Artificial Sequence
  ENSG00000130723_25 (sequence is synthesized)
ggcagaaaaggatgaggacgaagagaacgatgcctctctggccaactcctccaccaccactttggaggacaaaggccctggccatgccacttttggccgcgaggccaccaaatttgaaga

SEQ ID NO: 287716 - DNA, 120 bp, Artificial Sequence
  ENSG00000130723_26 (sequence is synthesized)
ggaggagaaacctgacaaggcctgggaagccagacccccacgagagtccagcgatgttccccccatgaagagaaataactggatctttattgatgaggagcaagcctttggggtcagagg

SEQ ID NO: 287717 - DNA, 120 bp, Artificial Sequence
  ENSG00000130723_27 (sequence is synthesized)
acaggcccggggccggggccgtggtttcagagagttcacttttcgtggtcggcctgctggcggaaatgggagcggcctctgtggtgggggggtcctgggggcccgcagcatctactgcag

SEQ ID NO: 287718 - DNA, 120 bp, Artificial Sequence
  ENSG00000130723_28 (sequence is synthesized)
cagtcagcgcagcggccgtggccggggcctgcgagagtttgcgcggccagaggactgccccagagccaagccccgacggagagttgccagtgagacccatagcgagggctcagagtatga

SEQ ID NO: 287719 - DNA, 120 bp, Artificial Sequence
  ENSG00000130723_29 (sequence is synthesized)
agaacttcccaagcgccgccggcagaggggctccgagaacgggaatgaaggctcgctcctggagagggaggagagcaccttgaagaagggcgactgcagagattcttggcggtccaacaa

SEQ ID NO: 287720 - DNA, 120 bp, Artificial Sequence
  ENSG00000130723_30 (sequence is synthesized)
ggggtgctctgaggaccacagcggtctagatgccaagagccgaggccctcgggcctttgggcgagccctccctccccggctgagcaattgcgggtatggacggagaaccttcgtctccaa

SEQ ID NO: 287721 - DNA, 120 bp, Artificial Sequence
  ENSG00000130723_31 (sequence is synthesized)
agagtcaccccactggcagagcaaaagtccaggcagctcttggcaggaatatggcccttccgacacatgcggatcccggcgacctacagacagagactatgtcccagattcctacagaca

SEQ ID NO: 287722 - DNA, 120 bp, Artificial Sequence
  ENSG00000130723_32 (sequence is synthesized)
ccctgacgcatttggtggccggggctttgaggacagccgcgcggaggacaagagatccttcttccaagatgaacacgtggcagattctgaaaatgcagagaaccggcccttcaggagaag

SEQ ID NO: 287723 - DNA, 120 bp, Artificial Sequence
  ENSG00000130723_33 (sequence is synthesized)
gcgccccccacgccaagataagccccctcgattccggcgcctccggcaagagcgggagtccctgggcctgtggggacccgaggaggagccccacctgctggcaggtcagtggccaggcag

SEQ ID NO: 287724 - DNA, 120 bp, Artificial Sequence
  ENSG00000130723_34 (sequence is synthesized)
gcccaaactgtgttctggggacaagagtggcactgtgggccgcaggtcccctgagctctcctaccagaactcctccgatcacgccaatgaggagtgggagacggcctccgaaagcagcga

SEQ ID NO: 287725 - DNA, 120 bp, Artificial Sequence
  ENSG00000130723_35 (sequence is synthesized)
cttcagcgagcggcgggagcggcgggaaggccctgggtccgagcccgactcccaggtggatggtggcctgtcgggggctagtttgggtgagaagaaggagctggccaagaggagcttctc

SEQ ID NO: 287726 - DNA, 120 bp, Artificial Sequence
  ENSG00000130723_36 (sequence is synthesized)
cagtcagagacccgtggttgacagacagagccgaaagctggagccgggagggtttggggagaagcccgttaggccaggtggtggtgacacctcccctcgctatgagagccaacagaatgg

SEQ ID NO: 287727 - DNA, 120 bp, Artificial Sequence
  ENSG00000130723_37 (sequence is synthesized)
gacgcctttgaaagtgaaaagatccccagacgaggccttgcctggaggtcttagtggctgcagcagtgggagtggccactccccctatgccctggagcgggcagcccatgccagtgctga

SEQ ID NO: 287728 - DNA, 120 bp, Artificial Sequence
  ENSG00000130723_38 (sequence is synthesized)
ccttcccgaagcctccagtaaaaaggcagagaaggaggccaagttggctgctccgagggcaggtgaacagggagaggccatgaaacagtttgacctgaactatggaagtgccatcattga

SEQ ID NO: 287729 - DNA, 120 bp, Artificial Sequence
  ENSG00000130723_39 (sequence is synthesized)
aaattgcgggtccagccccggggaggagagtgaggtgggttctatggtgggcgaaggcttcatcgaagtcctgaccaagaagcagcgccgcctgctggaggaagagagaagaaagaagga

SEQ ID NO: 287730 - DNA, 120 bp, Artificial Sequence
  ENSG00000130723_40 (sequence is synthesized)
gcaggccgtgcaggtgcctgtcaaaggtcgaggcctttcctcccgtattcctcctcgatttgcaaaaaagcagaacaacttatgtctggagcaaggtgacgtgaccgtgcctggcagcag

SEQ ID NO: 287731 - DNA, 120 bp, Artificial Sequence
  ENSG00000130723_41 (sequence is synthesized)
cctgggcactgagatctgggagagcagcagccaggctctccctgtgcaggccccagccaacgactcctggaggaaagctgtcactgccttcagcagcaccgagactggctctgcggagca

SEQ ID NO: 287732 - DNA, 120 bp, Artificial Sequence
  ENSG00000130723_42 (sequence is synthesized)
gggttttaagagcagccagggagatagtggcgttgacttgagtgccgagtctcgggagtcgtctgcgacctcctcgcagcgcagctccccatatgggactctgaagccagaggagatgag

SEQ ID NO: 287733 - DNA, 120 bp, Artificial Sequence
  ENSG00000130723_43 (sequence is synthesized)
cgggcccggcctggcggaacccaaggccgacagccacaaggagcaggctccaaagccatctgagcagaaggattcagaacaaggctctggacagagcaaggagcacagaccaggacccat

SEQ ID NO: 287734 - DNA, 120 bp, Artificial Sequence
  ENSG00000130723_44 (sequence is synthesized)
cggcaacgagcgttctctgaaaaacagaaagggctcggagggggccgagcggctgcaaggggctgtcgtcccgcctgttaacggggtggagattcacgtggactccgtgctgcctgtgcc

SEQ ID NO: 287735 - DNA, 120 bp, Artificial Sequence
  ENSG00000130723_45 (sequence is synthesized)
acccattgaatttggagtcagtccaaaagactccgatttcagcttgccacctggttctgcctctggtcctactgggagtccagttgttaaacttcaggatgccttggccagtaatgcagg

SEQ ID NO: 287736 - DNA, 120 bp, Artificial Sequence
  ENSG00000130723_46 (sequence is synthesized)
taacacagagtatccccatcctgcggcgggaccatcacatccagagggccatcggtctctccccaatgtccttccccaccgccgaccttactctgaagatggagtctgcgcgcaaggctt

SEQ ID NO: 287737 - DNA, 120 bp, Artificial Sequence
  ENSG00000130723_47 (sequence is synthesized)
gggaaaactcccccagtttgccggagcagagctctccaggcggcgctggctcaggcatccagcctccatcctctgtgggtgcctccagcggggtcaactacagctccttcggtggagtgt

SEQ ID NO: 287738 - DNA, 120 bp, Artificial Sequence
  ENSG00000130723_48 (sequence is synthesized)
ccatgccacccatgcctgtggcctctgtagcaccttctgcttctatgccaggcagccacctcccgcccctgtacctggatggccatgtgtttgcaagtcagccccggctggttcctcaaa

SEQ ID NO: 287739 - DNA, 120 bp, Artificial Sequence
  ENSG00000130723_49 (sequence is synthesized)
cgatacctcagcagcagagttaccaacaggccgccgctgcccagcagatcccgatctcccttcacacatctctgcaggcacaagctcagcttggactgaggggtgggcttcctgtgtccc

SEQ ID NO: 287740 - DNA, 120 bp, Artificial Sequence
  ENSG00000130723_50 (sequence is synthesized)
agtcccaggagatcttcagctccttgcagcccttcagatctcaggtgtacatgcaccccagcctgtcaccgcccagcaccatgatcctctctgggggcacagccttgaagcctccatact

SEQ ID NO: 287741 - DNA, 120 bp, Artificial Sequence
  ENSG00000130723_51 (sequence is synthesized)
cggcgttcccaggcatgcagcccttggagatggtgaagccgcagtctggctcaccctaccagcccatgagcgggaaccaagccctggtctacgagggccagctcagccaggctgctggcc

SEQ ID NO: 287742 - DNA, 120 bp, Artificial Sequence
  ENSG00000130723_52 (sequence is synthesized)
tgggtgcctcccagatgttggactcccagctcccacagctgaccatgccactgcctcggtacggctccgggcagcagccactgatcctgccccagtctattcagctgccacctgggcaga

SEQ ID NO: 287743 - DNA, 120 bp, Artificial Sequence
  ENSG00000130723_53 (sequence is synthesized)
gcctctccgttggggccccccgaaggattcctccgcccgggtcccagccgccagtcctgaacaccagcagagagccctctcagatggagatgaaaggcttccactttgccgacagtaaac

SEQ ID NO: 287744 - DNA, 120 bp, Artificial Sequence
  ENSG00000130723_54 (sequence is synthesized)
agaatgtcccttcaggaggccccgtgccatcgccacagacctacaggcctagctctgctagccccagtgggaagccctctggatcagcagttaacatgggctctgtgcagggacactacg

SEQ ID NO: 287745 - DNA, 120 bp, Artificial Sequence
  ENSG00000130723_55 (sequence is synthesized)
tgcaacaggcaaaacaacgagtggatgagaaacccagcctgggagccgtgaagctgcaggaggccccctcggctgcctcccagatgaagcgaaccggagcgatcaagcctcgggctgtca

SEQ ID NO: 287746 - DNA, 120 bp, Artificial Sequence
  ENSG00000130723_56 (sequence is synthesized)
aagtggaggagagtaaggcctgacagtgcctggctgccacctcgcctctccctactgaggacggtgccgccatgcggcctcgacacagccgacactcgggagcctcaccagatccaccgt

SEQ ID NO: 287747 - DNA, 120 bp, Artificial Sequence
  ENSG00000130723_57 (sequence is synthesized)
ccaaatgcgtggcccagactgagagacctccctcctctccactcccgaaagctccgttgtcaaccagcttgcacccgtggatatatggcattgacccgcttgctttgatacgaaacaaaa

SEQ ID NO: 287748 - DNA, 120 bp, Artificial Sequence
  ENSG00000130723_58 (sequence is synthesized)
aagcagacgactccttcatcccatctgctcctaccgtgactgtggagtgacgcctcctgtgcagtgcagatttgccctccctgcctcctccctgtcctgccgcgcagccagggcgccttc

SEQ ID NO: 287749 - DNA, 120 bp, Artificial Sequence
  ENSG00000130723_59 (sequence is synthesized)
tcagcagtgcttccggcccagccgcccatccctaggcacagtgatttggcagcagggtcattttactttgaggctttttgttttaaaatgtagccaaggtttttacaaaggggaaaggaa

SEQ ID NO: 287750 - DNA, 120 bp, Artificial Sequence
  ENSG00000130723_60 (sequence is synthesized)
aagaaaacaaaaacgcaagctccatgtgtatagctgaacttttatatgtttcttgccagcccctccgctcccttccatctctagcctctgtcctgtttagtttgatacgtcactgcagta

SEQ ID NO: 287751 - DNA, 120 bp, Artificial Sequence
  ENSG00000130723_61 (sequence is synthesized)
ccttaagaggtgactcttaagaatgcatcccctcctgattcctcagctggttcacccttgaggttatttgcaaaaagaaaaggaggttcttgagggcaccgattgcgagcattctggtgc

SEQ ID NO: 287752 - DNA, 120 bp, Artificial Sequence
  ENSG00000130723_62 (sequence is synthesized)
ctggctccccgcctgggaagcgatggggtgctcagagcagcaggcaggttgggggagggggggggtcatagttgggttccagctcctggcttgatgagcccagggcgcttacaggcagcc

SEQ ID NO: 287753 - DNA, 120 bp, Artificial Sequence
  ENSG00000130723_63 (sequence is synthesized)
catgaagttgatgacagttttagcatgagaatcacacagggtccctgtcctgggctcctctaaagccagtggatgtgctgggcaccagagacaaatcatggagatggctgctggtggctc

SEQ ID NO: 287754 - DNA, 120 bp, Artificial Sequence
  ENSG00000130723_64 (sequence is synthesized)
ccaggttggcccagatggggtgagctgacataccacaggcccatcccaggccccgtgggctctgcttctggggctccataccctgccctgcaggggtgctgtgtttttcacacatttctt

SEQ ID NO: 287755 - DNA, 120 bp, Artificial Sequence
  ENSG00000130723_65 (sequence is synthesized)
tccctgaagccttctgtaacctgtcattttccttccttcctcttccggagcctgctgctttctctggacctgtctccacctcccacacagctcatcgtgaacaccacttggtgatggagg

SEQ ID NO: 287756 - DNA, 120 bp, Artificial Sequence
  ENSG00000130723_66 (sequence is synthesized)
gagtggacccgtgtgtggtccccaagtgaggccactgggagtttgtccttttcctcctttgcttcactcccagcagcagacccaggttgtcaggacaggagggcctgagctaagcagtag

SEQ ID NO: 287757 - DNA, 120 bp, Artificial Sequence
  ENSG00000130723_67 (sequence is synthesized)
gcatcagtctcgtttgtcttcagacggcgggggcaggtccagggtgaggctgggtggagggctgaccaaggtccaaagggcctgcgcagcctccgggagggcagcttctccagccagagg

SEQ ID NO: 287758 - DNA, 120 bp, Artificial Sequence
  ENSG00000130723_68 (sequence is synthesized)
cttgtgtgagccatcgtgtgctgggcttgtttttaagtaagaaacaaggaaatcactccagattctgtcattccaaggaaagggaaggggacagttcaggtttctcagctgttcttaggg

SEQ ID NO: 287759 - DNA, 120 bp, Artificial Sequence
  ENSG00000130723_69 (sequence is synthesized)
gtcactgagcgtctacctcctcctccagaggaggctggctcagaacacctagaggagggggccggggatgcaccccccaccagaggctgccttcagcgtctcacgggtgcaggacagcgc

SEQ ID NO: 287760 - DNA, 120 bp, Artificial Sequence
  ENSG00000130723_70 (sequence is synthesized)
tcaggcttgggctctaagctctgtgtctagtgtagaacatggggaaggagcatcttaggaactgctgaagtaacttcttactgctctcacaattctaaggaagcgggagaacggcctcct

SEQ ID NO: 287761 - DNA, 120 bp, Artificial Sequence
  ENSG00000130723_71 (sequence is synthesized)
accaacagcgcccaccccagagctgcctgggaaagggcagttttactgaaaggtgctttactgttcacctgcatctttcagcagctcccctcctgccctcacctggtcttttccctcttt

SEQ ID NO: 287762 - DNA, 120 bp, Artificial Sequence
  ENSG00000130723_72 (sequence is synthesized)
atcccaagcctttatgcttgagtcccttccccaggggctgcccacccgacagttccaggcattccctacctgagcttcttgtctgcttttccttctcccactgcaagcggctgcttgtgg

SEQ ID NO: 287763 - DNA, 120 bp, Artificial Sequence
  ENSG00000130723_73 (sequence is synthesized)
ggcctgggatgagccctctctgtccccaccggccctccttgccaagccattcctgggtgagttcaggcctgcgggagccacacattcatctccacctggacacttgagccgcatggccag

SEQ ID NO: 287764 - DNA, 120 bp, Artificial Sequence
  ENSG00000130723_74 (sequence is synthesized)
acccctcccacctgatgcggtggtgcgtgtgatttgtcaaaagaaagccttctggatgctgttaagatgtacccttcaggtgaacctggtatcagacccacagtacttgctgtttgagaa

SEQ ID NO: 287765 - DNA, 120 bp, Artificial Sequence
  ENSG00000130723_75 (sequence is synthesized)
aaaataaaaacaaaaaggtcacctgttctccagcccttttctcttacctggtatttccttcctttctcctcccccaccccaaataaaaaaacaaaaaacactagaatttatttatatgta

SEQ ID NO: 287766 - DNA, 120 bp, Artificial Sequence
  ENSG00000130723_76 (sequence is synthesized)
ttgatgttgtaggtctaggtgaaaaaaaaagaagtaaatgtttcactgctctatttatatataatgtctgaattaattctgtgcaggaaaggccaggaaattgcatgtgaagttcggtgc

SEQ ID NO: 287767 - DNA, 120 bp, Artificial Sequence
  ENSG00000130723_77 (sequence is synthesized)
agtcaccacctgtgtgtgacctgagctgcagtctcttcgctgagatgcaggttttaaatgagacttggggggctgagggcaggcctcaggcctcccagcgccccaacccctccttggtct

SEQ ID NO: 287768 - DNA, 120 bp, Artificial Sequence
  ENSG00000130723_78 (sequence is synthesized)
aatgaaatgcagttcttagtgcagagatgttttaaggtgcaatatatctcttcctttcccgtggttttagagccaagctcaaggtagtaggacgtagggtcttattttgttttcaaaccc

SEQ ID NO: 287769 - DNA, 120 bp, Artificial Sequence
  ENSG00000130723_79 (sequence is synthesized)
ccatcctcagagcgcagatacatgcagaggcttctgccaggataccacggggccttagtgggaacaggtggagaccagcacttccctttcctgctgctgaggtagggattggggggtcag

SEQ ID NO: 287770 - DNA, 120 bp, Artificial Sequence
  ENSG00000130723_80 (sequence is synthesized)
aacccactcacttttgcctgttaaagttgccctcctgacgctggcagctctgccttggtcactggggatgcggctcgttgctcagccaccagtggccttgcggtattgtccaccatccac

SEQ ID NO: 287771 - DNA, 120 bp, Artificial Sequence
  ENSG00000130723_81 (sequence is synthesized)
tagagtgggatgaagtccagagtgtgggtatacatctcagatgcccatctacccactggggacttcaatgccagctgcatttggtttggttttcttaactgttggcttctccccacagcg

SEQ ID NO: 287772 - DNA, 120 bp, Artificial Sequence
  ENSG00000130723_82 (sequence is synthesized)
ttttttgtttttttttaaacattcatattgttttcaaacttggaattcatagacactctggctctaggttccttaagggggaaaacaaaagatgactttatttcacattcaagaaaatca

SEQ ID NO: 287773 - DNA, 120 bp, Artificial Sequence
  ENSG00000130723_83 (sequence is synthesized)
gttcagttccaaagctgtggtccttccagccacttctagggacactggggaaccttgttaaacgttgacatcagtgctctccagccgtgctgtcaccctcctatcttctggatctgcctt

SEQ ID NO: 287774 - DNA, 120 bp, Artificial Sequence
  ENSG00000130723_84 (sequence is synthesized)
cgcgatggtcagtgacagcttctggaagctgagcacacacaggtgcacagccatgctgtggtctggcctgctacggcagcatggcagctctggtggagccttctcccttgccatttggtt

SEQ ID NO: 287775 - DNA, 120 bp, Artificial Sequence
  ENSG00000130723_85 (sequence is synthesized)
cccctgtgccaagtagctgcaggctgcccctcaaatcttcatttgtcccttttcacttcctgcagaacaagcctgggttagagggtctgctggaaatggcctttgaagaccaaggatacc

SEQ ID NO: 287776 - DNA, 120 bp, Artificial Sequence
  ENSG00000130723_86 (sequence is synthesized)
aggatgtgtgcactctgtcgtgttctgtgatgaatgggaaacgtaggcttccagaaagccagctctcttctgaaatgtgacggacctaagcaggaagtcatccaggacaggagtggctca

SEQ ID NO: 287777 - DNA, 120 bp, Artificial Sequence
  ENSG00000130723_87 (sequence is synthesized)
gtgttggggatggacgctgtcgcccagccatgctccaccagggccaccaatgtgtagttggctggtggtcttcgggcatgtgagacctgctcttcactgtttccaccccacttggtggcc

SEQ ID NO: 287778 - DNA, 120 bp, Artificial Sequence
  ENSG00000130723_88 (sequence is synthesized)
tccaggatggtagtggcaccctcagagccccatcttcagcatgttctgaagcctcagagtggaaattcctgctaaggctctgtgtggacgcctttctcccgtgatctaaaggggacactg

SEQ ID NO: 287779 - DNA, 120 bp, Artificial Sequence
  ENSG00000130723_89 (sequence is synthesized)
tactcaagcttttgacctcatgccttgtgtagtaaaaaaggatttgggggttttgtttggttcctgagagggttgtgttttgtttttgtttccttttgtttatgttttggcctttcctct

SEQ ID NO: 287780 - DNA, 120 bp, Artificial Sequence
  ENSG00000130723_90 (sequence is synthesized)
ttgtctttccatgtagaccagatatttgaaagggcagacgatggctagaggtgtaatgtgcagcttgtttatacggtattttgggaaacttaccttggatgggaaatcgaatcgtggatt

SEQ ID NO: 287781 - DNA, 120 bp, Artificial Sequence
  ENSG00000130723_91 (sequence is synthesized)
caccaggccggtgctggcacactcaccctcgccctttccctccggttcagtacctattgtttctcctttcaaatatgtgattgtactagctctttccatatgaaagaattctccttattt

SEQ ID NO: 287782 - DNA, 80 bp, Artificial Sequence
  ENSG00000130723_92 (sequence is synthesized)
gcgccgaggctccaccgcgcagcgacgagcgagcccgggaggagggagggagcgagcgagcgagcagcccgcgccgccgc

SEQ ID NO: 287783 - DNA, 120 bp, Artificial Sequence
  ENSG00000130723_93 (sequence is synthesized)
aaacagtaagagtcttgaacgtgtgtgctgtacaaaggaatgcagagatatacgtccgatgcagctttcatcttttgggacttggcttcgccattacttctgactttcctcactcgtcct

SEQ ID NO: 287784 - DNA, 120 bp, Artificial Sequence
  ENSG00000130723_94 (sequence is synthesized)
ctccttgcccaccccgccccgtgtgcacccataaatctggtgtgcacccacagatcctatgccgctctgcatcccgagtgtcctgcagctgtgtccagtgtgtgacacactatcctggca

SEQ ID NO: 287785 - DNA, 120 bp, Artificial Sequence
  ENSG00000130723_95 (sequence is synthesized)
gtgtgcaggcccatgttggacagggccctgccgcttccttggcaccttgtatgctttcagtaagcacttgctggacaaaggcagaaagggctgaagatagacgcagcccttagcagagat

SEQ ID NO: 287786 - DNA, 120 bp, Artificial Sequence
  ENSG00000130723_96 (sequence is synthesized)
gtggatgagacacacttaacgctgttagttcccatgcctgcagccagcttagtcttgcccgttttctcaccacctactctattccagcaagaagacgtgcctctgccatcgaaggtgtga

SEQ ID NO: 287787 - DNA, 120 bp, Artificial Sequence
  ENSG00000130723_97 (sequence is synthesized)
aatcctgggcgatctctcctgtgctgcagtagaaattagagcatgtcctgctttatgcaggctttgctttagttcttctgaagtgtatgaatctgaagtgcatgtgcggtcgctctttgg

SEQ ID NO: 287788 - DNA, 120 bp, Artificial Sequence
  ENSG00000130723_98 (sequence is synthesized)
ggaccaaagtccatatgtacttaccagggatggaaaccccctggcaccaccgtgtgttttcccttggcaagatagggatgaagagccggacagggaagcagacctgatgccctccttcct

SEQ ID NO: 287789 - DNA, 120 bp, Artificial Sequence
  ENSG00000130723_99 (sequence is synthesized)
catttactccctgactagaggttccttcctggccaagccattagcttcttttggtctttagtcttgatcttagagttttgttgttaactttttaaaaattattgatgatgcaaaatttaa

SEQ ID NO: 287790 - DNA, 120 bp, Artificial Sequence
  ENSG00000130723_100 (sequence is synthesized)
acaaaaaagaaaatagctcccaaccactgatcactcaggttcaataagtaccaatgttctgccattcggtttttgtttgttttaatttaatttttttccaagagacagggtctcagctac

SEQ ID NO: 287791 - DNA, 120 bp, Artificial Sequence
  ENSG00000130724_0 (sequence is synthesized)
aatccggaaacggcggcggcggcgacaggaccgaggggccttagttggtgggcaagtcggggatcccagaaagagaagcgtgacccggaagcggaaacgggtgtccgtcccagctccggc

SEQ ID NO: 287792 - DNA, 120 bp, Artificial Sequence
  ENSG00000130724_1 (sequence is synthesized)
ctgccagtgagcttctaccatcatggacctattgttcgggcgccggaagacgccagaggagctactgcggcagaaccagagggccctgaaccgtgccatgcgggagctggaccgcgagcg

SEQ ID NO: 287793 - DNA, 120 bp, Artificial Sequence
  ENSG00000130724_2 (sequence is synthesized)
acagaaactagagacccaggagaagaaaatcattgcagacattaagaagatggccaagcaaggccagatggatgctgttcgcatcatggcaaaagacttggtgcgcacccggcgctatgt

SEQ ID NO: 287794 - DNA, 120 bp, Artificial Sequence
  ENSG00000130724_3 (sequence is synthesized)
gacactcaagtccaacaactcgatggcacaagccatgaagggtgtcaccaaggccatgggcaccatgaacagacagctgaagttgccccagatccagaagatcatgatggagtttgagcg

SEQ ID NO: 287795 - DNA, 120 bp, Artificial Sequence
  ENSG00000130724_4 (sequence is synthesized)
gcaggcagagatcatggatatgaaggaggagatgatgaatgatgccattgatgatgccatgggtgatgaggaagatgaagaggagagtgatgctgtggtgtcccaggttctggatgagct

SEQ ID NO: 287796 - DNA, 120 bp, Artificial Sequence
  ENSG00000130724_5 (sequence is synthesized)
gggacttagcctaacagatgagctgtcgaacctcccctcaactgggggctcgcttagtgtggctgctggtgggaaaaaagcagaggccgcagcctcagccctagctgatgctgatgcaga

SEQ ID NO: 287797 - DNA, 120 bp, Artificial Sequence
  ENSG00000130724_6 (sequence is synthesized)
cctggaggaacggcttaagaacctgcggagggactgagtgcccctgccactccgagataaccagtggatgcccaggatcttttaccacaacccctctgtaataaaagagatttgacacta

SEQ ID NO: 287798 - DNA, 120 bp, Artificial Sequence
  ENSG00000130724_7 (sequence is synthesized)
atcagaacccccacaattgctctgtcctcggtgcccacagtctccaaaacaccagtgcaccggcccgcgtcatcccccgctctcagtcgtatcaaggactccagggcctcacccatagtt

SEQ ID NO: 287799 - DNA, 120 bp, Artificial Sequence
  ENSG00000130724_8 (sequence is synthesized)
ctggagagggaagctgaacttgcaagccataacttcttttggggcatggcgatgaaggaggggctcgggccagcacttggataattttcaggtctacctgtccccctttatgtgtccccg

SEQ ID NO: 287800 - DNA, 120 bp, Artificial Sequence
  ENSG00000130724_9 (sequence is synthesized)
ggacaatcccagtgttctcagctgctcccttttggctcctcattcctgcctccagtctccgttagccccttcccatttggcaaggctcccgtgaccctgttctgcttcttgccctcctgg

SEQ ID NO: 287801 - DNA, 120 bp, Artificial Sequence
  ENSG00000130724_10 (sequence is synthesized)
cccgggcgggcgtgcgggcggcagcgtacgaggccttctactcgcccgggtgtccggtgcctcgcttctccctgggaccctgtcgtcaacatcgaggtctccaacaccaccttgctttgg

SEQ ID NO: 287802 - DNA, 120 bp, Artificial Sequence
  ENSG00000130724_11 (sequence is synthesized)
ggggatcacactcacactcctgtcacttccagctgaagttgccccagatccagaagatcatgatggagtttgagcggcaggcagagatcatggatatgaaggaggagatgatgaatgatg

SEQ ID NO: 287803 - DNA, 120 bp, Artificial Sequence
  ENSG00000130724_12 (sequence is synthesized)
aacaagagagaccagacaccaaacacaggtgctttcagcaaaacgagtggagtgaaaggtcagcagggcttccctagtttgagggtctggaaggctgcctccaaggaactggtatgagat

SEQ ID NO: 287804 - DNA, 120 bp, Artificial Sequence
  ENSG00000130724_13 (sequence is synthesized)
ccaaggcttgagtgatgagagtgagcctacagatctgggcagggaatgtgttaagcagacagagcagcaaatgttaaaaaagagcctcaaaaaaatgggagatgacaggtgagcttcaag

SEQ ID NO: 287805 - DNA, 120 bp, Artificial Sequence
  ENSG00000130724_14 (sequence is synthesized)
cctaacagatgagctgtcgagtgagtgctccaaatcctggaccccatttcccacccaaggcccagccacagctccaagccctccctttccctgcattactcccctccgctgcctgacccc

SEQ ID NO: 287806 - DNA, 80 bp, Artificial Sequence
  ENSG00000130725_0 (sequence is synthesized)
gagtccgaggcgctgggccaggccggagccggactacgggagccgaggcgggccgcgcggtgggcgcggagaggagcgga

SEQ ID NO: 287807 - DNA, 120 bp, Artificial Sequence
  ENSG00000130725_1 (sequence is synthesized)
cggcggcggggggccgggtggccggggtcccgggccccgcggcggcggcagcggcggcggcggcggcaggatgatcaagctgttctcgctgaagcagcagaagaaggaggaggagtcggc

SEQ ID NO: 287808 - DNA, 120 bp, Artificial Sequence
  ENSG00000130725_2 (sequence is synthesized)
tgttctcgctgaagcagcagaagaaggaggaggagtcggcgggcggcaccaagggcagcagcaagaaggcgtcggcggcgcagctgcggatccagaaggacataaacgagctgaacctgc

SEQ ID NO: 287809 - DNA, 120 bp, Artificial Sequence
  ENSG00000130725_3 (sequence is synthesized)
ccaagacgtgtgatatcagcttctcagatccagacgacctcctcaacttcaagctggtcatctgtcctgatgagggcttctacaagagtgggaagtttgtgttcagttttaaggtgggcc

SEQ ID NO: 287810 - DNA, 120 bp, Artificial Sequence
  ENSG00000130725_4 (sequence is synthesized)
ctgcctcaacatcctcagagaggactggaagccagtccttacgataaactccataatttatggcctgcagtatctcttcttggagcccaaccccgaggacccactgaacaaggaggccgc

SEQ ID NO: 287811 - DNA, 120 bp, Artificial Sequence
  ENSG00000130725_5 (sequence is synthesized)
agaggtcctgcagaacaaccggcggctgtttgagcagaacgtgcagcgctccatgcggggtggctacatcggctccacctactttgagcgctgcctgaaatagggttggcgcatacccac

SEQ ID NO: 287812 - DNA, 120 bp, Artificial Sequence
  ENSG00000130725_6 (sequence is synthesized)
ccccgccacggccacaagccctggcatcccctgcaaatatttattgggggccatgggtaggggtttggggggcggccggtgggggaatcccctgccttggccttgcctccccttcctgcc

SEQ ID NO: 287813 - DNA, 120 bp, Artificial Sequence
  ENSG00000130725_7 (sequence is synthesized)
acgtgcccctagttatttttttttttttaacaccatgtgattaaggtcggcgctgcctcccccgacccactcagcgatgggaaatgaattggcttgtctagcccccctgctgggtgcttg

SEQ ID NO: 287814 - DNA, 120 bp, Artificial Sequence
  ENSG00000130725_8 (sequence is synthesized)
ttcagcccccactctgggctgtggagtgggtgggcaacgggcctgggtagctgggcccaggcaacccacccctccacctctggaggtcccaccaggctattaaaggggaatgttactgca

SEQ ID NO: 287815 - DNA, 120 bp, Artificial Sequence
  ENSG00000130725_9 (sequence is synthesized)
gggcaacgtctgcctcaacatcctcaggtgaggacactggccctctaatgccctcctcagcgctgcctgccaggcctccctcatggtcttgtgggcactacatcagactctgtcccttcc

SEQ ID NO: 287816 - DNA, 120 bp, Artificial Sequence
  ENSG00000130725_10 (sequence is synthesized)
tcttggtgagtaggaataggtggttgggtctggggagattggccttctgtccctctggcctgttgaccccccctacctgtactggccacaggagcccaaccccgaggacccactgaacaa

SEQ ID NO: 287817 - DNA, 120 bp, Artificial Sequence
  ENSG00000130725_11 (sequence is synthesized)
gggaagagccaaagcgggcaggcggcggaaatatccgaagcggcggggcgcccgaggccgttgccgacctccgcgctaaagccgctgctgccgcggaagacgatcctccagtacccgccc

SEQ ID NO: 287818 - DNA, 120 bp, Artificial Sequence
  ENSG00000130725_12 (sequence is synthesized)
gccgtcaccgcagctgccgtgtcctcctcccacccctagccgcaccccctcgcggagggatcagctgagcggccaaacggcacggtcgggggagccccgagtccgcagctgcagcggggc

SEQ ID NO: 287819 - DNA, 120 bp, Artificial Sequence
  ENSG00000130725_13 (sequence is synthesized)
gtgtgatatcagcttctcagatccagacgacctcctcaacttcaagctggtcatctgtcctgatgaggtgagggtgcatatggctgaattcccaggagcaaaccaagggtgtccccactg

SEQ ID NO: 287820 - DNA, 120 bp, Artificial Sequence
  ENSG00000130726_0 (sequence is synthesized)
agtgacgcagaggctggagacgactctacggcggcgaagagacgcgggttgaggaagagggacggattgcccatgcgcttgggcgcacagcggcccgcttctgtgtggtctggaggtgga

SEQ ID NO: 287821 - DNA, 120 bp, Artificial Sequence
  ENSG00000130726_1 (sequence is synthesized)
gctgagaggggaatcacactctataaaggttcgcataccccactggcggattcaattgcggcagtgacgtcacagaggccccgccccgcccccacaagagccccaccgacgtggggttgg

SEQ ID NO: 287822 - DNA, 120 bp, Artificial Sequence
  ENSG00000130726_2 (sequence is synthesized)
ttggcggtggtggaaggactaggagttggcgcgtgcgtactggcggcctctcccgcaccgaccggcctgggccccgcccccgggcgtgaggcgcccaatgcgcgtgcgcggcggcgtcgg

SEQ ID NO: 287823 - DNA, 120 bp, Artificial Sequence
  ENSG00000130726_3 (sequence is synthesized)
agttatttctgtcccgccccccggcctcggctctttctgcgagcgggcgcgcgggcgagcggttgtgcttgtgcttgtggcgcgtggtgcgggtttcggcggcggctgaggaagaagcgc

SEQ ID NO: 287824 - DNA, 120 bp, Artificial Sequence
  ENSG00000130726_4 (sequence is synthesized)
gtttcggcggcggctgaggaagaagcgcgggcggcgccttcgggaggcgagcaggcagcagttggccgtgccgtagcagcgtcccgcgcgcggcgggcagcggcccaggaggcgcgtggc

SEQ ID NO: 287825 - DNA, 80 bp, Artificial Sequence
  ENSG00000130726_5 (sequence is synthesized)
ggcgagggctccgctggcggcgaaaagcgctccaccgccccttcggccgcagcctcggcctctgcctcagccgcggcgtc

SEQ ID NO: 287826 - DNA, 120 bp, Artificial Sequence
  ENSG00000130726_6 (sequence is synthesized)
gtcgcccgcggggggcggcgccgaggcgctggagctgctggagcactgcggcgtgtgcagagagcgcctgcgacccgagagggagccccgcctgctgccctgtttgcactcggcctgtag

SEQ ID NO: 287827 - DNA, 120 bp, Artificial Sequence
  ENSG00000130726_7 (sequence is synthesized)
tgcctgcttagggcccgcggcccccgccgccgccaacagctcgggggacggcggggcggcgggcgacggcaccgtggtggactgtcccgtgtgcaagcaacagtgcttctccaaagacat

SEQ ID NO: 287828 - DNA, 120 bp, Artificial Sequence
  ENSG00000130726_8 (sequence is synthesized)
cgtggagaattatttcatgcgtgatagtggcagcaaggctgccaccgacgcccaggatgcgaaccagtgctgcactagctgtgaggataatgccccagccaccagctactgtgtggagtg

SEQ ID NO: 287829 - DNA, 120 bp, Artificial Sequence
  ENSG00000130726_9 (sequence is synthesized)
ctcggagcctctgtgtgagacctgtgtagaggcgcaccagcgggtgaagtacaccaaggaccatactgtgcgctctactgggccagccaagtctcgggatggtgaacgtactgtctattg

SEQ ID NO: 287830 - DNA, 120 bp, Artificial Sequence
  ENSG00000130726_10 (sequence is synthesized)
caacgtacacaagcatgaaccccttgtgctgttttgtgagagctgtgatactctcacctgccgagactgccagctcaatgcccacaaggaccaccagtaccagttcttagaggatgcagt

SEQ ID NO: 287831 - DNA, 120 bp, Artificial Sequence
  ENSG00000130726_11 (sequence is synthesized)
gaggaaccagcgcaagctcctggcctcactggtgaagcgccttggggacaaacatgcaacattgcagaagagcaccaaggaggttcgcagctcaatccgccaggtgtctgacgtacagaa

SEQ ID NO: 287832 - DNA, 120 bp, Artificial Sequence
  ENSG00000130726_12 (sequence is synthesized)
gcgtgtgcaagtggatgtcaagatggccatcctgcagatcatgaaggagctgaataagcggggccgtgtgctggtcaatgatgcccagaaggtgactgaggggcagcaggagcgcctgga

SEQ ID NO: 287833 - DNA, 120 bp, Artificial Sequence
  ENSG00000130726_13 (sequence is synthesized)
cagcactggaccatgaccaagatccagaagcaccaggagcacattctgcgctttgcctcttgggctctggagagtgacaacaacacagcccttttgctttctaagaagttgatctacttc

SEQ ID NO: 287834 - DNA, 120 bp, Artificial Sequence
  ENSG00000130726_14 (sequence is synthesized)
cagctgcaccgggccctcaagatgattgtggatcccgtggagccacatggcgagatgaagtttcagtgggacctcaatgcctggaccaagagtgccgaggcctttggcaagattgtggca

SEQ ID NO: 287835 - DNA, 120 bp, Artificial Sequence
  ENSG00000130726_15 (sequence is synthesized)
gagcgtcctggcactaactcaacaggccctgcacccatggcccctccaagagccccagggcccctgagcaagcagggctctggcagcagccagcccatggaggtgcaggaaggctatggc

SEQ ID NO: 287836 - DNA, 120 bp, Artificial Sequence
  ENSG00000130726_16 (sequence is synthesized)
tttgggtcaggagatgatccctactcaagtgcagagccccatgtgtcaggtgtgaaacggtcccgctcaggtgagggcgaggtgagcggccttatgcgcaaggtgccacgagtgagcctt

SEQ ID NO: 287837 - DNA, 120 bp, Artificial Sequence
  ENSG00000130726_17 (sequence is synthesized)
gaacgcctggacctggacctcacagctgacagccagccacccgtcttcaaggtcttcccaggcagtaccactgaggactacaaccttattgttattgaacgtggcgctgccgctgcagct

SEQ ID NO: 287838 - DNA, 120 bp, Artificial Sequence
  ENSG00000130726_18 (sequence is synthesized)
accggccagccagggactgcgcctgcaggaacccctggtgccccacccctggctggcatggccattgtcaaggaggaggagacggaggctgccattggagcccctcctactgccactgag

SEQ ID NO: 287839 - DNA, 120 bp, Artificial Sequence
  ENSG00000130726_19 (sequence is synthesized)
ggccctgagaccaaacctgtgcttatggctcttgcggagggtcctggtgctgagggtccccgcctggcctcacctagtggcagcaccagctcagggctggaggtggtggctcctgagggt

SEQ ID NO: 287840 - DNA, 120 bp, Artificial Sequence
  ENSG00000130726_20 (sequence is synthesized)
acctcagccccaggtggtggcccgggaaccctggatgacagtgccaccatttgccgtgtctgccagaagccaggcgatctggttatgtgcaaccagtgtgagttttgtttccacctggac

SEQ ID NO: 287841 - DNA, 120 bp, Artificial Sequence
  ENSG00000130726_21 (sequence is synthesized)
tgtcacctgccggccctgcaggatgtaccaggggaggagtggagctgctcactctgccatgtgctccctgacctgaaggaggaggatggcagcctcagcctggatggtgcagacagcact

SEQ ID NO: 287842 - DNA, 120 bp, Artificial Sequence
  ENSG00000130726_22 (sequence is synthesized)
ggcgtggtggccaagctctcaccagccaaccagcggaaatgtgagcgtgtactgctggccctattctgtcacgaaccctgccgccccctgcatcagctggctaccgactccaccttctcc

SEQ ID NO: 287843 - DNA, 120 bp, Artificial Sequence
  ENSG00000130726_23 (sequence is synthesized)
ctggaccagcccggtggcaccctggatctgaccctgatccgtgcccgcctccaggagaagttgtcacctccctacagctccccacaggagtttgcccaggatgtgggccgcatgttcaag

SEQ ID NO: 287844 - DNA, 120 bp, Artificial Sequence
  ENSG00000130726_24 (sequence is synthesized)
caattcaacaagttaactgaggacaaggcagacgtgcagtccatcatcggcctgcagcgcttcttcgagacgcgcatgaacgaggccttcggtgacaccaagttctctgctgtgctggtg

SEQ ID NO: 287845 - DNA, 120 bp, Artificial Sequence
  ENSG00000130726_25 (sequence is synthesized)
gagcccccgccgatgagcctgcctggtgctggcctgagttcccaggagctgtctggtggccctggtgatggcccctgaggctggagcccccatggccagcccagcctggctctgttctct

SEQ ID NO: 287846 - DNA, 120 bp, Artificial Sequence
  ENSG00000130726_26 (sequence is synthesized)
gtcctgtcaccccatccccactcccctggtggcctgactcccactccctggtggccccatcccccagttcctcacgatatggtttttacttctgtggatttaataaaaacttcaccagtt

SEQ ID NO: 287847 - DNA, 120 bp, Artificial Sequence
  ENSG00000130726_27 (sequence is synthesized)
tccctactcaagtgcagagccccatgtgtcaggtgtgaaacggtaagtatggcacctcccctgggggtgaggtggatggagggtgggggtgtactcatgccaggttgctgcatctacagg

SEQ ID NO: 287848 - DNA, 120 bp, Artificial Sequence
  ENSG00000130726_28 (sequence is synthesized)
accagggtgagtgtgaggctggtgggggtcaagtctgggtgttgggctgtctggacaggatcatgtgcagacccttattttcttcaccctagggaggagtggagctgctcactctgccat

SEQ ID NO: 287849 - DNA, 120 bp, Artificial Sequence
  ENSG00000130726_29 (sequence is synthesized)
tttctgcgagcgggcgcgcgggcgagcggttgtgcttgtgcttgtggcgcgtggtgcgggtttcggcggcggctgaggaagaagcgcgggcggcgccttcgggagctgctggagcactgc

SEQ ID NO: 287850 - DNA, 120 bp, Artificial Sequence
  ENSG00000130726_30 (sequence is synthesized)
tatctctagaagctagaagaaagggatgtgtttctcagctatgttggggcagaggattctgggagcaaggagttgggcttgcaggcctgtgttcttccctggccacaccctctacatctt

SEQ ID NO: 287851 - DNA, 120 bp, Artificial Sequence
  ENSG00000130726_31 (sequence is synthesized)
cccaataaatggcccagtgtcacagaacaggccggaaatgaggccccaactcattctgcttcctgagttgggggtggtgaagggcaaggtccagccttatgattcccactccccagggcc

SEQ ID NO: 287852 - DNA, 120 bp, Artificial Sequence
  ENSG00000130726_32 (sequence is synthesized)
tctcaccagccaaccagcgggtgagggctggggttacttaggtggggttgcccagagaggctttataggtgctgcccagagctgtgacatcccttacaatgtttgtagaaatgtgagcgt

SEQ ID NO: 287853 - DNA, 120 bp, Artificial Sequence
  ENSG00000130726_33 (sequence is synthesized)
tgaggatgccacctgggcgagaggatgggggcccggacagggcacgggaaatactttctgggtcctgcatacgaacgtgggtttgtgctggccgctgagatgggacatctgactaaagtt

SEQ ID NO: 287854 - DNA, 120 bp, Artificial Sequence
  ENSG00000130726_34 (sequence is synthesized)
ggagaaaagaaggctcggggaggggaggggctggttcgctgcgggataatggtcgggggcccacccagcaggggaatggtgggggccataacctgggtgggaacttgtaacagtctccca

SEQ ID NO: 287855 - DNA, 120 bp, Artificial Sequence
  ENSG00000130731_0 (sequence is synthesized)
gttgttgctgccgcgatgctggtggcggcggccgcggagcggaacaaggatcccatcttgcacgtgctgcggcagtacctggatccggcccagcgtggcgtccgcgtcctcgaggtggcc

SEQ ID NO: 287856 - DNA, 120 bp, Artificial Sequence
  ENSG00000130731_1 (sequence is synthesized)
tcgggctccggccagcacgcagcgcacttcgcgcgggccttccccctggccgagtggcagccgtcggacgtggaccagcgctgcctggacagcatcgcggccaccacgcaagcccagggc

SEQ ID NO: 287857 - DNA, 120 bp, Artificial Sequence
  ENSG00000130731_2 (sequence is synthesized)
ctgaccaacgtgaaggccccgctacacctggacgtgacgtggggctgggagcactggggcgggatcctgccacagtcgctggacctgttgctctgcatcaacatggcccatgtcagcccc

SEQ ID NO: 287858 - DNA, 120 bp, Artificial Sequence
  ENSG00000130731_3 (sequence is synthesized)
ctatgccatcaatgggaagatctccccccagagcaacgtggactttgacctgatgctcagatgcaggaacccagaatgggggcttcgggacacagccctcctggaggacctgggaaaggc

SEQ ID NO: 287859 - DNA, 120 bp, Artificial Sequence
  ENSG00000130731_4 (sequence is synthesized)
cagtggcctgctcctggagaggatggtggacatgccagccaacaacaaatgcctgatcttccggaaaaactaagcccctccttcacccccgcacacctgcatccctgccggaggctctgt

SEQ ID NO: 287860 - DNA, 120 bp, Artificial Sequence
  ENSG00000130731_5 (sequence is synthesized)
gaggcacgaaccctgcctccctaggccggaccttgtggacgacagccccacccagtctgtgctctcagccgctggccgaagggcccagcctgctcagaataaagcatgtcctgctgccgg

SEQ ID NO: 287861 - DNA, 120 bp, Artificial Sequence
  ENSG00000130731_6 (sequence is synthesized)
caccctgcatgggggcagctgggatgccagatttgcccccatcacagtcggggggctcttcagagcagcaggacacctgctcaaacccagggccctgctcatcacctacgggccctatgc

SEQ ID NO: 287862 - DNA, 120 bp, Artificial Sequence
  ENSG00000130731_7 (sequence is synthesized)
tctatcggtgcggcggtccggggcctcaagagcccacggcccgcagccccggaggaaaaggatgcggctcgggctctgagggtgcggggtgggagcctgggggtgcccccggggcaggcc

SEQ ID NO: 287863 - DNA, 120 bp, Artificial Sequence
  ENSG00000130731_8 (sequence is synthesized)
ctagctgtgcggcccccgcggctgcggaagtgggtggacctcggggtcccccttcccagccgctttggtctccgctcctcaacgtgccccccagcctcccctaagaaattctgtgggggc

SEQ ID NO: 287864 - DNA, 120 bp, Artificial Sequence
  ENSG00000130731_9 (sequence is synthesized)
tccagcctcccccatcacagtcggggtgagggtctccagcctcagggcctggcttctgttgggggcagcacctcactgccgtcctgttcctactcaccaggggctcttcagagcagcagg

SEQ ID NO: 287865 - DNA, 120 bp, Artificial Sequence
  ENSG00000130731_10 (sequence is synthesized)
acacctgctcaaacccagggccctgctcatcacctacggggtgagtgggcctgtccacggcgggcctcccgctcccagtcctagctgctgtctcctgccctgctgagagtcctccctcct

SEQ ID NO: 287866 - DNA, 120 bp, Artificial Sequence
  ENSG00000130731_11 (sequence is synthesized)
gggctccctgccccccgcccagccaccagcacggcctcccctccacttccagtctgtacccctccctgggtcatctgccagcctccctacccccttgcccaccaggctggccttggctga

SEQ ID NO: 287867 - DNA, 120 bp, Artificial Sequence
  ENSG00000130731_12 (sequence is synthesized)
ctccctcttggggacagggagggggtgccctttcattctccaaaccccagcctgcaagtctgtcccaggctctctgggaaataccccgaccttggtccagtgggctgtgtccccatgccc

SEQ ID NO: 287868 - DNA, 120 bp, Artificial Sequence
  ENSG00000130731_13 (sequence is synthesized)
acggaggggctcttcagagcagcaggacacctgctcaaacccagggccctgctcatcacctacggggaacccagaatgggggcttcgggacacagccctcctggaggacctgggaaaggc

SEQ ID NO: 287869 - DNA, 120 bp, Artificial Sequence
  ENSG00000130731_14 (sequence is synthesized)
caccactcaccctgcatgggggcagctgggatgccagatttgcccccatcacagtcggggaacccagaatgggggcttcgggacacagccctcctggaggacctgggaaaggccagtggc

SEQ ID NO: 287870 - DNA, 120 bp, Artificial Sequence
  ENSG00000130733_0 (sequence is synthesized)
ggatgttgctgtcaggtctgagtcggttggagtctgacgggtaggcgagacgcgcaggcgcagagagccccagccacgccggcccaggtggcctcagcgagggatgcggagacgcccctg

SEQ ID NO: 287871 - DNA, 120 bp, Artificial Sequence
  ENSG00000130733_1 (sequence is synthesized)
aacgaccatggcatcggccgacgagctgaccttccatgaattcgaggaggccactaatcttctggctgacaccccagatgcagccaccaccagcagaagcgatcagctgaccccacaagg

SEQ ID NO: 287872 - DNA, 120 bp, Artificial Sequence
  ENSG00000130733_2 (sequence is synthesized)
gcacgtggctgtggccgtgggctcaggtggcagctatggagccgaggatgaggtggaggaggagagtgacaaggccgcgctcctgcaggagcagcagcagcagcagcagccgggattctg

SEQ ID NO: 287873 - DNA, 120 bp, Artificial Sequence
  ENSG00000130733_3 (sequence is synthesized)
gaccttcagctactatcagagcttctttgacgtggacacctcacaggtcctggaccggatcaaaggctcactgctgccccggcctggccacaactttgtgcggcaccatctgcggaatcg

SEQ ID NO: 287874 - DNA, 120 bp, Artificial Sequence
  ENSG00000130733_4 (sequence is synthesized)
gccggatctgtatggccccttctggatctgtgccacgttggcctttgtcctggccgtcactggcaacctgacgctggtgctggcccagaggagggacccctccatccactacagccccca

SEQ ID NO: 287875 - DNA, 120 bp, Artificial Sequence
  ENSG00000130733_5 (sequence is synthesized)
gttccacaaggtgaccgtggcaggcatcagcatctactgctatgcgtggctggtgcccctggccctgtggggcttcctgcggtggcgcaagggtgtccaggagcgcatggggccctacac

SEQ ID NO: 287876 - DNA, 120 bp, Artificial Sequence
  ENSG00000130733_6 (sequence is synthesized)
cttcctggagactgtgtgcatctacggctactccctctttgtcttcatccccatggtggtcctgtggctcatccctgtgccttggctgcagtggctctttggggcgctggccctgggcct

SEQ ID NO: 287877 - DNA, 120 bp, Artificial Sequence
  ENSG00000130733_7 (sequence is synthesized)
gtcagccgccgggctggtattcaccctctggcccgtggtccgtgaggacaccaggctggtggccacagtgctgctgtccgtggtcgtgctgctccacgccctcctggccatgggctgtaa

SEQ ID NO: 287878 - DNA, 120 bp, Artificial Sequence
  ENSG00000130733_8 (sequence is synthesized)
cccaaatcacatctctgccctcaaacatcgcgctgtcccctaccttgccgcagtccctggccccctcctaggaaggcccgggtcccacaggcaacacctaagtggaccaacccctctgcc

SEQ ID NO: 287879 - DNA, 120 bp, Artificial Sequence
  ENSG00000130733_9 (sequence is synthesized)
tgtcctgccccccagacgatgactgaaggctcctttgacaccttgagatgattctgctactttccagacttttcttacaaagcaaacacttttattttctatgcaaaggtgattcagaga

SEQ ID NO: 287880 - DNA, 120 bp, Artificial Sequence
  ENSG00000130733_10 (sequence is synthesized)
atttatataaaggcgggcgaggggcagccgagcagggagctttgggacagggctggggcccccatatcccccccgggccacctgctttccctcctatggctcccctggaacaggagggag

SEQ ID NO: 287881 - DNA, 120 bp, Artificial Sequence
  ENSG00000130733_11 (sequence is synthesized)
agccaagggggcggcccagcctggacagcgcccgctcctgcctgggtgcacacacggcgggcctgagctccagcatctgagtttgggggtatgagaaacaggggagcagaaggagaagaa

SEQ ID NO: 287882 - DNA, 120 bp, Artificial Sequence
  ENSG00000130733_12 (sequence is synthesized)
tttctttttctttttttctttttttggagggagaggtccctgcaaggtcccttcccgggcaggggagggatggaaatgccgtcacagtagtagggactggagcgtctacaaggatggagg

SEQ ID NO: 287883 - DNA, 120 bp, Artificial Sequence
  ENSG00000130733_13 (sequence is synthesized)
gtcacagtagtagggactggagcgtctacaaggatggaggggagctactcaggcctaacgttagctacaaggaaaaaggacgccttccgtgacagatccttgaggtgtctgtgtctgccc

SEQ ID NO: 287884 - DNA, 120 bp, Artificial Sequence
  ENSG00000130733_14 (sequence is synthesized)
caagtggccggcagtggccttccctccgggcccaaggcctgcagccacctgctctaactcttgagtgggggggcggggggggacctgcaggggctcggggacaggacagcagcaagaggc

SEQ ID NO: 287885 - DNA, 120 bp, Artificial Sequence
  ENSG00000130733_15 (sequence is synthesized)
aggggccgaggacggaggccttcccgacagtggggtgggttgtacattcaagtgtgaggtgaaccctttggtggggagggggcccctgaagcctcggcggggccacccctccccgcggcg

SEQ ID NO: 287886 - DNA, 120 bp, Artificial Sequence
  ENSG00000130733_16 (sequence is synthesized)
cctctgagtctagggagaggggctgctggctcggcccggccggcctggcttcacagagggtctgcggattgacactggttcttttcataaaaaaataaaattaaaaaaagcagcatgtca

SEQ ID NO: 287887 - DNA, 120 bp, Artificial Sequence
  ENSG00000130733_17 (sequence is synthesized)
ggagtctgacgggtaggcgagacgcgcaggcgcagagagccccagccacgccggcccaggtggcctcaggtgagggggggcggagcgcacctgtggggacgggacgacgagttcaagcct

SEQ ID NO: 287888 - DNA, 120 bp, Artificial Sequence
  ENSG00000130733_18 (sequence is synthesized)
acgagttcaagcctccgtgggtgcagttggtcgccaggtagggctgggggccgagggaccggctcgggggcgggggggaagtgtgcctgaccggtctctgtcctcagcgagggatgcgga

SEQ ID NO: 287889 - DNA, 120 bp, Artificial Sequence
  ENSG00000130733_19 (sequence is synthesized)
gccgaggatgaggtggaggaggagagtgacaaggccgcggtgagtccctgtgtcctgcctccttgcagcccccagctgacccaggctctccgggcaggcactgaatgcccgcaatgtgca

SEQ ID NO: 287890 - DNA, 120 bp, Artificial Sequence
  ENSG00000130733_20 (sequence is synthesized)
ggcgcagagagccccagccacgccggcccaggtggcctcagcgagggatgcggagacgcccctgaacgaccatggcatcggccgacgagctgaccttccatgcccccagctgacccaggc

SEQ ID NO: 287891 - DNA, 120 bp, Artificial Sequence
  ENSG00000130733_21 (sequence is synthesized)
aaggcgagaggttctggggccactcccagacaattctttctttcaggcaacacctaagtggaccaacccctctgcctgtcctgccccccagacgatgactgaaggctcctttgacacctt

SEQ ID NO: 287892 - DNA, 120 bp, Artificial Sequence
  ENSG00000130734_0 (sequence is synthesized)
gtcctggcccgctaagatggcgatggctgcggtagcagcggcggcggctgttgcctggcccggtaccctggggacgggggccgagtagcgccttccccgggccccgtgaaccggctgcgg

SEQ ID NO: 287893 - DNA, 120 bp, Artificial Sequence
  ENSG00000130734_1 (sequence is synthesized)
gtagcgccttccccgggccccgtgaaccggctgcgggtcgcccttggggggcagcggccgcagccccccacctgggccctcggtccgccctcccggcgcgtccatgaactcagtgtcgcc

SEQ ID NO: 287894 - DNA, 120 bp, Artificial Sequence
  ENSG00000130734_2 (sequence is synthesized)
gaggcccgcaggccgcggggtcccagaggcccagaccccaacggcctggggccttccggagccagcggccccgctcttggctctcccggggctggcccgagtgagccggacgaagtggac

SEQ ID NO: 287895 - DNA, 120 bp, Artificial Sequence
  ENSG00000130734_3 (sequence is synthesized)
gccggacgaagtggacaagttcaaggccaagttcctgacagcctggaacaacgtcaagtacggttgggtggttaaaagccggaccagctttagcaagatctccagcatccacctctgtgg

SEQ ID NO: 287896 - DNA, 120 bp, Artificial Sequence
  ENSG00000130734_4 (sequence is synthesized)
ccgccgctaccgtttcgagggcgagggtgacatacagcgtttccagcgggactttgtgtcccgcctgtggctcacataccgccgggacttcccgccccttcctgggggctgcctgacctc

SEQ ID NO: 287897 - DNA, 120 bp, Artificial Sequence
  ENSG00000130734_5 (sequence is synthesized)
ggactgtggctgggggtgcatgttacgcagcggccagatgatgctggcacagggccttctgctgcatttcctgcccagagactggacatgggccgagggcatgggcctgggcccccctga

SEQ ID NO: 287898 - DNA, 120 bp, Artificial Sequence
  ENSG00000130734_6 (sequence is synthesized)
gctgtcagggtcagcctctcccagccggtaccatgggcctgcccgctggatgcccccacgctgggcccagggtgcccctgagctggagcaggaacgccggcaccggcagattgtgtcctg

SEQ ID NO: 287899 - DNA, 120 bp, Artificial Sequence
  ENSG00000130734_7 (sequence is synthesized)
gttcgccgaccacccccgggccccctttggcctacaccggctggtggagcttgggcagagctcaggcaagaaggcaggtgactggtatgggccatcgctagtggcacacatcctcaggaa

SEQ ID NO: 287900 - DNA, 120 bp, Artificial Sequence
  ENSG00000130734_8 (sequence is synthesized)
gtttctcaggactgcacagtgtacaaggcggatgtggcacgcctggtggccaggccagaccccacagccgagtggaagtctgtggtcatcctggtgcccgtgcgactgggtggcgagact

SEQ ID NO: 287901 - DNA, 120 bp, Artificial Sequence
  ENSG00000130734_9 (sequence is synthesized)
ctcaaccccgtgtatgtgccctgcgtgaaggaactcctgcgttgcgagctgtgcctgggcatcatgggtgggaaaccgcgacactcactgtacttcattggctaccaagatgacttcctg

SEQ ID NO: 287902 - DNA, 120 bp, Artificial Sequence
  ENSG00000130734_10 (sequence is synthesized)
ctgtacctggaccctcactactgccagcccactgtggatgtcagccaggccgacttccccctggagtccttccactgcacctcgccccgcaagatggcctttgccaagatggacccaagc

SEQ ID NO: 287903 - DNA, 120 bp, Artificial Sequence
  ENSG00000130734_11 (sequence is synthesized)
tgtaccgtgggcttctatgctggagacaggaaggagtttgagacactctgctcagagctgaccagggtcctcagctcctcctcagccacagagcggtaccccatgttcaccctggccgag

SEQ ID NO: 287904 - DNA, 120 bp, Artificial Sequence
  ENSG00000130734_12 (sequence is synthesized)
ggccatgctcaggaccacagcctggacgacctctgctcccagctcgcccagcccacactccggctccctcgcacagggcggctcctcagggccaaacgccccagctctgaggactttgtg

SEQ ID NO: 287905 - DNA, 120 bp, Artificial Sequence
  ENSG00000130734_13 (sequence is synthesized)
tttttataaagggaggggatgaggggaaagatacaacactatttatttttttatttatgtcatgtcgggtgtgggatcttgagctctggcagtgatgatggtacttcctgttgtcagccc

SEQ ID NO: 287906 - DNA, 120 bp, Artificial Sequence
  ENSG00000130734_14 (sequence is synthesized)
ctcaagcccagctgcaaccagtctggggccattcagccagggacagagcccacagagcccatacacctgtctcccaccagcggggccctcctggcagggtagggaaggaggaccccgggc

SEQ ID NO: 287907 - DNA, 120 bp, Artificial Sequence
  ENSG00000130734_15 (sequence is synthesized)
acccccctcagggcctgactcacgtactgtagtttgcactggacgcccgggccctccctgtcccaaagcccccttgggggaactgtggctgctgggggccaataaagctgtgtaacttga

SEQ ID NO: 287908 - DNA, 120 bp, Artificial Sequence
  ENSG00000130734_16 (sequence is synthesized)
ggcgagggtgagctggtggttgggaccagggctgggggaggcctctccacgcccgccggagtgtccctggtggcagctgacagacccgctcttgtaggtgacatacagcgtttccagcgg

SEQ ID NO: 287909 - DNA, 120 bp, Artificial Sequence
  ENSG00000130734_17 (sequence is synthesized)
gacaagttcaaggccaagttcctgacagcctggaacaacgtcaaatgggggaatggaagcgctgttgctgtcatgcaagtgcttcatctcgctgggcgctgcccctacgtctccccaggt

SEQ ID NO: 287910 - DNA, 120 bp, Artificial Sequence
  ENSG00000130734_18 (sequence is synthesized)
gggaaaccgcgacactcactgtacttcattggctaccaagatgacttcctgctgtacctggaccctcactactgccagcccactgtggatgtcagccaggccgacttccccctggaggtc

SEQ ID NO: 287911 - DNA, 120 bp, Artificial Sequence
  ENSG00000130741_0 (sequence is synthesized)
ctcttttggcaacatggcgggcggagaagctggagtgactctagggcagccgcatctttcgcgtcaggatctcaccaccttggatgttaccaagttgacgccactttcacacgaagttat

SEQ ID NO: 287912 - DNA, 120 bp, Artificial Sequence
  ENSG00000130741_1 (sequence is synthesized)
cagcagacaagccacaattaacataggtacaattggtcatgtagctcatgggaaatccacagtcgtcaaagctatttctggagttcatactgtcaggttcaaaaatgaactagaaagaaa

SEQ ID NO: 287913 - DNA, 120 bp, Artificial Sequence
  ENSG00000130741_2 (sequence is synthesized)
tattacaatcaagcttggatatgctaatgctaagatttataagcttgatgacccaagttgccctcggccagaatgttatagatcttgtgggagcagtacacctgacgagtttcctacgga

SEQ ID NO: 287914 - DNA, 120 bp, Artificial Sequence
  ENSG00000130741_3 (sequence is synthesized)
cattccagggaccaaagggaacttcaaattagtcagacatgtttcctttgttgactgtcctggccacgatattttgatggctactatgctgaacggtgcagcagtgatggatgcagctct

SEQ ID NO: 287915 - DNA, 120 bp, Artificial Sequence
  ENSG00000130741_4 (sequence is synthesized)
tctgttgatagctggtaatgaatcttgccctcagcctcagacatcggaacacctggctgctatagagatcatgaaactgaagcatattttgattctacaaaataaaattgatttggtaaa

SEQ ID NO: 287916 - DNA, 120 bp, Artificial Sequence
  ENSG00000130741_5 (sequence is synthesized)
agaaagtcaggctaaagaacaatacgagcagatccttgcatttgtccaaggtacagtagcagagggagctcccattattccaatttcagctcagctgaaatacaatattgaagttgtttg

SEQ ID NO: 287917 - DNA, 120 bp, Artificial Sequence
  ENSG00000130741_6 (sequence is synthesized)
tgagtacatagtaaagaaaattccagtacccccaagagactttacttcagagccccggcttattgttattagatcttttgatgtcaacaaacctggctgtgaagttgatgaccttaaggg

SEQ ID NO: 287918 - DNA, 120 bp, Artificial Sequence
  ENSG00000130741_7 (sequence is synthesized)
aggtgtagctggtggtagtatcctaaaaggagtattaaaggtgggccaggagatagaagtaagacctggtattgtttccaaagatagtgaaggaaaactcatgtgtaaaccaatcttttc

SEQ ID NO: 287919 - DNA, 120 bp, Artificial Sequence
  ENSG00000130741_8 (sequence is synthesized)
caaaattgtatcactttttgcggagcataatgatctgcaatatgctgctccaggcggtcttattggagttggaacaaaaattgaccccactttgtgccgggctgacagaatggtggggca

SEQ ID NO: 287920 - DNA, 120 bp, Artificial Sequence
  ENSG00000130741_9 (sequence is synthesized)
agtacttggtgcagtcggagctttacctgagatattcacagaattggaaatttcctatttcctgcttagacggcttctaggtgtacgcactgaaggagacaagaaagcagcaaaggttca

SEQ ID NO: 287921 - DNA, 120 bp, Artificial Sequence
  ENSG00000130741_10 (sequence is synthesized)
aaagctgtctaagaatgaagtgctcatggtgaacataggatccctgtcaacaggagggagagttagtgctgtcaaggccgatttgggtaaaattgttttgaccaatccagtgtgcacaga

SEQ ID NO: 287922 - DNA, 120 bp, Artificial Sequence
  ENSG00000130741_11 (sequence is synthesized)
ggtaggagaaaaaattgcccttagccgaagagttgaaaaacactggcgtttaattggttggggtcagataagaagaggagtgacaatcaagccaacagtagatgatgactgaagaatacc

SEQ ID NO: 287923 - DNA, 120 bp, Artificial Sequence
  ENSG00000130741_12 (sequence is synthesized)
agttaaataatacattcggatggatttggaagttggaattcctcttaacaaccaaggggtttattttcaaagcaatattggggaattgatttcacagttcgttaccttagtaggtaacgg

SEQ ID NO: 287924 - DNA, 120 bp, Artificial Sequence
  ENSG00000130741_13 (sequence is synthesized)
ctttttttttttttttttttttggttatgaaaacttagggactaaaattaatataaaaattggcataatgttggattgaatctacattttggcagaagttaaacattcccacataatgtc

SEQ ID NO: 287925 - DNA, 61 bp, Artificial Sequence
  ENSG00000130741_14 (sequence is synthesized)
tagagacggggtttcagcatgttggctaggccggtctctcctgacctcagggtgatcacat

SEQ ID NO: 287926 - DNA, 120 bp, Artificial Sequence
  ENSG00000130741_15 (sequence is synthesized)
catacagtttgaaatgaaactttgccacaaccagcctttgctgtagcacacacatatatcactgaacctgtttgaaataaagttttttttctttttcatgattcgtctttgagtacctcc

SEQ ID NO: 287927 - DNA, 120 bp, Artificial Sequence
  ENSG00000130741_16 (sequence is synthesized)
aggctgaaagactgttgtaccagtaaaaacttaaaggcacaaattctccttgaagaccttctcccttttatgtggccccatattttatgttgctttatctttgaaattttgcatgaaaag

SEQ ID NO: 287928 - DNA, 120 bp, Artificial Sequence
  ENSG00000130741_17 (sequence is synthesized)
gaaatgaatggattcgaatgaaattgtcctttagagcatgattacttgttcccatggacaaatatttttctccccttgctcttcctggcctgaaacacgggaaaccagagtcaaaagtta

SEQ ID NO: 287929 - DNA, 120 bp, Artificial Sequence
  ENSG00000130741_18 (sequence is synthesized)
tctccctctccctgtgatgccttgagatttttttctgcgttgtttaatgcctgaaatccaagtcttcctccatgggaaaatactgttataccaaataattctagatgagtaacaaagatc

SEQ ID NO: 287930 - DNA, 120 bp, Artificial Sequence
  ENSG00000130741_19 (sequence is synthesized)
tttttaggccttcattttatgttttttcttaactgttatattatgattgtgacatagattatactactactaatttttggatgtttcaaaaggtcaagaagtaaaagatgttagaaagca

SEQ ID NO: 287931 - DNA, 120 bp, Artificial Sequence
  ENSG00000130741_20 (sequence is synthesized)
atgagtgagtccttttgatttttaacttattccccatgtccctatacttcgtgtgcttttcctttttttttttgagacggaggctcactccgtcacctaggctagagtacagtggcacga

SEQ ID NO: 287932 - DNA, 82 bp, Artificial Sequence
  ENSG00000130741_21 (sequence is synthesized)
tcttggctcgctgcaacctctgcctccctgattcaagtgattctcgtgcttcagcctcccatgtagctgatattacaggcac

SEQ ID NO: 287933 - DNA, 120 bp, Artificial Sequence
  ENSG00000130741_22 (sequence is synthesized)
ttctttatgtttttgcttcgtaagaggttctgttgagcagtgatttgcaactcttgctgacgttgctggggaagctttaaaaaaaaaaaagatgccccacagagattctgattttaattg

SEQ ID NO: 287934 - DNA, 120 bp, Artificial Sequence
  ENSG00000130741_23 (sequence is synthesized)
ttctgatttaattggcttggagtagaattcaggcattgatatctttaaaaactccccagtgttgagaaacaaatttagagagttgagaagtaggtatattaaattacagaatcttactga

SEQ ID NO: 287935 - DNA, 120 bp, Artificial Sequence
  ENSG00000130741_24 (sequence is synthesized)
gttttggtagactgataatacaatttgctttgcttttcttaaatttgcattgagatgggatttgaagcatattgtgctcttgtgaatgttgaagttgcattgtagaagtttagaagctct

SEQ ID NO: 287936 - DNA, 120 bp, Artificial Sequence
  ENSG00000130741_25 (sequence is synthesized)
ggctatgggttgcctaaattgatgttttgaggaagcatattaatgttataaacttcgctgactttgaaggttgtgttgtagcatgaggaacacaaataaaacaattctaaatcaaactaa

SEQ ID NO: 287937 - DNA, 120 bp, Artificial Sequence
  ENSG00000130741_26 (sequence is synthesized)
actgtggctttcagtctcaactatttatttggatgactttgaaaactatacttcggcgtgagccaccttgcccagcccacatcatacagtttgaaatgaaactttgccacaaccagcctt

SEQ ID NO: 287938 - DNA, 120 bp, Artificial Sequence
  ENSG00000130741_27 (sequence is synthesized)
atttaaaggggaactaaggcctttaaggatcatatctattacctaagggtgacatgaatgggaactaacatgtcatccaggatgactttcctacctatcagctatcacaaaatactcaaa

SEQ ID NO: 287939 - DNA, 120 bp, Artificial Sequence
  ENSG00000130741_28 (sequence is synthesized)
aagatagacttggggctgatagcttgcgagaattcttgtggtagcatttgagaaaaagaaaaaaagtcaatagttcatttttctcatttaaatcacatgaggtgatttatttagttttaa

SEQ ID NO: 287940 - DNA, 120 bp, Artificial Sequence
  ENSG00000130748_0 (sequence is synthesized)
agtgcgaatcatgggaggcggctggtggtgggctcgggccgctcgccttgcccgtcttcgcttccggaggtcgctactgccgcctcagcggccccggagcgggggcgcccgggggtcctt

SEQ ID NO: 287941 - DNA, 120 bp, Artificial Sequence
  ENSG00000130748_1 (sequence is synthesized)
cgcccccggccacggtccccgcgccggggcttcgccgcccccagtgtccgagctggatcgtgcggacgcctggctcctccgaaaagcgcacgagacagccttcctctcctggttccgcaa

SEQ ID NO: 287942 - DNA, 120 bp, Artificial Sequence
  ENSG00000130748_2 (sequence is synthesized)
cgggaagcagcatatggcttcttcctgctgggcggcctgtgcgtggtgtggggcagcgcctcgtacgccgtgggcctggcggcgctgcgaggacccatgcagctgacgctggggggcgcg

SEQ ID NO: 287943 - DNA, 120 bp, Artificial Sequence
  ENSG00000130748_3 (sequence is synthesized)
gccgtgggcgcgggcgccgtgctggccgccagcctgctctgggcgtgcgccgtgggcctctacatggggcagctggagctggacgtggagctggtgcccgaggacgacgggacggcctcc

SEQ ID NO: 287944 - DNA, 120 bp, Artificial Sequence
  ENSG00000130748_4 (sequence is synthesized)
gcggaaggccctgatgaggcgggtcggccgccacccgagtgagcgacacggccgtggggcctggcaggcgctggacagcgcccgaggactgggacattaaacctgacctcccctcctcca

SEQ ID NO: 287945 - DNA, 120 bp, Artificial Sequence
  ENSG00000130749_0 (sequence is synthesized)
gggcttcatcgcttctccggaaacctccgactctcggcacctggcctccagctttcggaactatggaggccgcgcccgggacccccccgccgccgccatcagagtcgccgccgccgccat

SEQ ID NO: 287946 - DNA, 120 bp, Artificial Sequence
  ENSG00000130749_1 (sequence is synthesized)
cgccgccgccgccatcaacgccttcgcctcctccgtgttcccccgacgcccgcccggccaccccgcacctcctccaccaccgcctcccgctccctgacgacagggaagatggagagttgg

SEQ ID NO: 287947 - DNA, 120 bp, Artificial Sequence
  ENSG00000130749_2 (sequence is synthesized)
aagaaggtgaattggaagatgatggggcagaggagacccaggatacctccggagggcctgagagaagccggaaagaaaagggggagaagcatcacagtgattcggatgaggagaagtccc

SEQ ID NO: 287948 - DNA, 120 bp, Artificial Sequence
  ENSG00000130749_3 (sequence is synthesized)
acaggagactgaagcggaaacggaagaaagagcgggagaaagagaaaaggaggtcgaagaagaggaggaaatccaagcacaaacgccatgcttcttctagcgatgacttctctgacttct

SEQ ID NO: 287949 - DNA, 120 bp, Artificial Sequence
  ENSG00000130749_4 (sequence is synthesized)
cagatgactcggatttcagccccagtgagaaaggtcaccgcaagtacagagagtacagccccccatatgcgccgtcccaccagcagtaccccccatcgcatgccacgcccctgcccaaga

SEQ ID NO: 287950 - DNA, 120 bp, Artificial Sequence
  ENSG00000130749_5 (sequence is synthesized)
aggcatactccaagatggacagcaagagttatggcatgtacgaggactacgagaatgagcagtatggggaatatgagggcgacgaggaggaggacatgggcaaggaggactatgacgact

SEQ ID NO: 287951 - DNA, 120 bp, Artificial Sequence
  ENSG00000130749_6 (sequence is synthesized)
tcaccaaagagctgaaccagtaccggcgtgccaaggagggcagcagccgcggccgaggcagccgaggccggggccggggctacaggggccgaggaagccgtggaggatcgcgaggccgcg

SEQ ID NO: 287952 - DNA, 120 bp, Artificial Sequence
  ENSG00000130749_7 (sequence is synthesized)
gcatgggcaggggcagccgaggcaggggcagaggctctatgggaggagaccacccggaggatgaagaggatttctacgaggaagagatggactatggagagagtgaggagccaatgggag

SEQ ID NO: 287953 - DNA, 120 bp, Artificial Sequence
  ENSG00000130749_8 (sequence is synthesized)
acgacgactatgacgagtactccaaggagctgaaccagtaccgccgctccaaggacagccgaggccgagggctaagtcgaggccgtggcaggggctcccgaggtcgagggaaaggaatgg

SEQ ID NO: 287954 - DNA, 120 bp, Artificial Sequence
  ENSG00000130749_9 (sequence is synthesized)
gtcggggccgaggccgaggtggcagccgaggagggatgaacaagggcggaatgaacgatgacgaagacttctatgacgaggacatgggcgacggtggtggtggaagctaccggagtcgtg

SEQ ID NO: 287955 - DNA, 120 bp, Artificial Sequence
  ENSG00000130749_10 (sequence is synthesized)
accatgacaagccccaccagcagtcggacaagaaaggcaaagtcatttgcaagtacttcgtggaagggcgctgcacctggggagaccactgtaattttagccatgacatcgaactcccaa

SEQ ID NO: 287956 - DNA, 120 bp, Artificial Sequence
  ENSG00000130749_11 (sequence is synthesized)
agaagcgagaactgtgcaagttttacatcactggattttgcgccagagctgagaactgcccttatatgcacggtgatttcccgtgtaagctgtaccacaccactgggaactgcatcaatg

SEQ ID NO: 287957 - DNA, 120 bp, Artificial Sequence
  ENSG00000130749_12 (sequence is synthesized)
gtgacgactgcatgttttcccacgaccctctgaccgaagagacgagggagctcttggataagatgttggccgatgatgcagaagcaggtgccgaggatgagaaggaggtggaggaactga

SEQ ID NO: 287958 - DNA, 120 bp, Artificial Sequence
  ENSG00000130749_13 (sequence is synthesized)
agaagcagggcatcaaccccctgcccaaaccgccccctggtgtgggcctcctgcccacccctcctcggccccctggcccgcaggctccaacctctcccaacggcaggcccatgcagggtg

SEQ ID NO: 287959 - DNA, 120 bp, Artificial Sequence
  ENSG00000130749_14 (sequence is synthesized)
cgccccctccccctcccccaccgcccgggccccctcagatgcccatgccggtgcatgagccactgtccccgcagcagctgcagcagcaggacatgtacaacaagaagatcccctccttgt

SEQ ID NO: 287960 - DNA, 120 bp, Artificial Sequence
  ENSG00000130749_15 (sequence is synthesized)
tcccctccttgtttgagatcgtggtgcggcccacgggacagctggctgagaagctgggtgtgaggttccctggacccggtggacccccagggccaatgggccctgggcccaacatgggac

SEQ ID NO: 287961 - DNA, 120 bp, Artificial Sequence
  ENSG00000130749_16 (sequence is synthesized)
ccccagggccaatgggcggtccaatgcatcctgacatgcaccccgacatgcacccggacatgcaccctgacatgcacgcagacatgcacgcagacatgccgatgggccctggcatgaatc

SEQ ID NO: 287962 - DNA, 120 bp, Artificial Sequence
  ENSG00000130749_17 (sequence is synthesized)
ctggcccacccatgggccctggcggccctccaatgatgccctacggccctggagactccccacattctggaatgatgccccctatcccgccagcccagaacttctatgaaaacttctacc

SEQ ID NO: 287963 - DNA, 120 bp, Artificial Sequence
  ENSG00000130749_18 (sequence is synthesized)
agcagcaggagggcatggagatggagcccggactcctgggggatgcagaggactacgggcactacgaagagctgccaggggagcctggggagcacctcttccctgagcaccctctggagc

SEQ ID NO: 287964 - DNA, 120 bp, Artificial Sequence
  ENSG00000130749_19 (sequence is synthesized)
ccgacagcttctctgagggagggcccccaggccggccgaagccaggcgccggtgtccctgacttcctgccctcagcccagagggccctgtacctgaggatccagcagaagcagcaggagg

SEQ ID NO: 287965 - DNA, 120 bp, Artificial Sequence
  ENSG00000130749_20 (sequence is synthesized)
aggaggagagagcgaggaggctggctgagagcagcaagcaggaccgggagaatgaggaaggtgacaccggaaactggtactcaagtgatgaggatgagggtggaagcagtgtcacctcca

SEQ ID NO: 287966 - DNA, 120 bp, Artificial Sequence
  ENSG00000130749_21 (sequence is synthesized)
tcctgaagaccttgaggcagcagacgtccagccgacccccggcttcagttggggagctgagcagcagtgggctgggggacccccgcctccagaagggacaccccacaggaagccggctgg

SEQ ID NO: 287967 - DNA, 120 bp, Artificial Sequence
  ENSG00000130749_22 (sequence is synthesized)
ctgaccctcgcctcagccgggaccccagactcacccgccatgtggaggcttctggcgggtctggcccaggtgattcgggaccctccgatcctcggctggctcgcgccctgcccacctcca

SEQ ID NO: 287968 - DNA, 120 bp, Artificial Sequence
  ENSG00000130749_23 (sequence is synthesized)
agcccgaaggcagccttcattccagccctgtgggccccagcagttccaaggggtctgggccgcccccaacggaggaggaggaaggggagcgggccctgcgggagaaggccgtgaacattc

SEQ ID NO: 287969 - DNA, 120 bp, Artificial Sequence
  ENSG00000130749_24 (sequence is synthesized)
ccctggacccactccccgggcaccctctgcgggacccacggtcacagctgcagcagttcagccacatcaagaaggacgtgaccctgagcaagcccagcttcgcccgcaccgtgctctgga

SEQ ID NO: 287970 - DNA, 120 bp, Artificial Sequence
  ENSG00000130749_25 (sequence is synthesized)
ctgatccccctacccatccccaagcaggacgcagtgccccccgtgcccgcggccctgcaatccatgcccaccctggacccccggctgcaccgcgctgccacggcagggccccccaacgcc

SEQ ID NO: 287971 - DNA, 120 bp, Artificial Sequence
  ENSG00000130749_26 (sequence is synthesized)
ggcgcctccacggattccagcacacagggcgccaacctccccgactttgaacttctgtctcgcatcctcaagacagtcaatgccaccggctcctcggccgcccccggttccagcgacaaa

SEQ ID NO: 287972 - DNA, 120 bp, Artificial Sequence
  ENSG00000130749_27 (sequence is synthesized)
cccagtgacccccgggtgcggaaggcccccaccgaccctcggctgcagaaacccacagactctacggcctcctcccgggctgccaagcccggccctgctgaggcgccctctcccaccgcc

SEQ ID NO: 287973 - DNA, 120 bp, Artificial Sequence
  ENSG00000130749_28 (sequence is synthesized)
agcccgagtggggatgcctccccaccagccaccgctccctacgacccccgcgtgctggcggccggtggactgggccagggcggagggggcgggcagagcagtgtgctgagcggtatcagc

SEQ ID NO: 287974 - DNA, 120 bp, Artificial Sequence
  ENSG00000130749_29 (sequence is synthesized)
ctctacgacccgaggactcccaacgcggggggcaaagccacagagccggctgctgacacgggtgcccagcccaagggtgctgagggcaatggcaagagctcggcctccaaggctaaggag

SEQ ID NO: 287975 - DNA, 120 bp, Artificial Sequence
  ENSG00000130749_30 (sequence is synthesized)
cccccgttcgtccgcaagtctgccctggaacagccagagacagggaaggccggtgctgatgggggcacccccacggacagatacaacagctacaaccggccccggcccaaggctgctgca

SEQ ID NO: 287976 - DNA, 120 bp, Artificial Sequence
  ENSG00000130749_31 (sequence is synthesized)
gcccccgctgccaccaccgccaccccaccccccgagggtgccccaccccagcccggggtgcacaacctgcccgtgcccaccctcttcgggacggtgaagcagacacccaagacgggctca

SEQ ID NO: 287977 - DNA, 120 bp, Artificial Sequence
  ENSG00000130749_32 (sequence is synthesized)
ggaagcccatttgctgggaacagtccggcccgcgagggtgagcaggatgcggcatccctgaaggatgtttttaaaggcttcgaccccacggcctcccccttttgccagtagtgtccagcc

SEQ ID NO: 287978 - DNA, 120 bp, Artificial Sequence
  ENSG00000130749_33 (sequence is synthesized)
agagctgcggctccagccacccttcctagggtggcattcagggcagcacccagggtagggaacttgggggcaaggggaggcaggctgggtgttccttttttcttttctttttcttttgct

SEQ ID NO: 287979 - DNA, 120 bp, Artificial Sequence
  ENSG00000130749_34 (sequence is synthesized)
ttccgtctcttttatttttttttaaagtagtactttctttgagatttgtaaattgtatataaccatcttaagttctggtcagtgtggcgggctcaggggctcctgctgagcaaaccgact

SEQ ID NO: 287980 - DNA, 120 bp, Artificial Sequence
  ENSG00000130749_35 (sequence is synthesized)
catgcccgcaaacctgtgaactttcgccagtgcctggcctcagactctgtgggctctgcgtggccgggccttgctggaggcccagtgggttttctgggcaaagcatggccccttttcccc

SEQ ID NO: 287981 - DNA, 120 bp, Artificial Sequence
  ENSG00000130749_36 (sequence is synthesized)
aggacaaagggaacagttggtgtctgggaaggtattgaacgctcctcaccctgtgcccgaagagacccggaaccaagaccatggcagggcctgcgtggaagcaggtccaggcgtttctag

SEQ ID NO: 287982 - DNA, 120 bp, Artificial Sequence
  ENSG00000130749_37 (sequence is synthesized)
aaccctagggtgcaccatcactgtcttttcagtgcaggctgtaacaacccactcaggagacagtgagagtgaaaaggtattaaggaaaaagcccccagcggcactatgggggctccctgg

SEQ ID NO: 287983 - DNA, 120 bp, Artificial Sequence
  ENSG00000130749_38 (sequence is synthesized)
cgcatgcctgctcctgtccctggattaccacacgtgccctccctgccaccctccgtctagagcaagcggatgccccccagcctgcagcagaagcctccacagtgagaactggacccaaag

SEQ ID NO: 287984 - DNA, 120 bp, Artificial Sequence
  ENSG00000130749_39 (sequence is synthesized)
gtagtgggggccggtgtggggcagagtcctgaagagccacctctaggaggcagcccctaggagcacgcacgttctgtcagtattaccccacctgtcctatcaggtgggccacaccctgct

SEQ ID NO: 287985 - DNA, 120 bp, Artificial Sequence
  ENSG00000130749_40 (sequence is synthesized)
tgcccacaccagggtctgtcctggtcctcaagccacgcacccgctatgcctgcactgcagcccagccccggacagctccaggatccgtgcagtggctgcgccgccaggccccaacaatgg

SEQ ID NO: 287986 - DNA, 120 bp, Artificial Sequence
  ENSG00000130749_41 (sequence is synthesized)
ggaccctggggtggctcctggccaagtgttctctgttttcctcgcacctccttacactgtgtgacctgcagggcatgaggtattgatgtgttcgggtttcctttcccaagccagcagatg

SEQ ID NO: 287987 - DNA, 120 bp, Artificial Sequence
  ENSG00000130749_42 (sequence is synthesized)
caggtgttccaaggtgtgttgctctgtgggatttgtggacacttaagaaacggactgagtgggaaccctgcagccaggggatggggagcctctgctccccccatgctcccaccctggctg

SEQ ID NO: 287988 - DNA, 120 bp, Artificial Sequence
  ENSG00000130749_43 (sequence is synthesized)
agggccagcctcatctgcagagccctggaggaggcccacctatggacacagcccgagagatgggcgcaaggggtgctgggggaggcctgctatcctgcctctgggccacttgaggggcct

SEQ ID NO: 287989 - DNA, 120 bp, Artificial Sequence
  ENSG00000130749_44 (sequence is synthesized)
caggaagtgtgtgcttgtggctgcatctgcccgtctccctggcccaccatgtggctgcaggccaagctcttcattgctgaccatgaagagacctagttacctgccaagggattccccttc

SEQ ID NO: 287990 - DNA, 120 bp, Artificial Sequence
  ENSG00000130749_45 (sequence is synthesized)
cctcctcctcagggtggggtgaacaaggctcctatcccaccccaccccaaaaagagaaaaatgaaaaactcatagtttggagccaggaggcagggtgtcctacagggctgcacagccctg

SEQ ID NO: 287991 - DNA, 120 bp, Artificial Sequence
  ENSG00000130749_46 (sequence is synthesized)
tgtctttttttttttttttttttttacacaatcattaatgagatttgtcttcagccaccagtgttggccttgaagcagagggcacagcccttggtgtttgtaaaataagtatgaatacac

SEQ ID NO: 287992 - DNA, 120 bp, Artificial Sequence
  ENSG00000130749_47 (sequence is synthesized)
ggcacagcccttggtgtttgtaaaataagtatgaatacacagtgtggcagtgttgtggtttttgttgttgtttttcctctccttttgagaattttcttttgtaaaagaaaaatatttttt

SEQ ID NO: 287993 - DNA, 120 bp, Artificial Sequence
  ENSG00000130749_48 (sequence is synthesized)
aaaccgaaatctgtggatgaaatagaagctggagccctcctcttggaatattcagcctaagaacctcataggactatgaattcacccgaaattctcatttgccatcaggccgagctttta

SEQ ID NO: 287994 - DNA, 120 bp, Artificial Sequence
  ENSG00000130749_49 (sequence is synthesized)
aagaaaaattgttctctaaccaggattgtaacaaaagtgtaaatactgtttcagagttgagagttggtggtgcaaatatgtatataatgaactgtatttttacaatgatcgccgcatgac

SEQ ID NO: 287995 - DNA, 120 bp, Artificial Sequence
  ENSG00000130749_50 (sequence is synthesized)
tatttcacaccctttttatactccatatctgtcttccagaaacgtcacctgcctttctcctgtggtctcttaatccagtaattgtattactgccattaaaggatgcagttattttaaaaa

SEQ ID NO: 287996 - DNA, 120 bp, Artificial Sequence
  ENSG00000130749_51 (sequence is synthesized)
cagccccccatatgcgccggtgagtgactggcatgcactgctgagctctggggccgggaggagttcaactgcttgtgtttcttgagcacttgctgtgttctgggcattttttgtgagttt

SEQ ID NO: 287997 - DNA, 120 bp, Artificial Sequence
  ENSG00000130749_52 (sequence is synthesized)
cagtcctgggccatcaggtattaatttaatccccattttatgagtgaggaaactgaaacttagacaatttcaacaaggcagcccagacaaccaagtgagaccccacaaaaaataaaaaaa

SEQ ID NO: 287998 - DNA, 120 bp, Artificial Sequence
  ENSG00000130749_53 (sequence is synthesized)
gctttctctcccggcctcatgcgtttcccccccctcgcggcgctcgcccgctctccctcgctctcgctctgtcttttttgggcgccatgctgaggggaagaccatactttgccttttaaa

SEQ ID NO: 287999 - DNA, 120 bp, Artificial Sequence
  ENSG00000130751_0 (sequence is synthesized)
tcatccaggcccccccccccccagctccttgctgggaccctgagccctgcacggatctcagtttccctagaaggtctcccgagggcactaagcgttgcccctggccccctcccgctgcag

SEQ ID NO: 288000 - DNA, 120 bp, Artificial Sequence
  ENSG00000130751_1 (sequence is synthesized)
gagactcggggctcggagcccgcctgagcgagccccccggagatggcggccccctatcccggcagtggcggcggaagcgaggtcaaatgcgtgggaggccgcggcgccagcgtcccctgg

SEQ ID NO: 288001 - DNA, 120 bp, Artificial Sequence
  ENSG00000130751_2 (sequence is synthesized)
gactttctacccgggctgatggtcaaggcgccgtccggaccgtgcctgcaggcgcagcgcaaggagaagtcccggaacgcggcgcgctcgcggcgcgggaaggagaacctggagttcttc

SEQ ID NO: 288002 - DNA, 120 bp, Artificial Sequence
  ENSG00000130751_3 (sequence is synthesized)
gagctggccaagcttctcccgctgcccggcgccatctccagccagctggacaaggcttccatcgtgcgcctcagcgtcacctacctccgcctgcgccggttcgccgcgctgggggcgccg

SEQ ID NO: 288003 - DNA, 120 bp, Artificial Sequence
  ENSG00000130751_4 (sequence is synthesized)
ccctgggggctgagagccgcggggccgccagctggcctcgccccaggccgccgcggccccgcagcgctggtctccgaagtcttcgagcagcacctgggaggtcacatcttgcagtccctg

SEQ ID NO: 288004 - DNA, 120 bp, Artificial Sequence
  ENSG00000130751_5 (sequence is synthesized)
gatggctttgtgttcgccttgaaccaggaaggaaaattcctctacatctcagagacagtctccatctatctgggtctctcacaggtggagatgacgggcagcagcgtcttcgactacatt

SEQ ID NO: 288005 - DNA, 120 bp, Artificial Sequence
  ENSG00000130751_6 (sequence is synthesized)
caccctggggaccactcagaggtgctggagcaactggggctgcggacgccgacgcccggccccccaaccccgccctccgtctcctcttcctcctcctcttcctcttcgcttgcagatacc

SEQ ID NO: 288006 - DNA, 120 bp, Artificial Sequence
  ENSG00000130751_7 (sequence is synthesized)
cccgagatcgaggccagcctcaccaaggtgcccccctcctccctggtccaggagcgctccttctttgtccgcatgaaatccacgctcaccaagagggggctgcacgtcaaggcctcaggg

SEQ ID NO: 288007 - DNA, 120 bp, Artificial Sequence
  ENSG00000130751_8 (sequence is synthesized)
aaggtcatccacgtgactgggcgccttcgggcccacgccctgggccttgtggccctcgggcacacgttgcccccggcccccctggctgagctgccactccatggacacatgatcgtcttc

SEQ ID NO: 288008 - DNA, 120 bp, Artificial Sequence
  ENSG00000130751_9 (sequence is synthesized)
cgtctcagcctgggtctcaccatccttgcttgtgagagcagagtcagcgaccacatggacctggggccctcagagctggtgggccgcagctgctaccagtttgtccacggacaggacgcc

SEQ ID NO: 288009 - DNA, 120 bp, Artificial Sequence
  ENSG00000130751_10 (sequence is synthesized)
acgaggatccgccagagccacgtggacttgctggacaagggtcaggtgatgactggttactaccgttggctgcagcgtgccgggggcttcgtgtggctgcagtctgtggccacagtggct

SEQ ID NO: 288010 - DNA, 120 bp, Artificial Sequence
  ENSG00000130751_11 (sequence is synthesized)
gggagcgggaagagccccggggagcaccatgtgctttgggtcagccacgtgctcagccaagccgagggtggccaaactcctttggatgccttccagcttccagccagcgtggcctgtgag

SEQ ID NO: 288011 - DNA, 120 bp, Artificial Sequence
  ENSG00000130751_12 (sequence is synthesized)
gaggcatccagcccggggccagagcccacagagccggagcctccgacggaagggaagcaggctgccccagcggagaacgaggccccccagacccagggcaaacgcatcaaagtggagccc

SEQ ID NO: 288012 - DNA, 120 bp, Artificial Sequence
  ENSG00000130751_13 (sequence is synthesized)
ggcccgagggaaaccaaaggctccgaggacagtggcgacgaggatccctccagccacccggccacaccgaggcccgagttcacctctgtcatccgggcaggggtcctgaagcaggatccg

SEQ ID NO: 288013 - DNA, 120 bp, Artificial Sequence
  ENSG00000130751_14 (sequence is synthesized)
ccccccgcccaccctcctgcacgcgggcttcctgccgccggtggtgcggggcctgtgcacacccggcaccatccgctacggccccgcggagctgggcctggtgtacccgcacctgcagag

SEQ ID NO: 288014 - DNA, 120 bp, Artificial Sequence
  ENSG00000130751_15 (sequence is synthesized)
gtgtacccgcacctgcagaggctgggtccgggccccgcgctcccggaggccttttacccgcccctgggcctgccctacccggggcccgcgggcaccaggctgccgcggaagggggactga

SEQ ID NO: 288015 - DNA, 120 bp, Artificial Sequence
  ENSG00000130751_16 (sequence is synthesized)
aagggggactgaggactggcagagctgccggcgccggaccctgcgacaaccggggtcccccaggacagtaggcccggctctgcccgtagccctgagaattaaacgccggctctccctgca

SEQ ID NO: 288016 - DNA, 80 bp, Artificial Sequence
  ENSG00000130751_17 (sequence is synthesized)
gccgaggtgggcgccgagagctgggcgccacagcccgcgcgtcccgctgcgccccgcgcgccccggggtctatggagctg

SEQ ID NO: 288017 - DNA, 120 bp, Artificial Sequence
  ENSG00000130751_18 (sequence is synthesized)
atggtggtcagcgcacctgcgtgcaggcaaatgaggcaaggctgagcccagagggcgagcgagttactgcgcgcgcacctcacccgccccctgcattcccctccttcgccggcaggtgga

SEQ ID NO: 288018 - DNA, 120 bp, Artificial Sequence
  ENSG00000130751_19 (sequence is synthesized)
tggtccctggaagtccttcttcagggctgcccacagtccctcctgctgcacctacagctccagggactccgtttagcattggaagagcagcaaggagactgagtgatgcctcaggatgtg

SEQ ID NO: 288019 - DNA, 120 bp, Artificial Sequence
  ENSG00000130755_0 (sequence is synthesized)
agccccggtccccacgcctagaagacagcggaactaagaaaagaagaggcctgtggacagaacaatcatgtctgactccctggtggtgtgcgaggtagacccagagctaacagaaaagct

SEQ ID NO: 288020 - DNA, 120 bp, Artificial Sequence
  ENSG00000130755_1 (sequence is synthesized)
gaggaaattccgcttccgaaaagagacagacaatgcagccatcataatgaaggtggacaaagaccggcagatggtggtgctggaggaagaatttcagaacatttccccagaggagctcaa

SEQ ID NO: 288021 - DNA, 120 bp, Artificial Sequence
  ENSG00000130755_2 (sequence is synthesized)
agagacagcccaggttcgtggtttacagctacaagtacgtgcatgacgatggccgagtgtcctaccctttgtgtttcatcttctccagccctgtgggctgcaagccggaacaacagatga

SEQ ID NO: 288022 - DNA, 120 bp, Artificial Sequence
  ENSG00000130755_3 (sequence is synthesized)
tgtatgcagggagtaaaaacaggctggtgcagacagcagagctcacaaaggtgttcgaaatccgcaccactgatgacctcactgaggcctggctccaagaaaagttgtctttctttcgtt

SEQ ID NO: 288023 - DNA, 120 bp, Artificial Sequence
  ENSG00000130755_4 (sequence is synthesized)
gatctctgggctggggactgaattcctgatgtctgagtcctcaaggtgactggggacttggaacccctaggacctgaacaaccaagactttaaataaattttaaaatgcaaaaactcgga

SEQ ID NO: 288024 - DNA, 120 bp, Artificial Sequence
  ENSG00000130755_5 (sequence is synthesized)
gcctagaagacagcggaactaagaaaagaagaggcctgtggacagaacaatcatgctcttcctgggtccctccggcagtctgactccctggtggtgtgcgaggtagacccagagctaaca

SEQ ID NO: 288025 - DNA, 120 bp, Artificial Sequence
  ENSG00000130755_6 (sequence is synthesized)
attagctcacgcccgggtgacgaacggcgcgccagccaacgggcggcgagggcagcccgaagggcgggaggtgtgagccgatctgactccctggtggtgtgcgaggtagacccagagcta

SEQ ID NO: 288026 - DNA, 120 bp, Artificial Sequence
  ENSG00000130755_7 (sequence is synthesized)
ctggtgcagacagcagagctcacaaaggttcagactgggatggggctccagagtgttagggagaggtggtgtgggtcctgggtctgagggaagagggactagagtcctcactgtctcagt

SEQ ID NO: 288027 - DNA, 69 bp, Artificial Sequence
  ENSG00000130755_8 (sequence is synthesized)
tcttacaggtgagccaccgtgcccagccactgtctcagtgtttgagtagatcataatgccgagacctct

SEQ ID NO: 288028 - DNA, 120 bp, Artificial Sequence
  ENSG00000130755_9 (sequence is synthesized)
caatgcagccatcataaaacatttccccagaggagctcaaaatggagttgccggagagacagcccaggtatcctgggggaagaaagggttggatcaggccatgaggggaggggtgatgtt

SEQ ID NO: 288029 - DNA, 120 bp, Artificial Sequence
  ENSG00000130755_10 (sequence is synthesized)
ggggaggggtgatgttggaggtataggctaagggactgctggagttccagccctattcatggactttgaatctctgtgtttggccgagtgaggtggctcatccctgtaatcccagcactt

SEQ ID NO: 288030 - DNA, 80 bp, Artificial Sequence
  ENSG00000130758_0 (sequence is synthesized)
ggcagtcgtggcccgggatgcggagccgggggccgccggtggagctgcgcggggtgagcggcgcggggaacggggactgc

SEQ ID NO: 288031 - DNA, 120 bp, Artificial Sequence
  ENSG00000130758_1 (sequence is synthesized)
ggtgagcggcgcggggaacggggactgcctgccgccctcgccctcgtcccccaccggcggaccccggcgggcattcgagagccgcgcggccaggccctcttagccctctgccgtttgggg

SEQ ID NO: 288032 - DNA, 120 bp, Artificial Sequence
  ENSG00000130758_2 (sequence is synthesized)
cgggtgaacctgccgccccactcccaccccgccccgccccgcccgtacagccaaatcggaagggacgagcctgccctttgaaagggttttttttcttgctcctgcggagggcgccccagc

SEQ ID NO: 288033 - DNA, 120 bp, Artificial Sequence
  ENSG00000130758_3 (sequence is synthesized)
cagccatggccctcaggagctccctagaccccgcagggactgccctccatcccggccgccggggcccgccctctgcatcccgcgggcagcctgtgtgaagcggcctcccgcagcccccgg

SEQ ID NO: 288034 - DNA, 120 bp, Artificial Sequence
  ENSG00000130758_4 (sequence is synthesized)
tcccccatggaggaggaggagggggcggtggccaaggagtggggcacgacccccgcggggcccgtctggaccgcggtgttcgactacgaggcggcgggcgacgaggagctgaccctgcgg

SEQ ID NO: 288035 - DNA, 120 bp, Artificial Sequence
  ENSG00000130758_5 (sequence is synthesized)
aggggcgatcgcgtccaggtgctttcccaagactgtgcggtgtccggcgacgagggctggtggaccgggcagctccccagcggccgcgtgggcgtcttccccagcaactacgtggccccc

SEQ ID NO: 288036 - DNA, 120 bp, Artificial Sequence
  ENSG00000130758_6 (sequence is synthesized)
ggcgcccccgctgcacccgcgggcctccagctgccccaggagatccccttccacgagctgcagctagaggagatcatcggtgtggggggctttggcaaggtctatcgggccctgtggcgt

SEQ ID NO: 288037 - DNA, 120 bp, Artificial Sequence
  ENSG00000130758_7 (sequence is synthesized)
ggcgaggaggtggcagtcaaggccgcccggctggaccctgagaaggacccggcagtgacagcggagcaggtgtgccaggaagcccggctctttggagccctgcagcaccccaacataatt

SEQ ID NO: 288038 - DNA, 120 bp, Artificial Sequence
  ENSG00000130758_8 (sequence is synthesized)
gcccttaggggcgcctgcctcaaccccccacacctctgcctagtgatggagtatgcccggggtggtgcactgagcagggtgctggcaggtcgccgggtgccacctcacgtgctggtcaac

SEQ ID NO: 288039 - DNA, 120 bp, Artificial Sequence
  ENSG00000130758_9 (sequence is synthesized)
tgggctgtgcaggtggcccggggcatgaactacctacacaatgatgcccctgtgcccatcatccaccgggacctcaagtccatcaacatcctgatcctggaggccatcgagaaccacaac

SEQ ID NO: 288040 - DNA, 120 bp, Artificial Sequence
  ENSG00000130758_10 (sequence is synthesized)
ctcgcagacacggtgctcaagatcacggacttcggcctcgcccgcgagtggcacaagaccaccaagatgagcgctgcggggacctacgcctggatggcgccggaggttatccgtctctcc

SEQ ID NO: 288041 - DNA, 120 bp, Artificial Sequence
  ENSG00000130758_11 (sequence is synthesized)
ctcttctccaaaagcagtgatgtctggagcttcggggtgctgctgtgggagctgctgacgggggaggtcccctaccgtgagatcgacgccttggccgtggcgtatggcgtggctatgaat

SEQ ID NO: 288042 - DNA, 120 bp, Artificial Sequence
  ENSG00000130758_12 (sequence is synthesized)
aagctgacgctgcccattccctccacgtgccccgagccctttgcccgcctcctggaggaatgctgggacccagacccccacgggcggccagatttcggtagcatcttgaagcggcttgaa

SEQ ID NO: 288043 - DNA, 120 bp, Artificial Sequence
  ENSG00000130758_13 (sequence is synthesized)
gtcatcgaacagtcagccctgttccagatgccactggagtccttccactcgctgcaggaagactggaagctggagattcagcacatgtttgatgaccttcggaccaaggagaaggagctt

SEQ ID NO: 288044 - DNA, 120 bp, Artificial Sequence
  ENSG00000130758_14 (sequence is synthesized)
aggagcagcgcttccaggaggagcagctgcggcggcgggagcaggagctggcagaacgtgagatggacatcgtggaacgggagctgcacctgctcatgtgccagctgagccaggagaagc

SEQ ID NO: 288045 - DNA, 120 bp, Artificial Sequence
  ENSG00000130758_15 (sequence is synthesized)
cccgggtccgcaagcgcaagggcaacttcaagcgcagccgcctgctcaagctgcgggaaggcggcagccacatcagcctgccctctggctttgagcataagatcacagtccaggcctctc

SEQ ID NO: 288046 - DNA, 120 bp, Artificial Sequence
  ENSG00000130758_16 (sequence is synthesized)
caactctggataagcggaaaggatccgatggggccagcccccctgcaagccccagcatcatcccccggctgagggccattcgcctgactcccgtggactgtggtggcagcagcagtggca

SEQ ID NO: 288047 - DNA, 120 bp, Artificial Sequence
  ENSG00000130758_17 (sequence is synthesized)
gcagcagtggaggaagtgggacatggagccgcggtgggcccccaaagaaggaagaactggtcgggggcaagaagaagggacgaacgtgggggcccagctccaccctgcagaaggagcggg

SEQ ID NO: 288048 - DNA, 120 bp, Artificial Sequence
  ENSG00000130758_18 (sequence is synthesized)
tgggaggagaggagaggctgaaggggctgggggaaggaagcaaacagtggtcatcaagtgcccccaacctgggcaagtcccccaaacacacacccatcgcccctggctttgccagcctca

SEQ ID NO: 288049 - DNA, 120 bp, Artificial Sequence
  ENSG00000130758_19 (sequence is synthesized)
atgagatggaggagttcgcggaggcagaggatggaggcagcagcgtgcccccttccccctactcgaccccgtcctacctctcagtgccactgcctgccgagccctccccgggggcgcggg

SEQ ID NO: 288050 - DNA, 80 bp, Artificial Sequence
  ENSG00000130758_20 (sequence is synthesized)
ggtggggacacggcgcccggcggcgctgcgacctggcgctgctaggctgcgccacgctgctgggggctgtgggcctgggc

SEQ ID NO: 288051 - DNA, 80 bp, Artificial Sequence
  ENSG00000130758_21 (sequence is synthesized)
acgtggccgaggcgcgcgcggccgacggtgaggagcagcggcgctggctcgacggcctcttctttccccgcgccggccgc

SEQ ID NO: 288052 - DNA, 120 bp, Artificial Sequence
  ENSG00000130758_22 (sequence is synthesized)
gccgcgaagacgtgggccccggcctgggcctggcgccctcggccaccctcgtgtcgctgtcgtccgtgtccgactgcaactccacgcgttcactgctgcgctctgacagtgacgaggccg

SEQ ID NO: 288053 - DNA, 120 bp, Artificial Sequence
  ENSG00000130758_23 (sequence is synthesized)
caccggccgcgccctccccaccaccctccccgcccgcgcccacacccacgccctcgcccagcaccaaccccctggtggacctggagctggagagcttcaagaaggacccccgccagtcgc

SEQ ID NO: 288054 - DNA, 120 bp, Artificial Sequence
  ENSG00000130758_24 (sequence is synthesized)
tcaagaaggacccccgccagtcgctcacgcccacccacgtcacggctgcatgcgctgtgagccgcgggcaccggcggacgccatcggacggggcgctggggcagcgggggccgcccgagc

SEQ ID NO: 288055 - DNA, 120 bp, Artificial Sequence
  ENSG00000130758_25 (sequence is synthesized)
gtgaccttctggacttcccccgcctgcccgacccccaggccctgttcccagcccgccgccggccccctgagttcccaggccgccccaccaccctgacctttgccccgagacctcggccgg

SEQ ID NO: 288056 - DNA, 120 bp, Artificial Sequence
  ENSG00000130758_26 (sequence is synthesized)
ctgccagtcgcccccgcttggacccctggaaactggtctccttcggccggacactcaccatctcgcctcccagcaggccagacactccggagagccctgggccccccagcgtgcagccca

SEQ ID NO: 288057 - DNA, 120 bp, Artificial Sequence
  ENSG00000130758_27 (sequence is synthesized)
cactgctggacatggacatggaggggcagaaccaagacagcacagtgcccctgtgcggggcccacggctcccactaaggcctgcccaccaccgcccgcctgggcagccatgaatgtagcg

SEQ ID NO: 288058 - DNA, 120 bp, Artificial Sequence
  ENSG00000130758_28 (sequence is synthesized)
ccccaggccctgccccagcccgccatgccacaaggtgggggaggccctgggcaggatgttcactctatttattggggaaggagggaggggggggacacttaacttattcctttgtacccc

SEQ ID NO: 288059 - DNA, 120 bp, Artificial Sequence
  ENSG00000130758_29 (sequence is synthesized)
agggggtggagccctgtgcccaccctgcactggggggagggtgggcagggatactcagggacagggcatcatgggggatttggcacaaaatggagcattaaaggtaacccctgcccccta

SEQ ID NO: 288060 - DNA, 120 bp, Artificial Sequence
  ENSG00000130758_30 (sequence is synthesized)
cacccgtgtccccagagcgccccccaagaggctgctgggagcagccccgacctaggatttatctcttccttttctttttcaacttgtttttattgctaaatatatcgcacatagtcagtg

SEQ ID NO: 288061 - DNA, 80 bp, Artificial Sequence
  ENSG00000130758_31 (sequence is synthesized)
aacttgtttttattgctaaatatatcgcacatagtcagtgatcagcccagtgcagtggcgagcacttgtagtcccagcaa

SEQ ID NO: 288062 - DNA, 120 bp, Artificial Sequence
  ENSG00000130758_32 (sequence is synthesized)
gagcgaagagaccaggtttcactgggccagtgagtggaaggccttcctgggaagggagatggtggcccctggggcgtggggggtcatttccaggggcagggaccacccttctctgaggct

SEQ ID NO: 288063 - DNA, 120 bp, Artificial Sequence
  ENSG00000130758_33 (sequence is synthesized)
tctcctggagacagattcaagaacgatgctcgtgggtcttggtcttgctgttggaggggtcatcgggggctgtcccttggcacaagtccccgtggggccctggccagccctgcagcggag

SEQ ID NO: 288064 - DNA, 120 bp, Artificial Sequence
  ENSG00000130758_34 (sequence is synthesized)
cgtgccccgagccctttgcccgcctcctggagggtgagccggggccccgtgacgagggtaggctcagcttggagtggcagggacctgtgggcccagacctttccccttcacacctatcca

SEQ ID NO: 288065 - DNA, 120 bp, Artificial Sequence
  ENSG00000130758_35 (sequence is synthesized)
taccagtgggcccaggagtgaggaagaaggggctggaacccactggactctaaacagcctccccatggttggctccatcccccacatcccagcccttgtttgggccaggcccagagctct

SEQ ID NO: 288066 - DNA, 120 bp, Artificial Sequence
  ENSG00000130758_36 (sequence is synthesized)
caggacaacctgttaggattccttggccctgggattccaccttgatcctgattccactaccagcccctcctcggggtgcaggtcccagggtttctctcccagcgtttcactgagtggaat

SEQ ID NO: 288067 - DNA, 120 bp, Artificial Sequence
  ENSG00000130758_37 (sequence is synthesized)
gaaattctgccttcctctgagcaggctgagtccccagagcatgaccactgacacctccatgccccaccactgtccttcctcctcccaccccagaatgctgggacccagacccccacgggc

SEQ ID NO: 288068 - DNA, 120 bp, Artificial Sequence
  ENSG00000130758_38 (sequence is synthesized)
caagatcacggacttcggcctcgcccgcgagtggcacaagaccaccaagatgagcgctgcggggacctacgcctggatggcgccggagaatgctgggacccagacccccacgggcggcca

SEQ ID NO: 288069 - DNA, 120 bp, Artificial Sequence
  ENSG00000130762_0 (sequence is synthesized)
caggaagcggaggaggcgccccgggccggaccgcgctgccgcaggagcgaagcggctgcaggacaggacaggacccggcgctggaagctgcaccgccagcgcgccgcccctccgtccctc

SEQ ID NO: 288070 - DNA, 120 bp, Artificial Sequence
  ENSG00000130762_1 (sequence is synthesized)
cctccgtccctccgccccgcggcgcaggaccccacagccgcccagcatggcccagcggcactcagacagctccttggaggagaagctcctgggacaccgcttccactcggagctccggct

SEQ ID NO: 288071 - DNA, 120 bp, Artificial Sequence
  ENSG00000130762_2 (sequence is synthesized)
cgatgccggggggaacccagcctccgggctcccaatggtccgtggctccccgcgtgttagagacgatgccgccttccagccccaggtcccggcacccccacagcctcggcccccggggca

SEQ ID NO: 288072 - DNA, 120 bp, Artificial Sequence
  ENSG00000130762_3 (sequence is synthesized)
cgaggagccatggcccatcgtcctgagcacagagagcccggcggccctcaagctgggcacccaacagctgatccctaagagcctggctgtggccagcaaggcaaagaccccagcccgcca

SEQ ID NO: 288073 - DNA, 120 bp, Artificial Sequence
  ENSG00000130762_4 (sequence is synthesized)
ccagagcttcggggcggctgtacttagcagggaggccgcccggcgggaccctaagctcctcccagcccccagcttctccctggatgacatggacgtggacaaggaccccgggggcatgct

SEQ ID NO: 288074 - DNA, 120 bp, Artificial Sequence
  ENSG00000130762_5 (sequence is synthesized)
gaggcggaacctgcggaaccaatcctaccgggcggccatgaagggcctggggaagccaggtggccagggagatgccatccagctaagccctaagctccaggctctggctgaggaacccag

SEQ ID NO: 288075 - DNA, 120 bp, Artificial Sequence
  ENSG00000130762_6 (sequence is synthesized)
ccagcctcatactcggagcccggccaaaaacaagaagacgctggggaggaaacgtgggcacaagggttccttcaaggacgacccccagctctaccaggagatccaggagcggggcctgaa

SEQ ID NO: 288076 - DNA, 120 bp, Artificial Sequence
  ENSG00000130762_7 (sequence is synthesized)
caccagccaggagtctgatgacgacatcctcgatgagtcctccagccccgagggaacccagaaggtggacgccaccattgtggtcaagagctaccggcccgcccaggtcacctggagcca

SEQ ID NO: 288077 - DNA, 120 bp, Artificial Sequence
  ENSG00000130762_8 (sequence is synthesized)
gctcccagaggtggtggaattgggcatcctggaccagctctccactgaggagcggaaaaggcaggaggccatgttcgagatcctcacgtcggagttctcctaccagcacagcctgagcat

SEQ ID NO: 288078 - DNA, 120 bp, Artificial Sequence
  ENSG00000130762_9 (sequence is synthesized)
cctggtggaggagttcctgcagtccaaggagctgcgggcgaccgtgacccagatggagcaccaccacctcttctccaacatcctggatgtcctgggtgccagtcagaggttcttcgagga

SEQ ID NO: 288079 - DNA, 120 bp, Artificial Sequence
  ENSG00000130762_10 (sequence is synthesized)
cctggagcagcggcacaaggcccaggtgctggtcgaggacatcagtgacatcctggaggagcacgctgagaagcacttccacccctacatcgcctactgctccaacgaggtctaccaaca

SEQ ID NO: 288080 - DNA, 120 bp, Artificial Sequence
  ENSG00000130762_11 (sequence is synthesized)
agaggcggccggcgtgcgggggcctgcccatgctctccttcctgatcctccccatgcagcgggtgacccggctgcccctcctgatggatacgctctgcctcaagacccagggccactccg

SEQ ID NO: 288081 - DNA, 120 bp, Artificial Sequence
  ENSG00000130762_12 (sequence is synthesized)
aaaggtacaaggctgccagccgtgcactgaaggccatcagcaagctggtgaggcagtgcaacgagggggcccacaggatggagcgcatggagcagatgtacacgctgcacacacagctgg

SEQ ID NO: 288082 - DNA, 120 bp, Artificial Sequence
  ENSG00000130762_13 (sequence is synthesized)
acttcagcaaggtcaagtccctcccactgatctctgcctcccggtggctgctgaagcgcggagagctgttcttagtggaagaaaccggactttttcgaaaaattgccagccggccaacgt

SEQ ID NO: 288083 - DNA, 120 bp, Artificial Sequence
  ENSG00000130762_14 (sequence is synthesized)
gctaccttttcctgttcaacgatgtcctggttgtgaccaagaagaagagcgaggagagctacatggtccaggactacgcccagatgaaccacatccaggtggagaagatagagccgtctg

SEQ ID NO: 288084 - DNA, 120 bp, Artificial Sequence
  ENSG00000130762_15 (sequence is synthesized)
agctccctctgcccgggggcggcaaccgtagctcctccgtgccccaccccttccaggtgaccctgcttcgcaacagcgagggccgccaggagcagctcctgctctcctcggactccgcga

SEQ ID NO: 288085 - DNA, 120 bp, Artificial Sequence
  ENSG00000130762_16 (sequence is synthesized)
gtgaccgggcacggtggatcgtggcgctcacacacagtgagagacagtggcagggcctctccagcaaaggagacctgccccaggtggagatcaccaaggccttcttcgcgaagcaagcag

SEQ ID NO: 288086 - DNA, 120 bp, Artificial Sequence
  ENSG00000130762_17 (sequence is synthesized)
acgaggtcacactgcagcaggcggacgtggtcctggttctgcagcaggaggatgggtggctctatggcgagaggctccgggacggagagacgggatggttccccgaggactttgcccgct

SEQ ID NO: 288087 - DNA, 120 bp, Artificial Sequence
  ENSG00000130762_18 (sequence is synthesized)
tcatcaccagccgtgtggccgtggagggcaatgtccgcaggatggagcgtctgcgggtggagacggacgtgtagccctggcgaggccagccggcggcagcacagcctgtctccaatcagc

SEQ ID NO: 288088 - DNA, 120 bp, Artificial Sequence
  ENSG00000130762_19 (sequence is synthesized)
aagtggtcgtgcctggctctagagagcgtggggagctggtctcaaggacccagcatggttccctggggcttcccaagagcctgtggctgtggtgccgggctccagacacttcacggaagg

SEQ ID NO: 288089 - DNA, 120 bp, Artificial Sequence
  ENSG00000130762_20 (sequence is synthesized)
aagatcacatgtccccagagaggcacccccaggcaagctcgagggggccacaccgtgtcccagggagcccagcctattcccgttggctggctgggcccctcagctgctgggccccacctc

SEQ ID NO: 288090 - DNA, 120 bp, Artificial Sequence
  ENSG00000130762_21 (sequence is synthesized)
cccactgcacccagggggcaactccacctggactgatgggcacaggaggcaccaatagcgattattgggggcaatgcgaggtctcctcctatgcccttcctacccctgagtgggacaaga

SEQ ID NO: 288091 - DNA, 120 bp, Artificial Sequence
  ENSG00000130762_22 (sequence is synthesized)
agggccctgagtgcccaggagtgccccacgttctgagaaggggccggccggagggaggggacccggcagggagatttcggttttgaggtttctaaatacattaaagttatttcttaagaa

SEQ ID NO: 288092 - DNA, 120 bp, Artificial Sequence
  ENSG00000130762_23 (sequence is synthesized)
cccatttcaggtgggacttgtggcataggagaggtcttgggactggtgcccagcctggggcagtcccctcccaaagcctccctctcccacacagccgtgagagcctgtgggcctagagga

SEQ ID NO: 288093 - DNA, 120 bp, Artificial Sequence
  ENSG00000130762_24 (sequence is synthesized)
cgtgaggccctgtggagctgacatctattgggcacagcttcgcatgtggagccgagaggtctctggggtcccagggcagaatcgccgtgggcaacacctgccccggctgacagctgcggt

SEQ ID NO: 288094 - DNA, 120 bp, Artificial Sequence
  ENSG00000130762_25 (sequence is synthesized)
cctttggggacagtccctggggctgcccctggacaacagagggacggcaccagtgcgtgggatcgtggcagggggctctgtaaggagccccaggcctctgaccacttcccacccgccctc

SEQ ID NO: 288095 - DNA, 120 bp, Artificial Sequence
  ENSG00000130762_26 (sequence is synthesized)
cctgctgtccagcatcccaggtccgggtcccgccccaagtgcttgctgtgtgctgcctctgggagctgagctcagctcctgccacgtccatgtatgtgtgagtgtgcatgcagatgcatg

SEQ ID NO: 288096 - DNA, 120 bp, Artificial Sequence
  ENSG00000130762_27 (sequence is synthesized)
gaccgctggccctggggcaggagggtacagggagttggccctgagcccctctgacctcagagccgaggcgcggcttccactcggcacatgctctacgtgacactcgggggcaggtggcgc

SEQ ID NO: 288097 - DNA, 120 bp, Artificial Sequence
  ENSG00000130762_28 (sequence is synthesized)
ggactcgaaagccatggcctctgttctgtgggacgcgggaactcttggagcccgtccgtggctgcctccccaccactgcaggggagccgggtgggacctggacgggagcccagcagcact

SEQ ID NO: 288098 - DNA, 120 bp, Artificial Sequence
  ENSG00000130762_29 (sequence is synthesized)
gtgtcctccggtcccctctgcctcaggcagctgcatgtttgcctctgacctcctcagggctttagattgctgccctggggcgggaagctccggcctcctcccccagctgggcccccgaca

SEQ ID NO: 288099 - DNA, 120 bp, Artificial Sequence
  ENSG00000130762_30 (sequence is synthesized)
cctgagggtggggccgggcataccatcctggggtcccacggccagagccctgccccggatggagcattacgtgcttgtgaccttctcctccaggcttggcctatgatattgtaatagtta

SEQ ID NO: 288100 - DNA, 120 bp, Artificial Sequence
  ENSG00000130762_31 (sequence is synthesized)
cccttggcggatttgtgttcacttactcaatggttcatgaggttcaggcacactgacgagttggaactggcatcacccagagccctgctgagcctcctcccagcccccaccccaccagtc

SEQ ID NO: 288101 - DNA, 120 bp, Artificial Sequence
  ENSG00000130762_32 (sequence is synthesized)
ctcctagacgtggtagccctgtccctggcacctactctccctgttctgtggacgcagagaggggctcagagaggctcaccagcatgggctgtgtgtgtgggatgccagcccacagggcag

SEQ ID NO: 288102 - DNA, 120 bp, Artificial Sequence
  ENSG00000130762_33 (sequence is synthesized)
agggtatatgagggtgaaaggtgtacacacacacgcacacatgtatatacagtgtacacgcactcaggcacgtatgtgcccatgtgcacacaatgcatatgtatggatgcacgccagtac

SEQ ID NO: 288103 - DNA, 120 bp, Artificial Sequence
  ENSG00000130762_34 (sequence is synthesized)
acacatgcatgcacacttgcacacactgcattgcaccgatgcatgcacatgtgcacacaatgcacacgtttgcatacatgcacacacaggcactgcacacacatgcacccggtgcacaca

SEQ ID NO: 288104 - DNA, 120 bp, Artificial Sequence
  ENSG00000130762_35 (sequence is synthesized)
catacacgtggatgcacacacatgcatgcacatggtgcacaggcatattcacacatgtgcatgctgcccatacacacagccccgcacatggcaggactgagctaagcttcctgaggctac

SEQ ID NO: 288105 - DNA, 120 bp, Artificial Sequence
  ENSG00000130762_36 (sequence is synthesized)
acatggcagggttgcccaagccaaacagaacctcaaactcctgggggccccagggatgtgcagaaatggggctgccagggggcctccactgacgattccccaagttggatggagatggcc

SEQ ID NO: 288106 - DNA, 120 bp, Artificial Sequence
  ENSG00000130762_37 (sequence is synthesized)
ctccgcacctctccatctgccgggaagatctgtgggacaagatccccccccgccctctggcctctccctctggatgccccatgctctttctgggctgctttggggctctggcggctgggg

SEQ ID NO: 288107 - DNA, 120 bp, Artificial Sequence
  ENSG00000130762_38 (sequence is synthesized)
ggagcggggggctgacccaaggcgggttacacagagaggaaggtgacggggataggccctcggcaggacaggcctactccaggatcggacctacctgagccctgtggggtggctgtccat

SEQ ID NO: 288108 - DNA, 120 bp, Artificial Sequence
  ENSG00000130764_0 (sequence is synthesized)
gcctgccagcagctgaggcgccatggcggcggcagcggtgtcagagtcttggccggagctggagctggctgagcgcgagcggcggcgggagctgctgctgacggggcccgggctggagga

SEQ ID NO: 288109 - DNA, 120 bp, Artificial Sequence
  ENSG00000130764_1 (sequence is synthesized)
gcgagtgcgggcggcgggtgggcagctgccgccgcggcttttcaccctgccgctgctgcactacttggaagtgagcggctgcgggagcttgcgcgcgccggggcctggcctggcgcaggg

SEQ ID NO: 288110 - DNA, 120 bp, Artificial Sequence
  ENSG00000130764_2 (sequence is synthesized)
cctgccgcagctgcacagcctcgtgctgcggcgcaacgcgctggggcccggcctgagccccgagctcgggccgctgcctgcccttcgggtgctcgacctgtcgggcaacgcgctggaggc

SEQ ID NO: 288111 - DNA, 120 bp, Artificial Sequence
  ENSG00000130764_3 (sequence is synthesized)
tgggccccgccgagccgccgggccttccgcagctgcagagcctcaacctcagcggcaaccggctgcgcgagctgccagccgacctggcgcgctgcgccccgcgcctgcagagcctcaacc

SEQ ID NO: 288112 - DNA, 120 bp, Artificial Sequence
  ENSG00000130764_4 (sequence is synthesized)
gcgcctgcagagcctcaacctcaccggcaattgcctagactcctttcccgccgagctctttcgccccggcgcgctgcccctgctcagtgaactggcggctgctgacaactgcctccgaga

SEQ ID NO: 288113 - DNA, 120 bp, Artificial Sequence
  ENSG00000130764_5 (sequence is synthesized)
actcagccccgacatcgcccacctggcctcgctcaagacgttggacctctcgaacaaccagctgagcgagatccctgcagagcttgcggactgccccaagctcaaggagatcaatttccg

SEQ ID NO: 288114 - DNA, 120 bp, Artificial Sequence
  ENSG00000130764_6 (sequence is synthesized)
tgggaacaagctgagggacaagcgcctggagaagatggtcagcggctgccagaccagatccatcctggagtacctgcgcgtcggaggccgtggtggcgggaagggcaagggccgtgccga

SEQ ID NO: 288115 - DNA, 120 bp, Artificial Sequence
  ENSG00000130764_7 (sequence is synthesized)
gggctcggagaaggaagagagccggaggaagaggagggagaggaagcagaggcgggaaggtggtgatggggaggagcaggacgtgggagatgccggccggctgctgctcagggtcctgca

SEQ ID NO: 288116 - DNA, 120 bp, Artificial Sequence
  ENSG00000130764_8 (sequence is synthesized)
cgtctctgaaaaccccgtacctctgacagtcagagtgagccccgaggtccgggatgtgcggccctacattgtgggggccgtggtgcgaggcatggacctgcagccagggaatgcactcaa

SEQ ID NO: 288117 - DNA, 120 bp, Artificial Sequence
  ENSG00000130764_9 (sequence is synthesized)
gcgcttcctcacctcgcagaccaagctccacgaagatctctgtgagaagaggacggctgccacccttgccacccacgagctccgtgccgtcaaagggcccctgctgtactgcgcccggcc

SEQ ID NO: 288118 - DNA, 120 bp, Artificial Sequence
  ENSG00000130764_10 (sequence is synthesized)
cccacaggacctcaagattgtccccttggggcggaaagaagccaaggccaaggagctggtgcggcagctgcagctggaggccgaggagcagaggaagcagaagaagcggcagagtgtgtc

SEQ ID NO: 288119 - DNA, 120 bp, Artificial Sequence
  ENSG00000130764_11 (sequence is synthesized)
gggcctgcacagataccttcacttgctggatggaaatgaaaattacccgtgtcttgtggatgcagacggtgatgtgatttccttcccaccaataaccaacagtgagaagacaaaggttaa

SEQ ID NO: 288120 - DNA, 120 bp, Artificial Sequence
  ENSG00000130764_12 (sequence is synthesized)
gaaaacgacttctgatttgtttttggaagtaacaagtgccaccagtctgcagatttgcaaggatgtcatggatgccctcattctgaaaatggcagaaatgaaaaagtacactttagaaaa

SEQ ID NO: 288121 - DNA, 120 bp, Artificial Sequence
  ENSG00000130764_13 (sequence is synthesized)
taaagaggaaggatcactctcagatactgaagccgatgcagtctctggacaacttccagatcccacaacgaatcccagtgctggaaaggacgggccctcccttctggtggtggagcaggt

SEQ ID NO: 288122 - DNA, 120 bp, Artificial Sequence
  ENSG00000130764_14 (sequence is synthesized)
ccgggtggtggatctggaagggagcctgaaggtggtgtacccgtccaaggccgacctggccactgcccctccccacgtgactgtcgtgcgctgacgccagggccgcctgtccgcgtttgt

SEQ ID NO: 288123 - DNA, 120 bp, Artificial Sequence
  ENSG00000130764_15 (sequence is synthesized)
gcctgtccgcgtttgtttggccggttttgcggaggtttctatgcggcaatgctgaattatccgttagattttcaccccagtttttttgttggtttttttttttgagatggagtctcgctc

SEQ ID NO: 288124 - DNA, 120 bp, Artificial Sequence
  ENSG00000130764_16 (sequence is synthesized)
aagtgctgggattacaggcgtgagctgtgcctggcccaccccagcattttttaagatgtatgtattcgttgttctgtttttccagatgattctgtcgtaaagtgatgctatgttgtcgtt

SEQ ID NO: 288125 - DNA, 120 bp, Artificial Sequence
  ENSG00000130764_17 (sequence is synthesized)
gtaaagtgatgctatgttgtcgttacaacatcaaagtgattttacggtttttgatgggattattcaagtgtcagaattaactgttcaaaatgttctgaatcatgtagatacatggcaggt

SEQ ID NO: 288126 - DNA, 120 bp, Artificial Sequence
  ENSG00000130764_18 (sequence is synthesized)
aactgtttatgggagaaaagtacagtgctgttacgtggcactgtacagtcatgtgccacgtaacagcgtctgggtcagtgacggacacttacctgacagcggatccacaatattctcgtg

SEQ ID NO: 288127 - DNA, 120 bp, Artificial Sequence
  ENSG00000130764_19 (sequence is synthesized)
cagtgtgtttggaatcctggtctgggctctcgtcgttggccttgtagatcaagtaggggaagtgagtgatgttcagtcatgctgctgggacacttggttttccagatgaaaacacataaa

SEQ ID NO: 288128 - DNA, 120 bp, Artificial Sequence
  ENSG00000130764_20 (sequence is synthesized)
taaaactacatgcaccatcgaggcttgtgtaaagactctgtgatcacacagcagcggctaagcacacgtttctcatgtgtcactgagcgacacgtgactgtcactggttcggagacccga

SEQ ID NO: 288129 - DNA, 120 bp, Artificial Sequence
  ENSG00000130764_21 (sequence is synthesized)
aaacttgggaagccaaccgatgtgcgtttccttgaacggcacggtcactttctatgacgcagcatcttgtaaaaccatatcatgccaggatgcagcttggcatgtgcaagggcgttgggt

SEQ ID NO: 288130 - DNA, 120 bp, Artificial Sequence
  ENSG00000130764_22 (sequence is synthesized)
tctccagctggcagtgatcataatcttggggggaaaagttttaatgtgaccttagaattggcagaattgcgtctcttcatactgctgttggattgctttgtgggggtggagatgtggaga

SEQ ID NO: 288131 - DNA, 120 bp, Artificial Sequence
  ENSG00000130764_23 (sequence is synthesized)
ccccttcaggcaagcagcctgtaggctgaaggcagtggcagcacctcaccctggctcagcggggccaagcggaggagagcggcatcggtggggtttccatcgtgtgcacgctggtgctgc

SEQ ID NO: 288132 - DNA, 120 bp, Artificial Sequence
  ENSG00000130764_24 (sequence is synthesized)
agtgacaggcaggtggagccccaggagtggaccagacgcctctgcttgggaagcatcggcagtcctcagccagccgagggacagatggtagcaaaagctggaggatgcttaggtttttga

SEQ ID NO: 288133 - DNA, 120 bp, Artificial Sequence
  ENSG00000130764_25 (sequence is synthesized)
gccaaaaatcttcatttatgcgccagaaaggtgggtcctgggcgccttctgttgtagacgtttccgttgtgaatgtccaggtcagacccccacgtccatgtgtcttcgtgtatgtccagg

SEQ ID NO: 288134 - DNA, 120 bp, Artificial Sequence
  ENSG00000130764_26 (sequence is synthesized)
caccacatgtgcgtgcacaccactcccgggagtcagtgtgcttggctcatgaggacacggccagccaccgcgatgattttacagaccccactgccttacgatctgggtgccatgtgagaa

SEQ ID NO: 288135 - DNA, 120 bp, Artificial Sequence
  ENSG00000130764_27 (sequence is synthesized)
gcagactcatcagctttatcgaatgacaccatttgttctctgttcagtgtctcgatttctgtgtctgtagaaatgactggtgattttgggaagcatctgcaagagccccacagcccacac

SEQ ID NO: 288136 - DNA, 120 bp, Artificial Sequence
  ENSG00000130764_28 (sequence is synthesized)
acctttagttgtcaacctgagaggcccggggccctgtgcagtgggcagactaacagctgggtggctcttcagagccttgcaggacatgggccaggctgccttgagacctggacccacttg

SEQ ID NO: 288137 - DNA, 120 bp, Artificial Sequence
  ENSG00000130764_29 (sequence is synthesized)
tctggtcaccgccaggccttcccgtctcgcccactgtgggagggaggggactccagacaggacgaggcccacacactcagtgccagctggactgccgtgggtgtgtcagatgactgcctt

SEQ ID NO: 288138 - DNA, 120 bp, Artificial Sequence
  ENSG00000130764_30 (sequence is synthesized)
gccttgtgtcctcccaaaacctgattcctgctgctctgggcagtcaaggcagatgccacagttggccaggggcctgccctgctggaggcttgaggcggcacgggggcttccccaggccag

SEQ ID NO: 288139 - DNA, 120 bp, Artificial Sequence
  ENSG00000130764_31 (sequence is synthesized)
gactctgctggagttctggggctggggaccccagacagttgctctgagaggtgatttggggctgccatggcagaggctgccctttctctgcatggcccggcccagcccgggaaggaggaa

SEQ ID NO: 288140 - DNA, 120 bp, Artificial Sequence
  ENSG00000130764_32 (sequence is synthesized)
gggaggaagggagggatgctggagctgccatcttggctcccggggacttggtgtccatgctgtaacacatctgtcactgcgtgggtgtggatgaggctgccacatgctgtgccctttcct

SEQ ID NO: 288141 - DNA, 120 bp, Artificial Sequence
  ENSG00000130764_33 (sequence is synthesized)
gatgcagcttgtgatgcgtgagatgctggaaatgtatttaactcgcagcacaggtgtctctgatgttttcttcaccccaccccaccccccgactcactaataaaaacagctccgcacctg

SEQ ID NO: 288142 - DNA, 120 bp, Artificial Sequence
  ENSG00000130764_34 (sequence is synthesized)
ccgaggagcagaggaagcagaagaagcggcagagtgtgtcgggcctgcacaggaaccgcctaatgctaccagaacccagaagcttcttaacagggtacaaagaaagcattctctttccaa

SEQ ID NO: 288143 - DNA, 120 bp, Artificial Sequence
  ENSG00000130766_0 (sequence is synthesized)
gctggcagttccgcggcggggatgctgaggagcgctgggtccgggagcagccctggcccctgcggacttccgaggccgtgaaaacccctgcgctgcggcccttcccaggcccccgaggcc

SEQ ID NO: 288144 - DNA, 120 bp, Artificial Sequence
  ENSG00000130766_1 (sequence is synthesized)
gttcgccgttcccgaagcccgactgggggaagagtccagcaccaaagcggccgttctcggattccggagcgttctggagccccgagagacgccccggggttctagaagctccccggcggc

SEQ ID NO: 288145 - DNA, 120 bp, Artificial Sequence
  ENSG00000130766_2 (sequence is synthesized)
gcccagtcccggcttcattcgggcgtccctccgaaacccactcgggtgcacgggtcgtcggcgagccgcgaccgggtcctggcgcgcaccatgatcgtggcggactccgagtgccgcgca

SEQ ID NO: 288146 - DNA, 120 bp, Artificial Sequence
  ENSG00000130766_3 (sequence is synthesized)
gagctcaaggactacctgcggttcgccccgggcggcgtcggcgactcgggccccggagaggagcagagggagagccgggctcggcgaggccctcgagggcccagcgccttcatccccgtg

SEQ ID NO: 288147 - DNA, 120 bp, Artificial Sequence
  ENSG00000130766_4 (sequence is synthesized)
gaggaggtccttcgggagggggctgagagcctcgagcagcacctggggctggaggcactgatgtcctctgggcgagtagacaacctggcagtggtgatgggcctgcaccctgactacttt

SEQ ID NO: 288148 - DNA, 120 bp, Artificial Sequence
  ENSG00000130766_5 (sequence is synthesized)
accagcttctggcgcctgcactacctgctgctgcacacggatggtcccttggccagctcctggcgccactacattgccatcatggctgccgcccgccatcagtgttcttacctggtaggc

SEQ ID NO: 288149 - DNA, 120 bp, Artificial Sequence
  ENSG00000130766_6 (sequence is synthesized)
tcccacatggccgagtttctgcagactggtggtgaccctgagtggctgctgggcctccaccgggcccccgagaagctgcgcaaactcagcgagatcaacaagttgctggcgcatcggcca

SEQ ID NO: 288150 - DNA, 120 bp, Artificial Sequence
  ENSG00000130766_7 (sequence is synthesized)
tggctcatcaccaaggaacacatccaggccttgctgaagaccggcgagcacacttggtccctggccgagctcattcaggctctggtcctgctcacccactgccactcgctctcctccttc

SEQ ID NO: 288151 - DNA, 120 bp, Artificial Sequence
  ENSG00000130766_8 (sequence is synthesized)
gtgtttggctgtggcatcctccctgagggggatgcagatggcagccctgccccccaggcacctacaccccctagtgaacagagcagccccccaagcagggacccgttgaacaactctggg

SEQ ID NO: 288152 - DNA, 120 bp, Artificial Sequence
  ENSG00000130766_9 (sequence is synthesized)
ggctttgagtctgcccgcgacgtggaggcgctgatggagcgcatgcagcagctgcaggagagcctgctgcgggatgaggggacgtcccaggaggagatggagagccgctttgagctggag

SEQ ID NO: 288153 - DNA, 120 bp, Artificial Sequence
  ENSG00000130766_10 (sequence is synthesized)
aagtcagagagcctgctggtgaccccctcagctgacatcctggagccctctccacacccagacatgctgtgctttgtggaagaccctactttcggatatgaggacttcactcggagaggg

SEQ ID NO: 288154 - DNA, 120 bp, Artificial Sequence
  ENSG00000130766_11 (sequence is synthesized)
gctcaggcaccccctaccttccgggcccaggattatacctgggaagaccatggctactcgctgatccagcggctttaccctgagggtgggcagctgctggatgagaagttccaggcagcc

SEQ ID NO: 288155 - DNA, 120 bp, Artificial Sequence
  ENSG00000130766_12 (sequence is synthesized)
tatagcctcacctacaataccatcgccatgcacagtggtgtggacacctccgtgctccgcagggccatctggaactatatccactgcgtctttggcatcagatatgatgactatgattat

SEQ ID NO: 288156 - DNA, 120 bp, Artificial Sequence
  ENSG00000130766_13 (sequence is synthesized)
ggggaggtgaaccagctcctggagcggaacctcaaggtctatatcaagacagtggcctgctacccagagaagaccacccgaagaatgtacaacctcttctggaggcacttccgccactca

SEQ ID NO: 288157 - DNA, 120 bp, Artificial Sequence
  ENSG00000130766_14 (sequence is synthesized)
aggacctgggcccggttcagctccccacaaggacttctctgtctggagacagccccagacccttttgtgtcccatgcccaccctccccacgctgcagtgggcttgtgtgtgatgtgcagt

SEQ ID NO: 288158 - DNA, 120 bp, Artificial Sequence
  ENSG00000130766_15 (sequence is synthesized)
cccgaagccacaccctcccttttcctcactggaatggacagttcattgcactgactctgggatctcagccctgctcctgggagctggaagagcacttggagatcctaagggaccacaccc

SEQ ID NO: 288159 - DNA, 120 bp, Artificial Sequence
  ENSG00000130766_16 (sequence is synthesized)
ttcctccttcccctgcccacagaggcagagggcacaggaaagaagccgggccaagctcggaattaatgtgccacaagtgttgtggccttcctgaactgggaagtccctggctggcccccg

SEQ ID NO: 288160 - DNA, 120 bp, Artificial Sequence
  ENSG00000130766_17 (sequence is synthesized)
ggggagaggggcaaatgcctccgggactgacactccaggcagctttgccttctctcccctgtcatttccagatttcattacctcctacttgccattcacccatcaatgtgaaagtcaggg

SEQ ID NO: 288161 - DNA, 120 bp, Artificial Sequence
  ENSG00000130766_18 (sequence is synthesized)
tcacagctggtctgtgtgtccagttccctaaaagcctgttctgttgggcagcctgaggctgttgcccgaatcctagttcagttttttgacttcctttgccctttttcccttttctccatg

SEQ ID NO: 288162 - DNA, 120 bp, Artificial Sequence
  ENSG00000130766_19 (sequence is synthesized)
cttaatggtgtgaggcgtcaggagagaggccaagtacataaaaaaaaaaaaagcagattatctctagagagtttgagcctttgctggtcacattgccttctgaagaggagggagtattag

SEQ ID NO: 288163 - DNA, 120 bp, Artificial Sequence
  ENSG00000130766_20 (sequence is synthesized)
attataaatcctctttattttggtcctttatgcttgaggttccaacctggagccacagtgtgtgagaggaggaggagagggagaattctgttctcccagagctgcacctgcctcgcagag

SEQ ID NO: 288164 - DNA, 120 bp, Artificial Sequence
  ENSG00000130766_21 (sequence is synthesized)
gccagcaccccactctcctgcctccagtggccctgccgcagatgtctcccaaaaagttgagcctttctagatggcttaggtggcaccatggctcagcaggaggggcgggaggcaccaggg

SEQ ID NO: 288165 - DNA, 120 bp, Artificial Sequence
  ENSG00000130766_22 (sequence is synthesized)
ttcttgtttggaccctgcccctgggccatggccaggtgaccatggctacattgccaaacctctgactgccacagctgcagactgagagggtgggtctgagtccccacaatgtctgaagct

SEQ ID NO: 288166 - DNA, 120 bp, Artificial Sequence
  ENSG00000130766_23 (sequence is synthesized)
gcccctgggattctcaggccaacctgccaacagcaagcggattttcttgcaagatcagggaccccatttctgcagccagtgtctcctgggtgccttctgaggactcccacccccatccca

SEQ ID NO: 288167 - DNA, 120 bp, Artificial Sequence
  ENSG00000130766_24 (sequence is synthesized)
gtatctcatctgtcccctctcctggggcttaagtgggttgcttccaggcagaagcagccaaggaccgattccaggcactttctgtagcaaatgactgtgaattacgacttctcttgccct

SEQ ID NO: 288168 - DNA, 120 bp, Artificial Sequence
  ENSG00000130766_25 (sequence is synthesized)
tcttctagcagtctgtgcctcctctctgaccagtttggagggcactgaagaaaggcaagggccgtgctgctgctgggcggggcaggagaggagcctggccagtgtgccacattaaatacc

SEQ ID NO: 288169 - DNA, 120 bp, Artificial Sequence
  ENSG00000130766_26 (sequence is synthesized)
cgtgcaggcgcggagaagcaaccggcacccccttccggcctgaaagccctccctgcaagaaggtgtgcaggagagaagaggccccggcatggggatctgggttctagagggcatgtgatg

SEQ ID NO: 288170 - DNA, 120 bp, Artificial Sequence
  ENSG00000130766_27 (sequence is synthesized)
actgtaaatgttcactgggtgggtagggagtggtatccagtgttcaagtgcagaaatctttggctttgctaccagttccatatgatgagaaataaacgttcgctgaggttttgtttcata

SEQ ID NO: 288171 - DNA, 120 bp, Artificial Sequence
  ENSG00000130768_0 (sequence is synthesized)
ataccctgctgggcaaaggaggaagagccagaggatccagacgccttggaggacttggaacacctgtaacaggacaaggagttctgctcaggcacgtggccacagaaaactacttaggaa

SEQ ID NO: 288172 - DNA, 120 bp, Artificial Sequence
  ENSG00000130768_1 (sequence is synthesized)
gcctgtggtgagaacaacaacagtgcctgagaatcccacggctctggggaagtgagccccgaggatgaggctgctcgcctggctgattttcctggctaactggggaggtgccagggctga

SEQ ID NO: 288173 - DNA, 120 bp, Artificial Sequence
  ENSG00000130768_2 (sequence is synthesized)
accagggaagttctggcacatcgctgacctgcaccttgaccctgactacaaggtatccaaagaccccttccaggtgtgcccatcagctggatcccagccagtgcccgacgcaggcccctg

SEQ ID NO: 288174 - DNA, 120 bp, Artificial Sequence
  ENSG00000130768_3 (sequence is synthesized)
gggtgactacctctgtgattctccctgggccctcatcaactcctccatctatgccatgaaggagattgagccagagccagacttcattctctggactggtgatgacacgcctcatgtgcc

SEQ ID NO: 288175 - DNA, 120 bp, Artificial Sequence
  ENSG00000130768_4 (sequence is synthesized)
cgatgagaaactgggagaggcagctgtactggaaattgtggaacgcctgaccaagctcatcagagaggtctttccagatactaaagtctatgctgctttgggaaatcatgattttcaccc

SEQ ID NO: 288176 - DNA, 120 bp, Artificial Sequence
  ENSG00000130768_5 (sequence is synthesized)
caaaaaccagttcccagctggaagtaacaacatctacaatcagatagcagaactatggaaaccctggcttagtaatgagtccatcgctctcttcaaaaaaggtgccttctactgtgagaa

SEQ ID NO: 288177 - DNA, 120 bp, Artificial Sequence
  ENSG00000130768_6 (sequence is synthesized)
gctgccgggtcccagcggggctgggcgaattgtggtcctcaacaccaatctgtactataccagcaatgcgctgacagcagacatggcggaccctggccagcagttccagtggctggaaga

SEQ ID NO: 288178 - DNA, 120 bp, Artificial Sequence
  ENSG00000130768_7 (sequence is synthesized)
ctttgagaagacgcaaaacaaggcatggttccgggagggcttcaatgaaaaatacctgaaggtggtccggaagcatcatcgcgtcatagcagggcagttcttcgggcaccaccacaccga

SEQ ID NO: 288179 - DNA, 120 bp, Artificial Sequence
  ENSG00000130768_8 (sequence is synthesized)
cagctttcggatgctctatgatgatgcaggtgtccccataagcgccatgttcatcacacctggagtcaccccatggaaaaccacattacctggagtggtcaatggggccaacaatccagc

SEQ ID NO: 288180 - DNA, 120 bp, Artificial Sequence
  ENSG00000130768_9 (sequence is synthesized)
catccgggtgttcgaatatgaccgagccacactgagcctgaaggacatggtgacctacttcatgaacctgagccaggcgaatgctcaggggacgccgcgctgggagctcgagtaccagct

SEQ ID NO: 288181 - DNA, 120 bp, Artificial Sequence
  ENSG00000130768_10 (sequence is synthesized)
gaccgaggcctatggggtgccggacgccagcgcccactccatgcacacagtgctggaccgcatcgctggcgaccagagcacactgcagcgctactacgtctataactcagtcagctactc

SEQ ID NO: 288182 - DNA, 120 bp, Artificial Sequence
  ENSG00000130768_11 (sequence is synthesized)
tgctggggtctgcgacgaggcctgcagcatgcagcacgtgtgtgccatgcgccaggtggacattgacgcttacaccacctgtctgtatgcctctggcaccacgcccgtgccccagctccc

SEQ ID NO: 288183 - DNA, 120 bp, Artificial Sequence
  ENSG00000130768_12 (sequence is synthesized)
gctgctgctgatggccctgctgggcctgtgcacgctcgtgctgtgacctgccaggctcaccttcttcctggtaacgggtaacgggggcagcgcccaggatcacccagagctgggccttcc

SEQ ID NO: 288184 - DNA, 120 bp, Artificial Sequence
  ENSG00000130768_13 (sequence is synthesized)
gctgggccttccaccatttcctccgcgcctgaggagtgaactgaaataggacaaccgaatcaggaagcgaagccccaggagctgcagccatccgtgatcgcgccactgcactccagcctg

SEQ ID NO: 288185 - DNA, 120 bp, Artificial Sequence
  ENSG00000130768_14 (sequence is synthesized)
agactctctccaaaaacaaaccagaaacagaaaagaaatgacgacccaagacccccctacaagcatacttcttttgcgtattatgtttaactcacaaaacaaagctcatcatgcgtttga

SEQ ID NO: 288186 - DNA, 120 bp, Artificial Sequence
  ENSG00000130768_15 (sequence is synthesized)
ggggcttaaatgcatcaccaccttccctcactctcagcttatccaccttcccctgaccactgagcctcaggaaggttgagctccttccacccttctccagctcaggatcagaaccctgga

SEQ ID NO: 288187 - DNA, 120 bp, Artificial Sequence
  ENSG00000130768_16 (sequence is synthesized)
ggcacctgccaccgagtcagggcagtgcctcaccaagtcaccttttcccctggatgactgtcacagcttcatacctggtctccctgcctctggccctgccctgctatggcccatccgcta

SEQ ID NO: 288188 - DNA, 120 bp, Artificial Sequence
  ENSG00000130768_17 (sequence is synthesized)
cacaagagagaagaaactaatctcctatagcaccactttcatcttgtctccgtcctgctcaaaaaccttcagtggctccccagtgccttcaagataaagttgtgtctccttgacctagta

SEQ ID NO: 288189 - DNA, 120 bp, Artificial Sequence
  ENSG00000130768_18 (sequence is synthesized)
gctgggaaatggcaggacaaagcctgtgcctggctgtactatgcttcatgtcctcttgggatggtggggtttagaggcacccttctaggcactgaggacatagaggtaaacaagacgggc

SEQ ID NO: 288190 - DNA, 120 bp, Artificial Sequence
  ENSG00000130768_19 (sequence is synthesized)
ctctcatggaactgacattgtaaacagggaagatggacaataagcaagccaacaagaggaagcgcaaggaccatgtgcccaagagaaaggcaaagggcctcccccaacatccatcctggc

SEQ ID NO: 288191 - DNA, 120 bp, Artificial Sequence
  ENSG00000130770_0 (sequence is synthesized)
agcgcgtaacgagagactgcttgctgcggcagagacgccagaggtgcagctccagcagcaatggcagtgacggcgttggcggcgcggacgtggcttggcgtgtggggcgtgaggaccatg

SEQ ID NO: 288192 - DNA, 120 bp, Artificial Sequence
  ENSG00000130770_1 (sequence is synthesized)
caagcccgaggcttcggctcggatcagtccgagaatgtcgaccggggcgcgggctccatccgggaagccggtggggccttcggaaagagagagcaggctgaagaggaacgatatttccga

SEQ ID NO: 288193 - DNA, 120 bp, Artificial Sequence
  ENSG00000130770_2 (sequence is synthesized)
agctttgaaaaaacaccatgaagaagaaatcgttcatcataagaaggagattgagcgtctgcagaaagaaattgagcgccataagcagaagatcaaaatgctaaaacatgatgattaagt

SEQ ID NO: 288194 - DNA, 120 bp, Artificial Sequence
  ENSG00000130770_3 (sequence is synthesized)
gcacaccgtgtgccatagaatggcacatgtcattgcccacttctgtgtagacatggttctggtttaactaatatttgtctgtgtgctactaacagattataataaattgtcatcagtgaa

SEQ ID NO: 288195 - DNA, 120 bp, Artificial Sequence
  ENSG00000130770_4 (sequence is synthesized)
ggatctcccaatggccttccaatccttaaactgccaatcgccccacccgttcctacctggtgccttgggcgccccatcccccaacagaactcccgggccccaatccagtataccctaacc

SEQ ID NO: 288196 - DNA, 120 bp, Artificial Sequence
  ENSG00000130770_5 (sequence is synthesized)
cttgatgtcccgaccgttgccacgtatagggcactcccagttacctgcacaacagtttcaggcccccaaaccgtttccaccggcgggtctccaaaacaacccacggctcaactcctcctt

SEQ ID NO: 288197 - DNA, 120 bp, Artificial Sequence
  ENSG00000130770_6 (sequence is synthesized)
tatcattaccatctcccgcgtggagttctcctcaggtcgtgcgaaacacccccagattcttcgcacagtgtctagatccgaccgcccaacgtttgcctcccagcctgactccctcggccc

SEQ ID NO: 288198 - DNA, 120 bp, Artificial Sequence
  ENSG00000130770_7 (sequence is synthesized)
ttacccacctgtcaccccctctacgctctccttcctcgccagcacgccttagctttgcaagcctgcatgcattcaggcttctcaggtgtttctagacccccgactccgcaagagtgagga

SEQ ID NO: 288199 - DNA, 120 bp, Artificial Sequence
  ENSG00000130770_8 (sequence is synthesized)
tgatgggagctggtcatgggagctacttatggttggacaccatcttctaaaggcttttgccctactcagcccaacctagacctgtagatttccctctcctgcttaggagtatggagtggg

SEQ ID NO: 288200 - DNA, 120 bp, Artificial Sequence
  ENSG00000130770_9 (sequence is synthesized)
gagagcagtgaggaattaatcttgcttttgcttgtcctttggcctttcacttctgccttctgttgagaattatcaccatgacacctgccataccgtatagagagccaaggtacagccgtt

SEQ ID NO: 288201 - DNA, 120 bp, Artificial Sequence
  ENSG00000130770_10 (sequence is synthesized)
agagactatctaattgagcccctacattttgtagttaaggaaaactgaggcctaaatgtgaccaaaccaacattgtaatccagtcccttcttggaacctaaattgaactgccaagtactg

SEQ ID NO: 288202 - DNA, 120 bp, Artificial Sequence
  ENSG00000130770_11 (sequence is synthesized)
cgcatgcaagagaccctttattggccttacagtgggccattcatttctataggcaaagaaagctctagacagattggaataggaaatggatatttgccttttagctacacccctttgtct

SEQ ID NO: 288203 - DNA, 120 bp, Artificial Sequence
  ENSG00000130770_12 (sequence is synthesized)
gtcttcctcattttgttcctttttttttccctaaaggggagtcaagttccctgggttgttcccctcataaggtattagggacttgtgtcacatctctctggagttttctattttaaagag

SEQ ID NO: 288204 - DNA, 120 bp, Artificial Sequence
  ENSG00000130770_13 (sequence is synthesized)
gaatctgaaagcaataagctctttggtcttcttaagatggctacacctcaatttaagatggggtattctttcactagttgaggagtagaagaggatgaccagctagactcccatggaatt

SEQ ID NO: 288205 - DNA, 120 bp, Artificial Sequence
  ENSG00000130770_14 (sequence is synthesized)
ggaactcctattccttgcttagacattacaggttatgctttgagatctctttggggtgaaggattgaaattaaaccctgagccaccgtgtccttgtagagcacagagtagagaacaactg

SEQ ID NO: 288206 - DNA, 120 bp, Artificial Sequence
  ENSG00000130770_15 (sequence is synthesized)
cctttgatagacatttgggtcacgtccggttttacgcttttacaatacatcagtgaacagcagtaatacgagctcaagacagaaggcctgaaaaacattgaaaaacacagagacggaaaa

SEQ ID NO: 288207 - DNA, 120 bp, Artificial Sequence
  ENSG00000130770_16 (sequence is synthesized)
aaaaaaaccacagagggggaaatataatttcgggttatttcagtttcacctttacactttgttatattccacattttttgcaataaatataaatttggaagtaaaagcataaaacgaaaa

SEQ ID NO: 288208 - DNA, 120 bp, Artificial Sequence
  ENSG00000130772_0 (sequence is synthesized)
agttggctggttgcaccgatctgggggcttcccgggctcgggtaaccggagtgctggtatctaatcgtcgctcaaaagctcctaggtgcgcgggtggatataattcccggcttctcgaga

SEQ ID NO: 288209 - DNA, 120 bp, Artificial Sequence
  ENSG00000130772_1 (sequence is synthesized)
agacactacagcctcaaggaggtatatcccgtgccttacctgactgggggctctgagtccagttgtgttgtcttcaacttagacaccatggaggcacctccagtcaccatgatgcctgtc

SEQ ID NO: 288210 - DNA, 120 bp, Artificial Sequence
  ENSG00000130772_2 (sequence is synthesized)
actgggggcaccattaacatgatggagtacctgttgcagggaagtgttttagatcacagtttggaaagcctcatccaccgccttcgtggtttgtgtgacaacatggaacctgagactttc

SEQ ID NO: 288211 - DNA, 120 bp, Artificial Sequence
  ENSG00000130772_3 (sequence is synthesized)
cttgaccatgagatggtattcctccttaagggccagcaagccagcccatttgttctcagggcccgacgctctatggacagggcaggggcaccctggcatctgcgctacctgggacagcca

SEQ ID NO: 288212 - DNA, 120 bp, Artificial Sequence
  ENSG00000130772_4 (sequence is synthesized)
gaaatgggagacaagaaccgccatgccctggtgcgaaactgcgtggacattgccacatctgagaacctcaccgacttcttgatggaaatgggcttccgcatggaccatgagtttgttgct

SEQ ID NO: 288213 - DNA, 120 bp, Artificial Sequence
  ENSG00000130772_5 (sequence is synthesized)
aagggacatttgttccgtaagggcatcatgaagattatggtgtacaagattttccgcatcctggtgccagggaacacagacagcactgaggccttgtcactctcctatctcgtggaatta

SEQ ID NO: 288214 - DNA, 120 bp, Artificial Sequence
  ENSG00000130772_6 (sequence is synthesized)
agtgtggtagcacccgctgggcaggacatggtctctgatgacatgaagaacttcgcagaacagctaaaacctctggttcacctagagaaaatagaccccaagaggctcatgtgactaaga

SEQ ID NO: 288215 - DNA, 77 bp, Artificial Sequence
  ENSG00000130772_7 (sequence is synthesized)
tgtgactaagaggatctgtccacatttggggcctatccttacttgtttgaaaaaatatgtttgcgctttgtttccca

SEQ ID NO: 288216 - DNA, 62 bp, Artificial Sequence
  ENSG00000130772_8 (sequence is synthesized)
aaatatgttttaaatgtcccatttcaccattgccaggcaggcattcttccttcagggagagg

SEQ ID NO: 288217 - DNA, 120 bp, Artificial Sequence
  ENSG00000130772_9 (sequence is synthesized)
ttcaccattgccaggcaggcattcttccttcagggagaggatggtgagaattaattggttctttgcactgttctcctcatgtggcgatttcactttcatgacagcctttctatattaaag

SEQ ID NO: 288218 - DNA, 120 bp, Artificial Sequence
  ENSG00000130772_10 (sequence is synthesized)
ttcactttcatgacagcctttctatattaaaggctcaggatgtcacggagaatctatctaatcccactgtattaagaggggaaaccgggccaagcgcagtggctcacacctctaatccca

SEQ ID NO: 288219 - DNA, 120 bp, Artificial Sequence
  ENSG00000130772_11 (sequence is synthesized)
aacccaggaggtgaaggttgcagtgaccagagatgacgccattgcactccagcctgggtgagaagagcgaaactccgtctcaaaaaaaaataaaaatgaagaggggaaaccagaataaat

SEQ ID NO: 288220 - DNA, 120 bp, Artificial Sequence
  ENSG00000130772_12 (sequence is synthesized)
ggaaaccagaataaattatcttttggaaaggacaatttcttgtttggccatttgtgtataaggttggtaacattagaggctgtgagcttgtgttacatggtaataaagccaatgaagaga

SEQ ID NO: 288221 - DNA, 120 bp, Artificial Sequence
  ENSG00000130772_13 (sequence is synthesized)
gagacgtcggcttccgaccggaagtgagaagaggaggaagttggctggttgcaccgatctgggggcttcccgggctcgggtaaccggagtgctggtatctaatcgtcgctcaaaagctcc

SEQ ID NO: 288222 - DNA, 120 bp, Artificial Sequence
  ENSG00000130775_0 (sequence is synthesized)
agtctgagcccagagagccgcggggaccatggagccggtgccgctgcaggacttcgtgcgcgccttggaccccgcctccctcccgcgcgtgctgcgggtctgctcgggggtctacttcga

SEQ ID NO: 288223 - DNA, 120 bp, Artificial Sequence
  ENSG00000130775_1 (sequence is synthesized)
gggctccatctatgagatctctgggaatgagtgctgcctctccacgggggacctgatcaaggtcacccaggtccgcctccagaaggtggtctgtgagaacccgaagaccagccagaccat

SEQ ID NO: 288224 - DNA, 120 bp, Artificial Sequence
  ENSG00000130775_2 (sequence is synthesized)
ggagctcgcccccaacttccagggctacttcacccccctcaacaccccacagagctatgaaaccctggaggagctggtctctgccacaactcagagctccaagcagctgcccacttgctt

SEQ ID NO: 288225 - DNA, 120 bp, Artificial Sequence
  ENSG00000130775_3 (sequence is synthesized)
catgtcgacccacaggattgtcacagagggcagggtggtgactgaggaccagctcctcatgcttgaggctgtggtgatgcacctcgggatccgctctgcccgctgtgtcctgggcatgga

SEQ ID NO: 288226 - DNA, 120 bp, Artificial Sequence
  ENSG00000130775_4 (sequence is synthesized)
gggtcagcaggtcatcctgcacctgcccctatcccagaaggggcccttctggacatgggagcctagtgcccctcgaactctgctccaggtcctacaggatccagccctgaaagacctcgt

SEQ ID NO: 288227 - DNA, 120 bp, Artificial Sequence
  ENSG00000130775_5 (sequence is synthesized)
cctcacctgccccaccctgccctggcattccctgatcctgcggccccagtatgagatccaagccatcatgcacatgcgcaggaccattgtcaagatcccttctaccctggaggtcgacgt

SEQ ID NO: 288228 - DNA, 120 bp, Artificial Sequence
  ENSG00000130775_6 (sequence is synthesized)
ggaggacgtcaccgcctcctcccggcacgtccactttatcaaaccgctgctgctgagcgaggtcctggcctgggaaggccctttccccctgtccatggagatcctggaggttcctgaggg

SEQ ID NO: 288229 - DNA, 120 bp, Artificial Sequence
  ENSG00000130775_7 (sequence is synthesized)
ccgccccatcttcctcagcccgtgggtgggctccttgcaaaaaggccagaggctttgcgtctatggcctagcctcaccaccctggcgggtcctggcctcaagcaagggccgcaaggtgcc

SEQ ID NO: 288230 - DNA, 120 bp, Artificial Sequence
  ENSG00000130775_8 (sequence is synthesized)
caggcacttcctggtgtcagggggctaccaaggcaagctgcggcggcggccaagggagttccccacggcctatgacctcctaggtgctttccagccaggccggccactccgggtggtggc

SEQ ID NO: 288231 - DNA, 120 bp, Artificial Sequence
  ENSG00000130775_9 (sequence is synthesized)
cacaaaggactgtgagggcgagagggaggagaatcccgagttcacgtccctggctgtgggtgaccggctggaggtgctggggcctggccaggcccatggggcccagggcagtgacgtgga

SEQ ID NO: 288232 - DNA, 120 bp, Artificial Sequence
  ENSG00000130775_10 (sequence is synthesized)
tgtcttggtttgtcagcggctgagtgaccaggctggggaggatgaggaggaagagtgcaaagaggaggcagagagcccagagcgggtcctgctgcccttccacttccctggcagtttcgt

SEQ ID NO: 288233 - DNA, 120 bp, Artificial Sequence
  ENSG00000130775_11 (sequence is synthesized)
aaggtggtggccaaggacaccagccaccccactgaccctctgacctccttcctgggcctgcggctggaggagaagatcacagagccattcttggtggtgagcctagactctgagcctggg

SEQ ID NO: 288234 - DNA, 120 bp, Artificial Sequence
  ENSG00000130775_12 (sequence is synthesized)
atgtgctttgagatccctccccggtggctggacctgactgttgtgaaggccaaggggcagccagacttgccagaggggtctctccccatagccacagtggaggagctgacagacaccttc

SEQ ID NO: 288235 - DNA, 120 bp, Artificial Sequence
  ENSG00000130775_13 (sequence is synthesized)
tattatcgtcttcggaagttaccagcctgtgagatccaagcccccccacccaggccccctaaaaatcagggcctcagcaagcagaggagacacagcagtgagggaggcgtcaagtcttct

SEQ ID NO: 288236 - DNA, 120 bp, Artificial Sequence
  ENSG00000130775_14 (sequence is synthesized)
caagtcttaggattgcagcaacacgctcggctgcccaaacccaaggcgaagaccttgccagagttcatcaaggatggctccagtacgtacagcaagattcctgcccacaggaagggccac

SEQ ID NO: 288237 - DNA, 120 bp, Artificial Sequence
  ENSG00000130775_15 (sequence is synthesized)
aggcccgctaagccccaaaggcaggatctagatgatgatgaacatgattatgaagaaatacttgagcaatttcagaaaaccatctaagtgctggaggaaccacgcttcctaactgctgct

SEQ ID NO: 288238 - DNA, 120 bp, Artificial Sequence
  ENSG00000130775_16 (sequence is synthesized)
tctcagggaatccgacaccagccaaccattttaagcctctaaaagacctcgggcaagtctcacagaaactgagctgcagacggggagtagctttgtggaaactgatttgatggacactgc

SEQ ID NO: 288239 - DNA, 120 bp, Artificial Sequence
  ENSG00000130775_17 (sequence is synthesized)
accagcttccttcaggttctagattcttgctacttagggcgggctggtttggacctaacatctcgcacgtgactccctcagcctcagagccttgggatgcagagcagctggcagggttcc

SEQ ID NO: 288240 - DNA, 120 bp, Artificial Sequence
  ENSG00000130775_18 (sequence is synthesized)
tctcaatcctgcaaccccagctgtcccaccggtggatgcagaggggaatccgaggccatcaaccttggtgacagcagcgcagtgccaatgctgatcacactgcatgggagattttgttaa

SEQ ID NO: 288241 - DNA, 120 bp, Artificial Sequence
  ENSG00000130775_19 (sequence is synthesized)
cgtctgccacccccactctcacccccaagctctaagcccccgggaggcctggactgtcttcctcatctctgtagcaccaagcctgatagatctgtatatggtaaacaggggtttaaccac

SEQ ID NO: 288242 - DNA, 120 bp, Artificial Sequence
  ENSG00000130775_20 (sequence is synthesized)
atgtggttaacatggattaatgtgggaacttggcttcaagaacacaaccttaggaccttgggccccaaaagctggtggtgaaatgaggaggagccaatttaagaagacccttatggagac

SEQ ID NO: 288243 - DNA, 120 bp, Artificial Sequence
  ENSG00000130775_21 (sequence is synthesized)
ctgaggctgcagaaactggtaggtttcatcaggtggttaaagtcgtcaaagttgtaagtgactaaccaagattatttcattttaaaaccatagaataaaaatgacacctgagcttctcta

SEQ ID NO: 288244 - DNA, 120 bp, Artificial Sequence
  ENSG00000130775_22 (sequence is synthesized)
gagagccgcggggaccatggagccggtgccgctgcaggacttcgtgcgcgccttggaccccgcctccctcccgcgcgtgctgcgggtctgctcgggggtctacttcgagggctacttcac

SEQ ID NO: 288245 - DNA, 120 bp, Artificial Sequence
  ENSG00000130775_23 (sequence is synthesized)
gagccgcggggaccatggagccggtgccgctgcaggacttcgtgcgcgccttggaccccgcctccctcccgcgcgtgctgcgggtctgctcgggggtctacttcgaggcggctgagtgac

SEQ ID NO: 288246 - DNA, 120 bp, Artificial Sequence
  ENSG00000130775_24 (sequence is synthesized)
tcctaaactacttcagcaggctcttacaaaagctgtcagaaaggcctcctaactcctttcttagtcattgatggacctcagctccatcttctggaaccttctgtggctgcccatcatcat

SEQ ID NO: 288247 - DNA, 120 bp, Artificial Sequence
  ENSG00000130775_25 (sequence is synthesized)
gggatgatgcaaaccccttaacatggcatccagggtcctttataagctgacttgtcgcacctccccgacccatcttcctccactcactctgctgtccacgctccagcgagagaaatgccc

SEQ ID NO: 288248 - DNA, 120 bp, Artificial Sequence
  ENSG00000130775_26 (sequence is synthesized)
gcagctccctcatggcgccgggactcctgctccagagccccacacccaggccttctgccagcagtgttcttcctccttcaggctcacaggcaaggtgggactcggatttctcactcagca

SEQ ID NO: 288249 - DNA, 120 bp, Artificial Sequence
  ENSG00000130775_27 (sequence is synthesized)
gcggtggtcctgcctcctcttctgtgctcccactgcacgctctacgtagctcaggacaggttgtttttagtgagtcctacctgagtctctggctgaaaagagttctgtcggggcagggac

SEQ ID NO: 288250 - DNA, 120 bp, Artificial Sequence
  ENSG00000130775_28 (sequence is synthesized)
cttacctgctccaaggccagagaggacctgctaaacggggccaaacagaatcacagatgagcgggagagagccaggcatggggtcagaaagactaagtttacgttccggttcacttactc

SEQ ID NO: 288251 - DNA, 120 bp, Artificial Sequence
  ENSG00000130775_29 (sequence is synthesized)
tgcctgtgctgggtactcctccgagcgtcctttttctcaccagtagacctgtgatatcctctgcagctgctttctgtgacctgcttactctgtggcaggcccctgatatgctttgtccca

SEQ ID NO: 288252 - DNA, 120 bp, Artificial Sequence
  ENSG00000130775_30 (sequence is synthesized)
accaattctcacagtgcttctgagttacacaccggtgtcctgcttcacagttgagaaggtgagaggcacagagaggtcaaatagtttacctgagatcacacagccaacaagtggcagggc

SEQ ID NO: 288253 - DNA, 120 bp, Artificial Sequence
  ENSG00000130775_31 (sequence is synthesized)
cagagcttgcaattgggtctgaccacacagcctgagcttctaactaccgtggtctgctgagaacgggaggggatgagacagatcaaaagtcctttactatccccagctcttgttttggga

SEQ ID NO: 288254 - DNA, 120 bp, Artificial Sequence
  ENSG00000130775_32 (sequence is synthesized)
tcttgggtgactcgtatttaatcacgtgtggtaggcagcaggtggcagtggaaattacaagatgactcctgagtggtctcagccccagcaggggcttttatctgtggcgtgagcgtggga

SEQ ID NO: 288255 - DNA, 120 bp, Artificial Sequence
  ENSG00000130775_33 (sequence is synthesized)
agtcattttctgacaatggctggactgaaacatccgaaacacaggccttgtgccagtgctgaaaagggtactttccagaaccgacagaccttagcccgtgtcttggctcccagtggaggg

SEQ ID NO: 288256 - DNA, 120 bp, Artificial Sequence
  ENSG00000130775_34 (sequence is synthesized)
actctgggcccggtcactgctgtcgccctggaaccacaacttttcccctctgtgcgttggaatcttggtgctgatcagggagctgtgccgcacactctgtaaagcgtggtggggcgccaa

SEQ ID NO: 288257 - DNA, 120 bp, Artificial Sequence
  ENSG00000130775_35 (sequence is synthesized)
ataaactgggaattgaaaccactcagagggtaacttgaggattaaagagcagacgtcatgtagcatctggcacatgggggaacgcaatggaagtcctctttcttctgggccacctcagct

SEQ ID NO: 288258 - DNA, 120 bp, Artificial Sequence
  ENSG00000130775_36 (sequence is synthesized)
caggcgtcgtcacaaggctttgtggctcctttcttacggtatccccactttgcttttttccccttcagcaagagaattaaaggacattgaccaaattcctaagtggaaaatcccaggaac

SEQ ID NO: 288259 - DNA, 120 bp, Artificial Sequence
  ENSG00000130775_37 (sequence is synthesized)
accctgtctccaacccccaaccctatcctcattttctaccctgatccctttctcccttgccagagaatatttcacatgcatgtagcaaaaacaccaggggtcttgagaggtcatagcctg

SEQ ID NO: 288260 - DNA, 120 bp, Artificial Sequence
  ENSG00000130775_38 (sequence is synthesized)
aaaaggaagtagagagagaagcagaggaagtgacacttaacgtgaatgaccgtttttcatggactctgcttccccatttcttgagaccctgatgatttctgctttttctcccaaagtctt

SEQ ID NO: 288261 - DNA, 120 bp, Artificial Sequence
  ENSG00000130775_39 (sequence is synthesized)
cagtatgagatccaagccatcatgcacacggctgagtgaccaggctggggaggatgaggaggaagagtgcaaagaggaggcagagagcccagagcgggtcctgctgcccttccacttccc

SEQ ID NO: 288262 - DNA, 120 bp, Artificial Sequence
  ENSG00000130779_0 (sequence is synthesized)
agatttaatccagagactgacttcactatagaacccacagttgtatcaatggttggggaaagatagtggcaacaggcaaaggagaaacagctctgacatacaaagaaaatgagtatgcta

SEQ ID NO: 288263 - DNA, 120 bp, Artificial Sequence
  ENSG00000130779_1 (sequence is synthesized)
aagccaagtgggcttaaggcccccaccaagatcctgaagcctggaagcacagctctgaagacacctacggctgttgtagctccagtagaaaaaaccatatccagtgaaaaagcatcaagc

SEQ ID NO: 288264 - DNA, 120 bp, Artificial Sequence
  ENSG00000130779_2 (sequence is synthesized)
actccatcatctgagactcaggaggaatttgtggatgactttcgagttggggagcgagtttgggtgaatggaaataagcctggatttatccagtttcttggagaaacccagtttgcacca

SEQ ID NO: 288265 - DNA, 120 bp, Artificial Sequence
  ENSG00000130779_3 (sequence is synthesized)
ggccagtgggctggaattgttttagatgaacccataggcaagaacgatggttcggtggcaggagttcggtatttccagtgtgaacctttaaagggcatatttacccgaccttcaaagtta

SEQ ID NO: 288266 - DNA, 120 bp, Artificial Sequence
  ENSG00000130779_4 (sequence is synthesized)
acaaggaaggtgcaagcagaagatgaagctaatggcctgcagacaacgcccgcctcccgagctacttcaccgctgtgcacttctacggccagcatggtgtcttcctccccctccacccct

SEQ ID NO: 288267 - DNA, 120 bp, Artificial Sequence
  ENSG00000130779_5 (sequence is synthesized)
tcaaacatccctcagaaaccatcacagccagcagcaaaggaaccttcagctacgcctccgatcagcaaccttacaaaaactgccagtgaatctatctccaacctttcagaggctggctca

SEQ ID NO: 288268 - DNA, 120 bp, Artificial Sequence
  ENSG00000130779_6 (sequence is synthesized)
atcaagaaaggagaaagagagctcaaaatcggagacagagtattggttggtggcactaaggctggtgtagtccggtttcttggggagaccgactttgccaagggggagtggtgtggcgtg

SEQ ID NO: 288269 - DNA, 120 bp, Artificial Sequence
  ENSG00000130779_7 (sequence is synthesized)
gagttagatgagccacttgggaagaatgatggcgctgttgctggaacaaggtattttcagtgtcaacccaaatatggcttgttcgctcctgtccacaaagttaccaagattggcttccct

SEQ ID NO: 288270 - DNA, 120 bp, Artificial Sequence
  ENSG00000130779_8 (sequence is synthesized)
tccactacaccagccaaagccaaggccaacgcagtgaggcgagtgatggcgaccacgtccgccagcctgaagcgcagcccttctgcctcttccctcagctccatgagctcagtggcctcc

SEQ ID NO: 288271 - DNA, 120 bp, Artificial Sequence
  ENSG00000130779_9 (sequence is synthesized)
tctgtgagcagcaggcccagtcggacaggactattgactgaaacctcctcccgttacgccaggaagatctccggtaccactgccctccaggaggccctgaaggagaagcagcagcacatt

SEQ ID NO: 288272 - DNA, 120 bp, Artificial Sequence
  ENSG00000130779_10 (sequence is synthesized)
gagcagctgctggcggaacgggatctggagagggcggaggtggccaaggccacgagccacgtgggggagatagagcaggagctagctctggcccgggacggacatgaccagcatgtcctg

SEQ ID NO: 288273 - DNA, 120 bp, Artificial Sequence
  ENSG00000130779_11 (sequence is synthesized)
gaattggaagccaaaatggaccagctgcgaacaatggtggaagctgctgacagggagaaggtggagcttctcaaccagcttgaagaggagaaaaggaaggttgaggaccttcagttccgg

SEQ ID NO: 288274 - DNA, 120 bp, Artificial Sequence
  ENSG00000130779_12 (sequence is synthesized)
gttgaagaagaatcaattaccaaaggtgatcttgagacgcagaccaaactggagcatgcccgcattaaggagcttgaacagagcctgctctttgaaaagaccaaagctgacaaactccag

SEQ ID NO: 288275 - DNA, 120 bp, Artificial Sequence
  ENSG00000130779_13 (sequence is synthesized)
agggagttagaagacactagggtggctacagtttcagaaaagtcacgtataatggaactggagaaagacctagcattgagagtacaggaagtagctgagctccgaagaaggctagagtcc

SEQ ID NO: 288276 - DNA, 120 bp, Artificial Sequence
  ENSG00000130779_14 (sequence is synthesized)
aataagcctgctggggatgtggacatgtcactttcccttttgcaagagataagctctttgcaagaaaagttagaagtcacccgtactgaccaccagagagaaataacttctctgaaggag

SEQ ID NO: 288277 - DNA, 120 bp, Artificial Sequence
  ENSG00000130779_15 (sequence is synthesized)
cattttggagcccgggaagaaactcatcagaaggagataaaggctctgtataccgccacggaaaagctttccaaagagaacgagtcattgaaaagcaagctggagcatgccaacaaagag

SEQ ID NO: 288278 - DNA, 120 bp, Artificial Sequence
  ENSG00000130779_16 (sequence is synthesized)
aactcagatgtgatagctctatggaagtccaaactggagactgccatcgcatcccaccagcaggcgatggaagaactgaaggtatctttcagcaaagggcttggaacagagacggcagaa

SEQ ID NO: 288279 - DNA, 120 bp, Artificial Sequence
  ENSG00000130779_17 (sequence is synthesized)
tttgctgaactaaaaacacaaatagagaaaatgagactagattaccaacacgaaatagaaaatttgcagaatcaacaagactctgaacgggctgcccatgctaaagagatggaagccttg

SEQ ID NO: 288280 - DNA, 120 bp, Artificial Sequence
  ENSG00000130779_18 (sequence is synthesized)
agggctaaactgatgaaagttattaaagaaaaggaaaacagtctggaagccatcaggtcgaaactggacaaagcagaagaccagcatctcgtagaaatggaagacacgttaaacaaatta

SEQ ID NO: 288281 - DNA, 120 bp, Artificial Sequence
  ENSG00000130779_19 (sequence is synthesized)
caggaagctgaaataaaggtaaaggagctagaggtactgcaagccaaatgcaatgaacaaaccaaggttattgataattttacatcacagctcaaggctactgaagaaaagctcttggat

SEQ ID NO: 288282 - DNA, 120 bp, Artificial Sequence
  ENSG00000130779_20 (sequence is synthesized)
cttgatgcacttcggaaagccagttccgaaggtaaatcggaaatgaagaaacttagacagcagcttgaggcagctgagaaacagattaaacatttagagattgaaaagaatgctgaaagt

SEQ ID NO: 288283 - DNA, 120 bp, Artificial Sequence
  ENSG00000130779_21 (sequence is synthesized)
agcaaggctagtagcattaccagagagctccaggggagagagctaaagcttactaaccttcaggaaaatttgagtgaagtcagtcaagtgaaagagactttggaaaaagaacttcagatt

SEQ ID NO: 288284 - DNA, 120 bp, Artificial Sequence
  ENSG00000130779_22 (sequence is synthesized)
ttgaaagaaaagtttgctgaagcttcagaggaggcagtctctgttcagagaagtatgcaagaaactgtaaataagttacaccaaaaggaggaacagtttaacatgctgtcttctgacttg

SEQ ID NO: 288285 - DNA, 120 bp, Artificial Sequence
  ENSG00000130779_23 (sequence is synthesized)
gagaagctgagagaaaacttagcagatatggaggcaaaatttagagagaaagatgagagagaagagcagctgataaaggcaaaggaaaaactggaaaatgacattgcagaaataatgaag

SEQ ID NO: 288286 - DNA, 120 bp, Artificial Sequence
  ENSG00000130779_24 (sequence is synthesized)
aattacagctaaaacttacaaaggctaatgaaaatgcaagttttctgcaaaaaagtattgaggacatgactgtcaaagctgaacagagccagcaagaagcagctaaaaagcatgaggaag

SEQ ID NO: 288287 - DNA, 120 bp, Artificial Sequence
  ENSG00000130779_25 (sequence is synthesized)
aaaagaaagaattggagaggaaattgtcggacctggaaaagaaaatggaaacaagccacaaccagtgtcaggagctgaaagccaggtatgagagagccacttctgagacaaaaaccaagc

SEQ ID NO: 288288 - DNA, 120 bp, Artificial Sequence
  ENSG00000130779_26 (sequence is synthesized)
atgaagaaatcctacagaacctccagaagacgctgctggacacagaggacaagctgaagggcgcacgggaggagaacagtggcttgctgcaggagctggaggagctgagaaagcaagccg

SEQ ID NO: 288289 - DNA, 120 bp, Artificial Sequence
  ENSG00000130779_27 (sequence is synthesized)
acaaagccaaagctgctcaaacagcggaagatgccatgcagataatggaacagatgaccaaagagaagactgagactctggcctccttggaggacaccaagcaaacaaatgcaaaactac

SEQ ID NO: 288290 - DNA, 120 bp, Artificial Sequence
  ENSG00000130779_28 (sequence is synthesized)
agaatgaattggacacacttaaagaaaacaacttgaaaaatgtggaagagctgaacaaatcaaaagaactcctgactgtagagaatcaaaaaatggaagaatttaggaaagaaatagaaa

SEQ ID NO: 288291 - DNA, 120 bp, Artificial Sequence
  ENSG00000130779_29 (sequence is synthesized)
ccctaaagcaggcagcagctcagaagtcccagcagctttcagcgttgcaagaagagaacgttaaacttgctgaggagctggggagaagcagggacgaagtcacaagtcatcaaaagctgg

SEQ ID NO: 288292 - DNA, 120 bp, Artificial Sequence
  ENSG00000130779_30 (sequence is synthesized)
aagaagaaagatctgtgctcaataatcagttgttagaaatgaaaaaaagagaatccaagttcataaaagacgcagatgaagagaaagcttccttgcagaaatccatcagtataactagtg

SEQ ID NO: 288293 - DNA, 120 bp, Artificial Sequence
  ENSG00000130779_31 (sequence is synthesized)
ccttactcacagaaaaggatgccgagctggagaaactgagaaatgaggtcacagtgctcaggggagaaaacgcctctgccaagtccttgcattcagttgttcagactctagagtctgata

SEQ ID NO: 288294 - DNA, 120 bp, Artificial Sequence
  ENSG00000130779_32 (sequence is synthesized)
aggtgaagctcgagctcaaggtaaagaacttggagcttcaactcaaagaaaacaagaggcagctcagcagctcctcaggtaatacagacactcaggcagacgaggatgaaagagcccagg

SEQ ID NO: 288295 - DNA, 120 bp, Artificial Sequence
  ENSG00000130779_33 (sequence is synthesized)
agagtcagattgatttcctaaattcagtaatagtggaccttcaaaggaagaatcaagacctcaagatgaaggtggagatgatgtcagaagcagccctgaatgggaacggggatgacctaa

SEQ ID NO: 288296 - DNA, 120 bp, Artificial Sequence
  ENSG00000130779_34 (sequence is synthesized)
acaattatgacagtgatgatcaggagaaacagtccaagaagaaacctcgcctcttctgtgacatttgtgactgctttgatctccacgacacagaggattgtcctacccaggcacagatgt

SEQ ID NO: 288297 - DNA, 120 bp, Artificial Sequence
  ENSG00000130779_35 (sequence is synthesized)
cagaggaccctccccattccacacaccatggcagtcggggtgaggaacgcccatactgtgaaatctgtgagatgtttggacactgggccaccaactgcaatgacgacgaaaccttctgat

SEQ ID NO: 288298 - DNA, 120 bp, Artificial Sequence
  ENSG00000130779_36 (sequence is synthesized)
gaagcctccagtggagaactgggcttgctcagacgcactcgcattgacacaacgtaacaccagcattgtgtgtgcagacttcaggagaactcatgttattttttaaccccgtcaacaaat

SEQ ID NO: 288299 - DNA, 120 bp, Artificial Sequence
  ENSG00000130779_37 (sequence is synthesized)
ctaggaaaatattttgatcttcaacaaattgccctttagtctccccgtatgagttagaataataaatatttagtaggtgagttttcacctcgaattttgttttcttgatttttacgtttg

SEQ ID NO: 288300 - DNA, 120 bp, Artificial Sequence
  ENSG00000130779_38 (sequence is synthesized)
aagacattgcaccagatgccattacatttattggccccccgaccttgtagaaaaacccctaccctcacaataccttatttaagtaactttaaattatgccgttacttttcatatttgcac

SEQ ID NO: 288301 - DNA, 120 bp, Artificial Sequence
  ENSG00000130779_39 (sequence is synthesized)
taagatatttccaggctgcatttgtatatttagattttttggttaagctttgacactggaatgagttgaaaaaatgtgccattttgcattttcatctactcatttaaagtattttattct

SEQ ID NO: 288302 - DNA, 120 bp, Artificial Sequence
  ENSG00000130779_40 (sequence is synthesized)
tattcaaagaaatatctgagctctttgcactacctgttatcagtagtgcctttacttcaggcttgataatacttaggtgtgattataaaatcatgaagcaggtaaagggaggggcaagcc

SEQ ID NO: 288303 - DNA, 120 bp, Artificial Sequence
  ENSG00000130779_41 (sequence is synthesized)
cccaaactgctgtggggacattttataatctatatgctgcacccacttaatctactgtggtgttttgtttattagttttgcataatttcagcttctatatattgtatgtatatatttttt

SEQ ID NO: 288304 - DNA, 120 bp, Artificial Sequence
  ENSG00000130779_42 (sequence is synthesized)
aaaaatctatattttgggaaaaaaacatacacaatgtgtctttctttttggacatttacctttttgaaaaagaaaacacttaaaatgatcattaggacataacagactaggccagacata

SEQ ID NO: 288305 - DNA, 120 bp, Artificial Sequence
  ENSG00000130779_43 (sequence is synthesized)
gcatcttgtggctttgcaaccattttcatttgtttgttttccttttatttcttcaccagatttaaataactggaggaattttctccaatttttttttccttctctggcaggtatccccag

SEQ ID NO: 288306 - DNA, 120 bp, Artificial Sequence
  ENSG00000130779_44 (sequence is synthesized)
cagtcaattaacaataagccagtataaaacacctaaataaccaatctacaatctcccttcacaagtttttttactgtttttagatgaatgtacgatgagaaattcaacgttaataattct

SEQ ID NO: 288307 - DNA, 120 bp, Artificial Sequence
  ENSG00000130779_45 (sequence is synthesized)
ggattttcttatcacaaaaaagaaaatgaaggacctcaaagcacctgaacagtttatcgaccagtttgaatctatttatcttcatttgaatgtcttctagaatatgtaaaaagtcataaa

SEQ ID NO: 288308 - DNA, 120 bp, Artificial Sequence
  ENSG00000130779_46 (sequence is synthesized)
atgtatcttccatgctacatgtacaataagaacttctataattgtatatatgcctttgatgtattttcccctcaagattatcaactgtgtgttcgacagtgaatattcaatctggtacca

SEQ ID NO: 288309 - DNA, 120 bp, Artificial Sequence
  ENSG00000130779_47 (sequence is synthesized)
gttgaaatttttggttataaatgtaatacgaattgtttcacaaacagaaaacatgtaaagcagtattaaaatttggccaaacaagtgttctgtatctactttaataaatggttattcttt

SEQ ID NO: 288310 - DNA, 120 bp, Artificial Sequence
  ENSG00000130779_48 (sequence is synthesized)
gaccactcactggtgactgtggtaatgtagtgtcttaggtcatatggcctgtggcctagcctaggaaacttttctccagttttgtttttcctaaagtatttttgtcattttcctctcgtg

SEQ ID NO: 288311 - DNA, 120 bp, Artificial Sequence
  ENSG00000130779_49 (sequence is synthesized)
tttcacactgcatgtcatttaaaaaactttttattttaaaataattttagatttccagaagagttgcaaaagtagtgcatccagttctcacagaccttcccccagaggcccctaattgaa

SEQ ID NO: 288312 - DNA, 120 bp, Artificial Sequence
  ENSG00000130779_50 (sequence is synthesized)
catcctacacagccccggcacactcatcaaaactgagaaactcccatgagcagcatactctcagctgaaacaagggacttcattcagatttcaccagtttgctcactaatgtccttttgt

SEQ ID NO: 288313 - DNA, 120 bp, Artificial Sequence
  ENSG00000130779_51 (sequence is synthesized)
gttacagcatccaaactaggatcccgccttgcagttagttgtcatatctccttcgtcttctctatatgtgacagtttctcagccttttcttgtatttaatgaccttggcattttgaaatg

SEQ ID NO: 288314 - DNA, 74 bp, Artificial Sequence
  ENSG00000130779_52 (sequence is synthesized)
agccttttcttgtatttaatgaccttggcattttgaaatgcatgtagtttttataacaaaactttcagtatggc

SEQ ID NO: 288315 - DNA, 84 bp, Artificial Sequence
  ENSG00000130779_53 (sequence is synthesized)
taaaaaaaacacacaactttaaataggtacacatatgtaaacacatgctagcctgctctttgggctgttttcactgtgtcctgc

SEQ ID NO: 288316 - DNA, 120 bp, Artificial Sequence
  ENSG00000130779_54 (sequence is synthesized)
atgctagcctgctctttgggctgttttcactgtgtcctgcgttcctccctgttcctccttcgtctttccctttctcttctcactcccacaaccctctcattaaaggcctcatccccgccc

SEQ ID NO: 288317 - DNA, 120 bp, Artificial Sequence
  ENSG00000130779_55 (sequence is synthesized)
tctgctgataaccaagtgctgagtcaggccgagaacataaaccaggcgctctgaatttctccttccaggctccccatgctttcattctgcacctgagaaaaccattttaacattttctgt

SEQ ID NO: 288318 - DNA, 120 bp, Artificial Sequence
  ENSG00000130779_56 (sequence is synthesized)
tctagcctttatgtaattaccattaatttctatgagctaatttaatgtcctcttcagagtctatggctggaaagtaataatccttcagtttgagtaataataataatctttactactgtt

SEQ ID NO: 288319 - DNA, 120 bp, Artificial Sequence
  ENSG00000130779_57 (sequence is synthesized)
tgatatttccagcataaagctgctctgcatgacatctgtataactgctttgcatgtgtgtattttaattgtcgttattgcttggtaataatttattcaagaattaacaaacttcaacttg

SEQ ID NO: 288320 - DNA, 120 bp, Artificial Sequence
  ENSG00000130779_58 (sequence is synthesized)
gggttagattttagtagaatattggggagggtgcaaccgttttttttttttttaattctacctcttccaaatttattaacttgtttctttaagttcaaatggatacaatcacatgcagac

SEQ ID NO: 288321 - DNA, 120 bp, Artificial Sequence
  ENSG00000130779_59 (sequence is synthesized)
tctggcatgtctatgcataggtaaactttttctcccctcacagtaagtaaaatttcaagtaaaattttgtgagcataatggccttaactccctataaaacttccctgttatatttttttt

SEQ ID NO: 288322 - DNA, 120 bp, Artificial Sequence
  ENSG00000130779_60 (sequence is synthesized)
tttacattaactaacattaattatgtgtttgttctagaacagttgtacactgaccagtctttcggttgatttgtggaacttttaactctttggtcttttagagaatccaagttcataaaa

SEQ ID NO: 288323 - DNA, 76 bp, Artificial Sequence
  ENSG00000130779_61 (sequence is synthesized)
tgtctctatctcttgacctcatgatcagcctgccttggcctcccaaagtactgcgattacaggcgtgagccaccac

SEQ ID NO: 288324 - DNA, 120 bp, Artificial Sequence
  ENSG00000130779_62 (sequence is synthesized)
ttacaggcgtgagccaccacgcctggcggggatgcttaaatgtagcccaatcctccagtaaagaatactaagaaaaagtgtttggaaccgaaccaaaataaaaacttgcgtaccagaagt

SEQ ID NO: 288325 - DNA, 120 bp, Artificial Sequence
  ENSG00000130779_63 (sequence is synthesized)
aaaacttgcgtaccagaagtttgcaggtaatacagatatgcgtacatgactggtgttcagctatttaggtggacttgcttgtctctgcttacctgtgttgctgatgctggtcagcagtgg

SEQ ID NO: 288326 - DNA, 120 bp, Artificial Sequence
  ENSG00000130779_64 (sequence is synthesized)
agaaaactgagattagatgctgctaatctcagatgggaggataatttcttaggaggaaggacatttcttgagtcatcagctccagattcctttaaagtggtgaggcttcagcccagaggg

SEQ ID NO: 288327 - DNA, 120 bp, Artificial Sequence
  ENSG00000130779_65 (sequence is synthesized)
cgactaacatgagaattcctgtttgtgaggtcattgtcatgacctcatagccaggctgttcaaaatgtttgcccagcttctggcaggatatgagctgatgcctgccccgattctacagac

SEQ ID NO: 288328 - DNA, 120 bp, Artificial Sequence
  ENSG00000130779_66 (sequence is synthesized)
tgagcaaaagagccagatttctgaagatcctgagaatgtaagagggcacttaactgtgtggatatttcccttgttaacaaagattgatcacagattaaaatgcttattgatatactcaaa

SEQ ID NO: 288329 - DNA, 120 bp, Artificial Sequence
  ENSG00000130779_67 (sequence is synthesized)
gccaaaaaagaaattgaactaatgtcagaagagctgaggggtctgaaatcagagaagcagcttctttctcaggagggaaatgatttaaagttagaaaacggttcacttttatccaagctt

SEQ ID NO: 288330 - DNA, 120 bp, Artificial Sequence
  ENSG00000130779_68 (sequence is synthesized)
gtagaattggaggccaaaatagctttacttcagggagaccagcagaaactgtggtcagtgaatgaaactcttaatttagaaaaggagaaattcttagaagaaaagcaagatgccgaaaag

SEQ ID NO: 288331 - DNA, 120 bp, Artificial Sequence
  ENSG00000130779_69 (sequence is synthesized)
tattatgagcaggaacatctcaataaagaagctttggctgttgagagagagaaattgcttaaagaaatcaatgttgtacaggaagaactcttgaagataaatgtggaaaatgactctttg

SEQ ID NO: 288332 - DNA, 120 bp, Artificial Sequence
  ENSG00000130779_70 (sequence is synthesized)
caagcttccaaggtgagcatgcaggcactcattgaagagctccagctcagcaaagatactttgattgctaagactgagaaggaccaggaagaaaaagatcacctggaggaccagatcaag

SEQ ID NO: 288333 - DNA, 120 bp, Artificial Sequence
  ENSG00000130779_71 (sequence is synthesized)
aaacttattaccgaaaacttcatcttggccaaagataaggatgacatcattcagaagcttcaaaggtcttatgaggagctagtcaaagatcagaaagctttggtacaggagactgaagat

SEQ ID NO: 288334 - DNA, 120 bp, Artificial Sequence
  ENSG00000130779_72 (sequence is synthesized)
ctcacagctgagaaaaagtcagctttagagaaattgtccaatctcgataacacgtgcatagccttaaaggtagaacgagataatgttcttcagaacaacagaaatctgcagttagagacg

SEQ ID NO: 288335 - DNA, 120 bp, Artificial Sequence
  ENSG00000130779_73 (sequence is synthesized)
gacatgctgcttcaagatcaggaaaagctgaatgccagcctccaggccgctctccaggtcaaacagctgctccgctcagaagccagtgggctccgcgcacagctggatgatgccagcaag

SEQ ID NO: 288336 - DNA, 120 bp, Artificial Sequence
  ENSG00000130779_74 (sequence is synthesized)
gccctgaggaaggcagagctggagaccgtgcaactcgaggccgcaaacacaagcctcacgaagctcttggaggaaattaaggccaggcgggcggtcacggactccgagtgcatccagctt

SEQ ID NO: 288337 - DNA, 120 bp, Artificial Sequence
  ENSG00000130779_75 (sequence is synthesized)
atcactgaaaaactccacaaatgcttagaagaggctgcccatactgagatgagcctgaatgagaagatcacttacctgacttccgagaaggagatggcttctcagaaaatgactgaactt

SEQ ID NO: 288338 - DNA, 120 bp, Artificial Sequence
  ENSG00000130779_76 (sequence is synthesized)
aaaaagcagcaggatagtctcttgaaagaaaaatcctcactggaaacgcaaaatggagctttacttgcagagagagagaattccatcaaagccataggagacctcaaaaggcaatgtgat

SEQ ID NO: 288339 - DNA, 120 bp, Artificial Sequence
  ENSG00000130779_77 (sequence is synthesized)
caagagtctgcaaacagaagtttagttgtgcaagagaatatgaaactcctcggtaatattgatgctctgaagaaggagcttcaagagagaaaaaaggaaaaccaagaactagtggccagc

SEQ ID NO: 288340 - DNA, 120 bp, Artificial Sequence
  ENSG00000130779_78 (sequence is synthesized)
aagtgcgacctctctttgatgctgaaagaggctcaaaataccaaaaagaatctggaaaaagaacacactcacatattgcaagcaaaggagagtttggatgctcaacttaacacgtgttgt

SEQ ID NO: 288341 - DNA, 120 bp, Artificial Sequence
  ENSG00000130779_79 (sequence is synthesized)
tccgagaagaacattttgctgagagatggcttgaacctgcaagaagagtgtcacaaattaagcaaggagatccaggaaatgcagcagtccttaatcctggaacaggaagccagagcaaag

SEQ ID NO: 288342 - DNA, 120 bp, Artificial Sequence
  ENSG00000130779_80 (sequence is synthesized)
gagagcgagtcatccttgtacgaaaacaatcaacttcacgggaggatggtgctcctggagcaggaggtggaggagttaagagtgtgtatcgaggagctgcagtccgagaagtttgtgcta

SEQ ID NO: 288343 - DNA, 120 bp, Artificial Sequence
  ENSG00000130779_81 (sequence is synthesized)
cttcaagagaagagcaaatcagagcaagaactggcagagataatcgaggagaaggaactgttgactgcagaagcagctcaacttgctgcccatataaagactctgaaaagtgattttgct

SEQ ID NO: 288344 - DNA, 120 bp, Artificial Sequence
  ENSG00000130779_82 (sequence is synthesized)
gccttgtccaaatccaaggcagagctgcaggaactgcacagctgcctcaccaagattctggatgaccttcagcggaaccatgaggtgaccctggccgaaaaagcccaggtgatgcaagac

SEQ ID NO: 288345 - DNA, 120 bp, Artificial Sequence
  ENSG00000130779_83 (sequence is synthesized)
aaccagaacctcctggctgagaagagcgaaatgatgctggaaaaggatgagctcctgaaggagaaggaaaccctggcagaaagctacttcatccttcagaaagagatcagccagttggcc

SEQ ID NO: 288346 - DNA, 120 bp, Artificial Sequence
  ENSG00000130779_84 (sequence is synthesized)
aaaaccaacagccatatttcagccaatctcctagaatctcaaaatgaaaaccgtactttgagaaaagacaagaacaagcttactcttaaaattagagagctcgagactcttcagtcattt

SEQ ID NO: 288347 - DNA, 120 bp, Artificial Sequence
  ENSG00000130779_85 (sequence is synthesized)
acggctgctcaaacagcggaagatgccatgcagataatggaacagatgaccaaagagaagactgagactctggcctccttggaggacaccaagcaaacaaatgcaaaactacagaatgaa

SEQ ID NO: 288348 - DNA, 120 bp, Artificial Sequence
  ENSG00000130779_86 (sequence is synthesized)
ggagctagacttgagagcacaagaaatgggtgtacatttctttgctgtgcttgtttgaaagctacagtctggggtgccagtttccatgatcacagagatgaagttttgttcttgattcga

SEQ ID NO: 288349 - DNA, 120 bp, Artificial Sequence
  ENSG00000130779_87 (sequence is synthesized)
acatgtttacttattgctccaccattatcagtcagttgataaatgagagtctgaaggaaatttccatgtgactttttcaaatctgccgaacagaaaagtcctggatggattgtagagttt

SEQ ID NO: 288350 - DNA, 66 bp, Artificial Sequence
  ENSG00000130779_88 (sequence is synthesized)
atctgccgaacagaaaagtcctggatggattgtagagtttaatggaagaactaacctttttatgat

SEQ ID NO: 288351 - DNA, 120 bp, Artificial Sequence
  ENSG00000130779_89 (sequence is synthesized)
ccaccacgcctggccaatattttttatgtggtagaatgaaaacaaacttgtgcccatatattcagaaatataagattatgacttctggagaatgcaagatttttttctcctatttaaaaa

SEQ ID NO: 288352 - DNA, 120 bp, Artificial Sequence
  ENSG00000130779_90 (sequence is synthesized)
ttctcctatttaaaaaaatgtttcttatattttttcatgaatcaatagcactccaccaacccacagatttagatgtttaggaataatttcagctgggtacagtggctcatgcctgtaatc

SEQ ID NO: 288353 - DNA, 85 bp, Artificial Sequence
  ENSG00000130779_91 (sequence is synthesized)
taaataaataaaataattaattaattcatggcctggcaccgtggctcacacatgtattcccagcactttgggaggccaagccggg

SEQ ID NO: 288354 - DNA, 84 bp, Artificial Sequence
  ENSG00000130779_92 (sequence is synthesized)
tcgtttacccatgttatacctagaaacattcaatgaagtgtaatttaaatttttttttaaaatataaaatagcatctcctcagt

SEQ ID NO: 288355 - DNA, 120 bp, Artificial Sequence
  ENSG00000130779_93 (sequence is synthesized)
atttttttttaaaatataaaatagcatctcctcagtaatgaacatttgaagaaatctgaaaggtgtgagggggtaaaagaaactgccatagccttaccacctagacatggcctcatttaa

SEQ ID NO: 288356 - DNA, 120 bp, Artificial Sequence
  ENSG00000130779_94 (sequence is synthesized)
gttcagctctttactcacacaatctcagcatgcctgtcctccgggagagtgaaaagcatgggttcctaatagccgctgttggccccttctgcacactttgccgccagagcttaaaggtat

SEQ ID NO: 288357 - DNA, 120 bp, Artificial Sequence
  ENSG00000130779_95 (sequence is synthesized)
cattcagatggacgtgacaggcattctaacccaggagttagcaggcctgagggagagcacgtgaagggcaaggctggtgtctgtgagaccctgtagggtcccgcaaggggacacaaactc

SEQ ID NO: 288358 - DNA, 120 bp, Artificial Sequence
  ENSG00000130779_96 (sequence is synthesized)
atccacatgtgctgaaagtggtgcatctgggaagtccacaggaaaatgagttttgaacacaggccctttcactgcagtttagattgtgattaaaaatatacatatattctccctccactt

SEQ ID NO: 288359 - DNA, 120 bp, Artificial Sequence
  ENSG00000130779_97 (sequence is synthesized)
caaaatcattgaatcttttcgtttattttccttctcatttgatgccttttgtatcatttagtcttttgaattggtaatgcattcctctagtccaaacattaaacagaattaaaaatatat

SEQ ID NO: 288360 - DNA, 120 bp, Artificial Sequence
  ENSG00000130779_98 (sequence is synthesized)
acattaaatgtcttcctccaaaccttctctctcttctgctcagttcccaaccctgcaaacagttaattactgttatttgtgtctttccttttcagagattttttaaagtgtgtatacaag

SEQ ID NO: 288361 - DNA, 120 bp, Artificial Sequence
  ENSG00000130779_99 (sequence is synthesized)
ccagcactaatacagtcttccctcccttttttttttttaacataaataatggcatactacataaacggttctgcacttattttttttatagctatgtagtgttccattacgtggatttac

SEQ ID NO: 288362 - DNA, 120 bp, Artificial Sequence
  ENSG00000130779_100 (sequence is synthesized)
tataatttagtcagttccctattggttgacaatgacactgggatgtttctgatcctttgggtgtattataaacaatgccgtaaggaattatcttgggcagctatcattttatatattagt

SEQ ID NO: 288363 - DNA, 120 bp, Artificial Sequence
  ENSG00000130779_101 (sequence is synthesized)
atttctgcaggatgaattcctagaagtagaattgctctgtcaaagggtttgttactcatctgaaccttaaaaagactggtttcttgaaaactcagtctcttaaagcgaaaattaacaaaa

SEQ ID NO: 288364 - DNA, 120 bp, Artificial Sequence
  ENSG00000130779_102 (sequence is synthesized)
ttcttgaaaactcagtctcttaaagcgaaaattaacaaaacaactttagttttaaactaaaaatgggattaggccaggaatggtggcttatccctgtaattccagcactttgggaggcca

SEQ ID NO: 288365 - DNA, 120 bp, Artificial Sequence
  ENSG00000130779_103 (sequence is synthesized)
aaaaaaaacaaaaaaaacaaaaaacaatcctgcagcctgagtgacagagcaacaccctgtctcaaaacaattacttaattaaaaaaaagtttttaagggcctgggccaggtgcagtggct

SEQ ID NO: 288366 - DNA, 120 bp, Artificial Sequence
  ENSG00000130779_104 (sequence is synthesized)
ggactgtttgagatcaggagatcgagaccagcctgagcaacaatggcaagaccccatctctacaaaaaataaaattagttaggcatggcgccatgctcccatagtcccagttaccccaga

SEQ ID NO: 288367 - DNA, 120 bp, Artificial Sequence
  ENSG00000130779_105 (sequence is synthesized)
gaggctgcagtgagccatgatcatgccaccgcacttaggcctgactgacaaagcaagaacctgtctcagaaaaaaaaaaggtggggtggggggcccgggcacagcagctcacacctgcaa

SEQ ID NO: 288368 - DNA, 120 bp, Artificial Sequence
  ENSG00000130779_106 (sequence is synthesized)
ggtggggggcccgggcacagcagctcacacctgcaatcccagcactttggtaggccaaggtaggcagatcgctggagcccgagaccagcctgcgcaacatgggcactccaagctgggtga

SEQ ID NO: 288369 - DNA, 120 bp, Artificial Sequence
  ENSG00000130779_107 (sequence is synthesized)
cagagcaaggccctgtctcaaaacaaacaaaaatttgtaaaaagggattatataaaggcaaactattctgtacttggaaatataattgtatatagcaacaaacatctgtcttttaatttt

SEQ ID NO: 288370 - DNA, 120 bp, Artificial Sequence
  ENSG00000130779_108 (sequence is synthesized)
aatatactttgtatgtattagtcatgttcaaaattcaaaagtacaaaagccacattttatatttaaataaaagaaaaactcaccttgagatgttagttgccagacacctcctttgagggg

SEQ ID NO: 288371 - DNA, 120 bp, Artificial Sequence
  ENSG00000130779_109 (sequence is synthesized)
cacaaaacgattcaacactgtacaaacttaccatggattagcattgtcctctttgtatgtctactgggcttaataactaacagtgtcttctcttcccccttcctttctgcttcggtttgt

SEQ ID NO: 288372 - DNA, 120 bp, Artificial Sequence
  ENSG00000130779_110 (sequence is synthesized)
gagccgacgagccgggaggcgggaggcggcggccgcggcggctgctgctgctgcagtgggacaggtggcggcgaccggcggcgtccgaggagtctcttctgtatatacagaaatatgaat

SEQ ID NO: 288373 - DNA, 120 bp, Artificial Sequence
  ENSG00000130779_111 (sequence is synthesized)
attaagctgtgaatgaacctcccaaacccaggaatatgatatgagaacatagcctttgaatttctctctcaagtttgacttgaaaaatcagcctcagaaacatctttatcttaagataga

SEQ ID NO: 288374 - DNA, 120 bp, Artificial Sequence
  ENSG00000130779_112 (sequence is synthesized)
gtcaaggtcaaatggttaaaaaagacaacaggagtttcttcctggtatgtttaagtaatttcaagaacaaaaggttgattcttttgtagttctcaagttgccgagttattaattgaggaa

SEQ ID NO: 288375 - DNA, 120 bp, Artificial Sequence
  ENSG00000130779_113 (sequence is synthesized)
agatcctcgctgtaagtctgcatcctgtgcatcttgcagtaagggcctagggaaaccgatgaagagaagagctttcaggcgacagctgcagcagctctgactgcagaagatgaagtcaag

SEQ ID NO: 288376 - DNA, 120 bp, Artificial Sequence
  ENSG00000130779_114 (sequence is synthesized)
gctgacttgatctggagccagcagtggctgagcagatggcctttggcgcggtggctcacacctgtaaccttagcactttagagttcgagaacagcctggcgaacatggcaaaaccccgtc

SEQ ID NO: 288377 - DNA, 120 bp, Artificial Sequence
  ENSG00000130779_115 (sequence is synthesized)
acaggcatgagccaccgcacctggctgatctctttacgttgatgtattctttgtgagatttatagacagaaggcacacactgtcttgtgtttttgaggaagcctttcctaatcctggcca

SEQ ID NO: 288378 - DNA, 120 bp, Artificial Sequence
  ENSG00000130779_116 (sequence is synthesized)
cctggccagcctgccagctggagcagcgcccttgctttgccgagcagatgcccgccatgcatgcatcgcgcctccctcgcttttctgacagcatcatcgcccttcatttctctaactttc

SEQ ID NO: 288379 - DNA, 120 bp, Artificial Sequence
  ENSG00000130779_117 (sequence is synthesized)
ggccagcttggttactagggccttaccaatgattgattatagctgctgtttgtggattactcttaatatgtgtttcagcttcaaaaaagatgagaggtgttttaacattgttctttatca

SEQ ID NO: 288380 - DNA, 120 bp, Artificial Sequence
  ENSG00000130779_118 (sequence is synthesized)
ctttcatcatctatcttccaggaaagctgttgagaataacctattaaaatagagaaagctttttaacataaggttttagagtaacgcccacccaccatggtgacccacagctctttggag

SEQ ID NO: 288381 - DNA, 85 bp, Artificial Sequence
  ENSG00000130779_119 (sequence is synthesized)
caaggtatataggcatgtaccacctcacccagccaatcacaggagttttgatccttgaaatatgggactcactgctgttttaaaa

SEQ ID NO: 288382 - DNA, 120 bp, Artificial Sequence
  ENSG00000130779_120 (sequence is synthesized)
ttttgatccttgaaatatgggactcactgctgttttaaaattattttgttccctttcatttcccagattagtccaagaatttttgtgatggaagctattttccacacatcctatgtacta

SEQ ID NO: 288383 - DNA, 120 bp, Artificial Sequence
  ENSG00000130779_121 (sequence is synthesized)
aatggactgcatagcaggtagcagagggaagtaattttctagcaatgaaagggcacaggttaagaaagtgtttttctagccctggggtatttatttaaaggaagaagattcttgggtact

SEQ ID NO: 288384 - DNA, 120 bp, Artificial Sequence
  ENSG00000130779_122 (sequence is synthesized)
atcccggagctcaaatagaatcgaagtacatgggaataggtagaaacttgcaggttagatgtacattccaggtgattcatgtgcgtactaatgtctgagaaccactgggttagggggtta

SEQ ID NO: 288385 - DNA, 120 bp, Artificial Sequence
  ENSG00000130779_123 (sequence is synthesized)
ggggaagaagatgtttacatcaaaatgctgatagaattatcatatctaaaaaggggattttgtgtaagattcttgtgtattattgcaggtaagtaatcattcttactttgtgttttaata

SEQ ID NO: 288386 - DNA, 120 bp, Artificial Sequence
  ENSG00000130779_124 (sequence is synthesized)
ccatctcaaaaaaaaaaaaaaaaaaagtttagtaaattaattcttcattcttcaattgaggctttcattctacaggtgatgtgttattcattgaaacatttgataggtaattttagacct

SEQ ID NO: 288387 - DNA, 120 bp, Artificial Sequence
  ENSG00000130779_125 (sequence is synthesized)
gtgttattcattgaaacatttgataggtaattttagaccttttatgcaagtgctgtccaatagaagtataatgtaagccacacatgtacaatttataattttctggtacccacattactt

SEQ ID NO: 288388 - DNA, 120 bp, Artificial Sequence
  ENSG00000130779_126 (sequence is synthesized)
ttgtttttttttttttttagagacagagtcgtgctctgtctcccaggctggagtacaatggcacaattactcactatagcctcaacctcctagactcaagcaatcctcccgtcttagcct

SEQ ID NO: 288389 - DNA, 89 bp, Artificial Sequence
  ENSG00000130779_127 (sequence is synthesized)
ctcaacctcctagactcaagcaatcctcccgtcttagcctcccaagtacctgttaccacaggcgatgcaaagacggggtcttgctgtgt

SEQ ID NO: 288390 - DNA, 120 bp, Artificial Sequence
  ENSG00000130779_128 (sequence is synthesized)
gggattacaggcgtgagccactgcacttggcccacaagacattttgtgatccttttcttctaagtcttcaaaatctgatgtgtattttgcacttataccacacctcacttcagatgagcc

SEQ ID NO: 288391 - DNA, 120 bp, Artificial Sequence
  ENSG00000130779_129 (sequence is synthesized)
accacacctcacttcagatgagccacatctcaagtgctcaatagccacgtgtggccaacagctactgttccggatggcacagttctataagatcacctccatgaaatggataagcattta

SEQ ID NO: 288392 - DNA, 120 bp, Artificial Sequence
  ENSG00000130779_130 (sequence is synthesized)
aagtggggtaggacaaactggcaaaataaggaaatgttttctttcaggaggcagttatatctgtgaactttgaaagttactgtttctgttaacttatcagttaatggatatttatctgat

SEQ ID NO: 288393 - DNA, 120 bp, Artificial Sequence
  ENSG00000130779_131 (sequence is synthesized)
ttaagcttctttagaattggagatactaaagttggacttaagccattatcacagttagaaatatatattaacctataaacgttcataatagtttgctgcctgagatggggtagttattaa

SEQ ID NO: 288394 - DNA, 64 bp, Artificial Sequence
  ENSG00000130779_132 (sequence is synthesized)
gttcataatagtttgctgcctgagatggggtagttattaaatatcttcagtgttaaagaaaata

SEQ ID NO: 288395 - DNA, 120 bp, Artificial Sequence
  ENSG00000130783_0 (sequence is synthesized)
gctccgggctcgcccccgccgctcggggcaggcgcgccgatggcgtttctgaggtgacgccgcccacaccgggcttctccgggggcggaggaaacacctatgaaccctccggcagccttc

SEQ ID NO: 288396 - DNA, 120 bp, Artificial Sequence
  ENSG00000130783_1 (sequence is synthesized)
cttgccgggcgccagaacatcgggtcagaagttgagatttccactatcgagaaacaacggaaggagctgcagttgctcattggagaattaaaagatcgagataaagagctcaatgacatg

SEQ ID NO: 288397 - DNA, 120 bp, Artificial Sequence
  ENSG00000130783_2 (sequence is synthesized)
gttgcagtgcaccagcaacagcttctttcatgggaagaggatcggcagaaagtgttgacactggaagaacgttgcagcaaattagaaggtgaactacataaaagaactgaaataatcagg

SEQ ID NO: 288398 - DNA, 120 bp, Artificial Sequence
  ENSG00000130783_3 (sequence is synthesized)
tcactcacgaagaaggtaaaagctcttgaatccaatcaaatggaatgccaaacagctctccaaaagacccaactacagcttcaggaaatggctcaaaaggcaacgcattcttctcttctc

SEQ ID NO: 288399 - DNA, 120 bp, Artificial Sequence
  ENSG00000130783_4 (sequence is synthesized)
tctgaagaccttgaggctagaaacgaaactctcagcaacacgttagtggaactttctgcccaggtaggacagctacaagctcgagaacaagctcttacgacaatgataaagctaaaggac

SEQ ID NO: 288400 - DNA, 120 bp, Artificial Sequence
  ENSG00000130783_5 (sequence is synthesized)
aaagatattattgaggcagttaatcacattgcagattgttcgggtaaatttaaaatgctagagcatgccctacgtgatgccaagatggcggagacttgtattgtgaaagaaaagcaagat

SEQ ID NO: 288401 - DNA, 120 bp, Artificial Sequence
  ENSG00000130783_6 (sequence is synthesized)
tataagcagaaattgaaggcacttaagattgaagtcaacaaactaaaagaggacctcaatgaaaagacgacagaaaataatgagcaacgagaagagatcattcgcctcaagcaagagaaa

SEQ ID NO: 288402 - DNA, 120 bp, Artificial Sequence
  ENSG00000130783_7 (sequence is synthesized)
agttgcctgcacgatgaattgctttttactgtagagagagaaaagaggaaagatgaattgcttaatattgcgaagtcaaagcaagaacgcacaaattcagaactgcacaatctgagacag

SEQ ID NO: 288403 - DNA, 120 bp, Artificial Sequence
  ENSG00000130783_8 (sequence is synthesized)
atttatgtaaaacaacagagtgatctgcagtttcttaatttcaatgtggaaaattctcaggaattaatacagatgtatgactcaaagatggaggaatcaaaggctctggactccagcaga

SEQ ID NO: 288404 - DNA, 120 bp, Artificial Sequence
  ENSG00000130783_9 (sequence is synthesized)
gacatgtgtttatcagaccttgaaaataaccacccaaaagtcgatattaagagggaaaaaaatcagaagtcactgtttaaggaccagaaatttgaagccatgttggttcagcaaaatagg

SEQ ID NO: 288405 - DNA, 120 bp, Artificial Sequence
  ENSG00000130783_10 (sequence is synthesized)
tcagacaagagctcttgcgatgaatgcaaagagaagaaacaacagatcgatactgtgtttggggagaaaagtgtaattacgctgtcatccatattcaccaaagacttagtagagaaacac

SEQ ID NO: 288406 - DNA, 120 bp, Artificial Sequence
  ENSG00000130783_11 (sequence is synthesized)
aacctcccttggtctctgggaggaaaaacccagattgaacccgaaaacaaaattacattgtgcaagatccacacaaaatcaccaaaatgtcatggcactggggttcagaacgaaggaaaa

SEQ ID NO: 288407 - DNA, 120 bp, Artificial Sequence
  ENSG00000130783_12 (sequence is synthesized)
caaccctcagaaacacccactttatctgatgagaagcagtggcatgatgtcagtgtttacctgggcctgaccaactgtccaagttcaaaacatccagaaaagctggatgtagaatgtcaa

SEQ ID NO: 288408 - DNA, 120 bp, Artificial Sequence
  ENSG00000130783_13 (sequence is synthesized)
gtggcatgtgtgactccaagtgctgccacccgagtaacttcataattgaagccccaggccacatgtctgacgtggagtggatgagtattttcaagccttccaaaatgcagagaattgtcc

SEQ ID NO: 288409 - DNA, 120 bp, Artificial Sequence
  ENSG00000130783_14 (sequence is synthesized)
gcctcaaatctgggtgcacctgttcagaaagcatctgtggcacacaacatgactccccggcaagtgagctaattgccatccaagattcccactctttgggttcttcaaaatctgccttga

SEQ ID NO: 288410 - DNA, 120 bp, Artificial Sequence
  ENSG00000130783_15 (sequence is synthesized)
gagaagatgagacggagtcctcttccaataaaaagaactcacctacgagtttgttaatctacaaagatgcaccagcattcaatgaaaaggcttcaattgtgttaccctcccaggatgatt

SEQ ID NO: 288411 - DNA, 120 bp, Artificial Sequence
  ENSG00000130783_16 (sequence is synthesized)
tctcgcccacgagcaagctccagcgtttgctggcggaatctcgtcagatggtgacggacctggagctgagcacactgctgcccatcagccatgagaatctcactggcagtgccacaaata

SEQ ID NO: 288412 - DNA, 120 bp, Artificial Sequence
  ENSG00000130783_17 (sequence is synthesized)
agtcagaggtcccagaagagtcagctcaaaaaaatacctttgtcagttattgaaggaaacaaaaggcaacttcagtattcatcgtgatcacgaatttctcatctatgtggaaggcagaaa

SEQ ID NO: 288413 - DNA, 120 bp, Artificial Sequence
  ENSG00000130783_18 (sequence is synthesized)
gcagacaccaatactgaatgaatacttaaccgtaaaactgaaagaggattctagttcttcataaacggcacttaattccagctgggagcagaactagaaagttaatttttaaacatctac

SEQ ID NO: 288414 - DNA, 120 bp, Artificial Sequence
  ENSG00000130783_19 (sequence is synthesized)
acttcattttcaagttaaccatttttgtgctgaagaaatattttcatgtgtaagaaagtagaccttattgtacatatagaaagttggaattatgctaagaatgaaaaagacttctctgta

SEQ ID NO: 288415 - DNA, 120 bp, Artificial Sequence
  ENSG00000130783_20 (sequence is synthesized)
aagatacggactacagttaaatgctagagaagctctttaaaaatgtgaatgtcaaatagagaaagaaccctgcatagaaagtgctgttttaactatctgatttttaaaaaatctgtgcat

SEQ ID NO: 288416 - DNA, 120 bp, Artificial Sequence
  ENSG00000130783_21 (sequence is synthesized)
acatttaaattctaaacaatagcttatcagagtcagctcaaaatatatgagaaacagtattctctcatggttttagcttttgactttgctgtgtaaatagacataaggtgctttgatata

SEQ ID NO: 288417 - DNA, 120 bp, Artificial Sequence
  ENSG00000130783_22 (sequence is synthesized)
aaatataaaatgtaactggaaaatagctcgaggtccttctgtcccaagctgagcagagccccatctttctgggtctatattagtcccacctactgacacaaacaaaagcttgctggaaga

SEQ ID NO: 288418 - DNA, 120 bp, Artificial Sequence
  ENSG00000130783_23 (sequence is synthesized)
tcgagttttagacgcatttttaaaaatcttaaagactaaaacacttccattttaacttgtaaagtaatttaattttttaaagattatactatatgcctctgtgtcttctctaaaagaata

SEQ ID NO: 288419 - DNA, 120 bp, Artificial Sequence
  ENSG00000130783_24 (sequence is synthesized)
gatcaacttcagtccataaaagatatttttaatattaaagaaaaaatatgtttccttggtttctttttattttacaggagtaaaataaggaaggaacgttcatcactttaaactgaacct

SEQ ID NO: 288420 - DNA, 120 bp, Artificial Sequence
  ENSG00000130783_25 (sequence is synthesized)
ggcaagttaatttcctcaggaatggggatgtatttttttaagcattgcagatatcaaagttctattgtgctgaataaatgcccctttgttaacaggtctcagtgttacttcagagatgat

SEQ ID NO: 288421 - DNA, 120 bp, Artificial Sequence
  ENSG00000130783_26 (sequence is synthesized)
tttcatgagcggggaagagccacctcatttagcctttttaattagggtgctgaaaagagaagttgggtgaggtttggttatgttctttatcaatgcgtgctttctccctcaggctgggct

SEQ ID NO: 288422 - DNA, 120 bp, Artificial Sequence
  ENSG00000130783_27 (sequence is synthesized)
tattgtctttgggtacatgtgaaagatttccttacataatttattttttaatgatgtatgttgtatttggatcagttacaatattaaattgcccttaatagattgagtatgtatagatgc

SEQ ID NO: 288423 - DNA, 120 bp, Artificial Sequence
  ENSG00000130783_28 (sequence is synthesized)
cttagatgttgtagttgtcatgcatattgaacactggaagacttaattttctttttatagactaaaattcccattgtttagtaaggatcatttacatttaaacagtaactatttcgtgat

SEQ ID NO: 288424 - DNA, 120 bp, Artificial Sequence
  ENSG00000130783_29 (sequence is synthesized)
acaggcgtgagccaccacgcctggccactatttcatgtttacctgtacttggttactcaaattgctggggcaaggtaggggataatgttattgactggcagagaaaagggttgttggcaa

SEQ ID NO: 288425 - DNA, 120 bp, Artificial Sequence
  ENSG00000130783_30 (sequence is synthesized)
tattgactggcagagaaaagggttgttggcaaagggggagaaaaagtgcagaaataggtttatttgtttacccagtgggttttagaaacagtcccactttttaggcatggtacgtatggc

SEQ ID NO: 288426 - DNA, 120 bp, Artificial Sequence
  ENSG00000130783_31 (sequence is synthesized)
atgacagaaaattgtagagaggcagagtgcatggtagattttaacttgaacatgttttaagtatacataatcttttgctgccatgttattaaaacttaattgaactacttagaattggcc

SEQ ID NO: 288427 - DNA, 120 bp, Artificial Sequence
  ENSG00000130787_0 (sequence is synthesized)
gcggtggcctcgcggtgcctaggctggggctgccggaccgtgaggctgtgagtcgcgcggacggagccggacaaaagcgggcggcggcggcaggatgaacagcatcaagaacgtgccggc

SEQ ID NO: 288428 - DNA, 120 bp, Artificial Sequence
  ENSG00000130787_1 (sequence is synthesized)
gcgggtgctgagccgcaggccgggccacagcctggaggccgagcgcgagcagttcgacaagacccaggccatcagcatcagcaaagccatcaacacccaggaggcccccgtgaaggagaa

SEQ ID NO: 288429 - DNA, 120 bp, Artificial Sequence
  ENSG00000130787_2 (sequence is synthesized)
gcacgcccggcgcatcattctgggcacacaccacgagaagggggctttcaccttctggtcctacgccattgggctgccgctgcccagcagctccattctcagctggaagttctgccacgt

SEQ ID NO: 288430 - DNA, 120 bp, Artificial Sequence
  ENSG00000130787_3 (sequence is synthesized)
cctccacaaggtccttcgagacgggcaccccaatgtgctgcatgactgccagcggtaccgcagcaacatccgggagattggagacctgtggggacatttgcatgaccgctacggacagct

SEQ ID NO: 288431 - DNA, 120 bp, Artificial Sequence
  ENSG00000130787_4 (sequence is synthesized)
ggtgaatgtctacaccaagctgctgctgaccaagatctccttccacctcaagcatccccagtttcccgcgggcctggaggtgacagatgaggtactggagaaggcagctgggaccgatgt

SEQ ID NO: 288432 - DNA, 120 bp, Artificial Sequence
  ENSG00000130787_5 (sequence is synthesized)
caacaacatcttccagctcactgtggagatgtttgattacatggattgtgagctgaagctttctgaatcagttttccgacagctcaacacggccatcgccgtatcccagatgtcctcagg

SEQ ID NO: 288433 - DNA, 120 bp, Artificial Sequence
  ENSG00000130787_6 (sequence is synthesized)
ccagtgccgcctggcccccctcatccaggtcatccaggactgcagccacctctaccactacacggtcaagctcctgttcaagctacactcttgtctccctgcggacaccctgcaaggcca

SEQ ID NO: 288434 - DNA, 120 bp, Artificial Sequence
  ENSG00000130787_7 (sequence is synthesized)
cagggaccggttccacgagcagtttcacagcctcaggaacttcttccgcagagcctccgacatgctgtacttcaagcggctcatccagatcccccggctgcccgagggaccccctaactt

SEQ ID NO: 288435 - DNA, 120 bp, Artificial Sequence
  ENSG00000130787_8 (sequence is synthesized)
cctgcgggcctcagccctggctgagcacatcaagccggtggtggtgatccccgaggaggccccggaagatgaggagccggagaatctcattgagatcagcacagggccccccgcggggga

SEQ ID NO: 288436 - DNA, 120 bp, Artificial Sequence
  ENSG00000130787_9 (sequence is synthesized)
gccagtggtggtggctgacctcttcgatcagacgtttggaccccccaatgggtctgtgaaggacgacagggacctccagattgagagcttgaagagagaggtggaaatgctccgctctga

SEQ ID NO: 288437 - DNA, 120 bp, Artificial Sequence
  ENSG00000130787_10 (sequence is synthesized)
actggagaagatcaagctggaggcccagcggtacatcgcgcagctgaagagccaggtgaatgcactggagggtgagctggaggagcagcggaagcagaagcagaaggccctggtggataa

SEQ ID NO: 288438 - DNA, 120 bp, Artificial Sequence
  ENSG00000130787_11 (sequence is synthesized)
tgagcagctccgccacgagctggcccagctgagggctgcccagctggagggcgagcggagccagggcctgcgtgaggaggctgagaggaaggccagtgccacggaggcgcgctacaacaa

SEQ ID NO: 288439 - DNA, 120 bp, Artificial Sequence
  ENSG00000130787_12 (sequence is synthesized)
gctgaaggaaaagcacagtgagctcgtccatgtgcacgcggagctgctcagaaagaacgcggacacagccaagcagctgacggtgacgcagcaaagccaggaggaggtggcgcgggtgaa

SEQ ID NO: 288440 - DNA, 120 bp, Artificial Sequence
  ENSG00000130787_13 (sequence is synthesized)
ggagcagctggccttccaggtggagcaggtgaagcgggagtcggagttgaagctagaggagaagagcgaccagctggagaagctcaagagggagctggaggccaaggccggagagctggc

SEQ ID NO: 288441 - DNA, 120 bp, Artificial Sequence
  ENSG00000130787_14 (sequence is synthesized)
ccgcgcgcaggaggccctgagccacacagagcagagcaagtcggagctgagctcacggctggacacgctgagtgcggagaaggatgctctgagtggagctgtgcggcagcgggaggcaga

SEQ ID NO: 288442 - DNA, 120 bp, Artificial Sequence
  ENSG00000130787_15 (sequence is synthesized)
cctgctggcggcgcagagcctggtgcgcgagacagaggcggcgctgagccgggagcagcagcgcagctcccaggagcagggcgagttgcagggccggctggcagagagggagtctcagga

SEQ ID NO: 288443 - DNA, 120 bp, Artificial Sequence
  ENSG00000130787_16 (sequence is synthesized)
gcaggggctgcggcagaggctgctggacgagcagttcgcagtgttgcggggcgctgctgccgaggccgcgggcatcctgcaggatgccgtgagcaagctggacgaccccctgcacctgcg

SEQ ID NO: 288444 - DNA, 120 bp, Artificial Sequence
  ENSG00000130787_17 (sequence is synthesized)
ctgtaccagctccccagactacctggtgagcagggcccaggaggccttggatgccgtgagcaccctggaggagggccacgcccagtacctgacctccttggcagacgcctccgccctggt

SEQ ID NO: 288445 - DNA, 120 bp, Artificial Sequence
  ENSG00000130787_18 (sequence is synthesized)
ggctcccaccgaccctgccgaccgcctcatagacacctgcagggagtgcggggcccgggctctggagctcatggggcagctgcaggaccagcaggctctgcggcacatgcaggccagcct

SEQ ID NO: 288446 - DNA, 120 bp, Artificial Sequence
  ENSG00000130787_19 (sequence is synthesized)
ggtgcggacacccctgcagggcatccttcagctgggccaggaactgaaacccaagagcctagatgtgcggcaggaggagctgggggccgtggtcgacaaggagatggcggccacatccgc

SEQ ID NO: 288447 - DNA, 120 bp, Artificial Sequence
  ENSG00000130787_20 (sequence is synthesized)
agccattgaagatgctgtgcggaggattgaggacatgatgaaccaggcacgccacgccagctcgggggtgaagctggaggtgaacgagaggatcctcaactcctgcacagacctgatgaa

SEQ ID NO: 288448 - DNA, 120 bp, Artificial Sequence
  ENSG00000130787_21 (sequence is synthesized)
ggctatccggctcctggtgacgacatccactagcctgcagaaggagatcgtggagagcggcaggggggcagccacgcagcaggaattttacgccaagaactcgcgctggaccgaaggcct

SEQ ID NO: 288449 - DNA, 120 bp, Artificial Sequence
  ENSG00000130787_22 (sequence is synthesized)
catctcggcctccaaggctgtgggctggggagccacacagctggtggaggcagctgacaaggtggtgcttcacacgggcaagtatgaggagctcatcgtctgctcccacgagatcgcagc

SEQ ID NO: 288450 - DNA, 120 bp, Artificial Sequence
  ENSG00000130787_23 (sequence is synthesized)
cagcacggcccagctggtggcggcctccaaggtgaaggccaacaagcacagcccccacctgagccgcctgcaggaatgttctcgcacagtcaatgagagggctgccaatgtggtggcctc

SEQ ID NO: 288451 - DNA, 120 bp, Artificial Sequence
  ENSG00000130787_24 (sequence is synthesized)
caccaagtcaggccaggagcagattgaggacagagacaccatggatttctccggcctgtccctcatcaagctgaagaagcaggagatggagacccaggtgcgtgtcctggagctggagaa

SEQ ID NO: 288452 - DNA, 120 bp, Artificial Sequence
  ENSG00000130787_25 (sequence is synthesized)
gacgctggaggctgaacgcatgcggctgggggagttgcggaagcaacactacgtgctggctggggcatcaggcagccctggagaggaggtggccatccggcccagcactgccccccgaag

SEQ ID NO: 288453 - DNA, 120 bp, Artificial Sequence
  ENSG00000130787_26 (sequence is synthesized)
tgtaaccaccaagaaaccacccctggcccagaagcccagcgtggcccccagacaggaccaccagcttgacaaaaaggatggcatctacccagctcaactcgtgaactactaggcccccca

SEQ ID NO: 288454 - DNA, 120 bp, Artificial Sequence
  ENSG00000130787_27 (sequence is synthesized)
ggggtccagcagggtggctggtgacaggcctgggcctctgcaactgccctgacaggaccgagaggccttgcccctccacctggtgcccaagcctcccgccccaccgtctggatcaatgtc

SEQ ID NO: 288455 - DNA, 120 bp, Artificial Sequence
  ENSG00000130787_28 (sequence is synthesized)
ctcaaggcccctggcccttactgagcctgcagggtcctgggccatgtgggtggtgcttctggatgtgagtctcttatttatctgcagaaggaactttggggtgcagccaggacccggtag

SEQ ID NO: 288456 - DNA, 120 bp, Artificial Sequence
  ENSG00000130787_29 (sequence is synthesized)
gcctgagcctcaactcttcagaaaatagtgtttttaatattcctcttcagaaaatagtgtttttaatattccgagctagagctcttcttcctacgtttgtagtcagcacactgggaaacc

SEQ ID NO: 288457 - DNA, 120 bp, Artificial Sequence
  ENSG00000130787_30 (sequence is synthesized)
gggccagcgtggggctccctgccttctggactcctgaaggtcgtggatggatggaaggcacacagcccgtgccggctgatgggacgagggtcaggcatcctgtctgtggccttctggggc

SEQ ID NO: 288458 - DNA, 120 bp, Artificial Sequence
  ENSG00000130787_31 (sequence is synthesized)
accgattctaccaggccctccagctgcgtggtctccgcagaccaggctctgtgtgggctagaggaatgtcgcccattactcctcaggcctggccctcgggcctccgtgatgggagccccc

SEQ ID NO: 288459 - DNA, 120 bp, Artificial Sequence
  ENSG00000130787_32 (sequence is synthesized)
caggaggggtcagatgctggaaggggccgctttctggggagtgaggtgagacatagcggcccgggcgctgccttcactcctggagtgagtttccatttccagctggaatctgcagccacc

SEQ ID NO: 288460 - DNA, 120 bp, Artificial Sequence
  ENSG00000130787_33 (sequence is synthesized)
cccatttcctgttttccattcccccgttctggccgcgccccactgcccacctgaaggggtggtttccagccctccggagagtgggcttggccctaggccctccagctcagccagaaaaag

SEQ ID NO: 288461 - DNA, 120 bp, Artificial Sequence
  ENSG00000130787_34 (sequence is synthesized)
cccagaaacccaggtgctggaccagggccctcagggaggggaccctgcggctagagtgggctaggccctggctttgcccgtcagatttgaacgaatgtgtgtcccttgagcccaaggaga

SEQ ID NO: 288462 - DNA, 120 bp, Artificial Sequence
  ENSG00000130787_35 (sequence is synthesized)
gcggcaggaggggtgggaccaggctgggaggacagagccagcagctgccatgccctcctgctccccccaccccagccctagccctttagcctttcaccctgtgctctggaaaggctacca

SEQ ID NO: 288463 - DNA, 120 bp, Artificial Sequence
  ENSG00000130787_36 (sequence is synthesized)
aatactggccaaggtcaggaggagcaaaaatgagccagcaccagcgccttggctttgtgttagcatttcctcctgaagtgttctgttggcaataaaatgcactttgactgtttgttgtca

SEQ ID NO: 288464 - DNA, 120 bp, Artificial Sequence
  ENSG00000130787_37 (sequence is synthesized)
cgggccctgggggtgtcaggggcaggggagacgggccctgggggtgtcaggggcaggggagatgggccctgggggcaagcgaggtttcagggtcacttggggtgtgcagagccaagctgt

SEQ ID NO: 288465 - DNA, 120 bp, Artificial Sequence
  ENSG00000130787_38 (sequence is synthesized)
gaccctagtgccgtgttacttggcagaagccctgcctgttcccacatctgtaaagttaggcatttggggtgctccatcgtgagcctccttcctgctctaacattcagcgtgggtttgagg

SEQ ID NO: 288466 - DNA, 120 bp, Artificial Sequence
  ENSG00000130787_39 (sequence is synthesized)
cccgtgggcatggagctatccgtcacccttgtcagtcgggcacctcgtcctgggctcccaggtggaggtctctggaagcccttgctgagctgggctgggagctcctttgccctgaccttg

SEQ ID NO: 288467 - DNA, 120 bp, Artificial Sequence
  ENSG00000130787_40 (sequence is synthesized)
ttgttgccgttgacctccttcatgggagcatctggtcttgacctggggcagccaccagcacatgaggctcccgtcttggaggcagggggcacactggtgtgtgggagctggcttagggcc

SEQ ID NO: 288468 - DNA, 120 bp, Artificial Sequence
  ENSG00000130787_41 (sequence is synthesized)
ctgcttcacagttggaccaccttggacaggttgcccagctcccaagggctcacgttcttcctcctgccccttttgcacagttttccgacagctcaacacggccatcgccgtatcccagat

SEQ ID NO: 288469 - DNA, 120 bp, Artificial Sequence
  ENSG00000130787_42 (sequence is synthesized)
caaccatcgatctgtctccgtgatctgcctgttctagagatttcatgtaaaggggatcatacacgatgcatccttttgtgtccggcttcttcactcagcatcacgttgtcaagggtcacc

SEQ ID NO: 288470 - DNA, 120 bp, Artificial Sequence
  ENSG00000130787_43 (sequence is synthesized)
ggtgaggggccggcggcagcagggcacagtccacaaggagcctgacccccagcctaggccaccctgggcatgagaccctccaccccctaccacagggaggcctcagggatgcgccctatg

SEQ ID NO: 288471 - DNA, 120 bp, Artificial Sequence
  ENSG00000130787_44 (sequence is synthesized)
cggtgcctctcccttcaaaagcaagggacctttatgcatgattccacatctgcattccgataggaaagggaaacagcagaaacacaatacccatctgagagctacgcttagagaggactc

SEQ ID NO: 288472 - DNA, 120 bp, Artificial Sequence
  ENSG00000130787_45 (sequence is synthesized)
tgggcttttatttatttttttacttcagtcttgtgaccagtaattttaagggaaagccaataataatgtttttaaaaagcctcacgccacccctggcggcatctcctcggtgtactttgc

SEQ ID NO: 288473 - DNA, 120 bp, Artificial Sequence
  ENSG00000130787_46 (sequence is synthesized)
tgttcagatccgcctgccttctgtgccagcctaacagcgcccggcctcagcccccattgtccctggagctggcgaggtgtccggttgcggagccggcggcgtctctggaaatgcatcctg

SEQ ID NO: 288474 - DNA, 120 bp, Artificial Sequence
  ENSG00000130787_47 (sequence is synthesized)
catccccgcatggataacagctgcagctatgtcagaattgcacaaagaggggagagtgtcattgtgtgccttttgacacatacattaagaccaaaaaggaaaaaaagcgtctatctgtgc

SEQ ID NO: 288475 - DNA, 120 bp, Artificial Sequence
  ENSG00000130787_48 (sequence is synthesized)
tgccaccgaccagactcatggaggccagattttctccaattaaccagatcttgccctggtgcagacaagacttagccatcagcatcagcaaagccatcaacacccaggaggcccccgtga

SEQ ID NO: 288476 - DNA, 120 bp, Artificial Sequence
  ENSG00000130787_49 (sequence is synthesized)
tatggctgagtcgtactctgccgtgtggacagaccacattgtgtttatctgttcatcacttggtggacattgggtttgttgcaactttctggctgttgtaaatagtgctgctgtgggcct

SEQ ID NO: 288477 - DNA, 120 bp, Artificial Sequence
  ENSG00000130787_50 (sequence is synthesized)
ttgagcacaagtttctgtgtaaacatctgccatcacttatcttggatagatagctgatgtgtgtggaacacagtagaactgctgggtctcacctctgttaccctgttgagaaactaccag

SEQ ID NO: 288478 - DNA, 120 bp, Artificial Sequence
  ENSG00000130787_51 (sequence is synthesized)
actgttttccaaagtggctgcaccattttacactcccaccagcaacgcatgaatgttccagtttctccacatccttgccaatgcttattattgtcttctttttattttagccatcctagt

SEQ ID NO: 288479 - DNA, 120 bp, Artificial Sequence
  ENSG00000130787_52 (sequence is synthesized)
gggtgtggagtggtttctcacggtcttgatttgtgtttccctgatagcaaagggtgctacatatcttttcatgagctacctggccatttgtgtatctttggagaaatgtcttttaggacc

SEQ ID NO: 288480 - DNA, 120 bp, Artificial Sequence
  ENSG00000130787_53 (sequence is synthesized)
ttgagctcacgttttaattgggttatctttttattcttgagctgtgcactgtgtgggaagcctctttctagaaatctccacccccctgaccagtgagggtctcagctgggctccaactgg

SEQ ID NO: 288481 - DNA, 120 bp, Artificial Sequence
  ENSG00000130787_54 (sequence is synthesized)
ccaaggctgtgggctggggagccacacagctggtgtaggttgccctgggtgggggggggcagggggctgcttcctgccagttggagcagtttggggttcaacagggtgcagggagtagag

SEQ ID NO: 288482 - DNA, 120 bp, Artificial Sequence
  ENSG00000130787_55 (sequence is synthesized)
tgggatgggggagttcctggacgggggtgctgtccccagccctagaggggcacatggtgcacgtccctggggaagtcagggaccactgacaacatgcagggaggagcttgctcaagggag

SEQ ID NO: 288483 - DNA, 120 bp, Artificial Sequence
  ENSG00000130803_0 (sequence is synthesized)
agtgaagcggaagccattactctctggagtcgattgccccgagacacatgggccaaggaggggtcagcggcgaattctttcggcctgttggggacccctcgtgtccccacgccagactgg

SEQ ID NO: 288484 - DNA, 120 bp, Artificial Sequence
  ENSG00000130803_1 (sequence is synthesized)
acctcccgtatgaacttctcttcgcatcggcggcggcttccgtcacctccgctcccccgatcctattcccagtcgtatgccagcttggagagtcacgtgagagcaagagagtagctttct

SEQ ID NO: 288485 - DNA, 120 bp, Artificial Sequence
  ENSG00000130803_2 (sequence is synthesized)
ggttgtcctggtgccctgctcaggcaaactgactgccattctctgaggatggcagctctgtcccccacatttgccacgtccacccaggattccacctgtctccaggactcagaatttcct

SEQ ID NO: 288486 - DNA, 120 bp, Artificial Sequence
  ENSG00000130803_3 (sequence is synthesized)
gtttcttcaaaagaccattcctgtccccagaatttggacctgttcgtgtgcagtggtctggagcctcacacacccagtgttggttcccaggaatcggtgactttccaagatgtcgctgtg

SEQ ID NO: 288487 - DNA, 120 bp, Artificial Sequence
  ENSG00000130803_4 (sequence is synthesized)
gactttaccgagaaggagtggcccttgctggattcttctcagagaaaactgtacaaagatgtaatgctggagaactacagcaacctcacttcactggggtatcaggtcggcaaacccagc

SEQ ID NO: 288488 - DNA, 120 bp, Artificial Sequence
  ENSG00000130803_5 (sequence is synthesized)
ctcatctcacacttggagcaggaggaggagccgaggacagaggagaggggcgctcaccagggcgcttgtgcagattgggagactccatctaaaaccaagtggtcacttcttatggaagat

SEQ ID NO: 288489 - DNA, 120 bp, Artificial Sequence
  ENSG00000130803_6 (sequence is synthesized)
atttttgggaaggaaacgcccagtggtgtgacgatggaaagagccggtcttggagagaagtccactgaatacgctcacttgttcgaagtctttggcatggaccctcatctcactcagcca

SEQ ID NO: 288490 - DNA, 120 bp, Artificial Sequence
  ENSG00000130803_7 (sequence is synthesized)
atgggaaggcacgctggcaagaggccctatcaccgccgcgactatggggtagcgttcaagggcaggccgcacctcactcagcacatgagcatgtacgacgggagaaaaatgcatgaatgt

SEQ ID NO: 288491 - DNA, 120 bp, Artificial Sequence
  ENSG00000130803_8 (sequence is synthesized)
catcagtgccaaaaagccttcaccacgagcgcgtccctcacacggcacaggagaatccacaccggggagaagccttacgagtgcagcgactgcgggaaagccttcaacgacccttcagcc

SEQ ID NO: 288492 - DNA, 120 bp, Artificial Sequence
  ENSG00000130803_9 (sequence is synthesized)
cttaggagccacgcaagaactcacctcaaagagaagccctttgactgcagtcagtgtggaaatgcattccggaccctctcggccctgaaaatccacatgcgagttcacactggcgagagg

SEQ ID NO: 288493 - DNA, 120 bp, Artificial Sequence
  ENSG00000130803_10 (sequence is synthesized)
ccttacaagtgtgatcagtgcgggaaggcttacggccggagctgccacctcatcgcacacaagagaacgcacaccggagagaggccctacgagtgtcacgactgtgggaaagctttccag

SEQ ID NO: 288494 - DNA, 120 bp, Artificial Sequence
  ENSG00000130803_11 (sequence is synthesized)
cacccctcccacctcaaagagcacgtgaggaatcacacgggggagaagccctacgcgtgcacgcagtgcggcaaagccttccgctggaagtccaactttaatttgcacaagaagaaccac

SEQ ID NO: 288495 - DNA, 120 bp, Artificial Sequence
  ENSG00000130803_12 (sequence is synthesized)
atggtggagaagacctacgaatgtaaagaatgcgggaaatcctttggcgatctcgtgtcccggaggaaacacatgaggattcacatcgtcaagaaacccgtggaatgtcggcagtgcggg

SEQ ID NO: 288496 - DNA, 120 bp, Artificial Sequence
  ENSG00000130803_13 (sequence is synthesized)
aagaccttccgaaaccagtccatccttaagactcacatgaactctcacactggagagaaaccatacgggtgcgatctctgcgggaaagctttcagcgcgagttcaaacctcaccgcacac

SEQ ID NO: 288497 - DNA, 120 bp, Artificial Sequence
  ENSG00000130803_14 (sequence is synthesized)
aggaagatacacacgcaagagagacgctacgaatgcgccgcctgcgggaaagtcttcggtgactatttatcccggcggaggcacatgagcgttcaccttgtaaagaaacgagttgagtgt

SEQ ID NO: 288498 - DNA, 120 bp, Artificial Sequence
  ENSG00000130803_15 (sequence is synthesized)
aggcagtgtggcaaggccttcaggaaccagtcaacgctgaagacgcacatgcgaagccacacgggggagaaaccgtacgaatgcgatcactgtgggaaggccttcagcataggctccaac

SEQ ID NO: 288499 - DNA, 120 bp, Artificial Sequence
  ENSG00000130803_16 (sequence is synthesized)
gtgaaaactcaccggggagagaagctctttgtgtcatccgtgtggaaaaggctccagtgagcgcgcctgctttagagacacaggatgattcagaccggaaacagacctcgtgggtgtaag

SEQ ID NO: 288500 - DNA, 120 bp, Artificial Sequence
  ENSG00000130803_17 (sequence is synthesized)
aggaagcctctgtgagctcgcaccttactgggtgcaaaagaatccacggaacttgggagaagtccagttcctgtaaaaactgggaagacgaggcgttctcatcccataggaggtttgtga

SEQ ID NO: 288501 - DNA, 120 bp, Artificial Sequence
  ENSG00000130803_18 (sequence is synthesized)
gaactcacgccgggggtgaaaatgtacgtctgtagcatggagaagccttcagggtacattcagctcttaacaaacacaggaggacttaatggcagcttggcatttaatgtcaaaatccaa

SEQ ID NO: 288502 - DNA, 120 bp, Artificial Sequence
  ENSG00000130803_19 (sequence is synthesized)
gccgtggcatttaatgtcaaaatgacttcagaccacttctagccttctgggcccatgagtaataatgagcacactagggagcatctctgtaaacacagtggctggggaaacccttcctag

SEQ ID NO: 288503 - DNA, 120 bp, Artificial Sequence
  ENSG00000130803_20 (sequence is synthesized)
tctcacttgattcctcatgacggaaatcacactaaagagagaaatcagtgaagtaaggaacgtggaaggtcatgaatgggccgcaaaccacggccagctgcttgtctttgtatggcttgc

SEQ ID NO: 288504 - DNA, 120 bp, Artificial Sequence
  ENSG00000130803_21 (sequence is synthesized)
cagctaacaatagtggttccatctttaaggaagaagaatgtttgatggagaaaatttgtggccaatgaagtctgaaatacttcctgtcatctgcccctttccagaaaaacttggccgacc

SEQ ID NO: 288505 - DNA, 120 bp, Artificial Sequence
  ENSG00000130803_22 (sequence is synthesized)
cttggtctacagcacgggttctcagtcgggcgacgatttggctgtctaggcgtcatttggcaatgtctagagacatttttggtagttagaatggggggaagatactcctgacttgtaata

SEQ ID NO: 288506 - DNA, 120 bp, Artificial Sequence
  ENSG00000130803_23 (sequence is synthesized)
agaagacatcagagatgctgctaagtcggctccagcacacaggagccccccacaacgaagagttagtgcccccaaacgtcactgttgctgaggttgaaaataatcatgcagtcattcctc

SEQ ID NO: 288507 - DNA, 120 bp, Artificial Sequence
  ENSG00000130803_24 (sequence is synthesized)
aattactgcctgcagcaattcctccatttttatgaatcttgtgagcacttacgctaggagaaatttcttttacaaaacttttaaaatacaattagtgctgataattcctatgtggaaatg

SEQ ID NO: 288508 - DNA, 120 bp, Artificial Sequence
  ENSG00000130803_25 (sequence is synthesized)
attccagccatggtcccctcacttgagcatgtgaatattctcacggagagaagccccagcgagattttccggtgaatacgggattgcacttactctttcatcacggaaacagaccccccg

SEQ ID NO: 288509 - DNA, 120 bp, Artificial Sequence
  ENSG00000130803_26 (sequence is synthesized)
agagaagccccaacgagattttccggtgaatacgggactgcacgtactctctcatcatgaaaacagagccccgttcataaatttttcatctttatttttaaggttatactcctctaaata

SEQ ID NO: 288510 - DNA, 120 bp, Artificial Sequence
  ENSG00000130803_27 (sequence is synthesized)
acccttaagcctcatcaagaaaggtttgtttatagtatttttactatagcttcatccttgataacgtcctaatttccttctggacaacctccttgaccaatggcatattgagatctatgt

SEQ ID NO: 288511 - DNA, 120 bp, Artificial Sequence
  ENSG00000130803_28 (sequence is synthesized)
gacatgaggatatttctcagtaccactttgttactggtacctgatgcacacggattgcgaccagagcatgatgcctccatcaagtggtaatatgtttgcagcctgctgtccagccaagag

SEQ ID NO: 288512 - DNA, 120 bp, Artificial Sequence
  ENSG00000130803_29 (sequence is synthesized)
tgacagatacttctagtgacttccccggtatccactctcatcttcttccaatatcaagagaatccaggttctgtcagattagtaaggtgtgctaatctaaattttaaaaaatctcttaca

SEQ ID NO: 288513 - DNA, 120 bp, Artificial Sequence
  ENSG00000130803_30 (sequence is synthesized)
ggttttcttgcagctggtaccatccatgtctcacagccctggccactgacagatcagcagatgtcaccacatgggcttctgagaaagctcttgaatggggatcgttcttaaacatgaatt

SEQ ID NO: 288514 - DNA, 120 bp, Artificial Sequence
  ENSG00000130803_31 (sequence is synthesized)
cctccctgtatgttttgttctttgctttacttttcaccttgcaaagagatccagtacctagtattggaagatccaccttaacgaccgtgcatatgaaaaccacagtctaaggaagtgact

SEQ ID NO: 288515 - DNA, 120 bp, Artificial Sequence
  ENSG00000130803_32 (sequence is synthesized)
gcagaaagctcacagcgaccctggcctcccctgtggcctctttgagtgtctgcagcagccctggacttccagacttctatcacatgagaaaaaataaaactgattattggtttaagctgc

SEQ ID NO: 288516 - DNA, 120 bp, Artificial Sequence
  ENSG00000130803_33 (sequence is synthesized)
tcttgcagagcttcatctcagccagtggatgccagaacagggcccaagagagagccaaggaatattggggctgtcctggtgttggggaagttaggggaagtgatttatgtagcatctgtt

SEQ ID NO: 288517 - DNA, 120 bp, Artificial Sequence
  ENSG00000130803_34 (sequence is synthesized)
tccctcatgcttgcaaaatctcaggcccttgctcagccccagagacggggggaaataaagggcaaagctctcggagtgggctagaactggagggagattagtcccttgtcagggttgcat

SEQ ID NO: 288518 - DNA, 120 bp, Artificial Sequence
  ENSG00000130803_35 (sequence is synthesized)
ctgaagtgacggcacaggacaagatggcctcaatggggagagaggatgtctgaggactgatgcctggaggaaatgttgagccccgtagcaggccatctggaaatcctgtgttgggtctct

SEQ ID NO: 288519 - DNA, 120 bp, Artificial Sequence
  ENSG00000130803_36 (sequence is synthesized)
aactatgcagcggttcagaacgcagctgtgaacaagcagccccagcacccatgcttaatggggcctctcctgggtatcgaggcccatctattgcagggaccatggtggttctccggtgtg

SEQ ID NO: 288520 - DNA, 120 bp, Artificial Sequence
  ENSG00000130803_37 (sequence is synthesized)
gtggttctccggtgtgtgtctgagcttggcatgggcttctgaaatacgaaatccccattcttttggagggtcagtgtgtgggtacttgtgatcttatttcctatttcttttttttttttt

SEQ ID NO: 288521 - DNA, 120 bp, Artificial Sequence
  ENSG00000130803_38 (sequence is synthesized)
gtccaccctcagaacactgaagacccaagtgttgagcccaggctactggaaggggttgtcctctgcatggccctccctcaacctgtgtctttcccgtgagtgtagggtatcaggtcggca

SEQ ID NO: 288522 - DNA, 120 bp, Artificial Sequence
  ENSG00000130810_0 (sequence is synthesized)
ggacgcaggaggcctcgtggaggacacagcagcatgggacagtcagggaggtcccggcaccagaagcgcgcccgcgcccaggcgcagctccgcaacctcgaggcctatgccgcgaacccg

SEQ ID NO: 288523 - DNA, 120 bp, Artificial Sequence
  ENSG00000130810_1 (sequence is synthesized)
cactcgttcgtgttcacgcgaggctgcacgggtcgcaacatccggcagctcagcctggacgtgcggcgggtcatggagccgctcactgccagccgtctgcaggttcgtaagaagaactcg

SEQ ID NO: 288524 - DNA, 120 bp, Artificial Sequence
  ENSG00000130810_2 (sequence is synthesized)
ctgaaggactgcgtggcagtggctgggcccctcggggtcacacactttctgatcctgagcaaaacagagaccaatgtctactttaagctgatgcgcctcccaggaggccccaccttgacc

SEQ ID NO: 288525 - DNA, 120 bp, Artificial Sequence
  ENSG00000130810_3 (sequence is synthesized)
ttccaggtcaagaagtactcgctggtgcgtgatgtggtctcctcactgcgccggcaccgcatgcacgagcagcagtttgcccacccacccctcctggtactcaacagctttggcccccat

SEQ ID NO: 288526 - DNA, 120 bp, Artificial Sequence
  ENSG00000130810_4 (sequence is synthesized)
ggtatgcatgtgaagctcatggccaccatgttccagaacctgttcccctccatcaacgtgcacaaggtgaacctgaacaccatcaagcgctgcctcctcatcgactacaaccccgactcc

SEQ ID NO: 288527 - DNA, 120 bp, Artificial Sequence
  ENSG00000130810_5 (sequence is synthesized)
caggagctggacttccgccactatagcatcaaagttgttcctgtgggcgcgagtcgcgggatgaagaagctgctccaggagaagttccccaacatgagccgcctgcaggacatcagcgag

SEQ ID NO: 288528 - DNA, 120 bp, Artificial Sequence
  ENSG00000130810_6 (sequence is synthesized)
ctgctggccacgggcgcggggctgtcggagagcgaggcagagcctgacggcgaccacaacatcacagagctgcctcaggctgtcgctggccgtggcaacatgcgggcccagcagagtgca

SEQ ID NO: 288529 - DNA, 120 bp, Artificial Sequence
  ENSG00000130810_7 (sequence is synthesized)
gtgcggctcaccgagatcggcccgcggatgacactgcagctcatcaaggtccaggagggcgtcggggagggcaaagtgatgttccacagttttgtgagcaagacggaggaggagctgcag

SEQ ID NO: 288530 - DNA, 120 bp, Artificial Sequence
  ENSG00000130810_8 (sequence is synthesized)
gccatcctggaagccaaggagaagaagctgcggctgaaggcgcagaggcaggcccagcaggcccagaatgtgcagcgcaagcaggagcagcgggaggcccacagaaagaagagcctggag

SEQ ID NO: 288531 - DNA, 120 bp, Artificial Sequence
  ENSG00000130810_9 (sequence is synthesized)
ggggtagtgatgaagaggcctctgggatcccttcaaggacggcgagcctggagttgggtgaggacgatgatgaacaggaagatgatgacatcgagtatttctgccaggcggtgggcgagg

SEQ ID NO: 288532 - DNA, 120 bp, Artificial Sequence
  ENSG00000130810_10 (sequence is synthesized)
cgcccagtgaggacctgttccccgaggccaagcagaaacggcttgccaagtctccagggcggaagcggaagcggtgggaaatggatcgaggcaggggtcgcctttgtgaccagaagtttc

SEQ ID NO: 288533 - DNA, 120 bp, Artificial Sequence
  ENSG00000130810_11 (sequence is synthesized)
ccaagaccaaggacaagtcccagggagcccaggccaggcgggggcccagaggggcttcccgggatggtgggcgaggccggggccggggccgcccagggaagagagtggcctgagcccaag

SEQ ID NO: 288534 - DNA, 120 bp, Artificial Sequence
  ENSG00000130810_12 (sequence is synthesized)
ccgcaccggagcagcggctggattgaacgccccagattggggcccgagatgtggccctcggtttcctttcataaaggagttgtgtccccagcccttccactccagtaaagaactgaattg

SEQ ID NO: 288535 - DNA, 120 bp, Artificial Sequence
  ENSG00000130810_13 (sequence is synthesized)
gccaggggtccacgtcagcgtttgggatgggggattctggagccatacaaagcaacccagagagtcctgggccggccacacccgagagtccctcccacctggtttcttcctggaagctgg

SEQ ID NO: 288536 - DNA, 120 bp, Artificial Sequence
  ENSG00000130810_14 (sequence is synthesized)
gtctctcccctaccctgcacggggttggtttcattggtggcagcagcagccatgagtggcccctccccccagtcccaccaaagagccgtgcaagcagacaggtcacactttcagcagatg

SEQ ID NO: 288537 - DNA, 120 bp, Artificial Sequence
  ENSG00000130810_15 (sequence is synthesized)
agcttgaacctcaggagggttgtggcacaatgaggaaggaaacgtgggtggaaaggcacgctggcctgctctgctggctgggccagtaactggggatggggctggggcagggcccactaa

SEQ ID NO: 288538 - DNA, 120 bp, Artificial Sequence
  ENSG00000130810_16 (sequence is synthesized)
gccactggtgactgggggaggggctggggaactgggtagcagacacaggctgaggatcggcacgggagcatggcagccaacgtctcgggtaaggagaaggcatgttggctgtctctgggg

SEQ ID NO: 288539 - DNA, 120 bp, Artificial Sequence
  ENSG00000130810_17 (sequence is synthesized)
cgtctcgggtaaggagaaggcatgttggctgtctctgggggtctgcagattgtcaggaggtgggggtagtgggtattggtaaaacacctaggtctggggctgggcacggtggctcacgcc

SEQ ID NO: 288540 - DNA, 64 bp, Artificial Sequence
  ENSG00000130810_18 (sequence is synthesized)
tgtaatcccagcactttgggaggtcgaggggggtggaacacgaggtcaggggttcgagaccact

SEQ ID NO: 288541 - DNA, 120 bp, Artificial Sequence
  ENSG00000130810_19 (sequence is synthesized)
cccggcagcttgggaggcaggtggcgcaggtggggtcccggccgaggtcgcggcgctgaccctttgtctctcgtcgccgcagtcccggcaccagaagcgcgcccgcgcccaggcgcagct

SEQ ID NO: 288542 - DNA, 120 bp, Artificial Sequence
  ENSG00000130810_20 (sequence is synthesized)
ctccaggagaagttccccaacatgagccgcctgcaggacatcagcgagctgctggccacgtgaggagggcatagggcgggaggccactgcggcccggggaccccagaacaggaccgggag

SEQ ID NO: 288543 - DNA, 120 bp, Artificial Sequence
  ENSG00000130810_21 (sequence is synthesized)
acccaccctcggcctagtcttcgtagctgcagtaatggctcccgctgtaaaactgtgggaggacttaagtctccccagctggaaaaaaagaccctcatggggagcatcatttctgccttt

SEQ ID NO: 288544 - DNA, 120 bp, Artificial Sequence
  ENSG00000130810_22 (sequence is synthesized)
cagggcttttgctgggctggagtgagggcgcgcagcttgggagatagatagtcgcctaagcctgacagttaagactggaatctggagccgggcgtggtggctcatgcctgtattcccagc

SEQ ID NO: 288545 - DNA, 120 bp, Artificial Sequence
  ENSG00000130811_0 (sequence is synthesized)
ctctggccgggcttgggctgcgtggagaatactttttgcgatgcctactggagactttgattcgaagcccagttgggccgaccaggtggaggaggagggggaggacgacaaatgtgtcac

SEQ ID NO: 288546 - DNA, 120 bp, Artificial Sequence
  ENSG00000130811_1 (sequence is synthesized)
cagcgagctcctcaaggggatccctctggccacaggtgacaccagcccagagccagagctactgccgggagctccactgccgcctcccaaggaggtcatcaacggaaacataaagacagt

SEQ ID NO: 288547 - DNA, 120 bp, Artificial Sequence
  ENSG00000130811_2 (sequence is synthesized)
gacagagtacaagatagatgaggatggcaagaagttcaagattgtccgcaccttcaggattgagacccggaaggcttcaaaggctgtcgcaaggaggaagaactggaagaagttcgggaa

SEQ ID NO: 288548 - DNA, 120 bp, Artificial Sequence
  ENSG00000130811_3 (sequence is synthesized)
ctcagagtttgacccccccggacccaatgtggccaccaccactgtcagtgacgatgtctctatgacgttcatcaccagcaaagaggacctgaactgccaggaggaggaggaccctatgaa

SEQ ID NO: 288549 - DNA, 120 bp, Artificial Sequence
  ENSG00000130811_4 (sequence is synthesized)
tgtcctgccgcatctgcaagggcgaccactggaccacccgctgcccctacaaggatacgctggggcccatgcagaaggagctggccgagcagctgggcctgtctactggcgagaaggaga

SEQ ID NO: 288550 - DNA, 120 bp, Artificial Sequence
  ENSG00000130811_5 (sequence is synthesized)
agctgccgggagagctagagccggtgcaggccacgcagaacaagacagggaagtatgtgccgccgagcctgcgcgacggggccagccgccgcggggagtccatgcagcccaaccgcagag

SEQ ID NO: 288551 - DNA, 120 bp, Artificial Sequence
  ENSG00000130811_6 (sequence is synthesized)
ccgacgacaacgccaccatccgtgtcaccaacttgtcagaggacacgcgtgagaccgacctgcaggagctcttccggcctttcggctccatctcccgcatctacctggctaaggacaaga

SEQ ID NO: 288552 - DNA, 120 bp, Artificial Sequence
  ENSG00000130811_7 (sequence is synthesized)
ccactggccaatccaagggctttgccttcatcagcttccaccgccgcgaggatgctgcgcgtgccattgccggggtgtccggctttggctacgaccacctcatcctcaacgtcgagtggg

SEQ ID NO: 288553 - DNA, 120 bp, Artificial Sequence
  ENSG00000130811_8 (sequence is synthesized)
ccaagccgtccaccaactaagccagctgccactgtgtactcggtccgggacccttggcgacagaagacagcctccgagagcgcgggctccaagggcaataaagcagctccactctctcta

SEQ ID NO: 288554 - DNA, 120 bp, Artificial Sequence
  ENSG00000130811_9 (sequence is synthesized)
cctcggggcgtctgtgccttcctaattggctgtacctcctatggttgggagacgggcgtctcccatatatgtgcgacttggcagctgtgactttgctggtggccctgtgactgtcctgat

SEQ ID NO: 288555 - DNA, 120 bp, Artificial Sequence
  ENSG00000130811_10 (sequence is synthesized)
gagctgctgtctgtcggccccagggtgctgaccaccccacatcgtgtgtgcgcactgtgtgtatagtgtctccgttgcatgcctgtggctgtaccgtccgaattctttggtgggatttgc

SEQ ID NO: 288556 - DNA, 120 bp, Artificial Sequence
  ENSG00000130811_11 (sequence is synthesized)
tggtggcgagtgtgagagtgcagacgtgcacttgtcgcctgccacgcgagggggacctgggcgctgttcctgttgtgtgtcccatgtctgccgttgctgtgcatgtgaggctgctgcccc

SEQ ID NO: 288557 - DNA, 120 bp, Artificial Sequence
  ENSG00000130811_12 (sequence is synthesized)
tgttgtcctcccgccctctctggggtggggtcggggctcctcctcctcctcctccaccagtgtcgctggctgggagctcaaatggtgtcagcttctcaggtgtcaccttggtgtcctcgt

SEQ ID NO: 288558 - DNA, 120 bp, Artificial Sequence
  ENSG00000130811_13 (sequence is synthesized)
gagcccagggaggcaggaagcttttgtggttcccgttttataagggaggaagctgaggctcaggttgtctagctcaagggcccggaggtctaggtggacccctgcacatccctgagtatt

SEQ ID NO: 288559 - DNA, 120 bp, Artificial Sequence
  ENSG00000130811_14 (sequence is synthesized)
gcgccctggtgggagctggtccgccagactgcgcaggccccacgctgtgtagctgtcacctggacccggaggctgacagctgccctgcctcctggagctcaggcctggcgtgtactcagg

SEQ ID NO: 288560 - DNA, 120 bp, Artificial Sequence
  ENSG00000130811_15 (sequence is synthesized)
tgtccgggctgcctctccctccagccctgccgctcctgatccccatgacccagggctcagtctttctctgtttttccccttctgccagctccactgccgcctcccaaggaggtcatcaac

SEQ ID NO: 288561 - DNA, 120 bp, Artificial Sequence
  ENSG00000130811_16 (sequence is synthesized)
ttacaggtgtgagccatcgcacccggccaggcttacctctttgtacctattttgttgaagctgaactgaggcctggggtgcttgcactgtcttggggccctgaaaagtccaaggcacagc

SEQ ID NO: 288562 - DNA, 120 bp, Artificial Sequence
  ENSG00000130811_17 (sequence is synthesized)
ggcacagcagtcgataaatagcaactaaataaatgatgataaatatctaatcaaagttcgatgatagatatcaaattatattaataaatatcaaataacatcgattgtaaatatcgaata

SEQ ID NO: 288563 - DNA, 120 bp, Artificial Sequence
  ENSG00000130811_18 (sequence is synthesized)
aggacggtaagtgtacacggtcgcccggggtattcgcggccaggcccaagccgtgtgactgccgcctgcttccatctcccagtctggcaccgtgtaccccgtcacggtctgcccctgccc

SEQ ID NO: 288564 - DNA, 120 bp, Artificial Sequence
  ENSG00000130811_19 (sequence is synthesized)
cgcgccatcctccttgggacccgcctgttgccaactccaggtgttccccggcgggtccctcttcctcccatgccactgcctcccagctgttcccctccagggaggaagttgtaatctccc

SEQ ID NO: 288565 - DNA, 120 bp, Artificial Sequence
  ENSG00000130811_20 (sequence is synthesized)
tcctacgagggatctcccatccttgccactccgagtccccacagggccatcccagtgcgttgcctggccagccctctgcccttggcctgcctttctccgcttttgctgtaggcgtcatcc

SEQ ID NO: 288566 - DNA, 120 bp, Artificial Sequence
  ENSG00000130811_21 (sequence is synthesized)
gtggagaatactttttgcgatgcctactggagactttgattcgaagcccagttgggccgaccaggtggaggaggagggggaggacggcgtcatcccaaaagcccttccatcgcagctggg

SEQ ID NO: 288567 - DNA, 120 bp, Artificial Sequence
  ENSG00000130811_22 (sequence is synthesized)
agactttgagtgagtcggcgatcgcggaaaggggcacgggaagcggttggggtgctctgggaagtattatggggcctgggtacgccgaggctgcgggagccgggcctggctgacttaatc

SEQ ID NO: 288568 - DNA, 120 bp, Artificial Sequence
  ENSG00000130812_0 (sequence is synthesized)
ctcattcgggaaatgctaaatatttatagtttgggctcctgggcccagcatcccagctccactcccaggctctgggggctggggagtggttaccaagcctcctctctccttctgtcccac

SEQ ID NO: 288569 - DNA, 120 bp, Artificial Sequence
  ENSG00000130812_1 (sequence is synthesized)
tgccctctccccgtctctagctcagaggccccactggaccctcggctcttccttggacttcttgtgtgttctgtgagcttcgctggattcagggtcttgggcatcagaggtccgccgcga

SEQ ID NO: 288570 - DNA, 120 bp, Artificial Sequence
  ENSG00000130812_2 (sequence is synthesized)
tggggaagccctggctgcgtgcgctacagctgctgctcctgctgggcgcgtcgtgggcgcgggcgggcgccccgcgctgcacctacaccttcgtgctgcccccgcagaagttcacgggcg

SEQ ID NO: 288571 - DNA, 120 bp, Artificial Sequence
  ENSG00000130812_3 (sequence is synthesized)
ctgtgtgctggagcggccccgcatccacgcgggcgacgcccgaggccgccaacgccagcgagctggcggcgctgcgcatgcgcgtcggccgccacgaggagctgttacgcgagctgcaga

SEQ ID NO: 288572 - DNA, 120 bp, Artificial Sequence
  ENSG00000130812_4 (sequence is synthesized)
cacgaggagctgttacgcgagctgcagaggctggcggcggccgacggcgccgtggccggcgaggtgcgcgcgctgcgcaaggagagccgcggcctgagcgcgcgcctgggccagttgcgc

SEQ ID NO: 288573 - DNA, 120 bp, Artificial Sequence
  ENSG00000130812_5 (sequence is synthesized)
ccgggggcggatctgggggcggagcctgccgcggcgctggcgctgctcggggagcgcgtgctcaacgcgtccgccgaggctcagcgcgcagccgcccggttccaccagctggacgtcaag

SEQ ID NO: 288574 - DNA, 120 bp, Artificial Sequence
  ENSG00000130812_6 (sequence is synthesized)
acgtcaagttccgcgagctggcgcagctcgtcacccagcagagcagtctcatcgcccgcctggagcgcctgtgcccgggaggcgcgggcgggcagcagcaggtcctgccgccacccccac

SEQ ID NO: 288575 - DNA, 120 bp, Artificial Sequence
  ENSG00000130812_7 (sequence is synthesized)
gcaggagcccatggcttctcccatgcctgcaggtcaccctgcggtccccaccaagcctgtgggcccgtggcaggattgtgcagaggcccgccaggcaggccatgaacagagtggagtgta

SEQ ID NO: 288576 - DNA, 120 bp, Artificial Sequence
  ENSG00000130812_8 (sequence is synthesized)
tgaactgcgagtgggccgtcacgtagtgtcagtatggtgtgagcagcaactggagggtggaggctggactgtgatccagcggaggcaagatggttcagtcaacttcttcactacctggca

SEQ ID NO: 288577 - DNA, 120 bp, Artificial Sequence
  ENSG00000130812_9 (sequence is synthesized)
gcactataaggcgggctttgggcggccagacggagaatactggctgggccttgaacccgtgtatcagctgaccagccgtggggaccatgagctgctggttctcctggaggactggggggg

SEQ ID NO: 288578 - DNA, 120 bp, Artificial Sequence
  ENSG00000130812_10 (sequence is synthesized)
ccgtggagcacgtgcccactatgatggcttctccctggaacccgagagcgaccactaccgcctgcggcttggccagtaccatggtgatgctggagactctctttcctggcacaatgacaa

SEQ ID NO: 288579 - DNA, 120 bp, Artificial Sequence
  ENSG00000130812_11 (sequence is synthesized)
gcccttcagcaccgtggatagggaccgagactcctattctggtaactgtgccctgtaccagcggggaggctggtggtaccatgcctgtgcccactccaacctcaacggtgtgtggcacca

SEQ ID NO: 288580 - DNA, 120 bp, Artificial Sequence
  ENSG00000130812_12 (sequence is synthesized)
cggcggccactaccgaagccgctaccaggatggtgtctactgggctgagtttcgtggtggggcatattctctcaggaaggccgccatgctcattcggcccctgaagctgtgactctgtgt

SEQ ID NO: 288581 - DNA, 120 bp, Artificial Sequence
  ENSG00000130812_13 (sequence is synthesized)
tcctctgtcccctaggccctagaggacattggtcagcaggagcccaagttgttctggccacaccttctttgtggctcagtgccaatgtgtcccacagaacttcccactgtggatctgtga

SEQ ID NO: 288582 - DNA, 120 bp, Artificial Sequence
  ENSG00000130812_14 (sequence is synthesized)
ccctgggcgctgaaaatgggacccaggaatcccccccgtcaatatcttggcctcagatggctccccaaggtcattcatatctcggtttgagctcatatcttataataacacaaagtagcc

SEQ ID NO: 288583 - DNA, 120 bp, Artificial Sequence
  ENSG00000130812_15 (sequence is synthesized)
tgggtaagtcgacattagggctgaggaattgtgggtagaggaaaattgaggagtcaggattttagtggcagatttctctcattgtgagaagaccagaagaaatgatactcctattctgat

SEQ ID NO: 288584 - DNA, 120 bp, Artificial Sequence
  ENSG00000130812_16 (sequence is synthesized)
taaaaataagaccaaacttctaaggtgtgaaaataggagaaacaagaaatagaagaggagggactcttactttagtgaggcgatgtttgggactgctactttggtaagagtttgaactgg

SEQ ID NO: 288585 - DNA, 120 bp, Artificial Sequence
  ENSG00000130813_0 (sequence is synthesized)
gaggcaccgccccctgccctgcgcggctgctggaccgacgggcgcacccaggtaggggggcggctgagccgcgcagtgcggaccctcgcggggaactgcgccgccgccaccatgtctcag

SEQ ID NO: 288586 - DNA, 120 bp, Artificial Sequence
  ENSG00000130813_1 (sequence is synthesized)
gaaggtgtggagctggagaagagcgtccggcgcctccgggagaagtttcatgggaaggtatcctccaagaaggcgggggctctgatgaggaaattcggcagcgaccacacgggagtgggg

SEQ ID NO: 288587 - DNA, 120 bp, Artificial Sequence
  ENSG00000130813_2 (sequence is synthesized)
cgctccatcgtgtacggggtaaagcaaaaagatggccaagaactaagtaacgatctggatgcccaggatccaccagaagatatgaagcaggaccgggacattcaggcagtggcgacctcc

SEQ ID NO: 288588 - DNA, 120 bp, Artificial Sequence
  ENSG00000130813_3 (sequence is synthesized)
ctcctgccactgacagaagccaacctacgcatgtttcaacgtgcccaggacgaccttatccctgctgtggaccggcagtttgcctgctcctcctgcgaccacgtctggtggcgccgcgtg

SEQ ID NO: 288589 - DNA, 120 bp, Artificial Sequence
  ENSG00000130813_4 (sequence is synthesized)
ccccagcggaaggaggtatcccggtgccggaaatgccggaagcgctacgagccagtgccagctgacaagatgtggggcctggctgagttccactgcccgaagtgtcggcacaacttccgg

SEQ ID NO: 288590 - DNA, 120 bp, Artificial Sequence
  ENSG00000130813_5 (sequence is synthesized)
ggctgggcacagatggggtccccgtccccctgctacgggtgcggcttccccgtgtatccaacacggatcctccccccgcgctgggaccgggacccggatcgccgcagcacccacactcac

SEQ ID NO: 288591 - DNA, 120 bp, Artificial Sequence
  ENSG00000130813_6 (sequence is synthesized)
tcctgctcagctgccgactgctacaaccggcgagagccccacgtgcctgggacatcctgtgctcaccccaagagccggaagcagaaccacctgcccaaagtgctccaccccagcaaccct

SEQ ID NO: 288592 - DNA, 120 bp, Artificial Sequence
  ENSG00000130813_7 (sequence is synthesized)
cacattagcagtggctccactgtggccacctgcttgagccagggtggcctcctggaagacctggacaacctcatcctggaggacctgaaggaggaggaggaggaagaggaggaggtggag

SEQ ID NO: 288593 - DNA, 120 bp, Artificial Sequence
  ENSG00000130813_8 (sequence is synthesized)
gggcgggcccagggagtgacccctgccaggtgcagatacaaaccagacacggtctgtggctactttgtgttattataagatatgagctcaaaccgagatatgaatgaccttggggagcca

SEQ ID NO: 288594 - DNA, 120 bp, Artificial Sequence
  ENSG00000130813_9 (sequence is synthesized)
tctgaggccaagatattgacgggggggattcctgggtcccattttcagcgcccagggtcacagatccacagtgggaagttctgtgggacacattggcactgagccacaaagaaggtgtgg

SEQ ID NO: 288595 - DNA, 120 bp, Artificial Sequence
  ENSG00000130813_10 (sequence is synthesized)
ccagaacaacttgggctcctgctgaccaatgtcctctagggcctaggggacagaggaacacagagtcacagcttcaggggccgaatgagcatggcggccttcctgagagaatatgcccca

SEQ ID NO: 288596 - DNA, 120 bp, Artificial Sequence
  ENSG00000130813_11 (sequence is synthesized)
ccacgaaactcagcccagtagacaccatcctggtagcggcttcggtagtggccgccgtggtgccacacaccgttgaggttggagtgggcacaggcatggtaccaccagcctccccgctgg

SEQ ID NO: 288597 - DNA, 120 bp, Artificial Sequence
  ENSG00000130813_12 (sequence is synthesized)
tacagggcacagttacctgaggggagagagagagtccatgtcctctcaccagaataaaagcctctacctgcacctcacagtgcaaggcttttgccaggcatcccctggcccctcccattc

SEQ ID NO: 288598 - DNA, 120 bp, Artificial Sequence
  ENSG00000130813_13 (sequence is synthesized)
ttattgaatacaagccctgatcttccatctcctcagcaaaaaaataggagccctggccccccaactttcttcagagtaatagccttaattccttccctatctccttaccaaagtacaagt

SEQ ID NO: 288599 - DNA, 120 bp, Artificial Sequence
  ENSG00000130813_14 (sequence is synthesized)
cacatctttcccaccttttctgcaaactaggagtctaccgttcattcctttatcaaagaaaagtatctacttcctttctagaataagagtactagctctcaccctctgccctttacttga

SEQ ID NO: 288600 - DNA, 120 bp, Artificial Sequence
  ENSG00000130813_15 (sequence is synthesized)
acaggagtcttgattctttttttgcctcatcagagaaggaatctggactccccatccccccaccaggataaaagtcctgacctttgttctcttgacggaataaaagcttgcttatcctta

SEQ ID NO: 288601 - DNA, 120 bp, Artificial Sequence
  ENSG00000130813_16 (sequence is synthesized)
cactcactcctgctcagctgccgactgctacaaccggcgaggtgaggctcttctcccccaacagcctggacagtctttgtccccttctgtgcctttaagtccccaaatctccactcagtc

SEQ ID NO: 288602 - DNA, 120 bp, Artificial Sequence
  ENSG00000130813_17 (sequence is synthesized)
cactttgtctcccacagcagcagccactgcttccacatggcctccatgaccccccagtctccgtggtcttgcccaggaggctctgaggtttcaccccagtggcccgtgcctgagggtccc

SEQ ID NO: 288603 - DNA, 120 bp, Artificial Sequence
  ENSG00000130813_18 (sequence is synthesized)
catggcctctgcccccatggtctctgggtttggggcccctgttttgtcccctgtaatctcaggtgacccccatgtccccaggtctcctgtatcttcaacacccctgaatgtccagttgtg

SEQ ID NO: 288604 - DNA, 120 bp, Artificial Sequence
  ENSG00000130813_19 (sequence is synthesized)
ctggtccccgtatctggtggtctcagctcctccctagagccccgcgtggcctaagtcccctcctccccagactctcatgggacctccagccccatgtctgcagcacctctccctccctag

SEQ ID NO: 288605 - DNA, 120 bp, Artificial Sequence
  ENSG00000130813_20 (sequence is synthesized)
gcaataaggtaacaggtgtgcccacctctcagggctgctatgaggacaactgaggccacacacctggctctcaataagtgagtggtgctctgtgagcttctggcgagttaggggcaccct

SEQ ID NO: 288606 - DNA, 120 bp, Artificial Sequence
  ENSG00000130813_21 (sequence is synthesized)
atggccaagaactaagtaacgatctggatgcccagacaaagaaactgaggccgaagtcacttgccagcaagcaggggcagctgcgatttgaaccctggccacctggagtcagagcctggg

SEQ ID NO: 288607 - DNA, 120 bp, Artificial Sequence
  ENSG00000130813_22 (sequence is synthesized)
atgtgaccgactgcagaggccgcgccgcctcccccgtccgaggtctgcgcgctccgccgcagggtgcagacccggggcgcccgcctgggtttggggcgcaagagcagaggcggagccagg

SEQ ID NO: 288608 - DNA, 120 bp, Artificial Sequence
  ENSG00000130813_23 (sequence is synthesized)
agtaacgatctggatgcccaggtaacctatcccctcccctcgcaaaggaccgggtcacgggagggagagcaagaggggggacccgacccgttcatggtgactgacccccctctgaaacag

SEQ ID NO: 288609 - DNA, 120 bp, Artificial Sequence
  ENSG00000130813_24 (sequence is synthesized)
gagggaccaggcattgtcggtccataactcatcacccaatctcactttttcacctctccatcatttgtccggccagggagcctgcaaacagtaggcgctcattatgtgctgattgtattc

SEQ ID NO: 288610 - DNA, 120 bp, Artificial Sequence
  ENSG00000130813_25 (sequence is synthesized)
actaagcaatgaaaggagccaggattattgccatcatagcgggggcgcagaggtcagagaaggcttactggaggaggaggtaccaagtcttaaaggatggggaggagtgagccctgggag

SEQ ID NO: 288611 - DNA, 120 bp, Artificial Sequence
  ENSG00000130813_26 (sequence is synthesized)
gggaaagggaaagaaaggcaggggtcttggggtgggggagggaatggcataagcaaaggctgggaggtggggaagggttgttagtggcagtctctagaaaggctaggatgagcagaggat

SEQ ID NO: 288612 - DNA, 78 bp, Artificial Sequence
  ENSG00000130813_27 (sequence is synthesized)
ctttgaagcacaggtgcatcatggctactttgcttctttgacagctttggtgatgggaacgctgtggatttagcctgc

SEQ ID NO: 288613 - DNA, 120 bp, Artificial Sequence
  ENSG00000130813_28 (sequence is synthesized)
tcatggctactttgcttctttgacagctttggtgatgggaacgctgtggatttagcctgcctgaaaggcttagtgtagggctgttaaagagtataataggccaggcgcggtggctcacgc

SEQ ID NO: 288614 - DNA, 120 bp, Artificial Sequence
  ENSG00000130813_29 (sequence is synthesized)
gggggcctcccccagcaaacgggtggaaagaggcctgagccccatccccagtttctgcccctgctatctccacccaggatccaccagaagatatgaagcaggaccgggacattcaggcag

SEQ ID NO: 288615 - DNA, 120 bp, Artificial Sequence
  ENSG00000130813_30 (sequence is synthesized)
cccagggggcagggagtggcttgcccaagtccccacagctggaagtgatacagctgggatttgaacccacatctctctcccacttagccgagcacaacgtggcctcaaaggggcgatatg

SEQ ID NO: 288616 - DNA, 120 bp, Artificial Sequence
  ENSG00000130813_31 (sequence is synthesized)
gtaaagggatgaaaggcggggggggggcggcggaggccaaaaccaagggtcaagttcgggccgggagaacggtgcctagagatgggggagggatgatcccgtttccccttcccccaccgg

SEQ ID NO: 288617 - DNA, 120 bp, Artificial Sequence
  ENSG00000130816_0 (sequence is synthesized)
tccgcgtggggggggtgtgtgcccgccttgcgcatgcgtgttccctgggcatggccggctccgttccatccttctgcacagggtatcgcctctctccgtttggtacatcccctcctcccc

SEQ ID NO: 288618 - DNA, 120 bp, Artificial Sequence
  ENSG00000130816_1 (sequence is synthesized)
cacgcccggactggggtggtagacgccgcctccgctcatcgcccctccccatcggtttccgcgcgaaaagccggggcgcctgcgctgccgccgccgcgtctgctgaagcctccgagatgc

SEQ ID NO: 288619 - DNA, 120 bp, Artificial Sequence
  ENSG00000130816_2 (sequence is synthesized)
cggcgcgtaccgccccagcccgggtgcccacactggccgtcccggccatctcgctgcccgacgatgtccgcaggcggctcaaagatttggaaagagacagcttaacagaaaaggaatgtg

SEQ ID NO: 288620 - DNA, 120 bp, Artificial Sequence
  ENSG00000130816_3 (sequence is synthesized)
tgaaggagaaattgaatctcttgcacgaatttctgcaaacagaaataaagaatcagttatgtgacttggaaaccaaattacgtaaagaagaattatccgaggagggctacctggctaaag

SEQ ID NO: 288621 - DNA, 120 bp, Artificial Sequence
  ENSG00000130816_4 (sequence is synthesized)
tcaaatcccttttaaataaagatttgtccttggagaacggtgctcatgcttacaaccgggaagtgaatggacgtctagaaaacgggaaccaagcaagaagtgaagcccgtagagtgggaa

SEQ ID NO: 288622 - DNA, 120 bp, Artificial Sequence
  ENSG00000130816_5 (sequence is synthesized)
tggcagatgccaacagcccccccaaacccctttccaaacctcgcacgcccaggaggagcaagtccgatggagaggctaagcctgaaccttcacctagccccaggattacaaggaaaagca

SEQ ID NO: 288623 - DNA, 120 bp, Artificial Sequence
  ENSG00000130816_6 (sequence is synthesized)
ccaggcaaaccaccatcacatctcattttgcaaagggccctgccaaacggaaacctcaggaagagtctgaaagagccaaatcggatgagtccatcaaggaagaagacaaagaccaggatg

SEQ ID NO: 288624 - DNA, 120 bp, Artificial Sequence
  ENSG00000130816_7 (sequence is synthesized)
agaagagacgtagagttacatccagagaacgagttgctagaccgcttcctgcagaagaacctgaaagagcaaaatcaggaacgcgcactgaaaaggaagaagaaagagatgaaaaagaag

SEQ ID NO: 288625 - DNA, 120 bp, Artificial Sequence
  ENSG00000130816_8 (sequence is synthesized)
aaaagagactccgaagtcaaaccaaagaaccaacacccaaacagaaactgaaggaggagccggacagagaagccagggcaggcgtgcaggctgacgaggacgaagatggagacgagaaag

SEQ ID NO: 288626 - DNA, 120 bp, Artificial Sequence
  ENSG00000130816_9 (sequence is synthesized)
atgagaagaagcacagaagtcaacccaaagatctagctgccaaacggaggcccgaagaaaaagaacctgaaaaagtaaatccacagatttctgatgaaaaagacgaggatgaaaaggagg

SEQ ID NO: 288627 - DNA, 120 bp, Artificial Sequence
  ENSG00000130816_10 (sequence is synthesized)
agaagagacgcaaaacgacccccaaagaaccaacggagaaaaaaatggctcgcgccaaaacagtcatgaactccaagacccaccctcccaagtgcattcagtgcgggcagtacctggacg

SEQ ID NO: 288628 - DNA, 120 bp, Artificial Sequence
  ENSG00000130816_11 (sequence is synthesized)
accctgacctcaaatatgggcagcacccaccagacgcggtggatgagccacagatgctgacaaatgagaagctgtccatctttgatgccaacgagtctggctttgagagttatgaggcgc

SEQ ID NO: 288629 - DNA, 120 bp, Artificial Sequence
  ENSG00000130816_12 (sequence is synthesized)
ttccccagcacaaactgacctgcttcagtgtgtactgtaagcacggtcacctgtgtcccatcgacaccggcctcatcgagaagaatatcgaactcttcttttctggttcagcaaaaccaa

SEQ ID NO: 288630 - DNA, 120 bp, Artificial Sequence
  ENSG00000130816_13 (sequence is synthesized)
tctatgatgatgacccatctcttgaaggtggtgttaatggcaaaaatcttggccccataaatgaatggtggatcactggctttgatggaggtgaaaaggccctcatcggcttcagcacct

SEQ ID NO: 288631 - DNA, 120 bp, Artificial Sequence
  ENSG00000130816_14 (sequence is synthesized)
catttgccgaatacattctgatggatcccagtcccgagtatgcgcccatatttgggctgatgcaggagaagatctacatcagcaagattgtggtggagttcctgcagagcaattccgact

SEQ ID NO: 288632 - DNA, 120 bp, Artificial Sequence
  ENSG00000130816_15 (sequence is synthesized)
cgacctatgaggacctgatcaacaagatcgagaccacggttcctccttctggcctcaacttgaaccgcttcacagaggactccctcctgcgacacgcgcagtttgtggtggagcaggtgg

SEQ ID NO: 288633 - DNA, 120 bp, Artificial Sequence
  ENSG00000130816_16 (sequence is synthesized)
agagttatgacgaggccggggacagtgatgagcagcccatcttcctgacaccctgcatgcgggacctgatcaagctggctggggtcacgctgggacagaggcgagcccaggcgaggcggc

SEQ ID NO: 288634 - DNA, 120 bp, Artificial Sequence
  ENSG00000130816_17 (sequence is synthesized)
agaccatcaggcattctaccagggagaaggacaggggacccacgaaagccaccaccaccaagctggtctaccagatcttcgatactttcttcgcagagcaaattgaaaaggatgacagag

SEQ ID NO: 288635 - DNA, 120 bp, Artificial Sequence
  ENSG00000130816_18 (sequence is synthesized)
aagacaaggagaacgcctttaagcgccggcgatgtggcgtctgtgaggtgtgtcagcagcctgagtgtgggaaatgtaaagcctgcaaggacatggttaaatttggtggcagtggacgga

SEQ ID NO: 288636 - DNA, 120 bp, Artificial Sequence
  ENSG00000130816_19 (sequence is synthesized)
gcaagcaggcttgccaagagcggaggtgtcccaatatggccatgaaggaggcagatgacgatgaggaagtcgatgataacatcccagagatgccgtcacccaaaaaaatgcaccagggga

SEQ ID NO: 288637 - DNA, 120 bp, Artificial Sequence
  ENSG00000130816_20 (sequence is synthesized)
agaagaagaaacagaacaagaatcgcatctcttgggtcggagaagccgtcaagactgatgggaagaagagttactataagaaggtgtgcattgatgcggaaaccctggaagtgggggact

SEQ ID NO: 288638 - DNA, 120 bp, Artificial Sequence
  ENSG00000130816_21 (sequence is synthesized)
gtgtctctgttattccagatgattcctcaaaaccgctgtatctagcaagggtcacggcgctgtgggaggacagcagcaacgggcagatgtttcacgcccactggttctgcgctgggacag

SEQ ID NO: 288639 - DNA, 120 bp, Artificial Sequence
  ENSG00000130816_22 (sequence is synthesized)
ctcggggccacgtcggaccctctggagctgttcttggtggatgaatgtgaggacatgcagctttcatatatccacagcaaagtgaaagtcatctacaaagccccctccgaaaactgggcc

SEQ ID NO: 288640 - DNA, 120 bp, Artificial Sequence
  ENSG00000130816_23 (sequence is synthesized)
atggagggaggcatggatcccgagtccctgctggagggggacgacgggaagacctacttctaccagctgtggtatgatcaagactacgcgagattcgagtcccctccaaaaacccagcca

SEQ ID NO: 288641 - DNA, 120 bp, Artificial Sequence
  ENSG00000130816_24 (sequence is synthesized)
acagaggacaacaagttcaaattctgtgtgagctgtgcccgtctggctgagatgaggcaaaaagaaatccccagggtcctggagcagctcgaggacctggatagccgggtcctctactac

SEQ ID NO: 288642 - DNA, 120 bp, Artificial Sequence
  ENSG00000130816_25 (sequence is synthesized)
tcagccaccaagaacggcatcctgtaccgagttggtgatggtgtgtacctgccccctgaggccttcacgttcaacatcaagctgtccagtcccgtgaaacgcccacggaaggagcccgtg

SEQ ID NO: 288643 - DNA, 120 bp, Artificial Sequence
  ENSG00000130816_26 (sequence is synthesized)
gatgaggacctgtacccagagcactaccggaaatactccgactacatcaaaggcagcaacctggatgcccctgagccctaccgaattggccggatcaaagagatcttctgtcccaagaag

SEQ ID NO: 288644 - DNA, 120 bp, Artificial Sequence
  ENSG00000130816_27 (sequence is synthesized)
agcaacggcaggcccaatgagactgacatcaaaatccgggtcaacaagttctacaggcctgagaacacccacaagtccactccagcgagctaccacgcagacatcaacctgctctactgg

SEQ ID NO: 288645 - DNA, 120 bp, Artificial Sequence
  ENSG00000130816_28 (sequence is synthesized)
agcgacgaggaggccgtggtggacttcaaggctgtgcagggccgctgcaccgtggagtatggggaggacctgcccgagtgcgtccaggtgtactccatgggcggccccaaccgcttctac

SEQ ID NO: 288646 - DNA, 120 bp, Artificial Sequence
  ENSG00000130816_29 (sequence is synthesized)
ttcctcgaggcctataatgcaaagagcaaaagctttgaagatcctcccaaccatgcccgtagccctggaaacaaagggaagggcaagggaaaagggaagggcaagcccaagtcccaagcc

SEQ ID NO: 288647 - DNA, 120 bp, Artificial Sequence
  ENSG00000130816_30 (sequence is synthesized)
tgtgagccgagcgagccagagatagagatcaagctgcccaagctgcggaccctggatgtgttttctggctgcggggggttgtcggagggattccaccaagcaggcatctctgacacgctg

SEQ ID NO: 288648 - DNA, 120 bp, Artificial Sequence
  ENSG00000130816_31 (sequence is synthesized)
tgggccatcgagatgtgggaccctgcggcccaggcgttccggctgaacaaccccggctccacagtgttcacagaggactgcaacatcctgctgaagctggtcatggctggggagaccacc

SEQ ID NO: 288649 - DNA, 120 bp, Artificial Sequence
  ENSG00000130816_32 (sequence is synthesized)
aactcccgcggccagcggctgccccagaagggagacgtggagatgctgtgcggcgggccgccctgccagggcttcagcggcatgaaccgcttcaattcgcgcacctactccaagttcaaa

SEQ ID NO: 288650 - DNA, 120 bp, Artificial Sequence
  ENSG00000130816_33 (sequence is synthesized)
aactctctggtggtttccttcctcagctactgcgactactaccggccccggttcttcctcctggagaatgtcaggaactttgtctccttcaagcgctccatggtcctgaagctcaccctc

SEQ ID NO: 288651 - DNA, 120 bp, Artificial Sequence
  ENSG00000130816_34 (sequence is synthesized)
cgctgcctggtccgcatgggctatcagtgcaccttcggcgtgctgcaggccggtcagtacggcgtggcccagactaggaggcgggccatcatcctggccgcggcccctggagagaagctc

SEQ ID NO: 288652 - DNA, 120 bp, Artificial Sequence
  ENSG00000130816_35 (sequence is synthesized)
cctctgttcccggagccactgcacgtgtttgctccccgggcctgccagctgagcgtggtggtggatgacaagaagtttgtgagcaacataaccaggttgagctcgggtcctttccggacc

SEQ ID NO: 288653 - DNA, 120 bp, Artificial Sequence
  ENSG00000130816_36 (sequence is synthesized)
atcacggtgcgagacacgatgtccgacctgccggaggtgcggaatggagcctcggcactggagatctcctacaacggggagcctcagtcctggttccagaggcagctccggggcgcacag

SEQ ID NO: 288654 - DNA, 120 bp, Artificial Sequence
  ENSG00000130816_37 (sequence is synthesized)
taccagcccatcctcagggaccacatctgtaaggacatgagtgcattggtggctgcccgcatgcggcacatccccttggccccagggtcagactggcgcgatctgcccaacatcgaggtg

SEQ ID NO: 288655 - DNA, 120 bp, Artificial Sequence
  ENSG00000130816_38 (sequence is synthesized)
cggctctcagacggcaccatggccaggaagctgcggtatacccaccatgacaggaagaacggccgcagcagctctggggccctccgtggggtctgctcctgcgtggaagccggcaaagcc

SEQ ID NO: 288656 - DNA, 120 bp, Artificial Sequence
  ENSG00000130816_39 (sequence is synthesized)
tgcgaccccgcagccaggcagttcaacaccctcatcccctggtgcctgccccacaccgggaaccggcacaaccactgggctggcctctatggaaggctcgagtgggacggcttcttcagc

SEQ ID NO: 288657 - DNA, 120 bp, Artificial Sequence
  ENSG00000130816_40 (sequence is synthesized)
acaaccgtcaccaaccccgagcccatgggcaagcagggccgcgtgctccacccagagcagcaccgtgtggtgagcgtgcgggagtgtgcccgctcccagggcttccctgacacctaccgg

SEQ ID NO: 288658 - DNA, 120 bp, Artificial Sequence
  ENSG00000130816_41 (sequence is synthesized)
ctcttcggcaacatcctggacaagcaccggcaggtgggcaatgccgtgccaccgcccctggccaaagccattggcttggagatcaagctttgtatgttggccaaagcccgagagagtgcc

SEQ ID NO: 288659 - DNA, 120 bp, Artificial Sequence
  ENSG00000130816_42 (sequence is synthesized)
tcagctaaaataaaggaggaggaagctgctaaggactagttctgccctcccgtcacccctgtttctggcaccaggaatccccaacatgcactgatgttgtgtttttaacatgtcaatctg

SEQ ID NO: 288660 - DNA, 120 bp, Artificial Sequence
  ENSG00000130816_43 (sequence is synthesized)
tccgttcacatgtgtggtacatggtgtttgtggccttggctgacatgaagctgttgtgtgaggttcgcttatcaactaatgatttagtgatcaaattgtgcagtactttgtgcattctgg

SEQ ID NO: 288661 - DNA, 120 bp, Artificial Sequence
  ENSG00000130816_44 (sequence is synthesized)
attttaaaagttttttattatgcattatatcaaatctaccactgtatgagtggaaattaagactttatgtagtttttatatgttgtaatatttcttcaaataaatctctcctataaacca

SEQ ID NO: 288662 - DNA, 120 bp, Artificial Sequence
  ENSG00000130816_45 (sequence is synthesized)
caagctcatgacttgtaaattgttggggcttggcctttccgtgttgttaccttaaaacgatacatccacgttctcccaggcatggatgaggtagcccaattggacagcagattctgcata

SEQ ID NO: 288663 - DNA, 120 bp, Artificial Sequence
  ENSG00000130816_46 (sequence is synthesized)
gcactttttcctgttctagaaggtactctcaagtgcttgtaataggcatttcagtgtcagccagatcaaatgttagtattaataaaatggattgttttaagtttctattgtagcaaagtc

SEQ ID NO: 288664 - DNA, 120 bp, Artificial Sequence
  ENSG00000130816_47 (sequence is synthesized)
agatgcactgtggagaagggcctgcatgtgtgggacagcaccaggattccttcgttaggcattgtctcaggacctgtccctgttatgaagaaaacagccccggttggtcttacttagaaa

SEQ ID NO: 288665 - DNA, 120 bp, Artificial Sequence
  ENSG00000130816_48 (sequence is synthesized)
aaaatggaccgtggattcccccgtagctccctggtggctagaaactaggcggggtgggggttctcttttgatccccaaatacagcaagctttgggctcaaagatttggaaagagacagct

SEQ ID NO: 288666 - DNA, 120 bp, Artificial Sequence
  ENSG00000130816_49 (sequence is synthesized)
gttacaggcacgcagcaccgcggcactgcaccggctattgttcttttatttttttccctctttgtccctgaaagagtcaagctactaattgtcagtaatcaaatcagaccacgatttccc

SEQ ID NO: 288667 - DNA, 120 bp, Artificial Sequence
  ENSG00000130816_50 (sequence is synthesized)
aggcaaactcctggcagttctacatttaggaatgactagctagagacatcctgaagaatgagttattcggggaggcgccagccacctcctctaacttcacctctatctgccctctgtgct

SEQ ID NO: 288668 - DNA, 90 bp, Artificial Sequence
  ENSG00000130816_51 (sequence is synthesized)
gcagatgccaacagcccccccaaacccctttccaaacctcgcacgcccaggaggagcaagtccgatggagaggctaagcgttcaagagac

SEQ ID NO: 288669 - DNA, 120 bp, Artificial Sequence
  ENSG00000130816_52 (sequence is synthesized)
aaaccacggtagccgctgtctcgctcatacgaggtgcccatcacaggtcagcagaggactccacctgttgtgtcccttggatatctgggccgctggagtcagaagttgccagtgtttgag

SEQ ID NO: 288670 - DNA, 120 bp, Artificial Sequence
  ENSG00000130816_53 (sequence is synthesized)
cccaagggaaagcacacaggacattccccaggcagtgacatcctctttggtcacttctgcccacgtcacatgccaggaaacacaagatgccaagtagtcgggaggcaggagcctggggta

SEQ ID NO: 288671 - DNA, 120 bp, Artificial Sequence
  ENSG00000130816_54 (sequence is synthesized)
tttgagcagtgtcagccaccaccgtagccagtaatgcgcagagggtgaatgcgtgcttcaaactgtgagactaaatctgcagctaaatcttttttttttttttctgtgagatggagtctt

SEQ ID NO: 288672 - DNA, 61 bp, Artificial Sequence
  ENSG00000130816_55 (sequence is synthesized)
agagacagggttttaccgtgttggccagggtggtctcgaacttctgaccttgtggctaaat

SEQ ID NO: 288673 - DNA, 120 bp, Artificial Sequence
  ENSG00000130816_56 (sequence is synthesized)
tacaggcgtgagccacaatgcccagcctaaatcatttcttagggtacacacctaccttaattcatcaggtgcttgactttaaatggttattttcactggtcagtcatgcctgactgacca

SEQ ID NO: 288674 - DNA, 120 bp, Artificial Sequence
  ENSG00000130816_57 (sequence is synthesized)
ctgccccccggaagctcacagctcagctctcaccagggagagactttgataacattcgtgaggggcttccggcacagtgggtcgtttcttccctctgtctgtggaggtgactcctgcagt

SEQ ID NO: 288675 - DNA, 120 bp, Artificial Sequence
  ENSG00000130816_58 (sequence is synthesized)
cagggtttcagcttttgtaagaagtgggtggttggctgacgtgaagctgttctgcaggagctttacgggggtctgagcagggttctccagagcacaagttgtatgagattcaagtggtcc

SEQ ID NO: 288676 - DNA, 120 bp, Artificial Sequence
  ENSG00000130816_59 (sequence is synthesized)
cggagtttaacactcctggtttttaaaaagtacgtcattagagaacctaacgttttagtgtcttggtgcaactgaacgttgaggaccatgaggcagcttccaccagcctgactggtgtct

SEQ ID NO: 288677 - DNA, 120 bp, Artificial Sequence
  ENSG00000130816_60 (sequence is synthesized)
ctcttattggtggctaattggtcatggccccactgagggagaaattaagtgactatcaaattgccttcttactagtctgcgttagagaggggacagtgcgtttctctcccaaacgattgc

SEQ ID NO: 288678 - DNA, 120 bp, Artificial Sequence
  ENSG00000130816_61 (sequence is synthesized)
acattatcgaaagcagatggtaatgttaaaatgatggttctagaacaaaagggaaggggtttcagtaattgccagagcaaccttaggctcattttggatcgggttggtgaacataggacc

SEQ ID NO: 288679 - DNA, 120 bp, Artificial Sequence
  ENSG00000130816_62 (sequence is synthesized)
aaggtgcgtcaggcaggatgcccctgcggtgaagagccactgtgaccacgcgcctgggcctcactgccacagccggtgcctccctgtgccacaggcacctcaggcagaaacctcacaggg

SEQ ID NO: 288680 - DNA, 120 bp, Artificial Sequence
  ENSG00000130816_63 (sequence is synthesized)
tcagcctttgtgtgacccctggtctctcttgcatggtcatgggaagtgtcagagctcccgcagtcctggacttggtctggaatggtgtcaagccactgcccacccaccactgccttcccc

SEQ ID NO: 288681 - DNA, 120 bp, Artificial Sequence
  ENSG00000130816_64 (sequence is synthesized)
cttgctgcctctccccgcatgttttcccaggatgccaagaccagccctttcaccatcccctggcaccactccccttcccccaccctaaaggctcagcttagattcccacgctctcctaca

SEQ ID NO: 288682 - DNA, 120 bp, Artificial Sequence
  ENSG00000130816_65 (sequence is synthesized)
aggctccatctctgaatacctggtgagcccagaccgggcaggtgctacctgaaacgacttccaaccccggtcaccttcctgactcaagaatctccttccgaggccaggcacggtggcgca

SEQ ID NO: 288683 - DNA, 120 bp, Artificial Sequence
  ENSG00000130816_66 (sequence is synthesized)
tcgagaggctgctaccggcaggcggacacagcagggcagggccaggcgtgcagagcaagcagccaagctgacctaatggcctgagaacacccacaagtccactccagcgagctaccacgc

SEQ ID NO: 288684 - DNA, 120 bp, Artificial Sequence
  ENSG00000130816_67 (sequence is synthesized)
aaaaaaaaaaaaaaaaaaagcctgttctagaaacctgtggtgatgtagatgtgtggggaccctggggcctctgaaggcctcgtctcgggatgacaagctggcagtgtgcctatagagctc

SEQ ID NO: 288685 - DNA, 120 bp, Artificial Sequence
  ENSG00000130816_68 (sequence is synthesized)
ccatgggtatcttgctttcccatggggaggcattagtttgtcactttccgtgcgagttggcgatgtggttagtgtttctaagctgctacttgctgtgtatctgttcaccctgcagagctg

SEQ ID NO: 288686 - DNA, 120 bp, Artificial Sequence
  ENSG00000130816_69 (sequence is synthesized)
agtggggcggcgcccgctgggtctggacaggaaggaggcttctgtgcctgtcaccaggtggggctggggccagcgcagtcacttccgggaggacgcctgctggctgccgggtagccccat

SEQ ID NO: 288687 - DNA, 120 bp, Artificial Sequence
  ENSG00000130816_70 (sequence is synthesized)
cactctcagtgggaagacggcccacaggagggacagtgctgagacatccgagtcaggctgcgtccctatgctggttccttactgtttgtttttgaggcagagattgagccagaaggacag

SEQ ID NO: 288688 - DNA, 120 bp, Artificial Sequence
  ENSG00000130816_71 (sequence is synthesized)
tggtctccttgcgttgaagtccctgagtaggaggtctgttcatctgtcccctcttcttatttcctcccctggctctaagtccagcttccttcaagtgctatccctttggtctcccatggc

SEQ ID NO: 288689 - DNA, 120 bp, Artificial Sequence
  ENSG00000130816_72 (sequence is synthesized)
ctggacaactggccatccctggggccactgttttgccctcaggttctggatgaaagacagctggattcatggtccgtactgctgagtgagtctatgatcttgggctcaaagatttggaaa

SEQ ID NO: 288690 - DNA, 81 bp, Artificial Sequence
  ENSG00000130816_73 (sequence is synthesized)
cccagccccagccgcggccgccctggggacgcagacgccaaggcccctccggccagggccgggagccgggccggcctagcc

SEQ ID NO: 288691 - DNA, 120 bp, Artificial Sequence
  ENSG00000130816_74 (sequence is synthesized)
cctgggctcaagccatcctcccacctcaatctcccaagtaggtggaactacaggctcaaagatttggaaagagacagcttaacagaaaaggaatgtgtgaaggagaaattgaatctcttg

SEQ ID NO: 288692 - DNA, 120 bp, Artificial Sequence
  ENSG00000130818_0 (sequence is synthesized)
ccttttgtgacgccggctgtgagcgcctgagagtctttttgcctttcagagttaaggcctcactggcctgggaaaataattgctgccttttgcatccgcgttggctccgtccccaggatc

SEQ ID NO: 288693 - DNA, 120 bp, Artificial Sequence
  ENSG00000130818_1 (sequence is synthesized)
ttcccggttcagggacctggcgatttctgagtgttccggaatcccaataaccctgtttaaagaggaatggagattgccactgtccatttagattaatgaggtgtcctgaagtgatggtga

SEQ ID NO: 288694 - DNA, 120 bp, Artificial Sequence
  ENSG00000130818_2 (sequence is synthesized)
catcaatgaaaggagggttctgacacgttctcacctcgcgggatggcagctgctgatttgtcccatggacattatctttctggggacccagtttgccttcatgaagaaaagacaccagca

SEQ ID NO: 288695 - DNA, 120 bp, Artificial Sequence
  ENSG00000130818_3 (sequence is synthesized)
ggaagaatagtggctgactgcctaacagattgttatcaggattcagtgacctttgacgatgtggctgtggacttcacccaggaggagtggactttactggactcaactcagagaagcctc

SEQ ID NO: 288696 - DNA, 120 bp, Artificial Sequence
  ENSG00000130818_4 (sequence is synthesized)
tacagtgacgtgatgctggagaactacaagaacctggccacagtaggaggtcagatcatcaaacccagtctaatctcttggttggaacaagaagagtcaaggacagttcagggaggagtt

SEQ ID NO: 288697 - DNA, 120 bp, Artificial Sequence
  ENSG00000130818_5 (sequence is synthesized)
ctccaaggatgggaaatgcgacttgaaacccagtggtctatacttcagcaggactttttgaggggtcagacatccattgggatacaattggaaggaaaacacaatggaagggaactctgt

SEQ ID NO: 288698 - DNA, 120 bp, Artificial Sequence
  ENSG00000130818_6 (sequence is synthesized)
gactgtgagcaatgtggagaagtcttcagtgaacactcatgccttaagacgcacgtgagaactcaaagtacagggaacactcatgactgtaatcagtatggaaaagatttccttaccctg

SEQ ID NO: 288699 - DNA, 120 bp, Artificial Sequence
  ENSG00000130818_7 (sequence is synthesized)
tgtgagaaaacctctactggtgagaaactttctgagtttaatcagagtgaaaaaatcttcagcctgacaccaaatattgtataccagagaactagcacacaagaaaagtcatttgaatgt

SEQ ID NO: 288700 - DNA, 120 bp, Artificial Sequence
  ENSG00000130818_8 (sequence is synthesized)
agtcactgtggaaaatccttcattaatgagtcataccttcaggcacatatgagaactcacaatggagaaaaactctacgaatggaggaattatgggccaggttttattgactctacaagc

SEQ ID NO: 288701 - DNA, 120 bp, Artificial Sequence
  ENSG00000130818_9 (sequence is synthesized)
ctttctgtgcttatagaaaccctcaatgcaaaaaagccctacaaatgtaaggaatgtggaaaaggctatagatacccagcctacctcagtattcacatgcgaacccacactggggagaaa

SEQ ID NO: 288702 - DNA, 120 bp, Artificial Sequence
  ENSG00000130818_10 (sequence is synthesized)
ccatatgaatgtaaggaatgtgggaaagccttcaattattccaactcatttcagatacatggaagaactcacactggagagaaaccctatgtatgtaaggaatgtgggaaagccttcact

SEQ ID NO: 288703 - DNA, 120 bp, Artificial Sequence
  ENSG00000130818_11 (sequence is synthesized)
cagtactcgggccttagtatgcatgtacgatctcacagtggagacaagccctatgaatgtaaggaatgtgggaaatccttccttacatcctcacgccttattcaacatataagaactcac

SEQ ID NO: 288704 - DNA, 120 bp, Artificial Sequence
  ENSG00000130818_12 (sequence is synthesized)
actggagagaagccttttgtatgtgttgaatgtgggaaagcctttgcagtttcctcaaatcttagtggacatttgagaactcacactgaagagaaggcctgtgagtgtaagatatgtggg

SEQ ID NO: 288705 - DNA, 120 bp, Artificial Sequence
  ENSG00000130818_13 (sequence is synthesized)
aaagtatttgggtatccctcatgtcttaataatcacatgcgaacgcacagtgcccagaaaccatacacctgtaaggaatgtgggaaggcttttaactattccacccaccttaaaattcac

SEQ ID NO: 288706 - DNA, 120 bp, Artificial Sequence
  ENSG00000130818_14 (sequence is synthesized)
cttaaaattcacatgcgaatccacactggagaaaaaccctatgagtgtaaacaatgtggaaaggccttcagtcattccagttcatttcaaatacatgaaaggactcacactggagagaaa

SEQ ID NO: 288707 - DNA, 120 bp, Artificial Sequence
  ENSG00000130818_15 (sequence is synthesized)
aaggagtgtgggaaagccttcacgtgttccagttcctttagaattcatgaaaaaactcacacagaagagaaaccctataaatgtcagcaatgcgggaaagcttacagtcatccccgttca

SEQ ID NO: 288708 - DNA, 120 bp, Artificial Sequence
  ENSG00000130818_16 (sequence is synthesized)
cttcgaagacatgaacaaattcactagtgagaaactgtccatgtaataaatgtgggaaagctctcatttgttccagttcactttaaagacatgaatgaactcactctggagagaagaagc

SEQ ID NO: 288709 - DNA, 60 bp, Artificial Sequence
  ENSG00000130818_17 (sequence is synthesized)
ctttaaagacatgaatgaactcactctggagagaagaagctgcatgaaaattacttaatt

SEQ ID NO: 288710 - DNA, 120 bp, Artificial Sequence
  ENSG00000130818_18 (sequence is synthesized)
tctcaaaaaaaaaaaaaaaagaaaattatttgattaaattgagtctgttagagtacatccctaatccaatatgattggtgtccctataagaagagaaagacacaactgagacaacaaata

SEQ ID NO: 288711 - DNA, 120 bp, Artificial Sequence
  ENSG00000130818_19 (sequence is synthesized)
tataagaagagaaagacacaactgagacaacaaatagaagatgatgtgaagtcatcagatgatggccatctgcaagccaaagacagagcactgggacagatccttctatcaaagccacca

SEQ ID NO: 288712 - DNA, 120 bp, Artificial Sequence
  ENSG00000130818_20 (sequence is synthesized)
accctgctggcaccttcatcttgggcttccagaactttgaacaaataaaattctcttgtttgagccacccagtctgtggtattttgttgtggtggctctagcaagtgaatacagtaagca

SEQ ID NO: 288713 - DNA, 120 bp, Artificial Sequence
  ENSG00000130818_21 (sequence is synthesized)
ataagcaaaaacgtttatagattgtccaaaagccttaatattcacatgcaaagccacactggagagaaactatatgaatgtaagacgtgggagagccttcattgagtcttcagtcctttc

SEQ ID NO: 288714 - DNA, 120 bp, Artificial Sequence
  ENSG00000130818_22 (sequence is synthesized)
tacatacaggagaaatcacataggagagaaattgtatgaatgtaaggagcatgaaaaagcctgtgaatgttcactatattttaatattcacatgcaagttgtctggtcgtagaccatgtg

SEQ ID NO: 288715 - DNA, 120 bp, Artificial Sequence
  ENSG00000130818_23 (sequence is synthesized)
aaaatagaggagaaaaaaggaaagaaagtttcttttactgtgaacgcaaggaatgtgaccccatacaccatactggaacttggagtggactgaaatcccattaggattgtggaaaagctt

SEQ ID NO: 288716 - DNA, 120 bp, Artificial Sequence
  ENSG00000130818_24 (sequence is synthesized)
acattaatgttttctaccttctagaaggtgtaagaagtcgaactggagagaagccttttacctgtaatgcatgtaggaagccttacattaattccacagaattttttttacacatgtaaa

SEQ ID NO: 288717 - DNA, 120 bp, Artificial Sequence
  ENSG00000130818_25 (sequence is synthesized)
attacctcagaaccctgggaaggtaaggaatatggtataacctttaaatatttcacatgccataataagtacatgaattctgataatactgtaccgtttcttgagtagtgttagtacctt

SEQ ID NO: 288718 - DNA, 120 bp, Artificial Sequence
  ENSG00000130818_26 (sequence is synthesized)
atactatcaaaataatcctaaatcctccctctcagaccttccatcattactatatttcacttttatgcctataaacacacacaaattagcatatgtaatctaatacattgtagctatttt

SEQ ID NO: 288719 - DNA, 120 bp, Artificial Sequence
  ENSG00000130818_27 (sequence is synthesized)
tcagaagttatcagatcaattaagtattagaaaaataaacatttttattttaccttcacttcttccttctatgctcaaagttggatgtaattcttatacttgatcctcaatacttaaagc

SEQ ID NO: 288720 - DNA, 120 bp, Artificial Sequence
  ENSG00000130818_28 (sequence is synthesized)
aaaattttttgttatctttgatattctgttatttttaaatgatatgcctaggtataggtttttggtgctcgtccttcttggtgtttgcttagcctcctggatttgcgttttggtgtctga

SEQ ID NO: 288721 - DNA, 120 bp, Artificial Sequence
  ENSG00000130818_29 (sequence is synthesized)
gttaattttgagaaattctgtcattgtttccctttttttttctttccatctggtatttcctttatatgtaggatacatcttttgtagttatcccacagttcttatatcttgtttttttat

SEQ ID NO: 288722 - DNA, 120 bp, Artificial Sequence
  ENSG00000130818_30 (sequence is synthesized)
tcttctctttgcttttcaggtgtggatgtttctgctgatatattctcaagctctttagttggctgtttcttggccaataataagcctaccaaagacattcttcatttctgttacactgtc

SEQ ID NO: 288723 - DNA, 120 bp, Artificial Sequence
  ENSG00000130818_31 (sequence is synthesized)
ttcaatttctagcatttctttgtggttcttagaatttccatctctgtgtttacactgcctgtctgttcttggatgctgtctgctttatccagtagaacccatggcatatcaatcataatt

SEQ ID NO: 288724 - DNA, 120 bp, Artificial Sequence
  ENSG00000130818_32 (sequence is synthesized)
gttttaaattcccagtctgataatttcagcaatcctgctatatctggttctggttcttactctttctctttaaactaacttttgccttttagtatgcttgtaatttttccttagctggac

SEQ ID NO: 288725 - DNA, 120 bp, Artificial Sequence
  ENSG00000130818_33 (sequence is synthesized)
atggcatactggataagaggaaatgctgtaagcaggcctctagtaatcatgataagctgtggggagaggggcagcattctattgtccagggattagatgtcagtcttgcagtgagtctgt

SEQ ID NO: 288726 - DNA, 120 bp, Artificial Sequence
  ENSG00000130818_34 (sequence is synthesized)
gcttctgcactgtgaacttcagtttttcccaccctttagttgggtcaggatgtatagagttggctggagttggatatttcccttcctccaggtcactgaagctctgactaaaactccagg

SEQ ID NO: 288727 - DNA, 86 bp, Artificial Sequence
  ENSG00000130818_35 (sequence is synthesized)
tgaccagcctgaattgcttgaatccaggaggtggaggtcacagtgagccgagattgtgatactgcactccagcctgggaaacagtg

SEQ ID NO: 288728 - DNA, 90 bp, Artificial Sequence
  ENSG00000130818_36 (sequence is synthesized)
gcctgaattgcttgaatccaggaggtggaggtcacagtgagccgagattgtgatactgcactccagcctgggaaacagtgagacaaggct

SEQ ID NO: 288729 - DNA, 120 bp, Artificial Sequence
  ENSG00000130818_37 (sequence is synthesized)
acaacaacaacaacaacaacaaaaacccatcatcaatgctcagcctttcttaaacatgaactcatggtggacagagccctatgaatgtaaggaatatagagaagccatcactagttactc

SEQ ID NO: 288730 - DNA, 120 bp, Artificial Sequence
  ENSG00000130818_38 (sequence is synthesized)
agttactcaaaccttattgaatgtgtgaaaatttactctggagagatgccctttcagcataagaaatgttgaaaaggatttatataatccttcctttttatttttatttttatttttatt

SEQ ID NO: 288731 - DNA, 120 bp, Artificial Sequence
  ENSG00000130818_39 (sequence is synthesized)
ggcgtgagccaccgcgcccagccaatccttcctttttaatatccacatacaaactcactgaagaaaaaccctgaaaatgtaaagcaatgttgaaaaacctagttatttaaattcatttca

SEQ ID NO: 288732 - DNA, 120 bp, Artificial Sequence
  ENSG00000130818_40 (sequence is synthesized)
aaagcaatgttgaaaaacctagttatttaaattcatttcaagtatatgaactcacatggtaaagaaaccctgtgaatataagtagtatgataaattcttgaatttttttttttttttttt

SEQ ID NO: 288733 - DNA, 65 bp, Artificial Sequence
  ENSG00000130818_41 (sequence is synthesized)
tgcccagctaattttgtatttttagtgaaggcaggggtttgacctcccaaagtgctgagattaca

SEQ ID NO: 288734 - DNA, 120 bp, Artificial Sequence
  ENSG00000130818_42 (sequence is synthesized)
aagtgctgagattacaggcatgagccatcacgcccagccagttcttcaattcttacagtccctttccatgtcattaaagaactcacactggagagaaatcttatcaatgttagaattgtg

SEQ ID NO: 288735 - DNA, 120 bp, Artificial Sequence
  ENSG00000130818_43 (sequence is synthesized)
tgtggtaaagctctctgttgttcccatttacatgaaagatgtgaacagtcacattgtagaaaaatgctgtgagagttgggaatctggaaccacttctttattatctcaggtcataatgaa

SEQ ID NO: 288736 - DNA, 120 bp, Artificial Sequence
  ENSG00000130818_44 (sequence is synthesized)
cttgtaagaattcacagtggcaggaaaccctatgtaaatggaaaatatgggaaaggcttcatttaatccataggactgataccacaaaactcccactaggagaaaacctatgtttatacg

SEQ ID NO: 288737 - DNA, 120 bp, Artificial Sequence
  ENSG00000130818_45 (sequence is synthesized)
gaatgtgggaaaatcttcacttatttctcaagccttaaagtgtatgtcaggattcccagtggagagaagccatattgatgtaaggaatgtgggaaagcccttgcctgccacttagtcctt

SEQ ID NO: 288738 - DNA, 120 bp, Artificial Sequence
  ENSG00000130818_46 (sequence is synthesized)
gataaacattttagaacacaaactggagagaaactatgaattcaaggattgtgggaaaacccttttatgttccacaagctttaatattcatatgcaatgtatgctggagaataacttgat

SEQ ID NO: 288739 - DNA, 120 bp, Artificial Sequence
  ENSG00000130818_47 (sequence is synthesized)
gactataataagtggaatggcctaggtcagggatccccaaacccctgggccatggactggtactggtctgtggcctgctaggatccagggtgcacagcaggaggtgaatgtaggatgagc

SEQ ID NO: 288740 - DNA, 75 bp, Artificial Sequence
  ENSG00000130818_48 (sequence is synthesized)
ggatccagggtgcacagcaggaggtgaatgtaggatgagcaaacattactgcctgagctcaactttttattgtga

SEQ ID NO: 288741 - DNA, 85 bp, Artificial Sequence
  ENSG00000130818_49 (sequence is synthesized)
atgagaatctaatgcctgatgatctgaactggaacagtttaatccccaactccagtccgtgggaaaaattaggggaccactgatt

SEQ ID NO: 288742 - DNA, 120 bp, Artificial Sequence
  ENSG00000130818_50 (sequence is synthesized)
ttatgtcacatgtcccatccactcattaacattaaggctttcatccctgggacctcaagataatggtggtatttagagatgtggttttttaaagaggtgattttaaaatgaggcagttag

SEQ ID NO: 288743 - DNA, 120 bp, Artificial Sequence
  ENSG00000130818_51 (sequence is synthesized)
aatggggccctcattcaatatgactggtttccttataagaagtgaaagagataccagggtagcaggcacagaattttatgtgaagtgaccggaaatggttaccttcaaggcaaagagaga

SEQ ID NO: 288744 - DNA, 120 bp, Artificial Sequence
  ENSG00000130818_52 (sequence is synthesized)
ttcctggaggagatccttcttttaaggctcattatagaggaaatcatccttatctacactttgatcctggacttccagcctcaaaaattatgagcaaataaatttctgttgtttaagcca

SEQ ID NO: 288745 - DNA, 71 bp, Artificial Sequence
  ENSG00000130818_53 (sequence is synthesized)
ttgtttacttatttttatttttgtttaggctgaagcagtcctcccaccctggcctcccaaaatgctgggat

SEQ ID NO: 288746 - DNA, 120 bp, Artificial Sequence
  ENSG00000130818_54 (sequence is synthesized)
ggattacaggcatgagctactgccccagccggtgtatatgtttgatggctgatgattaagtactgcttgttgattattgattaataccaacaggaatcccaataaccctgtttaaagagg

SEQ ID NO: 288747 - DNA, 120 bp, Artificial Sequence
  ENSG00000130818_55 (sequence is synthesized)
ggcctcactggcctgggtgagttccgaggagatgaactggttttggggtgaaggacgggtttggcccggacgttagagaggcctggcccgctctgctcgtgtctgctgggcccgctagcg

SEQ ID NO: 288748 - DNA, 120 bp, Artificial Sequence
  ENSG00000130818_56 (sequence is synthesized)
tccgctcggaccgtcgctcctcgggaggagtcgggtttatagttacggtgtccgcagggtgttttcatctgtgcgcccctctccaaaggcctccaaagcagcgtttgtgaatttttttcc

SEQ ID NO: 288749 - DNA, 120 bp, Artificial Sequence
  ENSG00000130821_0 (sequence is synthesized)
gaagagagggatagtcggagcgaggtggcgagtcgctgagcccgccgcggccccgagagcggctgcagccgccgccgccgggaaggagagggcgaggcgcgcccgagccgccgccgccgc

SEQ ID NO: 288750 - DNA, 80 bp, Artificial Sequence
  ENSG00000130821_1 (sequence is synthesized)
tgcagaccgcgggcgccgatgtcgcccgcgccccgctaggctgagcctcgggtcgggcgaggagccgccgcagccgccgc

SEQ ID NO: 288751 - DNA, 120 bp, Artificial Sequence
  ENSG00000130821_2 (sequence is synthesized)
gccgccgcccggccgggccccgccgccgcccgcgcgcccccgggcccccgacacacatgagattcttcaggctcactttcaagtgcttcgtggactgcttctgactgcgccgcccgcgcc

SEQ ID NO: 288752 - DNA, 120 bp, Artificial Sequence
  ENSG00000130821_3 (sequence is synthesized)
ccccgtgaggcgccgcgaccccggcccggccgtgcggcccgccgaggccatggcgaagaagagcgccgagaacggcatctatagcgtgtccggcgacgagaagaagggccccctcatcgc

SEQ ID NO: 288753 - DNA, 120 bp, Artificial Sequence
  ENSG00000130821_4 (sequence is synthesized)
ccgacggggccccggccaagggcgacggccccgtgggcctggggacacccggcggccgcctggccgtgccgccgcgcgagacctggacgcgccagatggacttcatcatgtcgtgcgtgg

SEQ ID NO: 288754 - DNA, 120 bp, Artificial Sequence
  ENSG00000130821_5 (sequence is synthesized)
gtgcgtgggcttcgccgtgggcttgggcaacgtgtggcgcttcccctacctgtgctacaagaacggcggaggtgtgttccttattccctacgtcctgatcgccctggttggaggaatccc

SEQ ID NO: 288755 - DNA, 120 bp, Artificial Sequence
  ENSG00000130821_6 (sequence is synthesized)
cattttcttcttagagatctcgctgggccagttcatgaaggccggcagcatcaatgtctggaacatctgtcccctgttcaaaggcctgggctacgcctccatggtgatcgtcttctactg

SEQ ID NO: 288756 - DNA, 120 bp, Artificial Sequence
  ENSG00000130821_7 (sequence is synthesized)
caacacctactacatcatggtgctggcctggggcttctattacctggtcaagtcctttaccaccacgctgccctgggccacatgtggccacacctggaacactcccgactgcgtggagat

SEQ ID NO: 288757 - DNA, 120 bp, Artificial Sequence
  ENSG00000130821_8 (sequence is synthesized)
cttccgccatgaagactgtgccaatgccagcctggccaacctcacctgtgaccagcttgctgaccgccggtcccctgtcatcgagttctgggagaacaaagtcttgaggctgtctggggg

SEQ ID NO: 288758 - DNA, 120 bp, Artificial Sequence
  ENSG00000130821_9 (sequence is synthesized)
actggaggtgccaggggccctcaactgggaggtgaccctttgtctgctggcctgctgggtgctggtctacttctgtgtctggaagggggtcaaatccacgggaaagatcgtgtacttcac

SEQ ID NO: 288759 - DNA, 120 bp, Artificial Sequence
  ENSG00000130821_10 (sequence is synthesized)
tgctacattcccctacgtggtcctggtcgtgctgctggtgcgtggagtgctgctgcctggcgccctggatggcatcatttactatctcaagcctgactggtcaaagctggggtcccctca

SEQ ID NO: 288760 - DNA, 120 bp, Artificial Sequence
  ENSG00000130821_11 (sequence is synthesized)
ggtgtggatagatgcggggacccagattttcttttcttacgccattggcctgggggccctcacagccctgggcagctacaaccgcttcaacaacaactgctacaaggacgccatcatcct

SEQ ID NO: 288761 - DNA, 120 bp, Artificial Sequence
  ENSG00000130821_12 (sequence is synthesized)
ggctctcatcaacagtgggaccagcttctttgctggcttcgtggtcttctccatcctgggcttcatggctgcagagcagggcgtgcacatctccaaggtggcagagtcagggccgggcct

SEQ ID NO: 288762 - DNA, 120 bp, Artificial Sequence
  ENSG00000130821_13 (sequence is synthesized)
ggccttcatcgcctacccgcgggctgtcacgctgatgccagtggccccactctgggctgccctgttcttcttcatgctgttgctgcttggtctcgacagccagtttgtaggtgtggaggg

SEQ ID NO: 288763 - DNA, 120 bp, Artificial Sequence
  ENSG00000130821_14 (sequence is synthesized)
tttgtcatcgatctctccatggtgactgatggcgggatgtacgtcttccagctgtttgactactactcggccagcggcaccaccctgctctggcaggccttttgggagtgcgtggtggtg

SEQ ID NO: 288764 - DNA, 120 bp, Artificial Sequence
  ENSG00000130821_15 (sequence is synthesized)
gcctgggtgtacggagctgaccgcttcatggacgacattgcctgtatgatcgggtaccgaccttgcccctggatgaaatggtgctggtccttcttcaccccgctggtctgcatgggcatc

SEQ ID NO: 288765 - DNA, 120 bp, Artificial Sequence
  ENSG00000130821_16 (sequence is synthesized)
ttcatcttcaacgttgtgtactacgagccgctggtctacaacaacacctacgtgtacccgtggtggggtgaggccatgggctgggccttcgccctgtcctccatgctgtgcgtgccgctg

SEQ ID NO: 288766 - DNA, 120 bp, Artificial Sequence
  ENSG00000130821_17 (sequence is synthesized)
cacctcctgggctgcctcctcagggccaagggcaccatggctgagcgctggcagcacctgacccagcccatctggggcctccaccacttggagtaccgagctcaggacgcagatgtcagg

SEQ ID NO: 288767 - DNA, 120 bp, Artificial Sequence
  ENSG00000130821_18 (sequence is synthesized)
ggcctgaccaccctgaccccagtgtccgagagcagcaaggtcgtcgtggtggagagtgtcatgtgacaactcagctcacatcaccagctcacctctggtagccatagcagcccctgcttc

SEQ ID NO: 288768 - DNA, 120 bp, Artificial Sequence
  ENSG00000130821_19 (sequence is synthesized)
agccccaccgcacccctccagggggcctgcctttccctgacacttttggggtctgcctgggggaggaggggagaaagcaccatgagtgctcactaaaacaactttttccatttttaataa

SEQ ID NO: 288769 - DNA, 120 bp, Artificial Sequence
  ENSG00000130821_20 (sequence is synthesized)
aacgccaaaaatatcacaacccaccaaaaatagatgcctctccccctccagccctagccgagctggtcctaggccccgcctagtgccccacccccacccacagtgctgcactcctcctgc

SEQ ID NO: 288770 - DNA, 120 bp, Artificial Sequence
  ENSG00000130821_21 (sequence is synthesized)
ccctgccacgcccaccccctgcccacctctccaggctctgctctgcagcacacccgtgggtgacccctcaccccagaagcagcagtggcagcttgggaaatgtgaggaagggaaggaggg

SEQ ID NO: 288771 - DNA, 120 bp, Artificial Sequence
  ENSG00000130821_22 (sequence is synthesized)
agagacgggagggaggagagagaggagaagggaggcaggggaggggcagcagaaccaaggcaaatatttcagctgggctatacccctctccccatccctgttatagaagcttagagagcc

SEQ ID NO: 288772 - DNA, 120 bp, Artificial Sequence
  ENSG00000130821_23 (sequence is synthesized)
agccagcaatggaaccttctggttcctgcgccaatcgccaccagtatcaattgtgtgagcttgggtgcgagtgcacgcgtgcgtgagtacggagagtatatatagatctctatctcttag

SEQ ID NO: 288773 - DNA, 120 bp, Artificial Sequence
  ENSG00000130821_24 (sequence is synthesized)
caaaggtgaatgccagatgtaaatggcgcctctgggcaaaggaggcttgtattttgcacattttataaaaacttgagagaatgagatttctgcttgtatatttctaaaaagaggaaggag

SEQ ID NO: 288774 - DNA, 120 bp, Artificial Sequence
  ENSG00000130821_25 (sequence is synthesized)
cccaaaccatcctctccttaccactcccatccctgtgagccctaccttacccctctgcccctagccaaggagtgtgaatttatagatctaactttcataggcaaaacaaaagcttcgagc

SEQ ID NO: 288775 - DNA, 120 bp, Artificial Sequence
  ENSG00000130821_26 (sequence is synthesized)
tgttgcgtgtgtgagtctgttgtgtggatgtgcgtgtgtggtccccagccccagactggattggaaaagtgcatggtgggggcctcggggctgtccccacgctgtccctttgccacaagt

SEQ ID NO: 288776 - DNA, 120 bp, Artificial Sequence
  ENSG00000130821_27 (sequence is synthesized)
ctgtggggcaagaggctgcaatattccgtcctgggtgtctgggctgctaacctggcctgctcaggcttcccaccctgtgcggggcacacccccaggaagggaccctggacacggctccca

SEQ ID NO: 288777 - DNA, 120 bp, Artificial Sequence
  ENSG00000130821_28 (sequence is synthesized)
cgtccaggcttaaggtggatgcacttcccgcacctccagtcttctgtgtagcagctttaacccacgtttgtctgtcacgtccagtcccgagacggctgagtgaccccaagaaaggcttcc

SEQ ID NO: 288778 - DNA, 120 bp, Artificial Sequence
  ENSG00000130821_29 (sequence is synthesized)
ccgacacccagacagaggctgcagggctggggctgggtgagggtggcgggcctgcggggacattctactgtgctaaaaagccactgcagacatagcaataaaaacatgtcattttccaaa

SEQ ID NO: 288779 - DNA, 120 bp, Artificial Sequence
  ENSG00000130821_30 (sequence is synthesized)
ctgaaagccaagcaatgctccccaccctgcaaatccagggcccagcagcctttgctcctggggatagaggccctggcaggcactgtcccttccctgtgcccatcacccccactggtgccc

SEQ ID NO: 288780 - DNA, 120 bp, Artificial Sequence
  ENSG00000130821_31 (sequence is synthesized)
tcctgccagtctctgactcttgtgacagtctggtggacctggtctggccatctgttacctatcttgccttggggacccagagcagagtctggccacatcccttgggggctcctggtcagg

SEQ ID NO: 288781 - DNA, 120 bp, Artificial Sequence
  ENSG00000130821_32 (sequence is synthesized)
ctggggagtcacctgaacaaagaagacagtgtctagagctgtgggacatggccagctccctgggggacaaggtccccagagcagcatgtgggaagagggggcagacagtgtggcagctgc

SEQ ID NO: 288782 - DNA, 120 bp, Artificial Sequence
  ENSG00000130821_33 (sequence is synthesized)
atctcgcctgcctctgcctggcccagttccactctccacctgctcaacccccacctctctccagaagaggagggggacccgacccggatccaatatcccgctccctgcctgggcctccca

SEQ ID NO: 288783 - DNA, 120 bp, Artificial Sequence
  ENSG00000130821_34 (sequence is synthesized)
cacctgcactgcccacacactcatacagctctcactccccacgtgctccacgcctcctgtccccactgaggagagctcccagaggctcgcctgctccccaccgacacgcgtccctgcaga

SEQ ID NO: 288784 - DNA, 120 bp, Artificial Sequence
  ENSG00000130821_35 (sequence is synthesized)
caaacgaggcgcccagggagcttccccactgcacttggccagggctgccggggcgcagccttgcccctagcttcctctggcgggagccatggctcggaggacaatggggacctctgaaca

SEQ ID NO: 288785 - DNA, 120 bp, Artificial Sequence
  ENSG00000130821_36 (sequence is synthesized)
gggggcggagggagggctgcaggcaaggaaaggggtggagggcggtgcggggctcggcctgagctgccctggccacagtttgtaggtgtggagggcttcatcaccggcctcctcgacctc

SEQ ID NO: 288786 - DNA, 120 bp, Artificial Sequence
  ENSG00000130821_37 (sequence is synthesized)
gtgacctctggtggccgtctgccatcctccctgactgggctctgtcccccagggcgggatgtacgtcttccagctgtttgactactactcggccagcggcaccaccctgctctggcaggc

SEQ ID NO: 288787 - DNA, 120 bp, Artificial Sequence
  ENSG00000130821_38 (sequence is synthesized)
cttttgggagtgcgtggtggtggcctgggtgtacggtaggtcatggctgagggctgggctgggggatggtggcggggaaggcaggtctccagcttggccctcccgcctcacctcgccgca

SEQ ID NO: 288788 - DNA, 120 bp, Artificial Sequence
  ENSG00000130821_39 (sequence is synthesized)
aggctggggagtcagcgcagtgttggggctcacacaagggggagcccaggggagtcaggagcaccacaaacaaggctccaggaggacagatggtgggagcacggccagcctgggtgggga

SEQ ID NO: 288789 - DNA, 120 bp, Artificial Sequence
  ENSG00000130821_40 (sequence is synthesized)
tgtcccctgttcaaaggtgagcagcccttggccagcctcagggactgcccccttctcccagctggctcccacttgagaaatcttttcctgtcgtgagcaccaggcctggggccacgtgat

SEQ ID NO: 288790 - DNA, 120 bp, Artificial Sequence
  ENSG00000130821_41 (sequence is synthesized)
ggcgtcccagtctcgaggggggagcctggaggagatgttcaggacgctggggcacagacaggtggagcgacgtactgaggttgcccactgcaggggcgactgtctccaacactacctcag

SEQ ID NO: 288791 - DNA, 120 bp, Artificial Sequence
  ENSG00000130821_42 (sequence is synthesized)
tccacgggaaaggtaccactagaggcatgcagcggggagggtggctcagccctgggagccggatgtctgtgccaggcacacctgtggcaacgggaggtgaccagacagagtctagcccta

SEQ ID NO: 288792 - DNA, 120 bp, Artificial Sequence
  ENSG00000130821_43 (sequence is synthesized)
gtgtgtcctgtgactacaaaacagcactggggttgctggaagccgaagtgacccggtgatgggtgggaaacagaggtccagagcaaaggcctttgcccaaggtcaggagaaggatgctgg

SEQ ID NO: 288793 - DNA, 120 bp, Artificial Sequence
  ENSG00000130822_0 (sequence is synthesized)
ggggcgcgggcggggggcttggcgctgcggccactgcgcggcacgacgctgcggcacccgctccagacatgctgctgctgaagaaacacacggaggacatcagcagcgtctacgagatcc

SEQ ID NO: 288794 - DNA, 120 bp, Artificial Sequence
  ENSG00000130822_1 (sequence is synthesized)
gcgagaggctcggctcgggtgccttctccgaggtggtgctggcccaggagcggggctccgcacacctcgtggccctcaagtgcatccccaagaaggccctccggggcaaggaggccctgg

SEQ ID NO: 288795 - DNA, 120 bp, Artificial Sequence
  ENSG00000130822_2 (sequence is synthesized)
tggagaacgagatcgcagtgctccgtaggatcagtcaccccaacatcgtcgctctggaggatgtccacgagagcccttcccacctctacctggccatggaactggtgacgggtggcgagc

SEQ ID NO: 288796 - DNA, 120 bp, Artificial Sequence
  ENSG00000130822_3 (sequence is synthesized)
tgtttgaccgcatcatggagcgcggctcctacacagagaaggatgccagccatctggtgggtcaggtccttggcgccgtctcctacctgcacagcctggggatcgtgcaccgggacctca

SEQ ID NO: 288797 - DNA, 120 bp, Artificial Sequence
  ENSG00000130822_4 (sequence is synthesized)
agcccgaaaacctcctgtatgccacgccctttgaggactcgaagatcatggtctctgactttggactctccaaaatccaggctgggaacatgctaggcaccgcctgtgggacccctggat

SEQ ID NO: 288798 - DNA, 120 bp, Artificial Sequence
  ENSG00000130822_5 (sequence is synthesized)
atgtggccccagagctcttggagcagaaaccctacgggaaggccgtagatgtgtgggccctgggcgtcatctcctacatcctgctgtgtgggtacccccccttctacgacgagagcgacc

SEQ ID NO: 288799 - DNA, 120 bp, Artificial Sequence
  ENSG00000130822_6 (sequence is synthesized)
gaatcagccaaagacttcatccggcaccttctggagcgagacccccagaagaggttcacctgccaacaggccttgcggcacctttggatctctggggacacagccttcgacagggacatc

SEQ ID NO: 288800 - DNA, 120 bp, Artificial Sequence
  ENSG00000130822_7 (sequence is synthesized)
ttaggctctgtcagtgagcagatccggaagaactttgctcggacacactggaagcgagccttcaatgccacctcgttcctgcgccacatccggaagctggggcagatcccagagggcgag

SEQ ID NO: 288801 - DNA, 120 bp, Artificial Sequence
  ENSG00000130822_8 (sequence is synthesized)
ggggcctctgagcagggcatggcccgccacagccactcaggcctccgtgctggccagccccccaagtggtgatgcccaggcagatgccgaggccaagtggactgacccccagatttcctt

SEQ ID NO: 288802 - DNA, 120 bp, Artificial Sequence
  ENSG00000130822_9 (sequence is synthesized)
cccttggatgctttcggtcccctcccccaacccctccccctggggctggcctctgctggattttgagatttgagggtgtggcgcatggcgctggggttggaatggggcacccccaagtct

SEQ ID NO: 288803 - DNA, 120 bp, Artificial Sequence
  ENSG00000130822_10 (sequence is synthesized)
ccaagtctgtccccaggctctgccctgcctgggggcagtggctcccctcccctgttgcctctcccgcccctgccccccccgccccgccaaaagccgagggggtgctggcaggcgggcctc

SEQ ID NO: 288804 - DNA, 120 bp, Artificial Sequence
  ENSG00000130822_11 (sequence is synthesized)
tctttcctgcacggctgttgtgtgcttcgctgagtgtgggtggtcctgcttgtgtcatggtcatggccttccagccccctccagttttccccaaaccaataaagaaagatacagcaatgg

SEQ ID NO: 288805 - DNA, 80 bp, Artificial Sequence
  ENSG00000130822_12 (sequence is synthesized)
agcacacctgtcacgcctggcgcgccccctgcccgcacgcgctcggtccacgcagctcgggacgcgggcggcccaggctg

SEQ ID NO: 288806 - DNA, 120 bp, Artificial Sequence
  ENSG00000130822_13 (sequence is synthesized)
gctgcggccactgcgcggcacgacgctgcggcacccgctccagacatgctgctgctgaagaaacacacggaggacatcagcagcgtctacgagatccgcgagaggctcggctcgtgagtg

SEQ ID NO: 288807 - DNA, 120 bp, Artificial Sequence
  ENSG00000130822_14 (sequence is synthesized)
tgtgtgtgtgtgtgtgtgtgtgtacctgtgtgagatggcatgtgtgtgtgactacgcgagtgggtgtgagatgatgtgtgtgtgtgtgaatatgtaggggtgtgtgaatgtgagtgagtc

SEQ ID NO: 288808 - DNA, 120 bp, Artificial Sequence
  ENSG00000130822_15 (sequence is synthesized)
ggggtgtgtgaatgtgagtgagtctgtgagatggcatgtgtgagtggtggtggggggtggcacagggccaggtagggcctccccatctccttcacagggggccctccccgctccactctc

SEQ ID NO: 288809 - DNA, 120 bp, Artificial Sequence
  ENSG00000130822_16 (sequence is synthesized)
gttgtgcccgttgcctttgtgtgggccattcctgggcttgagtaggccgagccagtgacactgagcggcatggctgcgtgtgtgcctgtgcgtgcgtctgtctgtctctggcccccagcc

SEQ ID NO: 288810 - DNA, 120 bp, Artificial Sequence
  ENSG00000130822_17 (sequence is synthesized)
tccgcccacctcctccctgccctcctcccggggaggagacgccgctccagcgggaggcaggatggttgctacctggggcggccgccagctcctcccgcagggctccgggccgcccctcgc

SEQ ID NO: 288811 - DNA, 120 bp, Artificial Sequence
  ENSG00000130822_18 (sequence is synthesized)
cccagggtcgccggctcctagtgcagcccaggcttcccggccggcccctcccagccctgggaagacgtcccccgggccccctcagccctccgcctccccttctctccctttctccccgct

SEQ ID NO: 288812 - DNA, 120 bp, Artificial Sequence
  ENSG00000130822_19 (sequence is synthesized)
tccttgagctctctccaccgctgcccactgggggctacagcttcccggctaccctggaagctggaggccgggaccagctcttcaggtgacaggcctctgtgtctccacagtgggcagagg

SEQ ID NO: 288813 - DNA, 120 bp, Artificial Sequence
  ENSG00000130822_20 (sequence is synthesized)
ggagcctgcctggctgatgagcaagcctcgactttgtcatcaaggcagagaaggggcccggggtcttctctggcccagcctttgactgaagctggtctggagacaggggcattagagaag

SEQ ID NO: 288814 - DNA, 120 bp, Artificial Sequence
  ENSG00000130822_21 (sequence is synthesized)
cgctgcggccactgcgcggcacgacgctgcggcacccgctccagacatgctgctgctgaagaaacacacggaggacatcagcagcgtctacgagatccgcgagaggctcggctcgagcgg

SEQ ID NO: 288815 - DNA, 120 bp, Artificial Sequence
  ENSG00000130822_22 (sequence is synthesized)
agcagctgtaggcctgggatgtggaggcgtgtatgcggtggcctcgctgggaggcgtccgtctggggacatgctgctgctgaagaaacacacggaggacatcagcagcgtctacgagatc

SEQ ID NO: 288816 - DNA, 120 bp, Artificial Sequence
  ENSG00000130822_23 (sequence is synthesized)
caggcagatatctgatcgaagaacattccaggcaggggagcaaaggctagggccgtcaggaggccagtgtggccggggaagaggtggaggaggaggggccagggcagtcgttaggccgcc

SEQ ID NO: 288817 - DNA, 120 bp, Artificial Sequence
  ENSG00000130822_24 (sequence is synthesized)
ccctaaggactcatgctttgacttggattgacatagagagctgcaggagggtgacatgatctcaataaaaggaatgctctggctgctgggtagagaagaaagcgagggtgagggattaat

SEQ ID NO: 288818 - DNA, 120 bp, Artificial Sequence
  ENSG00000130822_25 (sequence is synthesized)
aagtggccgggtcagcctgtcctcggagaggcggtgaaggcagagactggaaggcagagagccttgccgacctgtggccgaagagctctccgggagacagccaccggtggtgcaaaggcc

SEQ ID NO: 288819 - DNA, 120 bp, Artificial Sequence
  ENSG00000130822_26 (sequence is synthesized)
ctggggccggcccagccgggccgcagctccgggaggcggcgcgagcgagcagtgggctgggcggtggcggccggcacccgagccggatcccggcgattgccttacaagacatgctgctgc

SEQ ID NO: 288820 - DNA, 120 bp, Artificial Sequence
  ENSG00000130822_27 (sequence is synthesized)
ggcctttcttgatctcctgctccaccaaggctctggggaacctgagagtgcctagtccccatcctgtcccagcaccggcaccgcgtcaggactgactggcccttttcccggtgtccgtgt

SEQ ID NO: 288821 - DNA, 120 bp, Artificial Sequence
  ENSG00000130822_28 (sequence is synthesized)
ggcggcccccacccctgcctggcgtgagagtgggtaggggcttcggacttgaggggactggagcgggaacaaggcaaggctgccccctgcctttgactgaagctggtctggagacagggg

SEQ ID NO: 288822 - DNA, 120 bp, Artificial Sequence
  ENSG00000130822_29 (sequence is synthesized)
gagaagtgactcatagatggcctaaagaagcggggccactcaaggacccaggacagagggaagagggccaacccagctggaccacaggcaaaccccattgcctttgagagaaagaagagg

SEQ ID NO: 288823 - DNA, 120 bp, Artificial Sequence
  ENSG00000130822_30 (sequence is synthesized)
gtggttgggggagacaggcggtgtcacctgtgcttagaccaggggtggtgggtgggtacccctgaggtggcaaggtcacactgctcatcagaagtttctcactagggtcttctctggccc

SEQ ID NO: 288824 - DNA, 120 bp, Artificial Sequence
  ENSG00000130822_31 (sequence is synthesized)
ctggaaagcggccggatgtgtggaggcagagaggcagcatccaggcgctggtcgccttcggggtgcgggggaggacatgctgctgctgaagaaacacacggaggacatcagcagcgtcta

SEQ ID NO: 288825 - DNA, 120 bp, Artificial Sequence
  ENSG00000130822_32 (sequence is synthesized)
gagagctgcaggagggtgacatgatctcaataaaaggaatgctctggctgctgggtagagaagaaagcgaggacatgctgctgctgaagaaacacacggaggacatcagcagcgtctacg

SEQ ID NO: 288826 - DNA, 120 bp, Artificial Sequence
  ENSG00000130822_33 (sequence is synthesized)
agagaaggggcccggctccctgatctgatcgtggacactgcagtccccagatggctcatcccgttaagctaagcccgcggccatccgtccagctttaggaagaaaagcagttccggccca

SEQ ID NO: 288827 - DNA, 120 bp, Artificial Sequence
  ENSG00000130822_34 (sequence is synthesized)
ggctgaggcctgcctggcagggggtggaggaggaagctgcccttgcccccggcggggcggggagagacccccatcacctctcccctgcccctgcagacatgctgctgctgaagaaacaca

SEQ ID NO: 288828 - DNA, 120 bp, Artificial Sequence
  ENSG00000130822_35 (sequence is synthesized)
gaggtctggaaaaatgattttttaaaaactcttcctgccccgtggactctcttgaagacgtcgtgtcatgccagggcccacggtcacttgacggaacccttgtgatgctggccacaacct

SEQ ID NO: 288829 - DNA, 120 bp, Artificial Sequence
  ENSG00000130822_36 (sequence is synthesized)
catgggactggatggcgagcagcgaggggggtccagtaactgttggatgcaggattgaattcggtcacccgcacttatttcctgggctcgtcttggttgggttcgcggagatacactctc

SEQ ID NO: 288830 - DNA, 120 bp, Artificial Sequence
  ENSG00000130822_37 (sequence is synthesized)
ggagccttctggaaagcggccggatgtgtggaggcagagaggcagcatccaggcgctggtcgccttcgggacatgctgctgctgaagaaacacacggaggacatcagcagcgtctacgag

SEQ ID NO: 288831 - DNA, 120 bp, Artificial Sequence
  ENSG00000130822_38 (sequence is synthesized)
cgacgctgcggcacccgctccagacatgctgctgctgaagaaacacacggaggacatcagcagcgtctacgagatccgcgagaggctcggctcggggccctccccgctccactctctctc

SEQ ID NO: 288832 - DNA, 120 bp, Artificial Sequence
  ENSG00000130822_39 (sequence is synthesized)
gaaggccgtagatgtgtgggccctgggcgtcatctcctacatcctgtgagtgaccgctgggaaggcttgtctcctgcctgcctgcccctgctgggttggggagggtgggacagctggatg

SEQ ID NO: 288833 - DNA, 120 bp, Artificial Sequence
  ENSG00000130822_40 (sequence is synthesized)
gcgggggccggcggcctgctgggggaggaggccgcggcgggcgggggaactcacctccgccgttcttgtagcacagacatgctgctgctgaagaaacacacggaggacatcagcagcgtc

SEQ ID NO: 288834 - DNA, 120 bp, Artificial Sequence
  ENSG00000130822_41 (sequence is synthesized)
atgctgctgctgaagaaacacacggaggacatcagcagcgtctacgagatccgcgagaggctcggctcgatcagtcaccccaacatcgtcgctctggaggatgtccacgagagcccttcc

SEQ ID NO: 288835 - DNA, 120 bp, Artificial Sequence
  ENSG00000130826_0 (sequence is synthesized)
gggtgggtcctagcagcgcggcctgacgggaccaaggcggcgggagtctgcggtcgttccctcggctgtggaccgggcggcacgcacgcggtgcagggtaacatggcggatgcggaagta

SEQ ID NO: 288836 - DNA, 120 bp, Artificial Sequence
  ENSG00000130826_1 (sequence is synthesized)
attattttgccaaagaaacataagaagaaaaaggagcggaagtcattgccagaagaagatgtagccgaaatacaacacgctgaagaatttcttatcaaacctgaatccaaagttgctaag

SEQ ID NO: 288837 - DNA, 120 bp, Artificial Sequence
  ENSG00000130826_2 (sequence is synthesized)
ttggacacgtctcagtggccccttttgctaaagaattttgataagctgaatgtaaggacaacacactatacacctcttgcatgtggttcaaatcctctgaagagagagattggggactat

SEQ ID NO: 288838 - DNA, 120 bp, Artificial Sequence
  ENSG00000130826_3 (sequence is synthesized)
atcaggacaggtttcattaatcttgacaagccctctaacccctcttcccatgaggtggtagcctggattcgacggatacttcgggtggagaagacagggcacagtggtacgctggatccc

SEQ ID NO: 288839 - DNA, 120 bp, Artificial Sequence
  ENSG00000130826_4 (sequence is synthesized)
aaggtgactggttgtttaatcgtgtgcatagaacgagccactcgcttggtgaagtcacaacagagtgcaggcaaagagtatgtggggattgtccggctgcacaatgctattgaagggggg

SEQ ID NO: 288840 - DNA, 120 bp, Artificial Sequence
  ENSG00000130826_5 (sequence is synthesized)
acccagctttctagggccctagaaactctgacaggtgccttattccagcgacccccacttattgctgcagtaaagaggcagctccgagtgaggaccatctacgagagcaaaatgattgaa

SEQ ID NO: 288841 - DNA, 120 bp, Artificial Sequence
  ENSG00000130826_6 (sequence is synthesized)
tacgatcctgaaagaagattaggaatcttttgggtgagttgtgaggctggcacctacattcggacattatgtgtgcaccttggtttgttattgggagttggtggtcagatgcaggagctt

SEQ ID NO: 288842 - DNA, 120 bp, Artificial Sequence
  ENSG00000130826_7 (sequence is synthesized)
cggagggttcgttctggagtcatgagtgaaaaggaccacatggtgacaatgcatgatgtgcttgatgctcagtggctgtatgataaccacaaggatgagagttacctgcggcgagttgtt

SEQ ID NO: 288843 - DNA, 120 bp, Artificial Sequence
  ENSG00000130826_8 (sequence is synthesized)
taccctttggaaaagctgttgacatctcataaacggctggttatgaaagacagtgcagtaaatgccatctgctatggggccaagattatgcttccaggtgttcttcgatatgaggacggc

SEQ ID NO: 288844 - DNA, 120 bp, Artificial Sequence
  ENSG00000130826_9 (sequence is synthesized)
attgaggtcaatcaggagattgtggttatcaccaccaaaggagaagcaatctgcatggctattgcattaatgaccacagcggtcatctctacctgcgaccatggtatagtagccaagatc

SEQ ID NO: 288845 - DNA, 120 bp, Artificial Sequence
  ENSG00000130826_10 (sequence is synthesized)
aagctgatgatcaagcagggccttctggacaagcatgggaagcccacagacagcacacctgccacctggaagcaggagtatgttgactacagtgagtctgccaaaaaagaggtggttgct

SEQ ID NO: 288846 - DNA, 120 bp, Artificial Sequence
  ENSG00000130826_11 (sequence is synthesized)
gaagtggtaaaagccccgcaggtagttgccgaagcagcaaaaactgcgaagcggaagcgagagagtgagagtgaaagtgacgagactcctccagcagctcctcagttgatcaagaaggaa

SEQ ID NO: 288847 - DNA, 120 bp, Artificial Sequence
  ENSG00000130826_12 (sequence is synthesized)
aagaagaagagtaagaaggacaagaaggccaaagctggtctggagagcggggccgagcctggagatggggacagtgataccaccaagaagaagaagaagaagaagaaagcaaaagaggta

SEQ ID NO: 288848 - DNA, 120 bp, Artificial Sequence
  ENSG00000130826_13 (sequence is synthesized)
gaattggtttctgagtagtgaaggccacttgaagctggaggagaaactaaagccttattgagaaaacatgttatagatccttttgttgctgagagagtggaacataggtcctagacaggg

SEQ ID NO: 288849 - DNA, 120 bp, Artificial Sequence
  ENSG00000130826_14 (sequence is synthesized)
tgaagagttctggcacattttagctgctactttgagacctcggtgatgttacctggtgtggtcatcccatcttgtcctgttttaaggatatgggtggtgaaagatgaaagaggcagagtt

SEQ ID NO: 288850 - DNA, 120 bp, Artificial Sequence
  ENSG00000130826_15 (sequence is synthesized)
tatcccaatgacttctctgtttgagttgggaagcctcaccttcagacccagtaactgtccgcagctgtctgctagtggttgtcttaacatcgtagtcctagtttgcattttttaaatccc

SEQ ID NO: 288851 - DNA, 120 bp, Artificial Sequence
  ENSG00000130826_16 (sequence is synthesized)
ctctgtttaaaaggtttgtaaaacaaaaacaaaaaactaagtctgctcagtgaaatgctgtagaaccctaaataagtggtagaagagtgtcactgaattttgtctctgaattcagtataa

SEQ ID NO: 288852 - DNA, 120 bp, Artificial Sequence
  ENSG00000130826_17 (sequence is synthesized)
ctgagttttgtccatgctggtgtctgggttataggcctgatgggcctggtagttttccatcttgttctggcctagaggtcagtcctttgcacttcctcaaagcttgtgtacagtgctcac

SEQ ID NO: 288853 - DNA, 120 bp, Artificial Sequence
  ENSG00000130826_18 (sequence is synthesized)
ctaaatccatctgactacttgttcctgtgccctcttgttttaggcctcgtttacttttaaaaaatgaaattgttcattgctgggagaagaatgttgtaatttttacttattaaagtcaac

SEQ ID NO: 288854 - DNA, 120 bp, Artificial Sequence
  ENSG00000130826_19 (sequence is synthesized)
ttgttaagttttttatgtattcctgttgggttttcttgttgatctcatgctagcagagcaaaaattgtaaaatattttgattaaaaatctagggacctttatgtcctatttgaaatgtga

SEQ ID NO: 288855 - DNA, 120 bp, Artificial Sequence
  ENSG00000130826_20 (sequence is synthesized)
gtactggccgagccagcaaatcgcattgcgcagacgaccagcgggcgcctcggattccgcccccgggatggccccgcctcctcccgccccgcggcaaggcacgcacagggcagtgcgcgg

SEQ ID NO: 288856 - DNA, 120 bp, Artificial Sequence
  ENSG00000130826_21 (sequence is synthesized)
gacggcacacttgctgccttgatgcaggagtatgtcaacaacaggtgaggatgggaaggtagagcccacttgccatctggacgcaggagtacatggacaacaggtgaggaacaggtgagc

SEQ ID NO: 288857 - DNA, 120 bp, Artificial Sequence
  ENSG00000130826_22 (sequence is synthesized)
atggaggttgtagagcccaggggagggggagtcacttggtttggggcaaacttgctaaatgcaggaccacaggaaccagctcttcagctcccgtgagattttggctgcccaggccagtta

SEQ ID NO: 288858 - DNA, 120 bp, Artificial Sequence
  ENSG00000130826_23 (sequence is synthesized)
ggggtgtgggcctgcacggcagacagttatccctttctagtctggctcgtgggactctagagggagtcagtctgcaacagtaagtggtgagttcttctgtccagcgtcagtattttgatg

SEQ ID NO: 288859 - DNA, 120 bp, Artificial Sequence
  ENSG00000130826_24 (sequence is synthesized)
gtggctttagacttgccagataacactacataacatcagtactgccctggaaagccattcagtgaatttgacctattgctacctctttttcagtgagtctgccaaaaaagaggtggttgc

SEQ ID NO: 288860 - DNA, 120 bp, Artificial Sequence
  ENSG00000130826_25 (sequence is synthesized)
cagccccagacagtccaagtgtccttcaggcatagcttactaaatggtgctggccttaccaactgctgtctctgaatttgtcttccttatgccacccacagacccgccatccccctttct

SEQ ID NO: 288861 - DNA, 120 bp, Artificial Sequence
  ENSG00000130826_26 (sequence is synthesized)
ctttaaatgtttggacccatcttagtgacatttcacttcccctctgtactcctggttcatttcttctctctctttcccttggaggtcccagtgaaaaggcataggaagccttgttttctg

SEQ ID NO: 288862 - DNA, 120 bp, Artificial Sequence
  ENSG00000130826_27 (sequence is synthesized)
gaaaagctttctgtatttcccttctatgttttgtctgctggaaactatttcttcattaagaaaaaaaaaaatcctaaagcaaggatattgttttggtttctgtgtacgttctgtcccctg

SEQ ID NO: 288863 - DNA, 120 bp, Artificial Sequence
  ENSG00000130826_28 (sequence is synthesized)
ctggccagaattacagatctttacagcaaatgcttatattttaagaagtgtgtctgtcacctctagtcttggtggctcagatgaaggataactgcatttctcaaccagtgatgtatttac

SEQ ID NO: 288864 - DNA, 120 bp, Artificial Sequence
  ENSG00000130826_29 (sequence is synthesized)
ttcagtccagggcagcttccctgttctgttaattaaactttgggacattaaaatgggctaagggagatgattgggtagaaagtattattctattcatttgcctcccagcctacaaaaatg

SEQ ID NO: 288865 - DNA, 84 bp, Artificial Sequence
  ENSG00000130826_30 (sequence is synthesized)
agtattattctattcatttgcctcccagcctacaaaaatgcctgcttggggtctaatacttcaacggttaaagatgcctggaag

SEQ ID NO: 288866 - DNA, 80 bp, Artificial Sequence
  ENSG00000130827_0 (sequence is synthesized)
gtgcgagcggggccgcggtggggctcgggggcgcgtccacgtggccagagggcggccacccggagccagcggagggacag

SEQ ID NO: 288867 - DNA, 120 bp, Artificial Sequence
  ENSG00000130827_1 (sequence is synthesized)
cggccacccggagccagcggagggacaggcctgtccccaggcgcggctgccggccatgccctctgtctgcctcctcctgctgctcttccttgccgtggggggggccctgggcaacaggcc

SEQ ID NO: 288868 - DNA, 120 bp, Artificial Sequence
  ENSG00000130827_2 (sequence is synthesized)
cttccgtgccttcgtggtgacagacaccacgcttacccacctggctgtgcaccgggtgactggggaggtgttcgtgggcgcagtgaaccgagtctttaagctggcccccaacctgactga

SEQ ID NO: 288869 - DNA, 120 bp, Artificial Sequence
  ENSG00000130827_3 (sequence is synthesized)
gctgcgggcccatgtcacggggcccgtcgaggacaacgctcgctgctacccgccccccagcatgcgcgtgtgtgcccaccgcctggcccccgtggacaacatcaacaagctgctgctcat

SEQ ID NO: 288870 - DNA, 120 bp, Artificial Sequence
  ENSG00000130827_4 (sequence is synthesized)
agactatgcggcccgccgcctggtggcctgcggcagcatctggcagggcatctgccagttcctgcgtctggacgacctcttcaagctgggtgagccgcaccaccgcaaggagcactacct

SEQ ID NO: 288871 - DNA, 120 bp, Artificial Sequence
  ENSG00000130827_5 (sequence is synthesized)
gtcgggggcccaggagcccgactccatggctggtgtcattgtggagcagggccaggggcccagcaagctgtttgtgggcactgctgtcgacggcaagtcggagtacttccccaccttgag

SEQ ID NO: 288872 - DNA, 120 bp, Artificial Sequence
  ENSG00000130827_6 (sequence is synthesized)
ctcccgcaagctcatcagtgatgaagacagcgcggacatgttcagtctcgtgtaccaggatgagtttgtgtcctcccagatcaagatcccctcagacacgctgtccttgtaccctgcctt

SEQ ID NO: 288873 - DNA, 120 bp, Artificial Sequence
  ENSG00000130827_7 (sequence is synthesized)
tgacatctactacatctacggcttcgtcagcgcctccttcgtgtacttcctgacgctgcagctggacacccagcagacgctgttggacacagcgggcgagaaatttttcacgtccaagat

SEQ ID NO: 288874 - DNA, 120 bp, Artificial Sequence
  ENSG00000130827_8 (sequence is synthesized)
cgtgcgcatgtgcgcgggagactcagagttctactcatacgtggaattccccatcggctgctcctggcgcggcgtggagtaccgcttggtgcagagcgcccacctggccaagcctggcct

SEQ ID NO: 288875 - DNA, 120 bp, Artificial Sequence
  ENSG00000130827_9 (sequence is synthesized)
gctgctggcccaggccctgggcgtgccggctgatgaggacgtcctcttcaccatcttctctcagggccagaagaaccgggccagcccaccccggcagaccatcctctgcctcttcaccct

SEQ ID NO: 288876 - DNA, 120 bp, Artificial Sequence
  ENSG00000130827_10 (sequence is synthesized)
cagcaacatcaatgcccacatccggcgccgcatccagtcctgctatcgtggggagggcactctggctctgccctggctgctgaacaaggagctgccctgcatcaacacccccatgcagat

SEQ ID NO: 288877 - DNA, 120 bp, Artificial Sequence
  ENSG00000130827_11 (sequence is synthesized)
caacggcaacttctgtgggctggtgttgaaccagcctctgggaggcctgcatgtgatcgaggggctgcccctgctggccgacagcaccgacggcatggccagcgtggccgcctacaccta

SEQ ID NO: 288878 - DNA, 120 bp, Artificial Sequence
  ENSG00000130827_12 (sequence is synthesized)
ccgccagcactctgtggtcttcattggcacgcgcagcggcagcttgaagaaggtgcgggtcgatggcttccaggatgcccacctgtatgagacagtccccgtggtggatggcagccccat

SEQ ID NO: 288879 - DNA, 120 bp, Artificial Sequence
  ENSG00000130827_13 (sequence is synthesized)
cctccgagacctgctcttcagcccggaccaccggcacatctatctcctgagtgagaagcaggtgagccagctcccggtggagacctgtgagcagtaccagagctgcgcagcctgcctggg

SEQ ID NO: 288880 - DNA, 120 bp, Artificial Sequence
  ENSG00000130827_14 (sequence is synthesized)
ctccggggacccgcactgtggttggtgtgtgctgcgacacaggtgctgccgcgaaggggcctgtctgggcgcctctgccccacacggctttgctgaggagctgagcaagtgtgtccaggt

SEQ ID NO: 288881 - DNA, 120 bp, Artificial Sequence
  ENSG00000130827_15 (sequence is synthesized)
gcgggtccggcccaacaatgtgtcagtgacgtcacctggggtgcagctgaccgtcaccctgcacaacgtgccagacctcagtgcgggcgtgagctgcgccttcgaggcggcggcggagaa

SEQ ID NO: 288882 - DNA, 120 bp, Artificial Sequence
  ENSG00000130827_16 (sequence is synthesized)
cgaggcggtcctgctgccctccggtgaactgctctgcccctcaccctccctccaggagctccgagctcttaccagggggcatggggccacccgcactgtgcggctgcagcttctctccaa

SEQ ID NO: 288883 - DNA, 120 bp, Artificial Sequence
  ENSG00000130827_17 (sequence is synthesized)
ggagacaggcgtgaggtttgccggtgctgactttgtcttctacaactgcagcgtcctccagtcgtgcatgtcctgtgttggcagcccttacccctgccactggtgtaagtaccgccacac

SEQ ID NO: 288884 - DNA, 120 bp, Artificial Sequence
  ENSG00000130827_18 (sequence is synthesized)
gtgtaccagccgcccccacgagtgctccttccaggagggcagggtccacagccctgagggctgccctgagatcctgcccagtggggacctcctgatccccgttggggtcatgcagcctct

SEQ ID NO: 288885 - DNA, 120 bp, Artificial Sequence
  ENSG00000130827_19 (sequence is synthesized)
taccttgcgggctaagaacctacctcagccgcagtcgggccagaagaactatgagtgcgtggtgcgggtgcaggggcggcagcagcgggtgcctgccgtgcgcttcaacagcagcagtgt

SEQ ID NO: 288886 - DNA, 120 bp, Artificial Sequence
  ENSG00000130827_20 (sequence is synthesized)
gcagtgccagaacgcctcgtactcctatgaaggtgatgagcatggtgacaccgagctggacttttccgtggtctgggatggagacttccccatagacaagcctcccagcttccgagccct

SEQ ID NO: 288887 - DNA, 120 bp, Artificial Sequence
  ENSG00000130827_21 (sequence is synthesized)
cctgtacaagtgctgggcgcagcggcccagctgtggcctctgcctcaaggctgatccccgcttcaactgtggctggtgcatctcagagcacaggtgccagctgcggacccactgcccggc

SEQ ID NO: 288888 - DNA, 120 bp, Artificial Sequence
  ENSG00000130827_22 (sequence is synthesized)
cccgaagaccaactggatgcacctgagccagaagggcacccggtgcagccacccccgcatcacgcagatccaccctctcgtggggcccaaggaaggaggcacccgggtcaccatcgtggg

SEQ ID NO: 288889 - DNA, 120 bp, Artificial Sequence
  ENSG00000130827_23 (sequence is synthesized)
tgagaacctgggcctcttgtcccgagaggtgggcctgcgggtggctggcgtgcgttgcaactccattccggccgagtacatcagtgctgagaggatcgtgtgtgagatggaggagtcgct

SEQ ID NO: 288890 - DNA, 120 bp, Artificial Sequence
  ENSG00000130827_24 (sequence is synthesized)
ggtgcccagcccgccgccggggcccgtggagctgtgtgtgggtgactgttcagccgacttccgcacgcagtcggagcaggtctacagctttgtgaccccaacgtttgaccaagtgagtcc

SEQ ID NO: 288891 - DNA, 120 bp, Artificial Sequence
  ENSG00000130827_25 (sequence is synthesized)
cagccgtggcccggcgtccgggggcacacggcttaccatctcaggcagctctctggatgctggcagcagggtcacagtgactgtgagggacagcgagtgccagtttgtaaggagagatgc

SEQ ID NO: 288892 - DNA, 120 bp, Artificial Sequence
  ENSG00000130827_26 (sequence is synthesized)
caaggcgatcgtgtgcatctcacctctctccaccctgggccccagccaggcccccatcacacttgccattgaccgggctaacatctccagccccgggctcatctacacctacactcagga

SEQ ID NO: 288893 - DNA, 120 bp, Artificial Sequence
  ENSG00000130827_27 (sequence is synthesized)
ccccaccgtcacccgccttgagcccacctggagcatcatcaatggaagcactgccatcactgtgagtgggacccacctgctgacggtccaggagccccgggtccgtgccaagtaccgcgg

SEQ ID NO: 288894 - DNA, 120 bp, Artificial Sequence
  ENSG00000130827_28 (sequence is synthesized)
cattgagaccaccaatacatgccaagtgatcaacgacactgccatgctgtgtaaggcccccggcatctttcttgggcggccccagcctcgggcgcaaggcgagcaccctgatgagtttgg

SEQ ID NO: 288895 - DNA, 120 bp, Artificial Sequence
  ENSG00000130827_29 (sequence is synthesized)
cttcctgctggaccacgtgcaaacggcccgctccctcaaccgctcctcctttacctactaccctgatcccagctttgagccgctggggccctctggcgtgctggacgtcaaaccgggctc

SEQ ID NO: 288896 - DNA, 120 bp, Artificial Sequence
  ENSG00000130827_30 (sequence is synthesized)
ccacgtggtgctgaagggcaagaacctgattcccgctgcagccggcagctcccgcctcaactacactgtgctgataggaggccagccgtgttcgctcactgtctcggacacacaactcct

SEQ ID NO: 288897 - DNA, 120 bp, Artificial Sequence
  ENSG00000130827_31 (sequence is synthesized)
gtgcgactcacccagccagactggccggcagcctgtcatggtgctggtgggtggcctggagttctggctgggcaccctgcacatctcggcagagcgggcgctgaccctaccggccatgat

SEQ ID NO: 288898 - DNA, 120 bp, Artificial Sequence
  ENSG00000130827_32 (sequence is synthesized)
ggggctggcggcggggggtgggctcctgctgctggccatcacagccgtgctggtggcctacaagcgcaagactcaggacgcggaccgtaccctcaagcgtctgcagctgcagatggacaa

SEQ ID NO: 288899 - DNA, 120 bp, Artificial Sequence
  ENSG00000130827_33 (sequence is synthesized)
cctggagtcccgtgtggccctggagtgcaaggaagcttttgcagagctgcagacggacatcaatgagctgactaaccacatggacgaggtgcagatccccttcctggactaccggactta

SEQ ID NO: 288900 - DNA, 120 bp, Artificial Sequence
  ENSG00000130827_34 (sequence is synthesized)
cgccgtgcgcgtgctcttcccgggcatcgaggcccacccggtgctcaaggagctggatacgccacccaacgtggagaaggccctgcgcctcttcgggcagctgctgcacagccgcgcgtt

SEQ ID NO: 288901 - DNA, 120 bp, Artificial Sequence
  ENSG00000130827_35 (sequence is synthesized)
cgtgcttaccttcatccacacgctggaggcccagagcagcttctccatgcgcgaccgcggcaccgtggcctcgctcaccatggtggccctgcagagccggctcgactatgccacggggct

SEQ ID NO: 288902 - DNA, 120 bp, Artificial Sequence
  ENSG00000130827_36 (sequence is synthesized)
gctcaagcaactgctggccgacctcatcgagaagaacctcgagagcaagaaccaccccaagctgctgctacgcaggacagagtcagtggctgagaagatgcttaccaactggttcacgtt

SEQ ID NO: 288903 - DNA, 120 bp, Artificial Sequence
  ENSG00000130827_37 (sequence is synthesized)
cctgctgcataagtttctgaaggagtgtgctggggagcctctcttcctgctttactgtgccatcaagcagcagatggagaagggccccattgatgccatcacgggcgaggcacgatactc

SEQ ID NO: 288904 - DNA, 120 bp, Artificial Sequence
  ENSG00000130827_38 (sequence is synthesized)
cctgagcgaggacaagctcatccgtcagcagatcgactacaagacactgacccttcactgcgtgtgtccggagaacgagggcagcgcccaggtcccagtgaaggttctcaactgtgacag

SEQ ID NO: 288905 - DNA, 120 bp, Artificial Sequence
  ENSG00000130827_39 (sequence is synthesized)
catcacccaggccaaagataagctgctggacactgtgtacaagggcattccgtactcccagcgtcccaaagctgaggacatggacctggagtggcgccagggccgcatgactcgcatcat

SEQ ID NO: 288906 - DNA, 120 bp, Artificial Sequence
  ENSG00000130827_40 (sequence is synthesized)
cctccaggatgaggatgtcaccaccaagatcgagtgtgactggaagaggctcaactcactggcccactaccaggtgacagacggttccttggtggcattggtgcccaaacaagtgtctgc

SEQ ID NO: 288907 - DNA, 120 bp, Artificial Sequence
  ENSG00000130827_41 (sequence is synthesized)
ctataacatggccaactccttcaccttcacccgctccctcagccgctacgagagcttgctccgcacggccagcagccctgatagcctccgctcacgggcacccatgattacgcctgacca

SEQ ID NO: 288908 - DNA, 120 bp, Artificial Sequence
  ENSG00000130827_42 (sequence is synthesized)
ggagacaggcaccaaattgtggcacctggtgaaaaaccacgaccatgccgaccatcgcgagggggaccgtggcagcaagatggtctccgagatctacctgacacggctgctggccaccaa

SEQ ID NO: 288909 - DNA, 120 bp, Artificial Sequence
  ENSG00000130827_43 (sequence is synthesized)
gggcacactgcagaagttcgtggatgacctctttgagacagtgttcagcacagcccaccggggctcggccctgcccctggccatcaagtacatgttcgacttcctggatgagcaggcgga

SEQ ID NO: 288910 - DNA, 120 bp, Artificial Sequence
  ENSG00000130827_44 (sequence is synthesized)
ccagcgccagatcagcgaccccgatgtgcgccacacctggaagagcaactgcctgccgctgcgcttctgggtgaatgtgatcaagaacccgcagttcgtgttcgacatccacaagaacag

SEQ ID NO: 288911 - DNA, 120 bp, Artificial Sequence
  ENSG00000130827_45 (sequence is synthesized)
ccctccaacaaactgctctacgccaaggacatccccaactacaagagctgggtggagaggtattatcgagacattgcaaagatggcatccatcagcgaccaggacatggatgcctacctg

SEQ ID NO: 288912 - DNA, 120 bp, Artificial Sequence
  ENSG00000130827_46 (sequence is synthesized)
gtggagcagtcccgcctccacgccagcgacttcagcgtcctgagtgcgctcaacgagctgtatttctatgtcaccaagtaccgccaggagattctcacggctctggaccgagatgcctct

SEQ ID NO: 288913 - DNA, 120 bp, Artificial Sequence
  ENSG00000130827_47 (sequence is synthesized)
tgtcggaagcataagttgcggcagaaactggaacagatcatcagcctcgtgtccagcgacagctaaggtggtggaatcggtgaggagggggcttctcagtcctgtgccgtcctcccatcc

SEQ ID NO: 288914 - DNA, 120 bp, Artificial Sequence
  ENSG00000130827_48 (sequence is synthesized)
aggggagtggctggctcaagcctgggtccccgggctgagccctggattgggtatcgtggggcaggtcaccctggccacgatgcccccggcacacccaggcccccttcattagtgccttgc

SEQ ID NO: 288915 - DNA, 120 bp, Artificial Sequence
  ENSG00000130827_49 (sequence is synthesized)
tttgggccctgcagggggaggggtgacagggcgagcccccaccccagcagcagcaatacccccaccctcctgccctgtgcccaggtgttgggacagtcccaccctccctgctatttatat

SEQ ID NO: 288916 - DNA, 120 bp, Artificial Sequence
  ENSG00000130827_50 (sequence is synthesized)
ccctctgcctatttattgaatcgaacttcgcctctgtctccatctgtaaatatgtgtccccccaccggatgtcgccaccctcactcacctgcctcttcttgagctgtcctgggccctgcc

SEQ ID NO: 288917 - DNA, 120 bp, Artificial Sequence
  ENSG00000130827_51 (sequence is synthesized)
acccgtctgggctcctttgtgtagcattatcagcctcggtctggcctctggcacctcacccttgccatggctgaccccacccattccaaggcggggtcacggtaccagcagcacttgggg

SEQ ID NO: 288918 - DNA, 120 bp, Artificial Sequence
  ENSG00000130827_52 (sequence is synthesized)
tgaggcctccaaagcttcctcagaattgtggctgtgccacgctggaccacagggtccccctcaagcatctcggggccctattctctctgagcacctggagggctggactcaggcttgtgc

SEQ ID NO: 288919 - DNA, 120 bp, Artificial Sequence
  ENSG00000130827_53 (sequence is synthesized)
cagggcctgacttgggcctgggggccctagaacgctcctcctcctgagcctactgccaaacgtcctcagtgttgtctgcacctgctccgactccttcagccgccccattcagcgcccgct

SEQ ID NO: 288920 - DNA, 120 bp, Artificial Sequence
  ENSG00000130827_54 (sequence is synthesized)
ccgtccagtgcccgccctgtggggccaaggcggccgtgccttactactctgtgtcttctgcctcctctgaggaatctggccctgtctgacagtcccagaccccccgttctctcctcttta

SEQ ID NO: 288921 - DNA, 120 bp, Artificial Sequence
  ENSG00000130827_55 (sequence is synthesized)
gttgcatgagtttttctttgttcatggaatgttttttcctgattaaatgttggggaaatgccatccatgtggggctctgtccttggggcaggtcagtagacctgtggatgctgcatgagc

SEQ ID NO: 288922 - DNA, 120 bp, Artificial Sequence
  ENSG00000130827_56 (sequence is synthesized)
tggagccccattgtgggagaaaggaccactccttgcagggtcccagagggtttggggaggttcagggccatacccgacccatcagcaaaccccggtggctctaccttcaagacagattca

SEQ ID NO: 288923 - DNA, 120 bp, Artificial Sequence
  ENSG00000130827_57 (sequence is synthesized)
aggtagatagattctcctcccttccaccacccccacccagctctcctgtgccatcgtctatctctgcctggatgccagtctccctgcttctgccctggctctcttcagcctgttctcagc

SEQ ID NO: 288924 - DNA, 120 bp, Artificial Sequence
  ENSG00000130827_58 (sequence is synthesized)
gtgggaggcagagagatcctgttatgatataaggtggatcatgttgcctcactgtttagaaccctccggcggtttcagctgcagccagctccttcaaaacctgacaattgcatactgtcg

SEQ ID NO: 288925 - DNA, 120 bp, Artificial Sequence
  ENSG00000130827_59 (sequence is synthesized)
tactgtcgaggttgtggcacccatcatggtgcacctaccaaagtcttactcccaggcctgttaagtaatgcaggtggggagaaggtgacatgcaatttatttatttatttattttgagac

SEQ ID NO: 288926 - DNA, 60 bp, Artificial Sequence
  ENSG00000130827_60 (sequence is synthesized)
ctcagtgtattagtgcactctactatgccaggctttttttttttttttttttgagatagg

SEQ ID NO: 288927 - DNA, 120 bp, Artificial Sequence
  ENSG00000130827_61 (sequence is synthesized)
tactatgccaggctttttttttttttttttttgagataggttgccgctatgttgttcaggctggtcttgaattcctggtctcaagtgatcctcacccctcagcctcccaaagtattggga

SEQ ID NO: 288928 - DNA, 89 bp, Artificial Sequence
  ENSG00000130827_62 (sequence is synthesized)
gatcttgccctgttgcccacgctggagtgcagtggcaaaatcaactcactgcagccttgatgtcctgggctcaagtgatcttcctgcct

SEQ ID NO: 288929 - DNA, 90 bp, Artificial Sequence
  ENSG00000130827_63 (sequence is synthesized)
accatacccagcagagatggagtcttgctggttttgaacctcctgggctcaagtgatcctcctgttttggcctcccaaaattctgggatt

SEQ ID NO: 288930 - DNA, 90 bp, Artificial Sequence
  ENSG00000130827_64 (sequence is synthesized)
gtagagatggagtcttgctggttttgaacctcctgggctcaagtgatcctcctgttttggcctcccaaaattagccaagtgagatgcaat

SEQ ID NO: 288931 - DNA, 120 bp, Artificial Sequence
  ENSG00000130827_65 (sequence is synthesized)
cttctttttttgtttttgtttttttttgagatgcaattttaaatagggtggcttggacagccacctgagttgggtttaaaagctgccagctccagccgtccagctgtggggccacggtgc

SEQ ID NO: 288932 - DNA, 120 bp, Artificial Sequence
  ENSG00000130827_66 (sequence is synthesized)
cgtccagctgtggggccacggtgccagacagtggtggtggttataggaccgtaggtgtttaccaaaactagacaagtccacataacaaccaactgcacaaataaggagtaaaataataaa

SEQ ID NO: 288933 - DNA, 120 bp, Artificial Sequence
  ENSG00000130827_67 (sequence is synthesized)
gagaaggacgtgtgaggcaggactggattgtagcccaggataaagagaagttgcgggatgacagctgtgccgtcggcccagacagaaccatctggacagaggacagaggataagggagat

SEQ ID NO: 288934 - DNA, 120 bp, Artificial Sequence
  ENSG00000130827_68 (sequence is synthesized)
ggttgaaaatactaccatcatatgataatgacaactaagccacaggaaaacaaggcagttttaacctcaggggaaatccctcagaaatggatggaatctaccagaagcatcatgagagga

SEQ ID NO: 288935 - DNA, 120 bp, Artificial Sequence
  ENSG00000130827_69 (sequence is synthesized)
agaggaagggaaacagagctaaattggggccaggtgtggtggctcgcacttgtcatcccagcacttttggaggcccaggcgggaagatcactggagcccaggagttcaggaccagcctgg

SEQ ID NO: 288936 - DNA, 87 bp, Artificial Sequence
  ENSG00000130827_70 (sequence is synthesized)
ggagttcaggaccagcctgggcaacaaagcgagatcccctctctacaaaaaataaaaaactagccaggcatggtggtgcatgctggg

SEQ ID NO: 288937 - DNA, 120 bp, Artificial Sequence
  ENSG00000130827_71 (sequence is synthesized)
gaacaaggctgcagtgagctgtgattgtgccagcctaggtgacagagccagaccctgtatcaaaaaaaataataataattaaaaaacaaaagatcggctgggcgcggtggctcatgcctg

SEQ ID NO: 288938 - DNA, 120 bp, Artificial Sequence
  ENSG00000130827_72 (sequence is synthesized)
aaaaaaaaaaaaaaagtgaaagatctaaattgtcaactattcgtcaataattaatgtctaaaaaatattaagaaaggaagaaaggaatgagagcaaaagagagggagagaggaaagtgtc

SEQ ID NO: 288939 - DNA, 120 bp, Artificial Sequence
  ENSG00000130827_73 (sequence is synthesized)
atcttcataagctgaaggccagtgccaccgtcaccactggcagagctccccagattctacaaagggaaactgttcctccatatggagtaatagggactggatatgtcatgccaaatgaaa

SEQ ID NO: 288940 - DNA, 120 bp, Artificial Sequence
  ENSG00000130827_74 (sequence is synthesized)
gaacacgccaaaccagacaaaatatatggaatgcagagtattaaaaaactggctgtgggccagtgagggacagcgacgtgtgggagctgggaaacaaggtaagccatgcgactggcccag

SEQ ID NO: 288941 - DNA, 120 bp, Artificial Sequence
  ENSG00000130827_75 (sequence is synthesized)
tgtcctgtgtggagtttcctggtggagcctggcagacacccggactttaggagttgaaactgattcagagcgtcccagcagctggagtttgcagggcggagaaccagagagaagagagct

SEQ ID NO: 288942 - DNA, 120 bp, Artificial Sequence
  ENSG00000130827_76 (sequence is synthesized)
gcacagggaaagaaccctggatatccacagaggctcccgttccagtgtgcagcggactacgactactggtgagcacaggcgtgtgaggaagctacccaagaccagggaaggccatcaccc

SEQ ID NO: 288943 - DNA, 120 bp, Artificial Sequence
  ENSG00000130827_77 (sequence is synthesized)
cagcaggagaggatgaacggtaactccagtgtgcaagcaggacagggactagcagctgtccccacccaccaggatagagaagctcatgttcacctaggcagcactggccagggtgcccag

SEQ ID NO: 288944 - DNA, 120 bp, Artificial Sequence
  ENSG00000130827_78 (sequence is synthesized)
aatggtgtttgttgcctccatagagggaaacaagcctacagttaagagctgctctggtcccacacagcacatcttcaaagcaagactcaaaaggatcaaaccatttccttgttttctgag

SEQ ID NO: 288945 - DNA, 120 bp, Artificial Sequence
  ENSG00000130827_79 (sequence is synthesized)
aataaaagcagttgtacctcttccttttcactctcagaaaatctgatagaatctataaaagagccctaaggctggagacactgtattttccagggagccaactccttgccccagacacta

SEQ ID NO: 288946 - DNA, 120 bp, Artificial Sequence
  ENSG00000130827_80 (sequence is synthesized)
gtcaattgccccagcactttcttcactgatcgttagaggaaaaaagctcatgttagatttaaaaatcaggaaaaaaatttaacactaaacttgcaaatattatgtggtgtatattacagt

SEQ ID NO: 288947 - DNA, 120 bp, Artificial Sequence
  ENSG00000130827_81 (sequence is synthesized)
tacacatttactatgtaagtgcaactgtaaaactgaggaagtattccaaaatgttgacagtagttaatcctgaatgacagaacccaattgattttcattttcttccatttcctaaattgt

SEQ ID NO: 288948 - DNA, 120 bp, Artificial Sequence
  ENSG00000130827_82 (sequence is synthesized)
cttcaatttccttgtactccttgaatatctgaattctagaaccccccccccagcaacccaagcacaacaagaatattgggaggtgccccagctgcaaataaactcagacttggaatagta

SEQ ID NO: 288949 - DNA, 120 bp, Artificial Sequence
  ENSG00000130827_83 (sequence is synthesized)
ttgcaccaggtagagatgctggtggtcggtcgcaggtggtgagagcggtgacaggagaagctgcggagggggttgagccctattgagaacagaagttcagcagagacttagaggaaaggc

SEQ ID NO: 288950 - DNA, 120 bp, Artificial Sequence
  ENSG00000130827_84 (sequence is synthesized)
cgttcaccctaaatgtgttgctctcaccacctctggacaagatgtgagccggcccgacaggaaagagatgtgcacatgggaggggccccttggggctaactagggagcctcaggcgcacg

SEQ ID NO: 288951 - DNA, 120 bp, Artificial Sequence
  ENSG00000130827_85 (sequence is synthesized)
gccctgaggtgaggcgggcgccgcatgtgaggggctgggctctgtggtgcgggcggggccaccggcttctatgcgttctcggtttctttgagccttctccaggttgggcctggagaaggg

SEQ ID NO: 288952 - DNA, 120 bp, Artificial Sequence
  ENSG00000130827_86 (sequence is synthesized)
ccctaggacagagtcagtggctgagaagatgcttaccaactggttcacgttcctgctgcataagtttctgaaggagtgtgctggggagcctctcttcctgctttactgtgccatcaagca

SEQ ID NO: 288953 - DNA, 120 bp, Artificial Sequence
  ENSG00000130827_87 (sequence is synthesized)
cgccacacctggaagagcaactggtatcaccccgtgctgggctgccagcagcctgtctggagactggtgggcggaagacgctggtggctctgctgagacccagggcctggagtagcatcc

SEQ ID NO: 288954 - DNA, 120 bp, Artificial Sequence
  ENSG00000130827_88 (sequence is synthesized)
aggacagagtcagtggctgagaagatgcttaccaactggttcacgttcctgctgcataagtttctgaaggtgcgccaggtgggtgggcggcagggaggtggtggcagaggaccggccagt

SEQ ID NO: 288955 - DNA, 120 bp, Artificial Sequence
  ENSG00000130827_89 (sequence is synthesized)
tctcctcctggctcccactcataccctcctgtgccgtgtgacctccgtgggctctcccgctccccacctgaaccctgtttccaaagaggagtgggccaggcacttgggggctgccagcat

SEQ ID NO: 288956 - DNA, 80 bp, Artificial Sequence
  ENSG00000130829_0 (sequence is synthesized)
aaggtggaagctgggtccggctgccaggaagcggccggtgcgcgggctgcgcgggctgcgcggggctcggcttccacgtg

SEQ ID NO: 288957 - DNA, 120 bp, Artificial Sequence
  ENSG00000130829_1 (sequence is synthesized)
cctggggactctctgccgcgggacggcgcctcgcgttccgccgtggcagtggccgtggccagaacgtccacgcgcggtcgtccaccgccggatctcgctccagcgcccgtggtccagcgt

SEQ ID NO: 288958 - DNA, 120 bp, Artificial Sequence
  ENSG00000130829_2 (sequence is synthesized)
gtagggagccgatcgcccatggagggtctgggccgctcgtgcctgtggctgcgtcgggagctgtcgcccccgcggccgcggctcctgctcctggactgccgcagccgcgagctgtacgag

SEQ ID NO: 288959 - DNA, 120 bp, Artificial Sequence
  ENSG00000130829_3 (sequence is synthesized)
ggactgccgcagccgcgagctgtacgagtcggcgcgcatcggtggggcgctgagcgtggccctgccggcgctcctgctgcgccgcctgcggaggggcagcctgtcggtgcgcgcgctcct

SEQ ID NO: 288960 - DNA, 120 bp, Artificial Sequence
  ENSG00000130829_4 (sequence is synthesized)
cctgcccccgtgctcctgtacgaccagggcgggggccggcgccggcgcggggaggccgaggccgaggccgaggagtgggaggccgagtcggtgctgggcaccctgctgcagaagctgcga

SEQ ID NO: 288961 - DNA, 120 bp, Artificial Sequence
  ENSG00000130829_5 (sequence is synthesized)
gaggaaggctacctggcctactacctccagggaggcttcagcagattccaggccgagtgccctcacctgtgtgagaccagccttgctggccgtgccggctccagcatggcgccggtgccc

SEQ ID NO: 288962 - DNA, 120 bp, Artificial Sequence
  ENSG00000130829_6 (sequence is synthesized)
ggtccagtgcccgtggtggggttgggcagcctgtgcctgggctccgactgctctgatgcggaatccgaggctgaccgcgactccatgagctgtggcctggattcggagggtgccacaccc

SEQ ID NO: 288963 - DNA, 120 bp, Artificial Sequence
  ENSG00000130829_7 (sequence is synthesized)
ccaccagtggggctgcgggcatccttccctgtccagatcctgcccaacctctatctgggcagtgcccgggattccgccaatttggagagcctggccaaactgggcatccgctacatcctc

SEQ ID NO: 288964 - DNA, 120 bp, Artificial Sequence
  ENSG00000130829_8 (sequence is synthesized)
aatgtcacccccaacctcccaaacttcttcgagaagaatggtgactttcactacaagcagatccccatctccgaccactggagccagaacctgtcgcggttctttccggaggccattgag

SEQ ID NO: 288965 - DNA, 120 bp, Artificial Sequence
  ENSG00000130829_9 (sequence is synthesized)
ttcattgatgaggccttgtcccagaactgcggggtgctcgtccactgcttggcgggggtcagccgttctgtcaccgtcactgtggcctacctcatgcagaagctccacctctctctcaac

SEQ ID NO: 288966 - DNA, 120 bp, Artificial Sequence
  ENSG00000130829_10 (sequence is synthesized)
acatctcccccaacttcaacttcatggggcagttgctggactttgagcgcagcttgcggctggaggagcgccactcgcaggagcagggcagtggggggcaggcatctgcggcctccaacc

SEQ ID NO: 288967 - DNA, 120 bp, Artificial Sequence
  ENSG00000130829_11 (sequence is synthesized)
cgccctccttcttcaccacccccaccagtgatggcgccttcgagctggcccccacctagggccccgtggccggcaggccggcccctgccccacccccacccacgggtgtccctgcccact

SEQ ID NO: 288968 - DNA, 120 bp, Artificial Sequence
  ENSG00000130829_12 (sequence is synthesized)
cgtgtggcaagggaggggagggcaggagggctcggcctgagcagggtgctggggggagagcgcaatacctcacgcgggctgccgtcctaatcaacgtgcctatggcgggaccacgctcgg

SEQ ID NO: 288969 - DNA, 120 bp, Artificial Sequence
  ENSG00000130829_13 (sequence is synthesized)
agcctgcctcttctgcgactgttactttttctttgcgggatgggggtgggggttccctctccaggtggttgtccaggcccaggtcccggccctgggtgctcagccagctcggctaggccc

SEQ ID NO: 288970 - DNA, 120 bp, Artificial Sequence
  ENSG00000130829_14 (sequence is synthesized)
tgcgcctccctgcgcttcccccttcaggaagggtgtgtgccacctcgttgcactggatcccagtggctgcttgggggagaggcgtttgccatcactggtgttgtcacctccctgtttctc

SEQ ID NO: 288971 - DNA, 120 bp, Artificial Sequence
  ENSG00000130829_15 (sequence is synthesized)
caccaagggcttgggcctctcggggctggggcctcccaggggatggggacccagagtgcagtggccgcccacatccatggcctaggagctactgggcaggttcccggccacacatctggt

SEQ ID NO: 288972 - DNA, 120 bp, Artificial Sequence
  ENSG00000130829_16 (sequence is synthesized)
gggctgttttgttttttttttttcctcttcccccagatgtcttgacgggatcactggggctctttgtgagtgagggtggccaaactaccgccggaggagatggggtctcagagcgagagc

SEQ ID NO: 288973 - DNA, 120 bp, Artificial Sequence
  ENSG00000130829_17 (sequence is synthesized)
tgcggagggggaggggaagaagaaggcctcacttttgctgctgcggggcccacacagccgctgctactttggggggtggggaaggggccaagctgcagacacacacagtcattcatttct

SEQ ID NO: 288974 - DNA, 120 bp, Artificial Sequence
  ENSG00000130829_18 (sequence is synthesized)
gtccacacccctgtgggtggcgggtgtgcgtgtgtgtgcttgtgtgtgcgcacgtgtcggcgctcacacacacatgctagcccactgatgcacccagcccagggctggcagtctttgcag

SEQ ID NO: 288975 - DNA, 120 bp, Artificial Sequence
  ENSG00000130829_19 (sequence is synthesized)
cgtggggccgtctcaccctggagcctggagaggatctatgcttgtttgtttttgtaatccatatcatagttgctttctttaattgttccttctgaataaacagtttatttaagatactga

SEQ ID NO: 288976 - DNA, 120 bp, Artificial Sequence
  ENSG00000130829_20 (sequence is synthesized)
gccgccacccggggttccggtggcgttaggctgcagcagtggcgcttcccgccgcccgagcttcggaaacttcccggccgcgacgcagggaaccggcgcggagaaccgagcagagcggag

SEQ ID NO: 288977 - DNA, 120 bp, Artificial Sequence
  ENSG00000130829_21 (sequence is synthesized)
cgcctcctctgttcccctggcccacctggccctgggggagatctaggcctcgaacggcactcctcgcacgcacacccccagccagagtcggaagctcgaacttggggagcgttcgcgaga

SEQ ID NO: 288978 - DNA, 120 bp, Artificial Sequence
  ENSG00000130829_22 (sequence is synthesized)
agaccgagacaggagcagaaaggggcgcccgtggtccagcgtgtagggagccgatcgcccatggagggtctgggccgctcgtgcctgtggctgcgtcgggagctgtcgcccccgcggccg

SEQ ID NO: 288979 - DNA, 120 bp, Artificial Sequence
  ENSG00000130830_0 (sequence is synthesized)
gactggcccagccgcaccgcgtctcccgccttctccgcagccccgcaggccccgggccctgtcattcccagcgctgccctgtcttgcgttccagtgttccagcttctgcgagatgaccct

SEQ ID NO: 288980 - DNA, 120 bp, Artificial Sequence
  ENSG00000130830_1 (sequence is synthesized)
caaggcgagcgagggcgagagtgggggcagcatgcacacggcgctctccgacctctacctggagcatttgctgcagaagcgtagtcggccagaggctgtatcgcatccattgaatactgt

SEQ ID NO: 288981 - DNA, 120 bp, Artificial Sequence
  ENSG00000130830_2 (sequence is synthesized)
gaccgaggacatgtacaccaacgggtctcctgccccaggtagccctgcccaggtcaagggacaggaggtgcggaaagtgcgactcatacagtttgagaaggtcacagaagagcccatggg

SEQ ID NO: 288982 - DNA, 120 bp, Artificial Sequence
  ENSG00000130830_3 (sequence is synthesized)
aatcacgctgaagctgaatgaaaaacagtcctgtacggtggccagaattcttcatggtggcatgatccatagacaaggctcccttcacgtgggggatgagatcctagaaatcaatggcac

SEQ ID NO: 288983 - DNA, 120 bp, Artificial Sequence
  ENSG00000130830_4 (sequence is synthesized)
aaatgtgacaaatcattcagtggatcagctgcagaaggcgatgaaagaaaccaaaggaatgatctcattaaaagtaattcccaaccagcaaagccgtcttcctgcactacagatgttcat

SEQ ID NO: 288984 - DNA, 120 bp, Artificial Sequence
  ENSG00000130830_5 (sequence is synthesized)
gagagcgcagtttgactatgatcccaaaaaggacaatctgatcccttgcaaggaggcgggactgaagtttgctactggggacattatccagattatcaacaaggatgacagcaattggtg

SEQ ID NO: 288985 - DNA, 120 bp, Artificial Sequence
  ENSG00000130830_6 (sequence is synthesized)
gcagggacgggtggaaggctcctccaaggagtcagcaggattgatcccttcccctgagctgcaggaatggcgagtggcaagtatggctcagtcagctcctagcgaagccccgagctgcag

SEQ ID NO: 288986 - DNA, 120 bp, Artificial Sequence
  ENSG00000130830_7 (sequence is synthesized)
tccctttgggaagaagaagaagtacaaagacaaatatctggccaagcacagctcgatttttgatcagttggatgttgtttcctacgaggaagtcgttcggctccctgcattcaagaggaa

SEQ ID NO: 288987 - DNA, 120 bp, Artificial Sequence
  ENSG00000130830_8 (sequence is synthesized)
accctgtcccatatacaacacggccgccaaggaagagtgaggaagatgggaaggagtaccactttatctcaacggaggagatgacgaggaacatctctgccaatgagttcttggagtttg

SEQ ID NO: 288988 - DNA, 120 bp, Artificial Sequence
  ENSG00000130830_9 (sequence is synthesized)
gcagctaccaaggcaacatgtttggcaccaaatttgaaacagtgcaccagatccataagcagaacaagattgccatccttgacattgagccccagaccctgaaaattgttcggacagcag

SEQ ID NO: 288989 - DNA, 120 bp, Artificial Sequence
  ENSG00000130830_10 (sequence is synthesized)
aactttcgcctttcattgtgttcattgcacctactgaccagggcactcagacagaagccctgcagcagctgcagaaggactctgaggccatccgcagccagtacgctcactactttgacc

SEQ ID NO: 288990 - DNA, 120 bp, Artificial Sequence
  ENSG00000130830_11 (sequence is synthesized)
tctcactggtcaataatggtgttgatgaaacccttaagaaattacaagaagccttcgaccaagcgtgcagttctccacagtgggtgcctgtctcctgggtttactaagcttgtagaatgg

SEQ ID NO: 288991 - DNA, 120 bp, Artificial Sequence
  ENSG00000130830_12 (sequence is synthesized)
gggaacccactgtatgcccctctccagcatttggaattccacccgccttgctttaagacaaacagggctgctccaactagttttgtgtcagcttccagctctctgcagctatcctaattc

SEQ ID NO: 288992 - DNA, 120 bp, Artificial Sequence
  ENSG00000130830_13 (sequence is synthesized)
agccagtaaggttcagtcttcttgctcaggctcctgaagggttgattctcctgatagatggggccccactgatctggatttgaaaaggatttctagaaattgggggtaagaagtactacc

SEQ ID NO: 288993 - DNA, 120 bp, Artificial Sequence
  ENSG00000130830_14 (sequence is synthesized)
aaaatgtaactgctaatcaagggtgatgcacagcaaaagcaatggaccccatccctctaaagcctgccctcctttgccttcaactgtatatgctgggtatttcatttgtctttttatttt

SEQ ID NO: 288994 - DNA, 120 bp, Artificial Sequence
  ENSG00000130830_15 (sequence is synthesized)
ggagaaagcgtttttaactgcaactttctataatgccaaaatgacacatctgtgcaatagaatgatgtctgctctagggaaaccttcaaaagcaataaaaatgctgtgttgaaatgccaa

SEQ ID NO: 288995 - DNA, 120 bp, Artificial Sequence
  ENSG00000130830_16 (sequence is synthesized)
gcgtagtcggccagagcttcctttgagcaactgcctctgccctttgaaccctgctgcagatgtttcctctgaaggggctttcagagcggcaggcattgccactccagcactttgtctgat

SEQ ID NO: 288996 - DNA, 120 bp, Artificial Sequence
  ENSG00000130830_17 (sequence is synthesized)
ggtaggcatggaagggcagggacagatgggctcagccacacaagggatggcgaagacagtgctccttgggaatcttctgggggctcaggattgcttcagccttttaatggggtcagcctg

SEQ ID NO: 288997 - DNA, 120 bp, Artificial Sequence
  ENSG00000130830_18 (sequence is synthesized)
gaacaagaacagtagtactgggaatgatggaaagttgtattggggtaaagctcaaagctgcttattagaaggaatccattatgacagctatgtaggtttttttttttcactttccttttc

SEQ ID NO: 288998 - DNA, 120 bp, Artificial Sequence
  ENSG00000130830_19 (sequence is synthesized)
aattttctgaatcctcacgtgcaccccacctgggtccacctcacaaatgaaactaaaccttacaagtttctctactatttagcaacgaattatttttggttaggtttcatgctgtctgct

SEQ ID NO: 288999 - DNA, 120 bp, Artificial Sequence
  ENSG00000130830_20 (sequence is synthesized)
ggcagtgatacgctttgtaaatctcccttcccccaagcagtgactctgacctgaaacagagtaagtccttgcttcaaacccaggtatgtaggctttgcctctggcggactgctcaccttc

SEQ ID NO: 289000 - DNA, 120 bp, Artificial Sequence
  ENSG00000130830_21 (sequence is synthesized)
gtgggtcgcagccacattaagaatgccctgctcagccagaatccggagaagtttgtgtaccctgtcccatgtaagtagctcttaggcaccttggaggggaggtgacaggctggtaccact

SEQ ID NO: 289001 - DNA, 120 bp, Artificial Sequence
  ENSG00000130830_22 (sequence is synthesized)
attattaaaactaaacaaaatatggaaagataaaaatttgtgcccacaattcctccacctaacagaataactgttttcttattgttattcgtgctgtttgtctacataacagaagctata

SEQ ID NO: 289002 - DNA, 120 bp, Artificial Sequence
  ENSG00000130830_23 (sequence is synthesized)
ttgatactgccttaaaaattactaagtattaaagtttatacatataactttgtcattttactttttaaacattttctcatgttcctctgcaatttgcctaattctctttgagaactatcc

SEQ ID NO: 289003 - DNA, 120 bp, Artificial Sequence
  ENSG00000130830_24 (sequence is synthesized)
cactcttgatgttcaggctgcctctcattttcatggaatgtcttctaaatcaaagcagtgcctaggaaaggcccaaacgatctcaacagcagtcctagatatggagaagagtagcgccag

SEQ ID NO: 289004 - DNA, 120 bp, Artificial Sequence
  ENSG00000130830_25 (sequence is synthesized)
tgatcaggtggagaatttgataactcttccattcccagaagtgatgctgcatggtatagttgtgtatgttcccagaaagaaatacggtgattcctcacttaatattgtcaataggctctt

SEQ ID NO: 289005 - DNA, 120 bp, Artificial Sequence
  ENSG00000130830_26 (sequence is synthesized)
cgaagactgtgactttaagtgaaatgacatataacaagaaccagtttttttactcatcaacaatacaatgaaatgaagttgaactaaaccatgttagtcaacgaccagctgcatgtgatt

SEQ ID NO: 289006 - DNA, 120 bp, Artificial Sequence
  ENSG00000130830_27 (sequence is synthesized)
cacagctcgagtaagctttctgagccttcttgccccaggttcctggcagcattcacgtgtttcccagtctctgtaaccagcagaaaaggggaggtggtgcagtgcgcagcagaaggcgca

SEQ ID NO: 289007 - DNA, 120 bp, Artificial Sequence
  ENSG00000130830_28 (sequence is synthesized)
ttctacagaaagcatgtcatttcttctggtttctttttattgaatccatcttcacaagcttgctgcagtcaggccagtggatgtaaaggaggactagtggtgagcccacacctgctcatc

SEQ ID NO: 289008 - DNA, 120 bp, Artificial Sequence
  ENSG00000130830_29 (sequence is synthesized)
accccacccctcacacagaagtagatgtggtgggagaggggaagtgaggcaagaacacaggccagagggagaggccagggccaggtcatagggagcttcgtgcaccctccctagcgtttt

SEQ ID NO: 289009 - DNA, 120 bp, Artificial Sequence
  ENSG00000130830_30 (sequence is synthesized)
atagaaaaccagattctaaacctcatattactattttttaattctttcttcattttgcttttttacacatggatcattgagagttgtctcgttgctggagggacataagagttattccag

SEQ ID NO: 289010 - DNA, 120 bp, Artificial Sequence
  ENSG00000130830_31 (sequence is synthesized)
tgtcacattaggagcagaaagagatggccccaggagtgagtggggaagcagaaataaccagtacaggctcctccttcaagagaatcacatgtggttgtagattgaggggaaggggccagt

SEQ ID NO: 289011 - DNA, 120 bp, Artificial Sequence
  ENSG00000130830_32 (sequence is synthesized)
tgagagacaagtgtgatccggaaggcaaaggagacagtcaatggaagatggaaagaggggaggttgggaggattgtgtttcaagctacaatatctggagcatattttactgattagacaa

SEQ ID NO: 289012 - DNA, 120 bp, Artificial Sequence
  ENSG00000130830_33 (sequence is synthesized)
tttatatgagtaatagaaaatagtccaacttttaacaacatgagctgaaactaaaccaaagtactcttctttccaagtcatgaaaaggaaaccttaaatatatttccaagaaatcctgac

SEQ ID NO: 289013 - DNA, 120 bp, Artificial Sequence
  ENSG00000130830_34 (sequence is synthesized)
agggaaaatgataataggaattttctatgttaggctttgccccttaaaaattaaatgtgtcctgggcagatggagggatttcctggtgtgcatcactttctagcatcagctcttcaggag

SEQ ID NO: 289014 - DNA, 120 bp, Artificial Sequence
  ENSG00000130830_35 (sequence is synthesized)
cccacgggaggaacccctgtattaaagtcaatgcaccaaaggcagctagggtttccatacagacaccatggtccaagccctcatgaaagggtgaggacctggagtttgtcggggatttgg

SEQ ID NO: 289015 - DNA, 120 bp, Artificial Sequence
  ENSG00000130830_36 (sequence is synthesized)
gggtggggtttgattcagggattaataatttactccctgttcagtggtgtggggcatgaagcttataatcctccaaactggtagcatttttgtgagtgtgccaagagactttttgtggct

SEQ ID NO: 289016 - DNA, 120 bp, Artificial Sequence
  ENSG00000130830_37 (sequence is synthesized)
gtcaattcaaataagaatgaggccaaacttatgaaataagttttcagagcctcttgaatgttagaattgcagattgtggactggctgtgggccttgctcctgatttcatacgttgctttg

SEQ ID NO: 289017 - DNA, 120 bp, Artificial Sequence
  ENSG00000130830_38 (sequence is synthesized)
atttgacacaatctgtttcataacatgctgtaaatcctggtttctcttctatggtatcttgagttacattgacagctcctgtttgaacttttgttcttttgtggattgatttttcatttc

SEQ ID NO: 289018 - DNA, 120 bp, Artificial Sequence
  ENSG00000130844_0 (sequence is synthesized)
ggggcacagtccaatgaggagcgagccgggtggccggctgaggggcgtgcttcatgctcgcgggatttttaaaaatggtttctcctggatcttatcccaactgcgcctgagaccttgttt

SEQ ID NO: 289019 - DNA, 120 bp, Artificial Sequence
  ENSG00000130844_1 (sequence is synthesized)
cacctcctgatgtgctgggtgtggttaggcctcgagccgggagctatttgcctcccaggaggaagccagggcagggttccgcggggaatggcggtgagggagccactcgggacgcggagg

SEQ ID NO: 289020 - DNA, 120 bp, Artificial Sequence
  ENSG00000130844_2 (sequence is synthesized)
ggaatggcggtgagggagccactcgggacgcggaggccctaaaatgaagaagcttcggcctgaggcttcgggagcggcgagcagggaagtgggagtgtgtgtgagtgtgtgtgtgtgtgt

SEQ ID NO: 289021 - DNA, 120 bp, Artificial Sequence
  ENSG00000130844_3 (sequence is synthesized)
tggggccccgccgtggcccagtgactgagataattgtcttcgtctgtggggtaatgcgaacaagccccgttcccctaagccgtgatgcatgcggggttgacgcggccgggctctgtcccc

SEQ ID NO: 289022 - DNA, 120 bp, Artificial Sequence
  ENSG00000130844_4 (sequence is synthesized)
ataaactgtgacacaggtgtgtgtagacgtctatgagggccatagcgccgggctgtaagggcatctgtaggggtgacgcagccgggctgtgtctctgcacctccgttctgtgcgaggtca

SEQ ID NO: 289023 - DNA, 120 bp, Artificial Sequence
  ENSG00000130844_5 (sequence is synthesized)
atgctggtggggtctgcagaggtggcacggccaggacgggtctccgtgtctctgaaatgtgcctttgcacttctgtcaggttgacagggacaggcagtgtccctctggtgtgagcgtctg

SEQ ID NO: 289024 - DNA, 120 bp, Artificial Sequence
  ENSG00000130844_6 (sequence is synthesized)
tgggtgtgaaagggccagcgagtgtgcggctgtgactggtcgggatcgggcctgggtgcatggccttttgagtgagcacaggtgtgtgcgaccatgtcacctgtctttctagtgtctccg

SEQ ID NO: 289025 - DNA, 120 bp, Artificial Sequence
  ENSG00000130844_7 (sequence is synthesized)
ttgcttcctgtgccttggccttccagccatgtggtacctgctagggagcagtggtcccaaagtgacgtgagaggctctacgctattgtgaaaatgaccaagaagaaggcttcacaagtca

SEQ ID NO: 289026 - DNA, 120 bp, Artificial Sequence
  ENSG00000130844_8 (sequence is synthesized)
cgagatggcagttttggagccagaagtgctctccgtgcacactacctggacgacaagaggaagtaacctcaagaatagaattccttttggggaagaaagagctggccttcaggaaaagca

SEQ ID NO: 289027 - DNA, 120 bp, Artificial Sequence
  ENSG00000130844_9 (sequence is synthesized)
tcccggaggaggaagaagaagtgttatatgtcctaaagtaaggtttcaggccagcatccttcagaaaaagcatccccgaggaggaagacgaatcgttaaacatctgaaagggtcaggcca

SEQ ID NO: 289028 - DNA, 120 bp, Artificial Sequence
  ENSG00000130844_10 (sequence is synthesized)
gcatccttcagaaaaagcatccccgaggaggaagacgaatcgttaaacatcttaggtcagctctagcctctcggaatttgtcttcttcagtggaaaccccgagaagactgatcagttctt

SEQ ID NO: 289029 - DNA, 120 bp, Artificial Sequence
  ENSG00000130844_11 (sequence is synthesized)
cagttctaaaacaatggcccagggtttggtgacgttcgccgacgtagccatagacttttctcaggaggagtgggcctgtctgaactctgctcagagggacctgtactgggacgtgatgct

SEQ ID NO: 289030 - DNA, 120 bp, Artificial Sequence
  ENSG00000130844_12 (sequence is synthesized)
ggagaactacagtaacttggtctcactggatttggagtcagcatatgaaaataagagtttacctacagaaaaaaacattcatgaaataagggcttccaaaaggaattcagatagaagaag

SEQ ID NO: 289031 - DNA, 120 bp, Artificial Sequence
  ENSG00000130844_13 (sequence is synthesized)
taaatcccttggccgtaactggatatgtgaaggtacgcttgaaagaccacagcgctccagagggaggtatgtcaatcagatgatcatcaattatgtcaaaagacctgctactagagaagg

SEQ ID NO: 289032 - DNA, 120 bp, Artificial Sequence
  ENSG00000130844_14 (sequence is synthesized)
cacccctcctagaacacatcagagacatcataaggagaattcctttgaatgtaaggactgtgggaaggcctttagtcgtggctatcaacttagtcaacatcagaaaatccatactggtga

SEQ ID NO: 289033 - DNA, 120 bp, Artificial Sequence
  ENSG00000130844_15 (sequence is synthesized)
gaaaccttatgaatgtaaagaatgtaagaaggccttccgttggggcaatcagcttactcaacatcaaaaaattcatactggggagaagccctacgaatgtaaagactgtgggaaggcttt

SEQ ID NO: 289034 - DNA, 120 bp, Artificial Sequence
  ENSG00000130844_16 (sequence is synthesized)
tcgatggggctcaagcctcgttattcataagaggattcatactggtgaaaaaccctatgaatgtaaagactgtggaaaggcctttcggcgtggtgatgagctcactcagcaccagagatt

SEQ ID NO: 289035 - DNA, 120 bp, Artificial Sequence
  ENSG00000130844_17 (sequence is synthesized)
ccacactggggagaaagactacgaatgcaaagactgtgggaagacctttagccgtgtgtataaacttattcagcacaagagaattcatagtggggagaagccttacgagtgtaaagactg

SEQ ID NO: 289036 - DNA, 120 bp, Artificial Sequence
  ENSG00000130844_18 (sequence is synthesized)
tgggaaggcttttatttgtggttcaagcctcattcagcataaaagaattcacacaggtgagaaaccctatgaatgtcaagaatgtgggaaggcctttactcgagtcaattaccttactca

SEQ ID NO: 289037 - DNA, 120 bp, Artificial Sequence
  ENSG00000130844_19 (sequence is synthesized)
gcatcagaagatccacaccggtgagaagcctcacgaatgtaaggagtgtgggaaggcctttcgctggggttcgagcctcgttaagcacgagaggatacatacgggcgagaagccgtacaa

SEQ ID NO: 289038 - DNA, 120 bp, Artificial Sequence
  ENSG00000130844_20 (sequence is synthesized)
gtgcacagaatgtgggaaggccttcaattgtggctatcacctcactcagcacgagagaatccacacaggcgaaaccccgtataaatgtaaggagtgtgggaaggctttcatttatggatc

SEQ ID NO: 289039 - DNA, 120 bp, Artificial Sequence
  ENSG00000130844_21 (sequence is synthesized)
gcctcgtgaaacatgagagaattcataccggggtgaaaccctatgggtgtacagaatgtgggaagagctttagtcacggccatcagcttacacaacatcagaaaacgcacagtggggcga

SEQ ID NO: 289040 - DNA, 120 bp, Artificial Sequence
  ENSG00000130844_22 (sequence is synthesized)
aatcctacgaatgtaaggagtgcgggaaggcatgtaaccacctaaaccatctccgagaacatcagaggatccacaacagttgaagagccttttgaacgcagtagcccgctcgtatctatg

SEQ ID NO: 289041 - DNA, 89 bp, Artificial Sequence
  ENSG00000130844_23 (sequence is synthesized)
ttcagaattttaagtctcaaatggtgtgcccttctgagtagcgtgatgaaatctctcgctgtccggctccagccggccggggatgtgag

SEQ ID NO: 289042 - DNA, 120 bp, Artificial Sequence
  ENSG00000130844_24 (sequence is synthesized)
aatctctcgctgtccggctccagccggccggggatgtgagtcatcccttggtccagcacatccacgctgtatacgccacccaccctgctagtgacttagtagccgtcttggtgatcagat

SEQ ID NO: 289043 - DNA, 120 bp, Artificial Sequence
  ENSG00000130844_25 (sequence is synthesized)
caactatcccagcatcacagtgcctgtgcccaagcagtcctcactttgcttaacagtggccccagagagcaggagtagtgatgctggtgattcggatatgccaaagagaagccacaaagt

SEQ ID NO: 289044 - DNA, 120 bp, Artificial Sequence
  ENSG00000130844_26 (sequence is synthesized)
gcttccttttaaatgaaaaggtgaaagttctcaacttaaaaaagaaaagaaaaaaatcatatactgaggttgctaagatctacatgacaataagatattttgggagagagatacgttcac

SEQ ID NO: 289045 - DNA, 120 bp, Artificial Sequence
  ENSG00000130844_27 (sequence is synthesized)
tacatgacaataagatattttgggagagagatacgttcacataattttattacatatattgttacaattgttctattttgttagttactgttggtaatctcttactgtgcctaatttata

SEQ ID NO: 289046 - DNA, 120 bp, Artificial Sequence
  ENSG00000130844_28 (sequence is synthesized)
atatagtatcgtatatatgtacaggaaaaaaacgtactatctgtggtttcaggtgtccactgcgggtcttcaaacgtacccccctcaggtgagaggggactgctgtacaaagaatatagg

SEQ ID NO: 289047 - DNA, 120 bp, Artificial Sequence
  ENSG00000130844_29 (sequence is synthesized)
aaagaatataggaaggcctctagactacatccattccttcctcaacaggaggaaaattcctggtacagtttaacgtaaggcttcactgatcactgttgtttttgtttttgtttttgtttt

SEQ ID NO: 289048 - DNA, 120 bp, Artificial Sequence
  ENSG00000130844_30 (sequence is synthesized)
attacaggcgtgagccactgcacctagcccactgatcactcttctgcttacagaatatcagaagtcattctagaggcaaatttgaagagtggaaaaatcactttttctgaatgatcttgt

SEQ ID NO: 289049 - DNA, 120 bp, Artificial Sequence
  ENSG00000130844_31 (sequence is synthesized)
ttttggtgtagatgtttttattgtgtgggttagtttaatgaatacataaagactaccagtaccattctgtctttactccgtggcatctgtggaataaccctgctaatgtaacacgtgaga

SEQ ID NO: 289050 - DNA, 120 bp, Artificial Sequence
  ENSG00000130844_32 (sequence is synthesized)
aagcctttggtcatgccacccactctaccagttgtccccaccatcccccgccctcctccctgtgagacactgggccaaaggctcactacccctgtgcgttgtccagcacacagacactat

SEQ ID NO: 289051 - DNA, 120 bp, Artificial Sequence
  ENSG00000130844_33 (sequence is synthesized)
gtgcattatttgtacataaggataatcacatctacctgagactgctatcatggaaattaaatgtttggtacatgtaaagtctttgaaagtgtaactggaatattgtgtaattttaataaa

SEQ ID NO: 289052 - DNA, 120 bp, Artificial Sequence
  ENSG00000130844_34 (sequence is synthesized)
taataactattgttgtttttatgatcattactaccatttgtgttgccattagtgaatttttacaagaaaactccctgtgggtgcaatgagtctggaaaagaccattgagtcttctagaag

SEQ ID NO: 289053 - DNA, 120 bp, Artificial Sequence
  ENSG00000130844_35 (sequence is synthesized)
aaaacattaagagattattggcacagccgtgggttacgcaatgatttcttagtacacaaaacacagcaaacataaaaagttgttacacttcatcaaaagtacaaagttctgttcatcaaa

SEQ ID NO: 289054 - DNA, 120 bp, Artificial Sequence
  ENSG00000130844_36 (sequence is synthesized)
tgatgctgttaagatagggaaaagacaagaaacaggactggaagaagatgtttgctctaaggtacacctgacaaaggaactctcatagaaaatataaagaatccctcaagttgaaaaaaa

SEQ ID NO: 289055 - DNA, 120 bp, Artificial Sequence
  ENSG00000130844_37 (sequence is synthesized)
aatcaatttaaaggggagaaaacttcagcacgtctcaacagaagaccaccaaatggccaataagtaagtgaaaatgtattcaatgtcattgctcctcaaggaactgtagagtaaaaccac

SEQ ID NO: 289056 - DNA, 120 bp, Artificial Sequence
  ENSG00000130844_38 (sequence is synthesized)
aatgtgctgtcactctagacagtcaccaggatgattaaatttaaatcacaataacaaggctgatttcagatgtctcaccacaaagaaggaggataagggagcgaggtgatggatatgtta

SEQ ID NO: 289057 - DNA, 120 bp, Artificial Sequence
  ENSG00000130844_39 (sequence is synthesized)
attagcttgatttaatccttccacattgtatacatgtatcagaacatcacattgtactccatcaatataatacaattattatttgtcaatcaaatattaataaaatcaaagatgagcagg

SEQ ID NO: 289058 - DNA, 120 bp, Artificial Sequence
  ENSG00000130844_40 (sequence is synthesized)
gcggccgctgggtgcgcgtgcgcatgcgcgctggcctccagggggtggcgggaccgagtgtgtgacgcacttgcgtgggagtacgaggctgacgcggcggccctgtccccgtaactgtga

SEQ ID NO: 289059 - DNA, 120 bp, Artificial Sequence
  ENSG00000130844_41 (sequence is synthesized)
cacgggtgcacgcgagcgtcattgggggcgatgggggccgtgctgggtgcgcgtttgcaccagtgacgcagccgctgcatctccgccagtccgcgcaggccagcatccttcagaaaaagc

SEQ ID NO: 289060 - DNA, 120 bp, Artificial Sequence
  ENSG00000130844_42 (sequence is synthesized)
gggccttctgggtgacgcaggtgtgtgtgacagcacaacctgtagctccagcgtctctgctgcttcccctgccttcacctcctaaccaagcggtacctgcctgagaacaagggccgcgga

SEQ ID NO: 289061 - DNA, 120 bp, Artificial Sequence
  ENSG00000130844_43 (sequence is synthesized)
atgcgcgctggcctccatgggtggcgggaccgactgtgtgacgcacttgcgtgggagtgcgaggctgacgcggcggctctatctcccgtaactgtgacacgggtgcacgcaagcgtcatt

SEQ ID NO: 289062 - DNA, 120 bp, Artificial Sequence
  ENSG00000130844_44 (sequence is synthesized)
aggtgtgtgtgacagtgcaacttgtagctccagcgtctctgctgcttcccctgccttcacctcctaaccaagcggtacctgcctgagaacaagggccgcggagggacgtgagcgcctgag

SEQ ID NO: 289063 - DNA, 77 bp, Artificial Sequence
  ENSG00000130844_45 (sequence is synthesized)
gatttcaagtagcatccttcagaaaaagcatccccgaggaggaagacgaatcgttaaacatctgaaagggtcaggcc

SEQ ID NO: 289064 - DNA, 120 bp, Artificial Sequence
  ENSG00000130844_46 (sequence is synthesized)
gagtatccttttttttttatattaaatgatatgtgtttataagacttaagaccaaacattaaaggtagatgaccaagatttgagtcctgtttctgcctcttagctttttgagccttctga

SEQ ID NO: 289065 - DNA, 120 bp, Artificial Sequence
  ENSG00000130844_47 (sequence is synthesized)
agataggcttgtgaggagggtgaaatgcattaacacgcataaaacccatagacgcgcacccctgagtgggagtgcacagtgagtgctgctgttttgtgctaagtctggatgtctgtacat

SEQ ID NO: 289066 - DNA, 120 bp, Artificial Sequence
  ENSG00000130844_48 (sequence is synthesized)
ggtgcgcgtggctccgaggggagacgggcacggggcttctgacggtgacgcacttgctggagagtgtggggtgacacagccgggctctccccataactggtgaccgggggtgctccagag

SEQ ID NO: 289067 - DNA, 120 bp, Artificial Sequence
  ENSG00000130844_49 (sequence is synthesized)
tgacgttagtacttggaatgagagcgggactcacggggcataactgctacctgtacattgtttacaatgcagcaagcaagggacaccgaatagcagctccggcagcctgtgctagcggcc

SEQ ID NO: 289068 - DNA, 120 bp, Artificial Sequence
  ENSG00000130844_50 (sequence is synthesized)
tgcagagaattccaggtgacgctccagaggggctaggagaggatacccttctgaggacagccatggctcgcccggcatcaccccactcaagaggccagacggggtcccagctggggtgac

SEQ ID NO: 289069 - DNA, 120 bp, Artificial Sequence
  ENSG00000130844_51 (sequence is synthesized)
gcccctgcctgggaccgtcccggactacatttcccagagaccatccaggagtacgccgtgctgcatgctggaacacggggcttggggctctggtttcccccgacggccccgcgtcctctt

SEQ ID NO: 289070 - DNA, 120 bp, Artificial Sequence
  ENSG00000130844_52 (sequence is synthesized)
ggtgatcgggccttctgggtgacgcaggtgtgtgtgacagcacaacctgtagttccagcgtctctgtgctgagatgggtgatcgggccttctgggtgacgcaggtgtgtgtgacaacaca

SEQ ID NO: 289071 - DNA, 120 bp, Artificial Sequence
  ENSG00000130844_53 (sequence is synthesized)
caaggaacatcctgatgagatcccaccggaaaaagggccaaaccgcctgatcataagaacatcttgtcaatatcctgccgggcagcaagccatacagcccaggcctctcccgcccatacc

SEQ ID NO: 289072 - DNA, 120 bp, Artificial Sequence
  ENSG00000130844_54 (sequence is synthesized)
tctacaactttttggaagagtttcagaagaatattttgtgaatatttggtagaatacagcaatgaagccatcatcaagtcctgggctgttctttgatcagaaattctgtattatttgttc

SEQ ID NO: 289073 - DNA, 120 bp, Artificial Sequence
  ENSG00000130844_55 (sequence is synthesized)
aatctttttactcattactgatgtgttcagatttttctgtttattcatgattccatcttggtaggttgtgtgtttctaggaattaatcttctaggttatccaacttttttggcatctaat

SEQ ID NO: 289074 - DNA, 120 bp, Artificial Sequence
  ENSG00000130844_56 (sequence is synthesized)
agttgtaatgtctccattttcatttctgattttattgatttttgagtcttcccttttttgtctttgaaagtctcatggtttttcaatgttgtttatcttttcaaaaaatcaactcttagt

SEQ ID NO: 289075 - DNA, 120 bp, Artificial Sequence
  ENSG00000130844_57 (sequence is synthesized)
tttctcaagatttgttgacccttgaacaacatggagctggggcgacaactcaccatgcagtcaaaactccacatttaacttttgactccctaaaaatgtaatagcctactgttgaatgga

SEQ ID NO: 289076 - DNA, 120 bp, Artificial Sequence
  ENSG00000130844_58 (sequence is synthesized)
gtaaggtttcaggtgtttattgctataaacttccctcttagaactgcttttcctgcgtttctcaagatttggctggagtgcaatggtacaagctcggctcactgcaacctctgcctcccg

SEQ ID NO: 289077 - DNA, 68 bp, Artificial Sequence
  ENSG00000130844_59 (sequence is synthesized)
tacaacctctgcctcccaggttcaagcgaatctcctgactcagcctcctgagaaactgagattacaat

SEQ ID NO: 289078 - DNA, 120 bp, Artificial Sequence
  ENSG00000130844_60 (sequence is synthesized)
agcggtacctgcctgagaacaagggccgcggaaggacgggagtgcctgagccctgccaggaaattcaccaacaagaaggcagaaacagccatgaggtgacgctttcagagctagaagtgc

SEQ ID NO: 289079 - DNA, 120 bp, Artificial Sequence
  ENSG00000130844_61 (sequence is synthesized)
tctccactcagggcgcctgagtgacaggagacggtggcctcaggagtagaattcctcctgtagagggacacgtccctgatgtgggagacagggagaggggcagctccacgcttcatcatc

SEQ ID NO: 289080 - DNA, 120 bp, Artificial Sequence
  ENSG00000130856_0 (sequence is synthesized)
gcctggaaactacaaaggattgtgttaattttgtgtttaggaagaaagaggtaatgggtaggaatcaatgtaaacttattcataggccacaccaaaccaggaattcttgtcgtgattgca

SEQ ID NO: 289081 - DNA, 120 bp, Artificial Sequence
  ENSG00000130856_1 (sequence is synthesized)
cttggtagagttaacacacgtgcacattacggaaacgttggtgaccaacaggcgtttcagcgagctttcgcacacctcatgggcctttgtgggctgctggagagatgttggctgcaccat

SEQ ID NO: 289082 - DNA, 120 bp, Artificial Sequence
  ENSG00000130856_2 (sequence is synthesized)
gacccagatggagttttaacattgaatgcggagaacactaattatgcctatcaagttccaaacttccataaatgtgaaatctgtctactatcttttccaaaagaatcccagtttcaacgc

SEQ ID NO: 289083 - DNA, 120 bp, Artificial Sequence
  ENSG00000130856_3 (sequence is synthesized)
cacatgagggatcacgagcgaaatgacaagccacatcgatgtgaccagtgcccccaaacatttaatgttgaattcaacctgacacttcataaatgcacccacagcggggaagatcctacc

SEQ ID NO: 289084 - DNA, 120 bp, Artificial Sequence
  ENSG00000130856_4 (sequence is synthesized)
tgccctgtgtgtaacaagaaattctccagagtggctagtctcaaagcgcatattatgctacatgaaaaggaagagaatctcatctgttctgagtgtggggatgagtttactctgcagagt

SEQ ID NO: 289085 - DNA, 120 bp, Artificial Sequence
  ENSG00000130856_5 (sequence is synthesized)
cagctggccgtgcacatggaggagcaccgccaggagctggctggaacccggcagcatgcctgcaaggcctgcaagaaagagttcgagacctcctcggagctgaaggaacacatgaagact

SEQ ID NO: 289086 - DNA, 120 bp, Artificial Sequence
  ENSG00000130856_6 (sequence is synthesized)
cattacaaaattagggtatcaagtacaaggtcttataaccggaatatcgacagaagtggattcacgtattcgtgtccgcactgtggaaagacgtttcaaaagccaagccagttaacgcga

SEQ ID NO: 289087 - DNA, 120 bp, Artificial Sequence
  ENSG00000130856_7 (sequence is synthesized)
cacattaggatacacacaggtgaaaggccgttcaaatgtagtgaatgtggaaaggcttttaaccagaagggggcactgcagacccacatgatcaagcacacaggtgaaaaaccccatgcc

SEQ ID NO: 289088 - DNA, 120 bp, Artificial Sequence
  ENSG00000130856_8 (sequence is synthesized)
tgtgccttctgtcctgccgccttctctcagaaagggaatcttcagtcgcacgtgcagcgagtccactcagaggtcaagaatggtcctacctataactgtacagaatgtagttgtgtattt

SEQ ID NO: 289089 - DNA, 120 bp, Artificial Sequence
  ENSG00000130856_9 (sequence is synthesized)
aaaagtttaggcagcttaaacacgcatatcagcaagatgcatatgggtgggccacagaattcaacaagttctacagagactgctcatgttttaacggccacactttttcagacgttacct

SEQ ID NO: 289090 - DNA, 120 bp, Artificial Sequence
  ENSG00000130856_10 (sequence is synthesized)
cttcaacagacggaagcccaagccacgtcggcctcaagccagccgagctcccaggcggtgagcgacgtcatccagcagctcctggagctctcagagccggcgccggtggagtcggggcag

SEQ ID NO: 289091 - DNA, 120 bp, Artificial Sequence
  ENSG00000130856_11 (sequence is synthesized)
tccccgcagcctgggcagcagctgagcatcacagtgggcatcaaccaggacattttacagcaagccttagaaaacagtgggctgtcttcaattccagctgcagcacatcctaatgactcc

SEQ ID NO: 289092 - DNA, 120 bp, Artificial Sequence
  ENSG00000130856_12 (sequence is synthesized)
tgccatgccaagacctctgcaccacacgctcaaaacccagatgtttccagcgtttcaaatgagcagacggaccccacagacgcagagcaagaaaaagaacaggaaagcccggagaaactg

SEQ ID NO: 289093 - DNA, 120 bp, Artificial Sequence
  ENSG00000130856_13 (sequence is synthesized)
gataaaaaagaaaaaaaaatgataaagaagaagtcaccgtttctacctggctccatccgcgaggagaacggcgtgcgctggcatgtgtgtccctactgcgccaaggagttccgcaagccc

SEQ ID NO: 289094 - DNA, 120 bp, Artificial Sequence
  ENSG00000130856_14 (sequence is synthesized)
agcgacctggtccgccacatccgcatccacacccacgagaagcccttcaagtgcccgcagtgcttccgcgccttcgccgtgaagagcacgctgacagcgcacatcaagacgcacaccggc

SEQ ID NO: 289095 - DNA, 120 bp, Artificial Sequence
  ENSG00000130856_15 (sequence is synthesized)
atcaaggcgttcaagtgccagtactgcatgaagagcttctccacctctggcagcctcaaggtgcacattcgcctgcacacaggagttagaccttttgcttgtcctcactgtgacaaaaaa

SEQ ID NO: 289096 - DNA, 120 bp, Artificial Sequence
  ENSG00000130856_16 (sequence is synthesized)
tttcgaacctcaggccataggaagactcacattgcttcccactttaaacatacggaattaaggaaaatgaggcaccagcgtaaacctgcaaaggtccgtgttggcaagacgaatattcca

SEQ ID NO: 289097 - DNA, 120 bp, Artificial Sequence
  ENSG00000130856_17 (sequence is synthesized)
gtccctgatattcctttgcaggaaccaatcctcataactgacttaggtctcatccagcccattccaaaaaaccagtttttccaaagctatttcaataataattttgtcaatgaagcagat

SEQ ID NO: 289098 - DNA, 120 bp, Artificial Sequence
  ENSG00000130856_18 (sequence is synthesized)
agaccatacaagtgtttttactgtcatcgtgcatataaaaaatcttgccaccttaaacaacacatcagatcccatacaggtgaaaaaccttttaaatgttctcagtgtggaagaggcttt

SEQ ID NO: 289099 - DNA, 120 bp, Artificial Sequence
  ENSG00000130856_19 (sequence is synthesized)
gtttctgcaggcgtgctcaaagcacacatcagaacacacacaggactgaaatctttcaagtgtctgatatgtaatggggctttcactactggtggcagcttacggcgacacatgggtatc

SEQ ID NO: 289100 - DNA, 120 bp, Artificial Sequence
  ENSG00000130856_20 (sequence is synthesized)
cacaacgaccttcgtccctatatgtgtccctattgccaaaaaacatttaagacttcactaaattgcaaaaagcacatgaaaacccacagatatgagcttgcccagcagctccaacagcat

SEQ ID NO: 289101 - DNA, 120 bp, Artificial Sequence
  ENSG00000130856_21 (sequence is synthesized)
cagcaggcagcctcgatagatgacagcactgtagaccagcagagcatgcaggcctccactcaaatgcaggtggagatcgagagcgacgagctgccgcagacggcagaggtggtcgcagcg

SEQ ID NO: 289102 - DNA, 120 bp, Artificial Sequence
  ENSG00000130856_22 (sequence is synthesized)
aaccccgaggccatgctggacctggagcctcagcatgtggtgggcacggaggaagcagggctgggccagcagttggcagatcagcccctggaagcagatgaagatgggtttgtggctcca

SEQ ID NO: 289103 - DNA, 120 bp, Artificial Sequence
  ENSG00000130856_23 (sequence is synthesized)
caggaccctctgcgagggcacgtagaccagtttgaagagcagagccctgcgcaacagtccttcgaaccagcagggctaccccaaggttttacagtgactgatacgtaccatcagcagcct

SEQ ID NO: 289104 - DNA, 120 bp, Artificial Sequence
  ENSG00000130856_24 (sequence is synthesized)
cagtttccacctgtccaacagctacaggattccagcacacttgagtctcaggccctctccacaagcttccaccagcagagcttgctgcaggctcccagctctgatgggatgaatgtaaca

SEQ ID NO: 289105 - DNA, 120 bp, Artificial Sequence
  ENSG00000130856_25 (sequence is synthesized)
actcgcttgattcaggagtcatcccaagaggaactggacctgcaggcacaaggttcccagtttctggaggacaacgaggaccagagcaggcgctcttacaggtgtgactattgcaacaaa

SEQ ID NO: 289106 - DNA, 120 bp, Artificial Sequence
  ENSG00000130856_26 (sequence is synthesized)
ggctttaagaagtccagccacctgaagcagcatgtgcggtcgcacaccggggaaaagccctacaagtgcaagctctgtggacgcggctttgtttcctctggggtcctcaagtcccacgag

SEQ ID NO: 289107 - DNA, 120 bp, Artificial Sequence
  ENSG00000130856_27 (sequence is synthesized)
aagacacacacaggagtgaaggcgttcagctgcagtgtgtgcaatgcttccttcaccaccaatggcagcctcacccggcacatggccacacatatgagcatgaagccttataagtgtccg

SEQ ID NO: 289108 - DNA, 120 bp, Artificial Sequence
  ENSG00000130856_28 (sequence is synthesized)
ttttgtgaggagggtttccgaactacagtgcattgtaaaaagcacatgaagagacaccaaacagtcccctctgctgtgtcagccactggagagacagaaggaggagacatttgtatggag

SEQ ID NO: 289109 - DNA, 120 bp, Artificial Sequence
  ENSG00000130856_29 (sequence is synthesized)
gaagaggaagaacattctgacagaaatgcatcacggaagtctcgtcctgaggtcatcactttcacggaggaggagacagcccagttagccaagatccggccgcaggagagcgccacggtg

SEQ ID NO: 289110 - DNA, 120 bp, Artificial Sequence
  ENSG00000130856_30 (sequence is synthesized)
tcagagaaggtcctggtgcagtccgcggcagaaaaggaccgcatcagtgagctgagggacaagcaggcggagctgcaggacgagcccaagcacgccaactgctgcacatactgccccaag

SEQ ID NO: 289111 - DNA, 120 bp, Artificial Sequence
  ENSG00000130856_31 (sequence is synthesized)
agcttcaagaaacctagcgacctggtgaggcatgttcgaatccatactggagaaaagccatacaaatgtgatgaatgtggaaagagttttactgtgaaatccactctcgattgtcatgtg

SEQ ID NO: 289112 - DNA, 120 bp, Artificial Sequence
  ENSG00000130856_32 (sequence is synthesized)
aagactcacacaggtcagaagctcttcagctgtcacgtctgcagcaacgccttctccacgaagggaagtctgaaggtccacatgcgcctgcacacgggagccaagcccttcaaatgcccg

SEQ ID NO: 289113 - DNA, 120 bp, Artificial Sequence
  ENSG00000130856_33 (sequence is synthesized)
aagcctatgactcgaagctcatcggaaggactgcagcctgtaaacctcctcaactcctcctctactgacccaaacgtgtttatcatgaacaactctgttctaacaggacagtttgatcag

SEQ ID NO: 289114 - DNA, 120 bp, Artificial Sequence
  ENSG00000130856_34 (sequence is synthesized)
aatctgctgcaaccaggactggtgggccaagctattctccctgcctctgtgtcagctgggggtgacctgaccgtgtctctgacagatgggagcctggctaccctagaaggcatccagtta

SEQ ID NO: 289115 - DNA, 120 bp, Artificial Sequence
  ENSG00000130856_35 (sequence is synthesized)
cagttggctgctaacttggttggaccaaatgtacagatttctggaatcgatgctgccagcattaataacattacgttgcagattgatccaagcattctgcagcagacgctacagcagggc

SEQ ID NO: 289116 - DNA, 120 bp, Artificial Sequence
  ENSG00000130856_36 (sequence is synthesized)
aacctattggctcagcagctcacgggggagcctggcctggccccacagaacagctctctccagacatcggacagcacggtccctgccagtgttgtcatccagcccatctcaggcctgtcc

SEQ ID NO: 289117 - DNA, 120 bp, Artificial Sequence
  ENSG00000130856_37 (sequence is synthesized)
ttacagcccacagtgacctctgcgaacctgaccataggcccgctgtctgagcaggattcagtgctgaccactaacagcagtgggacccaagacctcactcaagtgatgacttcgcaaggt

SEQ ID NO: 289118 - DNA, 120 bp, Artificial Sequence
  ENSG00000130856_38 (sequence is synthesized)
ctagtgtccccctccggcggtccccacgagatcaccctgaccattaacaactccagcctgagccaggtcctggcacaggccgctgggcccactgccacgtcttcctcggggtctccacag

SEQ ID NO: 289119 - DNA, 120 bp, Artificial Sequence
  ENSG00000130856_39 (sequence is synthesized)
gaaattaccctgactatctccgaacttaacactacaagcggaagccttccttcaacaacaccgatgtctccatcggccatctcgactcagaacctggtcatgtcctcgtcgggcgtggga

SEQ ID NO: 289120 - DNA, 120 bp, Artificial Sequence
  ENSG00000130856_40 (sequence is synthesized)
ggtgacgctagtgtcacgctgacgctggccgatactcagggtatgctatctggaggcctggacactgtcacactcaacatcacctctcagggtcagcagttcccagcgctcctcacggat

SEQ ID NO: 289121 - DNA, 120 bp, Artificial Sequence
  ENSG00000130856_41 (sequence is synthesized)
ccctctctctcgggccagggtggagcaggctcgccgcaagtcatactagtgagccacacgccacagtcagcgtctgctgcttgtgaagaaatagcctaccaggtagctggcgtctctggg

SEQ ID NO: 289122 - DNA, 120 bp, Artificial Sequence
  ENSG00000130856_42 (sequence is synthesized)
aacctggccccgggcaaccagccagagaaggagggccgggcgcaccagtgcctggagtgtgaccgcgccttctcatcggcggcggtgctcatgcaccacagcaaggaggtgcatggccgg

SEQ ID NO: 289123 - DNA, 120 bp, Artificial Sequence
  ENSG00000130856_43 (sequence is synthesized)
gagcgcatccacggctgccccgtgtgcaggaaggccttcaagcgcgccacgcacctcaaggagcacatgcagacacaccaggccggcccctctttgagctcccagaagccaagagtgttt

SEQ ID NO: 289124 - DNA, 120 bp, Artificial Sequence
  ENSG00000130856_44 (sequence is synthesized)
aaatgtgacacttgtgagaaggcatttgccaaaccaagccagctggagcgccacagccgcatacatacaggggagcggccgttccattgcacgctttgtgagaaagccttcaaccagaag

SEQ ID NO: 289125 - DNA, 120 bp, Artificial Sequence
  ENSG00000130856_45 (sequence is synthesized)
agtgcgctgcaggtgcacatgaagaagcacacgggggagcggccctacaagtgtgcctactgcgtcatgggcttcacgcagaagagcaacatgaagctgcacatgaagcgggcgcacagc

SEQ ID NO: 289126 - DNA, 120 bp, Artificial Sequence
  ENSG00000130856_46 (sequence is synthesized)
tatgctggagctctgcaggagtctgcaggtcacccggagcaggacggggaggagctgagccggaccctccacctggaggaggtggtgcaggaggccgccggcgagtggcaggccctcacc

SEQ ID NO: 289127 - DNA, 120 bp, Artificial Sequence
  ENSG00000130856_47 (sequence is synthesized)
cacgtcttctgatgcgagttggaagtacacctttaagaatgtttctgaagttacgttttgtgaagagcaaagcacttggaatctccgttttaaagcttcaagtgttaaaaatgctacaat

SEQ ID NO: 289128 - DNA, 120 bp, Artificial Sequence
  ENSG00000130856_48 (sequence is synthesized)
agttttttatctataaaattatctaaagaatcattgtctttcagagactcataggaaaaaaaaactaggaaaagtgtcaccgcattgttctcttttgtctacaaatcactgaactcaggt

SEQ ID NO: 289129 - DNA, 120 bp, Artificial Sequence
  ENSG00000130856_49 (sequence is synthesized)
actactgtaggcagtttcctcctcagtctcctccgtggctagtgtgtctagttcacgaagcaattaactgggtcttactatcattgtagtgtgatttctttgtattagcaaagacaaaaa

SEQ ID NO: 289130 - DNA, 120 bp, Artificial Sequence
  ENSG00000130856_50 (sequence is synthesized)
cgctaacattgaaaaagtatgtcagattttccttcatgtttctggttataagaagcatagcttacaaagcaagcgtaagattgaggcatgaagttcagaaaaaaaagtgttacaacacac

SEQ ID NO: 289131 - DNA, 120 bp, Artificial Sequence
  ENSG00000130856_51 (sequence is synthesized)
agggaagttttttccactcttttctctgtgcattttgaaaattagtcaaaatggactcttttcagtctaccataagttaatataactgataccttgagagatggctggaccaattctctc

SEQ ID NO: 289132 - DNA, 120 bp, Artificial Sequence
  ENSG00000130856_52 (sequence is synthesized)
catgacaaatgtttaatcattagttacaagaatgcagtatctggggcgtcaacatggggactcgagtaaacctgacccaccaataaggattcagctgtccacacgggctggcgacacact

SEQ ID NO: 289133 - DNA, 120 bp, Artificial Sequence
  ENSG00000130856_53 (sequence is synthesized)
taccgcatcaatctgtgttcaggtccagggttacataattgcagaagcacaagccatacatcgcaggtaggaaaccacagaaccgtctgcaaggagcaagcaacggtggccctgtccacc

SEQ ID NO: 289134 - DNA, 120 bp, Artificial Sequence
  ENSG00000130856_54 (sequence is synthesized)
ccagcaaataagaagcatatctgtagcttaaggccacgaatccgtaaaaaccccatgactttctcttcgtgcataaacagatgtatttttgatttcagggaattctttagtatcgtcaat

SEQ ID NO: 289135 - DNA, 120 bp, Artificial Sequence
  ENSG00000130856_55 (sequence is synthesized)
ggtgccacataaaacatgtcccaaaccaaatcccacccgtgctgggcagagtgcgtgcacgccattcctacagcattccaaagatggaaggttctttacttcatgttaatttttcctttg

SEQ ID NO: 289136 - DNA, 120 bp, Artificial Sequence
  ENSG00000130856_56 (sequence is synthesized)
aaattatttatatgttctatatataaatacatatgtacatagatatatgggcctctgtgtggctgaacagtatattttgtaaatataagtactagtcctaattgcagaaagagcgtcagt

SEQ ID NO: 289137 - DNA, 120 bp, Artificial Sequence
  ENSG00000130856_57 (sequence is synthesized)
ttcacctccccacgagcacttcagatcagtattgtattcattttattcataaatggatatctttttcattgtcatataaagctgggttttatttttttttcctgaaaaataattgccttt

SEQ ID NO: 289138 - DNA, 120 bp, Artificial Sequence
  ENSG00000130856_58 (sequence is synthesized)
attttctctcgttgcctccttggtttcagaagagagtagttttattataaatattgtatggactttgtatattaagagaggagctcatttcagattcctaaagaaatagacattttactg

SEQ ID NO: 289139 - DNA, 120 bp, Artificial Sequence
  ENSG00000130856_59 (sequence is synthesized)
ttattttgaaagggcatcttttgatttttttgttgttgttgttcacttttggcatatgtatataagtaatattgacggtgatatgaaaacttttgttatgtgaagatatttaagtcagaa

SEQ ID NO: 289140 - DNA, 120 bp, Artificial Sequence
  ENSG00000130856_60 (sequence is synthesized)
aattgttaaataatattacttcttttccaaactgctttgtgtattgtatatttttttaagaaaaagaaaagccttatttgacttatgcttgtgatactggacttcttaccaatccggagg

SEQ ID NO: 289141 - DNA, 120 bp, Artificial Sequence
  ENSG00000130856_61 (sequence is synthesized)
tttccttccttgaatgtcagtgtgtaaacctggctgtagccgcatatgcagaataactgtaattgtgctagagttttaaaggttctgcttttaatgcactttttattttataattttgta

SEQ ID NO: 289142 - DNA, 120 bp, Artificial Sequence
  ENSG00000130856_62 (sequence is synthesized)
ttgaaatattttagaaatgttgattaattttggtgaaaaaatatccccaaagtggaaattattggaattttaaacttttgttcttgctgggttatttattttgattttagcattaaatgt

SEQ ID NO: 289143 - DNA, 120 bp, Artificial Sequence
  ENSG00000130856_63 (sequence is synthesized)
catctcaggacatctctaaaaggggttgtttaattcctaattgtatagaaagctagtttggtgaattgtattggttaattgactgtttaaggccttaacaggtgaatctagagcctactt

SEQ ID NO: 289144 - DNA, 120 bp, Artificial Sequence
  ENSG00000130856_64 (sequence is synthesized)
ttattttggttaaagaaaaagaaaatatcaataattcaattttgtgtcttttctcaatttattagcaaacacaagacattttatgtattatttcgatttacttcctaattataaaagctg

SEQ ID NO: 289145 - DNA, 120 bp, Artificial Sequence
  ENSG00000130856_65 (sequence is synthesized)
cttttttgcagaacattccttgaaaatataaggttttgaaaagacataattttacttgaatctttgtggggtacaggttgatctttatattttactggttgttttaaaaattctagaaaa

SEQ ID NO: 289146 - DNA, 120 bp, Artificial Sequence
  ENSG00000130856_66 (sequence is synthesized)
gagatttctaggcctcatgtataaccagggttttgaggataaagaactgtatttttagaactatctcatcatagcatatctgctttggaataactataaataaaagatgaagttaggaaa

SEQ ID NO: 289147 - DNA, 120 bp, Artificial Sequence
  ENSG00000130856_67 (sequence is synthesized)
cacatggtttaagaagcatcattatggcttttgtgtgttttggtgtgtgtggctgtgaagcctcaggaatttagtttaagcttctgaaaagcccaccaatatgtatttagaattctgttg

SEQ ID NO: 289148 - DNA, 120 bp, Artificial Sequence
  ENSG00000130856_68 (sequence is synthesized)
tcccatatcttagtcatctcaatgtttctcatttctaactttaaaacatgtcaattaaaaaaattcagtatatcattaatttcgtctaaaatgtcacataaatctctgacataatttggt

SEQ ID NO: 289149 - DNA, 120 bp, Artificial Sequence
  ENSG00000130856_69 (sequence is synthesized)
cctgtttgtactgaggagttagaccttttgcttgtcctcactgtgacaaaaaatttcgaacctcaggccataggaagactcacattgcttcccactttaaacatacggaattaaggaaaa

SEQ ID NO: 289150 - DNA, 120 bp, Artificial Sequence
  ENSG00000130856_70 (sequence is synthesized)
ctcaaggtgcacattcgcctgcacacaggtatggcctcagggctgggcccacacgggcactggccacgggggccacacacattactgcgcacatataccaaacacaggtatggcacacag

SEQ ID NO: 289151 - DNA, 120 bp, Artificial Sequence
  ENSG00000130876_0 (sequence is synthesized)
cctgtgggcgctgtcccggctgcgagggccgtgagctcacggaccgacggaccgacgggcggccggccggacagacggggcagcgcagggagcggggacgcggcgggacagcgacatggc

SEQ ID NO: 289152 - DNA, 120 bp, Artificial Sequence
  ENSG00000130876_1 (sequence is synthesized)
cagcgacatggccggccacacgcagcagccgagcgggcgcgggaaccccaggcctgcgccctcgccctccccagtcccagggaccgtccccggcgcctcggagcgggtggcgctcaagaa

SEQ ID NO: 289153 - DNA, 120 bp, Artificial Sequence
  ENSG00000130876_2 (sequence is synthesized)
gagcgggtggcgctcaagaaggagatcgggctgctgagcgcctgcaccatcatcatcgggaacatcatcggctcgggcatcttcatctcgcccaagggggtcctggagcactcaggctcc

SEQ ID NO: 289154 - DNA, 120 bp, Artificial Sequence
  ENSG00000130876_3 (sequence is synthesized)
gtgggtctggccctgttcgtctgggtcctgggtgggggcgtgacggctctgggctccctctgctatgcagagctgggagtcgccatccccaagtctggcggggactacgcctacgtcaca

SEQ ID NO: 289155 - DNA, 120 bp, Artificial Sequence
  ENSG00000130876_4 (sequence is synthesized)
gagatcttcgggggcctggctggctttctgctgctctggagcgccgtcctcatcatgtaccccaccagccttgctgtcatctccatgaccttctccaactacgtgctgcagcccgtgttc

SEQ ID NO: 289156 - DNA, 120 bp, Artificial Sequence
  ENSG00000130876_5 (sequence is synthesized)
cccaactgcatcccccccaccacagcctcccgggtgctgtccatggcctgcctgatgctcctgacatgggtgaacagctccagtgtgcgctgggccacgcgcatccaggacatgttcaca

SEQ ID NO: 289157 - DNA, 120 bp, Artificial Sequence
  ENSG00000130876_6 (sequence is synthesized)
ggcgggaagctgctggccttgtccctcatcatcggcgtgggccttctccagatcttccaaggacacttcgaggagctgaggcccagcaatgcctttgctttctggatgacgccctccgtg

SEQ ID NO: 289158 - DNA, 120 bp, Artificial Sequence
  ENSG00000130876_7 (sequence is synthesized)
ggacacctggccctggccttcctccagggctccttcgccttcagtggctggaacttcctcaactatgtcaccgaggagatggttgacgcccgaaagaacctacctcgcgccatcttcatc

SEQ ID NO: 289159 - DNA, 120 bp, Artificial Sequence
  ENSG00000130876_8 (sequence is synthesized)
cacgttcaccaacattgcctacttcacggccatgtccccccaggagctgctctcctccaatgcggtggctgtgaccttcggggagaagctgctgggctacttttcttgggtcatgcctgt

SEQ ID NO: 289160 - DNA, 120 bp, Artificial Sequence
  ENSG00000130876_9 (sequence is synthesized)
ctccgtggctctgtcaaccttcggagggatcaatggttacctgttcacctactccaggctgtgcttctctggagcccgcgaggggcacctgcccagcctgctggccatgatccacgtcag

SEQ ID NO: 289161 - DNA, 120 bp, Artificial Sequence
  ENSG00000130876_10 (sequence is synthesized)
acactgcacccccatccccgccctcctcgtctgttgcggggccacagccgtcatcatgctcgtgggcgacacgtacacgctcatcaactatgtgtccttcatcaactacctctgctacgg

SEQ ID NO: 289162 - DNA, 120 bp, Artificial Sequence
  ENSG00000130876_11 (sequence is synthesized)
cgtcaccatcctgggcctgctgctgctgcgctggaggcggcctgcactccacaggcccatcaaggtgaaccttctcatccccgtggcgtacttggtcttctgggccttcctgctggtctt

SEQ ID NO: 289163 - DNA, 120 bp, Artificial Sequence
  ENSG00000130876_12 (sequence is synthesized)
cagcttcatctcagagcctatggtctgtggggtcggcgtcatcatcatccttacgggggtgcccattttctttctgggagtgttctggagaagcaaaccaaagtgtgtgcacagactcac

SEQ ID NO: 289164 - DNA, 120 bp, Artificial Sequence
  ENSG00000130876_13 (sequence is synthesized)
agagtccatgacacactggggccaggagctgtgtttcgtggtctacccccaggacgcccccgaagaggaggagaatggcccctgcccaccctccctgctgcctgccacagacaagccctc

SEQ ID NO: 289165 - DNA, 120 bp, Artificial Sequence
  ENSG00000130876_14 (sequence is synthesized)
gaagccacaatgagatttttgtagagactgaagcagttgtttctgtttacatgttgtttattgaggaggtgttttggcaaaaaagttttgttttgtttttttctggaaaaaaaagaaaaa

SEQ ID NO: 289166 - DNA, 120 bp, Artificial Sequence
  ENSG00000130876_15 (sequence is synthesized)
agatacgactctcagaagcctgtttaaggaagccctaaaatgtggactgggtttcctgtcttagcactgccctgctagctcttcctgaaaaggcctataaataaacagggctggctgttc

SEQ ID NO: 289167 - DNA, 120 bp, Artificial Sequence
  ENSG00000130876_16 (sequence is synthesized)
ctgtgtctcgggcagcaatgctgccccctttcctgccccaacatccccagcagacacaagagatggagactatgagctgctctcgtggctgggtctcgggggtcctgcaccctcaggagc

SEQ ID NO: 289168 - DNA, 120 bp, Artificial Sequence
  ENSG00000130876_17 (sequence is synthesized)
ccccaggagctgctctcctccaatgcggtggctgtggtgagtgggcccctgctcggtccctggctcctgcccaggcccctgccccggccttacacatggcctctctactgtgcccaccca

SEQ ID NO: 289169 - DNA, 120 bp, Artificial Sequence
  ENSG00000130876_18 (sequence is synthesized)
gaccttcggggagaagctgctgggctacttttcttgggtcatgcctgtctccgtggctctgtcaaccttcggagggatcaatggttacctgttcacctactccaggtgactgcactgggg

SEQ ID NO: 289170 - DNA, 120 bp, Artificial Sequence
  ENSG00000130876_19 (sequence is synthesized)
agacgtgggcatggggagggaaggctggggtgcaggtgtgcaccagtcatgccgtgggccagaggaagggacacctgccgggggaggggtctgcctgaagctgggatgatgatcccacac

SEQ ID NO: 289171 - DNA, 120 bp, Artificial Sequence
  ENSG00000130876_20 (sequence is synthesized)
ggtaacaagtgtctgatcacaactgggaggcaaagaaagcaagaggcaggcaggctggatgagggggagaactgtccagtggggctgctgggcccggagcaggaggtcagaggcgacagc

SEQ ID NO: 289172 - DNA, 120 bp, Artificial Sequence
  ENSG00000130876_21 (sequence is synthesized)
agccaggccctctggtgggacaggcagcctctccgcccagccccactgccacccaaggctcgggctggtcctcggtggcccacgcctgttgccctgcaaaaatggccctgggaagaaagc

SEQ ID NO: 289173 - DNA, 120 bp, Artificial Sequence
  ENSG00000130876_22 (sequence is synthesized)
cggggggcttgcattctagcctggccctgttctctctggctatggacacgtcacagccccttgcagggcctcagaaaggctgaatatcatcatcctgctgtaaatagatccagagatttg

SEQ ID NO: 289174 - DNA, 120 bp, Artificial Sequence
  ENSG00000130876_23 (sequence is synthesized)
catttggcctaaaattatgcatatacacacaatatggtccctacaaatgaagccaatgactgcgtctgatgctcggccagggatctcgacagtaaacctttgcagctgagcgagctggga

SEQ ID NO: 289175 - DNA, 120 bp, Artificial Sequence
  ENSG00000130876_24 (sequence is synthesized)
ctggaaagttccaggaagactctgggtctgtggactgggctctggggccattttggggaattttccaggctgattttggctgtatgcgattttatctttctgcacagacatcagaccctg

SEQ ID NO: 289176 - DNA, 80 bp, Artificial Sequence
  ENSG00000130881_0 (sequence is synthesized)
cgctgagcccccgcagggcccgtgacgccgcggccgatgtggccgcgcgcgccctacgggcctgcaccgccaccgcacaa

SEQ ID NO: 289177 - DNA, 120 bp, Artificial Sequence
  ENSG00000130881_1 (sequence is synthesized)
caccgccaccgcacaaagacgcctcgggagccgccgcctgcacccgggccgcagcagccacgccagccggagcccgagccctagcccgagcccgagcccgagccgcagccagagccagag

SEQ ID NO: 289178 - DNA, 80 bp, Artificial Sequence
  ENSG00000130881_2 (sequence is synthesized)
cgagcccgagccgcagccagagccagagccggagccgcagccggaaccggagccggagccgcggggcaggaggcggcgcc

SEQ ID NO: 289179 - DNA, 120 bp, Artificial Sequence
  ENSG00000130881_3 (sequence is synthesized)
ctggagggcgcgccgggcgcccgggcgcagctggccgtcgtctgtctggtgaacatctttctcaccgggagactcagcagtgcggttcctgccttagcggcctgcagtgggaagctggag

SEQ ID NO: 289180 - DNA, 120 bp, Artificial Sequence
  ENSG00000130881_4 (sequence is synthesized)
cagcacacggagcggcgtggggtcatctacagcccggcctggcccctcaactacccgccaggcaccaactgcagctggtacatccagggcgaccgtggtgacatgattaccatcagcttc

SEQ ID NO: 289181 - DNA, 120 bp, Artificial Sequence
  ENSG00000130881_5 (sequence is synthesized)
cgcaactttgacgtggaggagtcccaccagtgctccctggactggctcctgctgggcccagcagccccaccccgccaggaggccttccgcctctgtggctccgccatcccacctgccttc

SEQ ID NO: 289182 - DNA, 120 bp, Artificial Sequence
  ENSG00000130881_6 (sequence is synthesized)
atctctgcccgcgaccatgtctggattttcttccactcagacgcctccagctccggccaggcccagggcttccgtctgtcttacatccgagggaagctgggccaggcatcctgccaggca

SEQ ID NO: 289183 - DNA, 120 bp, Artificial Sequence
  ENSG00000130881_7 (sequence is synthesized)
gatgagttccgctgtgacaacggcaagtgcctgcccggcccgtggcagtgcaacacggtggacgagtgtggagacggctctgatgagggcaactgctcggcgcccgcctccgagcctcca

SEQ ID NO: 289184 - DNA, 120 bp, Artificial Sequence
  ENSG00000130881_8 (sequence is synthesized)
ggcagcctgtgccccggggggaccttcccatgcagcggggcgcgctccacgcgctgcctgcctgtggagcggcgctgtgacggcttgcaggactgcggcgacggctcggatgaggcgggc

SEQ ID NO: 289185 - DNA, 120 bp, Artificial Sequence
  ENSG00000130881_9 (sequence is synthesized)
tgccccgacctggcgtgcggccggcggctgggcagcttctacggctcctttgcctccccagacctgttcggcgccgctcgcgggccctcagaccttcactgcacgtggctggtggacaca

SEQ ID NO: 289186 - DNA, 120 bp, Artificial Sequence
  ENSG00000130881_10 (sequence is synthesized)
caggactcccggcgggtgctgctgcagctggaactgcggctgggctatgacgactacgtgcaggtatacgagggcctgggcgagcgcggggaccgcctgctgcagacgctgtcctaccgc

SEQ ID NO: 289187 - DNA, 120 bp, Artificial Sequence
  ENSG00000130881_11 (sequence is synthesized)
agcaaccaccggcccgtgagcctggaggccgcccagggccgcctcactgtggcctaccacgcgcgcgcccgcagcgccggccacggcttcaatgccacctaccaggtgaagggctattgc

SEQ ID NO: 289188 - DNA, 120 bp, Artificial Sequence
  ENSG00000130881_12 (sequence is synthesized)
ctcccctgggagcagccgtgcgggagcagtagtgacagtgacgggggcagcctgggcgaccagggctgcttctcagagccacagcgctgtgatggctggtggcattgtgccagcggccga

SEQ ID NO: 289189 - DNA, 120 bp, Artificial Sequence
  ENSG00000130881_13 (sequence is synthesized)
gacgagcagggctgccctgcctgcccgcccgaccagtacccctgcgagggtggcagtggtctgtgctacacgcctgccgaccgctgcaacaaccagaaaagctgtcccgacggcgccgac

SEQ ID NO: 289190 - DNA, 120 bp, Artificial Sequence
  ENSG00000130881_14 (sequence is synthesized)
gagaagaactgcttctcctgccagcccggcaccttccactgcggtaccaacctgtgcatcttcgagacgtggcgctgtgacggccaggaagactgccaggacggcagcgatgagcatggg

SEQ ID NO: 289191 - DNA, 120 bp, Artificial Sequence
  ENSG00000130881_15 (sequence is synthesized)
gctctactcactgcgcacgcaggaatacagggccttcgagacccagatgacgcgcctggaggctgagttcgtgcggcgggaggcacccccatcctatggtcagctcatcgcccagggcct

SEQ ID NO: 289192 - DNA, 120 bp, Artificial Sequence
  ENSG00000130881_16 (sequence is synthesized)
cattccacccgtggaggactttcctgtctacagtgcgtcccaggcctctgtgctgcagaatcttcgcacagccatgcggagacagatgcgtcggcacgcctcccgccgggggccctcccg

SEQ ID NO: 289193 - DNA, 120 bp, Artificial Sequence
  ENSG00000130881_17 (sequence is synthesized)
ccgccgcctcggccgcctctggaaccggctctttcaccggccgcgggcgccccgaggccagatcccactgctgaccgcagcacgcccctcacagaccgtgctgggcgatggcttcctcca

SEQ ID NO: 289194 - DNA, 120 bp, Artificial Sequence
  ENSG00000130881_18 (sequence is synthesized)
gcctgctccaggggctgcccccgaccccccagcaccgctcatggacacaggcagcaccagggcggccggagacaggccccccagtgcccccggccgtgcaccggaggtgggaccttcagg

SEQ ID NO: 289195 - DNA, 120 bp, Artificial Sequence
  ENSG00000130881_19 (sequence is synthesized)
gccacccttgccctcgggcctgcgagacccagagtgcaggcccgtggacaaggacagaaaggtctgcagggagccactggtagacggcccagctcctgcagatgcacctcgggagccctg

SEQ ID NO: 289196 - DNA, 120 bp, Artificial Sequence
  ENSG00000130881_20 (sequence is synthesized)
ctcagcccaggacccgcacccccaggtctccactgccagcagcaccctgggcccccactcgccagagccactgggggtctgcaggaaccccccgcccccctgctccccaatgctggaggc

SEQ ID NO: 289197 - DNA, 120 bp, Artificial Sequence
  ENSG00000130881_21 (sequence is synthesized)
cagcgatgatgaggccctgttggtctgttgaccgctgggctcgctggtgaccgccacagccccgctttgtaaccagggaatacacagtcatttctaccctgcctctgcgtcctttcttat

SEQ ID NO: 289198 - DNA, 120 bp, Artificial Sequence
  ENSG00000130881_22 (sequence is synthesized)
ggagaggccctccggggaccccagcggaggggctggcccctaagccagctggctgcactggtgggcgggagctgtgggactgaacggcgggggggagaagagtggagtggtgagcccgtc

SEQ ID NO: 289199 - DNA, 120 bp, Artificial Sequence
  ENSG00000130881_23 (sequence is synthesized)
tgcagggtcccattgtacacaagcaccctggggtctcacttctctccccccactccattctgggaacccatttccagagaagcaggggaccagagcctttttgcttcatctgccctgcag

SEQ ID NO: 289200 - DNA, 120 bp, Artificial Sequence
  ENSG00000130881_24 (sequence is synthesized)
tggcaacagctgcccctagagctgggagttgtcatgaggatggggccgggccatggggacgctgggtctcatccgtggtgactattttgctcacgcctcaccctcttcctgtccagcaag

SEQ ID NO: 289201 - DNA, 120 bp, Artificial Sequence
  ENSG00000130881_25 (sequence is synthesized)
gcctctggaggacctgggttgggtggctcctgccaaaccctcatgcccctggccaggcaggcgccctttgccctccctgaaggtccaatctcctgggcaccgtggaagggctggggtgtg

SEQ ID NO: 289202 - DNA, 120 bp, Artificial Sequence
  ENSG00000130881_26 (sequence is synthesized)
tgcctgctgtacatgaagcccctggagttccctgcaggcctcaaagcccccaggacatgctgctctgtgctttctggggacagagaggccgaggcaccaacagcagtggccacgtctgtt

SEQ ID NO: 289203 - DNA, 120 bp, Artificial Sequence
  ENSG00000130881_27 (sequence is synthesized)
ccatcctatctcagggcctcggtttccccacctgtaagccagggtgagactgtgggctctgaagtcctgaccttcactctgtggtgatttacgggaagaaagacaatcccagcctggagc

SEQ ID NO: 289204 - DNA, 120 bp, Artificial Sequence
  ENSG00000130881_28 (sequence is synthesized)
ccctgagctctcctgggtggccgagctcagactggcatcgaggggcctggggtaggggcggactgagctgctaccccatcctcgacatccctttagggcagggggactctgggtgccatg

SEQ ID NO: 289205 - DNA, 120 bp, Artificial Sequence
  ENSG00000130881_29 (sequence is synthesized)
gtagggagcgcctgtgtcaagcagcaaagccccctaatgtcaagagcctcctccagggcctgccacggcatcttcctggccagcaacatgtgtgcacccaccgaggtacgccccagccac

SEQ ID NO: 289206 - DNA, 120 bp, Artificial Sequence
  ENSG00000130881_30 (sequence is synthesized)
tcccatctgtgcccatcagggactccccatagcacgagcgaacagccagccctgtttatttataggccttttcaggaagagctagcagggcagtgctaagacaggaaacccagtccacat

SEQ ID NO: 289207 - DNA, 120 bp, Artificial Sequence
  ENSG00000130881_31 (sequence is synthesized)
tttagggcttccttaaacaggcttctgagagtcgtatcttttttcttttttttccagaaaaaaacaaaacaaaacttttttgccaaaacacctcctcaataaacaacatgtaaacagaaa

SEQ ID NO: 289208 - DNA, 120 bp, Artificial Sequence
  ENSG00000130881_32 (sequence is synthesized)
ttgagctgcagggacatgcagagggaaagggggccaggcagtgagcggtggtcctggccaggggtggtcacagggacatttggctggggagtcactataggttccatctgccatagtttt

SEQ ID NO: 289209 - DNA, 120 bp, Artificial Sequence
  ENSG00000130881_33 (sequence is synthesized)
cctaaatgccagagcccaaaaagcgcaacccctgacttactccatagctgcaatgcgtgaggatgtgatgggcatgggcagggtctatcctagtctctgtgcctcagtttccccaagggc

SEQ ID NO: 289210 - DNA, 120 bp, Artificial Sequence
  ENSG00000130881_34 (sequence is synthesized)
caggtggttcagggccagtgtatctccggagatgacaagctgtcaacctgctgcagccttagccagccccgtgggcagtctcaccctcacttcccatgcctgggactttgtgctgggccc

SEQ ID NO: 289211 - DNA, 120 bp, Artificial Sequence
  ENSG00000130881_35 (sequence is synthesized)
atcccagtggtcccgaggtggagggttctgggcccttgggccactgcccttttggggagggtgtcggggcagggggctcttgacttcctgctccacttcggcttcgggctgggggtactg

SEQ ID NO: 289212 - DNA, 120 bp, Artificial Sequence
  ENSG00000130881_36 (sequence is synthesized)
tgtgcactgatggagggaaggggagccgcagcagagctggaaatgacctgcgtggatgtcgcaattcttcatggagcctcccgtgcacacctggatggggacagtgtggggacagagtgg

SEQ ID NO: 289213 - DNA, 120 bp, Artificial Sequence
  ENSG00000130881_37 (sequence is synthesized)
ctgggagtggaggaaccaggcagtctggaacatgaggagtgggggcagccggccgggacagggctggctgtcctggccgtggctccagcctgaccactccctgctggtcctcggccatgg

SEQ ID NO: 289214 - DNA, 120 bp, Artificial Sequence
  ENSG00000130881_38 (sequence is synthesized)
cttccgtctgtcttacatccgaggtgatggaggctgcagggcaggcaggacaccacggagcacaccgtgcatgcccacaggctcccggcccacaggggcggcaccctccacagggccccg

SEQ ID NO: 289215 - DNA, 120 bp, Artificial Sequence
  ENSG00000130881_39 (sequence is synthesized)
gctccctgtgggatgtcccctgaccgccctgtcaatctcaggacagtggcaggactgggcatgcggatgccttggacctctcaaggtcactggccccacttcccagtcttggctagtcct

SEQ ID NO: 289216 - DNA, 120 bp, Artificial Sequence
  ENSG00000130881_40 (sequence is synthesized)
gggaactcacccctaaccccaggctcaggtcagggacagagcccaccctggtgttggaggggtctctgctgccacagtgatggggaaccacctgcccgcttttggccccaggccccctgg

SEQ ID NO: 289217 - DNA, 120 bp, Artificial Sequence
  ENSG00000130881_41 (sequence is synthesized)
gcaaaggcctgaagattgcccgtctccctgcagccgcgcagtgggtgcagccttttcacaaatgcaagacctggaccggcggcgaggccaaggggaccccgtgtggagggatgcgggact

SEQ ID NO: 289218 - DNA, 120 bp, Artificial Sequence
  ENSG00000130921_0 (sequence is synthesized)
gcgtgcgcagatcagggatcgcgattgcgaatcctccgctgaggtgatttggatatccctagaacgttgagggcacgagtcgggtcctgagaccaggtcctcagccagcagagccacgtt

SEQ ID NO: 289219 - DNA, 120 bp, Artificial Sequence
  ENSG00000130921_1 (sequence is synthesized)
ccttatgagcaccgtgggtttatttcattttcctacaccactgacccgaatatgcccggcgccatggggactccggctttgggagaagctgacgttgttatccccaggaatagctgtcac

SEQ ID NO: 289220 - DNA, 120 bp, Artificial Sequence
  ENSG00000130921_2 (sequence is synthesized)
tccggtccagatggcaggcaagaaggactaccctgcactgctttccttggatgagaatgaactcgaagagcagtttgtgaaaggacacggtccagggggccaggcaaccaacaaaaccag

SEQ ID NO: 289221 - DNA, 120 bp, Artificial Sequence
  ENSG00000130921_3 (sequence is synthesized)
caactgcgtggtgctgaagcacatcccctcaggcatcgttgtaaagtgccatcagacaagatcagttgatcagaacagaaagctagctcggaaaatcctacaagagaaagtagatgtttt

SEQ ID NO: 289222 - DNA, 120 bp, Artificial Sequence
  ENSG00000130921_4 (sequence is synthesized)
ctacaatggtgaaaacagtcctgttcacaaagaaaaacgagaagcggcgaagaaaaaacaagaaaggaaaaaaagagcaaaggaaaccctggaaaaaaagaagctacttaaagaactgtg

SEQ ID NO: 289223 - DNA, 120 bp, Artificial Sequence
  ENSG00000130921_5 (sequence is synthesized)
ggagtcaagtaaaaaggtccactgagaaaagaattagagattccaactgacagaatctgccagaagctcccagggaataatggtggcgagttccatcaccagcattattatagtgcttca

SEQ ID NO: 289224 - DNA, 120 bp, Artificial Sequence
  ENSG00000130921_6 (sequence is synthesized)
agagcgagaccccatctcaaaaaaaaaataaaactagttcaagtgcaatgacacacgcctataatcccagcaccttgggaggctaagacaggaagatcacctgagcccaggagctcaaga

SEQ ID NO: 289225 - DNA, 120 bp, Artificial Sequence
  ENSG00000130921_7 (sequence is synthesized)
aagatcacctgagcccaggagctcaagattgcagtgagctatgaacaccactgcactccacctgtccacttgttcttgtgtgacagaacaagaccctgtctctaaaaaataagataaaac

SEQ ID NO: 289226 - DNA, 120 bp, Artificial Sequence
  ENSG00000130921_8 (sequence is synthesized)
cataaagaaacacagtcagtactatacaagaataatggctacttctagagggaaggagttgtcattgtgatgaggcacttggaggggttctggggtgcctgacaaagttctgtttcttca

SEQ ID NO: 289227 - DNA, 120 bp, Artificial Sequence
  ENSG00000130921_9 (sequence is synthesized)
cctgggtggtagttagaagggtgtccccgtatttcaaattgtacctttgtgagattgtatgttttgtaataataaaattttttttgtaattagtaaagtcaatttttatggagaactgga

SEQ ID NO: 289228 - DNA, 120 bp, Artificial Sequence
  ENSG00000130921_10 (sequence is synthesized)
gatttggatatccctagaacgttgagggcacgagtcgggtcctgagaccaggtaagcatctgcggagaagccaggtaaccctacggctgccgacgactgtcaaaggctccggagagagga

SEQ ID NO: 289229 - DNA, 120 bp, Artificial Sequence
  ENSG00000130921_11 (sequence is synthesized)
ctgcgagccgggacgcctgggtttttcccgacttgcgaccccgagtggcgcagccagtttacctgaggccgcgctggcggtggggtggggccggccgtgacacccgagctcagttttctc

SEQ ID NO: 289230 - DNA, 120 bp, Artificial Sequence
  ENSG00000130921_12 (sequence is synthesized)
gggacctggtttacgctaggtgctgtgggtcggccctggggctgttcaggcactcagggcaggggagaggagagactaccgtcctggagataacggttccacggaggcccaaggcgaaac

SEQ ID NO: 289231 - DNA, 120 bp, Artificial Sequence
  ENSG00000130921_13 (sequence is synthesized)
cttggaagatatttttggtctattgcaagaaaatatgtattagctggcagggcatgtcctggtaacatggcagacagtgcaaggctgaggagaggggcgtcttgctgaataatgtgtctc

SEQ ID NO: 289232 - DNA, 120 bp, Artificial Sequence
  ENSG00000130921_14 (sequence is synthesized)
tactcatttcctaaattccctcggtaacagatgggtcatcatttgaattgctttataaaaagctgtctttgaatctgaagcataatcttgagggcagatgcctcttactgaaagctctcc

SEQ ID NO: 289233 - DNA, 76 bp, Artificial Sequence
  ENSG00000130921_15 (sequence is synthesized)
atggtgcactaaactgtagtgaacagagacatgcacgattcaagaataaaactcggctgggcacggtggacggtgc

SEQ ID NO: 289234 - DNA, 80 bp, Artificial Sequence
  ENSG00000130921_16 (sequence is synthesized)
cctgcagaccttcgcagtgagtgttgcagctcttaaaggcagcacagacccaaggagtgagcagcagtaacatttaccac

SEQ ID NO: 289235 - DNA, 89 bp, Artificial Sequence
  ENSG00000130921_17 (sequence is synthesized)
cctgcagaccttcgcagtgagtgttgcagctcttaaaggcagcacagacccaaggagtgagcagcagtaacatttaccacaaagactga

SEQ ID NO: 289236 - DNA, 69 bp, Artificial Sequence
  ENSG00000130921_18 (sequence is synthesized)
aaccttgagctagacacaaagtgctgactggtgtatttattccagctagctttgcctactggatcccat

SEQ ID NO: 289237 - DNA, 120 bp, Artificial Sequence
  ENSG00000130921_19 (sequence is synthesized)
tcaggagtccagctagctttgcctactggatcccatgctggggccgtgggtggagctgcctgctagtcccacaccatgcccccgcactcctcagcccttgggcggtcaatgggactggtt

SEQ ID NO: 289238 - DNA, 120 bp, Artificial Sequence
  ENSG00000130921_20 (sequence is synthesized)
gcagagcagggggcggcgcccgtccgggaggctctggccatgagggagcagggcagggggagggggggactcaggcatggcgggttgcaagtcccacgccctgctccacggggaggcagc

SEQ ID NO: 289239 - DNA, 120 bp, Artificial Sequence
  ENSG00000130921_21 (sequence is synthesized)
tgaggcccagcgagaattcaagcacagcccgggtgagctggcagtgctgggggacccggcacaccctccacagctgctggccggggtgctaagcccctcactgcctggggccggcggcac

SEQ ID NO: 289240 - DNA, 120 bp, Artificial Sequence
  ENSG00000130921_22 (sequence is synthesized)
cagccggccactcctaggtcggggcccgccaagccctcactggcccgcgagctctccctccacacctccccacaagcggagggagcccgctttggccttggccagtccagagaggggctt

SEQ ID NO: 289241 - DNA, 120 bp, Artificial Sequence
  ENSG00000130921_23 (sequence is synthesized)
cagcggcgggctgaagggctcctcaagcacagccagagtggatgccgaggccaaggaggcgccgagagcgagtgagggctactagcacattgtcacctctcatttggataacctgatgac

SEQ ID NO: 289242 - DNA, 120 bp, Artificial Sequence
  ENSG00000130921_24 (sequence is synthesized)
attgtcacctctcatttggataacctgatgacaatatgcctagatgaagatctttttgcaatggatttctcaggtgttctttgtgcttctcgtatttggatgtctaggtctctagcaagg

SEQ ID NO: 289243 - DNA, 77 bp, Artificial Sequence
  ENSG00000130921_25 (sequence is synthesized)
atctatttccctgagtcattgggcttcacctttctctggtccttccctgattaataactaacctcctgaattctttt

SEQ ID NO: 289244 - DNA, 120 bp, Artificial Sequence
  ENSG00000130921_26 (sequence is synthesized)
ctgaattctttttcaggtaaatcaggtatttcttcttggtttggatccattgccagtgaactagtatgttttttggggggtgttgaagcgtcttgttttgtcatattaccagggtttgtt

SEQ ID NO: 289245 - DNA, 69 bp, Artificial Sequence
  ENSG00000130921_27 (sequence is synthesized)
tgaactagtatgttttttggggggtgttgaagcgtcttgttttgtcatattaccagggtttgagattct

SEQ ID NO: 289246 - DNA, 76 bp, Artificial Sequence
  ENSG00000130921_28 (sequence is synthesized)
tttgtcccatggggtgttctcttcatgtagtactctgccccttttcctatggatgtggcttcctatgagccaaaca

SEQ ID NO: 289247 - DNA, 120 bp, Artificial Sequence
  ENSG00000130921_29 (sequence is synthesized)
gaaccatctatgggtctctcagccatggctaccagtgcctgttcggtggaggtggcagagggtacaatggagctttggtgggttaatggtctattttttttgctggttggcctcctgcca

SEQ ID NO: 289248 - DNA, 120 bp, Artificial Sequence
  ENSG00000130921_30 (sequence is synthesized)
ggcctcctgccaggaggtggtcctttccagaaagcatcagctgtggtaatatggggaggaaccagcagtgggcggggccctagaactcccaagatttatttgccctttgtcttcctgcca

SEQ ID NO: 289249 - DNA, 120 bp, Artificial Sequence
  ENSG00000130921_31 (sequence is synthesized)
gggtgcatagggaaggaccatcaggtgggggtggagctaggcgtgtctgagctcagactctccttgggcgggtcttgctgcggctgctgtagggaatgtgggtgagattcccaggtcact

SEQ ID NO: 289250 - DNA, 60 bp, Artificial Sequence
  ENSG00000130921_32 (sequence is synthesized)
cggctgctgtagggaatgtgggtgagattcccaggtcactggagtcgtgtacctaggaga

SEQ ID NO: 289251 - DNA, 120 bp, Artificial Sequence
  ENSG00000130921_33 (sequence is synthesized)
tcttactcccaccgtgttcccccacaactgccccgagtctgtttccaggcagagggtgagactggcttgaaaatttgccccaaggctgtgcccctcccagcagcgaaagaaaagggctgt

SEQ ID NO: 289252 - DNA, 120 bp, Artificial Sequence
  ENSG00000130921_34 (sequence is synthesized)
agttcttcccccacctgtgaagtctgcatgctggattcgtgcagttgcccaagttctggccaggaggcttctcaccctgtttaaattgttacgaagttcgactagagaattcttctccct

SEQ ID NO: 289253 - DNA, 90 bp, Artificial Sequence
  ENSG00000130921_35 (sequence is synthesized)
ttaaattgttacgaagttcgactagagaattcttctccctgtggagttttatcccttgctcctctggccaccctcccgatcttctgggga

SEQ ID NO: 289254 - DNA, 120 bp, Artificial Sequence
  ENSG00000130921_36 (sequence is synthesized)
aactgcgtggtgctgaagcacatcccctcaggcatcgttgtaaaggtagatcacagaaggccgctgaggggagaggccccgcccaagggttccacagcctccagagatttctcccaagtg

SEQ ID NO: 289255 - DNA, 120 bp, Artificial Sequence
  ENSG00000130921_37 (sequence is synthesized)
tgaatgggatcagccgaagtgcattatttttctggcttgggccaccctctaccagccaggcagtagagagcaccgcagatctcgtcccatccctgagccattcctccctaaggcagaacc

SEQ ID NO: 289256 - DNA, 120 bp, Artificial Sequence
  ENSG00000130921_38 (sequence is synthesized)
tcctacaacagcctgggaagcctgtttccaggatcttttggagccagggtatggctgccatccttgaatttggcagacagcactggtgcttggctgctgccccggaagcaacgtcttgac

SEQ ID NO: 289257 - DNA, 120 bp, Artificial Sequence
  ENSG00000130921_39 (sequence is synthesized)
aaggctgccgagatccccagcattgctatgggatccaagtccctgaggaggcggcaagcaggcatgggttgtctgctggcagtcccagcccttaactgtcatggctggttaacattaggg

SEQ ID NO: 289258 - DNA, 120 bp, Artificial Sequence
  ENSG00000130921_40 (sequence is synthesized)
tggccacatcctccacgcctctctgtcccctttggtaaatgtcggtgatacctcctcttctggacagagaggactgagggcgagatcatggaggatcatggaggccaggcattttccaac

SEQ ID NO: 289259 - DNA, 120 bp, Artificial Sequence
  ENSG00000130921_41 (sequence is synthesized)
catggaggccaggcattttccaacctcagaagaaaaaatgctgtgcacagctgcctataggagtcttcctttttacataaaaaaacaagtctcgggccaggcacagtggctcatgcctgt

SEQ ID NO: 289260 - DNA, 120 bp, Artificial Sequence
  ENSG00000130921_42 (sequence is synthesized)
agaatcgcttgaaccctggaggcagacattgcagtgagccgagatcatgctactgcataccagcctgggcaacagacaagattccctcttaaaaaaaaaaaaaagaaggttggtcagagg

SEQ ID NO: 289261 - DNA, 120 bp, Artificial Sequence
  ENSG00000130921_43 (sequence is synthesized)
aaaagaaggttggtcagaggggctcccagtccatctgcctcagggatcacgagagagtcctggaagcagcacagaagagagatagccaagtgccatcagacaagatcagttgatcagaac

SEQ ID NO: 289262 - DNA, 120 bp, Artificial Sequence
  ENSG00000130921_44 (sequence is synthesized)
acagcctgggaagcctgtttccaggatcttttggagccaggtgccatcagacaagatcagttgatcagaacagaaagctagctcggaaaatcctacaagagaaagtagatgttttctaca

SEQ ID NO: 289263 - DNA, 120 bp, Artificial Sequence
  ENSG00000130935_0 (sequence is synthesized)
ggtttgctcaaaatggcagcgctggaggaagaattcacgttgtcttcggtagtcctgagcgccgggcctgaaggactcctaggcgtggagcagagcgacaaaacagaccagtttctagtg

SEQ ID NO: 289264 - DNA, 120 bp, Artificial Sequence
  ENSG00000130935_1 (sequence is synthesized)
acagacagcggcaggacagtcatcctctataaggtttctgatcagaaacccttggggagctggtcagtgaaacaaggtcaaattataacatgtccagctgtgtgcaactttcaaactgga

SEQ ID NO: 289265 - DNA, 120 bp, Artificial Sequence
  ENSG00000130935_2 (sequence is synthesized)
gagtatgttgttgtacacgataataaggttttaagaatatggaataatgaagatgtaaacctggataaagtatttaaagctacattgtcagcagaagtatataggatactttcagtgcaa

SEQ ID NO: 289266 - DNA, 120 bp, Artificial Sequence
  ENSG00000130935_3 (sequence is synthesized)
gggacagaacccttggtgctcttcaaggaaggtgctgttcgtggtttagaggccttgcttgcagacccccagcagaaaattgaaactgttatctctgatgaagaagtgattaaatggaca

SEQ ID NO: 289267 - DNA, 120 bp, Artificial Sequence
  ENSG00000130935_4 (sequence is synthesized)
aagtttttcgtagtattcagacatcctgttttaatttttattactgaaaaacatggaaattactttgcttacgtgcaaatgtttaactcacgtatcttaaccaaatatacactcttactt

SEQ ID NO: 289268 - DNA, 120 bp, Artificial Sequence
  ENSG00000130935_5 (sequence is synthesized)
ggacaagacgaaaactctgttataaagagttttactgcatctgtagatcggaaattcatctctttgatgtcattaagctctgatggttgtatatatgaaaccttgataccaatacgtcca

SEQ ID NO: 289269 - DNA, 120 bp, Artificial Sequence
  ENSG00000130935_6 (sequence is synthesized)
gctgacccagaaaaaaatcagagcttagttaaatcactgctgctcaaggctgttgtatctggtaacgctcgaaatggagttgcactcactgccctggatcaggatcacgtcgcagtccta

SEQ ID NO: 289270 - DNA, 120 bp, Artificial Sequence
  ENSG00000130935_7 (sequence is synthesized)
ggaagtccactagcagcttctaaggaatgcctctctgtatggaacataaaatttcaaacactacagacttcaaaagagttaccacaagggaccagtggtcaactctggtattatggagaa

SEQ ID NO: 289271 - DNA, 120 bp, Artificial Sequence
  ENSG00000130935_8 (sequence is synthesized)
catttgtttatgctacatggaaaatctctaactgtgattccatacaagtgtgaagtgtcatcattagcaggtgctcttggaaaactcaagcatagtcaagatccaggaactcatgtcgtg

SEQ ID NO: 289272 - DNA, 120 bp, Artificial Sequence
  ENSG00000130935_9 (sequence is synthesized)
tcccattttgtaaactgggagacacctcaaggatgtggacttgggttccagaactcagagcagtcaagaagaattttaaggagacgaaaaattgaagtgagtttacagccagaggttcca

SEQ ID NO: 289273 - DNA, 120 bp, Artificial Sequence
  ENSG00000130935_10 (sequence is synthesized)
ccatccaaacaacttttgtcaaccataatgaaagattcagaaaaacacattgaagtagaagtacggaaatttttggctctgaagcagacacctgactttcatactgtcattggggacaca

SEQ ID NO: 289274 - DNA, 120 bp, Artificial Sequence
  ENSG00000130935_11 (sequence is synthesized)
ctttcttacagtttgtgccccgacttaatggagattgccttaaaaaagaaagatgtacagttgttacaactctgtctacagcagttccctgacattcctgaatcagtcacctgtgcttgc

SEQ ID NO: 289275 - DNA, 120 bp, Artificial Sequence
  ENSG00000130935_12 (sequence is synthesized)
ttaaaaattttcttgagcattggtgatgacagtcttcaagaaacagatgttaatatggagtcagtttttgactatagtataaattctgtacatgatgagaaaatggaagagcaaactgaa

SEQ ID NO: 289276 - DNA, 120 bp, Artificial Sequence
  ENSG00000130935_13 (sequence is synthesized)
attcttcaaaatggcttcaatcctgaagaagataaatgcaataactgtgatcaagagttaaataaaaagccccaggacgaaacaaaggagagcacttcatgccctgtggtacaaaaaaga

SEQ ID NO: 289277 - DNA, 120 bp, Artificial Sequence
  ENSG00000130935_14 (sequence is synthesized)
gcagctctacttaatgcaattcttcattcagcatatagcgagacatttcttctgcctcatttgaaagacatcccagcacagcatatcacgctgtttcttaagtatttgtatttcctgtac

SEQ ID NO: 289278 - DNA, 120 bp, Artificial Sequence
  ENSG00000130935_15 (sequence is synthesized)
ctgaagtgtagcgaaaatgctactatgactcttcctggaatacacccacctaccttgaaccagattatggattggatatgtctacttctggatgcaaattttactgttgttgtaatgatg

SEQ ID NO: 289279 - DNA, 120 bp, Artificial Sequence
  ENSG00000130935_16 (sequence is synthesized)
ccagaagcaaagaggctactgataaatctttacaagcttgtaaaatctcagatatctgtttattctgagctcaacaagattgaagtaagttttcgggagctacagaaattaaatcaagaa

SEQ ID NO: 289280 - DNA, 120 bp, Artificial Sequence
  ENSG00000130935_17 (sequence is synthesized)
aagaataatagaggattatattcaattgaagtgctggagctcttctgatattatcaattctccttcatagacattttataaagctcttttatgtgaactcttgcttcatccaggcaagaa

SEQ ID NO: 289281 - DNA, 120 bp, Artificial Sequence
  ENSG00000130935_18 (sequence is synthesized)
cggtgttttgtttgcgaccatctcagtgtcaagagaaacgtgtcagtgagtacctggaccatcacttaactgatgctccggggtaggactgcaggtttcacatgaacctgttctaggctg

SEQ ID NO: 289282 - DNA, 120 bp, Artificial Sequence
  ENSG00000130935_19 (sequence is synthesized)
tggacattggtgtggagaggttctgcaattttttaaaaatatgtaactgggttgattttaagtaaaattatttgtgtattgataaaagtctaatttcttatcatgtgttttgaatttttt

SEQ ID NO: 289283 - DNA, 120 bp, Artificial Sequence
  ENSG00000130935_20 (sequence is synthesized)
cttttaataaaaaatgaccattgaagcagtgattctaggaagaatgtaattttatcagagtcagaagctgcccctgctcatttgttccacagctcacctttatttcacacatttgcagtg

SEQ ID NO: 289284 - DNA, 120 bp, Artificial Sequence
  ENSG00000130935_21 (sequence is synthesized)
tgtcttctgccacaagcagggcagagaggggccctcacacaggcacgtgattgcctcctgcggtctcccctgtcctttaggacaaatgaaaagttcaagtgtgattctacagcccagctt

SEQ ID NO: 289285 - DNA, 120 bp, Artificial Sequence
  ENSG00000130935_22 (sequence is synthesized)
tacagaaagaatcctgatggctgaatttaccttgcagtagtgaaaagctgcgttttaggtcaggcactgtatgtaaactttagtcacacatgtggccgttaataaacaggttctcctcca

SEQ ID NO: 289286 - DNA, 120 bp, Artificial Sequence
  ENSG00000130935_23 (sequence is synthesized)
taagaaggcctttgtatgtttccttcacggtgtaccttttagtcttccttttctttttcatttcgttattacccagactaattcattctctttatcagcatactcaattttttttgtgcc

SEQ ID NO: 289287 - DNA, 120 bp, Artificial Sequence
  ENSG00000130935_24 (sequence is synthesized)
ttcctaattcttcttgaattggtttttatttttattttgcattgatctttcaaaaacacttcttgctatcaccaccatgctcataactatgtcataaagaaataaaaatggcgaatatac

SEQ ID NO: 289288 - DNA, 120 bp, Artificial Sequence
  ENSG00000130935_25 (sequence is synthesized)
tagtcaccatcatactagcctgcaggtatttgaaacattagtaagcctacatttgaggattggattcttggcaacatttcacatcatggaaatccactggacatgaacaccttgaaatgt

SEQ ID NO: 289289 - DNA, 120 bp, Artificial Sequence
  ENSG00000130935_26 (sequence is synthesized)
atccccggaactgtctgatgcagcttatccaaacgcatgtgctttcttacaggtagctgtttgtgtgtaccacactgtacgtgcataattcttctgaccttgttttttatagttctaatc

SEQ ID NO: 289290 - DNA, 120 bp, Artificial Sequence
  ENSG00000130935_27 (sequence is synthesized)
tttataggatatagttatatgccaagcagtaaccaaggagtaactcaataatttaaggtttttctttccttttccaattgttttttgtttctgtttgaaaatagattatgttcaatgcta

SEQ ID NO: 289291 - DNA, 90 bp, Artificial Sequence
  ENSG00000130935_28 (sequence is synthesized)
tcaatgctacgttaagtaaggtttacttaaacctgtttaatttaactaggctgggcatgttgaggccgaggtgggaggattgtctgagcc

SEQ ID NO: 289292 - DNA, 120 bp, Artificial Sequence
  ENSG00000130935_29 (sequence is synthesized)
catctctacatcagatttaaaaaaaaaaaaaagaagaagctatactaacacagaagctctatcaattctgaagatcagtattctgaataaataccaattaaagtattccacatgatctcc

SEQ ID NO: 289293 - DNA, 120 bp, Artificial Sequence
  ENSG00000130935_30 (sequence is synthesized)
aatgattaggagagtgtttggtgatagagctcttttagagatgtaaaacttttgtataaatttagaaaactaacattgacaaaggaagttactcataagttcaatagaatagcttctatt

SEQ ID NO: 289294 - DNA, 60 bp, Artificial Sequence
  ENSG00000130935_31 (sequence is synthesized)
tcagcagaagtatataggatactttcagtgcaagggacagaacccttggtgctcttcaag

SEQ ID NO: 289295 - DNA, 120 bp, Artificial Sequence
  ENSG00000130935_32 (sequence is synthesized)
atttttctcataactgtttatttatggactttgtaaagtgaattaacctgaagttaaatttaaaatcttaacttccttttcctattcatcttcagattatggattggatatgtctacttc

SEQ ID NO: 289296 - DNA, 120 bp, Artificial Sequence
  ENSG00000130935_33 (sequence is synthesized)
tgggattacaggcgtgagccactgccctcggccagtaaattttttaaatgctgtcattttaatggtttcttttattgattataaacttaattgcttttaatgtttgaagttgacttcttg

SEQ ID NO: 289297 - DNA, 120 bp, Artificial Sequence
  ENSG00000130939_0 (sequence is synthesized)
gacggggtgggacggaggcggggagaggacgcaggcgagaggaactcggcggcgcggcgcccgcggcctattggctgccacgtcccggcgccagaagccccgcctccctgacgggggtca

SEQ ID NO: 289298 - DNA, 120 bp, Artificial Sequence
  ENSG00000130939_1 (sequence is synthesized)
cgtgatccctttcaaagatggccgccctgttgttttgatgaataatacttggtggggcgagggggaaagagtaggggtggaggggtaggaggatttactcttccagcgagagctacgcgc

SEQ ID NO: 289299 - DNA, 120 bp, Artificial Sequence
  ENSG00000130939_2 (sequence is synthesized)
atcccatcctccccctcccccctacccgggctccggcgtggaggcggggcgtggccggcctgctttgggaggggaggggcttcccttacagtgctgggctctgccaggacggctgtgggg

SEQ ID NO: 289300 - DNA, 120 bp, Artificial Sequence
  ENSG00000130939_3 (sequence is synthesized)
tcgccttacctcggggtatccactctgcagtcgaccagttcccgccaggagcaaagggtaggaaggagagcaggatctgctgtaggaacgcagctaccgcgccactatcacgaagaaaca

SEQ ID NO: 289301 - DNA, 120 bp, Artificial Sequence
  ENSG00000130939_4 (sequence is synthesized)
gcaggctcggggcacgagacgaactggagaccgcgctgcctagctgggtaacctgggaagcagagggtaataagtggcgccttaagacaaccctgtagcagcagcagtggcggccaaagg

SEQ ID NO: 289302 - DNA, 120 bp, Artificial Sequence
  ENSG00000130939_5 (sequence is synthesized)
aggctgctcagggaacaagcggctgtagtagtctgtggggcgactggagtgaccgaagccaaggcagtttagtgcctctcgtgttcttattttttaacctctgactatgcaattctgaaa

SEQ ID NO: 289303 - DNA, 120 bp, Artificial Sequence
  ENSG00000130939_6 (sequence is synthesized)
cctcccccattcgggggaccagacagcctgatagacaccttccactctccttcctcccgccgtggtctcgagaacagaaggatctctccttaacgcctttcaccattaagaggaaagcga

SEQ ID NO: 289304 - DNA, 120 bp, Artificial Sequence
  ENSG00000130939_7 (sequence is synthesized)
tggaggagctgagcgctgatgagattcgacggaggcgccttgcacgacttgctggtggacagacctctcagccaaccaccccactcacctctccccagagggagaaccctccggggcctc

SEQ ID NO: 289305 - DNA, 120 bp, Artificial Sequence
  ENSG00000130939_8 (sequence is synthesized)
ccatagcggcatcagccccaggaccctctcagagtcttggtctcaatgtccacaacatgaccccagctacctccccaataggtgcatcaggagtagcccatcgaagccagagcagtgaag

SEQ ID NO: 289306 - DNA, 120 bp, Artificial Sequence
  ENSG00000130939_9 (sequence is synthesized)
gagtcagttctctcagcagctcgccctctaatagccttgaaacgcaatctcagtctctctcacgttcccagagcatggatatcgatggtgtctcatgtgagaaaagcatgtcccaggtgg

SEQ ID NO: 289307 - DNA, 120 bp, Artificial Sequence
  ENSG00000130939_10 (sequence is synthesized)
atgtggattcaggaattgaaaacatggaggttgatgaaaatgatcgaagagaaaagcggagcctcagtgataaggagccttcctcgggccctgaagtgtctgaagagcaggccttacagc

SEQ ID NO: 289308 - DNA, 120 bp, Artificial Sequence
  ENSG00000130939_11 (sequence is synthesized)
tggtctgtaagatcttccgtgtctcttggaaggaccgggacagagatgtcatctttctttcttctctttctgcacagtttaagcagaacccaaaagaagtattctccgattttaaggact

SEQ ID NO: 289309 - DNA, 120 bp, Artificial Sequence
  ENSG00000130939_12 (sequence is synthesized)
tgattggccagattttaatggaagtgctaatgatgtccactcagaccagagatgaaaacccatttgccagtctgacagccacatcacagccaattgctgcagcagcacggtcaccagaca

SEQ ID NO: 289310 - DNA, 120 bp, Artificial Sequence
  ENSG00000130939_13 (sequence is synthesized)
gaaatctcttgctaaacactggctccaatccaggaacaagccccatgttctgcagcgtggcttcctttggtgccagctctttgtctagtttgggagcctctggtggagcaagtaattggg

SEQ ID NO: 289311 - DNA, 120 bp, Artificial Sequence
  ENSG00000130939_14 (sequence is synthesized)
attcctacagtgaccatttcaccattgaaacctgcaaagagacagatatgctgaactacctcatcgagtgtttcgaccgagttggaatagaggaaaaaaaagcaccaaagatgtgcagcc

SEQ ID NO: 289312 - DNA, 120 bp, Artificial Sequence
  ENSG00000130939_15 (sequence is synthesized)
agccagcagtcagccagcttctgagcaacatccgctcacagtgcatatcccatactgctttagtactacaaggctccctaacacagcccaggtccttgcagcagccgtccttcctagtgc

SEQ ID NO: 289313 - DNA, 120 bp, Artificial Sequence
  ENSG00000130939_16 (sequence is synthesized)
cgtatatgctgtgtaggaatctcccatatggcttcattcaggaactggtgagaaccactcaccaggatgaagaagtgttcaagcagatatttatccccattttacaaggcctggctcttg

SEQ ID NO: 289314 - DNA, 120 bp, Artificial Sequence
  ENSG00000130939_17 (sequence is synthesized)
ctgccaaagagtgctccctcgacagtgactactttaaataccccctcatggcactaggtgagctctgtgaaaccaagtttgggaagacacaccctgtgtgcaatttggttgcttctttgc

SEQ ID NO: 289315 - DNA, 120 bp, Artificial Sequence
  ENSG00000130939_18 (sequence is synthesized)
ggttgtggttgccgaaatccttaagtcctggctgtgggcgggagctgcagagactctcttacttaggggctttctttagcttctcagtctttgcagaagatgatgttaaagtggttgaaa

SEQ ID NO: 289316 - DNA, 120 bp, Artificial Sequence
  ENSG00000130939_19 (sequence is synthesized)
tttaagattctgcatagtattttgttaaatggcgaaacccgtgaggctgctctcagttacatggcggctgtcgtcaatgccaatatgaagaaagcacagatgcagacagatgatagattg

SEQ ID NO: 289317 - DNA, 120 bp, Artificial Sequence
  ENSG00000130939_20 (sequence is synthesized)
gtgtctacagatggatttatgctgaatttcctttgggtactgcagcagctaagtacaaaaatcaagttagaaacagttgatcccacgtatatttttcacccaagatgtcggattactctt

SEQ ID NO: 289318 - DNA, 120 bp, Artificial Sequence
  ENSG00000130939_21 (sequence is synthesized)
cccaatgatgagacgcgtgtgaatgcaacgatggaagatgtgaatgactggctgactgaactctatggcgatcagcctccattttctgagccgaaattccctacggagtgcttctttctc

SEQ ID NO: 289319 - DNA, 120 bp, Artificial Sequence
  ENSG00000130939_22 (sequence is synthesized)
accctgcatgctcaccacctctctattctgcctagttgccgtcgctatatccgcagactccgggctatccgggagctcaatagaactgtagaagatttgaaaaataatgaaagccaatgg

SEQ ID NO: 289320 - DNA, 120 bp, Artificial Sequence
  ENSG00000130939_23 (sequence is synthesized)
aaagattccccactggcaactagacaccgcgaaatgctgaagcgctgtaaaactcagcttaagaaactggtacggtgcaaggcctgtgctgatgctggcctacttgacgagagcttcctg

SEQ ID NO: 289321 - DNA, 120 bp, Artificial Sequence
  ENSG00000130939_24 (sequence is synthesized)
agaagatgtctgaatttttatggccttctcattcagctgctgctccgcatcctggaccccgcatatcccgatataacactgcctttaaattcagatgtccccaaggtatttgcagcgttg

SEQ ID NO: 289322 - DNA, 120 bp, Artificial Sequence
  ENSG00000130939_25 (sequence is synthesized)
cctgagttttatgtagaagatgttgcagaatttttattttttattgtacaatactctccccaggcgctttatgagccctgtactcaggatattgtgatgttccttgttgtgatgttgtgc

SEQ ID NO: 289323 - DNA, 120 bp, Artificial Sequence
  ENSG00000130939_26 (sequence is synthesized)
aaccagaactacatccgaaacccatatttggtggccaaactggtagaagtcatgtttatgaccaaccctgctgttcagccacgaacccagaagttttttgaaatgattgagaaccatcct

SEQ ID NO: 289324 - DNA, 120 bp, Artificial Sequence
  ENSG00000130939_27 (sequence is synthesized)
ctctccaccaagttgttggtaccttccctgatgaagttttatacagatgttgagcataccggagccaccagtgagttttatgacaagttcacaattcgctatcatattagcaccattttt

SEQ ID NO: 289325 - DNA, 120 bp, Artificial Sequence
  ENSG00000130939_28 (sequence is synthesized)
aaaagcctttggcaaaacatagctcaccatggcacctttatggaggagttcaactccgggaagcagtttgttcgctatataaacatgttgataaacgacacgacgtttttgctcgatgaa

SEQ ID NO: 289326 - DNA, 120 bp, Artificial Sequence
  ENSG00000130939_29 (sequence is synthesized)
agtctggagtctctgaagcgaatccatgaagtgcaggaagagatgaagaacaaagaacagtgggaccagttgccccgggatcagcagcaggctcgtcagtctcagcttgctcaggatgag

SEQ ID NO: 289327 - DNA, 120 bp, Artificial Sequence
  ENSG00000130939_30 (sequence is synthesized)
cgtgtgtcccgctcttacctcgccctggccaccgaaaccgtggacatgttccacatcctcacgaagcaggtccagaagcccttcctcagaccggagcttggaccccgattggctgcaatg

SEQ ID NO: 289328 - DNA, 120 bp, Artificial Sequence
  ENSG00000130939_31 (sequence is synthesized)
ctgaactttaatcttcagcaactttgtggccccaagtgccgtgacctgaaagttgaaaaccctgagaaatacggctttgaaccaaagaagctgttggaccaactgacggatatttactta

SEQ ID NO: 289329 - DNA, 120 bp, Artificial Sequence
  ENSG00000130939_32 (sequence is synthesized)
cagctggactgtgctcggttcgcgaaagccattgctgacgaccagagatcctacagtaaggaattgtttgaagaagttatttcaaagatgcggaaggcagggatcaaatccacaatagca

SEQ ID NO: 289330 - DNA, 120 bp, Artificial Sequence
  ENSG00000130939_33 (sequence is synthesized)
atagaaaaatttaagctgctcgccgagaaagtggaggagatagtggccaagaacgcacgcgcagaaatcgactacagcgacgctcctgatgagttcagagaccctctgatggacaccctc

SEQ ID NO: 289331 - DNA, 120 bp, Artificial Sequence
  ENSG00000130939_34 (sequence is synthesized)
atgacagaccccgtgcggctgccctctggcaccatcatggaccgctccatcatcctgcggcacctgctcaactcccccacggaccccttcaaccggcagacgctgacagagagcatgctg

SEQ ID NO: 289332 - DNA, 120 bp, Artificial Sequence
  ENSG00000130939_35 (sequence is synthesized)
gaaccagtgccagaactgaaagagcagattcaggcgtggatgagagagaaacagaacagcgatcactaaaccgttccgccgcccaccctctgctagacacagccaaggccaacgaggcaa

SEQ ID NO: 289333 - DNA, 120 bp, Artificial Sequence
  ENSG00000130939_36 (sequence is synthesized)
gcagaagcagcggccgcagcgaagctgccgttcatgtgttggaggccaaatgtggcaaaccaaccccaggcccacccagagcgagcaaacgctgagacctgaaaggacatggatgagaag

SEQ ID NO: 289334 - DNA, 120 bp, Artificial Sequence
  ENSG00000130939_37 (sequence is synthesized)
aggagcccgcttcctgtacatatatttaagtgacaaacacggtcaaaagcttaagggacaggttttatggttgcttgtgtaataaagcatgtccttcgtatgtcacagtttggggcaacg

SEQ ID NO: 289335 - DNA, 120 bp, Artificial Sequence
  ENSG00000130939_38 (sequence is synthesized)
gaagtcttttagtgatggctaatgggtctgggcagcatcccttcatgaatttttttttaatccaatatccgttgatttgattgtgattagagaaccttggacattttgctgctaaagaat

SEQ ID NO: 289336 - DNA, 120 bp, Artificial Sequence
  ENSG00000130939_39 (sequence is synthesized)
tacttttaaaaagtaagcccaagaaaatgacaacttaggaaaaatatttccaacatgtataagagacaaattgtttagatcctaatttatgaagaactcttaaaaattaataagaaaaaa

SEQ ID NO: 289337 - DNA, 120 bp, Artificial Sequence
  ENSG00000130939_40 (sequence is synthesized)
gatggaccattatcattttcctttcctgattaactgatattttaaaacattttctcacccagcagctacagtgacattgtgcggatttataaaaggtaaaaggcttgtttgtcttttgta

SEQ ID NO: 289338 - DNA, 120 bp, Artificial Sequence
  ENSG00000130939_41 (sequence is synthesized)
ttggttgatggttttaagataaaataatctgaaaatgcaagattaaaataatggtcaaaatgaacacctctaattgcagatttcctcgtcttcattctgcattggcacagaactttttct

SEQ ID NO: 289339 - DNA, 120 bp, Artificial Sequence
  ENSG00000130939_42 (sequence is synthesized)
ttaacttttcagaggataaaactacctgataggatgtttagaactatctcattaaaaagtaaaagtttatttctttataataaatgagctgatgcttgatatccaggactgtctttgttg

SEQ ID NO: 289340 - DNA, 120 bp, Artificial Sequence
  ENSG00000130939_43 (sequence is synthesized)
tctcatactgtgtatttgaaaatatctctcttttgtctgtgaacttttctatcaaatatagtattattgtcatataataataattactattttataattaggattctagttgcgtaaagg

SEQ ID NO: 289341 - DNA, 120 bp, Artificial Sequence
  ENSG00000130939_44 (sequence is synthesized)
gttgcgtaaagggggtgctaagagaactgcattgatcataatatcatctaataatttgatagccttctgaatcatctgtcttcttgatctagaatcgtgtcaattaaaagtatttgcaga

SEQ ID NO: 289342 - DNA, 120 bp, Artificial Sequence
  ENSG00000130939_45 (sequence is synthesized)
gtttttgttgctgtacttctcgttaggtatcagtgtagactatagatatatataaatgtttatacctaatgtggttcaaccaaaacatctgttagtaataaagaagatccttgcctataa

SEQ ID NO: 289343 - DNA, 120 bp, Artificial Sequence
  ENSG00000130939_46 (sequence is synthesized)
agaaatggggagtaaagttgaaatataatgttgtctttcttcagcttatgatacacagcacctgtaaggattctttgaagattaatccaaccaattcctgttcctccactgaaatgggag

SEQ ID NO: 289344 - DNA, 120 bp, Artificial Sequence
  ENSG00000130939_47 (sequence is synthesized)
gtttctggagctctgttcccgtgatgggcccgtctcttgcctcaccttcccgtgcagccagccagttggctgtgccttccactcccctcagtcctcacagtgcagcctctggaactgctg

SEQ ID NO: 289345 - DNA, 120 bp, Artificial Sequence
  ENSG00000130939_48 (sequence is synthesized)
cgggaagccagccttcatccccgcggtatcgcccctacactgtcactcacccatgggcgtcctcaggcgtctccattctgtcgagctccccaagtccccctgccctcgccagtagccccc

SEQ ID NO: 289346 - DNA, 120 bp, Artificial Sequence
  ENSG00000130939_49 (sequence is synthesized)
aagcagtgcccgccagcagttccagacagaggcccagcagcacgggtccacccctaccacccgcctcacccagtgccacgagcagacgcccctcctccctgaggatctctcctagtatgt

SEQ ID NO: 289347 - DNA, 120 bp, Artificial Sequence
  ENSG00000130939_50 (sequence is synthesized)
acgacaatcctttctccttcctcttcctcgcactttctggggacagtagtgatgaagaagatgaagaagaagatgatgatgatggtgatggtgatgatgaaggtggtggtggtggtgatg

SEQ ID NO: 289348 - DNA, 120 bp, Artificial Sequence
  ENSG00000130939_51 (sequence is synthesized)
ttgcactgctgtggatttttttaagagaagcaaaaacaaaagtaaactcctttccctggccctccaaacatatattctgtgagataactgtgcctgctaccaagtgttaatcctgggatc

SEQ ID NO: 289349 - DNA, 120 bp, Artificial Sequence
  ENSG00000130939_52 (sequence is synthesized)
gtatttttatatcatattcacatatttgtttttttaattggtgttagatgacatgattaataaaaaaggcaagatattttcagaatttgaatttcagttttttttttcttttgaaatgtc

SEQ ID NO: 289350 - DNA, 120 bp, Artificial Sequence
  ENSG00000130939_53 (sequence is synthesized)
cctttaagatttttttattctaaacaaaataaagaaaatcctgctgctctggtccttgtgataagcctctcttcggcatctgaggagcagctgcagcaaaatctaggggtgtaagtgtat

SEQ ID NO: 289351 - DNA, 120 bp, Artificial Sequence
  ENSG00000130939_54 (sequence is synthesized)
caggacttatgtgacttatattttggggagatgagggttgggttttttttttaatgctacgtgacagtttgaaaccttcacagttatcctctgggggtaaatcaattcttcaacccttgg

SEQ ID NO: 289352 - DNA, 120 bp, Artificial Sequence
  ENSG00000130939_55 (sequence is synthesized)
gtgtgtgagtttgaggcagggtcatttgtgtgatgtgtttggccttaccaaagcaaaagagggtgcaagaatgtgggagtatgtctgccggtttcaacacacacagacaaacacagccac

SEQ ID NO: 289353 - DNA, 120 bp, Artificial Sequence
  ENSG00000130939_56 (sequence is synthesized)
acgcgcacacaagtataagactttttgtattactgctccctacttaacatacttgaattctcaaatttcctttggggtaaaaaaaaaaaaaggatttgaaaccataaagtgttctgaaga

SEQ ID NO: 289354 - DNA, 120 bp, Artificial Sequence
  ENSG00000130939_57 (sequence is synthesized)
aattaagtctataaaaagcatactttcttttttcttttccttttttccctccacagacaatgtcctctgttcaattcctaacgcaaactacaataaatggtgacacacgttcagaagaaa

SEQ ID NO: 289355 - DNA, 120 bp, Artificial Sequence
  ENSG00000130939_58 (sequence is synthesized)
ataacgaggacacagtgagtgagagggtacaataatgagaggcaggaagcggaagactgttgaagctaaaatcagaaatcattgtgatcattctctaggtcagtggatcctgctgtgcca

SEQ ID NO: 289356 - DNA, 120 bp, Artificial Sequence
  ENSG00000130939_59 (sequence is synthesized)
tacgttggaatcaccttggaatcagctggggatctttaaaggtgtttctgcctggctccccaccccagaccttgtgatttaattcaccaggggtgtggcatggcattggggtttccaaag

SEQ ID NO: 289357 - DNA, 120 bp, Artificial Sequence
  ENSG00000130939_60 (sequence is synthesized)
gcttcccatgtgatcctaatatgcagccacgtttgtgaactcctgcactaggcagtgagaacgcttccttctgagttgaggctgcctgaacctcaaaggcatctcaacgttgtgtcaatg

SEQ ID NO: 289358 - DNA, 120 bp, Artificial Sequence
  ENSG00000130939_61 (sequence is synthesized)
cctaaatgcactcttcggctcatgtagcaacttctagagctgcgtccgaatcacagaggaaattaactgttgaaaataatgtttgattgagttaccatgggcatgctaaattatgtttat

SEQ ID NO: 289359 - DNA, 120 bp, Artificial Sequence
  ENSG00000130939_62 (sequence is synthesized)
gtccctaaaaagtgtttttcatcgttctctaatgttaggatggttggatgtctgaaggaaagtgttggaattcttaaaagtactagaaatcttgaaaccaagttatgtttttaaatatgt

SEQ ID NO: 289360 - DNA, 120 bp, Artificial Sequence
  ENSG00000130939_63 (sequence is synthesized)
tttgaatttgatagcttattaaattgtaattatttatagtcatgtttaacactggcaagaggagccatctaaagtttatgaaataaatctttttgacatggaaagatatgaagtggaaaa

SEQ ID NO: 289361 - DNA, 120 bp, Artificial Sequence
  ENSG00000130939_64 (sequence is synthesized)
acttttttgtaaaaaacatatatagatacagtacacaaaaatatatctgaaaactgttgctcaaaatatcaatagaggttatctttgagggtaaagcttgagtaatttttagtttcattt

SEQ ID NO: 289362 - DNA, 120 bp, Artificial Sequence
  ENSG00000130939_65 (sequence is synthesized)
tatatttctgttttatttcaagttttcacattgcatgtgttttagtttattaatcagaaaaagtagtgaagctgctgccatttcagagggaatgcatgtgtgccattttagagggaacga

SEQ ID NO: 289363 - DNA, 120 bp, Artificial Sequence
  ENSG00000130939_66 (sequence is synthesized)
atttatagcagcagttaaaactgtttctttatgctacaaatgacagtcagtttaagatgaaatgcatttaaatgactctgatcttatttctaggcactaggtgagctctgtgaaaccaag

SEQ ID NO: 289364 - DNA, 120 bp, Artificial Sequence
  ENSG00000130939_67 (sequence is synthesized)
acaccgcgaaatgctgaagcgctgtaaaactcagcttaaggtttgtatagctaagtggaataattatagaccagcctcatagtgataattttcccaacagaatatatgccttgagtgagc

SEQ ID NO: 289365 - DNA, 120 bp, Artificial Sequence
  ENSG00000130939_68 (sequence is synthesized)
agtttagtgtcctcactttttctttgttattcttttcccttccaataaaatagtatattttaaaacttgttgataccttacttatatgtgtatataatgatttcagtctcaggacagaat

SEQ ID NO: 289366 - DNA, 120 bp, Artificial Sequence
  ENSG00000130939_69 (sequence is synthesized)
tttcagtctcaggacagaatatggatagatatgcttctgctgtgattatgaattcttaatgggttttatgattctcagtttaacatcacctcccttggccgggcgcagtggctcacacct

SEQ ID NO: 289367 - DNA, 120 bp, Artificial Sequence
  ENSG00000130939_70 (sequence is synthesized)
tgacttaaagccagataacaaccctgaagattctaagggcagggctgcctttgcaagtggggattcacattttcaaagaattcccagaagtcctaagacaaagaattccagcctgccgtc

SEQ ID NO: 289368 - DNA, 120 bp, Artificial Sequence
  ENSG00000130940_0 (sequence is synthesized)
gcgcgcccgcggcgctccatcccaaacacacacacatttttcccccggacttggaaagtcacccaaagccgccccaagtgcaggcaaacagaccttgctgactgaaggcaaagactcctc

SEQ ID NO: 289369 - DNA, 120 bp, Artificial Sequence
  ENSG00000130940_1 (sequence is synthesized)
catcccacctgccctcccagctgccacggccatcgacccctcctttacaaggggctcctgcaactccccagcagcacgtgttggaatggacttcggaccctggcctcttgggatgcaaag

SEQ ID NO: 289370 - DNA, 120 bp, Artificial Sequence
  ENSG00000130940_2 (sequence is synthesized)
gatgaagtgacacccccagctacatccgaggaggttctaggacctgctacgagagtttgggaccaaggagaagagaatggatcttggaacagctgagggcacccggtgcacggacccgcc

SEQ ID NO: 289371 - DNA, 120 bp, Artificial Sequence
  ENSG00000130940_3 (sequence is synthesized)
tgcaggcaagcccgccatggcgcccaaacgcaagggtggcctgaagctgaacgccatctgcgccaagctgagccgccaggtggtggtggagaagcgagctgacgccggctcccacacgga

SEQ ID NO: 289372 - DNA, 120 bp, Artificial Sequence
  ENSG00000130940_4 (sequence is synthesized)
gggcagcccatcgcagccccgggaccaagagcgcagtggccctgagtctggggcagcccgggccccccgcagcgaggaagacaagagacgggcagtgatcgagaagtgggtgaacgggga

SEQ ID NO: 289373 - DNA, 120 bp, Artificial Sequence
  ENSG00000130940_5 (sequence is synthesized)
gtacagcgaggagccggcacccacacccgtgttggggcggattgcccgcgagggcctggagctgcctcccgagggtgtctacatggtgcagccccaggggtgcagcgatgaggaagacca

SEQ ID NO: 289374 - DNA, 120 bp, Artificial Sequence
  ENSG00000130940_6 (sequence is synthesized)
cgcggaggagccctccaaggacggcggtgccctggaggagaaggattcggacggggcagcctccaaggaggacagcggccccagcaccaggcaggcttcaggagaggcctcctcgctgcg

SEQ ID NO: 289375 - DNA, 120 bp, Artificial Sequence
  ENSG00000130940_7 (sequence is synthesized)
ggactacgcggcctccaccatgaccgagttcctcggcatgtttggctatgatgaccagaacacgcgggacgagctggccaggaagatcagctttgagaagctgcacgcgggctccacccc

SEQ ID NO: 289376 - DNA, 120 bp, Artificial Sequence
  ENSG00000130940_8 (sequence is synthesized)
ggaggcagccacctcctccatgctgcccacctccgaggataccctcagcaagcgggcgcggttctctaagtatgaggagtacatccgcaagctcaaggctggcgagcagctctcctggcc

SEQ ID NO: 289377 - DNA, 120 bp, Artificial Sequence
  ENSG00000130940_9 (sequence is synthesized)
ggcccccagcaccaagaccgaggagcgggtgggcaaggaggtggtgggcaccctgcccggcctgcggctgcccagcagcacggcccacctggagaccaaggccaccatcctgcccctgcc

SEQ ID NO: 289378 - DNA, 120 bp, Artificial Sequence
  ENSG00000130940_10 (sequence is synthesized)
gtcgcacagcagtgtccagatgcagaacctggtagcccgggcctccaagtacgacttcttcatccaaaaactgaagaccggcgagaatctgcggccccagaacgggagcacctacaagaa

SEQ ID NO: 289379 - DNA, 120 bp, Artificial Sequence
  ENSG00000130940_11 (sequence is synthesized)
gccatccaagtacgacctggagaatgtcaagtacctgcacctcttcaaacccggggagggcagccccgacatgggcggggccatcgccttcaagacaggcaaggtggggcgcccttccaa

SEQ ID NO: 289380 - DNA, 120 bp, Artificial Sequence
  ENSG00000130940_12 (sequence is synthesized)
ccaagtacgacgtccggggcatccagaagccaggccccgccaaggttccgcccacccccagcctggctcccgcacccctcgccagcgtgcccagtgcccccagcgcccccgggccagggc

SEQ ID NO: 289381 - DNA, 120 bp, Artificial Sequence
  ENSG00000130940_13 (sequence is synthesized)
gcctcctgcctccctgtccttcaacactcccgagtacctgaagtcaaccttctccaaaacagactccatcaccacggggaccgtctccactgtcaagaacggactgcccacagataaacc

SEQ ID NO: 289382 - DNA, 120 bp, Artificial Sequence
  ENSG00000130940_14 (sequence is synthesized)
agccgtcactgaagatgtaaacatttaccagaaatatattgccaggttctcgggcagccagcactgtggccacatccactgtgcctaccagtaccgcgagcactaccactgccttgaccc

SEQ ID NO: 289383 - DNA, 120 bp, Artificial Sequence
  ENSG00000130940_15 (sequence is synthesized)
tgagtgtaactaccagaggttcacgagtaagcaggacgtgatccgccactacaacatgcacaagaagcgcgacaactccctgcagcacggcttcatgcgtttcagcccgctggacgactg

SEQ ID NO: 289384 - DNA, 120 bp, Artificial Sequence
  ENSG00000130940_16 (sequence is synthesized)
cagcgtctactaccacggctgccacctcaatgggaagagcacccactatcactgcatgcaggtgggctgtaacaaggtgtacacgagcacgtctgacgtgatgacccacgagaacttcca

SEQ ID NO: 289385 - DNA, 120 bp, Artificial Sequence
  ENSG00000130940_17 (sequence is synthesized)
caagaagaatacccagctcattaacgacggcttccagcgcttccgagccaccgaagactgtggcacagccgactgccagttctacggacagaagaccacgcacttccactgcaggcgccc

SEQ ID NO: 289386 - DNA, 120 bp, Artificial Sequence
  ENSG00000130940_18 (sequence is synthesized)
cggctgcacattcactttcaagaacaagtgtgacatcgagaagcacaagagctaccacatcaaggacgatgcctacgccaaggacggcttcaagaagttctacaagtacgaggagtgcaa

SEQ ID NO: 289387 - DNA, 120 bp, Artificial Sequence
  ENSG00000130940_19 (sequence is synthesized)
gtacgagggctgcgtgtacagcaaggctaccaaccacttccactgcatccgcgccggctgcggcttcaccttcacctccaccagccagatgacctctcacaagcgcaagcatgagcgccg

SEQ ID NO: 289388 - DNA, 120 bp, Artificial Sequence
  ENSG00000130940_20 (sequence is synthesized)
gcacatccgctcctcgggcgcgctggggctgccgccctcgctgctgggcgccaaggacacggagcacgaggagtccagcaacgacgaccttgttgacttctccgccctgagcagcaagaa

SEQ ID NO: 289389 - DNA, 120 bp, Artificial Sequence
  ENSG00000130940_21 (sequence is synthesized)
ctccagcctgagcgcctcccctaccagccagcagtcctctgcgtccctggctgccgccactgccgccaccgaggctgggcccagtgccaccaaacctcccaacagcaagatctcggggct

SEQ ID NO: 289390 - DNA, 120 bp, Artificial Sequence
  ENSG00000130940_22 (sequence is synthesized)
gctgccccagggcctgcctggctcaatccccctggccctggccctctccaactcgggcctgcccacccccacgccctacttccccatactggctggccgtgggagcacctccctgcctgt

SEQ ID NO: 289391 - DNA, 120 bp, Artificial Sequence
  ENSG00000130940_23 (sequence is synthesized)
gggcacccccagcctcctgggtgccgtgtcgtctgggtcagcagcctcagccacccctgacacacccacgctggtcgcctcgggagctggagactcagcccccgtggctgccgcctctgt

SEQ ID NO: 289392 - DNA, 120 bp, Artificial Sequence
  ENSG00000130940_24 (sequence is synthesized)
cccggcaccacccgcctccatcatggagaggatctctgcaagcaagggcctcatctcgcccatgatggccaggctggctgcagctgccctcaagccctctgccacctttgacccaggaag

SEQ ID NO: 289393 - DNA, 120 bp, Artificial Sequence
  ENSG00000130940_25 (sequence is synthesized)
cgggcagcaggtcaccccagccaggttccccccggcccaagtgaagccggaacccggtgagagcaccggcgccccaggcccccacgaagcctcccaggaccgcagtctagacctgactgt

SEQ ID NO: 289394 - DNA, 120 bp, Artificial Sequence
  ENSG00000130940_26 (sequence is synthesized)
gaaggagcccagcaacgaatcaaatggccacgcagtcccggcaaattcatctcttttatcctcgcttatgaataagatgtctcagggcaaccctggcctgggcagcctgctgaacatcaa

SEQ ID NO: 289395 - DNA, 120 bp, Artificial Sequence
  ENSG00000130940_27 (sequence is synthesized)
ggcggaagcggaggggagccccgctgcggagccctcgcccttcctaggcaaggccgtgaaggcgctggttcaggagaagttggcagagccctggaaggtgtacctgcgcaggtttggtac

SEQ ID NO: 289396 - DNA, 120 bp, Artificial Sequence
  ENSG00000130940_28 (sequence is synthesized)
aaaggacttctgtgacggccagtgtgacttcctccacaaggcccacttccactgcgtggtggaggaatgcggcgcgctcttcagcaccttggacggggccatcaagcacgcaaacttcca

SEQ ID NO: 289397 - DNA, 120 bp, Artificial Sequence
  ENSG00000130940_29 (sequence is synthesized)
cttccggacagagggaggagcagcaaaaggaaacacagaggctgcctttccggcctcggccgccgagaccaaacctcccatggccccctcgtcccctccggtccctcctgtcaccacggc

SEQ ID NO: 289398 - DNA, 120 bp, Artificial Sequence
  ENSG00000130940_30 (sequence is synthesized)
cacggtgtcctctctggaggggcccgctcccagcccggcctccgtgccctccacccccaccctgctcgcctggaagcagctggcttccaccataccccagatgcctcagatcccagcgtc

SEQ ID NO: 289399 - DNA, 120 bp, Artificial Sequence
  ENSG00000130940_31 (sequence is synthesized)
agtgcctcacctgcccgcctcgcccttggcaacgacttctctagagaacgccaagccccaggtcaaacccggattcctccagttccaggagaacgatccttgcctcgccacggactgcaa

SEQ ID NO: 289400 - DNA, 120 bp, Artificial Sequence
  ENSG00000130940_32 (sequence is synthesized)
gtacgccaacaagttccacttccactgtctctttgggaactgcaagtacgtctgcaaaacgtctggcaaggccgaatcccactgcctggaccacatcaaccccaacaacaacctggtgaa

SEQ ID NO: 289401 - DNA, 120 bp, Artificial Sequence
  ENSG00000130940_33 (sequence is synthesized)
ttgcatactactctctgcagtgtctctgtcccaaccagcactgcgagttccgaatgcgtgggcactaccactgcctccgcaccggctgctattttgtgaccaacatcaccaccaagctcc

SEQ ID NO: 289402 - DNA, 120 bp, Artificial Sequence
  ENSG00000130940_34 (sequence is synthesized)
cctggcacatcaagaagcatgagaaggcggagcggcgggcagccaatggcttcaaatacttcaccaagcgcgaggagtgtggcaggctaggttgcaagtacaaccaggtgaacagccact

SEQ ID NO: 289403 - DNA, 120 bp, Artificial Sequence
  ENSG00000130940_35 (sequence is synthesized)
tccactgcatccgggagggctgccagttctccttcctcctcaagcaccagatgacctcccacgcgcggaagcacatgcggaggatgctggggaagaacttcgaccgcgtgcccccctccc

SEQ ID NO: 289404 - DNA, 120 bp, Artificial Sequence
  ENSG00000130940_36 (sequence is synthesized)
agggccccccaggcctgatggatgctgagacagatgagtgcatggactacactggctgcagcccaggcgccatgtcctctgagtcatccaccatggaccggagctgctccagcacccccg

SEQ ID NO: 289405 - DNA, 120 bp, Artificial Sequence
  ENSG00000130940_37 (sequence is synthesized)
tgggtaacgagagcaccgcggcagggaacaccatctctatgccgacagcctcgggggccaaaaagcgcttctggatcatcgaggacatgtcgcccttcggcaagcggcggaagacggcgt

SEQ ID NO: 289406 - DNA, 120 bp, Artificial Sequence
  ENSG00000130940_38 (sequence is synthesized)
cctcccggaagatgctggacgagggcatgatgctggagggcttccggcgcttcgacctttacgaggactgcaaggacgcagcttgtcagttctcgctcaaggtcacccactaccactgca

SEQ ID NO: 289407 - DNA, 120 bp, Artificial Sequence
  ENSG00000130940_39 (sequence is synthesized)
cgcgcgagaactgcggctacaagttctgcgggcgcacgcacatgtacaagcacgcgcagcaccacgaccgcgtggacaacctggtgctggacgacttcaagcgcttcaaggcctcactca

SEQ ID NO: 289408 - DNA, 120 bp, Artificial Sequence
  ENSG00000130940_40 (sequence is synthesized)
gctgccacttcgccgactgccccttctcgggcaccagcacgcacttccactgcctgcgctgccgcttccgctgcaccgacagcaccaaggtcacggcgcatcgcaagcaccacggcaaac

SEQ ID NO: 289409 - DNA, 120 bp, Artificial Sequence
  ENSG00000130940_41 (sequence is synthesized)
aggacgtgatcagcgccgcgggcttctgccagttcagctccagcgccgactgcgccgtgcccgactgcaagtacaagctcaagtgctcgcacttccactgcaccttcccgggctgccgcc

SEQ ID NO: 289410 - DNA, 120 bp, Artificial Sequence
  ENSG00000130940_42 (sequence is synthesized)
acacggtggtgggcatgtcgcagatggactcgcacaagcgcaagcacgagaagcaggagcgcggcgagcccgcggcagagggccccgcgcccgggcctcccatcagtctggacggctccc

SEQ ID NO: 289411 - DNA, 80 bp, Artificial Sequence
  ENSG00000130940_43 (sequence is synthesized)
tgtcgctgggcgccgagccgggctcgctgctcttcctgcagtcggcggccgccggcctgggcctggcgctgggcgacgcg

SEQ ID NO: 289412 - DNA, 120 bp, Artificial Sequence
  ENSG00000130940_44 (sequence is synthesized)
gcgagggcgccgccgccgccgccgccgcagctggggagtcctcgcaggaggacgaggaggaggagctggagctgccggaggaggaggccgaagacgacgaggacgaggacgacgacgagg

SEQ ID NO: 289413 - DNA, 120 bp, Artificial Sequence
  ENSG00000130940_45 (sequence is synthesized)
acgacgacgacgaggacgacgacgaggacgacgacgacgaggacctgcgcaccgactcggaggagtcgctgcccgaggcggcggcggaggcggcgggcgcgggcgcgcggaccccggcct

SEQ ID NO: 289414 - DNA, 120 bp, Artificial Sequence
  ENSG00000130940_46 (sequence is synthesized)
cccgcgcgaagcggcccctgggcagagccccgcgccccgccggtgcttccggaccccgagtccgtctcaggacagaggcggggacccctctggtgctccgcggccgaggacacaggcggc

SEQ ID NO: 289415 - DNA, 120 bp, Artificial Sequence
  ENSG00000130940_47 (sequence is synthesized)
ggcggtggccctgctctagggaggccgggtctcttcagggaaacagaaggtgctcttgtcccggggtagggaacctaggagcaggggtcccgggcgaatgcggcgcagctcccggccgct

SEQ ID NO: 289416 - DNA, 120 bp, Artificial Sequence
  ENSG00000130940_48 (sequence is synthesized)
cccgcgaccattgctcaggactgggacgggcgctgggggccaccgggacccccaccgcgcgccaccagggcggggtggctcctggagccgctggcggggcctccctcatgcagctaggat

SEQ ID NO: 289417 - DNA, 120 bp, Artificial Sequence
  ENSG00000130940_49 (sequence is synthesized)
cgctggcggggcctccctcatgcagctaggatcctcccccctgcccagggggagacgggcagaaggcagtcagcacgggtgacactacagggaccgtggaggaagcctcacgggagtagc

SEQ ID NO: 289418 - DNA, 120 bp, Artificial Sequence
  ENSG00000130940_50 (sequence is synthesized)
agccgcggagctccagctcagccccaccccagggcccggctgctcccccaggcctgggtcgggtctgtttggcgactccctggccccagcctccgccccagggaaaccgaggctgcgtcc

SEQ ID NO: 289419 - DNA, 120 bp, Artificial Sequence
  ENSG00000130940_51 (sequence is synthesized)
aaaacccagagtagcccgctgggggccggggcggggtctcggccaccctggtggtgcaaacaggaaggatgcgcctggttttggctttaatgttcaaaatggaaaaaaatacaagaaagt

SEQ ID NO: 289420 - DNA, 120 bp, Artificial Sequence
  ENSG00000130940_52 (sequence is synthesized)
tgtacagtatttttcctgtaaaggttattattctacatagaacaaaaaggaagaaagcaggcgtggtgagagtgcagacccgcctgggcccggcctgaggttggaggctcagtcccgttt

SEQ ID NO: 289421 - DNA, 120 bp, Artificial Sequence
  ENSG00000130940_53 (sequence is synthesized)
atcctgtgggatttggtccagggtttttgtagaggccttaactgtttgaggctgtctgtcttcacaatagcactgatgggagctgcgtgattccaactcttaacttgaattttgtagaga

SEQ ID NO: 289422 - DNA, 120 bp, Artificial Sequence
  ENSG00000130940_54 (sequence is synthesized)
caagaaaaaaggactattactgttgatccaagtttgtagttaatttaacatttgagttctctcttggtgatgcgtgtggctttatagggcttttttttttttccagtttgttttattact

SEQ ID NO: 289423 - DNA, 120 bp, Artificial Sequence
  ENSG00000130940_55 (sequence is synthesized)
ttgtttgggatgcttcttcgctggtgcagtctacccagattgggttccctttgcaaaacatcccccttcctggagatgatgatgccatcgaagcccgggccagggcctgacctggcaggc

SEQ ID NO: 289424 - DNA, 120 bp, Artificial Sequence
  ENSG00000130940_56 (sequence is synthesized)
acacacctggccagtggctctgaggtccccggggaccgagtcccctgcgagggcaggctgcccgaggccacacctgcccaccttccctactccaggccaccagctggtgtcagattgggc

SEQ ID NO: 289425 - DNA, 120 bp, Artificial Sequence
  ENSG00000130940_57 (sequence is synthesized)
caccgggagagaacaggcctaggagggaatggaaggctggcggggaggctgtcatccagaagcctcctccccagaggtctccaggaggaacctggctcaactggggggcagtggtttact

SEQ ID NO: 289426 - DNA, 120 bp, Artificial Sequence
  ENSG00000130940_58 (sequence is synthesized)
tttcccttttttcttcctttcttttgtcctctcagctgcccacagccagaaagccaggaccacccgaactggacagggagcagggagggaggagtggtcgcacggagcgtacctgattca

SEQ ID NO: 289427 - DNA, 120 bp, Artificial Sequence
  ENSG00000130940_59 (sequence is synthesized)
acaggaaatcagttattttctaaaacagcccctaccagagcctcctgaactctgtgggcaccacgtgctgctgtgagcatctgcccagacagtgacccgccacaggccccgggcgtctgt

SEQ ID NO: 289428 - DNA, 120 bp, Artificial Sequence
  ENSG00000130940_60 (sequence is synthesized)
ggaaggagttttgtaaaggaaaaaaaaacacacacacacaaacattttttcaatgtagcaaaatcaaacttaaaaaaaaaaaagaagaaaagaagaagatgccgacagtgcggagtctag

SEQ ID NO: 289429 - DNA, 120 bp, Artificial Sequence
  ENSG00000130940_61 (sequence is synthesized)
ccttttgtaaacttcatattgcacactaggactataagccattgctagctcattttgaattttaacgtgtaatttttgttttattttctttctgtggggaaacaatgcttgatccaccaa

SEQ ID NO: 289430 - DNA, 120 bp, Artificial Sequence
  ENSG00000130940_62 (sequence is synthesized)
aacaatgcttgatccaccaatgctctttttaatgttttataactatgtatgtgtatatatataaatatcaaataatatgtatgcacatatgtgtgtgtatatatctatatgtatatacat

SEQ ID NO: 289431 - DNA, 120 bp, Artificial Sequence
  ENSG00000130940_63 (sequence is synthesized)
atagagaggttttgagacaaaaaaaatacagaacgtgaaacccgagctgaacagcgtgtgctctgattacttgaatctggtctcctcggcacctggttattaagaactgaatatttttcc

SEQ ID NO: 289432 - DNA, 86 bp, Artificial Sequence
  ENSG00000130940_64 (sequence is synthesized)
tctcctcggcacctggttattaagaactgaatatttttccacttgaatttagtgctattagaaatttaatatatgcatgactgatg

SEQ ID NO: 289433 - DNA, 120 bp, Artificial Sequence
  ENSG00000130940_65 (sequence is synthesized)
gccaaggcgagagagcggagacatttatgaaactttgtttaatgtactgaaaagccatcggccagaacatttaggaaattgattttcctggcattgatgaactcgttttattttacccca

SEQ ID NO: 289434 - DNA, 120 bp, Artificial Sequence
  ENSG00000130940_66 (sequence is synthesized)
ctgcccggctcctcctcctcctcctcttcctcctcctgcggccgctggtgatgaggctgcccgcacggccccgcagccgccagcgactccatccttctcgccggccacgctccggccgcc

SEQ ID NO: 289435 - DNA, 120 bp, Artificial Sequence
  ENSG00000130940_67 (sequence is synthesized)
cctcccccccctcccctgcctcttctctccgtcctgtctctcatactctctgctcagtgccactctcggagccggccggggcctggcccatcccacctgcagcccgcccagcttcccgcc

SEQ ID NO: 289436 - DNA, 120 bp, Artificial Sequence
  ENSG00000130940_68 (sequence is synthesized)
gctaacagggctcctctctctgcctctccaggatgaagtgacacccccagctacatccgaggaggttctaggacctgctacgaggaggacggagaagggaggagattccccggctcccac

SEQ ID NO: 289437 - DNA, 120 bp, Artificial Sequence
  ENSG00000130940_69 (sequence is synthesized)
gtagggcaggcccggcccgcgccctgcactctcgctggggccggtggattcctccctttgccgccagcaccaccctggttacagctccatcccgggtcctctcggcctttctctccctgg

SEQ ID NO: 289438 - DNA, 120 bp, Artificial Sequence
  ENSG00000130940_70 (sequence is synthesized)
tgccccttcttgctcccttctggccactcccgtcctcctcttaaccatggcctcacccctgtctcatggagttgagaattctagaatcttcagagctgcgagcctccatgccttcacatg

SEQ ID NO: 289439 - DNA, 120 bp, Artificial Sequence
  ENSG00000130940_71 (sequence is synthesized)
ccgcgcccgcccgcccgctccctcctgccaaactgttaccctgagtgttaccggcaggagcaatgacatcagggctttaaaacaacttgttattcggggagtaatcagttgcaattaggc

SEQ ID NO: 289440 - DNA, 120 bp, Artificial Sequence
  ENSG00000130940_72 (sequence is synthesized)
accttctggactggggtggccacctggcctcaggctgcagagcagagtcggggggtgtttggaagaagtgtccgtgtggcccctgcttgccagcaccccctctttgcctgatcttcgccc

SEQ ID NO: 289441 - DNA, 120 bp, Artificial Sequence
  ENSG00000130940_73 (sequence is synthesized)
ccatcctgttggtttctatgtggggcccctggttctggctccccacagtaggggggccatgcttctgtttccccatctgtgagctgggggcgatggtccctgcctcctcggctgccctgc

SEQ ID NO: 289442 - DNA, 120 bp, Artificial Sequence
  ENSG00000130940_74 (sequence is synthesized)
atccctggggccactgcaggtcccccctccctgtctgctcaccctcccacatcccaagtccaccctgataagagcaggcccagggcccctggcgtgccgagcgtttcctccagctgacct

SEQ ID NO: 289443 - DNA, 120 bp, Artificial Sequence
  ENSG00000130940_75 (sequence is synthesized)
gtgttgatatgtgagaatgtgtgtgtatgtcactgtggggaggtggctccaggcttcctggtgtgcccggggtggccacagtaaggaggctgcactcaggccctgcccggactcctgccc

SEQ ID NO: 289444 - DNA, 120 bp, Artificial Sequence
  ENSG00000130940_76 (sequence is synthesized)
tccccgggtggcccaaccttgtgtgactgcaagtgactggaggaggccagggggttggaggacgtgtccaggtcctatgtcacaggccaggggcacatccacacacctgcgcccctggct

SEQ ID NO: 289445 - DNA, 120 bp, Artificial Sequence
  ENSG00000130940_77 (sequence is synthesized)
gagctgtgttgtcagggaccctcagcacctgggaaggtgtggggaggccaagaggccaggtcctaggaaggcttgtagtggacccttcatctgcccaggggatccatttgtggggtcaag

SEQ ID NO: 289446 - DNA, 120 bp, Artificial Sequence
  ENSG00000130940_78 (sequence is synthesized)
ggaggtcctccagccaggcccaccccgaccccggccagagcatcttccccacccctgggctcccacccagctgcccactggcccacgtccctacctgtccccggttcttgccgctccctg

SEQ ID NO: 289447 - DNA, 120 bp, Artificial Sequence
  ENSG00000130940_79 (sequence is synthesized)
agccaaacgtccatagatcgtgtcctgctccgcccctccccacactgaccccctccctctatgggtgggggcccccagtggggggacctcctgtccctcccactccctcccagaggtgat

SEQ ID NO: 289448 - DNA, 120 bp, Artificial Sequence
  ENSG00000130940_80 (sequence is synthesized)
tgccgtggagagaaggtggggggccaggactgaccgggcactctgaggccattcgtttgatatctgacctctagggccaaggtagctgcctcctcccatccccatccacttcggtccctc

SEQ ID NO: 289449 - DNA, 120 bp, Artificial Sequence
  ENSG00000130940_81 (sequence is synthesized)
caccgcaccgagggctgccctgcacgcccgtttgggagcctccctccgctctgtgtagtccaggccacacattccctcagcagcctgtgcccccagttagggccggggtcccgacgcagg

SEQ ID NO: 289450 - DNA, 120 bp, Artificial Sequence
  ENSG00000130940_82 (sequence is synthesized)
gcctggccacaggtgagtgcagctcccccagcttgcctgggtcctgctgtcacacagagccttgagtagggtgcaggccaccgtgaaactgtcagggctgggaaggtagaggcaggccag

SEQ ID NO: 289451 - DNA, 120 bp, Artificial Sequence
  ENSG00000130940_83 (sequence is synthesized)
gttccaggagaagtgagtccctcgatgagccgggagtcccgcgttcccctcgcgtctcgggagtaggtgctagcaagggcgctaggaggccctgttcctcactgcggatggtgctgctgt

SEQ ID NO: 289452 - DNA, 120 bp, Artificial Sequence
  ENSG00000130940_84 (sequence is synthesized)
ccccagcctctctggggcatggccatcgggtgatgtccttctagccaaagatgctgctgctcctacctcactgcctgtcccagagcaggccagcccgcgtgggccgatggtggcggcagt

SEQ ID NO: 289453 - DNA, 120 bp, Artificial Sequence
  ENSG00000130940_85 (sequence is synthesized)
ggctactgctcctgcagggcatgtggtgatcctgccagggccaggtggggtggactgggcgtggtggtcctcagaggacaactcccagcctgacaaggagggctgcgtctccctccgagc

SEQ ID NO: 289454 - DNA, 120 bp, Artificial Sequence
  ENSG00000130940_86 (sequence is synthesized)
ctccgtattggcctcctctgtggctcacacccatggctgaatctctgcagggcacgtgaagtcacgggtaggggccaggcccctccaggccgtcactggcctgcacagtggtctgagctc

SEQ ID NO: 289455 - DNA, 120 bp, Artificial Sequence
  ENSG00000130940_87 (sequence is synthesized)
ttgggtggaagggaccctcctcactggatggtggtggctccttgcagggagaacggtgactttgtattgtcatgtgtgcggcttcctgttctcaataaaagtaataaattggattattta

SEQ ID NO: 289456 - DNA, 120 bp, Artificial Sequence
  ENSG00000130940_88 (sequence is synthesized)
attcatctcttttatcctcgcttatgaataaggtaagagccatccatcacacgcctcccgttcccccacccagagaaattaaagctgtgctggggggtggggggatgtgtttgtttttta

SEQ ID NO: 289457 - DNA, 120 bp, Artificial Sequence
  ENSG00000130940_89 (sequence is synthesized)
atgttttgcctctaataagatgagtttgtaccatttaaattttgaggccatttttcatcggatataatttcagagccactgcttacaaattaatttaatgaactggctgaagaaatatat

SEQ ID NO: 289458 - DNA, 120 bp, Artificial Sequence
  ENSG00000130943_0 (sequence is synthesized)
agcttctcctgggccggcgccatgaggcctgggcccgctctcctccttctgggcgtgggcctgagcctgagcgtcggccgcctcccgctgccgccggttcctcgcggggcacaagccgcc

SEQ ID NO: 289459 - DNA, 80 bp, Artificial Sequence
  ENSG00000130943_1 (sequence is synthesized)
cgcgccctcctcagtctgcggcccagcgcggtgcgggcgggcggcgctgtcctgagcggccgcggcagcctctgcttccc

SEQ ID NO: 289460 - DNA, 120 bp, Artificial Sequence
  ENSG00000130943_2 (sequence is synthesized)
cgcggcagcctctgcttcccccatggcgggaccgggcggcgctggtactgcctcgacttgcgcgtcctgctcagcgcccaacgcctgccctggccggccgcgcccgcgctcgcgctcgtc

SEQ ID NO: 289461 - DNA, 80 bp, Artificial Sequence
  ENSG00000130943_3 (sequence is synthesized)
gacctgcagctctccgcgcgcggcggccgcctctccctgacgtggtccgtgcggctgccgcgctcgcccgggcgcctggc

SEQ ID NO: 289462 - DNA, 120 bp, Artificial Sequence
  ENSG00000130943_4 (sequence is synthesized)
ccgcgtctccccgcgctccgccgcgccaggcccgcggccccagcagggcttcgtggcccgcaccgagtgccccacagacggccccgcgcgcgtgatgttgcaggccgtcaactcgtccag

SEQ ID NO: 289463 - DNA, 120 bp, Artificial Sequence
  ENSG00000130943_5 (sequence is synthesized)
caggccgtcaactcgtccagccacagagccgtcgagtcgtccgtgtcctgtcagataaacgcctgcgtcatccagcgcgtgaggatcaacacggaccagaagggcgcccccgtgcgcctg

SEQ ID NO: 289464 - DNA, 120 bp, Artificial Sequence
  ENSG00000130943_6 (sequence is synthesized)
agcatgcaggcggaggccaccatcaacgcctcggtgcagctggactgcccggccgcgcgcgccatcgcccagtactggcaggtgttctccgtgcccgccgtgggtcaggcgcccgactgg

SEQ ID NO: 289465 - DNA, 120 bp, Artificial Sequence
  ENSG00000130943_7 (sequence is synthesized)
acgcagcccttggatctgccccagctcgagatcaggaacagccccttgttcattcacatccccaataattcgttacagtggggagtgtatgtgtttaatttcacggtgtccatcaccaca

SEQ ID NO: 289466 - DNA, 120 bp, Artificial Sequence
  ENSG00000130943_8 (sequence is synthesized)
gggaaccccaagatgcccgaggtgaaagactcggacgccgtctatgtctggatcgtcaggagttccctgcaggcggtgatgcttggcgatgccaacataacagctaatttcacagagcag

SEQ ID NO: 289467 - DNA, 120 bp, Artificial Sequence
  ENSG00000130943_9 (sequence is synthesized)
ctgattctggacgggtccacgtcctcggacccagatgcggacagcccgttacagggactccagttcttttggtactgtaccacagatcccagaaactacggtggggatcgaataatcctg

SEQ ID NO: 289468 - DNA, 120 bp, Artificial Sequence
  ENSG00000130943_10 (sequence is synthesized)
gggagcaaggaagtctgtcaccccgagcaggccaatctgaaatggccctgggcctcgggccctgtactgacacttttgccagaaacacttaaaggcgaccacgtgtatttcttcagaatg

SEQ ID NO: 289469 - DNA, 120 bp, Artificial Sequence
  ENSG00000130943_11 (sequence is synthesized)
gtgattcggaaggactctaggacagcgttttctgataagagggtccacgtgctccaaggaccaaaagccatagcacacatcacatgtatcgaaaattgtgagagaaacttcattgtctct

SEQ ID NO: 289470 - DNA, 120 bp, Artificial Sequence
  ENSG00000130943_12 (sequence is synthesized)
gatagattttctttgttcctaaattgcacaaattgtgcaagccgtgatttctataaatggtcaattttgtcttcttcaggtggtgagatgctatttgattggatgggggaaactgtaaca

SEQ ID NO: 289471 - DNA, 120 bp, Artificial Sequence
  ENSG00000130943_13 (sequence is synthesized)
ggaaggaatggtgcttatctgtctataaaagcttttgcttttcggcattttttggaagctgagttttcgatttctctgtatctagcatgttggagtggagtgacctcggtcttcaggcat

SEQ ID NO: 289472 - DNA, 120 bp, Artificial Sequence
  ENSG00000130943_14 (sequence is synthesized)
tcttttattattaaccatggccctcagatcggagaatgcaaaattaatccagctaaaggaattgcacttattactaaatttgttgtccagtgtagtaattttagggataagcacgtccct

SEQ ID NO: 289473 - DNA, 120 bp, Artificial Sequence
  ENSG00000130943_15 (sequence is synthesized)
cttacatataaaataattgtttctgatttgcacagtgttggtgaaatcagttcagtaaaagagaacaccctggggaccatcctgtacttggggcctcagtccacagtacccccttccttt

SEQ ID NO: 289474 - DNA, 120 bp, Artificial Sequence
  ENSG00000130943_16 (sequence is synthesized)
ctccctgttggtatgttggctagtcaatatggcttgaagatatatgcccaggtctatgattctctaggagctttttctcaggtgactttgcatgccaccgcacaggctcccactgacaaa

SEQ ID NO: 289475 - DNA, 120 bp, Artificial Sequence
  ENSG00000130943_17 (sequence is synthesized)
aattcatcaaagacagtgttgaatcagttactcagtttcaccgtgggaccaagttcattgctgtctactttgattcaaaagaaggattttttacctgcaggttacttactgtatatagta

SEQ ID NO: 289476 - DNA, 120 bp, Artificial Sequence
  ENSG00000130943_18 (sequence is synthesized)
gcttccgttttgaataacatgaaaactgaattacctctccgagatgacagagtcaatctccgaaaacacctcatcgatcagtctttccttcttcctgtaagcactttggtagaaattggc

SEQ ID NO: 289477 - DNA, 120 bp, Artificial Sequence
  ENSG00000130943_19 (sequence is synthesized)
caggtagtcatgactattaccaaattaacccagaaaccctctgaattcacttgggatgctcagaaacgtgccaccatgagggtatggcaagcaaatcaagccctacaagagtatcagcaa

SEQ ID NO: 289478 - DNA, 120 bp, Artificial Sequence
  ENSG00000130943_20 (sequence is synthesized)
aaagataaacgctttcgatctgaacaaatagaaatcgtgagtactggaatactaatgagtttgtctaatattcttaaaatgacttctcctcaccaagtagttaaagatcctttctatgta

SEQ ID NO: 289479 - DNA, 120 bp, Artificial Sequence
  ENSG00000130943_21 (sequence is synthesized)
atagaatctctatcagacacaatactggctaataaagtgccagggaacaaaaccacctcaatgagaacccccaatttcaacatgtatgtcaagaaagttgaaaagtggggtatcaaccag

SEQ ID NO: 289480 - DNA, 120 bp, Artificial Sequence
  ENSG00000130943_22 (sequence is synthesized)
ctcttcagaaatgagaaacactgcagaaattgtttttatccaacactcaatgtgagcagtgttcctggtctgtctgcaaatggtcccatttctacaatgttttgtgatttcacaaatgac

SEQ ID NO: 289481 - DNA, 120 bp, Artificial Sequence
  ENSG00000130943_23 (sequence is synthesized)
ctctttccttggttaaatgatcaggaaaacacttcggtggaggtgtctggattcagaatgacaggagttgcagataacggtagtgtgctagagatcacacctgatgtagcggaagtgtac

SEQ ID NO: 289482 - DNA, 120 bp, Artificial Sequence
  ENSG00000130943_24 (sequence is synthesized)
cttgtcaggaaaaacttgacctttgcagcttttaatctcacagtgggacccaacagcgaggttgatgggtccttgaagaagacgacaggtgggtttagctttcaagtggacagcacagtg

SEQ ID NO: 289483 - DNA, 120 bp, Artificial Sequence
  ENSG00000130943_25 (sequence is synthesized)
cttagggaggttctggtccacatagtaacagaagtgatggtgctgttcacagtgttggtgtacacaggcagtcagatcactcccacagcgctggtcgccaccttcctggtgcctcatgac

SEQ ID NO: 289484 - DNA, 120 bp, Artificial Sequence
  ENSG00000130943_26 (sequence is synthesized)
atccctccatttgccagccagagtgccctgtttgacccagcctgcacagtgaagaaggcccgtgtagtctgcctccctgtgtccctgctgcaactcatagctcagcacagccactctccc

SEQ ID NO: 289485 - DNA, 120 bp, Artificial Sequence
  ENSG00000130943_27 (sequence is synthesized)
cactgtactgtatccatagttctgcaggcacctcgttttgtcatgaagctcaatgacaagctagtgagaatttctattttcagcgtccagtgcttggacatgtatgggatccagagtgaa

SEQ ID NO: 289486 - DNA, 120 bp, Artificial Sequence
  ENSG00000130943_28 (sequence is synthesized)
tggagagagggttattgcattcttggtgagaagaccagctggtatgaggtgcactgcatctgcaagaatgtagtaagggctaggcggcagctgggcacaatcggactcacgggcattcac

SEQ ID NO: 289487 - DNA, 120 bp, Artificial Sequence
  ENSG00000130943_29 (sequence is synthesized)
ctgcatacccactatgtgatggccaaggtgattgtgatccctaatcctgtggatctacggttaaacatcatcaagagccttcaccaaaaccccgtgaccctcttcactgtgcttttcatt

SEQ ID NO: 289488 - DNA, 120 bp, Artificial Sequence
  ENSG00000130943_30 (sequence is synthesized)
attctcttatacgtgggcctagctttttgggctttatacagggatgaaatggaccagcatcttcgggggcatgtgatagttctaccagataatgatccttatgataatttatgctacttg

SEQ ID NO: 289489 - DNA, 120 bp, Artificial Sequence
  ENSG00000130943_31 (sequence is synthesized)
gtgactatttttacaggaagtcgttgggggtctgggaccagggccaatgtctttgtgcaacttagaggaactgtgagtaccagcgacgtgcattgtttaagccatccacatttcacaact

SEQ ID NO: 289490 - DNA, 120 bp, Artificial Sequence
  ENSG00000130943_32 (sequence is synthesized)
tctaccgaggtagcatcaacactttcctcctaacgacaaaaagtgacttgggggacatccattccatccgtgtgtggcacaacaacgagggtcgatcgcctagctggtatttaagtagaa

SEQ ID NO: 289491 - DNA, 120 bp, Artificial Sequence
  ENSG00000130943_33 (sequence is synthesized)
tcaaagtggaaaatctgtttagcaggcacatttggctgttcatatgccagaaatggctttctgttgataccactttggacagaacatttcacgttacccatccagatgagcgtctgacta

SEQ ID NO: 289492 - DNA, 120 bp, Artificial Sequence
  ENSG00000130943_34 (sequence is synthesized)
gaaaagactttttctttatagatgtgagtagtaatctccggaaaaaccacatgtggttctctatttttgctagtgttgttgctaaaacattcaataggctccagagattgtcctgttgtt

SEQ ID NO: 289493 - DNA, 120 bp, Artificial Sequence
  ENSG00000130943_35 (sequence is synthesized)
tagcaatgttgcttagctctcttctttgtaacattatgttctttaatctaaatagacaagaacaaactgagtcaagagagaggaaatacatgagatcaatgatgataggaattgaaagtg

SEQ ID NO: 289494 - DNA, 120 bp, Artificial Sequence
  ENSG00000130943_36 (sequence is synthesized)
tcttaattacaatccctgtgcaattattaataacttttttgttcacctgttcccagaggaaacctcaagcggatctaaaggaggtatctcctcaaaagcatcctctaatgtcagaagcaa

SEQ ID NO: 289495 - DNA, 120 bp, Artificial Sequence
  ENSG00000130943_37 (sequence is synthesized)
gtgagcactgggaagaatacttgagaaagtggcatgcttacgaaactgctaaggtgcaccccagggaggttgcaaaacctgcatctaaaggaaagcccaggcttccaaaggcttctccta

SEQ ID NO: 289496 - DNA, 120 bp, Artificial Sequence
  ENSG00000130943_38 (sequence is synthesized)
aggcaacctccaaacccaagcacaggcataggaaagcacaaatcaagaccccggagaccctcgggccaaatacaaattccaataacaacatagaagatgatcaggatgtccattccgaac

SEQ ID NO: 289497 - DNA, 120 bp, Artificial Sequence
  ENSG00000130943_39 (sequence is synthesized)
agcacccttcccaaaaggatctccagcagcttaagaaaaagccccggatcgtcctaccttggtggtgtgtttatgttgcatggtttttggtttttgctacttctagcatatcctcattct

SEQ ID NO: 289498 - DNA, 120 bp, Artificial Sequence
  ENSG00000130943_40 (sequence is synthesized)
tcattgtattttatggactgacttacggctatgacaagtcaatagaatggctctttgcatctttttgttcattctgtcagtcagttcttctggtgcagccatctaaaattatactcctgt

SEQ ID NO: 289499 - DNA, 120 bp, Artificial Sequence
  ENSG00000130943_41 (sequence is synthesized)
caggcttcagaacgaataaacccaagtattgcaaaaacctttcatggtcaaccaagtataaatatactgagatcaggttggatggaatgcgtatgcatccagaagaaatgcagaggatac

SEQ ID NO: 289500 - DNA, 120 bp, Artificial Sequence
  ENSG00000130943_42 (sequence is synthesized)
atgaccagatcgtccgaatccgaggcacgaggatgtaccaaccccttacagaagatgaaatcagaatattcaaaagaaagaagaggatcaagagaagagcactcctgtttctgagttaca

SEQ ID NO: 289501 - DNA, 120 bp, Artificial Sequence
  ENSG00000130943_43 (sequence is synthesized)
ttctaactcactttatctttctagcccttctgttgatccttatcgtcttactacgtcacactgactgcttttactataaccagtttattcgtgatcggttctctatggatcttgctactg

SEQ ID NO: 289502 - DNA, 120 bp, Artificial Sequence
  ENSG00000130943_44 (sequence is synthesized)
tgactaagctggaagacatctatagatggctaaacagcgtgctgttgcctttgttacacaatgacctgaatccaacatttcttcctgaaagctcgtctaaaatccttggccttccattga

SEQ ID NO: 289503 - DNA, 120 bp, Artificial Sequence
  ENSG00000130943_45 (sequence is synthesized)
tgaggcaagtgagagcaaaatctagtgaaaaaatgtgtctacctgccgaaaagtttgtgcaaaacagcatcagaagagaaattcattgtcaccccaaatatggcattgacccagaagaca

SEQ ID NO: 289504 - DNA, 120 bp, Artificial Sequence
  ENSG00000130943_46 (sequence is synthesized)
caaaaaactattctggcttttggaatgaagttgataagcaggctatagatgagagtaccaatggatttacttataagcctcaaggaacgcaatggctatattattcctatggactactac

SEQ ID NO: 289505 - DNA, 120 bp, Artificial Sequence
  ENSG00000130943_47 (sequence is synthesized)
acacctatggatctggaggatatgcactctatttttttccagaacagcagcggtttaattccacactgaggctcaaagaacttcaagaaagcaattggctggatgagaagacatgggctg

SEQ ID NO: 289506 - DNA, 120 bp, Artificial Sequence
  ENSG00000130943_48 (sequence is synthesized)
tggttttggaattaacaacttttaatccagatataaatctgttctgtagcatttcggtcatatttgaagtctctcagttaggagttgtcaacacaagcatatctctgcactctttttcac

SEQ ID NO: 289507 - DNA, 120 bp, Artificial Sequence
  ENSG00000130943_49 (sequence is synthesized)
ttgctgattttgacagaaaagcttcagcagaaatctacttgtatgtggccattctcatttttttcttagcctacgttgttgatgagggttgtatcattatgcaagaaagagcctcctatg

SEQ ID NO: 289508 - DNA, 120 bp, Artificial Sequence
  ENSG00000130943_50 (sequence is synthesized)
tgagaagtgtgtataatttgctcaactttgctttaaagtgcatatttactgtgttgattgtgctctttctcaggaaacatttcctggccactggcataattcggttttacttgtcgaacc

SEQ ID NO: 289509 - DNA, 120 bp, Artificial Sequence
  ENSG00000130943_51 (sequence is synthesized)
cagaagacttcattccctttcatgcagtttctcaggtagatcacattatgaggataattttgggtttcctgttatttctgacaattttgaagaccctcaggtattccagattcttctacg

SEQ ID NO: 289510 - DNA, 120 bp, Artificial Sequence
  ENSG00000130943_52 (sequence is synthesized)
atgtgcgcctggctcagagggccatccaggctgccctccctggcatctgccacatggcatttgttgtgtccgtgtatttcttcgtatacatggcttttggttacctggtgtttggtcagc

SEQ ID NO: 289511 - DNA, 120 bp, Artificial Sequence
  ENSG00000130943_53 (sequence is synthesized)
atgaatggaactacagtaacttgattcattccactcagacagtattttcctattgtgtctcagctttccagaacactgaattttccaataacaggattctgggggtcctgttcctctcat

SEQ ID NO: 289512 - DNA, 120 bp, Artificial Sequence
  ENSG00000130943_54 (sequence is synthesized)
ctttcatgctggtgatgatctgcgtcttgatcaacttatttcaggctgtaattctgtctgcatatgaggaaatgaagcagcccgtgtatgaggagccatcggatgaagtggaagcaatga

SEQ ID NO: 289513 - DNA, 120 bp, Artificial Sequence
  ENSG00000130943_55 (sequence is synthesized)
cctatttgtgccgtaagctgagaaccatgttcagctttctgacctcgcaatctaaggccaaagatgagcctgagttctttattgacatgctgtatgggcagccagagaagaacagccacc

SEQ ID NO: 289514 - DNA, 120 bp, Artificial Sequence
  ENSG00000130943_56 (sequence is synthesized)
gttatctggggctgaagaccagaaacatcaacgggaagaaaatggtttaccttgttgtttgatgaatgatggtttcatgagtcacaagcaagcgttcccccaactgctgagtctgtggga

SEQ ID NO: 289515 - DNA, 120 bp, Artificial Sequence
  ENSG00000130943_57 (sequence is synthesized)
ttaaggggattagggagtgtcagtggcctagtcatgctttctactcatgtccttcacaaggcacatcccctacatttggaagaatccccaatcttgtcctctgctcttgggagtgtaaaa

SEQ ID NO: 289516 - DNA, 120 bp, Artificial Sequence
  ENSG00000130943_58 (sequence is synthesized)
gttgggagtgtagtgtagcatctggggagacagcaggatcacagtgtgggattcctggactgatttccctttagaggggagttatgtgactccccgtacaagggcaaccctgtttctttg

SEQ ID NO: 289517 - DNA, 120 bp, Artificial Sequence
  ENSG00000130943_59 (sequence is synthesized)
gtgcctgcagtttagagaaggcagagccactggttttgagaaccagatttgagagagggacctggccagggtggagcattgtctgggtgtttctgcgcttgacccatgctggaagctaat

SEQ ID NO: 289518 - DNA, 120 bp, Artificial Sequence
  ENSG00000130943_60 (sequence is synthesized)
ggcctgttgctcctgacagagccccaaactcctcggcctcactgggaggcccctttgtagaccagggctcccctcctcttgttccccctgggcttagggcctcgtggggagttccaggac

SEQ ID NO: 289519 - DNA, 120 bp, Artificial Sequence
  ENSG00000130943_61 (sequence is synthesized)
ttgcttcatgcttgagaatgcagatgtggtgcttctcatttattcttaaagctactggtagttaaagtaaaattcagtaacattttctgaccaagagacatgttttgttaaacaacaaaa

SEQ ID NO: 289520 - DNA, 120 bp, Artificial Sequence
  ENSG00000130943_62 (sequence is synthesized)
aggtacatatgggttcacattgaaatatgtctatatgctgaatatagcaacatatgcatctaagatttgggcatttggttattaatagcgtgctggactattcaggaataaggaaaatgt

SEQ ID NO: 289521 - DNA, 120 bp, Artificial Sequence
  ENSG00000130943_63 (sequence is synthesized)
ggtttatcacttaagagaaacaagggctggtagctgtactattttcactcagaagcatgttcatttatgtagatgccactttaagctttatcagaattaaatgtgagatttcttctttga

SEQ ID NO: 289522 - DNA, 120 bp, Artificial Sequence
  ENSG00000130948_0 (sequence is synthesized)
agagcagcgtggtcccaggaggcatacacagagagccacggccagggctgaaacagtctgttgagtgcagccatgggggacgtcctggaacagttcttcatcctcacagggctgctggtg

SEQ ID NO: 289523 - DNA, 120 bp, Artificial Sequence
  ENSG00000130948_1 (sequence is synthesized)
tgcctggcctgcctggcgaagtgcgtgagattctccagatgtgttttactgaactactggaaagttttgccaaagtctttcttgcggtcaatgggacagtgggcagtgatcactggagca

SEQ ID NO: 289524 - DNA, 120 bp, Artificial Sequence
  ENSG00000130948_2 (sequence is synthesized)
ggcgatggaattgggaaagcgtactcgttcgagctagcaaaacgtggactcaatgttgtccttattagccggacgctggaaaaactagaggccattgccacagagatcgagcggactaca

SEQ ID NO: 289525 - DNA, 120 bp, Artificial Sequence
  ENSG00000130948_3 (sequence is synthesized)
gggaggagtgtgaagattatacaagcagattttacaaaagatgacatctacgagcatattaaagaaaaacttgcaggcttagaaattggaattttagtcaacaatgtcggaatgcttcca

SEQ ID NO: 289526 - DNA, 120 bp, Artificial Sequence
  ENSG00000130948_4 (sequence is synthesized)
agatgacacagctaattctgaaacatatggaatcaaggcagaaaggtctcatcctgaacatttcttctgggatagccctgtttccttggcctctctactccatgtactcagcttccaagg

SEQ ID NO: 289527 - DNA, 120 bp, Artificial Sequence
  ENSG00000130948_5 (sequence is synthesized)
cgtttgtgtgcgcattttccaaggccctgcaagaggaatataaagcaaaagaagtcatcatccaggtgctgaccccatatgctgtctcgactgcaatgacaaagtatctaaatacaaatg

SEQ ID NO: 289528 - DNA, 120 bp, Artificial Sequence
  ENSG00000130948_6 (sequence is synthesized)
tgataaccaagactgctgatgagtttgtcaaagagtcattgaattatgtcacaattggaggtgaaacctgtggctgccttgcccatgaaatcttggcgggctttctgagcctgatcccgg

SEQ ID NO: 289529 - DNA, 120 bp, Artificial Sequence
  ENSG00000130948_7 (sequence is synthesized)
cctgggccttctacagcggtgccttccaaaggctgctcctgacacactatgtggcatacctgaagctcaacaccaaggtcaggtagccaggcggtgaggagtccagcacaaccttttcct

SEQ ID NO: 289530 - DNA, 120 bp, Artificial Sequence
  ENSG00000130948_8 (sequence is synthesized)
caccagtcccatgctggctgaagaggaccagaggagcagaccagcacttcaacctagtccgctgaagatggagggggctggggtcacagaggcatagaatacacattttttgccacttta

SEQ ID NO: 289531 - DNA, 120 bp, Artificial Sequence
  ENSG00000130948_9 (sequence is synthesized)
gcaagagatattgaactttctcaattacttgctatttttatgtagaacctcaacaatgtgcataatcaccaatgtaactcacactacaaagcagacatgcagagaggatataaagtcttt

SEQ ID NO: 289532 - DNA, 120 bp, Artificial Sequence
  ENSG00000130948_10 (sequence is synthesized)
attttttctgttgctgatctggtctttttccagatcaccacttgctgcaggaaaattcatcgaatgtccaatgagtctaaactgagtttgatctagtcatctcaactggccatttaggaa

SEQ ID NO: 289533 - DNA, 120 bp, Artificial Sequence
  ENSG00000130948_11 (sequence is synthesized)
gagaatgatcgcagtgggctcttatgagtgagtgcaagccagctccagcatgccacagatccagcatatggcagaagaggctcttaccactcctggactgcttttaaaaacaaacacaaa

SEQ ID NO: 289534 - DNA, 120 bp, Artificial Sequence
  ENSG00000130948_12 (sequence is synthesized)
catgaaacaaaggcgggctttctgagcctgatcccggcctgggccttctacagcggtgccttccaaaggctgctcctgacacactatgtggcatacctgaagctcaacaccaaggtcagg

SEQ ID NO: 289535 - DNA, 120 bp, Artificial Sequence
  ENSG00000130948_13 (sequence is synthesized)
atcatccaggcgggctttctgagcctgatcccggcctgggccttctacagcggtgccttccaaaggctgctcctgacacactatgtggcatacctgaagctcaacaccaaggtcaggtag

SEQ ID NO: 289536 - DNA, 120 bp, Artificial Sequence
  ENSG00000130948_14 (sequence is synthesized)
cgtcctgtgtaagccccgagtctgctgcaccgggtgataatgccagactgcttgggcgctgctgcacatcctcaccaaactcctgaactcctctctggaccacacatctcctgtgtgggc

SEQ ID NO: 289537 - DNA, 120 bp, Artificial Sequence
  ENSG00000130948_15 (sequence is synthesized)
ctgtgtttgtgctagtgtctgtgtccgtcctcttgtcctttctctttatctttggtcattctagtggtttctttacctgccctccatagcccagaacctctaccttatattatacaacca

SEQ ID NO: 289538 - DNA, 120 bp, Artificial Sequence
  ENSG00000130948_16 (sequence is synthesized)
tttgtctttctgttctcctggactcacataggctaacccctcttcctccagctgagaatggagtagctccctttgaaaaaccgtatttatattcctccaggaatatagttccgagttttc

SEQ ID NO: 289539 - DNA, 120 bp, Artificial Sequence
  ENSG00000130948_17 (sequence is synthesized)
caggaaactcttaattgatgtctagtcaagatgacgtgggtacagaatgacagaatgggagtcagatgtttcttgatgctagtacatgcttgctggaaggcagttatgagcctaatttgc

SEQ ID NO: 289540 - DNA, 120 bp, Artificial Sequence
  ENSG00000130948_18 (sequence is synthesized)
agggtgagtgatgaaaccgttcagacatgcacttttgcccacttcatggttctttagcaccaactactttccaggagaatttctctaatcatccggctgatgtgtggttgtgattattta

SEQ ID NO: 289541 - DNA, 120 bp, Artificial Sequence
  ENSG00000130948_19 (sequence is synthesized)
ttacagagcctcatccattgtaacatcacctccgtagtcaaggtatgtgatcaatatatgtgcgaaatgcattaacatgtagtaacttgaaatttggcaactcaggagaattgtgcccat

SEQ ID NO: 289542 - DNA, 120 bp, Artificial Sequence
  ENSG00000130948_20 (sequence is synthesized)
ccactgtagaagcaggattctttgaaatcgaaccacacttagttgagaggccatgtcgtggtcttgtaattgtcttgttctgtttttcatctagaaaatacagtaatggattcaactctc

SEQ ID NO: 289543 - DNA, 120 bp, Artificial Sequence
  ENSG00000130950_0 (sequence is synthesized)
gtcagtgcccagcctgaggggatggcttcaaatggagcatacccagtgctgggacccggcgtgaccgtgaaccctggcacctccctgtctgtgttcacggctctgccctttgccacaccc

SEQ ID NO: 289544 - DNA, 120 bp, Artificial Sequence
  ENSG00000130950_1 (sequence is synthesized)
gctcccggcccagcacacaggccgcccctcgtgactgcagtggttcctccagccggccctctggtgctctctgccttccccagcacccctctagtggcaggacaggatggccgcggcccg

SEQ ID NO: 289545 - DNA, 120 bp, Artificial Sequence
  ENSG00000130950_2 (sequence is synthesized)
agtggggccggggcttccaacgtctttgtccagatgaggacagaagtggggcctgtgaagccccctcaggcacagaccttgatcctaactcaggcccccctcgtctggcaggctccaggc

SEQ ID NO: 289546 - DNA, 120 bp, Artificial Sequence
  ENSG00000130950_3 (sequence is synthesized)
accctctgtggaggtgtcatgtgtccacctcccctactcctggcagctgctcctggggtgcccgttacctctgcccaggtggttgggggcacccaggcctgtgagggaggctggtcccat

SEQ ID NO: 289547 - DNA, 120 bp, Artificial Sequence
  ENSG00000130950_4 (sequence is synthesized)
ggccttcctcttccaccaccaccaccggctgcccaggtggcccccatcgtgtccccagggaacgctaggccatggccacaaggggctcatggagagggcagcctggctccctcccaggcc

SEQ ID NO: 289548 - DNA, 120 bp, Artificial Sequence
  ENSG00000130950_5 (sequence is synthesized)
aaggcccggccggacgactcctgtaaacccaagagtgtctatgagaacttccgactctggcagcactacaagcccctggcccggaggcaccttccccagagtcctgacactgaagcgctt

SEQ ID NO: 289549 - DNA, 120 bp, Artificial Sequence
  ENSG00000130950_6 (sequence is synthesized)
tcctgcttcctcatcccagttctccgatccctggcccggcggaagcccaccatgacgctggaggagggactgtggcaggccatgcgggaatggcagcacacgagcaactttgaccggatg

SEQ ID NO: 289550 - DNA, 120 bp, Artificial Sequence
  ENSG00000130950_7 (sequence is synthesized)
atcttctacgagatggcggaaaagttcctggaatttgaggctgaggaggagatgcagattcagaaatcgcagtggatgaaggggccccagagcctgcctcctccagccccgccgaggctt

SEQ ID NO: 289551 - DNA, 120 bp, Artificial Sequence
  ENSG00000130950_8 (sequence is synthesized)
gaacctcgaggaccccctgcccctgaggtggtcaagcagccagtgtaccttcccagcaaggatggccccaaggccccgactgcctgcctgccaccacccaggccccagaggccagcggag

SEQ ID NO: 289552 - DNA, 120 bp, Artificial Sequence
  ENSG00000130950_9 (sequence is synthesized)
accaaggcccacctgccaccacccaggccccagaggccagcggagaccaacgcccacctgccaccacccaggccccagaggccagcggagaccaaggtccctgaggagatcccccctgaa

SEQ ID NO: 289553 - DNA, 120 bp, Artificial Sequence
  ENSG00000130950_10 (sequence is synthesized)
gggtctcaccctggggacacaggggagcctgagggacaacgggaaaagggcaaagtggagcagccgcaggaagaggacgggataacctcagacccgggcctcctgagctacattgacaag

SEQ ID NO: 289554 - DNA, 120 bp, Artificial Sequence
  ENSG00000130950_11 (sequence is synthesized)
ctgtgttcccaggaagactttgtcaccaaggtggaggccgtcattcacccccgattcctggaagaattgctttccccagatccacagatggatttcttggccctaagccaggagctggag

SEQ ID NO: 289555 - DNA, 120 bp, Artificial Sequence
  ENSG00000130950_12 (sequence is synthesized)
caggaggaaggactcacccttgcccagctagtggagaagcgcctcctgtccttgaaggagaaagggtgcgggagggcagcccctcgacatggcacggccaggttggactcaagtccttct

SEQ ID NO: 289556 - DNA, 120 bp, Artificial Sequence
  ENSG00000130950_13 (sequence is synthesized)
gagtttgcagctggccaagaagcagcgagagaggtccctgacccccaacaaagggtcagcgtggaaacctccccaccccagacagctgcccaggaccctcagggacagggcagagtgcgc

SEQ ID NO: 289557 - DNA, 120 bp, Artificial Sequence
  ENSG00000130950_14 (sequence is synthesized)
actggcatggccaggtccgaagaccctgctgtgcttttgggatgtcaggattcccccaggctgaaggctgtccggccaacctctcctccccaggaccacagacccacctgccccggcctg

SEQ ID NO: 289558 - DNA, 120 bp, Artificial Sequence
  ENSG00000130950_15 (sequence is synthesized)
gggaccaaggacgccttgggtctccctggagagtctcctgtcaaggagtcacatgggctggctaaggggtcaagtgaggagacggaactccctggcatggtctatgtcgtgggttcccac

SEQ ID NO: 289559 - DNA, 120 bp, Artificial Sequence
  ENSG00000130950_16 (sequence is synthesized)
cacaggctgaggccctggaggctgtcccagagccctgtcccttcctcgggccttctcagcccaggagggagaggaccccagggagctcttcagtctccatctgctcagaaaagaggcctc

SEQ ID NO: 289560 - DNA, 120 bp, Artificial Sequence
  ENSG00000130950_17 (sequence is synthesized)
agcccatcaccttctcctgccagcaagtccaagaagcgacctctctttggaagcccatcccctgctgaaaagacaccgcacccagggcctgggctcagggtctctggggagcaatccctg

SEQ ID NO: 289561 - DNA, 120 bp, Artificial Sequence
  ENSG00000130950_18 (sequence is synthesized)
gcttgggggctgggtggcccctcacagtctcaaaagagaaagggtgaccccttggcctccaggaggaagaagaagcggcattgtagccagtaggggccgccatggggcagactctctgat

SEQ ID NO: 289562 - DNA, 120 bp, Artificial Sequence
  ENSG00000130950_19 (sequence is synthesized)
gccagtccccaaaagtggggctctgaagtctcggaccctcatggcacccggtgccccaaagcaaaggctgcttctcctccagtgctgatcttgctgggccttagctttggagggtagggg

SEQ ID NO: 289563 - DNA, 120 bp, Artificial Sequence
  ENSG00000130950_20 (sequence is synthesized)
aaggaggggagggagaaggtggctgaacggggagggcaggaagggagggcctggggggtgggaagcagtgccttgggggccttgtgtgtaaatgtgaataaatgtagttgttttggaaaa

SEQ ID NO: 289564 - DNA, 120 bp, Artificial Sequence
  ENSG00000130956_0 (sequence is synthesized)
gagcgggcggcatgggtcctggccgccggcttcgctgagacgcgctcgcgtgggctgccctcccgggcccgcagtggtcgcggcggcatgaagggcgctctggggagtcccgtggctgcc

SEQ ID NO: 289565 - DNA, 120 bp, Artificial Sequence
  ENSG00000130956_1 (sequence is synthesized)
gctctggggagtcccgtggctgccgctggcgccgcgatgcaggagagtttcggctgcgtggtggccaaccgcttccatcagctgctggacgacgagtcggacccgttcgacatcctgcgc

SEQ ID NO: 289566 - DNA, 120 bp, Artificial Sequence
  ENSG00000130956_2 (sequence is synthesized)
gctgctggacgacgagtcggacccgttcgacatcctgcgcgaggccgagcgccggcgccagcagcagctgcagcgcaagaggcgcgacgaggcggcggcggcggccggggccggtccccg

SEQ ID NO: 289567 - DNA, 120 bp, Artificial Sequence
  ENSG00000130956_3 (sequence is synthesized)
ggcgcgggcggccggagggagtcgcagaaggagcgcaagagcctcccggcgcccgtcgctcagcggcccgatagccccgggggcggcctgcaggcgccgggccagaagcggactcctaga

SEQ ID NO: 289568 - DNA, 120 bp, Artificial Sequence
  ENSG00000130956_4 (sequence is synthesized)
agaggggagcagcaaggatggaatgacagccgtgggccggaggggatgctcgaaagagctgagcggagatcctacagggaataccgaccctatgagacagagaggcaggcagacttcaca

SEQ ID NO: 289569 - DNA, 120 bp, Artificial Sequence
  ENSG00000130956_5 (sequence is synthesized)
gctgagaagtttccagatgaaaaaccaggtgataggtttgatcgagacagaccgttgagaggacgtggaggcccgagagggggtatgcgcggcagaggcagaggtggccctgggaacaga

SEQ ID NO: 289570 - DNA, 120 bp, Artificial Sequence
  ENSG00000130956_6 (sequence is synthesized)
gtttttgacgcttttgaccagagaggaaagcgagaatttgaaagatatggtgggaatgacaaaatagcagtcagaactgaagacaacatgggtggatgtggagttcgaacctggggatcg

SEQ ID NO: 289571 - DNA, 120 bp, Artificial Sequence
  ENSG00000130956_7 (sequence is synthesized)
ggtaaagataccagtgatgtggagccaactgcaccgatggaggaacccacagtggtggaggagtcccagggcaccccggaagaggagtctccagccaaagttcctgagttggaggtagaa

SEQ ID NO: 289572 - DNA, 120 bp, Artificial Sequence
  ENSG00000130956_8 (sequence is synthesized)
gaagaaacccaagttcaagagatgactttagatgagtggaaaaatcttcaagaacagaccagaccaaagcctgagtttaacatccggaaaccagaatccactgttccttccaaagccgtg

SEQ ID NO: 289573 - DNA, 120 bp, Artificial Sequence
  ENSG00000130956_9 (sequence is synthesized)
gtgattcacaagtcaaaatacagagatgatatggtaaaagatgactatgaggacgattcccatgttttccggaaacccgccaatgacatcacatcccagctggagattaattttggtaac

SEQ ID NO: 289574 - DNA, 120 bp, Artificial Sequence
  ENSG00000130956_10 (sequence is synthesized)
ctccctcgtcctgggcgtggagccagaggaggcacccggggaggccggggaaggatcaggagggcagagaactatggacccagagcagaagtggtgatgcaagatgttgcccccaaccca

SEQ ID NO: 289575 - DNA, 120 bp, Artificial Sequence
  ENSG00000130956_11 (sequence is synthesized)
agatttccctgcgctgtcttgaaagagccctgtttcccagcaccgcggagctgcactgcacacctgtggggagacttttccagctgggccaagggagtcagactctaagaacaatagatg

SEQ ID NO: 289576 - DNA, 120 bp, Artificial Sequence
  ENSG00000130956_12 (sequence is synthesized)
ttgcttttcccgtgtcatgtaaatttgttgcacttttttgggctgagctgttagaggggcttctccagaggctcgagagcaggccatttcccaagaagatgaagaatggtgactgtgttt

SEQ ID NO: 289577 - DNA, 120 bp, Artificial Sequence
  ENSG00000130956_13 (sequence is synthesized)
ttattgaaggaatttcaaatgaagaataatgtttaaaatgtgtatatagagatagtatagactcctccgcggaagcatggagggaaaggaggttgtaaaatagactccatggagactctt

SEQ ID NO: 289578 - DNA, 120 bp, Artificial Sequence
  ENSG00000130956_14 (sequence is synthesized)
aggaagcagtagattcccgggggctgtgcctttagcgttagaggaaacacatagagctggaactgttaatggaaagcagtcacagctgagttttcggagaccaagaaattaaaatacaat

SEQ ID NO: 289579 - DNA, 120 bp, Artificial Sequence
  ENSG00000130956_15 (sequence is synthesized)
tgcacttactgtttacttgtaaatgttatcttctctcctggaatattttgagttctggttttcacttaaccaatcatttaaaaatcgctattgtgtagccactggccaccactctgtgac

SEQ ID NO: 289580 - DNA, 120 bp, Artificial Sequence
  ENSG00000130956_16 (sequence is synthesized)
acagaatcagagaaagcgttgatttttaatggtgatttaaactacctcgtggtttctgtgtgtgtgcacacacacatctagtgtttgggtggtttttaggaagaatattaagtatgtgac

SEQ ID NO: 289581 - DNA, 120 bp, Artificial Sequence
  ENSG00000130956_17 (sequence is synthesized)
ttcaaaaaccatgttatttaacctgccaatcaaatggaaagggatcatggcaaaagcaaataccgcatccttttcttccgcagaactagagtcagagttcggcagctgcgtacaaaggcc

SEQ ID NO: 289582 - DNA, 120 bp, Artificial Sequence
  ENSG00000130956_18 (sequence is synthesized)
tctgccctcggcttgagcaaaagttgtaaataactagtatttattaagcacttataagcagtttttctcacttagtcctggctccagttctagagttcctctttattgcttttggtgaaa

SEQ ID NO: 289583 - DNA, 120 bp, Artificial Sequence
  ENSG00000130956_19 (sequence is synthesized)
gtttggggttgggggtacacctcagaggttcagtaattcacctggagtcccaccctgaacagagctggacccagagccacacacgcccgggaacacacactgtgctggggaggaagtggg

SEQ ID NO: 289584 - DNA, 120 bp, Artificial Sequence
  ENSG00000130956_20 (sequence is synthesized)
cctaggagggcctgcaggtccaggcagctgtagagctgctagaagctggggtgttgctctccccgctttctcatagacacagaggtactgtctgcctgttgtcacacagttcatatgctc

SEQ ID NO: 289585 - DNA, 120 bp, Artificial Sequence
  ENSG00000130956_21 (sequence is synthesized)
gcttgagatggaatctgaaccttggtcccaggatctgtgctttttcccactttgccacactgtctaaggtggctttgaactggaacccaagtgcaaataaaggttggtattcgctcctga

SEQ ID NO: 289586 - DNA, 120 bp, Artificial Sequence
  ENSG00000130956_22 (sequence is synthesized)
gggtcagaggctaactcagcttagatttttgaggaaccgccagactgctttccaaagaggctacaccatttcacattcccactggcagtgtatgtgggttccagtttctccacatcctcc

SEQ ID NO: 289587 - DNA, 120 bp, Artificial Sequence
  ENSG00000130956_23 (sequence is synthesized)
ccaacgcttgtcaaatgtcgttttggttctaaccatcccactgggtgtggactggtgcagctctgtggttttgacttgtctttctctaatagctaatgatgtgcaacatcttactgccta

SEQ ID NO: 289588 - DNA, 120 bp, Artificial Sequence
  ENSG00000130956_24 (sequence is synthesized)
tttgtatatcttctctggaaaaatgttcactcagatccttgccttttttggggggagggtggtcatttgtctcaactaaagaggacttgtatctagaattcataaagcattctttttttt

SEQ ID NO: 289589 - DNA, 120 bp, Artificial Sequence
  ENSG00000130956_25 (sequence is synthesized)
ttttttaaagagacagtgtctcattctgttgcccaaggtggaacacagtggccattcacacgtgtgatcatagctcactgcagcctcagatgcctggcctcaagcgatcctcccacctca

SEQ ID NO: 289590 - DNA, 120 bp, Artificial Sequence
  ENSG00000130956_26 (sequence is synthesized)
gccccctgagtagctaggactatcggcatgagccaccacgcttggctgttcataaagaattctttatgtattctagatacaagtcccttgtgagatatattatttgtaaatattttatcc

SEQ ID NO: 289591 - DNA, 120 bp, Artificial Sequence
  ENSG00000130956_27 (sequence is synthesized)
cattttgtggactgtctttttactttcttgatggtgtcctttgtagtataaaagtatctgatgatgttcaatgtatgtacttttgttgcttgtttttttggtgtcatgtggaagaaacca

SEQ ID NO: 289592 - DNA, 120 bp, Artificial Sequence
  ENSG00000130956_28 (sequence is synthesized)
ttgcccagtccagggttaagaaagtttctgcctaggttttctgctaagagttttatattttagctcttgtatttatggtgtgaggtaggtctaacttcattctttcttttggtgtgtgtg

SEQ ID NO: 289593 - DNA, 120 bp, Artificial Sequence
  ENSG00000130956_29 (sequence is synthesized)
gatatccagttgcccaagcaccgtttgttgaaaatacttttcattctccattgaattgtctttggcaccacggttggaaaaaaaaaatcagttgaccgtaaatgtgagggtttatttctg

SEQ ID NO: 289594 - DNA, 120 bp, Artificial Sequence
  ENSG00000130956_30 (sequence is synthesized)
gactctgaattctttgctctcaatctatatttctgtcttttgttttctttttaaaactcattaaagaggatatttgcaaaagtatgcattcatgagccactgctttaaaacttgtttatg

SEQ ID NO: 289595 - DNA, 120 bp, Artificial Sequence
  ENSG00000130956_31 (sequence is synthesized)
gtttcctgtattttatttcaacccattgtccataattacctcattttgtctgtcatgctgtctggaagggagtgccagtggtgaagtgtgatgttaatgtcatcaggatggtgatgttcc

SEQ ID NO: 289596 - DNA, 120 bp, Artificial Sequence
  ENSG00000130956_32 (sequence is synthesized)
catttttcaaagattgatttgaacacagataggaagtatcttctgttggcagtgatgacataaaatgttgaaaatgaaatatggaagcttgtgagtcaaagatttccttaccttatttgc

SEQ ID NO: 289597 - DNA, 120 bp, Artificial Sequence
  ENSG00000130956_33 (sequence is synthesized)
atttgaaatgcagtaccacaaaaatatgttgaattaatggttataactttttctttataaagtagacattttagtaccatcaaaaagtattctttatgattatatatctctttatagagt

SEQ ID NO: 289598 - DNA, 120 bp, Artificial Sequence
  ENSG00000130957_0 (sequence is synthesized)
acagatttcttatcggcttccacactgcggagctgcagccctcagaagtaagcaaggtttcctgccgggagaaaaggatttgaagcattccagccaaaatgacggacagaagccccttcg

SEQ ID NO: 289599 - DNA, 120 bp, Artificial Sequence
  ENSG00000130957_1 (sequence is synthesized)
aaaccgacatgctcaccctgacccgctacgttatggaaaaggggcgtcaggccaaagggactggggagctcacccagctgctgaactcaatgctgacggccatcaaagccatctcctcgg

SEQ ID NO: 289600 - DNA, 120 bp, Artificial Sequence
  ENSG00000130957_2 (sequence is synthesized)
ctgtgcgcaaggccggtctggcccacctgtatggaatcgcaggaagcgttaacgtgacgggagatgaggtgaagaaactggatgtgctatccaattccctggtgatcaacatggtccaat

SEQ ID NO: 289601 - DNA, 120 bp, Artificial Sequence
  ENSG00000130957_3 (sequence is synthesized)
cctcctatagtacctgcgtcctggtctcagaagagaataaggacgccatcatcaccgccaaggagaagcgggggaaatacgtggtctgctttgacccactggatggatcttccaatattg

SEQ ID NO: 289602 - DNA, 120 bp, Artificial Sequence
  ENSG00000130957_4 (sequence is synthesized)
actgcctggcctccatcggaaccatctttgccatctatagaaagacctcagaggatgagccttctgaaaaggatgccctgcagtgtggccgcaatattgtggccgcaggttatgcgctgt

SEQ ID NO: 289603 - DNA, 120 bp, Artificial Sequence
  ENSG00000130957_5 (sequence is synthesized)
ggtggctctctccacagggcaaggcgtggacctcttcatgcttgacccggctcttggtgaatttgtcctggtggaaaaagatgtcaagattaagaagaaaggaaagatttacagcctgaa

SEQ ID NO: 289604 - DNA, 120 bp, Artificial Sequence
  ENSG00000130957_6 (sequence is synthesized)
tgagggctatgccaagtattttgatgcggccaccactgaatatgtgcagaaaaagaaattccctgaggatggcagtgctccctatggggccaggtatgtgggctccatggtggctgacgt

SEQ ID NO: 289605 - DNA, 120 bp, Artificial Sequence
  ENSG00000130957_7 (sequence is synthesized)
gcaccgcaccctggtctatggaggaatcttcctgtacccagccaaccagaagagccctaagggcaagctccggctcctgtatgaatgcaatcccgtggcctacatcattgagcaggcagg

SEQ ID NO: 289606 - DNA, 120 bp, Artificial Sequence
  ENSG00000130957_8 (sequence is synthesized)
aggcttggcgaccacggggacccagcctgtactggacgtgaagcccgaggcaattcaccagcgagtccccctcattctggggtcaccagaggatgtgcaggaatatctcacctgtgtgca

SEQ ID NO: 289607 - DNA, 120 bp, Artificial Sequence
  ENSG00000130957_9 (sequence is synthesized)
gaaaaatcaggcaggcagctagcgagtttgaccccacatgccctcttctgtttgtcttgcaccttgtctaaggaccctaaatgaacgataaacagagatggtagctatgagtatacaaaa

SEQ ID NO: 289608 - DNA, 120 bp, Artificial Sequence
  ENSG00000130957_10 (sequence is synthesized)
ggtaaatccacttaatcacatacagaagagcaacaacaaactgcttacgacaggtttggaagccacaggcgattctatggtcaatgtgaaggactagaaataaaaacccacatgtggaaa

SEQ ID NO: 289609 - DNA, 120 bp, Artificial Sequence
  ENSG00000130958_0 (sequence is synthesized)
agcccggcgcggcgcggctgccctcgcgggtggcccggctgctgtcggcgctcttctacgggacctgctccttcctcatcgtgcttgtcaacaaggcgctgctgaccacctacggtttcc

SEQ ID NO: 289610 - DNA, 120 bp, Artificial Sequence
  ENSG00000130958_1 (sequence is synthesized)
cgtcaccaattttccttggaattggacagatggcagccaccataatgatactatatgtgtccaagctaaacaaaatcattcacttccctgattttgataagaaaattcctgtaaagctgt

SEQ ID NO: 289611 - DNA, 120 bp, Artificial Sequence
  ENSG00000130958_2 (sequence is synthesized)
ttcctctgcctctcctctacgttggaaaccacataagtggattatcaagcacaagtaaattaagcctaccgatgttcaccgtgctcaggaaattcaccattccacttaccttacttctgg

SEQ ID NO: 289612 - DNA, 120 bp, Artificial Sequence
  ENSG00000130958_3 (sequence is synthesized)
aaaccatcatacttgggaagcagtattcactcaacatcatcctcagtgtctttgccattattctcggggctttcatagcagctgggtctgaccttgcttttaacttagaaggctatattt

SEQ ID NO: 289613 - DNA, 120 bp, Artificial Sequence
  ENSG00000130958_4 (sequence is synthesized)
ttgtattcctgaatgatatcttcacagcagcaaatggagtttataccaaacagaaaatggacccaaaggagctagggaaatacggagtacttttctacaatgcctgcttcatgattatcc

SEQ ID NO: 289614 - DNA, 120 bp, Artificial Sequence
  ENSG00000130958_5 (sequence is synthesized)
agaatgttgtgtttatcctacagtttcttctttcctgttttttggggtttctgctgatgtactccacggttctgtgcagctattacaattcagccctgacgacagcagtggttggagcca

SEQ ID NO: 289615 - DNA, 120 bp, Artificial Sequence
  ENSG00000130958_6 (sequence is synthesized)
tcaagaatgtatccgttgcctacattgggatattaatcggtggagactacattttctctttgttaaactttgtagggttaaatatttgcatggcagggggcttgagatattcctttttaa

SEQ ID NO: 289616 - DNA, 120 bp, Artificial Sequence
  ENSG00000130958_7 (sequence is synthesized)
cactgagcagccagttaaaacctaaacctgtgggtgaagaaaacatctgtttggatttgaagagctaaagagtctgcagcaggattggagactgacttgtgactgcgggctgggggggca

SEQ ID NO: 289617 - DNA, 120 bp, Artificial Sequence
  ENSG00000130958_8 (sequence is synthesized)
ttcccagtaggaatgtgaagccagaggtttcggattcgtgacatccaccccctgggcaagtgagagcatctgcaaaatgcaaagagaactacctcatatgcaggatgagccaatggcagt

SEQ ID NO: 289618 - DNA, 120 bp, Artificial Sequence
  ENSG00000130958_9 (sequence is synthesized)
ctcaagaaatgtactcgggcgacaccttacctgtggaaagcaaatcttttcaaaataagccactgggactcggtaggtggagccccagctgctcttctagggacctatggggccttcgtg

SEQ ID NO: 289619 - DNA, 120 bp, Artificial Sequence
  ENSG00000130958_10 (sequence is synthesized)
gcatctctgtgctgtgtgctggggaggaggttgatgtaatggtgactcttttctgatcagcaccttggccgtgattcccaaggtcccagccaaagcaaagggccagttgtttcagtttaa

SEQ ID NO: 289620 - DNA, 120 bp, Artificial Sequence
  ENSG00000130958_11 (sequence is synthesized)
acagacatgtctttagtctaataaaattagttaactgccagtaaagttatttgttagctttgatgaaagctatgttggtatctttccctaatcatcaaagtaaataaaaaatcatttcta

SEQ ID NO: 289621 - DNA, 120 bp, Artificial Sequence
  ENSG00000130958_12 (sequence is synthesized)
agctgggtaagactttggactgtttctgctcaataacttctttgtgtctttgacaataggcccagccccatcctcagtttttcattttccatctggctgctgttgaattgagcaggcaag

SEQ ID NO: 289622 - DNA, 120 bp, Artificial Sequence
  ENSG00000130958_13 (sequence is synthesized)
agacaaatctgttgaagttagtggaatccccatgtgttcctatgaaagtcaaagtgggtcccacattggccagaaaatttctgagaatatatgaagagagcattgcaagatattaatata

SEQ ID NO: 289623 - DNA, 120 bp, Artificial Sequence
  ENSG00000130958_14 (sequence is synthesized)
gcttttcttcacaaaaagcagtgaactgtttacatttcttactgaatgtttgtcttcattataacaactttacttgagaagttcttaggcatttgattaataataacagacttacaaagc

SEQ ID NO: 289624 - DNA, 120 bp, Artificial Sequence
  ENSG00000130958_15 (sequence is synthesized)
ctttcactggtgcaatcatggctcactgtggcctcaaactcctgggctcaaatgattctccacctcagcctctcgagtacctgggactgcagcctaccgatgttcaccgtgctcaggaaa

SEQ ID NO: 289625 - DNA, 120 bp, Artificial Sequence
  ENSG00000130958_16 (sequence is synthesized)
taatgatactatatgtgtccaagctaaacaaaatcattcacttccctgattttgataagaaaattcctgtaaagtgcttggaaaaatgccagcatctagcactggattatttatcagaca

SEQ ID NO: 289626 - DNA, 120 bp, Artificial Sequence
  ENSG00000130958_17 (sequence is synthesized)
gaccaaagaagcacatgcttacagcatcagtaatcaggggagcccagtgtggtggctcacgcctataatcccagtgactcggggagatcaaggcaggaggatcgtctgaggccaggagtt

SEQ ID NO: 289627 - DNA, 120 bp, Artificial Sequence
  ENSG00000130958_18 (sequence is synthesized)
tcaaaataagccactgggactcgctcgacttggtggaagttctgcctcaggtgggcatagccaaaaaggggtcattctcttctcggttcctggggaattggatccaactgggagaagacc

SEQ ID NO: 289628 - DNA, 79 bp, Artificial Sequence
  ENSG00000130958_19 (sequence is synthesized)
gctgcatagtattccgtggtgtgtatgtaccatattccatgtttttgctgttgtgaatagtgctgcagtgaacatacac

SEQ ID NO: 289629 - DNA, 120 bp, Artificial Sequence
  ENSG00000130958_20 (sequence is synthesized)
ttgtatctttatttttaaaaatctttttttttgaagacagggtctggctctgttgcccaggcaggagtacagtggcattatctcagctcactgcaaccactgcctcccaggctcaagtga

SEQ ID NO: 289630 - DNA, 120 bp, Artificial Sequence
  ENSG00000130958_21 (sequence is synthesized)
tctgccctcctcagcctcctaagtagctgagaccacagggacacaccattacacctggctaattgttgtattttagtagagatgggatctttctatgttgcctaggctggcctcaagtga

SEQ ID NO: 289631 - DNA, 120 bp, Artificial Sequence
  ENSG00000130958_22 (sequence is synthesized)
ttacaggtgtgaaccaccatgcccagccagagatgctcaattcctggtgagtgcagctgaggggctagggccctctctaccaagcccctacccattagatgcaggctctacctcaagtac

SEQ ID NO: 289632 - DNA, 120 bp, Artificial Sequence
  ENSG00000130958_23 (sequence is synthesized)
tacccattagatgcaggctctacctcaagtacagcaggccacaaatactggggtccccattacccttgccccagctcacttggaaggctgttccacactggggagagatgatctgacaag

SEQ ID NO: 289633 - DNA, 120 bp, Artificial Sequence
  ENSG00000130958_24 (sequence is synthesized)
accagaggctaccaccctgtccagcacccagacgagtggctcagagaggctgcccagggaggacgcagcctgtgcagtaaagaatttaatcttgcccaaaaagatgtctggtctttgccc

SEQ ID NO: 289634 - DNA, 120 bp, Artificial Sequence
  ENSG00000130958_25 (sequence is synthesized)
taagcttcttggaatatcatgccaaagaggagtgtctttgtttgcctggggaccttgggttacattagatagtctaacaatgtgatttcagatgggggctggctacaccagaaagaccaa

SEQ ID NO: 289635 - DNA, 120 bp, Artificial Sequence
  ENSG00000130958_26 (sequence is synthesized)
cagggtggtttagggtgaaggctttgggtgatacctggggagtctggagacagagatcagccatgtgggcaatcagtgaagtttatgtaatgaagccctaataaaaactctgaacactga

SEQ ID NO: 289636 - DNA, 120 bp, Artificial Sequence
  ENSG00000130962_0 (sequence is synthesized)
tctttccacctcccttccagtccgctcccggttcctggctccagctaggctcggcagaaataggagcgcgcaggcgcgacgtgcggctcgcagaacggcgagtagcggagcgggacccgc

SEQ ID NO: 289637 - DNA, 120 bp, Artificial Sequence
  ENSG00000130962_1 (sequence is synthesized)
tggaatcatcatccagggacgtgccagaaaccacaagaaaacatggggagggttttcctcacgggagaaaaagccaattccatattaaaacgctacccaagagctaatgggttttttgaa

SEQ ID NO: 289638 - DNA, 120 bp, Artificial Sequence
  ENSG00000130962_2 (sequence is synthesized)
gaaataagacagggcaacattgagcgtgagtgcaaagaagaattctgtacatttgaagaagcaagagaagcttttgaaaataatgaaaaaactaaggagttttggagcacctacacaaaa

SEQ ID NO: 289639 - DNA, 120 bp, Artificial Sequence
  ENSG00000130962_3 (sequence is synthesized)
gcgcaacaaggggagagtaaccgaggaagtgactggtttcagttttaccttacctttccgttaatctttggcctcttcattatcctccttgtcattttcctaatctggagatgcttccta

SEQ ID NO: 289640 - DNA, 120 bp, Artificial Sequence
  ENSG00000130962_4 (sequence is synthesized)
agaaacaaaactcgtagacagacagtgactgaaggccacattcctttccctcagcaccttaatattatcaccccaccccccccaccagatgaagtgtttgacagcagtggattgtctcca

SEQ ID NO: 289641 - DNA, 120 bp, Artificial Sequence
  ENSG00000130962_5 (sequence is synthesized)
ggctttctgggatatgtagttgggcgctcagattccgtctctactcgcctgtccaattgtgatcccccgccaacctatgaggaagccactggccaagtgaacctgcagaggagtgaaaca

SEQ ID NO: 289642 - DNA, 120 bp, Artificial Sequence
  ENSG00000130962_6 (sequence is synthesized)
gaacctcatttagacccacccccagagtatgaggacatagtcaactccaactcagccagtgccattcctatggtgcctgtggtcaccaccatcaaatgaagctgcaaacttctttttact

SEQ ID NO: 289643 - DNA, 120 bp, Artificial Sequence
  ENSG00000130962_7 (sequence is synthesized)
ctaatcatttttaaaatactaatggaagaactttctagcactttaccactacataaatgttcattgacttattttattggactcttaccgcataccacttcacacttgttttattttctt

SEQ ID NO: 289644 - DNA, 120 bp, Artificial Sequence
  ENSG00000130962_8 (sequence is synthesized)
tagttttgtttcttgttatagaatcattatccatgctcatttttgctaggggaaatatatgaagagggaaaacatactaatgggggtctttctgtgatgtgatgagacatacatgtaagt

SEQ ID NO: 289645 - DNA, 120 bp, Artificial Sequence
  ENSG00000130962_9 (sequence is synthesized)
gtatatatgtgtgtataggcatatatacgtgtgtatgcatcaacacagtatatgtaaaactgtcttaaaaatccattaacttctacctaaatcacctggaaggagagcattactcaccaa

SEQ ID NO: 289646 - DNA, 120 bp, Artificial Sequence
  ENSG00000130962_10 (sequence is synthesized)
aattgcaaaacaagggtatcaagaatttgtgtaatagccagtgacatgctgtagatttttgcaaactggatgtacttagcatgttttctaattctgactggcttttgttaacttgataat

SEQ ID NO: 289647 - DNA, 120 bp, Artificial Sequence
  ENSG00000130962_11 (sequence is synthesized)
tcttcatctaccttaaaaagaaaaaaattacacatagtcattcttgatgttataaatagagaaaaagtgtgtgtgagcaataatgcataagctactgataacttgcttacagcagatagc

SEQ ID NO: 289648 - DNA, 120 bp, Artificial Sequence
  ENSG00000130962_12 (sequence is synthesized)
aataaggtatttggtggcattcggcttgttttgtaatagggattttttttttggttgaccactcccccacacttccaaaattaaacagtgttttcttagcatcttgaatatctcctgcgg

SEQ ID NO: 289649 - DNA, 120 bp, Artificial Sequence
  ENSG00000130962_13 (sequence is synthesized)
tgtatattaacatcttgatgagacagatttccaggcaacaaaataatttctaaaatggatatatgtgtggattaatgacaggcagtaaatacccattactcctttactcatagctggtaa

SEQ ID NO: 289650 - DNA, 120 bp, Artificial Sequence
  ENSG00000130962_14 (sequence is synthesized)
aattattcccactgttttattgccttttactgtacgttctacactctgtcctactcccacagaattttcaagcccttaagagtttagttaaaataaaatttttgaaattattgtcttaat

SEQ ID NO: 289651 - DNA, 120 bp, Artificial Sequence
  ENSG00000130962_15 (sequence is synthesized)
atttttatataggctgatgtctttgcctcaagattgttaggaggtaattttccattgaattatcaactgtgatttttatattgccctccaagtggtagaagaagattgcaaagtccatgt

SEQ ID NO: 289652 - DNA, 120 bp, Artificial Sequence
  ENSG00000130962_16 (sequence is synthesized)
tatgctaggtgcacaataaatctagtaatagccccacacagatctcatcattgttgctacttccttttgtattttcatcaggtatttttttaactgtagggtttttacttttttcttgga

SEQ ID NO: 289653 - DNA, 120 bp, Artificial Sequence
  ENSG00000130962_17 (sequence is synthesized)
gcagagagaacaggctgtaaatgggttgccaacataagctggctgagaaataaaagaaaacaagacagttgttcataaagtttcattttgtatgcactgatggcaaattcattaggtcag

SEQ ID NO: 289654 - DNA, 120 bp, Artificial Sequence
  ENSG00000130962_18 (sequence is synthesized)
tgatgaggcaggcagaaggaatgtaggtttcaggtgtgtcatttcctgctgcttccagctccatccctacagactcctccccgagtcctgccctggaaccaaaggaaggaggaacactga

SEQ ID NO: 289655 - DNA, 120 bp, Artificial Sequence
  ENSG00000130962_19 (sequence is synthesized)
ggggaatcctgaagtaggagtcagatgacctgaactcagatctccctctatcacatgcttgccaccactgtaccttgagcaagaatcatatctgaccctcaacctcctcaactctaaaat

SEQ ID NO: 289656 - DNA, 120 bp, Artificial Sequence
  ENSG00000130962_20 (sequence is synthesized)
ggggataacatcatttgtcctgcacttctctaagggctttacaaggatcaaataagatggtgtgtatgtaagaaatttgtaaaatgtgaagagctatctacactaagttcgtaatgttat

SEQ ID NO: 289657 - DNA, 120 bp, Artificial Sequence
  ENSG00000130962_21 (sequence is synthesized)
tattattgtgcttcatggagaattttcccctctgttttcctaaattgtatgagagctttcacacagtgagaaatagagcaggctgccccataaatgggtaacatattcctaatctgagtg

SEQ ID NO: 289658 - DNA, 120 bp, Artificial Sequence
  ENSG00000130962_22 (sequence is synthesized)
tgtgggctgttagagaacccctgccatgctctggtctgttctgaaactgtgccaactgaaagatgatagtccacacagcacaaacaggtttaagcaaatgatagaaagggaagtaaggcg

SEQ ID NO: 289659 - DNA, 120 bp, Artificial Sequence
  ENSG00000130962_23 (sequence is synthesized)
tgtgtgctagttaataggtttagtagcttttatggactaaaaatgattgattgtatcttgaccctggtctcagaaatgacatttttacttttgccatgagtacacatcagatatctttgg

SEQ ID NO: 289660 - DNA, 120 bp, Artificial Sequence
  ENSG00000130962_24 (sequence is synthesized)
cttctatttaaagctaaaggtagaagtgtttgatccagtgaactgtgtatgtatgtgtggggtttttttctttatttttaaatgaaaattaagacaccttttgtgtggacatgtttttgt

SEQ ID NO: 289661 - DNA, 120 bp, Artificial Sequence
  ENSG00000130962_25 (sequence is synthesized)
ctttaatgtcaggctttagattagaccagcagttttcaaagtatggccaatggacccctgggttccttgagagcctttcaggggggactatgagatcaaaatatttttattataatgtga

SEQ ID NO: 289662 - DNA, 120 bp, Artificial Sequence
  ENSG00000130962_26 (sequence is synthesized)
agacattgtcttttcactctatctcaaaaaaagtgttgcaaatgtaaaacattgccatcttctcacaaatctctttttttgtttttgaaaatatggccatttttcataaaatgttatttg

SEQ ID NO: 289663 - DNA, 120 bp, Artificial Sequence
  ENSG00000130962_27 (sequence is synthesized)
tgttagcatgtaatgggtttactatgtttaaataagttaatactttaaaaattttcaggtttttttagtatggtgaatattgatagatataaacctcatgaacaaaagtactttggcatc

SEQ ID NO: 289664 - DNA, 120 bp, Artificial Sequence
  ENSG00000130962_28 (sequence is synthesized)
cagattctcaataaatgttaagagcgtaagtgtaagggggtccagagaccaaaagttttagagctacaggattagacataggagcaggatattctgttagtgtgatttcttgcaacttta

SEQ ID NO: 289665 - DNA, 120 bp, Artificial Sequence
  ENSG00000130962_29 (sequence is synthesized)
ttttacattttaaactgctgatattggatataatgctgctttttagagacacctaaattgcagtatcagaatgaatgttgatgtttgaagccaaaaagccaaatgcttaaactgatcaat

SEQ ID NO: 289666 - DNA, 120 bp, Artificial Sequence
  ENSG00000130962_30 (sequence is synthesized)
gactgtagctttttagactgttggtcaaagaacattctacttcacagtaatagctctatcagccacagatctcatggtggctgttgcatgataatgataggataaacaaaataccactgt

SEQ ID NO: 289667 - DNA, 120 bp, Artificial Sequence
  ENSG00000130962_31 (sequence is synthesized)
cttcaagaaacattatcttaggtttgtttgtttggtttgagtttgatttggcttttatattttttaaaatcccttttgctaccccatctggttttataaactgagtttcttagcattcgt

SEQ ID NO: 289668 - DNA, 120 bp, Artificial Sequence
  ENSG00000130962_32 (sequence is synthesized)
taaaattaaggggtttgtttggaataatatatattttttatgcttttgtctttcttacctgattgatattacattcacctttgattgttttttaaaagtttatttttacagaatatattt

SEQ ID NO: 289669 - DNA, 120 bp, Artificial Sequence
  ENSG00000130962_33 (sequence is synthesized)
agtacctttcttaaggagtaactgaattgaatcaaccagtttgcatttaaataaaagaacaggctcagtggtcttcctgtagaatggtttacatgcctgcatgtgcagtagttgtgtctg

SEQ ID NO: 289670 - DNA, 120 bp, Artificial Sequence
  ENSG00000130962_34 (sequence is synthesized)
gaatcctagaattggcactttctgcctccttgctctaaatgtcacaaaaaattatacttccttaaagtaaatgtaatgatttcttcttttcctattgaccagtacagatagatatgttgt

SEQ ID NO: 289671 - DNA, 120 bp, Artificial Sequence
  ENSG00000130962_35 (sequence is synthesized)
gtttgcttcatttttaatgatgacttcaagattgatgatgtgatccaataactgtggaggtagctttaacttggttctgtgtaaatagtatgtattttattataatatttctcattttaa

SEQ ID NO: 289672 - DNA, 120 bp, Artificial Sequence
  ENSG00000130962_36 (sequence is synthesized)
gatgcttggtttacattaaattatggtatttaactatttttatgtttatactaggtagggtctttcttatgtttctgtgtttttggtatgctaaataaagctatttttaaacccaagaga

SEQ ID NO: 289673 - DNA, 120 bp, Artificial Sequence
  ENSG00000130962_37 (sequence is synthesized)
agaaataggagcgcgcaggcgcgacgtgcggctcgcagaacggcgagtagcggagcgggacccgctgtgagtgtggcggccgcgctgggttcctagctggggaaacgtgatccaggcgaa

SEQ ID NO: 289674 - DNA, 120 bp, Artificial Sequence
  ENSG00000130962_38 (sequence is synthesized)
tttgaaaataatgaaaaaactggtcttgttctgttgccaaggctggagtgcagctgtgaacatggctcattgcagcctcaacttcctgtgcccaagtgatcctcccatctcagcctccca

SEQ ID NO: 289675 - DNA, 69 bp, Artificial Sequence
  ENSG00000130962_39 (sequence is synthesized)
aggtgcatgccaccatgcctggctaatttaaaaaacaaaattatgtgcagacaaggtccaccttggcct

SEQ ID NO: 289676 - DNA, 120 bp, Artificial Sequence
  ENSG00000130962_40 (sequence is synthesized)
ttataggtgtgagacaccatgcccggccatctattttaaaatatttaaactcaaggcaaactctagacaaaacagaactaaatctggaaggagctattataccagaaacaagaaaatgtt

SEQ ID NO: 289677 - DNA, 120 bp, Artificial Sequence
  ENSG00000130962_41 (sequence is synthesized)
accaaaaatatcaaattgatattctcagaatttaagaaaacaataggtttgtaaaatgagaagaagctattacagaggggaccaattaggggataagagaaagtccttggacattagaaa

SEQ ID NO: 289678 - DNA, 120 bp, Artificial Sequence
  ENSG00000130962_42 (sequence is synthesized)
aaaaggaatgcatccctccccagataatggacccaaatacccacttccggccctttccgccattagccatccgccttcagccagctactactaccacagctcccgcctgcctgctcacca

SEQ ID NO: 289679 - DNA, 120 bp, Artificial Sequence
  ENSG00000130962_43 (sequence is synthesized)
catcccaaggtgcctgccatggccaccaccccagtgttgcaggtgcgtcagaactaccaccccaactgcgaggccgctgtcaacaaccacgtcaacctggagttgcatgcttcctacgtg

SEQ ID NO: 289680 - DNA, 120 bp, Artificial Sequence
  ENSG00000130962_44 (sequence is synthesized)
tacctgtccatggccttctacttcgaccgggacaatgcggccctggagcactttagccgctacttcctgcgccagttgcacaagaagagggagcacgtccaggagctgatgaggctgcag

SEQ ID NO: 289681 - DNA, 120 bp, Artificial Sequence
  ENSG00000130962_45 (sequence is synthesized)
aaccagcacagtggctgcatctgctttcacgacatcaggaagccagagcgtcaagactgggagagcaggctcgaggccatggagtgcgccttccacctggagaagagtgtcaaccagagc

SEQ ID NO: 289682 - DNA, 120 bp, Artificial Sequence
  ENSG00000130962_46 (sequence is synthesized)
ctcctggagctacaccagctggccatggagaaaggtgacccccagctatgcgacttcctggagagccacttcctgaaccagcaggtcaaggccatcaaaaagctgggtgactacctgagc

SEQ ID NO: 289683 - DNA, 120 bp, Artificial Sequence
  ENSG00000130962_47 (sequence is synthesized)
aacctgtgcaagacgtgagccccagaagcaggcctggcagagtacctgtttgacaagctcaccctgggcggcagcgaggaagacacctgagccaagatgggccccacagccacggtgtgc

SEQ ID NO: 289684 - DNA, 120 bp, Artificial Sequence
  ENSG00000130962_48 (sequence is synthesized)
cttccctgggtcaggccaccaggcgggggcgtgcatgttgccctttcagaacgttctcttcaatttttttcctttcagtgttaccattattggcaataaagttatctgttctcaaagcaa

SEQ ID NO: 289685 - DNA, 120 bp, Artificial Sequence
  ENSG00000130962_49 (sequence is synthesized)
tggctatgttttctaaagagcatctagcagttttcatctggtatatcaacttgccacataggttttttatacttatatttctttttagttttcctcacgggagaaaaagccaattccata

SEQ ID NO: 289686 - DNA, 120 bp, Artificial Sequence
  ENSG00000130985_0 (sequence is synthesized)
atcttgtgtcggcggctcggctgtaaggaggtggcagggacaaccacaaccacaacggccgggggaggagaaggcggcagcggcgattctaggcggcccaggcggcggggaggaggagaa

SEQ ID NO: 289687 - DNA, 120 bp, Artificial Sequence
  ENSG00000130985_1 (sequence is synthesized)
ggaggagggtggcggccgggcttggcttcggctccttgaggagttggcggcggcgcgacccggggaaccggcattgatgtccagctcgccgctgtccaagaaacgtcgcgtgtccgggcc

SEQ ID NO: 289688 - DNA, 120 bp, Artificial Sequence
  ENSG00000130985_2 (sequence is synthesized)
tgatccaaagccgggttctaactgctcccctgcccagtccgtgttgtccgaagtgccctcggtgccaaccaacggaatggccaagaacggcagtgaagcagacatagacgagggccttta

SEQ ID NO: 289689 - DNA, 120 bp, Artificial Sequence
  ENSG00000130985_3 (sequence is synthesized)
ctcccggcagctgtatgtgttgggccatgaggcaatgaagcggctccagacatccagtgtcctggtatcaggcctgcggggcctgggcgtggagatcgctaagaacatcatccttggtgg

SEQ ID NO: 289690 - DNA, 120 bp, Artificial Sequence
  ENSG00000130985_4 (sequence is synthesized)
ggtcaaggctgttaccctacatgaccagggcactgcccagtgggctgatctttcctcccagttctacctgcgggaggaggacatcggtaaaaaccgggccgaggtatcacagccccgcct

SEQ ID NO: 289691 - DNA, 120 bp, Artificial Sequence
  ENSG00000130985_5 (sequence is synthesized)
cgctgagctcaacagctatgtgcctgtcactgcctacactggacccctcgttgaggacttccttagtggtttccaggtggtggtgctcaccaacacccccctggaggaccagctgcgagt

SEQ ID NO: 289692 - DNA, 120 bp, Artificial Sequence
  ENSG00000130985_6 (sequence is synthesized)
gggtgagttctgtcacaaccgtggcatcaagctggtggtggcagacacgcggggcctgtttgggcagctcttctgtgactttggagaggaaatgatcctcacagattccaatggggagca

SEQ ID NO: 289693 - DNA, 120 bp, Artificial Sequence
  ENSG00000130985_7 (sequence is synthesized)
gccactcagtgctatggtttctatggttaccaaggacaaccccggtgtggttacctgcctggatgaggcccgacacgggtttgagagcggggactttgtctccttttcagaagtacaggg

SEQ ID NO: 289694 - DNA, 120 bp, Artificial Sequence
  ENSG00000130985_8 (sequence is synthesized)
catggttgaactcaacggaaatcagcccatggagatcaaagtcctgggtccttatacctttagcatctgtgacacctccaacttctccgactacatccgtggaggcatcgtcagtcaggt

SEQ ID NO: 289695 - DNA, 120 bp, Artificial Sequence
  ENSG00000130985_9 (sequence is synthesized)
caaagtacctaagaagattagctttaaatccttggtggcctcactggcagaacctgactttgtggtgacggacttcgccaagttttctcgccctgcccagctgcacattggcttccaggc

SEQ ID NO: 289696 - DNA, 120 bp, Artificial Sequence
  ENSG00000130985_10 (sequence is synthesized)
cctgcaccagttctgtgctcagcatggccggccacctcggccccgcaatgaggaggatgcagcagaactggtagccttagcacaggctgtgaatgctcgagccctgccagcagtgcagca

SEQ ID NO: 289697 - DNA, 120 bp, Artificial Sequence
  ENSG00000130985_11 (sequence is synthesized)
aaataacctggacgaggacctcatccggaagctggcatatgtggctgctggggatctggcacccataaacgccttcattgggggcctggctgcccaggaagtcatgaaggcctgctccgg

SEQ ID NO: 289698 - DNA, 120 bp, Artificial Sequence
  ENSG00000130985_12 (sequence is synthesized)
gaagttcatgcccatcatgcagtggctatactttgatgcccttgagtgtctccctgaggacaaagaggtcctcacagaggacaagtgcctccagcgccagaaccgttatgacgggcaagt

SEQ ID NO: 289699 - DNA, 120 bp, Artificial Sequence
  ENSG00000130985_13 (sequence is synthesized)
ggctgtgtttggctcagacctgcaagagaagctgggcaagcagaagtatttcctggtgggtgcgggggccattggctgtgagctgctcaagaactttgccatgattgggctgggctgcgg

SEQ ID NO: 289700 - DNA, 120 bp, Artificial Sequence
  ENSG00000130985_14 (sequence is synthesized)
agttaaagtctgacacggctgctgcagctgtgcgccaaatgaatccacatatccgggtgacaagccaccagaaccgtgtgggtcctgacacggagcgcatctatgatgacgattttttcc

SEQ ID NO: 289701 - DNA, 120 bp, Artificial Sequence
  ENSG00000130985_15 (sequence is synthesized)
aaaacctagatggcgtggccaatgccctggacaacgtggatgcccgcatgtacatggaccgccgctgtgtctactaccggaagccactgctggagtcaggcacactgggcaccaaaggca

SEQ ID NO: 289702 - DNA, 120 bp, Artificial Sequence
  ENSG00000130985_16 (sequence is synthesized)
atgtgcaggtggtgatccccttcctgacagagtcgtacagttccagccaggacccacctgagaagtccatccccatctgtaccctgaagaacttccctaatgccatcgagcacaccctgc

SEQ ID NO: 289703 - DNA, 120 bp, Artificial Sequence
  ENSG00000130985_17 (sequence is synthesized)
agtgggctcgggatgagtttgaaggcctcttcaagcagccagcagaaaatgtcaaccagtacctcacagaccccaagtttgtggagcgaacactgcggctggcaggcactcagcccttgg

SEQ ID NO: 289704 - DNA, 120 bp, Artificial Sequence
  ENSG00000130985_18 (sequence is synthesized)
aggtgctggaggctgtgcagcgcagcctggtgctgcagcgaccacagacctgggctgactgcgtgacctgggcctgccaccactggcacacccagtactcgaacaacatccggcagctgc

SEQ ID NO: 289705 - DNA, 120 bp, Artificial Sequence
  ENSG00000130985_19 (sequence is synthesized)
tgcacaacttccctcctgaccagctcacaagctcaggagcgccgttctggtctgggcccaaacgctgtccacacccgctcacctttgatgtcaacaatcccctgcatctggactatgtga

SEQ ID NO: 289706 - DNA, 120 bp, Artificial Sequence
  ENSG00000130985_20 (sequence is synthesized)
tggctgctgccaacctgtttgcccagacctacgggctgacaggctctcaggaccgagctgctgtggccacattcctgcagtctgtgcaggtccccgaattcacccccaagtctggcgtca

SEQ ID NO: 289707 - DNA, 120 bp, Artificial Sequence
  ENSG00000130985_21 (sequence is synthesized)
agatccatgtttctgaccaggagctgcagagcgccaatgcctctgttgatgacagtcgtctagaggagctcaaagccactctgcccagcccagacaagctccctggattcaagatgtacc

SEQ ID NO: 289708 - DNA, 120 bp, Artificial Sequence
  ENSG00000130985_22 (sequence is synthesized)
ccattgactttgagaaggatgatgacagcaactttcatatggatttcatcgtggctgcatccaacctccgggcagaaaactatgacattccttctgcagaccggcacaagagcaagctga

SEQ ID NO: 289709 - DNA, 120 bp, Artificial Sequence
  ENSG00000130985_23 (sequence is synthesized)
ttgcagggaagatcatcccagccattgccacgaccacagcagccgtggttggccttgtgtgtctggagctgtacaaggttgtgcaggggcaccgacagcttgactcctacaagaatggtt

SEQ ID NO: 289710 - DNA, 120 bp, Artificial Sequence
  ENSG00000130985_24 (sequence is synthesized)
tcctcaacttggccctgcctttctttggtttctctgaaccccttgccgcaccacgtcaccagtactataaccaagagtggacattgtgggatcgctttgaggtacaagggctgcagccta

SEQ ID NO: 289711 - DNA, 120 bp, Artificial Sequence
  ENSG00000130985_25 (sequence is synthesized)
atggtgaggagatgaccctcaaacagttcctcgactattttaagacagagcacaaattagagatcaccatgctgtcccagggcgtgtccatgctctattccttcttcatgccagctgcca

SEQ ID NO: 289712 - DNA, 120 bp, Artificial Sequence
  ENSG00000130985_26 (sequence is synthesized)
agctcaaggaacggttggatcagccgatgacagagattgtgagccgtgtgtcgaagcgaaagctgggccgccacgtgcgggcgctggtgcttgagctgtgctgtaacgacgagagcggcg

SEQ ID NO: 289713 - DNA, 120 bp, Artificial Sequence
  ENSG00000130985_27 (sequence is synthesized)
aggatgtcgaggttccctatgtccgatacaccatccgctgaccccgtctgctcctctaggctggccccttgtccacccctctccacaccccttccagcccagggttcccatttggcttct

SEQ ID NO: 289714 - DNA, 120 bp, Artificial Sequence
  ENSG00000130985_28 (sequence is synthesized)
ggcagtggcccaactagccaagtctggtgttccctcatcatccccctacctgaacccctcttgccactgccttctaccttgtttgaaacctgaatcctaataaagaattaataactccca

SEQ ID NO: 289715 - DNA, 120 bp, Artificial Sequence
  ENSG00000130985_29 (sequence is synthesized)
cttgtacgacagaggtggtttgctcttccgttgccccgtggcttcagctcatctttggcaggaaggcgaggcttccgcccggcacaggggatgtccagctcgccgctgtccaagaaacgt

SEQ ID NO: 289716 - DNA, 120 bp, Artificial Sequence
  ENSG00000130985_30 (sequence is synthesized)
aggactgcgagactggacacgtcgggggcccagatgtttctagggagaggagcctcccagctcaggctagggaagggacaccggagcccagctcttcctgagctgacgaggcgccacccg

SEQ ID NO: 289717 - DNA, 120 bp, Artificial Sequence
  ENSG00000130985_31 (sequence is synthesized)
tgggccctgagcccaggggcatttggcaaacagtcccccaccagctgcatgcctctgggcgagtgaatggggttctctaagcctttcttttcccatttgtgatttgggcatagggttatc

SEQ ID NO: 289718 - DNA, 120 bp, Artificial Sequence
  ENSG00000130985_32 (sequence is synthesized)
tgggtcatggggattgttaagattagacaaagccctttcctctttgattgacacacagtatgctcttggtagatagtagggagctcttgtcattgtggttggtgctagtgacaagtgcca

SEQ ID NO: 289719 - DNA, 120 bp, Artificial Sequence
  ENSG00000130985_33 (sequence is synthesized)
agatggaatcttaggtacattgggatacttagtgtcataaaagtctcagtgtgggaggacttgtgtgaacagaagactcagtgcctagaggagcacttggggtgaggggaagtgacgctg

SEQ ID NO: 289720 - DNA, 120 bp, Artificial Sequence
  ENSG00000130985_34 (sequence is synthesized)
ggtcctcccatctccagcatgtggacccagtcacccccaccaccagatttcacttccacagcaggctttattgttctgtctctgggacctagcaggtgaccctgggcaagttacttctca

SEQ ID NO: 289721 - DNA, 120 bp, Artificial Sequence
  ENSG00000130985_35 (sequence is synthesized)
tttgtccggcaaggacactaaactctgccttgctgggtcagggtcatggaggggatgaaacgtgataacacgaggaagcagcctgggcttcagagtcagcagatcctggtctggtcccag

SEQ ID NO: 289722 - DNA, 120 bp, Artificial Sequence
  ENSG00000130985_36 (sequence is synthesized)
ctcagtgtgtgggaaccttggtcaccgaacgtccctgagtgaatttttttccatcactttaaagttgggggtattattgatagcagtccaaaccccacaggagtaccctgaggacagagt

SEQ ID NO: 289723 - DNA, 120 bp, Artificial Sequence
  ENSG00000130985_37 (sequence is synthesized)
gagacgaggtttagagaagtgcttactatggcatctggcacaaggaggactcctgatcaatctaatactcatttatcattgtggttaacctgtttaagggactccgcatgcagatgaggc

SEQ ID NO: 289724 - DNA, 120 bp, Artificial Sequence
  ENSG00000130985_38 (sequence is synthesized)
ttgcaacctcttttattggtctgtgtcggttttcccctcccaaagctgggggcagggttgggctttataaaacttgagcccctctggggactgggttctcagcaagttaccgctcctgcc

SEQ ID NO: 289725 - DNA, 120 bp, Artificial Sequence
  ENSG00000130985_39 (sequence is synthesized)
atcatgccaccctgatggatgtccaagcctcacttccctcctgcactccccgctcccgccgccatccctgggattaagggagaggagaatggctgcttgttactgcctacctactctgtg

SEQ ID NO: 289726 - DNA, 90 bp, Artificial Sequence
  ENSG00000130985_40 (sequence is synthesized)
ctaattgaagtttttattttttatggaggcataacatatctagaataaggtacacagtttgctcatgttgcccaggttggagtgcagtgg

SEQ ID NO: 289727 - DNA, 72 bp, Artificial Sequence
  ENSG00000130985_41 (sequence is synthesized)
agcgatttcgcctggcactcagatcttaatacatttttaggctgggcatggcggctgacacctataatctca

SEQ ID NO: 289728 - DNA, 120 bp, Artificial Sequence
  ENSG00000130985_42 (sequence is synthesized)
acctcgcctggcactcagatcttaatacatttttaggctgggcatggcggctgacacctataatctcagcactcaggaggccaaggagtgaggtttgtttgagcccaggagttcaagacc

SEQ ID NO: 289729 - DNA, 85 bp, Artificial Sequence
  ENSG00000130985_43 (sequence is synthesized)
gtgcctgctgtttcaacctgggaggtcaaggctgctgtgagccgtgattgcatcgctgcactccagctcgggtgacagtgtgaga

SEQ ID NO: 289730 - DNA, 120 bp, Artificial Sequence
  ENSG00000130985_44 (sequence is synthesized)
gattgcatcgctgcactccagctcgggtgacagtgtgagactttgtctcaaacaacaaaacaaaacagttttccacatacacagcactattgtaaccactgcccaaatcaacttcattga

SEQ ID NO: 289731 - DNA, 120 bp, Artificial Sequence
  ENSG00000130985_45 (sequence is synthesized)
ttacaggtgtgagctactgtgcctggcctggtttttcaattgaggtgggggaatggggaaggctagagggcttccccacttccagagtagctgtgcgccttgtacttgctttattcactg

SEQ ID NO: 289732 - DNA, 120 bp, Artificial Sequence
  ENSG00000130985_46 (sequence is synthesized)
attattcacgaggggcggatcagcgtgccgaagggacgtgctgaaggggcgttctgaagtctgccgcgcaaacgagttcattgatgattcgcaaaaatgtccagctcgccgctgtccaag

SEQ ID NO: 289733 - DNA, 120 bp, Artificial Sequence
  ENSG00000130985_47 (sequence is synthesized)
agtgtaagatgtgccttttctccaaacctccctccctcacttcccaccaggcagcctaggtttctagaatgactcattcttttttcacttttattttgatttttttttcaacacatagac

SEQ ID NO: 289734 - DNA, 120 bp, Artificial Sequence
  ENSG00000130988_0 (sequence is synthesized)
acaaacaccaaggagtggaggtcagagtgtcacttttttgttttctttttgaaagatcattcgagaaacacgtcactgatctcccctgcgaccatgtcttccattaagattgagtgtgtt

SEQ ID NO: 289735 - DNA, 120 bp, Artificial Sequence
  ENSG00000130988_1 (sequence is synthesized)
ttgccagagaactgccggtgtggtgagtctccagtatgggaggaagtgtccaactctctgctctttgtagacattcctgcaaaaaaggtttgccggtgggattcattcaccaagcaagta

SEQ ID NO: 289736 - DNA, 120 bp, Artificial Sequence
  ENSG00000130988_2 (sequence is synthesized)
cagcgagtgaccatggatgccccagtcagctccgtggctcttcgccagtcgggaggctatgttgccaccattggaacaaagttctgtgctttgaactggaaagaacaatcagcagttgtc

SEQ ID NO: 289737 - DNA, 120 bp, Artificial Sequence
  ENSG00000130988_3 (sequence is synthesized)
ttggccacggtggataacgacaagaaaaacaatcgcttcaatgatgggaaggtggatcccgccgggaggtactttgctggcaccatggctgaggaaacagctccagcagttcttgagcgg

SEQ ID NO: 289738 - DNA, 120 bp, Artificial Sequence
  ENSG00000130988_4 (sequence is synthesized)
caccagggggccctgtactccctctttcctgatcaccacgtgaaaaagtactttgaccaggtggacatttccaatggtttggattggtcgctagaccacaaaatcttctattacattgac

SEQ ID NO: 289739 - DNA, 120 bp, Artificial Sequence
  ENSG00000130988_5 (sequence is synthesized)
ctgcagacaggacagatctccaaccgcagaagtgtttacaagctagaaaaggaagaacaaatcccagatggaatgtgtattgatgctgaggggaagctctgggtggcctgttacaatgga

SEQ ID NO: 289740 - DNA, 120 bp, Artificial Sequence
  ENSG00000130988_6 (sequence is synthesized)
ggaagagtgattcgtttagatcctgtgacagggaaaagacttcaaactgtgaagttgcctgttgataaaacaacttcatgctgctttggagggaagaattactctgaaatgtatgtgacc

SEQ ID NO: 289741 - DNA, 120 bp, Artificial Sequence
  ENSG00000130988_7 (sequence is synthesized)
tgcgcccgggatgggatggaccccgagggtcttttgaggcaacctgaagctggtggaattttcaagataactggtctgggggtcaaaggaattgctccctactcctatgcgggatgagga

SEQ ID NO: 289742 - DNA, 120 bp, Artificial Sequence
  ENSG00000130988_8 (sequence is synthesized)
caggtcttctttcctgccagagggagctctgaagacaactagagaattctgggcctgaaatttcaatctagttagaaagaaaaatgaggcaatgattttattaacagcgttaagttttaa

SEQ ID NO: 289743 - DNA, 120 bp, Artificial Sequence
  ENSG00000130988_9 (sequence is synthesized)
tttacaacttttaaaaggcagagcatttttaacaaggggtgacaggtggttttgataacacacttataaggctttctgtaaaaggtactatagaagggcgaagaatcgttcaactgtcaa

SEQ ID NO: 289744 - DNA, 120 bp, Artificial Sequence
  ENSG00000130988_10 (sequence is synthesized)
tcagcctcttgattctttgtaaattgccagggtgggtgggtacatatctcttcttgattctgcatttcatacttaactatattaaagcttcaaggaacaataaatagtaacctggtaatg

SEQ ID NO: 289745 - DNA, 120 bp, Artificial Sequence
  ENSG00000130988_11 (sequence is synthesized)
ccgagccaggccggcctccccgccccctccctggaaaggaaaggccccggcgacaacagagccagacccgctcatcccgatctcccagaaggcgactgacagctgactgccagaaggaga

SEQ ID NO: 289746 - DNA, 120 bp, Artificial Sequence
  ENSG00000130988_12 (sequence is synthesized)
tcgcgccaggagactgactgctctgtgcccacccggggacccgggcccgttcagccgggctggctggtgcgccctctgcaaagcctgcgccagggaggaggcaggctcaaccttcagatt

SEQ ID NO: 289747 - DNA, 120 bp, Artificial Sequence
  ENSG00000130988_13 (sequence is synthesized)
cccagggcctctctgtcgctgtcgccgtcgccgtcgcccgaggtcccagcggctctaccagattgttgtggaggcctctcacccgcacagatctcccctgcgaccatgtcttccattaag

SEQ ID NO: 289748 - DNA, 120 bp, Artificial Sequence
  ENSG00000130988_14 (sequence is synthesized)
ctttgccaaactggcacggtgtcttcctgggaagcaagaaatcactgagggcctgtcagttcctgccagggtggttcgatgctgtccttttctccactccttccatggtctgcgttggaa

SEQ ID NO: 289749 - DNA, 120 bp, Artificial Sequence
  ENSG00000130988_15 (sequence is synthesized)
aatgtgtgttagttcgaattcagcgagttctcattggggtgaacatagtcctaaaaatgcagttcataaaaatcaaccacacagagaagaaaaataaataaatcagtaaagcagctcaga

SEQ ID NO: 289750 - DNA, 120 bp, Artificial Sequence
  ENSG00000130988_16 (sequence is synthesized)
aaaatgcaggtgtggcgggccctggcctctgcaccctcatagaggggctcaacagcatcaacagaaggtgggggagcagaaggtgccctgcagacacccagaggggccaccaatgagcaa

SEQ ID NO: 289751 - DNA, 120 bp, Artificial Sequence
  ENSG00000130988_17 (sequence is synthesized)
ttgcatatcctgctctgatctgggggaagtgtatccagccttgccagttcttagccaggtgttttactgtatttgttctgtgcgatgacctttcactcacctctgttaccttcaatagat

SEQ ID NO: 289752 - DNA, 120 bp, Artificial Sequence
  ENSG00000130988_18 (sequence is synthesized)
taagatttctcttaacacctacttattactgagccttggaggaaatactttgacatacaaagttctcactactgaccagggtggtggctcccgcctgtaatccagcactttgggagccaa

SEQ ID NO: 289753 - DNA, 77 bp, Artificial Sequence
  ENSG00000130988_19 (sequence is synthesized)
gtggtggctcccgcctgtaatccagcactttgggagccaaggcgagtaggtcgcatgagcccaggagttcgataact

SEQ ID NO: 289754 - DNA, 70 bp, Artificial Sequence
  ENSG00000130988_20 (sequence is synthesized)
aaaattagctgggcctggtggcatgcatctgtgttcccagctactcaggaggctgagttggaaggatcat

SEQ ID NO: 289755 - DNA, 120 bp, Artificial Sequence
  ENSG00000130997_0 (sequence is synthesized)
atggaaaattatgaggcattggtaggctttgatctctgtaatacaccgctctccagtgttgctcagaagattatgtctgctatgcattcaggtgatttagtggattctaagacttgggga

SEQ ID NO: 289756 - DNA, 120 bp, Artificial Sequence
  ENSG00000130997_1 (sequence is synthesized)
aagagtacagagactatggaagtgataaacaagtccagtgttaagtattcagtacaacttgaagacaggaagactcaatcaccagaaaaaaaggatcttaaatctttaagaagtcagaca

SEQ ID NO: 289757 - DNA, 120 bp, Artificial Sequence
  ENSG00000130997_2 (sequence is synthesized)
tcaagaggttctgccaagctgtctcctcagtccttcagtgtcaggctcacagatcagctgtctgctgaccaaaaacagaagagcatcagctcattgactctttcaagttgtttaattcca

SEQ ID NO: 289758 - DNA, 120 bp, Artificial Sequence
  ENSG00000130997_3 (sequence is synthesized)
cagtataatcaagaggcttcagttctacagaaaaaggggcataaaagaaagcatttcctaatggagaatataaataatgaaaataaaggaagcattaatcttaaaagaaaacatattaca

SEQ ID NO: 289759 - DNA, 120 bp, Artificial Sequence
  ENSG00000130997_4 (sequence is synthesized)
tataataatttgtcagagaaaacaagtaaacaaatggcattggaagaagatactgatgacgccgaaggctacctaaattctgggaactcaggagcattgaaaaaacatttttgtgatatt

SEQ ID NO: 289760 - DNA, 120 bp, Artificial Sequence
  ENSG00000130997_5 (sequence is synthesized)
aggcatttggatgattgggcaaaaagccagctgattgaaatgctcaaacaggcagcagccctggtgataactgtgatgtatactgatggttccacccagctaggagctgaccagaccccc

SEQ ID NO: 289761 - DNA, 120 bp, Artificial Sequence
  ENSG00000130997_6 (sequence is synthesized)
gtttcttctgttagaggaattgtggtgttagtaaaacgccaagcagagggtggccatggctgtccagatgccccggcctgtggtcctgttctggagggctttgtgtcagatgatccatgc

SEQ ID NO: 289762 - DNA, 120 bp, Artificial Sequence
  ENSG00000130997_7 (sequence is synthesized)
atctacattcaaatagagcactctgctatctgggaccaagaacaggaggcacatcaacaatttgcccggaacgtgctatttcaaacaatgaaatgtaaatgtcctgttatttgttttaat

SEQ ID NO: 289763 - DNA, 120 bp, Artificial Sequence
  ENSG00000130997_8 (sequence is synthesized)
gctaaggattttgtgagaatagtgctgcagttttttggcaatgatggcagttggaagcatgttgctgattttatagggctagatcccagaattgctgcatggcttatagatcctagtgat

SEQ ID NO: 289764 - DNA, 120 bp, Artificial Sequence
  ENSG00000130997_9 (sequence is synthesized)
gccacaccctcttttgaagatttagtagaaaaatactgtgaaaaatccattacagttaaagtgaacagcacatatggaaattcctcaagaaatattgtgaatcagaatgtacgtgagaac

SEQ ID NO: 289765 - DNA, 120 bp, Artificial Sequence
  ENSG00000130997_10 (sequence is synthesized)
ctgaagacactctacagacttacaatggacctttgctctaaactgaaggattatggtttatggcaactatttcgtactttggagcttcctctgataccaattttggcagtgatggaaagc

SEQ ID NO: 289766 - DNA, 120 bp, Artificial Sequence
  ENSG00000130997_11 (sequence is synthesized)
catgccattcaggtgaacaaagaggagatggagaagacgtcagcacttcttggggctcgtctcaaggaattggagcaagaagctcattttgttgcaggagaacggtttcttataacgagc

SEQ ID NO: 289767 - DNA, 120 bp, Artificial Sequence
  ENSG00000130997_12 (sequence is synthesized)
tcctctttggcaagttaaagctgcacctgctgagtcaaaggaacagtctccccagaacggggttgcagaaatacccgtctacatcagaagcagtgttaaatgctctgcgagaccttcatc

SEQ ID NO: 289768 - DNA, 120 bp, Artificial Sequence
  ENSG00000130997_13 (sequence is synthesized)
cattacccaagataattttggaatacaggcaggttcacaagatcaagtcaacctttgtagatggattactagcttgcatgaaaaagggctccatttcctctacatggaatcagactggaa

SEQ ID NO: 289769 - DNA, 120 bp, Artificial Sequence
  ENSG00000130997_14 (sequence is synthesized)
ctgtgactggaagactttcagccaagcatcctaatatccaaggtatctccaagcacccaattcagattactacacctaagaattttaaaggtaaagaagacaagattctcacgatctccc

SEQ ID NO: 289770 - DNA, 120 bp, Artificial Sequence
  ENSG00000130997_15 (sequence is synthesized)
cgagggccatgtttgtttcatccaaaggccacacctttctagcagcagacttttcacagattgaattgcgcattcttacacatttatctggagatccggaacttctgaagttattccagg

SEQ ID NO: 289771 - DNA, 120 bp, Artificial Sequence
  ENSG00000130997_16 (sequence is synthesized)
aatctgaaagagatgatgtattttctactctgacttcacagtggaaggatgtgcccgtggaacaggtgacacacgcagacagagagcaaaccaagaaggtggtgtacgcggtggtctatg

SEQ ID NO: 289772 - DNA, 120 bp, Artificial Sequence
  ENSG00000130997_17 (sequence is synthesized)
gagcagggaaggagcggctggctgcttgccttggagttcctattcaggaagctgcccagtttttggagagttttttgcagaagtacaagaaaatcaaggacttcgcccgagcagctattg

SEQ ID NO: 289773 - DNA, 120 bp, Artificial Sequence
  ENSG00000130997_18 (sequence is synthesized)
cccagtgtcaccagacaggctgtgtggtgtccatcatgggcagaaggagacccctgccaaggattcacgctcatgaccagcaactccgggcacaagcagagcgacaggcagtgaacttcg

SEQ ID NO: 289774 - DNA, 120 bp, Artificial Sequence
  ENSG00000130997_19 (sequence is synthesized)
tggtgcaaggctccgctgctgacctctgcaagctggccatgatccatgtcttcactgcagtggctgcttcccacaccttgacggccaggctggtggcccagatccatgatgagctgctgt

SEQ ID NO: 289775 - DNA, 120 bp, Artificial Sequence
  ENSG00000130997_20 (sequence is synthesized)
ttgaagtggaagatccgcagatcccggagtgtgcagctctcgtcaggaggaccatggagtccttggaacaggtgcaggcattggagctgcagcttcaggtacccctcaaggtgagcctga

SEQ ID NO: 289776 - DNA, 120 bp, Artificial Sequence
  ENSG00000130997_21 (sequence is synthesized)
gtgccggccgctcatggggacacctggtgccactgcaggaggcctggggccctccgccaggcccatgtcgcactgagtctcccagcaacagcctggctgcccctgggtcccctgccagca

SEQ ID NO: 289777 - DNA, 120 bp, Artificial Sequence
  ENSG00000130997_22 (sequence is synthesized)
cccagcccccacccctgcatttttcgccttcattttgtctgtagccccaggcaacagtgggaggagagaactggtttccagcagtccattgtgtggccttccccaaggtcaccagctctg

SEQ ID NO: 289778 - DNA, 120 bp, Artificial Sequence
  ENSG00000130997_23 (sequence is synthesized)
tacgccccaggacgcattaaccctttggggctggggtggcccgccatcccctggagtaaatgcctgtgcaaagccctcctcatccttgtctgagtgaattcttcctgtgagtgggaagtg

SEQ ID NO: 289779 - DNA, 120 bp, Artificial Sequence
  ENSG00000130997_24 (sequence is synthesized)
agtgcgaggcgcgcggggcacggagggcggtggcggcgggctcctgcgagaagcaagcggaacttcctgagcgtgcttaggtgtcacagctgggtgaccctccgaaggaaggttttgccg

SEQ ID NO: 289780 - DNA, 120 bp, Artificial Sequence
  ENSG00000130997_25 (sequence is synthesized)
ctggcgcgtctggtgtatcgcggccttggggccgcggatccctggggcttgccgctgcctctggggttcgcgcggccctggcgtcggggctgcctcagcgctggctgaaggccggcccga

SEQ ID NO: 289781 - DNA, 120 bp, Artificial Sequence
  ENSG00000130997_26 (sequence is synthesized)
ctgggacattcagaagggtcacactttagaggcaggtctagactagccctagattacagctattccaaatccactctaacaaagcttagaagcaaacctcaaaagggtcaagatgattgg

SEQ ID NO: 289782 - DNA, 120 bp, Artificial Sequence
  ENSG00000130997_27 (sequence is synthesized)
caagtaacttaagcctgccaaaacaccctcagaaggaagacagcacaccccagcattcaacaacataaaattcacagtgcccagcatccggccaaaagtcactagaccgacaaagcagca

SEQ ID NO: 289783 - DNA, 120 bp, Artificial Sequence
  ENSG00000130997_28 (sequence is synthesized)
gggaccaagtcagagcagaagatctctcgtgtcctcactgccagtccttcttaagaatcttgtatattgcctggcatgtagctgtgtggtgtccatcatgggcagaaggagacccctgcc

SEQ ID NO: 289784 - DNA, 120 bp, Artificial Sequence
  ENSG00000130997_29 (sequence is synthesized)
aaggattcacgctcatgaccagcaactccgggcacaagcagagcgacaggcagtgaacttcgtggtgcaagacagctcagagccagcacctctgtgtggaggtaccgtgagagctgtggc

SEQ ID NO: 289785 - DNA, 120 bp, Artificial Sequence
  ENSG00000130997_30 (sequence is synthesized)
agttctgaagaacaagtttgatgtgcagaagcctttgtcagaggttctggaacaagatagcatgtagaatttgaaggacaagaatgagggaagagtatctacaggaaagatagcaaaagg

SEQ ID NO: 289786 - DNA, 120 bp, Artificial Sequence
  ENSG00000130997_31 (sequence is synthesized)
aaggtaccagaagcctcttacctgtagttctgtgtccatttgcttcttgggttttagcagccgcagggctgggtggcacccaccgatcactgttgcggtatttcctgctcatcacaaacc

SEQ ID NO: 289787 - DNA, 120 bp, Artificial Sequence
  ENSG00000130997_32 (sequence is synthesized)
tccttgcaggagcttacactacccatgtcctgcctggcagttactgtcaggaggcatgaggggacacggtcatctttgtagctaggatgattggatgattcccgcaagaactgggcccag

SEQ ID NO: 289788 - DNA, 120 bp, Artificial Sequence
  ENSG00000130997_33 (sequence is synthesized)
agccaagcatcctatttgtgccagacaggtggcttctgatttccagaaatgtgttgaagtatctgatgctatgatgaacagctccattttttggtggttgttgaagctgtatctctgatg

SEQ ID NO: 289789 - DNA, 120 bp, Artificial Sequence
  ENSG00000130997_34 (sequence is synthesized)
cataggctccgctgctgacctctgcaagctggccatgatccatgtcttcactgcagtggctgcttcccacaccttgacggccagcccttgtggaattgataaaggaagttggcatgtgag

SEQ ID NO: 289790 - DNA, 120 bp, Artificial Sequence
  ENSG00000130997_35 (sequence is synthesized)
gagctgaggtctctctctgttgctgactgagtccttctgaaagctggacacagacacttttactcaggaacgcagttactcgctggtcatccttctgtcatcagccattggctgtcacga

SEQ ID NO: 289791 - DNA, 120 bp, Artificial Sequence
  ENSG00000130997_36 (sequence is synthesized)
gtggaatattgggcacatggtctgtgttttgtgaacgtgatttgttcttccaggagtaatgtgaaaggctgtggatggcgtctggaagggacgggtgcaggctcagtgtggccaggcatc

SEQ ID NO: 289792 - DNA, 120 bp, Artificial Sequence
  ENSG00000130997_37 (sequence is synthesized)
tctcgctgaagcagcaggcatgaaactcgatcactgggaggcacacggtgcccctagagtgagctgagatcgcaccacttcactccagcctgggcgagagcgagagtctgtctaacaaaa

SEQ ID NO: 289793 - DNA, 120 bp, Artificial Sequence
  ENSG00000130997_38 (sequence is synthesized)
gagtctcttttccttcccactccttacctccctccctgctaaggaaaaaaaaaatagcctccttggaagttgaagggaatgcagtcctgggccaccctgcctgagagagagcctgggaaa

SEQ ID NO: 289794 - DNA, 120 bp, Artificial Sequence
  ENSG00000130997_39 (sequence is synthesized)
tgtcctttgtagctgaggacacagccccacctccaccccacccagcaacaaaggggccaacatgaagaaagagaggaagggcggattggggcaggtcaccggaaatctctgttgcaaagt

SEQ ID NO: 289795 - DNA, 120 bp, Artificial Sequence
  ENSG00000130997_40 (sequence is synthesized)
ccacatcccctgtggaaagtgccagcacagcccacctgtaccctggggcttgaaggctgccccttatcccagctggggctctccgtcacatgcccgtgactactgcccggcaaggacgcc

SEQ ID NO: 289796 - DNA, 120 bp, Artificial Sequence
  ENSG00000130997_41 (sequence is synthesized)
catgcagaccagctccctagggccctgggcccgctgtgcccatctgtgccagccaaggacgggcagcaggggcgaagataggacgtgacccctgcccctgaagactcgatccaggagaca

SEQ ID NO: 289797 - DNA, 120 bp, Artificial Sequence
  ENSG00000130997_42 (sequence is synthesized)
agccagcacctctgtgtggaggtaccgtgagagctgtggcgatggtgcagaatgctgagtgcaccatgaaccgtgtgccatgggacctcaagacagtaccacgcgccccataggctccgc

SEQ ID NO: 289798 - DNA, 120 bp, Artificial Sequence
  ENSG00000130997_43 (sequence is synthesized)
tgctgacctctgcaagctggccatgatccatgtcttcactgcagtggctgcttcccacaccttgacggccaggtcagtgggtggtggtctcccagggcttggatgggagggttagtattc

SEQ ID NO: 289799 - DNA, 120 bp, Artificial Sequence
  ENSG00000130997_44 (sequence is synthesized)
tgtgggaagaccccctcggggctcgtgattctgatgatcaccatctctgcttatcgggcccccgtcccctcctgaggctctcagcccatggaaggccctgggggctactcacagcaggca

SEQ ID NO: 289800 - DNA, 120 bp, Artificial Sequence
  ENSG00000130997_45 (sequence is synthesized)
tgcagacaacaaccagccatccaccagcgtggggtgcagatgaggcctctccagacagaaatgctgtctcccccagacccctcctcctcggggtgtctgcacagcacaggggcacccctt

SEQ ID NO: 289801 - DNA, 120 bp, Artificial Sequence
  ENSG00000130997_46 (sequence is synthesized)
gaggctgcccaccccagaggcaggcgaacccctcagccccttgagcaggaccctggggactccaaactgcccccacccctgcctgttgctgccaccaatgccaggcagtgtgccccacgc

SEQ ID NO: 289802 - DNA, 120 bp, Artificial Sequence
  ENSG00000130997_47 (sequence is synthesized)
ctacctgttgctgccaccagtgccaggcagtgtgccccacgcccagctctgcccccacccctacctgttgctgccaccagtgccaggcagtgtgccccacgcccagctctgcccccaccc

SEQ ID NO: 289803 - DNA, 120 bp, Artificial Sequence
  ENSG00000130997_48 (sequence is synthesized)
ccgagcccagagccaacatgcagatgtgccttggtgggggggggctccgccctggctgccccccaggccacagctctctcaggcctctgtccctgcctcagttattcccccagggcacat

SEQ ID NO: 289804 - DNA, 120 bp, Artificial Sequence
  ENSG00000130997_49 (sequence is synthesized)
tcctcaagagtgtgggtggccaggggacaagcagccctcgcccagccacctcctccttgccagccaaggcctgggggtgctgcaagtggtgacccagacacctcctctcctcgttctcct

SEQ ID NO: 289805 - DNA, 120 bp, Artificial Sequence
  ENSG00000130997_50 (sequence is synthesized)
tgtgcgggatcccctcaggagtcccggagccccttctgggagctaacctgccccagccccccacagtgtcagtccccgaagggcccctcgccctctgacacaccatggacgttttcccac

SEQ ID NO: 289806 - DNA, 120 bp, Artificial Sequence
  ENSG00000130997_51 (sequence is synthesized)
ccccaccctaagagccctcaagctcttggcgacagtcccgtgggggtctaagcactgccccagggactctgcttgcagcttcactgggctgtgggctctcagtgctgctttctgcagtaa

SEQ ID NO: 289807 - DNA, 83 bp, Artificial Sequence
  ENSG00000130997_52 (sequence is synthesized)
tcactgggctgtgggctctcagtgctgctttctgcagtaactgaagtggtcagaaggcaggagtggggcattagaagattcac

SEQ ID NO: 289808 - DNA, 87 bp, Artificial Sequence
  ENSG00000130997_53 (sequence is synthesized)
caagactctgtctaacagaaaaaaaaataagattcactctcagtcctctcctgccccatctcactgccatctgcattcattcccaac

SEQ ID NO: 289809 - DNA, 120 bp, Artificial Sequence
  ENSG00000130997_54 (sequence is synthesized)
ctcctgccccatctcactgccatctgcattcattcccaacacacacgtgcacacacacgcacacacaagcacatgcacccatacacgtgttcacccatgcatacaacccatgcacacaca

SEQ ID NO: 289810 - DNA, 120 bp, Artificial Sequence
  ENSG00000130997_55 (sequence is synthesized)
tatacgcatatacactgatgccaggcagcctctagtgccccacagtgttctcatggtgtcctgaaatccatgcatcccgctcacttccacagtttctgcaggtaaattatagcttctccc

SEQ ID NO: 289811 - DNA, 120 bp, Artificial Sequence
  ENSG00000130997_56 (sequence is synthesized)
aggatatgagcagcttgtgctagtttccgtcttggcaggaactgaaagccaaatggtggtcctgcctctaagatactgcaagtctagaaaagttgattcaaggctgggcgcagtggctca

SEQ ID NO: 289812 - DNA, 120 bp, Artificial Sequence
  ENSG00000130997_57 (sequence is synthesized)
cacctgtaatcccagcatttgggaggccgagtcgggtggatcacttgagctcagaagtttgtgaacaacatatgtgttgcctgggcaacataatgaaacctgtctctacaaaataaaagc

SEQ ID NO: 289813 - DNA, 120 bp, Artificial Sequence
  ENSG00000130997_58 (sequence is synthesized)
tcataaagttgaatctcaactgaataagctaaatcatctcctcactgatattcttgctgatgtgaagacaaaaagaaaaactttggcaaataataaattacatcaaatggaaagagaatt

SEQ ID NO: 289814 - DNA, 120 bp, Artificial Sequence
  ENSG00000130997_59 (sequence is synthesized)
attgaagttttttctccatatgtgtttgcctgtgcactttctgtttccaagaggggacttcatactgatatgttgtgttttattctgtttattctgagaacatagcaggagaacaagaca

SEQ ID NO: 289815 - DNA, 120 bp, Artificial Sequence
  ENSG00000130997_60 (sequence is synthesized)
gatgggttctcttctcatgaagtgctgagttagcaagaggggggcttcacacccagaaacccatgcactccagtgtgcaggcaaaaaggacacccgtaccccatcttccttttcagattt

SEQ ID NO: 289816 - DNA, 120 bp, Artificial Sequence
  ENSG00000130997_61 (sequence is synthesized)
ctcacaggagaggctggcagtaggtctgggggcagcaggcctcagcagaggtctcacatcaccaagatttgaggcatcatctgcccaaggctggtggcccagatccatgatgagctgctg

SEQ ID NO: 289817 - DNA, 120 bp, Artificial Sequence
  ENSG00000131013_0 (sequence is synthesized)
ctcctcccggggtttgtagcggaggaggagcgggcgccatggcggttctactggagaccactttaggcgacgtcgtcatcgacttgtacaccgaagaacggccgcgtgcctgcttgaatt

SEQ ID NO: 289818 - DNA, 120 bp, Artificial Sequence
  ENSG00000131013_1 (sequence is synthesized)
tcttgaaactgtgcaaaataaaatattacaattattgccttattcacaatgtacagagggattttatcatacaaactggcgatcctacagggactggccgtggaggagagtctatctttg

SEQ ID NO: 289819 - DNA, 120 bp, Artificial Sequence
  ENSG00000131013_2 (sequence is synthesized)
gccaactgtatggtgatcaagcaagcttttttgaggcagaaaaagtcccaagaattaagcacaagaagaaaggcacagtgtccatggtgaataatggcagtgatcaacatggatctcagt

SEQ ID NO: 289820 - DNA, 120 bp, Artificial Sequence
  ENSG00000131013_3 (sequence is synthesized)
ttcttatcaccacaggagaaaatctagattatcttgatggtgtccatacggtgtttggtgaggtgacagaaggcatggacataattaagaaaattaatgagacctttgttgacaaggact

SEQ ID NO: 289821 - DNA, 120 bp, Artificial Sequence
  ENSG00000131013_4 (sequence is synthesized)
ttgtaccatatcaggatatcaggataaatcatacggtgattttagatgatccatttgatgaccctcctgatttattaatccctgatcgatcaccagaacctacaagggaacaattagata

SEQ ID NO: 289822 - DNA, 120 bp, Artificial Sequence
  ENSG00000131013_5 (sequence is synthesized)
gtggtcgaataggagcagatgaagaaattgatgatttcaaaggaagatcagctgaggaagtagaagaaataaaggcagaaaaagaggctaaaactcaggctatacttttggagatggtgg

SEQ ID NO: 289823 - DNA, 120 bp, Artificial Sequence
  ENSG00000131013_6 (sequence is synthesized)
gagacctacctgatgcagatattaaacctccagaaaatgtactgtttgtgtgtaaattgaacccagtgaccacagatgaggatctggaaataatattctctagatttgggccaataagaa

SEQ ID NO: 289824 - DNA, 120 bp, Artificial Sequence
  ENSG00000131013_7 (sequence is synthesized)
gttgtgaagttatccgagactggaagacaggagagtccctctgttacgcttttattgaatttgaaaaggaagaagattgtgagaaagcattcttcaaaatggacaatgtgcttatagatg

SEQ ID NO: 289825 - DNA, 120 bp, Artificial Sequence
  ENSG00000131013_8 (sequence is synthesized)
acagaagaatacatgtggattttagccagtcggttgcaaaggttaaatggaaaggaaaaggtgggaaatacaccaagagtgatttcaaggagtatgaaaaagaacaggataaaccaccta

SEQ ID NO: 289826 - DNA, 120 bp, Artificial Sequence
  ENSG00000131013_9 (sequence is synthesized)
atttggttctgaaagataaagtaaagcccaaacaggatacaaaatacgatcttatattagatgagcaggccgaagactcaaaatcaagtcactcacacacaagtaaaaaacacaagaaga

SEQ ID NO: 289827 - DNA, 120 bp, Artificial Sequence
  ENSG00000131013_10 (sequence is synthesized)
gagaaatggggtttggtcactatgaagaagaagaaagctgttgggagaaacaaaagagtgaaaagagagaccgaactcagaaccgaagtcgtagccgatctcgagagagggatggccatt

SEQ ID NO: 289828 - DNA, 120 bp, Artificial Sequence
  ENSG00000131013_11 (sequence is synthesized)
atagtaatagtcataaatcaaaataccaaacagatctttatgaaagagaaaggagtaaaaagagagaccgaagcagaagtccaaagaagtccaaagataaagaaaaatctaagtatagat

SEQ ID NO: 289829 - DNA, 120 bp, Artificial Sequence
  ENSG00000131013_12 (sequence is synthesized)
gaaagatgaagaggcagaattgagaggctaacatatttactcttgtctaacttaagagtgccaggaaagcagatgcttagattttgtgtcaaagcttgttatttttttcatactaggatt

SEQ ID NO: 289830 - DNA, 120 bp, Artificial Sequence
  ENSG00000131013_13 (sequence is synthesized)
atggtctttagattaatactgattatatagagcacggaaagataaagaattgaacattttctttgtatacttttttacactaattttattgttatacataaatggtagtcttcatttttg

SEQ ID NO: 289831 - DNA, 120 bp, Artificial Sequence
  ENSG00000131013_14 (sequence is synthesized)
aagtcttacattttcactctttttttaatgaagtatttcatactacaaaaatacataaacgtatatataaagggataataaatgtaaatatctgtgtactcatcagccagcttaagatac

SEQ ID NO: 289832 - DNA, 120 bp, Artificial Sequence
  ENSG00000131013_15 (sequence is synthesized)
agatgttgtcgacattttagaagttccctaaggccctctccctctcaaataattatttggaattttgtgtttgtcatttgtctattatagttttacaacatacgtatgtatctgtaagtg

SEQ ID NO: 289833 - DNA, 120 bp, Artificial Sequence
  ENSG00000131013_16 (sequence is synthesized)
attttgtatgtttctgaattttatataaatggcaaaatgtttacttctgtgactttctttcatttttattgctatatagtattatataaatatactacaacttattcattcttgatggac

SEQ ID NO: 289834 - DNA, 120 bp, Artificial Sequence
  ENSG00000131013_17 (sequence is synthesized)
tgatggacatttgagttttgtttatttgtttttgctgttgaaacaatgctgctgtgaacattgtatctagcagttatattgcttgatatattgataaaataatgccaaatttgtgttctg

SEQ ID NO: 289835 - DNA, 120 bp, Artificial Sequence
  ENSG00000131013_18 (sequence is synthesized)
aagtgactgtactagtttatacctctcttggcactgtgagttacctttgtttcatagcatctccaacacttaagttcagacttaaaaatttgccaacctagtggatgttaagtggtatct

SEQ ID NO: 289836 - DNA, 120 bp, Artificial Sequence
  ENSG00000131013_19 (sequence is synthesized)
acctgtgatttccagcaagattactgttatctctgctcttccatgtgtaagatgtcatttttttcctggctgcttttaaggttttctgtcactggttgtaagaagtttgattatgatgtg

SEQ ID NO: 289837 - DNA, 120 bp, Artificial Sequence
  ENSG00000131013_20 (sequence is synthesized)
acacactatctcgttagatctttaaaaggtctcttaaagtctcacttctctcaaacttaggtctttcagatcttaaactcaggtcccaaatcctcagttttccactggacttaatgttct

SEQ ID NO: 289838 - DNA, 120 bp, Artificial Sequence
  ENSG00000131013_21 (sequence is synthesized)
catgggctcaatggctctacttgaacacggcatttgtgtgtaatttatttgaaagtttgatgttgtaatattcacatatatcgttaggtggcagcatgtggctacctagcaaaaatggat

SEQ ID NO: 289839 - DNA, 120 bp, Artificial Sequence
  ENSG00000131013_22 (sequence is synthesized)
gtctgatttcaaattagtaatggagatggaattactatgattcttttgttccctttctctgtctctcgatatatgccatttataaaatagctcttatgctttttataaaataattattgt

SEQ ID NO: 289840 - DNA, 120 bp, Artificial Sequence
  ENSG00000131015_0 (sequence is synthesized)
attcatcttccaggctctccttccatcaagtctctcatccctagcgctctgggtccttaatggcagcagccgccgctaccaagatccttctgtgcctcccgcttctgctcctgctgtccg

SEQ ID NO: 289841 - DNA, 120 bp, Artificial Sequence
  ENSG00000131015_1 (sequence is synthesized)
gctggtcccgggctgggcgagccgaccctcactctctttgctatgacatcaccgtcatccctaagttcagacctggaccacggtggtgtgcggttcaaggccaggtggatgaaaagactt

SEQ ID NO: 289842 - DNA, 120 bp, Artificial Sequence
  ENSG00000131015_2 (sequence is synthesized)
ttcttcactatgactgtggcaacaagacagtcacacctgtcagtcccctggggaagaaactaaatgtcacaacggcctggaaagcacagaacccagtactgagagaggtggtggacatac

SEQ ID NO: 289843 - DNA, 120 bp, Artificial Sequence
  ENSG00000131015_3 (sequence is synthesized)
ttacagagcaactgcgtgacattcagctggagaattacacacccaaggaacccctcaccctgcaggcaaggatgtcttgtgagcagaaagctgaaggacacagcagtggatcttggcagt

SEQ ID NO: 289844 - DNA, 120 bp, Artificial Sequence
  ENSG00000131015_4 (sequence is synthesized)
tcagtttcgatgggcagatcttcctcctctttgactcagagaagagaatgtggacaacggttcatcctggagccagaaagatgaaagaaaagtgggagaatgacaaggttgtggccatgt

SEQ ID NO: 289845 - DNA, 120 bp, Artificial Sequence
  ENSG00000131015_5 (sequence is synthesized)
caatgggagactgtataggatggcttgaggacttcttgatgggcatggacagcaccctggagccaagtgcaggagcaccactcgccatgtcctcaggcacaacccaactcagggccacag

SEQ ID NO: 289846 - DNA, 120 bp, Artificial Sequence
  ENSG00000131015_6 (sequence is synthesized)
ccaccaccctcatcctttgctgcctcctcatcatcctcccctgcttcatcctccctggcatctgaggagagtcctttagagtgacaggttaaagctgataccaaaaggctcctgtgagca

SEQ ID NO: 289847 - DNA, 120 bp, Artificial Sequence
  ENSG00000131015_7 (sequence is synthesized)
cggtcttgatcaaactcgcccttctgtctggccagctgcccacgacctacggtgtatgtccagtggcctccagcagatcatgatgacatcatggacccaatagctcattcactgccttga

SEQ ID NO: 289848 - DNA, 120 bp, Artificial Sequence
  ENSG00000131015_8 (sequence is synthesized)
ttccttttgccaacaattttaccagcagttatacctaacatattatgcaattttctcttggtgctacctgatggaattcctgcacttaaagttctggctgactaaacaagatatatcatt

SEQ ID NO: 289849 - DNA, 120 bp, Artificial Sequence
  ENSG00000131015_9 (sequence is synthesized)
ttctttcttctctttttgtttggaaaatcaagtacttctttgaatgatgatctctttcttgcaaatgatattgtcagtaaaataatcacgttagacttcagacctctggggattctttcc

SEQ ID NO: 289850 - DNA, 120 bp, Artificial Sequence
  ENSG00000131015_10 (sequence is synthesized)
ttccgtgtcctgaaagagaatttttaaattatttaataagaaaaaatttatattaatgattgtttcctttagtaatttattgttctgtactgatatttaaataaagagttctatttccca

SEQ ID NO: 289851 - DNA, 120 bp, Artificial Sequence
  ENSG00000131016_0 (sequence is synthesized)
ttcttttaaggagtttgccgcgagcgcgtctccttcattcgcaggctgggcgcgttcgcagtcggctggcggcgaaggaaggcgctctcgggacctcgcgggcgcgcgtcttttggctct

SEQ ID NO: 289852 - DNA, 120 bp, Artificial Sequence
  ENSG00000131016_1 (sequence is synthesized)
tgcccctgtccctgcggcttggggaaggcgtaacccggcggctaggcgcgggagaagtgcggaggagccatgggcgccgggagctccaccgagcagcgcagcccggagcagccgcccgag

SEQ ID NO: 289853 - DNA, 120 bp, Artificial Sequence
  ENSG00000131016_2 (sequence is synthesized)
gggagctccacgccggctgagcccgagcccagcggcggcggcccctcggccgaggcggcgccagacaccaccgcggaccccgccatcgctgcctcggaccccgccaccaagctcctacag

SEQ ID NO: 289854 - DNA, 120 bp, Artificial Sequence
  ENSG00000131016_3 (sequence is synthesized)
aagaatggtcagctgtccaccatcaatggcgtagctgagcaagatgagctcagcctccaggagggtgacctaaatggccagaaaggagccctgaacggtcaaggagccctaaacagccag

SEQ ID NO: 289855 - DNA, 120 bp, Artificial Sequence
  ENSG00000131016_4 (sequence is synthesized)
gaggaagaagaagtcattgtcacagaggttggacagagagactctgaagatgtgagcaaaagagactccgataaagagatggctactaagtcagcggttgttcacgacatcacagatgat

SEQ ID NO: 289856 - DNA, 120 bp, Artificial Sequence
  ENSG00000131016_5 (sequence is synthesized)
gggcaggaggagacacccgaaataatcgaacagattccttcttcagaaagcaatttagaagagctaacacaacccactgagtcccaggctaatgatattggatttaagaaggtgtttaag

SEQ ID NO: 289857 - DNA, 120 bp, Artificial Sequence
  ENSG00000131016_6 (sequence is synthesized)
tttgttggctttaaattcactgtgaaaaaggataagacagagaagcctgacactgtccagctactcactgtgaagaaagatgaaggggagggagcagcaggggctggcgaccacaaggac

SEQ ID NO: 289858 - DNA, 120 bp, Artificial Sequence
  ENSG00000131016_7 (sequence is synthesized)
cccagccttggggctggagaagcagcatccaaagaaagcgaacccaaacaatctacagagaaacccgaagagaccctgaagcgtgagcaaagccacgcagaaatttctcccccagccgaa

SEQ ID NO: 289859 - DNA, 120 bp, Artificial Sequence
  ENSG00000131016_8 (sequence is synthesized)
tctggccaagcagtggaggaatgcaaagaggaaggagaagagaaacaagaaaaagaacctagcaagtctgcagaatctccgactagtcccgtgaccagtgaaacaggatcaaccttcaaa

SEQ ID NO: 289860 - DNA, 120 bp, Artificial Sequence
  ENSG00000131016_9 (sequence is synthesized)
aaattcttcactcaaggttgggccggctggcgcaaaaagaccagtttcaggaagccgaaggaggatgaagtggaagcttcagagaagaaaaaggaacaagagccagaaaaagtagacaca

SEQ ID NO: 289861 - DNA, 120 bp, Artificial Sequence
  ENSG00000131016_10 (sequence is synthesized)
gaagaagacggaaaggcagaggttgcctccgagaaactgaccgcctccgagcaagcccacccacaggagccggcagaaagtgcccacgagccccggttatcagctgaatatgagaaagtt

SEQ ID NO: 289862 - DNA, 120 bp, Artificial Sequence
  ENSG00000131016_11 (sequence is synthesized)
gagctgccctcagaggagcaagtcagtggctcgcagggaccttctgaagagaaacctgctccgttggcgacagaagtgtttgatgagaaaatagaagtccaccaagaagaggttgtggcc

SEQ ID NO: 289863 - DNA, 120 bp, Artificial Sequence
  ENSG00000131016_12 (sequence is synthesized)
gaagtccacgtcagcaccgtggaggagagaaccgaagagcagaaaacggaggtggaagaaacagcagggtctgtgccagctgaagaattggttgaaatggatgcagaacctcaggaagct

SEQ ID NO: 289864 - DNA, 120 bp, Artificial Sequence
  ENSG00000131016_13 (sequence is synthesized)
gaacctgccaaggagctggtgaagctcaaagaaacgtgtgtttccggagaggaccctacacagggagctgacctcagtcctgatgagaaggtgctgtccaaaccccccgaaggcgttgtg

SEQ ID NO: 289865 - DNA, 120 bp, Artificial Sequence
  ENSG00000131016_14 (sequence is synthesized)
agtgaggtggaaatgctgtcatcacaggagagaatgaaggtgcagggaagtccactaaagaagctttttaccagcactggcttaaaaaagctttctggaaagaaacagaaagggaaaaga

SEQ ID NO: 289866 - DNA, 120 bp, Artificial Sequence
  ENSG00000131016_15 (sequence is synthesized)
ggaggaggagacgaggaatcaggggagcacactcaggttccagccgattctccggacagccaggaggagcaaaagggcgagagctctgcctcatcccctgaggagcccgaggagatcacg

SEQ ID NO: 289867 - DNA, 120 bp, Artificial Sequence
  ENSG00000131016_16 (sequence is synthesized)
tgtctggaaaagggcttagccgaggtgcagcaggatggggaagctgaagaaggagctacttccgatggagagaaaaaaagagaaggtgtcactccctgggcatcattcaaaaagatggtg

SEQ ID NO: 289868 - DNA, 120 bp, Artificial Sequence
  ENSG00000131016_17 (sequence is synthesized)
acgcccaagaagcgtgttagacggccttcggaaagtgataaagaagatgagctggacaaggtcaagagcgctaccttgtcttccaccgagagcacagcctctgaaatgcaagaagaaatg

SEQ ID NO: 289869 - DNA, 120 bp, Artificial Sequence
  ENSG00000131016_18 (sequence is synthesized)
aaagggagcgtggaagagccaaagccggaagaaccaaagcgcaaggtggatacctcagtatcttgggaagctttaatttgtgtgggatcatccaagaaaagagcaaggagagggtcctct

SEQ ID NO: 289870 - DNA, 120 bp, Artificial Sequence
  ENSG00000131016_19 (sequence is synthesized)
tctgatgaggaagggggaccaaaagcaatgggaggagaccaccagaaagctgatgaggccggaaaagacaaagagacggggacagacgggatccttgctggttcccaagaacatgatcca

SEQ ID NO: 289871 - DNA, 120 bp, Artificial Sequence
  ENSG00000131016_20 (sequence is synthesized)
gggcagggaagttcctccccggagcaagctggaagccctaccgaaggggagggcgtttccacctgggagtcatttaaaaggttagtcacgccaagaaaaaaatcaaagtccaagctggaa

SEQ ID NO: 289872 - DNA, 120 bp, Artificial Sequence
  ENSG00000131016_21 (sequence is synthesized)
gagaaaagcgaagactccatagctgggtctggtgtagaacattccactccagacactgaacccggtaaagaagaatcctgggtctcaatcaagaagtttattcctggacgaaggaagaaa

SEQ ID NO: 289873 - DNA, 120 bp, Artificial Sequence
  ENSG00000131016_22 (sequence is synthesized)
aggccagatgggaaacaagaacaagcccctgttgaagacgcagggccaacaggggccaacgaagatgactctgatgtcccggccgtggtccctctgtctgagtatgatgctgtagaaagg

SEQ ID NO: 289874 - DNA, 120 bp, Artificial Sequence
  ENSG00000131016_23 (sequence is synthesized)
gagaaaatggaggcacagcaagcccaaaaaagcgcagagcagcccgagcagaaggcagccactgaggtgtccaaggagctcagcgagagtcaggttcatatgatggcagcagctgtcgct

SEQ ID NO: 289875 - DNA, 120 bp, Artificial Sequence
  ENSG00000131016_24 (sequence is synthesized)
gacgggacgagggcagctaccattattgaagaaaggtctccttcttggatatctgcttcagtgacagaacctcttgaacaagtagaagctgaagccgcactgttaactgaggaggtattg

SEQ ID NO: 289876 - DNA, 120 bp, Artificial Sequence
  ENSG00000131016_25 (sequence is synthesized)
gaaagagaagtaattgcagaagaagaaccccccacggttactgaacctctgccagagaacagagaggcccggggcgacacggtcgttagtgaggcggaattgacccccgaagctgtgaca

SEQ ID NO: 289877 - DNA, 120 bp, Artificial Sequence
  ENSG00000131016_26 (sequence is synthesized)
gctgcagaaactgcagggccattgggtgccgaagaaggaaccgaagcatctgctgctgaagagaccacagaaatggtgtcagcagtctcccagttaaccgactccccagacaccacagag

SEQ ID NO: 289878 - DNA, 120 bp, Artificial Sequence
  ENSG00000131016_27 (sequence is synthesized)
cctggcaccggtgggccagaagatgtgcttcagcctgtgcagagagcagaggcagaaagaccagaagagcaggctgaagcgtcgggtctgaagaaagagacggatgtagtgttgaaagta

SEQ ID NO: 289879 - DNA, 120 bp, Artificial Sequence
  ENSG00000131016_28 (sequence is synthesized)
gatgctcaggaggcaaaaactgagccttttacacaagggaaggtggtggggcagaccaccccagaaagctttgaaaaagctcctcaagtcacagagagcatagagtccagtgagcttgta

SEQ ID NO: 289880 - DNA, 120 bp, Artificial Sequence
  ENSG00000131016_29 (sequence is synthesized)
accacttgtcaagccgaaaccttagctggggtaaaatcacaggagatggtgatggaacaggctatcccccctgactcggtggaaacccctacagacagtgagactgatggaagcaccccc

SEQ ID NO: 289881 - DNA, 120 bp, Artificial Sequence
  ENSG00000131016_30 (sequence is synthesized)
gtagccgactttgacgcaccaggcacaacccagaaagacgagattgtggaaatccatgaggagaatgaggtcgcatctggtacccagtcagggggcacagaagcagaggcagttcctgca

SEQ ID NO: 289882 - DNA, 120 bp, Artificial Sequence
  ENSG00000131016_31 (sequence is synthesized)
cagaaagagaggcctccagcaccttccagttttgtgttccaggaagaaactaaagaacaatcaaagatggaagacactctagagcatacagataaagaggtgtcagtggaaactgtatcc

SEQ ID NO: 289883 - DNA, 120 bp, Artificial Sequence
  ENSG00000131016_32 (sequence is synthesized)
attctgtcaaagactgaggggactcaagaggctgaccagtatgctgatgagaaaaccaaagacgtaccatttttcgaaggacttgaggggtctatagacacaggcataacagtcagtcgg

SEQ ID NO: 289884 - DNA, 120 bp, Artificial Sequence
  ENSG00000131016_33 (sequence is synthesized)
gaaaaggtcactgaagttgcccttaaaggtgaagggacagaagaagctgaatgtaaaaaggatgatgctcttgaactgcagagtcacgctaagtctcctccatcccccgtggagagagag

SEQ ID NO: 289885 - DNA, 120 bp, Artificial Sequence
  ENSG00000131016_34 (sequence is synthesized)
atggtagttcaagtcgaaagggagaaaacagaagcagagccaacccatgtgaatgaagagaagcttgagcacgaaacagctgttaccgtatctgaagaggtcagtaagcagctcctccag

SEQ ID NO: 289886 - DNA, 120 bp, Artificial Sequence
  ENSG00000131016_35 (sequence is synthesized)
acagtgaatgtgcccatcatagatggggcaaaggaagtcagcagtttggaaggaagccctcctccctgcctaggtcaagaggaggcagtatgcaccaaaattcaagttcagagctctgag

SEQ ID NO: 289887 - DNA, 120 bp, Artificial Sequence
  ENSG00000131016_36 (sequence is synthesized)
gcatcattcactctaacagcggctgcagaggaggaaaaggtcttaggagaaactgccaacattttagaaacaggtgaaacgttggagcctgcaggtgcacatttagttctggaagagaaa

SEQ ID NO: 289888 - DNA, 120 bp, Artificial Sequence
  ENSG00000131016_37 (sequence is synthesized)
tcctctgaaaaaaatgaagactttgccgctcatccaggggaagatgctgtgcccacagggcccgactgtcaggcaaaatcgacaccagtgatagtatctgctactaccaagaaaggctta

SEQ ID NO: 289889 - DNA, 120 bp, Artificial Sequence
  ENSG00000131016_38 (sequence is synthesized)
agttccgacctggaaggagagaaaaccacatcactgaagtggaagtcagatgaagtcgatgagcaggttgcttgccaggaggtcaaagtgagtgtagcaattgaggatttagagcctgaa

SEQ ID NO: 289890 - DNA, 120 bp, Artificial Sequence
  ENSG00000131016_39 (sequence is synthesized)
aatgggattttggaacttgagaccaaaagcagtaaacttgtccaaaacatcatccagacagccgttgaccagtttgtacgtacagaagaaacagccaccgaaatgttgacgtctgagtta

SEQ ID NO: 289891 - DNA, 120 bp, Artificial Sequence
  ENSG00000131016_40 (sequence is synthesized)
cagacacaagctcacgtgataaaagctgacagccaggacgctggacaggaaacggagaaagaaggagaggaacctcaggcctctgcacaggatgaaacaccaattacttcagccaaagag

SEQ ID NO: 289892 - DNA, 120 bp, Artificial Sequence
  ENSG00000131016_41 (sequence is synthesized)
gagtcagagtcaaccgcagtgggacaagcacattctgatatttccaaagacatgagtgaagcctcagaaaagaccatgactgttgaggtagaaggttccactgtaaatgatcagcagctg

SEQ ID NO: 289893 - DNA, 120 bp, Artificial Sequence
  ENSG00000131016_42 (sequence is synthesized)
gaagaggtcgtcctcccatctgaggaagagggaggtggagctggaacaaagtctgtgccagaagatgatggtcatgccttgttagcagaaagaatagagaagtcactagttgaaccgaaa

SEQ ID NO: 289894 - DNA, 120 bp, Artificial Sequence
  ENSG00000131016_43 (sequence is synthesized)
gaagatgaaaaaggtgatgatgttgatgaccctgaaaaccagaactcagccctggctgatactgatgcctcaggaggcttaaccaaagagtccccagatacaaatggaccaaaacaaaaa

SEQ ID NO: 289895 - DNA, 120 bp, Artificial Sequence
  ENSG00000131016_44 (sequence is synthesized)
gagaaggaggatgcccaggaagtagaattgcaggaaggaaaagtgcacagtgaatcagataaagcgatcacaccccaagcacaggaggagttacagaaacaagagagagaatctgcaaag

SEQ ID NO: 289896 - DNA, 120 bp, Artificial Sequence
  ENSG00000131016_45 (sequence is synthesized)
tcagaacttacagaatcttaaaacatcatgcagttaaactcattgtctgtttggaagaccagaatgtgaagacaagtagtagaagaaaatgaatgctgctgctgagactgaagaccagta

SEQ ID NO: 289897 - DNA, 120 bp, Artificial Sequence
  ENSG00000131016_46 (sequence is synthesized)
tttcagaactttgagaattggagagcaggcacatcaactgatctcatttctagagagcccctgacaatcctgaggcttcatcaggagctagagccatttaacatttcctctttccaagac

SEQ ID NO: 289898 - DNA, 120 bp, Artificial Sequence
  ENSG00000131016_47 (sequence is synthesized)
caacctacaattttcccttgataaccatataaattctgatttaaggtcctaaattcttaacctggaactggagttggcaatacctagttctgcttctgaaactggagtatcattctttac

SEQ ID NO: 289899 - DNA, 120 bp, Artificial Sequence
  ENSG00000131016_48 (sequence is synthesized)
atatttatatgtatgttttaagtagtcctcctgtatctattgtatatttttttcttaatgtttaaggaaatgtgcaggatactacatgctttttgtatcacacagtatatgatggggcat

SEQ ID NO: 289900 - DNA, 120 bp, Artificial Sequence
  ENSG00000131016_49 (sequence is synthesized)
gtgccatagtgcaggcttggggagctttaagcctcagttatataacccacgaaaaacagagcctcctagatgtaacattcctgatcaaggtacaattctttaaaattcactaatgattga

SEQ ID NO: 289901 - DNA, 120 bp, Artificial Sequence
  ENSG00000131016_50 (sequence is synthesized)
ggtccatatttagtggtactctgaaattggtcactttcctattacacggagtgtgctaaaactaaaaagcattttgaaacatacagaatgttctattgtcattgggaaatttttctttct

SEQ ID NO: 289902 - DNA, 120 bp, Artificial Sequence
  ENSG00000131016_51 (sequence is synthesized)
aacccagtggaggttagaaagaagttatattctggtagcaaattaactttacatcctttttcctacttgttatggttgtttggaccgataagtgtgcttaatcctgaggcaaagtagtga

SEQ ID NO: 289903 - DNA, 120 bp, Artificial Sequence
  ENSG00000131016_52 (sequence is synthesized)
atatgttttatatgttatgaagaaaagaattgttgtaagtttttgattctactcttatatgctggactgcattcacacatggcatgaaataagtcaggttctttacaaatggtattttga

SEQ ID NO: 289904 - DNA, 120 bp, Artificial Sequence
  ENSG00000131016_53 (sequence is synthesized)
tagatactggattgtgtttgtgccatatttgtgccattcttttaagaacaatgttgcaacacattcatttggataagttgtgatttgacgactgatttaaataaaatatttgcttcactt

SEQ ID NO: 289905 - DNA, 120 bp, Artificial Sequence
  ENSG00000131016_54 (sequence is synthesized)
acatgaaaccccttgtcactggtttgtgtgttcagaggaagccatggccgagatagctttcctgaaataaaccagtagcttttcagattgacgttcttgctacaattgtaccatctggta

SEQ ID NO: 289906 - DNA, 120 bp, Artificial Sequence
  ENSG00000131016_55 (sequence is synthesized)
attcctgaaaatgtcaatttttttgtgttaatatttttggtttcaaacaataacaaatgtctctagaaagaaattttaagaaagcttaattaatagtaaaaatgcctttcctgaaataat

SEQ ID NO: 289907 - DNA, 120 bp, Artificial Sequence
  ENSG00000131016_56 (sequence is synthesized)
cttaattaatagtaaaaatgcctttcctgaaataatcttggaaaattttttaaatgtcaaaatgatgagtcatgctaatacattgagggtttgtttttttgtttgtttgtttgtttgttt

SEQ ID NO: 289908 - DNA, 120 bp, Artificial Sequence
  ENSG00000131016_57 (sequence is synthesized)
tcagctcaccgcaacctccacctcccggattccagcgattctcctgcctcagcctacattaagggttttgtcagacaattgtcacacgaagaatagtgtcacttatctactcttgacaca

SEQ ID NO: 289909 - DNA, 120 bp, Artificial Sequence
  ENSG00000131016_58 (sequence is synthesized)
atctactcttgacacacagaactggcctggcatatagctttccagattttactcaaacttggtactccagtttgaaaatttaaattttgactgctgattagctggaaagcctagttttaa

SEQ ID NO: 289910 - DNA, 120 bp, Artificial Sequence
  ENSG00000131016_59 (sequence is synthesized)
tggaaagaaagtttgcttttaaaactgaaagtagtttctttttgctaacaaatctaacttcatacataattggccatattagtaaaacacctcatgatagcagtgtatatatagtcttgt

SEQ ID NO: 289911 - DNA, 120 bp, Artificial Sequence
  ENSG00000131016_60 (sequence is synthesized)
ttgtagttggaagtcatcttttaggagttattctcaaatatatataatagctacccatgcatcattattaaaatccccaaattcaaaaaacctctgatatatatatataatttttttttt

SEQ ID NO: 289912 - DNA, 120 bp, Artificial Sequence
  ENSG00000131016_61 (sequence is synthesized)
tttttttttttggccaactgagattgaaatccaagtgctggtttctagttctgaacatcaactaaagagttttggaaatgacagcaatttataacaagttcatattgacttcctctctat

SEQ ID NO: 289913 - DNA, 120 bp, Artificial Sequence
  ENSG00000131016_62 (sequence is synthesized)
ggcaggaagacattctgtgctgttttgaacagattaaagatttgtgtagtttgtgggaaattgacgtttttgtttaaattccacccgcgtttgtcttttcctaccacctgtggccaggtg

SEQ ID NO: 289914 - DNA, 120 bp, Artificial Sequence
  ENSG00000131016_63 (sequence is synthesized)
ctcgctggccatcacagttgcgattccatgagtagctgctttatgactgctttttgtactatctggatgtgcccagagttacttctgtacaagctctgtatctatgtccgttgagaacat

SEQ ID NO: 289915 - DNA, 120 bp, Artificial Sequence
  ENSG00000131016_64 (sequence is synthesized)
tattttaacaagaagaacaccaacagtagcatgaaatataatactgttttataattctaaagctgctgttaatttatgaagtacataataatctaatgtaaactgcagaagtcagagcaa

SEQ ID NO: 289916 - DNA, 120 bp, Artificial Sequence
  ENSG00000131016_65 (sequence is synthesized)
gtgcctacattttgttatttttggcattactacagagccatgtacaatagaaagcaatgcaagacttgtaaactctcaccacttcttgtaatatcaaatgttccccctcaggttattttg

SEQ ID NO: 289917 - DNA, 120 bp, Artificial Sequence
  ENSG00000131016_66 (sequence is synthesized)
cttatggtacccatgagttgcctctctctgtacatagataaattgttccaatattttcctttgatgtttggaactacagatagtcaagggctggaaattttagttttcaatataagcttc

SEQ ID NO: 289918 - DNA, 120 bp, Artificial Sequence
  ENSG00000131016_67 (sequence is synthesized)
cagcttagcaattacctctagtcgaagacaatatttgattcctagttctgtttggggcaaattttcatttatctaaataaaatgcaatctaattaaatgccatggattttctttctgtaa

SEQ ID NO: 289919 - DNA, 120 bp, Artificial Sequence
  ENSG00000131016_68 (sequence is synthesized)
ggcagctccgagggcacctccggttctcccccatcctccgggagtgtctgggcgctcagtccgctctgatcccgccgaaaccacctgcggttggcaggcaggagactaggcgtctgccgg

SEQ ID NO: 289920 - DNA, 120 bp, Artificial Sequence
  ENSG00000131016_69 (sequence is synthesized)
agtgagtagcacgtgcacccaagcggcagttcgccccgcagcgatggcggacacggaatcccgagggccaccaactgtcccttaggaccggcccgagatggttggacagagagactctga

SEQ ID NO: 289921 - DNA, 120 bp, Artificial Sequence
  ENSG00000131018_0 (sequence is synthesized)
aggacagcgcagctcctccaggcagcggaggcagcgcgtcccggctctcagggacatttccttcccacctcgacccccgggaggtggtcccggtataaaggctcgctgagcgggtgggtc

SEQ ID NO: 289922 - DNA, 120 bp, Artificial Sequence
  ENSG00000131018_1 (sequence is synthesized)
acagcacagctttgcagctgcggagaaacgcccaaggccgtgcatctccaggagggcggctgggctcccgcagtcctgcagaccgcgcccgatcccggcgacagggcgggcggacagccg

SEQ ID NO: 289923 - DNA, 120 bp, Artificial Sequence
  ENSG00000131018_2 (sequence is synthesized)
cgcatccccggggtcccgccgagcctgggcgcagagagccgggaggaagcgttcgctcgcttcgccttgctgctgggaaactgaacgaggccgagagagaaggttcttgagttcatgtaa

SEQ ID NO: 289924 - DNA, 120 bp, Artificial Sequence
  ENSG00000131018_3 (sequence is synthesized)
gaggacagtcttaaaacggaagaagaaaaagaagcagttcagtctttgggagagctgcctccttgttgagtgctgcaaaggcctggaattcatttatgacagaatagatctagaaaagtc

SEQ ID NO: 289925 - DNA, 120 bp, Artificial Sequence
  ENSG00000131018_4 (sequence is synthesized)
caagcatgttttctagagtggtgtagccctgtgctgcctccagtgaagagtctcttggtgttggcttcgtgcttccggagggaccatggcaacctccagaggggcctcccggtgtcctcg

SEQ ID NO: 289926 - DNA, 120 bp, Artificial Sequence
  ENSG00000131018_5 (sequence is synthesized)
ggatatcgccaatgtgatgcagaggctgcaagatgagcaagagatagtacaaaaacgaactttcacaaaatggatcaactctcatctggccaagcggaaacctccaatggtggtggacga

SEQ ID NO: 289927 - DNA, 120 bp, Artificial Sequence
  ENSG00000131018_6 (sequence is synthesized)
tctttttgaagacatgaaagatggtgttaaactgcttgcccttctggaggtcctgtctgggcagaaactgccttgtgaacaaggacgccggatgaagcgaatccatgctgtggctaacat

SEQ ID NO: 289928 - DNA, 120 bp, Artificial Sequence
  ENSG00000131018_7 (sequence is synthesized)
tggcacggcactcaagttcctcgaaggaagaaagattaaattagtcaacattaactccaccgatatagctgatggccgaccctcaatagttcttggattgatgtggaccattattctata

SEQ ID NO: 289929 - DNA, 120 bp, Artificial Sequence
  ENSG00000131018_8 (sequence is synthesized)
tttccagattgaagagttgaccagcaacctgccccagctccagtctttgtccagcagcgcatcctccgtggacagcatagttagctctgagactcccagcccaccaagtaaacggaaggt

SEQ ID NO: 289930 - DNA, 120 bp, Artificial Sequence
  ENSG00000131018_9 (sequence is synthesized)
gaccaccaagatccaaggaaatgctaagaaggctttattaaagtgggttcagtacacagctggcaagcagactggaatagaagtaaaagattttgggaagagttggagaagcggggttgc

SEQ ID NO: 289931 - DNA, 120 bp, Artificial Sequence
  ENSG00000131018_10 (sequence is synthesized)
ctttcattcagttattcatgccattcgaccggaattggtggacttggagacagtgaaaggcagatccaaccgagaaaatttggaggatgctttcactatcgccgaaacagaactggggat

SEQ ID NO: 289932 - DNA, 120 bp, Artificial Sequence
  ENSG00000131018_11 (sequence is synthesized)
cccaagactgctagatcctgaagacgttgatgtggataaaccagatgagaaatctattatgacctatgtagcccagtttctgaaacattatcctgacatccacaatgcaagcactgatgg

SEQ ID NO: 289933 - DNA, 120 bp, Artificial Sequence
  ENSG00000131018_12 (sequence is synthesized)
gcaagaggatgatgaaatacttccaggtttcccatcttttgcaaattctgtacaaaattttaagagagaagacagagtaatttttaaggaaatgaaagtttggatagaacaatttgagag

SEQ ID NO: 289934 - DNA, 120 bp, Artificial Sequence
  ENSG00000131018_13 (sequence is synthesized)
agatttgacaagagcacagatggtggaatcaaatttacaggataaatatcagtcatttaagcacttcagagttcaatatgaaatgaagaggaaacagattgaacatttaatacaaccatt

SEQ ID NO: 289935 - DNA, 120 bp, Artificial Sequence
  ENSG00000131018_14 (sequence is synthesized)
acacagagacggtaaattgtcacttgaccaagcattggtaaaacaatcttgggatagagtgacctccaggctctttgactggcatatacagcttgataaatctcttcctgcacctctggg

SEQ ID NO: 289936 - DNA, 120 bp, Artificial Sequence
  ENSG00000131018_15 (sequence is synthesized)
caccataggtgcctggctgtacagagcggaggtggccctgagagaggaaataaccgttcaacaggtccacgaggaaacagcaaacacgatacaacggaaacttgagcaacataaggatct

SEQ ID NO: 289937 - DNA, 120 bp, Artificial Sequence
  ENSG00000131018_16 (sequence is synthesized)
gcttcaaaacacggatgcccacaaaagagcattccatgaaatctaccggaccaggtctgttaacgggattccagtgccacctgatcaattagaggacatggccgagaggtttcattttgt

SEQ ID NO: 289938 - DNA, 120 bp, Artificial Sequence
  ENSG00000131018_17 (sequence is synthesized)
ttcctccacatcagagctacacctaatgaaaatggaatttttagaattaaagtaccgtctgctctcactgctggttcttgcagagtcaaagctgaagtcttggatcattaagtacgggag

SEQ ID NO: 289939 - DNA, 120 bp, Artificial Sequence
  ENSG00000131018_18 (sequence is synthesized)
gagagagtcagtggagcagcttctacaaaactacgtgtcttttatagaaaatagcaagttctttgaacaatatgaggtgacataccagatcttgaaacagacagctgagatgtatgtcaa

SEQ ID NO: 289940 - DNA, 120 bp, Artificial Sequence
  ENSG00000131018_19 (sequence is synthesized)
agcagatggttcagtggaagaagctgagaatgtgatgaaattcatgaatgaaaccaccgctcagtggaggaatctctcagtagaagtgaggagtgtgaggagcatgctggaagaagtgat

SEQ ID NO: 289941 - DNA, 120 bp, Artificial Sequence
  ENSG00000131018_20 (sequence is synthesized)
ctctaactgggatcgctatggcaatacagtggctagtctgcaagcctggctagaggatgctgaaaaaatgctcaatcaatcagaaaatgccaaaaaggatttttttcgaaatttacctca

SEQ ID NO: 289942 - DNA, 120 bp, Artificial Sequence
  ENSG00000131018_21 (sequence is synthesized)
ttggattcagcagcatactgccatgaacgatgctggcaattttctaattgaaacctgtgatgagatggtttcccgtgacctgaagcagcaattactgttgctaaatgggcggtggaggga

SEQ ID NO: 289943 - DNA, 120 bp, Artificial Sequence
  ENSG00000131018_22 (sequence is synthesized)
gttgtttatggaagtcaagcaatatgctcaagctgatgagatggacagaatgaagaaggaatacacagactgtgttgttaccctgtctgcttttgcaacggaagcccataagaaactttc

SEQ ID NO: 289944 - DNA, 120 bp, Artificial Sequence
  ENSG00000131018_23 (sequence is synthesized)
tgaacccttagaagtctcttttatgaatgtcaagctattaattcaagacttggaggatattgagcagagggtgcctgtgatggatgcccaatacaagataattacaaagacagcacacct

SEQ ID NO: 289945 - DNA, 120 bp, Artificial Sequence
  ENSG00000131018_24 (sequence is synthesized)
cattaccaaagaaagcccccaagaagaaggaaaagaaatgtttgcgaccatgtcaaagctcaaagagcagctaaccaaggtcaaagaatgttactccccactcctttatgagtctcagca

SEQ ID NO: 289946 - DNA, 120 bp, Artificial Sequence
  ENSG00000131018_25 (sequence is synthesized)
gctgttgattccgttggaggaattagaaaagcagatgacgtccttttatgactcacttgggaaaatcaatgaaattatcacagttcttgagcgtgaggcacaatcgagtgccctttttaa

SEQ ID NO: 289947 - DNA, 120 bp, Artificial Sequence
  ENSG00000131018_26 (sequence is synthesized)
acaaaaacatcaggaactgttagcttgtcaagaaaactgtaagaaaaccttgacacttattgagaaaggcagtcaaagtgttcaaaagtttgtgaccttgagcaacgtgttaaagcattt

SEQ ID NO: 289948 - DNA, 120 bp, Artificial Sequence
  ENSG00000131018_27 (sequence is synthesized)
tgatcagacgaggctacaaagacagattgcagatattcatgttgcttttcagagtatggtaaagaaaactggagattggaagaagcatgtggaaaccaacagtcgcttgatgaagaagtt

SEQ ID NO: 289949 - DNA, 120 bp, Artificial Sequence
  ENSG00000131018_28 (sequence is synthesized)
tgaggagtctcgagcagagttggagaaggtactgcggattgctcaggagggcctggaggaaaagggggatccagaggagctcctgcggagacacactgagtttttcagtcagctggatca

SEQ ID NO: 289950 - DNA, 120 bp, Artificial Sequence
  ENSG00000131018_29 (sequence is synthesized)
gagggtgctcaatgctttcctgaaagcttgtgatgaactcaccgacatccttccagagcaggagcagcaggggctgcaggaagctgttcgaaagctccacaaacaatggaaggatcttca

SEQ ID NO: 289951 - DNA, 120 bp, Artificial Sequence
  ENSG00000131018_30 (sequence is synthesized)
aggagaagccccttatcatttgcttcatctgaagattgatgtggagaagaataggttcttagcctctgtagaagaatgcagaactgagctggatcgagagaccaagctgatgccccagga

SEQ ID NO: 289952 - DNA, 120 bp, Artificial Sequence
  ENSG00000131018_31 (sequence is synthesized)
aggcagtgaaaagataattaaagagcacagggttttcttcagtgacaaaggtcctcatcatctctgtgagaaaaggttacagctcatcgaggaactctgtgtgaaactcccagtgcggga

SEQ ID NO: 289953 - DNA, 120 bp, Artificial Sequence
  ENSG00000131018_32 (sequence is synthesized)
cccagtaagggacacacctggaacctgtcacgtgactctcaaagagctcagagctgccattgacagcacctacaggaagctcatggaagacccagacaagtggaaggactacactagcag

SEQ ID NO: 289954 - DNA, 120 bp, Artificial Sequence
  ENSG00000131018_33 (sequence is synthesized)
attctctgagttctcatcttggatatctacaaatgagacacaattaaaggggatcaagggtgaggccatcgatactgccaaccacggagaggttaaacgtgccgttgaagagatcagaaa

SEQ ID NO: 289955 - DNA, 120 bp, Artificial Sequence
  ENSG00000131018_34 (sequence is synthesized)
tggtgttaccaaaaggggtgagaccctcagctggctgaaatccaggctgaaagttttgacagaagtttcttctgagaatgaagcccaaaagcagggagatgagctggcaaaattatccag

SEQ ID NO: 289956 - DNA, 120 bp, Artificial Sequence
  ENSG00000131018_35 (sequence is synthesized)
ctctttcaaggctcttgtgacgctgctgtcagaggttgaaaagatgctaagcaattttggggactgtgtccagtacaaagaaatagtcaaaaattctctcgaagaattaatttctggctc

SEQ ID NO: 289957 - DNA, 120 bp, Artificial Sequence
  ENSG00000131018_36 (sequence is synthesized)
taaagaagtccaggaacaagctgagaagatcttggatactgaaaatctgtttgaagcacagcagttacttcttcatcaccagcaaaagacaaagcggatctcagcaaagaagagagatgt

SEQ ID NO: 289958 - DNA, 120 bp, Artificial Sequence
  ENSG00000131018_37 (sequence is synthesized)
gcagcagcagatcgcgcaggcgcagcagggagaaggggggctgcctgaccgaggccacgaggagctgcggaagctggagagcacactggatggcctggagcgcagccgggagaggcagga

SEQ ID NO: 289959 - DNA, 120 bp, Artificial Sequence
  ENSG00000131018_38 (sequence is synthesized)
acgccgcatccaggtcacattaagaaaatgggagcgatttgaaacaaacaaagaaacagtagtaagatacctttttcaaacaggttccagtcatgaacgcttcttgagttttagcagttt

SEQ ID NO: 289960 - DNA, 120 bp, Artificial Sequence
  ENSG00000131018_39 (sequence is synthesized)
ggaaagtttatcttcagaactggaacaaacaaaggagttttctaaacggacagaaagtattgcagtccaggctgagaaccttgtaaaggaagcttcagagataccgcttgggccccaaaa

SEQ ID NO: 289961 - DNA, 120 bp, Artificial Sequence
  ENSG00000131018_40 (sequence is synthesized)
taagcagctgcttcaacagcaggccaagtcaatcaaagaacaagtcaaaaaattagaagacacgcttgaagaagatattaaaaccatggaaatggtgaaaaccaagtgggatcattttgg

SEQ ID NO: 289962 - DNA, 120 bp, Artificial Sequence
  ENSG00000131018_41 (sequence is synthesized)
cagtaattttgagactctgtccgtctggataactgagaaagaaaaagaactcaatgccttggaaacttcgtcatctgccatggacatgcaaatcagccaaattaaggtcacaattcagga

SEQ ID NO: 289963 - DNA, 120 bp, Artificial Sequence
  ENSG00000131018_42 (sequence is synthesized)
aatagaaagtaagctcagcagcattgtaggattagaagaagaagcccagtcttttgctcagtttgttaccactggagaatctgctcgaattaaagccaagttgacacaaataagaagata

SEQ ID NO: 289964 - DNA, 120 bp, Artificial Sequence
  ENSG00000131018_43 (sequence is synthesized)
cggggaagagcttcgagagcatgcacagtgtctggaaggaacaatcctgggacatttatctcagcagcaaaagtttgaagagaaccttagaaagatccagcaatctgtgtctgaatttga

SEQ ID NO: 289965 - DNA, 120 bp, Artificial Sequence
  ENSG00000131018_44 (sequence is synthesized)
agataaacttgctgttccaattaaaatatgttcttcagctacagaaacatacaaagttcttcaagaacatatggatctctgccaggccctggagtcactgagcagcgcgatcactgcctt

SEQ ID NO: 289966 - DNA, 120 bp, Artificial Sequence
  ENSG00000131018_45 (sequence is synthesized)
ctcagccagtgccaggaaggttgtgaacagagattcctgtgttcaggaggctgcggctctacagcagcaatacgaggacatcctaaggagggcgaaggagagacagacggcgctggagaa

SEQ ID NO: 289967 - DNA, 120 bp, Artificial Sequence
  ENSG00000131018_46 (sequence is synthesized)
tctgctggcccactggcagaggctagagaaagaactatcatcctttttgacctggttagagcggggtgaagctaaagccagttccccagaaatggacatttctgcagacagagtcaaagt

SEQ ID NO: 289968 - DNA, 120 bp, Artificial Sequence
  ENSG00000131018_47 (sequence is synthesized)
ggaaggtgaacttcagttaatacaggcactgcaaaatgaagttgtatcccaggcctcattctatagcaaacttttgcaattgaaggaatcattgttctcagtagcctccaaagatgatgt

SEQ ID NO: 289969 - DNA, 120 bp, Artificial Sequence
  ENSG00000131018_48 (sequence is synthesized)
gaaaatgatgaaactacatttggagcagttggatgagagatggagagatttaccacagatcattaacaaaaggattaattttcttcagtctgtggttgctgaacaccagcaatttgatga

SEQ ID NO: 289970 - DNA, 120 bp, Artificial Sequence
  ENSG00000131018_49 (sequence is synthesized)
gctgctgctttccttttctgtctggattaaactgtttctcagtgaattacaaactacctctgagattagcataatggaccatcaagtagcccttactcggcataaggaccacgcagcaga

SEQ ID NO: 289971 - DNA, 120 bp, Artificial Sequence
  ENSG00000131018_50 (sequence is synthesized)
agtagagagcaaaaagggcgaattgcagagtctgcagggtcacttagcaaagttgggttctctgggccgtgctgaggacctccacctcctgcagggaaaggctgaggactgcttccagct

SEQ ID NO: 289972 - DNA, 120 bp, Artificial Sequence
  ENSG00000131018_51 (sequence is synthesized)
gtttgaggaggccagccaggttgtggagaggcggcagcttgccctgtcccatttggcagaattcctccagagccatgcctctctgtccggcattctccgccagctgaggcaaacagtgga

SEQ ID NO: 289973 - DNA, 120 bp, Artificial Sequence
  ENSG00000131018_52 (sequence is synthesized)
agcaaccaacagtatgaataagaacgagtctgatttgatagaaaaggacctcaatgatgctcttcaaaatgctaaagcattagaatctgctgccgtcagtctggatggcattctttccaa

SEQ ID NO: 289974 - DNA, 120 bp, Artificial Sequence
  ENSG00000131018_53 (sequence is synthesized)
agcccaataccatctgaaaatcgggagctctgagcaaaggacttcctgcagagccacggctgatcagctctgtggagaggtagagaggatccagaaccttctgggaaccaagcagagtga

SEQ ID NO: 289975 - DNA, 120 bp, Artificial Sequence
  ENSG00000131018_54 (sequence is synthesized)
ggcagatgctctggcagtgttgaaaaaagcattccaagaccagaaagaggagcttctgaaaagcattgaggacattgaagaaaggactgacaaagagcgattgaaagaacctacccgcca

SEQ ID NO: 289976 - DNA, 120 bp, Artificial Sequence
  ENSG00000131018_55 (sequence is synthesized)
agctcttcagcagaggttaagagtgtttaatcagctagaagatgaattgaattctcacgagcatgaactatgttggttgaaagacaaagccaagcaaattgcccagaaagatgtagcttt

SEQ ID NO: 289977 - DNA, 120 bp, Artificial Sequence
  ENSG00000131018_56 (sequence is synthesized)
tgcacctgaagttgacagggagataaaccgcttagaggtcacctgggatgataccaaaagactaattcatgaaaatcagggtcagtgctgtggacttattgacttaatgagagaatatca

SEQ ID NO: 289978 - DNA, 120 bp, Artificial Sequence
  ENSG00000131018_57 (sequence is synthesized)
gaacctgaaatcagctgtatctaaagtcttagaaaatgccagcagtgtgattgtaaccagaactaccataaaagatcaggaggatcttaaatgggctttttccaagcatgaaactgccaa

SEQ ID NO: 289979 - DNA, 120 bp, Artificial Sequence
  ENSG00000131018_58 (sequence is synthesized)
gaacaaaatgaattacaaacagaaagacttggataactttaccagcaaaggaaaacacttgttatctgagctgaagaaaattcacagtagtgatttcagcttggtgaaaacagacatgga

SEQ ID NO: 289980 - DNA, 120 bp, Artificial Sequence
  ENSG00000131018_59 (sequence is synthesized)
gagcaccgtggacaaatggctggatgtatcagagaaacttgaagaaaacatggataggctgagagtaagcctgtccatttgggatgatgtactgtcaactagagatgagattgagggatg

SEQ ID NO: 289981 - DNA, 120 bp, Artificial Sequence
  ENSG00000131018_60 (sequence is synthesized)
gtcaaacaactgcgttccacagatggcagaaaacatcagcaacctggataaccacctcagagctgaagaactgcttaaagaatttgagtctgaagttaaaaacaaagcattgagattgga

SEQ ID NO: 289982 - DNA, 120 bp, Artificial Sequence
  ENSG00000131018_61 (sequence is synthesized)
agaactgcattccaaagttaatgatctgaaagaattaactaaaaatctagaaacaccgccagaccttcagtttatagaagcagacttaatgcagaaactggagcatgccaaagaaataac

SEQ ID NO: 289983 - DNA, 120 bp, Artificial Sequence
  ENSG00000131018_62 (sequence is synthesized)
tgaagtagcaaaaggaaccctgaaggatttcacggctcaaagtacacaagtggagaagtttattaatgacataacaacatggttcacaaaagtggaagaatcgttgatgaactgtgccca

SEQ ID NO: 289984 - DNA, 120 bp, Artificial Sequence
  ENSG00000131018_63 (sequence is synthesized)
aaatgagacttgtgaagcattgaaaaaagtcaaggatatacaaaaagaacttcaaagtcaacaaagcaacatcagctctacccaagaaaatctcaatagcttgtgccgcaagtaccactc

SEQ ID NO: 289985 - DNA, 120 bp, Artificial Sequence
  ENSG00000131018_64 (sequence is synthesized)
agctgagttggagagcctgggccgtgcaatgactggtctgataaagaaacatgaagccgtgagccagttgtgctccaaaacccaggccagcctgcaggaatctctggaaaaacacttcag

SEQ ID NO: 289986 - DNA, 120 bp, Artificial Sequence
  ENSG00000131018_65 (sequence is synthesized)
tgagtctatgcaggaattccaagaatggtttttgggagcaaaggcagcagcaaaagaatcatcagatcgcaccggtgacagcaaagttctagaagcaaagctccatgatcttcagaacat

SEQ ID NO: 289987 - DNA, 120 bp, Artificial Sequence
  ENSG00000131018_66 (sequence is synthesized)
tttggactcagtcagtgatgggcagagcaaacttgatgcagtgactcaagaaggacaaactttgtatgcacatttgtctaaacaaattgtcagtagcattcaagaacaaatcacaaaggc

SEQ ID NO: 289988 - DNA, 120 bp, Artificial Sequence
  ENSG00000131018_67 (sequence is synthesized)
caatgaagagtttcaagcatttctgaaacaatgccttaaagataagcaggctcttcaagactgtgcttcagaacttggaagctttgaagatcagcacagaaaactgaacttatggatcca

SEQ ID NO: 289989 - DNA, 120 bp, Artificial Sequence
  ENSG00000131018_68 (sequence is synthesized)
tgaaatggaagaaaggttcaatacggaaaacttgggagagagtaaacagcacattcctgagaagaaaaatgaagttcataaagttgaaatgtttttgggagaactgctggctgcaagaga

SEQ ID NO: 289990 - DNA, 120 bp, Artificial Sequence
  ENSG00000131018_69 (sequence is synthesized)
gtctcttgataagctttcccagagagggcagcttctgagtgaagaaggccacggtgctgggcaggagggccgcctgtgttcccagctcctcacaagccaccagaacctacttagaatgac

SEQ ID NO: 289991 - DNA, 120 bp, Artificial Sequence
  ENSG00000131018_70 (sequence is synthesized)
caaagagaaactccggagctgccaggtggcccttcaggagcacgaagccctggaggaagcactgcaaagcatgtggttctgggtgaaggccattcaggacagactggcctgtgcagagag

SEQ ID NO: 289992 - DNA, 120 bp, Artificial Sequence
  ENSG00000131018_71 (sequence is synthesized)
cactcttgggagcaaagacaccctggagaaacggctgtcacaaatacaggatattctcctgatgaaaggtgaaggggaagttaagttgaatatggccattggcaagggggaacaggcctt

SEQ ID NO: 289993 - DNA, 120 bp, Artificial Sequence
  ENSG00000131018_72 (sequence is synthesized)
gagaagtagcaacaaagaaggtcagagggtgattcagactcagttagagacccttaaagaagtgtgggctgacatcatgagctcctccgtccacgctcaaagcactttagagtctgtgat

SEQ ID NO: 289994 - DNA, 120 bp, Artificial Sequence
  ENSG00000131018_73 (sequence is synthesized)
tagccaatggaatgactatgtagagaggaaaaaccagttggagcagtggatggaatcagtggatcaaaaaatagaacatcccttacaaccacagccaggtctgaaagagaagttcgtcct

SEQ ID NO: 289995 - DNA, 120 bp, Artificial Sequence
  ENSG00000131018_74 (sequence is synthesized)
gcttgaccacctccagtccatcctgtctgaggcagaagatcacacgagagcccttcaccgtctaattgcgaagtccagggagctctacgaaaagacagaggatgagtctttcaaggacac

SEQ ID NO: 289996 - DNA, 120 bp, Artificial Sequence
  ENSG00000131018_75 (sequence is synthesized)
agctcaagaggagctgaaaacacagtttaatgatataatgactgttgccaaggaaaaaatgaggaaagtggaagagattgtgaaagatcatctaatgtatttagatgcggtccacgagtt

SEQ ID NO: 289997 - DNA, 120 bp, Artificial Sequence
  ENSG00000131018_76 (sequence is synthesized)
cacagattggctccattcagcaaaggaagaacttcaccggtggtcagatatgtctggagattcatcagccacccagaaaaagttatcaaaaattaaggagctgatagattccagagagat

SEQ ID NO: 289998 - DNA, 120 bp, Artificial Sequence
  ENSG00000131018_77 (sequence is synthesized)
tggtgcaagccgtctcagcagagtggagtcgctggctcccgaagtgaaacagaacacaactgccagtgggtgtgagctcatgcacacggagatgcaggccctgcgtgccgactggaagca

SEQ ID NO: 289999 - DNA, 120 bp, Artificial Sequence
  ENSG00000131018_78 (sequence is synthesized)
gtgggaagacagtgtattccaaacgcagagctgtttggagaacctggtcagccagatggccctttcggagcaggaattctcaggccaagtggctcaactggagcaggccctggaacagtt

SEQ ID NO: 290000 - DNA, 120 bp, Artificial Sequence
  ENSG00000131018_79 (sequence is synthesized)
cagtgcccttctgaaaacctgggctcagcagttaaccctcctggaaggcaagaacacggatgaggagatagtggaatgctggcacaaaggacaagagatactggatgctttgcaaaaagc

SEQ ID NO: 290001 - DNA, 120 bp, Artificial Sequence
  ENSG00000131018_80 (sequence is synthesized)
agagcctagaacagaggatctcaagtctcagctgaatgaactttgtcgattttccagagacctgagtacctacagtggaaaagtttctggcttgattaaagagtataattgtctttgttt

SEQ ID NO: 290002 - DNA, 120 bp, Artificial Sequence
  ENSG00000131018_81 (sequence is synthesized)
gcaagcatccaagggctgccagaataaagaacagattttacagcaaagatttcgaaaggccttcagggatttccagcagtggttggttaatgcaaaaatcactaccgccaagtgttttga

SEQ ID NO: 290003 - DNA, 120 bp, Artificial Sequence
  ENSG00000131018_82 (sequence is synthesized)
tatacctcaaaatataagtgaagtttcaactagtcttcagaaaatacaggagtttttgtcagaaagtgaaaatggacagcacaagctaaacatgatgctgtctaaaggggaacttctgag

SEQ ID NO: 290004 - DNA, 120 bp, Artificial Sequence
  ENSG00000131018_83 (sequence is synthesized)
taccctgctgaccaaagagaaagcgaaagggatccaggccaaagttacagctgcaaaagaagattggaaaaattttcattcaaatctccaccaaaaagaatctgctctagagaatctaaa

SEQ ID NO: 290005 - DNA, 120 bp, Artificial Sequence
  ENSG00000131018_84 (sequence is synthesized)
gatccaaatgaaggactttgaagtaagtgctgagcctatccaggactggctgagtaaaactgagaagatggtccatgaaagcagcaatcgcctctatgatctgccagcaaagaggaggga

SEQ ID NO: 290006 - DNA, 120 bp, Artificial Sequence
  ENSG00000131018_85 (sequence is synthesized)
gcagcagaagctccagtctgtccttgaggaaatacactgctacgagcctcagctcaacaggctgaaagagaaagctcagcagctgtgggaaggacaagctgccagcaagagctttaggca

SEQ ID NO: 290007 - DNA, 120 bp, Artificial Sequence
  ENSG00000131018_86 (sequence is synthesized)
cagagtgtcgcagctgtcttctcagtatctagcgctaagcaatttaacaaaggagaaagtgtcaagactggatagaatcgttgcagaacacaatcagttctctcttgggattaaagaatt

SEQ ID NO: 290008 - DNA, 120 bp, Artificial Sequence
  ENSG00000131018_87 (sequence is synthesized)
acaagactggatgacggatgcgattcacatgctggattcatactgccacccgacatccgacaaaagtgtgctggacagcaggacgctcaagctcgaggctctattatcagtcaaacagga

SEQ ID NO: 290009 - DNA, 120 bp, Artificial Sequence
  ENSG00000131018_88 (sequence is synthesized)
aaaagagattcagatgaaaatgatagtgaccaggggagaatctgtccttcagaatacttctccagaaggcattcccactattcagcagcagctgcagagtgtgaaggatatgtgggcatc

SEQ ID NO: 290010 - DNA, 120 bp, Artificial Sequence
  ENSG00000131018_89 (sequence is synthesized)
ccttttgtctgcagggattcgttgtaaaagccaactcgaaggagctctctccaagtggacaagttatcaggatggcgttcgacagttctccggttggatggatagtatggaagccaacct

SEQ ID NO: 290011 - DNA, 120 bp, Artificial Sequence
  ENSG00000131018_90 (sequence is synthesized)
gaatgaatcagaaaggcagcatgcggagctgcgggataaaacaacgatgctcggaaaagccaagttattaaatgaagaagtgctgagttacagcagcttgctggagaccatcgaagtcaa

SEQ ID NO: 290012 - DNA, 120 bp, Artificial Sequence
  ENSG00000131018_91 (sequence is synthesized)
aggggctggcatgacagaacactatgtcacccagctagaactccaggatctacaggaacgatacagagccatccaagagagggccaaggaagccgtaaccaagtctgaaaaacttgtccg

SEQ ID NO: 290013 - DNA, 120 bp, Artificial Sequence
  ENSG00000131018_92 (sequence is synthesized)
cctgcaccaagagtatcagagagacctaaaggcatttgaagtttggttggggcaagaacaagaaaagctcgaccagtattcagttcttgaaggtgatgcccacactcatgagacaacatt

SEQ ID NO: 290014 - DNA, 120 bp, Artificial Sequence
  ENSG00000131018_93 (sequence is synthesized)
gcgtgatcttcaggagctacaggtacactgtgcagaggggcaggccctgttgaactcagtgctgcacaccagagaggatgtgatcccatcaggtatcccacaggcagaggaccgggcttt

SEQ ID NO: 290015 - DNA, 120 bp, Artificial Sequence
  ENSG00000131018_94 (sequence is synthesized)
agagtctctccggcaagactggcaggcttaccagcacaggctgtccgagactcgaactcagttcaataacgtggtgaacaaattgaggctaatggagcaaaagtttcagcaagtagatga

SEQ ID NO: 290016 - DNA, 120 bp, Artificial Sequence
  ENSG00000131018_95 (sequence is synthesized)
atggctcaaaacagcagaggagaaagttagtcccaggaccagacgtcagtctaacagggcaaccaaggagatacaattacatcagatgaagaagtggcacgaagaagtgactgcatacag

SEQ ID NO: 290017 - DNA, 120 bp, Artificial Sequence
  ENSG00000131018_96 (sequence is synthesized)
agatgaagttgaggaagtgggagctagagctcaggagatactggacgagagccacgtgaacagcagaatgggttgccaggccacccagctgacttccagataccaggccctgcttctcca

SEQ ID NO: 290018 - DNA, 120 bp, Artificial Sequence
  ENSG00000131018_97 (sequence is synthesized)
agtgctggaacaaataaaattcctggaggaggagattcagagtttggaggaatcagaatcatccctcagttcctattctgattggtatggctctactcataaaaacttcaagaatgtggc

SEQ ID NO: 290019 - DNA, 120 bp, Artificial Sequence
  ENSG00000131018_98 (sequence is synthesized)
taccaagattgacaaagtagatacagtaatgatggggaagaaattgaagacgttggaggttttgctcaaagacatggagaaaggtcacagtttgctgaaatcagcccgggagaaaggaga

SEQ ID NO: 290020 - DNA, 120 bp, Artificial Sequence
  ENSG00000131018_99 (sequence is synthesized)
gagggctgttaaatacttggaggaaggcgaggcagagaggttaagaaaggagattcatgatcacatggagcagttgaaggaactgaccagcactgtccggaaagaacacatgacgctgga

SEQ ID NO: 290021 - DNA, 120 bp, Artificial Sequence
  ENSG00000131018_100 (sequence is synthesized)
aaaaggtcttcatttagcaaaggaattctcagataaatgcaaagcactgacacagtggatagcagaataccaggaaattctacatgttcctgaagaacccaaaatggaattatatgagaa

SEQ ID NO: 290022 - DNA, 120 bp, Artificial Sequence
  ENSG00000131018_101 (sequence is synthesized)
aaaagctcagttatctaaatacaagtcacttcaacaaacggtgctgtcccatgaaccatcagtaaagtcagtgagagagaagggtgaagctcttttggaactggtgcaggacgtcacttt

SEQ ID NO: 290023 - DNA, 120 bp, Artificial Sequence
  ENSG00000131018_102 (sequence is synthesized)
aaaggacaaaatagatcaacttcaaagtgattaccaggacctgtgcagcataggaaaggagcatgtcttcagtctggaggcgaaagtcaaagaccatgaagactacaacagtgagctcca

SEQ ID NO: 290024 - DNA, 120 bp, Artificial Sequence
  ENSG00000131018_103 (sequence is synthesized)
agaggtcgaaaagtggctgctgcagatgtctggcagactggtggcacctgacctcctggagacaagcagcctggagacaatcacccagcaattggcccaccacaaggcaatgatggaaga

SEQ ID NO: 290025 - DNA, 120 bp, Artificial Sequence
  ENSG00000131018_104 (sequence is synthesized)
aattgctggttttgaagaccgtttgaacaatcttcaaatgaaaggtgatactttgattggccaatgtgcagaccacctgcaagcgaaacttaaacaaaacgtgcatgctcatctgcaggg

SEQ ID NO: 290026 - DNA, 120 bp, Artificial Sequence
  ENSG00000131018_105 (sequence is synthesized)
cacaaaggacagctactcagcgatctgcagcacagctcagaggatgtaccagagtttggaacacgaacttcagaagcacgtcagccgacaagacaccctgcagcagtgccaggcctggct

SEQ ID NO: 290027 - DNA, 120 bp, Artificial Sequence
  ENSG00000131018_106 (sequence is synthesized)
ttctgcagtccagccggatttagagccaagtcctcaaccacctcttagtagggcagaagccattaagcaggtcaaacacttcagagctttgcaagagcaggcaaggacctacctagatct

SEQ ID NO: 290028 - DNA, 120 bp, Artificial Sequence
  ENSG00000131018_107 (sequence is synthesized)
cctttgctccatgtgtgacctgtcaaatgcttcggtgaaaaccacagcaaaagacattcaacaaacagagcaaacgattgaacaaaagcttgtccaggcccagaacttaactcagggctg

SEQ ID NO: 290029 - DNA, 120 bp, Artificial Sequence
  ENSG00000131018_108 (sequence is synthesized)
ggaagagatcaagcacctgaagtctgagctctggatttacctgcaagatgctgatcagcaactgcagaacatgaagaggaggcactctgagctggagctgaacattgcacagaacatggt

SEQ ID NO: 290030 - DNA, 120 bp, Artificial Sequence
  ENSG00000131018_109 (sequence is synthesized)
ttcacaagttaaggattttgttaagaaactacagagcaaacaggcatccgtgaacaccataatagaaaaggtgaataagttaacaaagaaggaggaatcgcctgaacacaaggaaataaa

SEQ ID NO: 290031 - DNA, 120 bp, Artificial Sequence
  ENSG00000131018_110 (sequence is synthesized)
tcatttaaatgatcagtggctcgatttgtgccgtcagtctaacaacctgtgcttgcaaagggaagaggatcttcagagaacaagagattaccatgactgtatgaatgttgttgaagtgtt

SEQ ID NO: 290032 - DNA, 120 bp, Artificial Sequence
  ENSG00000131018_111 (sequence is synthesized)
cctagaaaaatttactacagaatgggataacttggccagatctgatgcagagagtacagctgtccacctggaagctttgaaaaagttagcattggcattgcaggagagaaagtatgctat

SEQ ID NO: 290033 - DNA, 120 bp, Artificial Sequence
  ENSG00000131018_112 (sequence is synthesized)
tgaagatctgaaagatcaaaagcagaaaatgatagagcatctgaatttagatgacaaggagttagtcaaagaacagacgagtcatttagagcaacgttggtttcagcttgaggacctcat

SEQ ID NO: 290034 - DNA, 120 bp, Artificial Sequence
  ENSG00000131018_113 (sequence is synthesized)
taaaaggaaaatccaagtgtcagtcaccaacttggaggagttaaatgtggtgcagtccagatttcaggagctaatggagtgggcagaagagcaacaacccaacatcgccgaggcccttaa

SEQ ID NO: 290035 - DNA, 120 bp, Artificial Sequence
  ENSG00000131018_114 (sequence is synthesized)
gcagagccctcctccagatatggctcagaaccttctcatggatcacctggccatctgcagtgaactggaggccaagcagatgctcctgaaatcgcttataaaggacgcagacagggtcat

SEQ ID NO: 290036 - DNA, 120 bp, Artificial Sequence
  ENSG00000131018_115 (sequence is synthesized)
aaacaaagccttgtccgagaaaacccagtttctcatggcagtgttccaggccaccagccaaattcagcaacatgagcgaaagataatgttccgtgaacacatctgtctgttaccagatga

SEQ ID NO: 290037 - DNA, 120 bp, Artificial Sequence
  ENSG00000131018_116 (sequence is synthesized)
tgtgagcaaacaagtcaaaacatgtaagagtgcacaagccagcctcaagacttaccaaaatgaagtcactggactttgggcccagggtcgcgaactaatgaaggaagtcacagagcagga

SEQ ID NO: 290038 - DNA, 120 bp, Artificial Sequence
  ENSG00000131018_117 (sequence is synthesized)
aaagagtgaagtgctggggaagcttcaggaattgcagagtgtctatgacagtgttttacaaaagtgcagtcaccggttacaagaactagagaagaatttggtttctaggaagcattttaa

SEQ ID NO: 290039 - DNA, 120 bp, Artificial Sequence
  ENSG00000131018_118 (sequence is synthesized)
ggaagattttgataaagcttgccactggctaaaacaagcagatattgttacatttcctgaaatcaacctaatgaatgagagttctgagcttcatacacaactggctaaataccaaaacat

SEQ ID NO: 290040 - DNA, 120 bp, Artificial Sequence
  ENSG00000131018_119 (sequence is synthesized)
tcttgaacaatctccagaatatgaaaatcttctacttacgctgcagagaactgggcagaccatattaccatcgctgaatgaagtcgatcattcctacctcagtgaaaagctaaatgcttt

SEQ ID NO: 290041 - DNA, 120 bp, Artificial Sequence
  ENSG00000131018_120 (sequence is synthesized)
gcctcgacaatttaatgtaattgttgccttggctaaagacaagttctataaagtccaggaagcaattcttgctcggaaggaatatgcttccttgattgagttgacaacccagtctctgag

SEQ ID NO: 290042 - DNA, 120 bp, Artificial Sequence
  ENSG00000131018_121 (sequence is synthesized)
tgaacttgaagcccaattcttgaggatgagcaaagttcccaccgacctggccgttgaggaggctctttctctgcaagatggttgcagagccattctggacgaggtggcgggccttgggga

SEQ ID NO: 290043 - DNA, 120 bp, Artificial Sequence
  ENSG00000131018_122 (sequence is synthesized)
ggcggtggatgaactgaaccagaaaaaagaaggttttcgcagcacaggtcagccttggcagccagacaagatgctgcaccttgtcaccttatatcacaggctgaagcgacaaacagaaca

SEQ ID NO: 290044 - DNA, 120 bp, Artificial Sequence
  ENSG00000131018_123 (sequence is synthesized)
gagggttagcttattagaagacaccaccagtgcttaccaagaacacgagaagatgtgccaacagctggagagacaactgaagtctgtaaaagaggagcagtccaaagtgaatgaggaaac

SEQ ID NO: 290045 - DNA, 120 bp, Artificial Sequence
  ENSG00000131018_124 (sequence is synthesized)
gctgcctgcagaggagaagctcaaaatgtatcactccctggcaggaagtctccaggactcagggattgtactgaaacgagtaaccatacatcttgaagatcttgccccacaccttgaccc

SEQ ID NO: 290046 - DNA, 120 bp, Artificial Sequence
  ENSG00000131018_125 (sequence is synthesized)
cttggcttatgagaaagccaggcatcagatccagtcctggcaaggggagttaaaactgttgacttctgccattggtgagacggtgacagaatgtgagagccgaatggtgcagagtataga

SEQ ID NO: 290047 - DNA, 120 bp, Artificial Sequence
  ENSG00000131018_126 (sequence is synthesized)
cttccagactgagatgagtcgctccctggactggctgaggagagtgaaggcagagctcagtgggccggtgtacctagacctcaacctgcaggacatccaagaggaaatcagaaaaatcca

SEQ ID NO: 290048 - DNA, 120 bp, Artificial Sequence
  ENSG00000131018_127 (sequence is synthesized)
aattcatcaggaagaggtccagtccagcttgagaatcatgaatgcgctgagtcacaaggaaaaggagaagttcacaaaggccaaggagctgatttctgcggatttagaacacagcctcgc

SEQ ID NO: 290049 - DNA, 120 bp, Artificial Sequence
  ENSG00000131018_128 (sequence is synthesized)
tgagctctcagagctggatggagacatccaggaagccttacgcaccagacaggctaccttgactgaaatatatagccagtgtcaaaggtattatcaggtatttcaagcagccaatgactg

SEQ ID NO: 290050 - DNA, 120 bp, Artificial Sequence
  ENSG00000131018_129 (sequence is synthesized)
gcttgaggatgcccaagaattgttacagctggcaggcaatggcctagacgtggagagcgcagaggaaaatctcaaaagccacatggaatttttcagtacagaggatcagttccatagtaa

SEQ ID NO: 290051 - DNA, 120 bp, Artificial Sequence
  ENSG00000131018_130 (sequence is synthesized)
cctggaggagctccacagcctggtagccaccctggacccactcatcaagccaaccggcaaagaagacctagaacagaaagtggcttctctggaactcaggagccagaggatgagccggga

SEQ ID NO: 290052 - DNA, 120 bp, Artificial Sequence
  ENSG00000131018_131 (sequence is synthesized)
ctctggtgcccaagtggatctcttgcagagatgcacagctcaatggcacgattaccagaaagcaagggaagaggttattgaattgatgaatgatacagaaaagaaattgtctgagttttc

SEQ ID NO: 290053 - DNA, 120 bp, Artificial Sequence
  ENSG00000131018_132 (sequence is synthesized)
tttgttgaagacttcgtctagtcatgaagcggaagaaaaattgtcagaacacaaggctttagtgtcagtggttaactctttccatgagaaaattgtggcccttgaggaaaaagcttcaca

SEQ ID NO: 290054 - DNA, 120 bp, Artificial Sequence
  ENSG00000131018_133 (sequence is synthesized)
actggagaaaaccggaaatgatgccagcaaagccaccctgagcaggtcaatgaccaccgtctggcagcgctggacacgccttcgagctgtggcccaggaccaggagaagatcctggaaga

SEQ ID NO: 290055 - DNA, 120 bp, Artificial Sequence
  ENSG00000131018_134 (sequence is synthesized)
tgcagtggatgagtggacgggctttaacaacaaggttaaaaaggccactgaaatgattgatcagctgcaagataagttacctggaagttcagcagagaaagcatcgaaagcagagctctt

SEQ ID NO: 290056 - DNA, 120 bp, Artificial Sequence
  ENSG00000131018_135 (sequence is synthesized)
aactcttcttgaataccacgacacgttcgttctggagctggagcagcagcagtcggccttgggcatgctgcggcagcaaaccctgagcatgctccaggatggagccgccccaacccctgg

SEQ ID NO: 290057 - DNA, 120 bp, Artificial Sequence
  ENSG00000131018_136 (sequence is synthesized)
ggaagagcctccgctcatgcaggaaatcaccgccatgcaagatcggtgcctgaacatgcaggagaaagtgaagactaatggaaagttggtgaagcaagagctgaaggaccgagaaatggt

SEQ ID NO: 290058 - DNA, 120 bp, Artificial Sequence
  ENSG00000131018_137 (sequence is synthesized)
ggagactcagatcaattctgtgaaatgttgggttcaggaaacgaaagaatatttagggaatccaacaatagaaatagatgctcaacttgaagaacttcagattctcctaacagaagccac

SEQ ID NO: 290059 - DNA, 120 bp, Artificial Sequence
  ENSG00000131018_138 (sequence is synthesized)
aaatcaccgacagaacattgaaaaaatggcagaagaacagaaggagaagtacttaggtctttataccatattaccttctgaactctcccttcagttggctgaagtggcgttagatctaaa

SEQ ID NO: 290060 - DNA, 120 bp, Artificial Sequence
  ENSG00000131018_139 (sequence is synthesized)
gatccgagatcagatccaagacaaaataaaagaagttgagcagagcaaggccacgagccaggaactcagccggcaaattcagaagttagctaaagacctcacaactattctaactaagct

SEQ ID NO: 290061 - DNA, 120 bp, Artificial Sequence
  ENSG00000131018_140 (sequence is synthesized)
gaaagcgaagacagataatgtagttcaagctaaaactgaccaaaaggtgctgggagaggaattagatggctgtaattcaaagttaatggaattagatgcagcagtacagaaattcttgga

SEQ ID NO: 290062 - DNA, 120 bp, Artificial Sequence
  ENSG00000131018_141 (sequence is synthesized)
acagaatggccaactgggtaagccactggccaagaagataggaaaactgactgaacttcaccagcagaccattagacaagctgagaatcggctctccaagctcaatcaggcagcatcaca

SEQ ID NO: 290063 - DNA, 120 bp, Artificial Sequence
  ENSG00000131018_142 (sequence is synthesized)
tttagaagaatacaatgaaatgcttgaattaattttgaagtggattgaaaaagctaaagtcttggctcatggaactattgcatggaattctgcaagccagcttcgggaacaatatatttt

SEQ ID NO: 290064 - DNA, 120 bp, Artificial Sequence
  ENSG00000131018_143 (sequence is synthesized)
gcatcagaccctgctagaagaatccaaagaaattgacagtgagctggaagcaatgactgagaaattacagtacctcactagcgtgtactgtacagaaaaaatgtctcagcaagtggcaga

SEQ ID NO: 290065 - DNA, 120 bp, Artificial Sequence
  ENSG00000131018_144 (sequence is synthesized)
actgggacgggagactgaggagttgcgacagatgatcaaaattcgtttgcagaacctccaagatgcagctaaggatatgaaaaaatttgaagcagagttgaaaaagttacaagctgcctt

SEQ ID NO: 290066 - DNA, 120 bp, Artificial Sequence
  ENSG00000131018_145 (sequence is synthesized)
ggagcaagcccaggcaacactgacttctccagaagttggacgtctcagtctcaaggagcagctctctcatcggcagcatttgttgtctgagatggagtcactgaagccgaaggtgcaagc

SEQ ID NO: 290067 - DNA, 120 bp, Artificial Sequence
  ENSG00000131018_146 (sequence is synthesized)
agtgcagctctgccagagtgccctccggatccccgaggatgtggttgccagcttacctctctgtcatgctgctctgcggctgcaggaagaggccagccggctgcagcacaccgccatcca

SEQ ID NO: 290068 - DNA, 120 bp, Artificial Sequence
  ENSG00000131018_147 (sequence is synthesized)
gcagtgtaacatcatgcaggaagctgtggtacaatatgaacaatatgagcaagaaatgaaacatctccagcaactgatagaaggagctcacagagagattgaggataaacctgttgccac

SEQ ID NO: 290069 - DNA, 120 bp, Artificial Sequence
  ENSG00000131018_148 (sequence is synthesized)
cagtaacatacaggagctgcaggctcagatttctcggcatgaggagctggcgcagaaaattaagggctaccaggagcagatcgcttctttgaattccaagtgcaagatgctgacgatgaa

SEQ ID NO: 290070 - DNA, 120 bp, Artificial Sequence
  ENSG00000131018_149 (sequence is synthesized)
agccaagcacgccaccatgctgctgacggtgaccgaggtcgaggggctggcggaagggacagaggacctggatggggagctcctccccacgccttcggcccacccctctgtggtcatgat

SEQ ID NO: 290071 - DNA, 120 bp, Artificial Sequence
  ENSG00000131018_150 (sequence is synthesized)
gactgcaggtcgctgtcacactttgctgtcaccggtcactgaggagtctggggaggagggaaccaacagtgagatttcctctccacctgcctgtcgctccccttcacctgtggctaatac

SEQ ID NO: 290072 - DNA, 120 bp, Artificial Sequence
  ENSG00000131018_151 (sequence is synthesized)
agatgcttctgttaaccaggacattgcatattaccaagccttgtctgctgagaggttgcagacagatgctgcaaaaattcaccccagcacatccgcatcccaggagttctatgaaccggg

SEQ ID NO: 290073 - DNA, 120 bp, Artificial Sequence
  ENSG00000131018_152 (sequence is synthesized)
attggagccatccgctactgccaaactgggtgatttgcagcgttcttgggaaaccttaaagaatgtgatcagtgagaagcagcgcacactctatgaagctttggaacgccagcagaagta

SEQ ID NO: 290074 - DNA, 120 bp, Artificial Sequence
  ENSG00000131018_153 (sequence is synthesized)
ccaggactccctccagtccatctctacgaagatggaggccattgagctgaaactcagtgagagcccagagcctggcaggagtccagaaagccagatggctgaacatcaggcattgatgga

SEQ ID NO: 290075 - DNA, 120 bp, Artificial Sequence
  ENSG00000131018_154 (sequence is synthesized)
tgagattctcatgctccaggatgaaatcaatgagctccagtcctctctcgcagaggagctggtatccgagtcttgtgaggccgaccctgcggagcagctggccttgcagtccacgctcac

SEQ ID NO: 290076 - DNA, 120 bp, Artificial Sequence
  ENSG00000131018_155 (sequence is synthesized)
tgtcttagccgagcgaatgtccaccatcaggatgaaagcctcggggaaacggcagcttttggaggagaagttgaatgatcagctggaggaacaaaggcaggaacaggccctgcagaggta

SEQ ID NO: 290077 - DNA, 120 bp, Artificial Sequence
  ENSG00000131018_156 (sequence is synthesized)
tcgctgtgaagccgatgagctggacagctggctcttgagtaccaaggccactctggacactgcgctgagtccacccaaggagcccatggacatggaggcccagcttatggactgccagaa

SEQ ID NO: 290078 - DNA, 120 bp, Artificial Sequence
  ENSG00000131018_157 (sequence is synthesized)
tatgctggtggaaatagagcagaaggtggtggctttatcagaactgtcagtccacaatgagaacctgctgctggagggcaaagctcacaccaaggacgaggccgagcagctggctggaaa

SEQ ID NO: 290079 - DNA, 120 bp, Artificial Sequence
  ENSG00000131018_158 (sequence is synthesized)
gctgagaaggctcaaggggagcctgctggagctgcagagagccctgcatgataagcagctcaacatgcagggaacagcacaggagaaggaggagagcgatgttgacctaacagccacgca

SEQ ID NO: 290080 - DNA, 120 bp, Artificial Sequence
  ENSG00000131018_159 (sequence is synthesized)
gagccccggcgtccaggaatggctggcccaagctcgcaccacatggacccagcagcggcagagcagtctccagcaacaaaaagagttagaacaggaattagccgagcagaagagtctcct

SEQ ID NO: 290081 - DNA, 120 bp, Artificial Sequence
  ENSG00000131018_160 (sequence is synthesized)
tcgctcagtagccagtcgtggagaggagattctaattcaacattcggcggcagagacctctggtgatgctggcgaaaaacctgatgtgttatcccaggagttggggatggaaggggagaa

SEQ ID NO: 290082 - DNA, 120 bp, Artificial Sequence
  ENSG00000131018_161 (sequence is synthesized)
atcatccgctgaagaccagatgagaatgaaatgggaaagcctacatcaagaatttagtaccaagcagaaactactacagaatgttctggaacaggaacaagagcaagtgctttatagcag

SEQ ID NO: 290083 - DNA, 120 bp, Artificial Sequence
  ENSG00000131018_162 (sequence is synthesized)
gccaaatcgactcttgtctggtgtgccactgtacaaaggggacgtgccaacccaagataaatctgcagttacatctttgctggatggactgaaccaagccttcgaggaggtttcatccca

SEQ ID NO: 290084 - DNA, 120 bp, Artificial Sequence
  ENSG00000131018_163 (sequence is synthesized)
gagtggaggggcaaagaggcagagtatacacttggagcagaagttgtatgatggagtctcagccacctctacttggttggatgacgttgaagaacgtttatttgttgccacagcactttt

SEQ ID NO: 290085 - DNA, 120 bp, Artificial Sequence
  ENSG00000131018_164 (sequence is synthesized)
accagaagaaacagagacttgtctcttcaaccaagagattcttgccaaagacattaaggaaatgtctgaagaaatggataagaacaaaaacttgttttcccaagcttttccagagaatgg

SEQ ID NO: 290086 - DNA, 120 bp, Artificial Sequence
  ENSG00000131018_165 (sequence is synthesized)
tgataatcgagatgttattgaagatactttgggttgtcttttgggcaggttatccttgctagactcagtagtgaatcaacgatgtcatcagatgaaagaaagacttcagcaaatactaaa

SEQ ID NO: 290087 - DNA, 120 bp, Artificial Sequence
  ENSG00000131018_166 (sequence is synthesized)
tttccagaatgatctgaaagtgctgtttacatcactggctgacaacaaatacatcattctgcaaaaactggcaaatgtgtttgaacagcccgtagcagaacaaatagaggcaatacaaca

SEQ ID NO: 290088 - DNA, 120 bp, Artificial Sequence
  ENSG00000131018_167 (sequence is synthesized)
ggctgaagatggactcaaagaatttgatgcaggaatcattgaattaaagaggcgtggtgacaagctacaggtcgagcagccgtccatgcaagaactctccaagctccaggacatgtatga

SEQ ID NO: 290089 - DNA, 120 bp, Artificial Sequence
  ENSG00000131018_168 (sequence is synthesized)
tgagctgatgatgatcattggctcccggaggagtggtctgaatcagaaccttacactcaagagtcagtatgagagggccctacaagatctggctgacctgctagaaactggtcaggagaa

SEQ ID NO: 290090 - DNA, 120 bp, Artificial Sequence
  ENSG00000131018_169 (sequence is synthesized)
gatggcaggagaccagaaaatcatcgtgtcttccaaagaggaaatccagcaactacttgacaaacataaggaatactttcagggcctggaatctcatatgatcttgactgaaacactctt

SEQ ID NO: 290091 - DNA, 120 bp, Artificial Sequence
  ENSG00000131018_170 (sequence is synthesized)
cagaaagataatcagctttgcagtccaaaaggaaacccagttccatacagagctgatggctcaggcttctgctgtactgaaacgggctcacaagaggggtgtggagctggagtacattct

SEQ ID NO: 290092 - DNA, 120 bp, Artificial Sequence
  ENSG00000131018_171 (sequence is synthesized)
agagacgtggtcccatctggatgaggaccagcaggagctcagcagacagctggaggtggtggaaagcagcatcccaagcgtgggtctggtggaggagaacgaggacaggcttattgaccg

SEQ ID NO: 290093 - DNA, 120 bp, Artificial Sequence
  ENSG00000131018_172 (sequence is synthesized)
cataacactctaccagcatttaaaatctagccttaatgaataccagcccaaattatatcaagtattagatgatgggaaacgacttctgatatccatcagctgctcagatctagaaagcca

SEQ ID NO: 290094 - DNA, 120 bp, Artificial Sequence
  ENSG00000131018_173 (sequence is synthesized)
actaaatcaacttggagagtgctggctaagtaacaccaataaaatgtctaaggaacttcacagactggaaacaatattgaaacactggaccagatatcaaagtgaatctgcagatctaat

SEQ ID NO: 290095 - DNA, 120 bp, Artificial Sequence
  ENSG00000131018_174 (sequence is synthesized)
tcactggttacaatctgcaaaagaccggctagaattttggactcagcaatctgtgacagtcccacaagagctggaaatggtccgtgatcatctaaatgctttcctggagttttctaaaga

SEQ ID NO: 290096 - DNA, 120 bp, Artificial Sequence
  ENSG00000131018_175 (sequence is synthesized)
agtggatgcccaatcttccctgaaatcatctgttctgagtactggaaatcagctccttcgactaaaaaaggtggacacagccacgctgcgctctgagctgtcgcgcattgatagccagtg

SEQ ID NO: 290097 - DNA, 120 bp, Artificial Sequence
  ENSG00000131018_176 (sequence is synthesized)
gactgacctgctaaccaatatcccagccgtccaggagaagctccaccagctccagatggataaactgccttcccgccatgccatttctgaagtcatgagttggatttctctaatggaaaa

SEQ ID NO: 290098 - DNA, 120 bp, Artificial Sequence
  ENSG00000131018_177 (sequence is synthesized)
tgttattcagaaggatgaagataatattaaaaattccataggttacaaggcaattcatgaataccttcagaaatataagggttttaagatagacattaactgtaaacagctgacagtgga

SEQ ID NO: 290099 - DNA, 120 bp, Artificial Sequence
  ENSG00000131018_178 (sequence is synthesized)
ttttgtgaaccagtccgtgctacaaatcagcagtcaggatgtggaaagtaagcgtagtgataagactgattttgctgagcaacttggagcaatgaataaaagttggcaaattctgcaagg

SEQ ID NO: 290100 - DNA, 120 bp, Artificial Sequence
  ENSG00000131018_179 (sequence is synthesized)
tctagtaactgagaagatccagctgttggaaggcttattggaatcttggtcagaatatgaaaataatgtacaatgtctgaaaacatggtttgaaacccaggaaaagagactaaaacaaca

SEQ ID NO: 290101 - DNA, 120 bp, Artificial Sequence
  ENSG00000131018_180 (sequence is synthesized)
gcatcgaattggagatcaggcttctgttcaaaatgcactgaaagactgtcaggatctggaagatttgattaaagcaaaagaaaaagaagtagagaaaattgagcagaatggacttgcttt

SEQ ID NO: 290102 - DNA, 120 bp, Artificial Sequence
  ENSG00000131018_181 (sequence is synthesized)
gattcagaacaagaaagaagacgtctctagcattgtcatgagcacactgcgagagctcggccaaacctgggcaaatttagatcacatggttggacaattaaagatactgctgaaatcagt

SEQ ID NO: 290103 - DNA, 120 bp, Artificial Sequence
  ENSG00000131018_182 (sequence is synthesized)
gcttgaccaatggagtagtcacaaagtggcctttgacaagataaacagttacctcatggaggccagatactctctttcccgattccgtctgctgactggctccttagaagctgtgcaagt

SEQ ID NO: 290104 - DNA, 120 bp, Artificial Sequence
  ENSG00000131018_183 (sequence is synthesized)
tcaggtggacaatcttcagaatctccaagatgatctggaaaaacaggaaaggagcttacagaaatttggctctatcaccaaccaattattaaaagagtgtcacccacccgtgacagaaac

SEQ ID NO: 290105 - DNA, 120 bp, Artificial Sequence
  ENSG00000131018_184 (sequence is synthesized)
tcttaccaatacactgaaagaagtcaacatgagatggaataacttgctggaagagattgctgagcagctacagtccagcaaggccctacttcagctttggcaaagatacaaggactactc

SEQ ID NO: 290106 - DNA, 120 bp, Artificial Sequence
  ENSG00000131018_185 (sequence is synthesized)
caaacagtgtgcttcgacagttcagcagcaggaggatcgaaccaatgagctgttgaaggcagccacaaacaaggacattgccgatgatgaggttgccacatggattcaagattgcaacga

SEQ ID NO: 290107 - DNA, 120 bp, Artificial Sequence
  ENSG00000131018_186 (sequence is synthesized)
cctcctcaaaggactgggcacagttaaagattccctcttttttctccatgagctgggagagcaactgaagcaacaagtggatgcttccgcagcatcagctattcaatcggatcaactctc

SEQ ID NO: 290108 - DNA, 120 bp, Artificial Sequence
  ENSG00000131018_187 (sequence is synthesized)
tttgagtcaacacttgtgtgccctggagcaagctctctgcaaacagcagacttcattacaggctggagttcttgattatgaaacctttgccaagagtttagaagctttggaggcctggat

SEQ ID NO: 290109 - DNA, 120 bp, Artificial Sequence
  ENSG00000131018_188 (sequence is synthesized)
agtggaagctgaagaaatactacaagggcaggaccctagccactcatctgacctctccacaatccaggaaaggatggaagaacttaagggacagatgttaaaattcagcagcatggctcc

SEQ ID NO: 290110 - DNA, 120 bp, Artificial Sequence
  ENSG00000131018_189 (sequence is synthesized)
agatttagaccgtctaaatgagcttggatataggttacccttgaatgataaggaaatcaaaagaatgcagaatctgaaccgccattggtctctgatctcctctcagactacagaaagatt

SEQ ID NO: 290111 - DNA, 120 bp, Artificial Sequence
  ENSG00000131018_190 (sequence is synthesized)
cagcaagttgcagtcatttttgctacaacatcagactttcttggaaaaatgtgaaacatggatggaattcctagttcagacagaacaaaagttagcagtagagatttcaggaaattatca

SEQ ID NO: 290112 - DNA, 120 bp, Artificial Sequence
  ENSG00000131018_191 (sequence is synthesized)
gcaccttttggaacagcagagagcacacgagttgtttcaagccgagatgttcagtcgtcagcagattttgcactcaatcattattgatgggcaacgtcttctagaacaaggtcaagttga

SEQ ID NO: 290113 - DNA, 120 bp, Artificial Sequence
  ENSG00000131018_192 (sequence is synthesized)
tgacagggatgaattcaacctgaaattgacactcctcagtaatcaatggcagggagtgattcgcagggcccagcagaggcgggggatcattgacagccagattcgccagtggcagcgcta

SEQ ID NO: 290114 - DNA, 120 bp, Artificial Sequence
  ENSG00000131018_193 (sequence is synthesized)
tagggagatggcagaaaagcttcgtaaatggttggttgaagtgtcctacctccccatgagtggtctcggaagtgttcctataccactgcaacaagcaaggaccctctttgatgaagtgca

SEQ ID NO: 290115 - DNA, 120 bp, Artificial Sequence
  ENSG00000131018_194 (sequence is synthesized)
gttcaaagaaaaagtgtttctgcggcaacaaggcagctacatcctgactgtggaggctggcaagcaactccttctctcggcggacagtggcgctgaggccgccttgcaggccgaactcgc

SEQ ID NO: 290116 - DNA, 120 bp, Artificial Sequence
  ENSG00000131018_195 (sequence is synthesized)
tgaaatccaagagaaatggaaatcagccagcatgcggctggaagaacagaagaaaaaactagccttcttgttgaaagactgggaaaaatgtgagaaaggaatagcagattccctggagaa

SEQ ID NO: 290117 - DNA, 120 bp, Artificial Sequence
  ENSG00000131018_196 (sequence is synthesized)
actacgaactttcaaaaagaagctttcgcagtctctcccggatcaccatgaagagctccatgcagaacaaatgcgttgcaaggaattagaaaatgcagttgggagctggacagatgactt

SEQ ID NO: 290118 - DNA, 120 bp, Artificial Sequence
  ENSG00000131018_197 (sequence is synthesized)
gacccagttgagcctgctgaaggacaccctctctgcctatatcagtgctgatgatatctccattcttaatgaacgcgtagagcttctgcaaaggcagtgggaagaactatgccaccagct

SEQ ID NO: 290119 - DNA, 120 bp, Artificial Sequence
  ENSG00000131018_198 (sequence is synthesized)
ctccttaaggcggcagcaaataggtgaaagattgaatgaatgggcagtcttcagtgaaaagaacaaggaactctgtgagtggttgactcaaatggaaagcaaagtttctcagaatggaga

SEQ ID NO: 290120 - DNA, 120 bp, Artificial Sequence
  ENSG00000131018_199 (sequence is synthesized)
cattctcattgaagaaatgatagagaagctcaagaaggattatcaagaggaaattgctattgctcaagagaacaaaatacagctccaacaaatgggagaacgacttgctaaagccagcca

SEQ ID NO: 290121 - DNA, 120 bp, Artificial Sequence
  ENSG00000131018_200 (sequence is synthesized)
tgaaagcaaagcatctgagattgaatacaagctgggaaaggtcaacgaccggtggcagcatctcctggacctcattgcagccagggtgaagaagctgaaggagaccctggtagccgtgca

SEQ ID NO: 290122 - DNA, 120 bp, Artificial Sequence
  ENSG00000131018_201 (sequence is synthesized)
gcagcttgataagaacatgagcagcctgaggacctggctcgctcacatcgagtcagagctggccaagccaatagtctacgattcctgtaactcggaagaaatacagagaaagcttaatga

SEQ ID NO: 290123 - DNA, 120 bp, Artificial Sequence
  ENSG00000131018_202 (sequence is synthesized)
gcagcaggagcttcagagagacatagagaagcacagtacaggtgttgcatctgtcctcaacctgtgtgaagtcctgctgcacgactgtgacgcctgtgccactgatgccgagtgtgactc

SEQ ID NO: 290124 - DNA, 120 bp, Artificial Sequence
  ENSG00000131018_203 (sequence is synthesized)
tatacagcaggctacgagaaacctggaccggcggtggagaaacatttgtgctatgtccatggaaaggaggctgaaaatcgaagagacgtggcgattgtggcagaaatttctggatgacta

SEQ ID NO: 290125 - DNA, 120 bp, Artificial Sequence
  ENSG00000131018_204 (sequence is synthesized)
ttcacgttttgaagattggctgaagtcttcagaaaggacagctgcttttcccagctcttctggggtgatctatacagttgccaaggaagaactaaagaaatttgaggctttccagcgaca

SEQ ID NO: 290126 - DNA, 120 bp, Artificial Sequence
  ENSG00000131018_205 (sequence is synthesized)
ggtccacgagtgcctgacgcagctggaactgatcaacaagcagtaccgccgcctggccagggagaaccgcactgattcagcatgtagcctcaaacagatggttcacgaaggcaaccagag

SEQ ID NO: 290127 - DNA, 120 bp, Artificial Sequence
  ENSG00000131018_206 (sequence is synthesized)
atgggacaacctgcaaaagcgtgtcacctccatcttgcgcagactcaagcattttattggccagcgtgaggagtttgagactgcgcgggacagcattctggtctggctcacagagatgga

SEQ ID NO: 290128 - DNA, 120 bp, Artificial Sequence
  ENSG00000131018_207 (sequence is synthesized)
tctgcagctcactaatattgaacatttttctgagtgtgatgttcaagctaaaataaagcaactcaaggccttccagcaggaaatttcactgaaccacaataagattgagcagataattgc

SEQ ID NO: 290129 - DNA, 120 bp, Artificial Sequence
  ENSG00000131018_208 (sequence is synthesized)
ccaaggagaacagctgatagaaaagagtgagcccttggatgcagcgatcatcgaggaggaactagatgagctccgacggtactgccaggaggtcttcgggcgtgtggaaagataccataa

SEQ ID NO: 290130 - DNA, 120 bp, Artificial Sequence
  ENSG00000131018_209 (sequence is synthesized)
gaaactgatccgcctgcctctcccagacgatgagcacgacctctcagacagggagctggagctggaagactctgcagctctgtcggacctgcactggcacgaccgctctgcagacagcct

SEQ ID NO: 290131 - DNA, 120 bp, Artificial Sequence
  ENSG00000131018_210 (sequence is synthesized)
gctttctccacagccttcctccaatctctccctctcgctcgctcagcccctccggagcgagcggtcaggacgagacaccccggctagtgtggactccatccccctggagtgggatcacga

SEQ ID NO: 290132 - DNA, 120 bp, Artificial Sequence
  ENSG00000131018_211 (sequence is synthesized)
ctatgacctcagtcgggacctggagtctgcaatgtccagagctctgccctctgaggatgaagaaggtcaggatgacaaagatttctacctccggggagctgttggcttatcaggggacca

SEQ ID NO: 290133 - DNA, 120 bp, Artificial Sequence
  ENSG00000131018_212 (sequence is synthesized)
cagtgccctagagtcacagatccgacaactgggcaaagccctggatgatagccgttttcagatacagcaaaccgaaaatatcattcgcagcaaaactcccacggggccggagctagacac

SEQ ID NO: 290134 - DNA, 120 bp, Artificial Sequence
  ENSG00000131018_213 (sequence is synthesized)
cagctacaaaggctacatgaaactgctgggcgaatgcagtagcagtatagactccgtgaagagactggagcacaaactgaaggaggaagaggagagccttcctggctttgttaacctgca

SEQ ID NO: 290135 - DNA, 120 bp, Artificial Sequence
  ENSG00000131018_214 (sequence is synthesized)
tagtaccgaaacccaaacggctggtgtgattgaccgatgggagcttctccaggcccaggcattgagcaaggagttgaggatgaagcagaacctccagaagtggcagcagtttaactcaga

SEQ ID NO: 290136 - DNA, 120 bp, Artificial Sequence
  ENSG00000131018_215 (sequence is synthesized)
cttgaacagcatctgggcctggctgggggacacggaggaggagttggaacagctccagcgtctggaactcagcactgacatccagaccatcgagctccagatcaaaaagctcaaggagct

SEQ ID NO: 290137 - DNA, 120 bp, Artificial Sequence
  ENSG00000131018_216 (sequence is synthesized)
ccagaaagctgtggaccaccgcaaagccatcatcctctccatcaatctctgcagccctgagttcacccaggctgacagcaaggagagccgggacctgcaggatcgcttgtcgcagatgaa

SEQ ID NO: 290138 - DNA, 120 bp, Artificial Sequence
  ENSG00000131018_217 (sequence is synthesized)
tgggcgctgggaccgagtgtgctctctgctggaggagtggcggggcctgctgcaggatgccctgatgcagtgccagggtttccatgaaatgagccatggtttgcttcttatgctggagaa

SEQ ID NO: 290139 - DNA, 120 bp, Artificial Sequence
  ENSG00000131018_218 (sequence is synthesized)
cattgacagaaggaaaaatgaaattgtccctattgattctaaccttgatgcagagatacttcaggaccatcacaaacagcttatgcaaataaagcatgagctgttggaatcccaactcag

SEQ ID NO: 290140 - DNA, 120 bp, Artificial Sequence
  ENSG00000131018_219 (sequence is synthesized)
agtagcctctttgcaagacatgtcttgccaactactggtgaatgctgaaggaacagactgtttagaagccaaagaaaaagtccatgttattggaaatcggctcaaacttctcttgaagga

SEQ ID NO: 290141 - DNA, 120 bp, Artificial Sequence
  ENSG00000131018_220 (sequence is synthesized)
ggtcagtcgtcatatcaaggaactggagaagttattagacgtgtcaagtagtcagcaggatttgtcttcctggtcttctgctgatgaactggacacctcagggtctgtgagtcccacatc

SEQ ID NO: 290142 - DNA, 120 bp, Artificial Sequence
  ENSG00000131018_221 (sequence is synthesized)
aggaaggagcaccccaaacagacagaaaacgccacgaggcaagtgtagtctctcacagcctggaccctctgtcagcagtccacatagcaggtccacaaaaggtggctccgattcctccct

SEQ ID NO: 290143 - DNA, 120 bp, Artificial Sequence
  ENSG00000131018_222 (sequence is synthesized)
ttctgagccagggccaggtcggtccggccgcggcttcctgttcagagtcctccgagcagctcttccccttcagcttctcctgctcctcctcatcgggcttgcctgccttgtaccaatgtc

SEQ ID NO: 290144 - DNA, 120 bp, Artificial Sequence
  ENSG00000131018_223 (sequence is synthesized)
agaggaagactacagctgtgccctctccaacaactttgcccggtcattccaccccatgctcagatacacgaatggccctcctccactctgaactaagcagatgccatctgcagaagtgct

SEQ ID NO: 290145 - DNA, 120 bp, Artificial Sequence
  ENSG00000131018_224 (sequence is synthesized)
ggtagcataaggaggatcgggtcataagcaatcccaaactaccaacaagaggaccttgatcttggcgaaagccctcggtgtggcagctttagccctcctccagatcacatgtgtgcaaat

SEQ ID NO: 290146 - DNA, 120 bp, Artificial Sequence
  ENSG00000131018_225 (sequence is synthesized)
tatggcttcagaggtggaagataaacagtgacgggggaacaaacagacaacaagaaggtttggaagaaatctggtttgagactctgaaccttagcactaaggagattgagtaaggacctc

SEQ ID NO: 290147 - DNA, 120 bp, Artificial Sequence
  ENSG00000131018_226 (sequence is synthesized)
caaagttccccggactcatgaattctgggcccttggcccattctgtgcacagccaaggacttcagtagaccatctgggcagctttcccatggtgctgctccaaccatcagataaatgacc

SEQ ID NO: 290148 - DNA, 120 bp, Artificial Sequence
  ENSG00000131018_227 (sequence is synthesized)
ctcccaagcaccatgtcagtgtcgtacaatctaccaaccaaccagtgctgaagagattttagaaccttgtaacatacaatttttaagagcttatatggcagcttcctttttaccttgttt

SEQ ID NO: 290149 - DNA, 120 bp, Artificial Sequence
  ENSG00000131018_228 (sequence is synthesized)
tcctttggggcatgatgttttaacctttgctttagaagcacaagctgtaaatctaaaaggcacttttttttagaggtataaagaaaaactagatgtaataaataagatcatggaaggctt

SEQ ID NO: 290150 - DNA, 120 bp, Artificial Sequence
  ENSG00000131018_229 (sequence is synthesized)
gctttatgtgaaaaaagttgaatgttatagtaaaaaaaaaaagatatttatgtatgtacagtttgctaaagccaagttttgtttgtattgatttctttgcatttattatagatattataa

SEQ ID NO: 290151 - DNA, 120 bp, Artificial Sequence
  ENSG00000131018_230 (sequence is synthesized)
gtgggcgagccagccagggtgagcgcgggcgccgggccgcggccgccggccgcagcgggctgagattgttgtcctctgtcaccagggcggctgggctcccgcagtcctgcagaccgcgcc

SEQ ID NO: 290152 - DNA, 120 bp, Artificial Sequence
  ENSG00000131018_231 (sequence is synthesized)
caggacgctcaagctcgaggtgtgcatctttacacagaaatatctccaacctacagaatttgtttttctcaaaatttcccgtctccatccacctggggtgatgatgtcacattctctcca

SEQ ID NO: 290153 - DNA, 120 bp, Artificial Sequence
  ENSG00000131018_232 (sequence is synthesized)
tgataaatctcagatgctttgtgagtgcaacgctgtctgccttgggtgcacatgccagagaattcctgaatcatctgaccccggatgttttccaaaaaataaaataaaataaagcccgaa

SEQ ID NO: 290154 - DNA, 120 bp, Artificial Sequence
  ENSG00000131018_233 (sequence is synthesized)
tacttcaggaccatcacaaacagcttatggtaagatgtgtgaactctggcagcctccagttatttttagcagggttgcatttcatttacagaaaatgaatataagtgcaaataaagcatg

SEQ ID NO: 290155 - DNA, 120 bp, Artificial Sequence
  ENSG00000131018_234 (sequence is synthesized)
tgttctcacgagggggcagcttgggcttgaccgagcaggagcttcatggtcccacacgtagtatgacatgtgacctctgcacattgtttacagttcctaaactgtgatttctttttctgt

SEQ ID NO: 290156 - DNA, 120 bp, Artificial Sequence
  ENSG00000131018_235 (sequence is synthesized)
gaaatagttataatagtaagtggctaccaagtagaaagtggtcatggggggtgaaggttaaacacaataacggacacacagaacttacacagggcattttatgccaagctatattgaata

SEQ ID NO: 290157 - DNA, 120 bp, Artificial Sequence
  ENSG00000131018_236 (sequence is synthesized)
agtgataatatcaggagaatgctgctaggagagttggaagttcccttggtgaaagctgtgtttggtttagatacgactgaattaggataatttaccaaaatcagtaaaataggtgagata

SEQ ID NO: 290158 - DNA, 120 bp, Artificial Sequence
  ENSG00000131018_237 (sequence is synthesized)
ttgacaagtcctaaactttcttctctgagataaagtttcatacaatctttcctgtaccttgtattcaaaacactcttttaaaatctcaaagtgtctgtgtatttcagcatgttttgagga

SEQ ID NO: 290159 - DNA, 120 bp, Artificial Sequence
  ENSG00000131018_238 (sequence is synthesized)
aacaactcacagttcaaaagaaagtatcgctaatacagaaaccaatatctataacagagcccaaaaaatataaaggatgtgggttttgcatcttaaactgatcatgttcatgagaaagcc

SEQ ID NO: 290160 - DNA, 120 bp, Artificial Sequence
  ENSG00000131018_239 (sequence is synthesized)
atatctattctattctgtggcctttgtacattgtagagggaatcttgaaaaagaactaatatttaaaataatttttttactatattattctgctgtcaccatttagagcgaaaaggagat

SEQ ID NO: 290161 - DNA, 120 bp, Artificial Sequence
  ENSG00000131018_240 (sequence is synthesized)
attttgttagtgtagattccaggcctaaatacacatcacatagaccatatatctccaacctgaagaagctcctggagcttgtttacagtgcctcggtattcaagttatcctgactaatat

SEQ ID NO: 290162 - DNA, 120 bp, Artificial Sequence
  ENSG00000131018_241 (sequence is synthesized)
gctctttccagaaattaactttaaaatattttatttttaaacttttaatgtttgtttatctgaaaaaaaaaaactgcttggcctattgatatcctgttatatacccaaaatatacaaaaa

SEQ ID NO: 290163 - DNA, 120 bp, Artificial Sequence
  ENSG00000131018_242 (sequence is synthesized)
agtttggaggggaaaaacatatgaggatacagccaatattattcaaaacaatatggctaaacatttctatttttaacataatttagtggcaaatcaatgatacataatagcatattatta

SEQ ID NO: 290164 - DNA, 120 bp, Artificial Sequence
  ENSG00000131018_243 (sequence is synthesized)
ttaagggacaggccatcatttctaaggtgggttttaaaatgtaaaatgtgtttttaatactattaacagcttaaaattaacattttacatttgcctaaactttaaaatttgatacatatt

SEQ ID NO: 290165 - DNA, 120 bp, Artificial Sequence
  ENSG00000131018_244 (sequence is synthesized)
aacaaattatgacttgaaattttgaggactttatattacattaaatattctctatcaagttatggaaatagtaaaacagagtttattagaaaggaatttacttctattaagaatagccat

SEQ ID NO: 290166 - DNA, 120 bp, Artificial Sequence
  ENSG00000131018_245 (sequence is synthesized)
atagccattttaacctttatttaatttaaaaagttgcaatataacacagcttgcattacctgtactgctgacagcattaggcacattcagggtataaatttgagactgcaatattattta

SEQ ID NO: 290167 - DNA, 120 bp, Artificial Sequence
  ENSG00000131018_246 (sequence is synthesized)
atttgacagtcaatgatgccactctatttttcttgatgtcttcaagtgccttttggtaaacagggacattctttcactttttttttttttaacccaaggacttactagttcaattatata

SEQ ID NO: 290168 - DNA, 120 bp, Artificial Sequence
  ENSG00000131018_247 (sequence is synthesized)
ctgttagtttcttagtctttttctaaactgaaagccatagtcacctggttatacatgcatagctaatacaaattagaaatctatagttgaaattctgttcactagatttgttacaaataa

SEQ ID NO: 290169 - DNA, 120 bp, Artificial Sequence
  ENSG00000131018_248 (sequence is synthesized)
aacctataagttgtctaaaagtagttagggtgctcatgtacaataatttataaatgtcttttggaatcaggaccataagacatttatgaaaatggctgaagtcacaaagattatacatcg

SEQ ID NO: 290170 - DNA, 120 bp, Artificial Sequence
  ENSG00000131018_249 (sequence is synthesized)
caggattagctctaataatagaaacagttcttgcccggcagcatgggattgagatcacgagctctgtcttgattgataagatgcagtttataaaggtatttctatagaaagcatcactgc

SEQ ID NO: 290171 - DNA, 120 bp, Artificial Sequence
  ENSG00000131018_250 (sequence is synthesized)
agtgtctctcctttaagtgtaagaagaacatttctttggaaataggactattgaaaagctgtgtacactgaaatcttttctggcatagtttataaaaataagtcctggcaacaactggtc

SEQ ID NO: 290172 - DNA, 120 bp, Artificial Sequence
  ENSG00000131018_251 (sequence is synthesized)
acatgcagagtttaattagattctacctggattcaaacccctttggacccagcaatgttttgttcaaagtgcagtttcactcaaagtgtagatactgcctcattaaatgttcattctcag

SEQ ID NO: 290173 - DNA, 120 bp, Artificial Sequence
  ENSG00000131018_252 (sequence is synthesized)
agaagataggaaaacctgataaactactcagaacaactgtgcaattttttttttagcgtgaatagtttcaactttgaaatggtcacaaatgtcttcattatctcttcacctggtgatttc

SEQ ID NO: 290174 - DNA, 120 bp, Artificial Sequence
  ENSG00000131018_253 (sequence is synthesized)
ttataatccatgtctagcttttaagaactactttcttacatttcatcaaatgctgttcggtcccaggacaagactttcattgcaatgtgactattaaaattaaattcatacattttatca

SEQ ID NO: 290175 - DNA, 120 bp, Artificial Sequence
  ENSG00000131018_254 (sequence is synthesized)
acgtagtgctgaaacacatactactggatctatgtggtagcatacgccagttgaacaactggaccatgacatttgtatctcgttagatattctgttttggattttatcaaccttcaagca

SEQ ID NO: 290176 - DNA, 120 bp, Artificial Sequence
  ENSG00000131018_255 (sequence is synthesized)
agtgtcatgttatcgggcagagactaccaacatttgtctacagtgagcattttcatacttctatacacagacaaggggaaactttcatccccacgcaggatatagctttttgctctgcag

SEQ ID NO: 290177 - DNA, 120 bp, Artificial Sequence
  ENSG00000131018_256 (sequence is synthesized)
agtctaacttttgcaagtggaagcttcatggtggtggcggaggacctgagtgccctgaggatggcagaggacagctgtgtggatgcagatctcccagattgtaactgcgatgtcacaagg

SEQ ID NO: 290178 - DNA, 74 bp, Artificial Sequence
  ENSG00000131018_257 (sequence is synthesized)
gatctaaagatccgagatcagacattggaagatctactgggaaggatgacttggcaagttcatggtctttttat

SEQ ID NO: 290179 - DNA, 120 bp, Artificial Sequence
  ENSG00000131018_258 (sequence is synthesized)
acaacacttagagggctgtgatgtaaaatttttggagctaccagataaaaagaatgctaaggtacccctaagttgttcagtagttggacagaaaggagcttctcatgaaatttcatgaaa

SEQ ID NO: 290180 - DNA, 120 bp, Artificial Sequence
  ENSG00000131018_259 (sequence is synthesized)
ttgaataaataaatatccttgatcttccctaaacctaccttacaccaagacccaaaccaatcagccttgtagaactcattttctgtagcttctttgaaataattatctgcagggatctgg

SEQ ID NO: 290181 - DNA, 120 bp, Artificial Sequence
  ENSG00000131018_260 (sequence is synthesized)
tgggaaattctttcctgtgaagagatgcaatgaagtgtggaaagattctagactccacactcagactggtgggaaaaccaagctccgccatgcagggctgtgtgatttggagcagaatgc

SEQ ID NO: 290182 - DNA, 120 bp, Artificial Sequence
  ENSG00000131018_261 (sequence is synthesized)
tttgcctctctgaattctgtcttctcatcatttgtatgaagacgtaaataatattcgtatttcagacttatgagatcaagtggtttaaggtacacacgtgcaaacgtctgcctggcacat

SEQ ID NO: 290183 - DNA, 120 bp, Artificial Sequence
  ENSG00000131018_262 (sequence is synthesized)
gcaggtgctcagtgggagatctcccgcctcctccctcagccctcacccaggcctgtcatctggccttccacaggaggtcgggcagcccagagcaagccatgagtccacatcacatgctgg

SEQ ID NO: 290184 - DNA, 120 bp, Artificial Sequence
  ENSG00000131018_263 (sequence is synthesized)
ctatgttagttcatttcctctgaagttacatgagaaaaatgttccttttctgtcagtcacgtcatccaggaaattatttcatccttttgtaacttaagcttaaattagacacagatagtt

SEQ ID NO: 290185 - DNA, 120 bp, Artificial Sequence
  ENSG00000131018_264 (sequence is synthesized)
aataggctagttatcatataataaaatatagggtgacttttataggagttacatgggtatcgagtattctagatttttgtctcttatattatttatgtatccttgtggcctttaaatgaa

SEQ ID NO: 290186 - DNA, 120 bp, Artificial Sequence
  ENSG00000131018_265 (sequence is synthesized)
tccctgtttccattcttgtttacagggttctagatcaaagcctcatttttccatttttggaatgctttaacagcttctaatttttccctatattcacagtctttcttctctgatcaatct

SEQ ID NO: 290187 - DNA, 120 bp, Artificial Sequence
  ENSG00000131018_266 (sequence is synthesized)
tgcgtattcttcccacaatgtctttcttaagcaactccaatcttttgctttaagatatgcttagatatgaacagacaggacttaagttaccactgatttgaaaacaatgaaaaaaagcca

SEQ ID NO: 290188 - DNA, 120 bp, Artificial Sequence
  ENSG00000131018_267 (sequence is synthesized)
acatccttagaagtctagaaatgcaaatttcagcaaaaaaagagaggaagaaagacaaacttaactgtcacattcatactgtttctttcaagttcatatttaaggaagtgagagctctca

SEQ ID NO: 290189 - DNA, 120 bp, Artificial Sequence
  ENSG00000131018_268 (sequence is synthesized)
agctctcaaacattgctggtatcctggtaaaatctctttgaaaaataattggcaaaatgtatggtgattgtcaaaaatgttgctactctgggccacgtgcggtggctcacacctgtaatc

SEQ ID NO: 290190 - DNA, 120 bp, Artificial Sequence
  ENSG00000131018_269 (sequence is synthesized)
cgtgagacatagtgtgtttttccccatttctggtggattttatgttttctgactttccttggaagtatgatttgtttccttccatgatttgtgctccacggtgtgtagattggagataat

SEQ ID NO: 290191 - DNA, 120 bp, Artificial Sequence
  ENSG00000131018_270 (sequence is synthesized)
aaagcctccagggtacacggactgcctgccagtgttgatttccatgttctctgggccaaagcttcgtccgcgatgtgcttttccccagcctctgaatagtaacttgcttgtgcttttcag

SEQ ID NO: 290192 - DNA, 120 bp, Artificial Sequence
  ENSG00000131018_271 (sequence is synthesized)
tcttctcagtatctagcgctaagcaatttaacaaaggtaacgcctggcacgtgctgtgtgtgagtgtgatactgatgtcgcaaaattggagttgcagcaggttctgcagggtgtgcattg

SEQ ID NO: 290193 - DNA, 120 bp, Artificial Sequence
  ENSG00000131018_272 (sequence is synthesized)
catcctgacccgcccacagtgtgggtctccaggtcagcagtaaggggcgtgtgtgctgtttccttagccttgcaatctgagttcatcattgttgttgcataagcttgatgtggctctctg

SEQ ID NO: 290194 - DNA, 120 bp, Artificial Sequence
  ENSG00000131018_273 (sequence is synthesized)
aaaaggccgaaggaggtttcaaagattgaggagactttcagtcttcattattgcacaagatattccttttaatactgaaatgatatgtttcccagggctttgatttggaagactcaaatc

SEQ ID NO: 290195 - DNA, 120 bp, Artificial Sequence
  ENSG00000131018_274 (sequence is synthesized)
aatcataaacatgattttttttgttctaaataatcccagagtttttgttctaaataatcccagattaaattactttagaaaaaacatggattctaaacagtttaaattttattagattaa

SEQ ID NO: 290196 - DNA, 120 bp, Artificial Sequence
  ENSG00000131018_275 (sequence is synthesized)
aatgatatttttaaaaaattcatctgaatctttgcattcattatatagtagtcaaggatgtgttgattgagagtttcagttcagattctagagcagagctcaaaattggcaatggttcag

SEQ ID NO: 290197 - DNA, 120 bp, Artificial Sequence
  ENSG00000131018_276 (sequence is synthesized)
acaactgattaaacctcttttcaaatagcttagaagaaaataaatggaatcctactacaatctcatttagaacattcagccattttgacgtagatggtaacgtagacccattttgaactg

SEQ ID NO: 290198 - DNA, 120 bp, Artificial Sequence
  ENSG00000131018_277 (sequence is synthesized)
tgtgttgcagacctatcttgagctttatgtggcttataacctttgtttcctatgtttttaactttcaggtgttagaatatagggacactggtataatttagtctttaatttggcctcatc

SEQ ID NO: 290199 - DNA, 120 bp, Artificial Sequence
  ENSG00000131018_278 (sequence is synthesized)
tgttctgtaagtgtgcatttacagagggtctgctcatttgggtcttcaatacacatcactgaagcagtcacactagcttaggtctgggagtaaatagtctatgtttacacccatttttat

SEQ ID NO: 290200 - DNA, 120 bp, Artificial Sequence
  ENSG00000131018_279 (sequence is synthesized)
tctatgattgttattttggatgtttttataaaatctggcacatacctaagttaagataaggaatgaatcatcttagaatgaatgaagaacatctttccattcctttgtatttacttagat

SEQ ID NO: 290201 - DNA, 120 bp, Artificial Sequence
  ENSG00000131018_280 (sequence is synthesized)
accaaaagtaatcgatatatgaatattttgagagctgtagattattcttgcaaagtcttcactgtgttagatataacctataattgataaacaaaaccatgtgtatggtcccatgtttta

SEQ ID NO: 290202 - DNA, 120 bp, Artificial Sequence
  ENSG00000131018_281 (sequence is synthesized)
aaatttagagatattacaaaaatctcagattattttttttttagaactctggctacaatgtaggtcatgtgggttgttgtgtcaggtgagcctaatgtgatatgtgaaaactagaaacta

SEQ ID NO: 290203 - DNA, 120 bp, Artificial Sequence
  ENSG00000131018_282 (sequence is synthesized)
ctttgaccagtctcccagacaaggcattagggagaaattttactgatttaaaataatcatgatagtcataaagaattggagaggcataaaattgtaacttttttttttgcttttgaccca

SEQ ID NO: 290204 - DNA, 120 bp, Artificial Sequence
  ENSG00000131018_283 (sequence is synthesized)
gttattctaatagttttatgatttagaaagatctttaacatatctcatagatttaggccagacttgcctcgtatctgtgcagcgtatgaagccatgactgattgcctttgtttcaaacaa

SEQ ID NO: 290205 - DNA, 120 bp, Artificial Sequence
  ENSG00000131018_284 (sequence is synthesized)
ggaattaatttgcccccaagggagataaaagaggccaacagagtagaaaacctgaaatgtgttcagtgtattcacttcaatatgcctgagtgtctgtcaatccttagacattaatacaac

SEQ ID NO: 290206 - DNA, 120 bp, Artificial Sequence
  ENSG00000131018_285 (sequence is synthesized)
tctttaaggcagaggtccccaagccccaggttatggacaagcacaagtccatgtcctgttaggaacctggccgcacagtgggaggcgagcaagcattaatgcctgaactccacctcctgt

SEQ ID NO: 290207 - DNA, 89 bp, Artificial Sequence
  ENSG00000131018_286 (sequence is synthesized)
ggaggcgagcaagcattaatgcctgaactccacctcctgtcagatcagaggccacatcagattctcataggagtgcaaaccctaccatg

SEQ ID NO: 290208 - DNA, 120 bp, Artificial Sequence
  ENSG00000131018_287 (sequence is synthesized)
ggaacagcttcatcctgaaaccatccccctccagccccattcacggaaaaattgttttccacaaaacccatcccaggtgccaaaaagtttggggaccgctgctttaaggaatagcaaatc

SEQ ID NO: 290209 - DNA, 120 bp, Artificial Sequence
  ENSG00000131018_288 (sequence is synthesized)
tgaacaaacatcatttggtgccagggaaaacagattataaagtagacattcaaatatattactgaagcttcagatggccactttcatcagaagacattcatactctacattattcctgag

SEQ ID NO: 290210 - DNA, 120 bp, Artificial Sequence
  ENSG00000131018_289 (sequence is synthesized)
aaaagcaggtgtgatttagtctacagagtagactgcttagtcagaaaactctgtgactaagcaaacatggaacattattctttttttagattttcatcaccatattatgctaaaactgta

SEQ ID NO: 290211 - DNA, 120 bp, Artificial Sequence
  ENSG00000131018_290 (sequence is synthesized)
gattttcatcaccatattatgctaaaactgtaggactgtaagcttatcaattcattagttatatatttgagctatatgtaattaatttaaagtataatataaatgcagtttgtattacat

SEQ ID NO: 290212 - DNA, 120 bp, Artificial Sequence
  ENSG00000131018_291 (sequence is synthesized)
agagtgagactctgtctcaaaaaaaagggaaaaaagaaaattataagtgtattaacttaattggaagttgggtcagattttaaataaacttaaagatgttttttctctgtgattatgagt

SEQ ID NO: 290213 - DNA, 120 bp, Artificial Sequence
  ENSG00000131018_292 (sequence is synthesized)
cttaaagatgttttttctctgtgattatgagtcaataataatatattgtctactggagtgctgtttgcaagtacagagaaaaaagagaatagggatcgggataataagatttattttttc

SEQ ID NO: 290214 - DNA, 120 bp, Artificial Sequence
  ENSG00000131018_293 (sequence is synthesized)
tcagaagcatgaactcttttttaaaaaaatttgtgaaccatcctagaaatttaattttttaaaatgtattttataagaaaagttttgtttattataaaaggcttagaaaatacagaaatg

SEQ ID NO: 290215 - DNA, 120 bp, Artificial Sequence
  ENSG00000131018_294 (sequence is synthesized)
tcttaataagcaaatttaaatcacaatcacttatgatactaccattcagagataataaacaatgccaatattttgctgtatttgttttagatatacacataataaaaacattcaagatga

SEQ ID NO: 290216 - DNA, 120 bp, Artificial Sequence
  ENSG00000131018_295 (sequence is synthesized)
gggacacagtgagaaaccactgtatgaagtgtttggggctcagatggcagtgtggtggcaggacacacaagcaggggcgacaaagccggagtcctgggagagacttcgggaaagaaacca

SEQ ID NO: 290217 - DNA, 120 bp, Artificial Sequence
  ENSG00000131018_296 (sequence is synthesized)
tggagcagagtccagagggtgaatcgcagttggtcaggtgggctcggaagtgcttagaggaagaaaggaggggaagcctccctgctttgtgattggcctggtgcttttgatcattggcag

SEQ ID NO: 290218 - DNA, 120 bp, Artificial Sequence
  ENSG00000131018_297 (sequence is synthesized)
tttgtctggaatgacaggcatggaatggacaaagtggagaagagcctggctgtgaagcagcctgttcaccatggaaaagagctgtggctcctatcctgaaggtcgtggagccacagcagg

SEQ ID NO: 290219 - DNA, 120 bp, Artificial Sequence
  ENSG00000131018_298 (sequence is synthesized)
atctgcggagggaggtgctgggatcctccctcctcagggatgtgcagattttcatattgtatctttctggataccacagggagaagggcatattcagcggagagagtccaaatgaaacct

SEQ ID NO: 290220 - DNA, 120 bp, Artificial Sequence
  ENSG00000131018_299 (sequence is synthesized)
tttacaacctcagacagaagtagggtggtggcctgaactaggggaagcagaattgggaatggggagaatgggaatgatgtgagaaatcacacagagaagactcctccagaactctcagtc

SEQ ID NO: 290221 - DNA, 120 bp, Artificial Sequence
  ENSG00000131018_300 (sequence is synthesized)
cattgaactgggatggaggcgattttctgggctgggcatcttggtgaaagatgcaggtggtcctaggccctgaggaccacaagagggaaggagcactgtgggtgcaggtgggcaagggag

SEQ ID NO: 290222 - DNA, 120 bp, Artificial Sequence
  ENSG00000131018_301 (sequence is synthesized)
gtggggctgtgagagcagggaggggatgagtttgcttgtgtgcatcctgatcttgagatacctgcagaatatccaaatgcaaaagtccagtcgtagatgcacggtgtgaagtgcagaagc

SEQ ID NO: 290223 - DNA, 120 bp, Artificial Sequence
  ENSG00000131018_302 (sequence is synthesized)
cagaaatgcagattgggtaggtattcacatgtaaatggcaatggtcctggagtgaacggaggagctcccacaggaagagtgtgtgaaggaaaacaagaaggaccaccacccaagccacac

SEQ ID NO: 290224 - DNA, 120 bp, Artificial Sequence
  ENSG00000131018_303 (sequence is synthesized)
atgcagtgaagggatggacagagaaacagaaactctgtaaggaaggtgaataaaaatagaataaagagttggaggctgatttgtggcacttggaaatgtatctcatacattctgtcaaag

SEQ ID NO: 290225 - DNA, 120 bp, Artificial Sequence
  ENSG00000131018_304 (sequence is synthesized)
gacatctggggaatttctgtttggttctggtggttcacatcagattcccaagggatgacactgttctaaaaagaaaatgatttctctcatttctattttgtctttacagtaaggcctatt

SEQ ID NO: 290226 - DNA, 120 bp, Artificial Sequence
  ENSG00000131018_305 (sequence is synthesized)
agtcaggcatatggcatctgaagcagagctgtccaaaaccagccactggccagttgggactgttgagctctgagatgggactgtgcaaattgagatgggttgtgcgtggaaaacatgctt

SEQ ID NO: 290227 - DNA, 120 bp, Artificial Sequence
  ENSG00000131018_306 (sequence is synthesized)
cgtggaaaacatgcttacatgaatttcaaagacttagtacaagaaagaaaataaaatattaataattatattgattacatgttataatccctgtctaatgtagtgttaaaattaatttta

SEQ ID NO: 290228 - DNA, 120 bp, Artificial Sequence
  ENSG00000131018_307 (sequence is synthesized)
tttctaatgtggctatgaaacctttaagattacatatatagttcacatagaaatatatgggacagcgctgctctggagtctgggctgaaatctcagttctgccatgtactttctgtttaa

SEQ ID NO: 290229 - DNA, 120 bp, Artificial Sequence
  ENSG00000131018_308 (sequence is synthesized)
acttagataaggaacctaattcctctgtgcctcagttttctcatctataaaatgggaataacattcccaggtaccctatagggtttctatgtgataaatttgtgctcagaccagagcctg

SEQ ID NO: 290230 - DNA, 71 bp, Artificial Sequence
  ENSG00000131018_309 (sequence is synthesized)
gggtttctatgtgataaatttgtgctcagaccagagcctggctcataaaaacactctcagtcacttctgtt

SEQ ID NO: 290231 - DNA, 61 bp, Artificial Sequence
  ENSG00000131018_310 (sequence is synthesized)
ccgggttcaagcgatcctcctgcctcagactcccatgtagctgggattacaggtcggccag

SEQ ID NO: 290232 - DNA, 120 bp, Artificial Sequence
  ENSG00000131018_311 (sequence is synthesized)
tcatttcaggaaagctttggtgagcctgcacgctcctctgtgcgctcaggagctatgtgtctagaataactgacttcctttttttcccctaggaaagttattttcctgcacaagggattc

SEQ ID NO: 290233 - DNA, 120 bp, Artificial Sequence
  ENSG00000131018_312 (sequence is synthesized)
agggtttccagaacttagctgtcaacttagactgtgctttttttgcagatgtaatgatccccgaaagccctgaggcctatgtaaaactcacagaaaatgcaatcaaaaatacctccggta

SEQ ID NO: 290234 - DNA, 120 bp, Artificial Sequence
  ENSG00000131018_313 (sequence is synthesized)
ggcacaacaagccggagccagcctccctccctcccctgtatagcaatcctcctctcttagcacatctgctgtctctctcccagctttgtggctctagcatgttaaggcacagccttcctc

SEQ ID NO: 290235 - DNA, 120 bp, Artificial Sequence
  ENSG00000131018_314 (sequence is synthesized)
tcttactgctgtactagaaaaaacagctggttaaatccacaccaagaataagatttcactaattgagcgaaataaagtaacttctcaacttgttaaatggtgattggtctcattaggtat

SEQ ID NO: 290236 - DNA, 120 bp, Artificial Sequence
  ENSG00000131018_315 (sequence is synthesized)
agacctctcatgtccattaactgcagaaaatatgagaaggaaaacccagtcatcagcctctgcgccctagtgttctacgtggtgtggtaatttcagcttcactgcatgcagacctacctg

SEQ ID NO: 290237 - DNA, 120 bp, Artificial Sequence
  ENSG00000131018_316 (sequence is synthesized)
tggctggagactcagggtgcaggctctggtcccaagtccgccagcctgcatgagtgacctttggcccatccaccactttatcctcctcatctcaagaatcccgtatgagacaaggggtga

SEQ ID NO: 290238 - DNA, 120 bp, Artificial Sequence
  ENSG00000131018_317 (sequence is synthesized)
gatcagatttcagctctaaaaaatatatgtaattttaatttaagaggtcgtaaaagataatttgaaatgaaaaatgtatttcacggtatgctgagccatagataagaacagaactattcc

SEQ ID NO: 290239 - DNA, 120 bp, Artificial Sequence
  ENSG00000131018_318 (sequence is synthesized)
tgaaacaagaagaattaaagaaagaaaaatggaactagttttgcttagtgttgtgttagacaaactgtagtgcaggagttcaggatcagtgatgtgggatgtcggcggggaatagagttt

SEQ ID NO: 290240 - DNA, 120 bp, Artificial Sequence
  ENSG00000131018_319 (sequence is synthesized)
gaacgcagtgatatgatattgaatcacggagttactagtttacgcttcagtttttgaagaaaatcaaaaggacagaaagcaaagtaacattactgagagggtgattcccagggagggacc

SEQ ID NO: 290241 - DNA, 120 bp, Artificial Sequence
  ENSG00000131018_320 (sequence is synthesized)
tctcctaggtgtatctagaaggccttttttagaaacaaataaaaacatttaataaagcttactaatatttgttctgctttcaccccatgctagcttcactgatgatcaaatgttcctgtg

SEQ ID NO: 290242 - DNA, 120 bp, Artificial Sequence
  ENSG00000131018_321 (sequence is synthesized)
acacacacacacacacacacactctcagtaattttacaaagaaatgttacaactttgagaggagaatgagccagaattctaggctatgagtaagaacctgcctagatggaaatgttaaaa

SEQ ID NO: 290243 - DNA, 120 bp, Artificial Sequence
  ENSG00000131018_322 (sequence is synthesized)
cctagatggaaatgttaaaatcttagctttctcctggttttgtttcagatcttagataaaaagcaagtcgttgctagtttgatatctctgtatatatctattctgaggcactcttttctt

SEQ ID NO: 290244 - DNA, 120 bp, Artificial Sequence
  ENSG00000131018_323 (sequence is synthesized)
gattaatgaatttatgccttcagtaaatgatgcagcaacctgagccttccgtgacactatcttcccctgaggtgcatgaagaaaaatcagagggaggatcttcccctgctcactaagcga

SEQ ID NO: 290245 - DNA, 120 bp, Artificial Sequence
  ENSG00000131018_324 (sequence is synthesized)
tagcagaaagaacatgagaaaaagaacagctttctccttactgagatgcagtagacaccattgcagatttttagaaaggccttccacactgacaacattcagatgatcaggggttcagct

SEQ ID NO: 290246 - DNA, 120 bp, Artificial Sequence
  ENSG00000131018_325 (sequence is synthesized)
ggaagagggtcaggtgcacgaagctgttcaaaacggactggagagccgttttgcgacgtccgatctgctagggctctcagtcaagcaccttcattggtttggccattttaatgtctaacc

SEQ ID NO: 290247 - DNA, 120 bp, Artificial Sequence
  ENSG00000131018_326 (sequence is synthesized)
tctttttttttaactttttgcattatagtctctactttacacttttttaactccctgtggtttccaatctttgtaaagcaaacatgtgcatagaagatgatatctgctagctttagaatc

SEQ ID NO: 290248 - DNA, 120 bp, Artificial Sequence
  ENSG00000131018_327 (sequence is synthesized)
tgattctaaagttgttgctcagttgtaaaaatcttagtgttctcaagcaatcttaattagcttgtgttgtttattaaggcagcttaatttaaacttcatgttacatctatggcccaaaag

SEQ ID NO: 290249 - DNA, 120 bp, Artificial Sequence
  ENSG00000131018_328 (sequence is synthesized)
cccaaaagtatatttggtggcttgtagtaaaaggtcattaaaatattagaatagaatgagacaattaagtcttttgtttgtttttgttgtcgttgttttttgagacagagtctcactctg

SEQ ID NO: 290250 - DNA, 120 bp, Artificial Sequence
  ENSG00000131018_329 (sequence is synthesized)
tctcggctcactgcaatctccgcctccgggattcgagcaattctcctgccaattctcctgcctcaccctcccgagtaggtgggactacaggtgtaagccaccacgcctcactaatgtttg

SEQ ID NO: 290251 - DNA, 120 bp, Artificial Sequence
  ENSG00000131018_330 (sequence is synthesized)
tacaggcatgagccaccacacccagccgagtctttcaaagaggaattaaatacatcagattaaacatgaacctgagcatcaagttttctgaaagccaagacaaaatgggaaacaaggagt

SEQ ID NO: 290252 - DNA, 120 bp, Artificial Sequence
  ENSG00000131018_331 (sequence is synthesized)
aaacttactttcattatctggcaaaaacaaaacataccacttctcaaggaaggagaaactttttctagcactaaattcaagaggaaattaactggtagactcttatacaaggatctttgg

SEQ ID NO: 290253 - DNA, 120 bp, Artificial Sequence
  ENSG00000131018_332 (sequence is synthesized)
acaatataatgtacagtatatttaagtgactttatagaagataaggaagcatatttgagttccattagaagaaaatattatgcactttgtagctctctgtatttttaaaatgttatgtct

SEQ ID NO: 290254 - DNA, 120 bp, Artificial Sequence
  ENSG00000131018_333 (sequence is synthesized)
taacatttaacactcacctaaactacagaattggtaccttttaattcagtaccataatagtcttagaaacctagaggaaatagctgtggaactgcatttttacttcactttgacctctgg

SEQ ID NO: 290255 - DNA, 120 bp, Artificial Sequence
  ENSG00000131018_334 (sequence is synthesized)
catcaagctgtgaatgacgaatcaccccttttttttttcaaatcttgactagatatcagaggatacctagacatacttctgcttcgctatatttaatgttgtgcttttctgtttaaaaga

SEQ ID NO: 290256 - DNA, 120 bp, Artificial Sequence
  ENSG00000131018_335 (sequence is synthesized)
ttatcttacatctcacttgcatactaatctatattttaattactgtcatatatacattaactaatttgaaccttccaataatactgtggaccaggcatcaaatcaaactgagatcagaga

SEQ ID NO: 290257 - DNA, 120 bp, Artificial Sequence
  ENSG00000131018_336 (sequence is synthesized)
cggtcaggggtcttatagaatatttttggcagaggcaggattagaactcaggccgtgagctgctgcatcctttagtgtgtgagctccacgtttgatgctcaggtataatttcccaccaag

SEQ ID NO: 290258 - DNA, 120 bp, Artificial Sequence
  ENSG00000131018_337 (sequence is synthesized)
ttaagttgattgcattctgcacttttggagcttttgccaattatcaaaaatgcttagaaaaattaatttgtttttgtatgcatagcaaataaagcatgagctgttggaatcccaactcag

SEQ ID NO: 290259 - DNA, 120 bp, Artificial Sequence
  ENSG00000131018_338 (sequence is synthesized)
cagagggaattaatattgccctggaaacatgacagctatccagaatcatttgcttccttctttcatgcggggaaattgtacctaagtgaacacttagatatgaatgtgattataaaatgc

SEQ ID NO: 290260 - DNA, 120 bp, Artificial Sequence
  ENSG00000131018_339 (sequence is synthesized)
gtaaagccactagagagaaactgaaagaaaacattcttaagataaattgaattgacattttctctctaaaatatgatttatagaccacagataggaattaagagtttcctgataattttg

SEQ ID NO: 290261 - DNA, 120 bp, Artificial Sequence
  ENSG00000131018_340 (sequence is synthesized)
tttatttccgtaagacactggcctgagtgcacactgtaaacctggtgttgcttttctaaacttggtgcacacattcaaggcagctcgtgtgatgtgcttgtaattttcaatttgactaat

SEQ ID NO: 290262 - DNA, 120 bp, Artificial Sequence
  ENSG00000131018_341 (sequence is synthesized)
tcaaaatccagagttgcaggacgtgtttttaaaaaaataaaacagccgttttattttagctcaagcagttgtctctcttgctctctggtcaaatttggctcgaggaatggttatcgtttg

SEQ ID NO: 290263 - DNA, 120 bp, Artificial Sequence
  ENSG00000131018_342 (sequence is synthesized)
actttggctgtgcctgcgccgcgccgcgcagcctgcggtctggctcggtagcgagatgcaggaggactcgccgcctacacatcctgcctcccgggcccgcgcggctctgcgcgctcattg

SEQ ID NO: 290264 - DNA, 120 bp, Artificial Sequence
  ENSG00000131018_343 (sequence is synthesized)
gctcgccctgcaggaagatgaacgctactacttctgtttccttttgatgctgctctgacaccccggtgggggaaatgtttcctcaggagctggcgcagaaaattaagggctaccaggagc

SEQ ID NO: 290265 - DNA, 120 bp, Artificial Sequence
  ENSG00000131018_344 (sequence is synthesized)
gctcaacatgcaggtgagggttccagccgctggcccacagctgaaagttggcacactgttcacgtgctccttctaaggtttgccaggtaaaggaacaggttggcggtgacgcgtacttgt

SEQ ID NO: 290266 - DNA, 120 bp, Artificial Sequence
  ENSG00000131018_345 (sequence is synthesized)
gtgtgtacctgctttacgctgacattttagcatgcagctttaagtttacactcttggactttggcaaacatttgcaaatagattttgttaggactactaacaacagctgttcagcggagt

SEQ ID NO: 290267 - DNA, 120 bp, Artificial Sequence
  ENSG00000131018_346 (sequence is synthesized)
ggtggaggcaaaaagcactctgacatgaaagtaacaatgagaggagaggaactggagagggaaagtaaaggctactccaggagtgttgctgtaaagtggtatatagaggaatgagataag

SEQ ID NO: 290268 - DNA, 120 bp, Artificial Sequence
  ENSG00000131018_347 (sequence is synthesized)
ctataaggagaagtgggtcaaagaaaattttatctctttttttcttttacattcatcacaatttgagtatttcattttaagatcagaaaaataataagtttacacgttgatggaaataac

SEQ ID NO: 290269 - DNA, 78 bp, Artificial Sequence
  ENSG00000131018_348 (sequence is synthesized)
gatcagaaaaataataagtttacacgttgatggaaataactcaatagaggaaaagttggtgaaaaaggaatgtgggca

SEQ ID NO: 290270 - DNA, 120 bp, Artificial Sequence
  ENSG00000131018_349 (sequence is synthesized)
gtataattggtgagcatgaaccttattggtgttcaagatatttttatacaaattagaagctagaagtttattttaaggtgtaatttcaaaataatattagttcagcattaaatatattac

SEQ ID NO: 290271 - DNA, 120 bp, Artificial Sequence
  ENSG00000131018_350 (sequence is synthesized)
ctcaaaatataagtgaagtttcaactagtcttcagaaaatacaggtaagggtgttatcaattaattctagtagcagtgctgatgtgaactaaagttaacctctaaatcaagggtccccat

SEQ ID NO: 290272 - DNA, 120 bp, Artificial Sequence
  ENSG00000131018_351 (sequence is synthesized)
gtccccatctcctgggccgcggactggtacaggtccctggcctgttaggaaccaggccgcacagcaggaggtgagcagcaggccaatgagcgttactgcctgagctccacctcctgtcag

SEQ ID NO: 290273 - DNA, 120 bp, Artificial Sequence
  ENSG00000131018_352 (sequence is synthesized)
cctgtcagatcagcggtagcatcagattctcataggagcctgaaccccattgtgaactgtgcacacagaggaactaggctgtgtgctccttctaagaatctaactaatgcctgatgatct

SEQ ID NO: 290274 - DNA, 120 bp, Artificial Sequence
  ENSG00000131018_353 (sequence is synthesized)
gacgagagatgtgttggcaggggaaagaactaaatcgaagacttcaatcattcatgctttgcttttaaatccagagctagaaaaggaatcggatttccagaaaatgatcagccagagtta

SEQ ID NO: 290275 - DNA, 120 bp, Artificial Sequence
  ENSG00000131018_354 (sequence is synthesized)
gaatgctaccaggcaacaccaagatctcttacaccacgagaaggacttgtggccaaagatacaaatggctccgcaatgtacagggtgcatacagtgcacctgaagaacctaaaagtggtt

SEQ ID NO: 290276 - DNA, 120 bp, Artificial Sequence
  ENSG00000131018_355 (sequence is synthesized)
tttagaatcatcataataaacagtcaagaattaaagatgtcaagcgctttctcaagaagtctaaactttatacataacattaaaaaagatctataaagcctgaccagtctccctcaaatt

SEQ ID NO: 290277 - DNA, 120 bp, Artificial Sequence
  ENSG00000131018_356 (sequence is synthesized)
aagttatttgctactgacttggcagccaaaacgatttaggatctttcggaagttgatgaaaaaggagccagcgggttttgctctttgctctgcatcacgcccttcctgggaccatcaggg

SEQ ID NO: 290278 - DNA, 120 bp, Artificial Sequence
  ENSG00000131018_357 (sequence is synthesized)
cttgagcgtgttaaggtccaaatgtaagagaaatttagaaattcctggaaagtcactgtaactatttcgctcatttaaaaactcaaaaaactggacttaaataaaacctgataatatatg

SEQ ID NO: 290279 - DNA, 120 bp, Artificial Sequence
  ENSG00000131018_358 (sequence is synthesized)
attgtaaaagtcaaaacttgagttcaacataacattatccctactaaggagcaagtagtctgttcctattctgaccaaagcagttgatgaggagtctggagtacctgggactggcgatga

SEQ ID NO: 290280 - DNA, 120 bp, Artificial Sequence
  ENSG00000131018_359 (sequence is synthesized)
tgaatgtcaagctattaattcaagacttggaggtgaggggtttctgaatcaaaatgaaaagcctactctgttgtgagaggaaagatcagcaagtttattcagatcattgcaaaagctgtt

SEQ ID NO: 290281 - DNA, 120 bp, Artificial Sequence
  ENSG00000131018_360 (sequence is synthesized)
tctgtgtctcctgggcatcattttgacatgtctgtatgtcccaatttgcacctgtcagaaaaaaatgtattgaacataaaaaagacatgacttgatcatataaagtaacttcaaattgtt

SEQ ID NO: 290282 - DNA, 120 bp, Artificial Sequence
  ENSG00000131018_361 (sequence is synthesized)
cagtttggagattttttttttctacaaccaagttaaaaagtattaggaaaaaacaggagacatctatagatagcacccgcacctaaatactttcaataataaaggatttattgcatgaac

SEQ ID NO: 290283 - DNA, 120 bp, Artificial Sequence
  ENSG00000131018_362 (sequence is synthesized)
tgtggtatttgcatattttgaatagcctgcagctctcacaaatgaagtagtggaagaatttttaatgacatggtaagattttgcaatatattgttacatgagaaaagcaaacaacagtat

SEQ ID NO: 290284 - DNA, 120 bp, Artificial Sequence
  ENSG00000131018_363 (sequence is synthesized)
ggtctggattaatactgggcaacatttatagttggaattatgtattcacattgtctgacttgtgcattcaaagttaatattgtgtgaaatatcattaaaatatttttatggttacattaa

SEQ ID NO: 290285 - DNA, 120 bp, Artificial Sequence
  ENSG00000131018_364 (sequence is synthesized)
caaaaatcagtctgatctcgggaaacctggagaaatttattttctgtactctaatgttctttcattttggtgaccatcaaggtgctgggagaggaattagatggctgtaattcaaagtta

SEQ ID NO: 290286 - DNA, 120 bp, Artificial Sequence
  ENSG00000131019_0 (sequence is synthesized)
atacgctggtctccacatcgactgcgccttgtgtcccgggcgctcctggtctacaatggcagcggccgccagccccgcgatccttccgcgcctcgcgattcttccgtacctgctattcga

SEQ ID NO: 290287 - DNA, 120 bp, Artificial Sequence
  ENSG00000131019_1 (sequence is synthesized)
ctggtccgggacggggcgggccgacgctcactctctctggtataacttcaccatcattcatttgcccagacatgggcaacagtggtgtgaggtccagagccaggtggatcagaagaattt

SEQ ID NO: 290288 - DNA, 120 bp, Artificial Sequence
  ENSG00000131019_2 (sequence is synthesized)
tctctcctatgactgtggcagtgacaaggtcttatctatgggtcacctagaagagcagctgtatgccacagatgcctggggaaaacaactggaaatgctgagagaggtggggcagaggct

SEQ ID NO: 290289 - DNA, 120 bp, Artificial Sequence
  ENSG00000131019_3 (sequence is synthesized)
cagactggaactggctgacactgagctggaggatttcacacccagtggacccctcacgctgcaggtcaggatgtcttgtgagtgtgaagccgatggatacatccgtggatcttggcagtt

SEQ ID NO: 290290 - DNA, 120 bp, Artificial Sequence
  ENSG00000131019_4 (sequence is synthesized)
cagcttcgatggacggaagttcctcctctttgactcaaacaacagaaagtggacagtggttcacgctggagccaggcggatgaaagagaagtgggagaaggatagcggactgaccacctt

SEQ ID NO: 290291 - DNA, 120 bp, Artificial Sequence
  ENSG00000131019_5 (sequence is synthesized)
cttcaagatggtctcaatgagagactgcaagagctggcttagggacttcctgatgcacaggaagaagaggctggaacccacagcaccacccaccatggccccaggcttagctcaacccaa

SEQ ID NO: 290292 - DNA, 120 bp, Artificial Sequence
  ENSG00000131019_6 (sequence is synthesized)
agccatagccaccaccctcagtccctggagcttcctcatcatcctctgcttcatcctccctggcatctgagaagagtcatttagagtgacaggtggaaggtgatatcaagaagcctctgt

SEQ ID NO: 290293 - DNA, 120 bp, Artificial Sequence
  ENSG00000131019_7 (sequence is synthesized)
tagcctggtctggttcctgctctcccttcagggaggccgcctgtctactcaccactgtgcctttctggaaagcaggagttcaagccttagcaagcccagaggcccccagcagatgatgag

SEQ ID NO: 290294 - DNA, 120 bp, Artificial Sequence
  ENSG00000131019_8 (sequence is synthesized)
ccttagcaagcccagaggcccccagcagatgatgaggacattgtcggctcaacatctcaggccactcattaccttcgctcatgatcccagcagccatttttctttttttttttttgtttt

SEQ ID NO: 290295 - DNA, 120 bp, Artificial Sequence
  ENSG00000131019_9 (sequence is synthesized)
ggcgtgagccaccgcgcccggccagccatttttcttaacaccttctgccactttctctcggtgctaatggatggaattcctgcacaagttttaactgaacaagaaatcccagcaaaaggc

SEQ ID NO: 290296 - DNA, 120 bp, Artificial Sequence
  ENSG00000131019_10 (sequence is synthesized)
ggatcctttccatgcactgaccaagaattgtattaatcctttttatcattatagtttttttacattttctcattctgtcaaccatattggagtgaagtggcatagtcatcactcactgta

SEQ ID NO: 290297 - DNA, 80 bp, Artificial Sequence
  ENSG00000131019_11 (sequence is synthesized)
ctctaaattgttttatatttaggtagagattgggtcttcctatgttgcgcaggtaataaaactgtgaaaatcctggaata

SEQ ID NO: 290298 - DNA, 120 bp, Artificial Sequence
  ENSG00000131019_12 (sequence is synthesized)
tatgttgcgcaggtaataaaactgtgaaaatcctggaatataagctaagaaataccaatgtggacatagggcctggcaaagatttcatgaagaagacactaaaaacaattgtaacaaaaa

SEQ ID NO: 290299 - DNA, 120 bp, Artificial Sequence
  ENSG00000131019_13 (sequence is synthesized)
caaaaattgacaaatgggacctcattaaactaaagagcttctgcacagaaaaagaaactagcaacacggtaaacagacagcgtgtagaatggggaaactatttgcaaactctgcatctga

SEQ ID NO: 290300 - DNA, 120 bp, Artificial Sequence
  ENSG00000131019_14 (sequence is synthesized)
ctctgcatctgacaaaggtccaatatccagaatctacaaagtacttaaacaattagacaagcaagaaaaaaaaacccaattaaaaaatgtgcaaagacatgaacagacacttttcaaaag

SEQ ID NO: 290301 - DNA, 120 bp, Artificial Sequence
  ENSG00000131019_15 (sequence is synthesized)
tggccaacaaacgtgaaaaaatgctcaatatcactaatcatcagataagtgcaaatcaaaactgcaatgagttaccatctcttaccagtcacaaagttggagatggtggtgaggctgcag

SEQ ID NO: 290302 - DNA, 120 bp, Artificial Sequence
  ENSG00000131019_16 (sequence is synthesized)
aggaaaagaaacagacactgttggtgggaaagcaaacttgttcagccgctatggaaagcagtttggagatttctccaagaacttaaaatagaactaccattcaagcctgcaatcccacta

SEQ ID NO: 290303 - DNA, 120 bp, Artificial Sequence
  ENSG00000131019_17 (sequence is synthesized)
ctcgggatatatccacaggaaaagaattcattttatccaaaagacacctgcaccaatatgttcattacagtgctattcttactagcaaggacacagaatcaacctaagtgcccagcaaca

SEQ ID NO: 290304 - DNA, 120 bp, Artificial Sequence
  ENSG00000131019_18 (sequence is synthesized)
ctgaattgaatgaaaaaaatgtggtacataaacaccatggaaatctatgcagccaccaaacacagcaaaatcatgtccttttcagcaacatggatggaactagaggctattatcctaagc

SEQ ID NO: 290305 - DNA, 120 bp, Artificial Sequence
  ENSG00000131019_19 (sequence is synthesized)
aacctaatgcaagaacagaaaactacatactgcatgttcccattggaaagtggcagctacacattgaattcacatgaaccagaggcactggagattactagacaggtgagacaggagggg

SEQ ID NO: 290306 - DNA, 120 bp, Artificial Sequence
  ENSG00000131019_20 (sequence is synthesized)
cacctgggctgaaaaaccacctgttgggtaccatgcttactgtttgagtgatgagatcattgggacaccaagcctcagccttccaaaatctacccatgtaacaaacctgtatgtgtaccc

SEQ ID NO: 290307 - DNA, 120 bp, Artificial Sequence
  ENSG00000131019_21 (sequence is synthesized)
tttaatctataataaaggttaaaattaaagattcgtaagtaaaataaaatgacatagagccctccaaaaaatggggttaactgagtggaacgagagaactttgcactatgaacgctaacc

SEQ ID NO: 290308 - DNA, 120 bp, Artificial Sequence
  ENSG00000131019_22 (sequence is synthesized)
cagatcaaaaactaaactctagtcatttaaaataatcgtaagttgtatatgatgataattgtataaaagttatacgtgaaagtgccaaaccctaaaattaaacactgcataatgaaatta

SEQ ID NO: 290309 - DNA, 120 bp, Artificial Sequence
  ENSG00000131023_0 (sequence is synthesized)
aacccctatatcaatggacttttcctctaatacatggtactgctgtattaaccactttatagctttcctttctttctttcttttacagagttaattatttatattgtaaagaattttaac

SEQ ID NO: 290310 - DNA, 120 bp, Artificial Sequence
  ENSG00000131023_1 (sequence is synthesized)
agtcctggggacttccttgaaggatcattttcacttttgctcagaagaaagctctggatctatcaaataaagaagtccttcgtgtgggctacatatatagatgttttcatgaagaggagt

SEQ ID NO: 290311 - DNA, 120 bp, Artificial Sequence
  ENSG00000131023_2 (sequence is synthesized)
gaaaagccagaaggatatagacaaatgaggcctaagacctttcctgccagtaactatactgtcagtagccggcaaatgttacaagaaattcgggaatcccttaggaatttatctaaacca

SEQ ID NO: 290312 - DNA, 120 bp, Artificial Sequence
  ENSG00000131023_3 (sequence is synthesized)
tctgatgctgctaaggctgagcataacatgagtaaaatgtcaaccgaagatcctcgacaagtcagaaatccacccaaatttgggacgcatcataaagccttgcaggaaattcgaaactct

SEQ ID NO: 290313 - DNA, 120 bp, Artificial Sequence
  ENSG00000131023_4 (sequence is synthesized)
ctgcttccatttgcaaatgaaacaaattcttctcggagtacttcagaagttaatccacaaatgcttcaagacttgcaagctgctggatttgatgaggatatggttatacaagctcttcag

SEQ ID NO: 290314 - DNA, 120 bp, Artificial Sequence
  ENSG00000131023_5 (sequence is synthesized)
aaaactaacaacagaagtatagaagcagcaattgaattcattagtaaaatgagttaccaagatcctcgacgagagcagatggctgcagcagctgccagacctattaatgccagcatgaaa

SEQ ID NO: 290315 - DNA, 120 bp, Artificial Sequence
  ENSG00000131023_6 (sequence is synthesized)
ccagggaatgtgcagcaatcagttaaccgcaaacagagctggaaaggttctaaagaatccttagttcctcagaggcatggcccgccactaggagaaagtgtggcctatcattctgagagt

SEQ ID NO: 290316 - DNA, 120 bp, Artificial Sequence
  ENSG00000131023_7 (sequence is synthesized)
cccaactcacagacagatgtaggaagacctttgtctggatctggtatatcagcatttgttcaagctcaccctagcaacggacagagagtgaaccccccaccaccacctcaagtaaggagt

SEQ ID NO: 290317 - DNA, 120 bp, Artificial Sequence
  ENSG00000131023_8 (sequence is synthesized)
gttactcctccaccacctccaagaggccagactccccctccaagaggtacaactccacctcccccttcatgggaaccaaactctcaaacaaagcgctattctggaaacatggaatacgta

SEQ ID NO: 290318 - DNA, 120 bp, Artificial Sequence
  ENSG00000131023_9 (sequence is synthesized)
atctcccgaatctctcctgtcccacctggggcatggcaagagggctatcctccaccacctctcaacacttcccccatgaatcctcctaatcaaggacagagaggcattagttctgttcct

SEQ ID NO: 290319 - DNA, 120 bp, Artificial Sequence
  ENSG00000131023_10 (sequence is synthesized)
gttggcagacaaccaatcatcatgcagagttctagcaaatttaactttccatcagggagacctggaatgcagaatggtactggacaaactgatttcatgatacaccaaaatgttgtccct

SEQ ID NO: 290320 - DNA, 120 bp, Artificial Sequence
  ENSG00000131023_11 (sequence is synthesized)
gctggcactgtgaatcggcagccaccacctccatatcctctgacagcagctaatggacaaagcccttctgctttacaaacagggggatctgctgctccttcgtcatatacaaatggaagt

SEQ ID NO: 290321 - DNA, 120 bp, Artificial Sequence
  ENSG00000131023_12 (sequence is synthesized)
attcctcagtctatgatggtgccaaacagaaatagtcataacatggaactatataacattagtgtacctggactgcaaacaaattggcctcagtcatcttctgctccagcccagtcatcc

SEQ ID NO: 290322 - DNA, 120 bp, Artificial Sequence
  ENSG00000131023_13 (sequence is synthesized)
ccgagcagtgggcatgaaatccctacatggcaacctaacataccagtgaggtcaaattcttttaataacccattaggaaatagagcaagtcactctgctaattctcagccttctgctaca

SEQ ID NO: 290323 - DNA, 120 bp, Artificial Sequence
  ENSG00000131023_14 (sequence is synthesized)
acagtcactgcaattacaccagctcctattcaacagcctgtgaaaagtatgcgtgtattaaaaccagagctacagactgctttagcacctacacacccttcttggataccacagccaatt

SEQ ID NO: 290324 - DNA, 120 bp, Artificial Sequence
  ENSG00000131023_15 (sequence is synthesized)
caaactgttcaacccagtccttttcctgagggaaccgcttcaaatgtgactgtgatgccacctgttgctgaagctccaaactatcaaggaccaccaccaccctacccaaaacatctgctg

SEQ ID NO: 290325 - DNA, 120 bp, Artificial Sequence
  ENSG00000131023_16 (sequence is synthesized)
caccaaaacccatctgttcctccatacgagtcaatcagtaagcctagcaaagaggatcagccaagcttgcccaaggaagatgagagtgaaaagagttatgaaaatgttgatagtggggat

SEQ ID NO: 290326 - DNA, 120 bp, Artificial Sequence
  ENSG00000131023_17 (sequence is synthesized)
tgaagagcgaagggaatctcgtattcaaagttattctcctcaagcatttaaattctttatggagcaacatgtagaaaatgtactcaaatctcatcagcagcgtctacatcgtaaaaaaca

SEQ ID NO: 290327 - DNA, 120 bp, Artificial Sequence
  ENSG00000131023_18 (sequence is synthesized)
attagagaatgaaatgatgcgggttggattatctcaagatgcccaggatcaaatgagaaagatgctttgccaaaaagaatctaattacatccgtcttaaaagggctaaaatggacaagtc

SEQ ID NO: 290328 - DNA, 120 bp, Artificial Sequence
  ENSG00000131023_19 (sequence is synthesized)
tatgtttgtgaagataaagacactaggaataggagcatttggtgaagtctgtctagcaagaaaagtagatactaaggctttgtatgcaacaaaaactcttcgaaagaaagatgttcttct

SEQ ID NO: 290329 - DNA, 120 bp, Artificial Sequence
  ENSG00000131023_20 (sequence is synthesized)
tcgaaatcaagtcgctcatgttaaggctgagagagatatcctggctgaagctgacaatgaatgggtagttcgtctatattattcattccaagataaggacaatttatactttgtaatgga

SEQ ID NO: 290330 - DNA, 120 bp, Artificial Sequence
  ENSG00000131023_21 (sequence is synthesized)
ctacattcctgggggtgatatgatgagcctattaattagaatgggcatctttccagaaagtctggcacgattctacatagcagaacttacctgtgcagttgaaagtgttcataaaatggg

SEQ ID NO: 290331 - DNA, 120 bp, Artificial Sequence
  ENSG00000131023_22 (sequence is synthesized)
ttttattcatagagatattaaacctgataatattttgattgatcgtgatggtcatattaaattgactgactttggcctctgcactggcttcagatggacacacgattctaagtactatca

SEQ ID NO: 290332 - DNA, 120 bp, Artificial Sequence
  ENSG00000131023_23 (sequence is synthesized)
gagtggtgaccatccacggcaagatagcatggatttcagtaatgaatggggggatccctcaagctgtcgatgtggagacagactgaagccattagagcggagagctgcacgccagcacca

SEQ ID NO: 290333 - DNA, 120 bp, Artificial Sequence
  ENSG00000131023_24 (sequence is synthesized)
gcgatgtctagcacattctttggttgggactcccaattatattgcacctgaagtgttgctacgaacaggatacacacagttgtgtgattggtggagtgttggtgttattctttttgaaat

SEQ ID NO: 290334 - DNA, 120 bp, Artificial Sequence
  ENSG00000131023_25 (sequence is synthesized)
gttggtgggacaacctcctttcttggcacaaacaccattagaaacacaaatgaaggttatcaactggcaaacatctcttcacattccaccacaagctaaactcagtcctgaagcttctga

SEQ ID NO: 290335 - DNA, 120 bp, Artificial Sequence
  ENSG00000131023_26 (sequence is synthesized)
tcttattattaaactttgccgaggacccgaagatcgcttaggcaagaatggtgctgatgaaataaaagctcatccattttttaaaacaattgacttctccagtgacctgagacagcagtc

SEQ ID NO: 290336 - DNA, 120 bp, Artificial Sequence
  ENSG00000131023_27 (sequence is synthesized)
tgcttcatacattcctaaaatcacacacccaacagatacatcaaattttgatcctgttgatcctgataaattatggagtgatgataacgaggaagaaaatgtaaatgacactctcaatgg

SEQ ID NO: 290337 - DNA, 120 bp, Artificial Sequence
  ENSG00000131023_28 (sequence is synthesized)
atggtataaaaatggaaagcatcctgaacatgcattctatgaatttaccttccgaaggttttttgatgacaatggctacccatataattatccgaagcctattgaatatgaatacattaa

SEQ ID NO: 290338 - DNA, 120 bp, Artificial Sequence
  ENSG00000131023_29 (sequence is synthesized)
ttcacaaggctcagagcagcagtcggatgaagatgatcaaaacacaggctcagagattaaaaatcgcgatctagtatatgtttaacacactagtaaataaatgtaatgaggatttgtaaa

SEQ ID NO: 290339 - DNA, 120 bp, Artificial Sequence
  ENSG00000131023_30 (sequence is synthesized)
agggcctgaaatgcgaggtgttttgaggttctgagagtaaaattatgcaaatatgacagagctatatatgtgtgctctgtgtacaatattttattttcctaaattatgggaaatcctttt

SEQ ID NO: 290340 - DNA, 120 bp, Artificial Sequence
  ENSG00000131023_31 (sequence is synthesized)
aaaatgttaatttattccagccgtttaaatcagtatttagaaaaaaattgttataaggaaagtaaattatgaactgaatattatagtcagttcttggtacttaaagtacttaaaataagt

SEQ ID NO: 290341 - DNA, 120 bp, Artificial Sequence
  ENSG00000131023_32 (sequence is synthesized)
agtgctttgtttaaaaggagaaacctggtatctatttgtatatatgctaaataattttaaaatacaagagtttttgaaatttttttgaaagacagttttagttttatcttgctttaacca

SEQ ID NO: 290342 - DNA, 120 bp, Artificial Sequence
  ENSG00000131023_33 (sequence is synthesized)
aatatgaaacataccccctattttacagagctcttttttcccctcataaccttgtttttggtagaaaataagctagagaaattaagccatcgtgttggtgagtgttcctaggctaatgat

SEQ ID NO: 290343 - DNA, 120 bp, Artificial Sequence
  ENSG00000131023_34 (sequence is synthesized)
aatctgtataattcacatcctgaaactaaggaatacagggttgaaaaaatattaatatgtttgtcagaaggaaaaataatgcatttatcttcccccccaccccccgccccatggaatatt

SEQ ID NO: 290344 - DNA, 120 bp, Artificial Sequence
  ENSG00000131023_35 (sequence is synthesized)
agcggagtgcggcggcggcgacactgagtggaaggcaaaatggcggcggcggcggcggtggcctggtgttaaggggagagccaggtcctcacgacccctgggacgggccgcgctggcccg

SEQ ID NO: 290345 - DNA, 120 bp, Artificial Sequence
  ENSG00000131023_36 (sequence is synthesized)
cggcagcccccccgttcgtctccccgctctgccccaccagggatacttggggttgctgggacggactctggccgcctcagcgtccgccctcaggcccgtggccgctgtccaggagctctg

SEQ ID NO: 290346 - DNA, 120 bp, Artificial Sequence
  ENSG00000131023_37 (sequence is synthesized)
gcactactagctttttttccatattggtatttttgatgctgcttccaattttaaaagggaacaaagctgccataaatcgaaatgttcaatactaaaagctaaaatatttctcaccatcct

SEQ ID NO: 290347 - DNA, 120 bp, Artificial Sequence
  ENSG00000131023_38 (sequence is synthesized)
aagcagataattattttaattttcatatacttttcctgtatagtaactattttgattatatcatcaatgttacctgtttcctctttcagaacagtgctgcatatacagattgttattggc

SEQ ID NO: 290348 - DNA, 120 bp, Artificial Sequence
  ENSG00000131023_39 (sequence is synthesized)
aaaggaaaatctggctatctggcaatattttacctaagcgcagattaattggtgaaaaaattaactcttaagatggccattaataattaggaaagtttacagagtggtcttagtagaaaa

SEQ ID NO: 290349 - DNA, 120 bp, Artificial Sequence
  ENSG00000131023_40 (sequence is synthesized)
ttcaagtcctcctaatttatttaaggttcaataatgcgttcaacatgcctgttatgtataacgcttaggttctaaggaagattaaggtttcataccaaaatacatgtagcttatctttta

SEQ ID NO: 290350 - DNA, 120 bp, Artificial Sequence
  ENSG00000131023_41 (sequence is synthesized)
ggaaggggaaaaaggctccattttgaccatagtaaaatttgtgttgtgttttatttccttttcttaagctccactgataagggattgtttttatcaaaagttactatttgtagattggag

SEQ ID NO: 290351 - DNA, 120 bp, Artificial Sequence
  ENSG00000131023_42 (sequence is synthesized)
gcataattttagtgattttcatacttttagctttcttcgcataaaagctaattgaaaccgtatatgtagtaaaattaaaggcagagctgttgcagttgaattggagagttagggcaaaga

SEQ ID NO: 290352 - DNA, 120 bp, Artificial Sequence
  ENSG00000131023_43 (sequence is synthesized)
acacttattagcccacacttcccacctttctacaggtggtcctttcagagctcagcctgaaaacccactactgtgttatcgtgcgtcttttggggttagtggttcttttgagaatctgaa

SEQ ID NO: 290353 - DNA, 120 bp, Artificial Sequence
  ENSG00000131023_44 (sequence is synthesized)
ggaagctgtggactcttcctagaaaaaaaaaccacacatacacatacaatgttgcatgcagtttcaagggattttggacatattgaaacctatcacaggctgtaggttatggacctctgt

SEQ ID NO: 290354 - DNA, 120 bp, Artificial Sequence
  ENSG00000131023_45 (sequence is synthesized)
gccatgagaaaattgatacattaaactaagaactttgtttttaacttaccaatcactactcagcacatcttatataagctgataatttgtgatggaaaaggtctgtagcatgtgatataa

SEQ ID NO: 290355 - DNA, 120 bp, Artificial Sequence
  ENSG00000131023_46 (sequence is synthesized)
ggtgaccttatgaatgcctctcttgctggtacattaagttgttttaatatatcatttggaggggactgaaatgttaggctcattacaagcttgatacagaaatatttctgaaggatttct

SEQ ID NO: 290356 - DNA, 120 bp, Artificial Sequence
  ENSG00000131023_47 (sequence is synthesized)
aatcagaattgtaaaacaatgtgctatcatgaaatcgcagtcttcacctcatggttcatggaacatttggttagtcccataaaatcctatgcaaaacaaagtagttcaagaatttttagg

SEQ ID NO: 290357 - DNA, 120 bp, Artificial Sequence
  ENSG00000131023_48 (sequence is synthesized)
tgggtagtcacatttataaggtattcctcttactctttgggctttttcagtctgatttatttaaattttcatttagttgttttacttttggactaaggtgcaatacagtagaagataact

SEQ ID NO: 290358 - DNA, 120 bp, Artificial Sequence
  ENSG00000131023_49 (sequence is synthesized)
ttgttacatttatgttgtaggaaaactaaggtgctgtctcctcccccttcccttcccacaaaatctgtattccccctattgctgaaatgtaacagacactacaaattttgtattcttttt

SEQ ID NO: 290359 - DNA, 88 bp, Artificial Sequence
  ENSG00000131023_50 (sequence is synthesized)
gtcacccaggctggagggcagtggcgcttcacagctcactgcatcctcaaccttgggggctcacgcacatgcgccaccaagcccagct

SEQ ID NO: 290360 - DNA, 64 bp, Artificial Sequence
  ENSG00000131023_51 (sequence is synthesized)
atgcgccaccattggtgtggaattcctgggctccagttatatgcccacctcagcctcccaaagt

SEQ ID NO: 290361 - DNA, 120 bp, Artificial Sequence
  ENSG00000131023_52 (sequence is synthesized)
cccaaagtgctgggattacagacgtgacccaccgcgcctggcgcaaatatgtattcttttaaaatttcctctgatactataagctttttgcatttatctgaagcagtatacatgcctttg

SEQ ID NO: 290362 - DNA, 120 bp, Artificial Sequence
  ENSG00000131023_53 (sequence is synthesized)
tttggtatcagcaattttaacagtttggatatacttatcagctatcttattccaaaactacatctacttcttccagtatagaatctggtgcttcctgaccaaaaagatgagaaaaacaat

SEQ ID NO: 290363 - DNA, 120 bp, Artificial Sequence
  ENSG00000131023_54 (sequence is synthesized)
gttaaaaatatagatgctttccattgaaatggagtgaaaacattggttctatatgttttcttttaaaataattttcttattaaaaacttgctgtctttattatacttaccctttttatgc

SEQ ID NO: 290364 - DNA, 120 bp, Artificial Sequence
  ENSG00000131023_55 (sequence is synthesized)
atatcaatagtatttataagatgtgttctataattatgtaattgtagatactgttatgcattgtccagtgacatcataaggcaggccctactgctgtatcttttctaccttcttatttgt

SEQ ID NO: 290365 - DNA, 120 bp, Artificial Sequence
  ENSG00000131023_56 (sequence is synthesized)
aatagaaactatagaatgtatgactaaaaagtcactttgagattgacttttttaaaaagttattaccttctgctgttgcaaagtgcaaaactgtgagtggaattgttttattctgactta

SEQ ID NO: 290366 - DNA, 120 bp, Artificial Sequence
  ENSG00000131023_57 (sequence is synthesized)
atgtgttagaaattagagaatacagtgggaggatttttagacattgctgctgctgttacccaaggtattttagataaaaaatttttaataaacatccctttggtatttaaagtggaacat

SEQ ID NO: 290367 - DNA, 120 bp, Artificial Sequence
  ENSG00000131023_58 (sequence is synthesized)
ttagcctgttcattttaatctaaagcaaaaagtaatttgggtcaaaatattggtatatttgtaaagcgccttaatatatccctttgtggaaggcactacacagtttacttttatattgta

SEQ ID NO: 290368 - DNA, 120 bp, Artificial Sequence
  ENSG00000131023_59 (sequence is synthesized)
ttgtgtatataagtattttgtattaaaattgaatcagtggcaacattaaagttttataaaatcatgctttgttagaaaaagaattacagctttgcaatataactaattgtttcgcataat

SEQ ID NO: 290369 - DNA, 120 bp, Artificial Sequence
  ENSG00000131023_60 (sequence is synthesized)
tctgaatgtaatagatatgaataatcagcctgtgtttttaatgaacttatttgtattttcccaatcattttctctagtgtaatgtttgctgggataataaaaaaaattcaaatctttcaa

SEQ ID NO: 290370 - DNA, 120 bp, Artificial Sequence
  ENSG00000131023_61 (sequence is synthesized)
tgtccatttttatacttaatcatctgtttgcttggtgtttattttaaaatattgtgtccagtatttttctttctttttatagctaaataaaatatattatcagttatggaatttaaaagt

SEQ ID NO: 290371 - DNA, 120 bp, Artificial Sequence
  ENSG00000131023_62 (sequence is synthesized)
agcaatcatttttcagcatgaagatacagcgttgctttcacttttgatctgacaattattagaaagtgaactgaagaaaatgtcagtatgcagtttcctttaaagatgggaactcgctat

SEQ ID NO: 290372 - DNA, 89 bp, Artificial Sequence
  ENSG00000131023_63 (sequence is synthesized)
tgtcagtatgcagtttcctttaaagatgggaactcgctatgttgcctgcgctggattccaactcctggactcgagcaatcctcccacca

SEQ ID NO: 290373 - DNA, 120 bp, Artificial Sequence
  ENSG00000131023_64 (sequence is synthesized)
ttcttggcacaaacaccattagaaacacaaatgaaggtaaggtatggcatctatatcaaaagaattctcacaaagttgctacatcattgacttttatttattagtacgtagagcatttta

SEQ ID NO: 290374 - DNA, 120 bp, Artificial Sequence
  ENSG00000131023_65 (sequence is synthesized)
gacttttatttattagtacgtagagcattttagtctggagttaaagaatgaacttgggccgggtgcagtggctcacacccataatgccagttctttgggaggctgaggcaggaggattgc

SEQ ID NO: 290375 - DNA, 120 bp, Artificial Sequence
  ENSG00000131023_66 (sequence is synthesized)
caatgtgagaccacatctctacaaacaaatattttttaatttaaaaaaggaaaagaatgaacttgtaagggtataggaactcaccagaattgcatgcgtgaactccagtctccatgatgc

SEQ ID NO: 290376 - DNA, 120 bp, Artificial Sequence
  ENSG00000131023_67 (sequence is synthesized)
aactccagtctccatgatgccatatccccataatcttgtatcccccctcactcatacagcatactcatatatcatatatcattctcaaaaaggtctttaggccaggcacggtggctcatg

SEQ ID NO: 290377 - DNA, 120 bp, Artificial Sequence
  ENSG00000131037_0 (sequence is synthesized)
agcctggaagggaaaggacagcggagagcagggcagagcctgagcaggcagggcacctccaggtgggcaggagctaccactcagcaccatgagcaccgccacaggcccagaagctgcccc

SEQ ID NO: 290378 - DNA, 120 bp, Artificial Sequence
  ENSG00000131037_1 (sequence is synthesized)
aaagccaagcgccaagtctatctatgagcagaggaagcgttactccacagttgttatggctgatgtatcccagtacccagtcaatcacctggtgacgttctgcctgggtgaggacgatgg

SEQ ID NO: 290379 - DNA, 120 bp, Artificial Sequence
  ENSG00000131037_2 (sequence is synthesized)
cgtgcataccgtggaggatgcctccaggaagttggccgtcatggatagccagggccgagtctgggcacaggagatgctgctgcgagtgtctcccgaccatgtcacgctgctcgacccggc

SEQ ID NO: 290380 - DNA, 120 bp, Artificial Sequence
  ENSG00000131037_3 (sequence is synthesized)
ctccaaggaggagctggagtcgtacccactgggcgccatcgtgcgctgtgacgcggtgatgccacccggcaggagccgctcgttgctgctgctcgtgtgccaggaacccgagcgcgcgca

SEQ ID NO: 290381 - DNA, 120 bp, Artificial Sequence
  ENSG00000131037_4 (sequence is synthesized)
gcccgacgtgcacttcttccagggcctgcgcctcggggcggagctgatccgagaggacatccagggggctctgcacaattaccgctcgggccgcggggagcgcagggcggcggcgctcag

SEQ ID NO: 290382 - DNA, 120 bp, Artificial Sequence
  ENSG00000131037_5 (sequence is synthesized)
ggccacgcaggaggagttgcagcgcgaccgctcgcccgccgctgagaccccgcccctgcagcgccgcccgtcagtccgcgcagtgatcagcaccgtagagcggggcgcgggccgcggacg

SEQ ID NO: 290383 - DNA, 120 bp, Artificial Sequence
  ENSG00000131037_6 (sequence is synthesized)
accccaggcgaagcccattcccgaggcagaggaggcgcagaggcctgagccggtggggacctcgagcaacgctgactcggcctccccggacctgggtccccggggtcctgacctggcggt

SEQ ID NO: 290384 - DNA, 120 bp, Artificial Sequence
  ENSG00000131037_7 (sequence is synthesized)
tctgcaggcggagcgggaagtggacatcctgaaccacgtgttcgacgacgtagagagctttgtatcgaggctgcagaagtcggcggaggcggccagggtgctggagcaccgggaacgcgg

SEQ ID NO: 290385 - DNA, 120 bp, Artificial Sequence
  ENSG00000131037_8 (sequence is synthesized)
ccgcaggagccggcgccgggcggctggggagggcttgctgacgctgcgggccaagccgccctcggaggccgagtacaccgacgtgctgcagaagatcaagtacgccttcagcctgctggc

SEQ ID NO: 290386 - DNA, 120 bp, Artificial Sequence
  ENSG00000131037_9 (sequence is synthesized)
ccggctgcgcggcaacatcgccgacccctcctctccggagctgttgcacttccttttcgggcctctgcagatgattgtgaacacgtcgggggggccggagttcgcgagcagtgtgcggcg

SEQ ID NO: 290387 - DNA, 120 bp, Artificial Sequence
  ENSG00000131037_10 (sequence is synthesized)
ccacgtgaaaacgagctctggacctcgctgggggactcgtggacccgccccgggctggagctgtccccggaggagggacccccatacagacccgagttcttcagcggctgggagccgccg

SEQ ID NO: 290388 - DNA, 120 bp, Artificial Sequence
  ENSG00000131037_11 (sequence is synthesized)
gtcactgacccgcagagccgcgcctgggaggacccagttgagaaacagctacagcacgagcggaggcgccggcagcaaagcgccccccaggtcgctgtcaatggtcaccgagacttggag

SEQ ID NO: 290389 - DNA, 120 bp, Artificial Sequence
  ENSG00000131037_12 (sequence is synthesized)
ccagaatctgagcctcagctggagtcagagacagcaggaaaatgggtcctgtgtaattatgacttccaggcccgcaacagcagtgagctgtcggtcaagcagcgggacgtactggaggtc

SEQ ID NO: 290390 - DNA, 120 bp, Artificial Sequence
  ENSG00000131037_13 (sequence is synthesized)
ctggatgacagtcgtaagtggtggaaggttcgggacccagcggggcaggagggatatgtgccctacaacatcctgacaccctaccccggaccccggctgcaccacagccaaagccctgcc

SEQ ID NO: 290391 - DNA, 120 bp, Artificial Sequence
  ENSG00000131037_14 (sequence is synthesized)
cgcagcctgaacagcactcctcctccaccaccagccccagccccggccccacctccagctctggctcggccccgctgggacaggccccgctgggacagctgcgatagcctcaacggcttg

SEQ ID NO: 290392 - DNA, 120 bp, Artificial Sequence
  ENSG00000131037_15 (sequence is synthesized)
gaccccagcgagaaggagaaattctcccagatgctcatcgtcaacgaggaactgcaggcgcgcctggcccagggccgctcgggaccgagccgcgcagtcccagggccccgcgccccggaa

SEQ ID NO: 290393 - DNA, 120 bp, Artificial Sequence
  ENSG00000131037_16 (sequence is synthesized)
ccgcagctcagcccgggctcggacgcctccgaggtccgcgcctggctgcaggccaagggctttagctccgggaccgtggacgcgctgggtgtgctgaccggggcgcagcttttctcgctg

SEQ ID NO: 290394 - DNA, 120 bp, Artificial Sequence
  ENSG00000131037_17 (sequence is synthesized)
cagaaggaggagctgcgggcggtgagccccgaggagggggcacgtgtgtacagccaggtcaccgtgcagcgctcgctgctggaggacaaagagaaagtgtcagagctggaggcagtgatg

SEQ ID NO: 290395 - DNA, 120 bp, Artificial Sequence
  ENSG00000131037_18 (sequence is synthesized)
gagaagcaaaagaagaaggtggaaggcgaggtggaaatggaggtcatttgacctgccaggcgcccttcgcaaagagtgacgaggccccgtgggagaacggactcctcagactctccccaa

SEQ ID NO: 290396 - DNA, 120 bp, Artificial Sequence
  ENSG00000131037_19 (sequence is synthesized)
tagcggaagtcgatcttctgaaggatggccaatctgctccggccctggtcttcccccatcccggtggacagacttaacgatccttgctgcagtccctccggagaggatctggactggctg

SEQ ID NO: 290397 - DNA, 120 bp, Artificial Sequence
  ENSG00000131037_20 (sequence is synthesized)
ggagtggggagggcgtggagacagtctacggaaagcgctagcagacccccgagagggtgcagtggagccctgagcattgtaatatgcggcccagcctataaacagcctccgtgcttagca

SEQ ID NO: 290398 - DNA, 120 bp, Artificial Sequence
  ENSG00000131037_21 (sequence is synthesized)
gagaaacagctacagcacgagcggaggcgccggcaggtgacccaagcgacacagcagggccgaggctgggaagtccgggggcgcggccggtccgcctggccccgcctgacccgactgtct

SEQ ID NO: 290399 - DNA, 120 bp, Artificial Sequence
  ENSG00000131037_22 (sequence is synthesized)
agactccgactggattccttagggaaatcccgtaccctttgaaagcaggatgcggccacgccccccgggtggcaacattgtgattggtgggtggggttcaggaggtgtcgggcctgcccc

SEQ ID NO: 290400 - DNA, 120 bp, Artificial Sequence
  ENSG00000131037_23 (sequence is synthesized)
cgctagagctagaatgctgttctgattggaccatcgccgggtgggcgtgacatgattgtccgggctggggcatccgccgaccggcctgaccgcgcccgggctgccctcgctcaggaccgt

SEQ ID NO: 290401 - DNA, 120 bp, Artificial Sequence
  ENSG00000131037_24 (sequence is synthesized)
cttgtttcaaatttctattaacagtattaacccggcccctgctgtgcccccagcttggctctaaccccagctcacaccagcaccctgcagcccagagcaatggggctggctgcctcctta

SEQ ID NO: 290402 - DNA, 120 bp, Artificial Sequence
  ENSG00000131037_25 (sequence is synthesized)
agactggagggaagcaacgtgggaggagacgaaaacaaagcagtgaggctggaggagacaaaggggggtctgggtgagggcccgagcagagggtctcagcagggacagcgtgctgggagc

SEQ ID NO: 290403 - DNA, 120 bp, Artificial Sequence
  ENSG00000131037_26 (sequence is synthesized)
agtggggtttgagattggacccagggtcaagatagaacatgaaggtgggatgaggacatgaacagaacatggccaagaaggatctgggggagcagccaggacgaggtgggggcgaggaac

SEQ ID NO: 290404 - DNA, 120 bp, Artificial Sequence
  ENSG00000131037_27 (sequence is synthesized)
cacccggactgggtctccatgggcggggtcgtggcttagggcagggacaggtgtagggcgaggggtgagttcggggcgtggacgtgcgtgggttcacaggtgtgaacggtagccgcacgt

SEQ ID NO: 290405 - DNA, 120 bp, Artificial Sequence
  ENSG00000131037_28 (sequence is synthesized)
agagcaaggaagggcaggggacctgggaaggaagttctggaaggcagtggggtttgagattggacccagggtcaagatagaacatgaaggtgggatgaggacatgaacagaacatggcca

SEQ ID NO: 290406 - DNA, 120 bp, Artificial Sequence
  ENSG00000131037_29 (sequence is synthesized)
tctctgttccctgtccaggccctcagtttcactctagagaggtgctatccctccgtatatcggatttctccctacctcgttgaacttgttcactccctttgagccttttgagcctgtgtg

SEQ ID NO: 290407 - DNA, 120 bp, Artificial Sequence
  ENSG00000131037_30 (sequence is synthesized)
cttccagggcctgcgcctcggggtgagcagatgggctggctctgggggtggagctggaactgggcggagcctggagccggggcggaaatgggtggggcctctaggtggggcggggcctgg

SEQ ID NO: 290408 - DNA, 120 bp, Artificial Sequence
  ENSG00000131037_31 (sequence is synthesized)
ccagaacacccctatcttctaggattgacactggctgtcaaactcatccttcaaggtgattcctggcctgccctcctcctccaggcagcctgtcctcctcctccaggcagcctgtcctga

SEQ ID NO: 290409 - DNA, 120 bp, Artificial Sequence
  ENSG00000131037_32 (sequence is synthesized)
ccctcagcagcctctcctggccttggcagagcccctcgtgtcctcccttgcagcacgcatgggaagaaaggccatcgtcctcgccattgctaacaccagccttgcgtttcctctttgcca

SEQ ID NO: 290410 - DNA, 120 bp, Artificial Sequence
  ENSG00000131037_33 (sequence is synthesized)
gatctcttccaaatgtccccgctctccccaggctctcccctcccgccacttgccagggctgacctcaccgccatcttaaccgggtgtccacctctctctgcctgcctggtgctggccccg

SEQ ID NO: 290411 - DNA, 120 bp, Artificial Sequence
  ENSG00000131037_34 (sequence is synthesized)
atggagacccggattcctgggcctaagggaggaagggggctgggagtgggtaaagtctgagaggttggatccctggatccccaaaaggctggaagaagccagtttgttttcccagggcct

SEQ ID NO: 290412 - DNA, 120 bp, Artificial Sequence
  ENSG00000131037_35 (sequence is synthesized)
aggaggtgtggttagtctcaggctgaaagtctgattattctgggggattctgagcccacctggcatcatcttgggcctcactgctttctccatggtccgtaccagcacctggtgacgttc

SEQ ID NO: 290413 - DNA, 120 bp, Artificial Sequence
  ENSG00000131037_36 (sequence is synthesized)
aggaattagaggctcctactggccaggccttcacatgtttgctggctcccagggcacctccaggtgggcaggagctaccactcagcaccatgagcaccgccacaggcccagaagctgccc

SEQ ID NO: 290414 - DNA, 120 bp, Artificial Sequence
  ENSG00000131037_37 (sequence is synthesized)
tgggatcctggagacccagaggagcaggcttgggacttcaagggcttgggggcaagtttctgggaaagttaggaagtggtagtatctctgggcccccgagaggggtaaaggctggacgat

SEQ ID NO: 290415 - DNA, 120 bp, Artificial Sequence
  ENSG00000131037_38 (sequence is synthesized)
taaactcttggttttccagaggctctaatgcaattgtctaagtcgctgctgggtgtcggactgggttaaaaggtttgagggttaaaaggataagattgaagcttgagacctggactccta

SEQ ID NO: 290416 - DNA, 120 bp, Artificial Sequence
  ENSG00000131037_39 (sequence is synthesized)
ggtccctgggggaggaaagaacattccaagtcatggttctaccaagcagtgggggctcagactctgggtcctgggggagggaaggaggtagatggactagaactctagggtccttgagca

SEQ ID NO: 290417 - DNA, 120 bp, Artificial Sequence
  ENSG00000131042_0 (sequence is synthesized)
gggactatttggttgaaagaaaacccacaatccagtgtcaagaaagaagtcaacttttcttcccctacttccctgcatttctcctctgtgctcactgccacacacagctcaacctggaca

SEQ ID NO: 290418 - DNA, 120 bp, Artificial Sequence
  ENSG00000131042_1 (sequence is synthesized)
gcacagccagaggcgagatgcttctctgctgatctgagtctgcctgcagcatggacctgggtcttccctgaagcatctccagggctggagggacgactgccatgcaccgagggctcatcc

SEQ ID NO: 290419 - DNA, 120 bp, Artificial Sequence
  ENSG00000131042_2 (sequence is synthesized)
atccgcagagcagggcagtgggaggagacgccatgacccccatcgtcacagtcctgatctgtctcgggctgagtctgggccccaggacccgcgtgcagacagggaccatccccaagccca

SEQ ID NO: 290420 - DNA, 120 bp, Artificial Sequence
  ENSG00000131042_3 (sequence is synthesized)
ccctgtgggctgagccagactctgtgatcacccaggggagtcccgtcaccctcagttgtcaggggagccttgaagcccaggagtaccgtctatatagggagaaaaaatcagcatcttgga

SEQ ID NO: 290421 - DNA, 120 bp, Artificial Sequence
  ENSG00000131042_4 (sequence is synthesized)
ttacacggatacgaccagagcttgtgaagaacggccagttccacatcccatccatcacctgggaacacacagggcgatatggctgtcagtattacagccgcgctcggtggtctgagctca

SEQ ID NO: 290422 - DNA, 120 bp, Artificial Sequence
  ENSG00000131042_5 (sequence is synthesized)
gtgaccccctggtgctggtgatgacaggagcctacccaaaacccaccctctcagcccagcccagccctgtggtgacctcaggaggaagggtgaccctccagtgtgagtcacaggtggcat

SEQ ID NO: 290423 - DNA, 120 bp, Artificial Sequence
  ENSG00000131042_6 (sequence is synthesized)
ttggcggcttcattctgtgtaaggaaggagaagatgaacacccacaatgcctgaactcccagccccatgcccgtgggtcgtcccgcgccatcttctccgtgggccccgtgagcccgaatc

SEQ ID NO: 290424 - DNA, 120 bp, Artificial Sequence
  ENSG00000131042_7 (sequence is synthesized)
gcaggtggtcgcacaggtgctatggttatgacttgaactctccctatgtgtggtcttcacccagtgatctcctggagctcctggtcccaggtgtttctaagaagccatcactctcagtgc

SEQ ID NO: 290425 - DNA, 120 bp, Artificial Sequence
  ENSG00000131042_8 (sequence is synthesized)
agccgggtcctgtcatggcccctggggaaagcctgaccctccagtgtgtctctgatgtcggctatgacagatttgttctgtacaaggagggggaacgtgaccttcgccagctccctggcc

SEQ ID NO: 290426 - DNA, 120 bp, Artificial Sequence
  ENSG00000131042_9 (sequence is synthesized)
cccaggctgggctctcccaggccaacttcaccctgggccctgtgagccgctcctacgggggccagtacagatgctacggtgcacacaacctctcctctgagtgctcggcccccagcgacc

SEQ ID NO: 290427 - DNA, 120 bp, Artificial Sequence
  ENSG00000131042_10 (sequence is synthesized)
ccctggacatcctgatcacaggacagatccgtggcacacccttcatctcagtgcagccaggccccacagtggcctcaggagagaacgtgaccctgctgtgtcagtcatggcggcagttcc

SEQ ID NO: 290428 - DNA, 120 bp, Artificial Sequence
  ENSG00000131042_11 (sequence is synthesized)
acactttccttctgaccaaggcgggagcagctgatgccccactccgtctaagatcaatacacgaatatcctaagtaccaggctgaattccccatgagtcctgtgacctcagcccacgcgg

SEQ ID NO: 290429 - DNA, 120 bp, Artificial Sequence
  ENSG00000131042_12 (sequence is synthesized)
ggacctacaggtgctacggctcactcaactccgacccctacctgctgtctcaccccagtgagcccctggagctcgtggtctcaggaccctccatgggttccagccccccacccaccggtc

SEQ ID NO: 290430 - DNA, 120 bp, Artificial Sequence
  ENSG00000131042_13 (sequence is synthesized)
ccatctccacacctgcaggccctgaggaccagcccctcacccccactgggtcggatccccaaagtggtctgggaaggcacctgggggttgtgatcggcatcttggtggccgtcgtcctac

SEQ ID NO: 290431 - DNA, 120 bp, Artificial Sequence
  ENSG00000131042_14 (sequence is synthesized)
tgctcctcctcctcctcctcctcttcctcatcctccgacatcgacgtcagggcaaacactggacatcgacccagagaaaggctgatttccaacatcctgcaggggctgtggggccagagc

SEQ ID NO: 290432 - DNA, 120 bp, Artificial Sequence
  ENSG00000131042_15 (sequence is synthesized)
ccacagacagaggcctgcagtggaggtccagcccagctgccgacgcccaggaagaaaacctctatgctgccgtgaaggacacacagcctgaagatggggtggagatggacactcgggctg

SEQ ID NO: 290433 - DNA, 120 bp, Artificial Sequence
  ENSG00000131042_16 (sequence is synthesized)
ctgcatctgaagccccccaggatgtgacctacgcccagctgcacagcttgaccctcagacggaaggcaactgagcctcctccatcccaggaaagggaacctccagctgagcccagcatct

SEQ ID NO: 290434 - DNA, 120 bp, Artificial Sequence
  ENSG00000131042_17 (sequence is synthesized)
acgccaccctggccatccactagcccggagggtacgcagactccacactcagtagaaggagactcaggactgctgaaggcacgggagctgcccccagtggacaccaatgaaccccagtca

SEQ ID NO: 290435 - DNA, 120 bp, Artificial Sequence
  ENSG00000131042_18 (sequence is synthesized)
gcctggacccctaacaaagaccatgaggagatgctgggaactttgggactcacttgattctgcagtcgaaataactaatatccctacattttttaattaaagcaacagacttctcaataa

SEQ ID NO: 290436 - DNA, 120 bp, Artificial Sequence
  ENSG00000131042_19 (sequence is synthesized)
tttaaactgaatcacaatataaatattacacatcacacaatgaaattgaaaaagtacaaaccacaaatgaaaaaagtagaaacgaaaaaaaaaaactaggaaatgaatgacgttggcttt

SEQ ID NO: 290437 - DNA, 120 bp, Artificial Sequence
  ENSG00000131042_20 (sequence is synthesized)
cgtataaggaatttagaaaaagaataaccaattattccaaatgaaggtgtaagaaagggaataagaagaagaagagttgctcatgaggaaaaaccaaaacttgaaaattcaacaaagcca

SEQ ID NO: 290438 - DNA, 120 bp, Artificial Sequence
  ENSG00000131042_21 (sequence is synthesized)
atgaagctcattcttgaaaatattaattacagtcataaatcctaactacattgagcaagagaaagaaagagcaggcacgcatttccatatgggagtgagccagcagacagcccagcagat

SEQ ID NO: 290439 - DNA, 120 bp, Artificial Sequence
  ENSG00000131042_22 (sequence is synthesized)
cctacacacattttcacaaactaaccccagaacaggctgcaaacctataccaatatactagaaaatgcagattaaatggatgaaatattcaaaactggagtttacataatgaacgtaaga

SEQ ID NO: 290440 - DNA, 75 bp, Artificial Sequence
  ENSG00000131042_23 (sequence is synthesized)
tgaaatattcaaaactggagtttacataatgaacgtaagagtaatcagagaatctgactcattttaaatgtgtgt

SEQ ID NO: 290441 - DNA, 120 bp, Artificial Sequence
  ENSG00000131042_24 (sequence is synthesized)
cagtggaggtccagcccagctgccgacgcccaggaagaaaacctctgtgagtgagaggaagagatgctgccgtgaaggacacacagcctgaagatggggtggagatggacactcgggctg

SEQ ID NO: 290442 - DNA, 120 bp, Artificial Sequence
  ENSG00000131042_25 (sequence is synthesized)
tgagatttgaagagagaggggagcttctaacctaggagggacctcaccccacagccaaactctggtccctaaggagaccccaggggctcacaaagatcccagggaggggaggacctgctc

SEQ ID NO: 290443 - DNA, 120 bp, Artificial Sequence
  ENSG00000131042_26 (sequence is synthesized)
cctgaggaccagcccctcacccccactgggtcggatccccaaagtggtgagtgaggggctctgagtgggaggtgggcggggtcccggggaggcaggggtgggttctgtcctaggttcagg

SEQ ID NO: 290444 - DNA, 120 bp, Artificial Sequence
  ENSG00000131042_27 (sequence is synthesized)
ctcctctggaggtggtgatgtagacaggctcctcccctgcctgggcctcagtttctccaagtgtaaaggagagaggcctgcaggtgggaaagttcctttcagctctcactcccagctgtg

SEQ ID NO: 290445 - DNA, 120 bp, Artificial Sequence
  ENSG00000131042_28 (sequence is synthesized)
acctcctgggagaggaggcccctcagggaagactccaagactcgattccgcgggggcctgtcccgtcccacctgcagcagagacggtgacctggggcaggggaggggagcagagtcgtgg

SEQ ID NO: 290446 - DNA, 120 bp, Artificial Sequence
  ENSG00000131042_29 (sequence is synthesized)
ttcaggacggtaaggctctttccctgcagctccggggctcggctctggtgcaggaacaagggctgcaggtcagactcccaggctcccttcccagctctgccgcttcctggctgggggccc

SEQ ID NO: 290447 - DNA, 120 bp, Artificial Sequence
  ENSG00000131042_30 (sequence is synthesized)
ggggcaggcgattcccctctctgagcgtcagtttttcatctgtagagtgggtggggtggatgtttgtgtgctgcacgactgttgtgggggttggaggtggtgaacagaaggtccagcagt

SEQ ID NO: 290448 - DNA, 120 bp, Artificial Sequence
  ENSG00000131042_31 (sequence is synthesized)
cacctgcacacagtaggcgctcatttcaatgacatcacccccatccctgacatcatcgtgctcaaggtctgggaaggcacctgggggttgtgatcggcatcttggtggccgtcgtcctac

SEQ ID NO: 290449 - DNA, 120 bp, Artificial Sequence
  ENSG00000131043_0 (sequence is synthesized)
gctgtaccggaacgtggggcgaggcgctgttcatcaaagaaaaagggttcttttggtcacccaccactggccccatggctgccgtgcagatggatcctgagctagccaagcgcctcttct

SEQ ID NO: 290450 - DNA, 120 bp, Artificial Sequence
  ENSG00000131043_1 (sequence is synthesized)
ttgaaggggccactgtggtcatcctgaacatgcccaagggaacagagtttgggattgactataactcctgggaggtcgggcccaagttccggggcgtgaagatgatccctccaggcatcc

SEQ ID NO: 290451 - DNA, 120 bp, Artificial Sequence
  ENSG00000131043_2 (sequence is synthesized)
acttcctccactacagctctgtggacaaggctaatccgaaggaagtaggccctcgtatgggtttcttccttagcctgcaccagcgggggctgacagtgctgcgctggagcacactcaggg

SEQ ID NO: 290452 - DNA, 120 bp, Artificial Sequence
  ENSG00000131043_3 (sequence is synthesized)
aagaggtagacctgtccccagccccagagtctgaggtggaggccatgagggccaacctccaggagctggaccagttcctggggccttacccatatgccaccctgaagaagtggatctcac

SEQ ID NO: 290453 - DNA, 120 bp, Artificial Sequence
  ENSG00000131043_4 (sequence is synthesized)
tcaccaacttcatcagcgaagccacagtggagaagctacagcccgagaatcgacagatctgtgccttttccgatgtgctacctgtgctctccatgaagcacaccaaggaccgcgtggggc

SEQ ID NO: 290454 - DNA, 120 bp, Artificial Sequence
  ENSG00000131043_5 (sequence is synthesized)
agaatctaccccgctgtggcattgagtgcaaaagctaccaagagggcctggcccggctaccagagatgaagcccagagccgggacagagatccgcttctcagagctgcccacgcagatgt

SEQ ID NO: 290455 - DNA, 120 bp, Artificial Sequence
  ENSG00000131043_6 (sequence is synthesized)
tcccagagggtgccacgccagctgagataaccaagcacagcatggacctgagctatgccctggagactgtgctcaacaagcagttccccagcagcccccaggatgtgcttggtgaactcc

SEQ ID NO: 290456 - DNA, 120 bp, Artificial Sequence
  ENSG00000131043_7 (sequence is synthesized)
agtttgcttttgtgtgcttcctgctggggaatgtgtacgaggcatttgagcattggaagcggctcctgaacctcctgtgccggtcagaagcagccatgatgaagcaccacaccctctaca

SEQ ID NO: 290457 - DNA, 120 bp, Artificial Sequence
  ENSG00000131043_8 (sequence is synthesized)
tcaacctcatctccatcctgtaccaccagcttggtgagatccccgctgacttcttcgtagacattgtctcccaagacaacttcctcaccagcaccttacaggttttcttttcctctgcct

SEQ ID NO: 290458 - DNA, 120 bp, Artificial Sequence
  ENSG00000131043_9 (sequence is synthesized)
gcagcattgccgtggatgccaccctgagaaagaaagctgaaaagttccaagctcacctgaccaagaagttccggtgggactttgctgcggaacctgaggactgtgccccggtggtggtgg

SEQ ID NO: 290459 - DNA, 120 bp, Artificial Sequence
  ENSG00000131043_10 (sequence is synthesized)
gagatgggctaactcggggagcgctctcagctgcgaggggccccttcccacagggctgcagtcctggcctctccatttacttcttcccatcctgggacctgccagggcagcaatctctcc

SEQ ID NO: 290460 - DNA, 120 bp, Artificial Sequence
  ENSG00000131043_11 (sequence is synthesized)
aggtcctgcaaagatggagccagaattccctttttcactgataaatatatttcttcattgccaaagaggctgtacccatcctgaaggcacatttgtgggttccccatcagccaggccttg

SEQ ID NO: 290461 - DNA, 120 bp, Artificial Sequence
  ENSG00000131043_12 (sequence is synthesized)
gtgctaacctggctgaatttcacacaggctcttacacacacacgctcctaggagacatctgcctacacggcaaccatatttcctctgaatgagaaggaattgaaccaaaagtccaagaaa

SEQ ID NO: 290462 - DNA, 120 bp, Artificial Sequence
  ENSG00000131043_13 (sequence is synthesized)
gaactgattgcttgttccataggagcttaggaaacaagaaaccctggattgcccagggggtctgagaagttggttggtgactttttttgcggttaaatgaagggtgatggggagatcagc

SEQ ID NO: 290463 - DNA, 120 bp, Artificial Sequence
  ENSG00000131043_14 (sequence is synthesized)
ccgaattgccgcctgcctcttgctaaataggagcagaggacttggcctgcagctccttgggagcccttgattgggaagagagtttcaagggaggcagctggattcaatctagcaggtggt

SEQ ID NO: 290464 - DNA, 120 bp, Artificial Sequence
  ENSG00000131043_15 (sequence is synthesized)
cagcttcagctttctccatcgaaatcccattctcctgtccagaggcccagtgggtcatctcccaaggtgggtgtggaccctggcctcagaggccttgctggtgctgtcacctcccacctg

SEQ ID NO: 290465 - DNA, 120 bp, Artificial Sequence
  ENSG00000131043_16 (sequence is synthesized)
ttccattccgaggcctcacccagaagtgggaccctccccttcctcaccagagccaccgtgactgtttctgatgacctggagagtcaacaacaaccagaaaggtttctgcccagagcaggc

SEQ ID NO: 290466 - DNA, 120 bp, Artificial Sequence
  ENSG00000131043_17 (sequence is synthesized)
ttcttaaggcctttacgaagttttgtgccttccaagtgctgaagaagacctggtcagcctaaatcttcccagtcccgctgtggagctgtcagtcaccggagtaatgagctcctggttcct

SEQ ID NO: 290467 - DNA, 120 bp, Artificial Sequence
  ENSG00000131043_18 (sequence is synthesized)
cgggagtccttcgtgctgtgtggcagggttcctctctagacaagtacacaggccctgccaccctgacatcaaactgttgtactatgatcacagtccctgtgccatccttttccaagactg

SEQ ID NO: 290468 - DNA, 120 bp, Artificial Sequence
  ENSG00000131043_19 (sequence is synthesized)
gggctcacaccatgtttttgaatgagaatccctgctggttgagacttttgcttccacttgtttccttggagatgtttttccaagagcataatgtacattaaagtcttcgagttgagacaa

SEQ ID NO: 290469 - DNA, 120 bp, Artificial Sequence
  ENSG00000131043_20 (sequence is synthesized)
cggaacgtggggcgaggcggtgagtgtggcctcctggcctctttttcctttcctgattccttgtgtatgtgtggctgggccgcccctcttctcggctcagagtcacggagtgccttgaac

SEQ ID NO: 290470 - DNA, 120 bp, Artificial Sequence
  ENSG00000131043_21 (sequence is synthesized)
taggcccacctcgccggggcggctggttctctgtttgtgggacgctggtgtctctggaggcccttcctgagaagccgtcgccagagttacgtcgcggttttcttaactttagagcctggg

SEQ ID NO: 290471 - DNA, 120 bp, Artificial Sequence
  ENSG00000131043_22 (sequence is synthesized)
agagacagagtctcgctgtgtcacccagactgaagtgcagtgacttaatcatagctcgctgcagccttgaactcctgggctcatacgatccacccacctcagcctccagagtagctggga

SEQ ID NO: 290472 - DNA, 79 bp, Artificial Sequence
  ENSG00000131043_23 (sequence is synthesized)
gagtagctgggactacaggaagatatcatcacacccggctaattaacaacaacaaaaaaaattgtagggataaagtctt

SEQ ID NO: 290473 - DNA, 120 bp, Artificial Sequence
  ENSG00000131043_24 (sequence is synthesized)
gcgtgagtcgccacacccggcccacggcatcacttttatctgccacagcatatttcattctgtgtttataccttggtataaccactctcctgttttggggaactaggtttctggttttgc

SEQ ID NO: 290474 - DNA, 120 bp, Artificial Sequence
  ENSG00000131044_0 (sequence is synthesized)
gaggtgggggcgggggccttaccccaccctggcaccggcaggcgcgggcggatggggggatgtcgcctagagccccccggccggcccacaaactcccgtcccccttccggctctgcctgg

SEQ ID NO: 290475 - DNA, 120 bp, Artificial Sequence
  ENSG00000131044_1 (sequence is synthesized)
acgtccctgcgggccccgggggaaagcacccaacttctcccgcctcggcttctagcagaaacgtgacggggctggactttgatcgccgagggctctctgctcttcagagtctgcttggaa

SEQ ID NO: 290476 - DNA, 120 bp, Artificial Sequence
  ENSG00000131044_2 (sequence is synthesized)
cgggataagagggatggtgccatccagggaagctctgctgggaccaggcacaactgccattaggtgccccaagaaattacagaaccaaaattacaagggccatggattgtcaaagggaaa

SEQ ID NO: 290477 - DNA, 120 bp, Artificial Sequence
  ENSG00000131044_3 (sequence is synthesized)
agagcgagagcagagagcatcgatccggttcaagaccaccctcatgaacacactcatggacgtccttcgccacaggccaggatgggtggaagtgaaggacgaaggggagtgggatttcta

SEQ ID NO: 290478 - DNA, 120 bp, Artificial Sequence
  ENSG00000131044_4 (sequence is synthesized)
ctggtgtgacgtcagctggctccgggagaacttcgaccacacctacatggatgaacatgtgcggatcagtcacttccggaaccactatgagctgacccggaagaactacatggtgaagaa

SEQ ID NO: 290479 - DNA, 120 bp, Artificial Sequence
  ENSG00000131044_5 (sequence is synthesized)
cctgaagcggttccggaagcagctggagcgtgaggcaggaaagctggaggcagccaagtgtgacttcttccccaaaacctttgagatgccttgcgagtaccacctgtttgtagaggagtt

SEQ ID NO: 290480 - DNA, 120 bp, Artificial Sequence
  ENSG00000131044_6 (sequence is synthesized)
tcgcaaaaacccaggaatcacctggatcatgaagcctgtagcccggtctcaagggaaaggcatcttcctcttccgtaggctgaaggacatcgtggactggaggaaggacacaagaagctc

SEQ ID NO: 290481 - DNA, 120 bp, Artificial Sequence
  ENSG00000131044_7 (sequence is synthesized)
tgacgaccagaaagatgatattcccgtggagaactatgtggctcagcgttacattgaaaatccttacctgataggaggccgcaagtttgacctgcgtgtctatgtgctggtgatgtcggt

SEQ ID NO: 290482 - DNA, 120 bp, Artificial Sequence
  ENSG00000131044_8 (sequence is synthesized)
gtttgctgaatgcctgctgtggtctgggcacaggagacaggatgttcacctcaccaacgtggctgtgcaaaaaacatctcccgactaccacccaaagaagggctgcaagtggacgctgca

SEQ ID NO: 290483 - DNA, 120 bp, Artificial Sequence
  ENSG00000131044_9 (sequence is synthesized)
gcgcttccggcagtacctggcgtccaaacacgggcccgaggcagtggagacactcttcagggacatcgacaacatctttgtcaaaagcctgcagagtgtgcagaaggtgatcatcagtga

SEQ ID NO: 290484 - DNA, 120 bp, Artificial Sequence
  ENSG00000131044_10 (sequence is synthesized)
caggaagactatgagctcaagacctgcctcctggaagacaccctgcatgttgtggacatggaagcgaggctcacgggaagggagaagcgagtcgggggctttgacctcatgtggaatgat

SEQ ID NO: 290485 - DNA, 120 bp, Artificial Sequence
  ENSG00000131044_11 (sequence is synthesized)
ggccctgttagcagagaggagggggctcctgacctgtcgggaatgggaaactttgtgaccaacacacatctcggctgcgtcaacgatcggaagaaacaactgaggcagctcttctgctcc

SEQ ID NO: 290486 - DNA, 120 bp, Artificial Sequence
  ENSG00000131044_12 (sequence is synthesized)
cttcaagttcagaagaaagcttccagttgatccccagctgccaggaggaaatcagccttagcaggccttgtgtttgagattgggagctgagccagaaaccggaaaaccctgggctcatgg

SEQ ID NO: 290487 - DNA, 120 bp, Artificial Sequence
  ENSG00000131044_13 (sequence is synthesized)
gcaggacagcttcgggagttgagtgtcaagcccgaagggaagacttttggaaggaaaatactggcaaatccaagaagtgaaccagccgactttaggaaagccagaagccaggctactcta

SEQ ID NO: 290488 - DNA, 120 bp, Artificial Sequence
  ENSG00000131044_14 (sequence is synthesized)
gaccttctgccttcagagcatgaggacttctcccactcatccctgtacctgaggcacaccaacccagacaggtccaggcatggactccaggttccctatttccagaaggaatgcgattag

SEQ ID NO: 290489 - DNA, 120 bp, Artificial Sequence
  ENSG00000131044_15 (sequence is synthesized)
ctttttttggcccagcacccaccctgccagggaggaaggggcaattttccagtgatgaaattgtgaatcaggcagtcacactggacaacatctagcaaggtgaattctgcaactccctac

SEQ ID NO: 290490 - DNA, 120 bp, Artificial Sequence
  ENSG00000131044_16 (sequence is synthesized)
tttatttacattttaaaataagcaatatattcatacggtttaaaatccaaagtttacaaaagggtatagggtgacatctccttccctcccacctgtgcgccccaaccctgcaggtgctgt

SEQ ID NO: 290491 - DNA, 120 bp, Artificial Sequence
  ENSG00000131044_17 (sequence is synthesized)
tctgagggaatcacactgtgcttgcacaaaaattattagcttataagacaccagccttccccttgctttcctcacttgatgtatcttggagcttgttccttattcttgattatagttgta

SEQ ID NO: 290492 - DNA, 120 bp, Artificial Sequence
  ENSG00000131044_18 (sequence is synthesized)
tggtattgcactatctggagctaacacctgtgacccacactcatgttttaaaagtttctgcattagtcaaaaatatttaaaaggagattcaacttcacaacccatatgtctagcttctct

SEQ ID NO: 290493 - DNA, 120 bp, Artificial Sequence
  ENSG00000131044_19 (sequence is synthesized)
tgaaaacacgtaagaactggccatgacagcctgtgtttctatgtaactatgagccagagccaaggagcggggggaccaggagaggtgtgcccctgccatgctgccatttgttatcacccg

SEQ ID NO: 290494 - DNA, 120 bp, Artificial Sequence
  ENSG00000131044_20 (sequence is synthesized)
cctgtcaaatcacaggtttatttcaaggcaagaaccatgttcataggttgtattctaaatggagtggcgtgcccttactgaaggactagatgaggcaaataaagactagttgctgctatt

SEQ ID NO: 290495 - DNA, 120 bp, Artificial Sequence
  ENSG00000131044_21 (sequence is synthesized)
tccccagctgccaggaggaaatcagccttagcaggtgccacccaggcctcccccccactcccagatcccagcacagcacctcacagcattcgcctccccacctccagcctggcaccagct

SEQ ID NO: 290496 - DNA, 120 bp, Artificial Sequence
  ENSG00000131044_22 (sequence is synthesized)
ttgctggcttagcagctgcagcttactacctgaattgggccccttggatacctccagcccatccccaggcatctttgcaccaggagacagccaatcactgggactgggggaggtttaacc

SEQ ID NO: 290497 - DNA, 120 bp, Artificial Sequence
  ENSG00000131044_23 (sequence is synthesized)
taggcccaaagagaacaaatacagcaagttctgctacccccaggagatcatatctaataaatgagcacaggccctacttggagtcactgggcaccaggcctggttccggggatactgttg

SEQ ID NO: 290498 - DNA, 120 bp, Artificial Sequence
  ENSG00000131044_24 (sequence is synthesized)
gctgcagccaagtcctcctggctttgacacttggatacctcccaagtcagtgctgaaaaggtccttcaggagcaagagtttggaggctaaggaactcgtctttaagctgtgcttacacag

SEQ ID NO: 290499 - DNA, 120 bp, Artificial Sequence
  ENSG00000131044_25 (sequence is synthesized)
caagcagttattagattgtgtgtttattgggggcctggggaagtactgagccctaaacacatcctcttctccttgcatgtcaggggagcccatggggctccctgaccatcatctgaaaac

SEQ ID NO: 290500 - DNA, 120 bp, Artificial Sequence
  ENSG00000131044_26 (sequence is synthesized)
cagtgggacagggcatccccatttctcagatggacaagacagaccagggaggcagagcttagtgagggtctctgcaaaggtgcatttatctaagtcagatgggtgacttaagtgcttctc

SEQ ID NO: 290501 - DNA, 120 bp, Artificial Sequence
  ENSG00000131044_27 (sequence is synthesized)
taggccttgtgtttgagattgggagctgagccagaaaccggaaaaccctgggctcatgggcaggacagcttcgggagttgagtgtgagtaaaaatctgccttttcacatcttacattgct

SEQ ID NO: 290502 - DNA, 120 bp, Artificial Sequence
  ENSG00000131044_28 (sequence is synthesized)
aagcttcctcttggtttaagaggggttgcaacaagactcggggctgttggggtaactgttccaggggggacttactccctctaccactccgcctgcttcagagtagtttctctggctgca

SEQ ID NO: 290503 - DNA, 120 bp, Artificial Sequence
  ENSG00000131044_29 (sequence is synthesized)
aacgggacgcataagcacgcgaggcgcgcggtggcggtttggatctggcccctggggaatcgcgttatgtcgcgaccgaagatgacatcattgtatccagagaaaactcaaaggatttac

SEQ ID NO: 290504 - DNA, 120 bp, Artificial Sequence
  ENSG00000131044_30 (sequence is synthesized)
tgtgaccaacacacatctcggtatgtagggccaggtggggagtgggcacaagggatggggtcatgggaggtaccaggtagtctaggaggcagcttgggatagtggttagattgtttgaat

SEQ ID NO: 290505 - DNA, 120 bp, Artificial Sequence
  ENSG00000131044_31 (sequence is synthesized)
tcaatctgcaacttaccagctgtgtgaccttgggcaagggacttaacctctgttcctcgtttttaaacttggtttctaaaaagtgaaaactttccctgattataaaaaagggattcacac

SEQ ID NO: 290506 - DNA, 120 bp, Artificial Sequence
  ENSG00000131044_32 (sequence is synthesized)
tcattgtagaatatttgaaaactagagaaagaaataaaaacatccagacataagcatctttaacaatctggtgtatttccttccagttcttaaaaaatgcatatattcatactttttctt

SEQ ID NO: 290507 - DNA, 120 bp, Artificial Sequence
  ENSG00000131044_33 (sequence is synthesized)
ttataaaattggcattgggctagagttttgaatccctcttttccccttggcatttttcattcaagcatattaagagcctccctcttgaatgcactttttggtccagtccggatgaaatct

SEQ ID NO: 290508 - DNA, 120 bp, Artificial Sequence
  ENSG00000131044_34 (sequence is synthesized)
tttacatacattatctcattttatctttaaggagtttttattgtcattttacagatgaggaaatgatatccaggtgctatgtaacttgctgaatgaaggttttggccataagtggtgagc

SEQ ID NO: 290509 - DNA, 120 bp, Artificial Sequence
  ENSG00000131044_35 (sequence is synthesized)
caggactcaaactcccatctgcctggctccaaaacttgagtgcttgtccgctagactctcctgcctcttggcagagtttaaaaaaattaccatatggctgcaaaatatttcagtttgtac

SEQ ID NO: 290510 - DNA, 120 bp, Artificial Sequence
  ENSG00000131044_36 (sequence is synthesized)
ttttttacttttataaattataccatgatgaacatcctttcacattaagctcggctgaaattctggccatttcctgaggacagattcctagaagcagaattattgggccaaagggatggg

SEQ ID NO: 290511 - DNA, 120 bp, Artificial Sequence
  ENSG00000131044_37 (sequence is synthesized)
attattacaaccaaatttctttccagaaagattatacgaatttgtcagatttgaatttttagaaaaaagaaatctgtgccaactggtgaggtaaaacatactgactcgttgttttatgtg

SEQ ID NO: 290512 - DNA, 120 bp, Artificial Sequence
  ENSG00000131044_38 (sequence is synthesized)
cattccattgattactggtgaggtttccgttttttaaatttgcatttcttcttttgtaagctgtccatactctttatccatttttctatgggttgtttagttttctaaatgtataaggct

SEQ ID NO: 290513 - DNA, 120 bp, Artificial Sequence
  ENSG00000131044_39 (sequence is synthesized)
tcagatgactatataacactgtccaagcttaatttaatatgcatacaatcacctggaaatcttgttaaactatagattgtgactccataggtctagggtggggcctaagattgtatttct

SEQ ID NO: 290514 - DNA, 120 bp, Artificial Sequence
  ENSG00000131044_40 (sequence is synthesized)
aacaagctcctgggtgatgctctattgattaaccattgctgtgtaacaagccctcccaaaacctagcagcttaaagcaactattttatttgctcatccttcctcaggtctctcctggggt

SEQ ID NO: 290515 - DNA, 120 bp, Artificial Sequence
  ENSG00000131044_41 (sequence is synthesized)
cacttatagggctgcaggcacctggcagatttactggagacttgatggtgtacgacagcctcattcataggtgtgggggttgatactggctgtcagttgggcctctctttccatgtggcc

SEQ ID NO: 290516 - DNA, 120 bp, Artificial Sequence
  ENSG00000131044_42 (sequence is synthesized)
actcgtcttccaacagtctggccctggcttcttcacgtggtagactcggggttctaagagggtgagaaaacacactgcaaagccttttgcggcccggactcagaagtcccataaagtcat

SEQ ID NO: 290517 - DNA, 120 bp, Artificial Sequence
  ENSG00000131044_43 (sequence is synthesized)
cccggactcagaagtcccataaagtcattctgctacaatcaaagcatttgctggtgtagcccagtcactgggtaagaaaatagaccccacctcgccgggcgcggtggctcacgcctgtaa

SEQ ID NO: 290518 - DNA, 120 bp, Artificial Sequence
  ENSG00000131044_44 (sequence is synthesized)
ccctgcatgttgtggacatggaagcgagaagtttgagggctgattctccttgctggtaactgggacacattcccattcctaaaccactcactgtgactctgcttgaccaggctcacggga

SEQ ID NO: 290519 - DNA, 120 bp, Artificial Sequence
  ENSG00000131044_45 (sequence is synthesized)
gaaaggttgaggaagtcgggggacctaggctgccaggacgcccaatagcctccagaggttctggtggaccagagcctgcgcactccgccgagagcatgcccttggctcatccaatcagag

SEQ ID NO: 290520 - DNA, 120 bp, Artificial Sequence
  ENSG00000131044_46 (sequence is synthesized)
cggcggatccaggcgcctgtctgtcgccttggcaacgggacgcataagcacgcgaggcgcgcggtggcggtttggatctggcccctggggaatcgcgttatgtcgcgaccgaagaaccaa

SEQ ID NO: 290521 - DNA, 120 bp, Artificial Sequence
  ENSG00000131050_0 (sequence is synthesized)
ggagaatttgcaggggggtgacatcctcagacctggcccttggcactgggaagagttgatgcaaagaaattctgcgaggccagagaggaggctttgggaattgtccagcagaaacagaga

SEQ ID NO: 290522 - DNA, 120 bp, Artificial Sequence
  ENSG00000131050_1 (sequence is synthesized)
agtctgaggtggtgtcaagacaaaagatgcttcagctttggaaacttgttctcctgtgcggcgtgctcactgggacctcagagtctcttcttgacaatcttggcaatgacctaagcaatg

SEQ ID NO: 290523 - DNA, 120 bp, Artificial Sequence
  ENSG00000131050_2 (sequence is synthesized)
tcgtggataagctggaacctgttcttcacgagggacttgagacagttgacaatactcttaaaggcatccttgagaaactgaaggtcgacctaggagtgcttcagaaatccagtgcttggc

SEQ ID NO: 290524 - DNA, 120 bp, Artificial Sequence
  ENSG00000131050_3 (sequence is synthesized)
aactggccaagcagaaggcccaggaagctgagaaattgctgaacaatgtcatttctaagctgcttccaactaacacggacatttttgggttgaaaatcagcaactccctcatcctggatg

SEQ ID NO: 290525 - DNA, 120 bp, Artificial Sequence
  ENSG00000131050_4 (sequence is synthesized)
gcttccctgtcaccgcgaatgtcactgtggccgggcccatcattggccagattatcaacctgaaagcctccttggacctcctgaccgcagtcacaattgaaactgatccccagacacacc

SEQ ID NO: 290526 - DNA, 120 bp, Artificial Sequence
  ENSG00000131050_5 (sequence is synthesized)
agcctgttgccgtcctgggagaatgcgccagtgacccaaccagcatctcactttccttgctggacaaacacagccaaatcatcaacaagttcgtgaatagcgtgatcaacacgctgaaaa

SEQ ID NO: 290527 - DNA, 120 bp, Artificial Sequence
  ENSG00000131050_6 (sequence is synthesized)
gcactgtatcctccctgctgcagaaggagatatgtccactgatccgcatcttcatccactccctggatgtgaatgtcattcagcaggtcgtcgataatcctcagcacaaaacccagctgc

SEQ ID NO: 290528 - DNA, 120 bp, Artificial Sequence
  ENSG00000131050_7 (sequence is synthesized)
aaaccctcatctgaagaggacgaatgaggaggaccactgtggtgcatgctgattggttcccagtggcttgccccacccccttatagcatctccctccaggaagctgctgccaccacctaa

SEQ ID NO: 290529 - DNA, 120 bp, Artificial Sequence
  ENSG00000131050_8 (sequence is synthesized)
ccagcgtgaaagcctgagtcccaccagaaggaccttcccagataccccttctcctcacagtcagaacagcagcctctacacatgttgtcctgcccctggcaataaaggcccatttctgca

SEQ ID NO: 290530 - DNA, 120 bp, Artificial Sequence
  ENSG00000131051_0 (sequence is synthesized)
atgtgtgctggtgaatgtgagtacagggaagcagcggccgccatttcagggagcttgtcgacgctgtcgcaggggtggatcctgagctgccgaagccgccgtcctgctctcccgcgtggg

SEQ ID NO: 290531 - DNA, 120 bp, Artificial Sequence
  ENSG00000131051_1 (sequence is synthesized)
cttctctaattccattgttttttttagattctctcgggcctagccgtccttggaacccgatattcgggctgggcggttccgcggcctgggcctaggggcttaacagtagcaacagaagcg

SEQ ID NO: 290532 - DNA, 120 bp, Artificial Sequence
  ENSG00000131051_2 (sequence is synthesized)
gcggcggcggcagcagcagcagcagcagcagcaatctcttcccgaacacgagcaccacaggcgcccgaaggccggaacaggcgtttagagaaaatggcagacgatattgatattgaagca

SEQ ID NO: 290533 - DNA, 120 bp, Artificial Sequence
  ENSG00000131051_3 (sequence is synthesized)
atgcttgaggctccttacaagaaggatgagaacaagttgagcagtgccaacggccatgaagaacgtagcaaaaagaggaaaaaaagcaagagcagaagtcgtagtcatgaacgaaagaga

SEQ ID NO: 290534 - DNA, 120 bp, Artificial Sequence
  ENSG00000131051_4 (sequence is synthesized)
agcaaaagtaaggaacggaagcgaagtagagacagagaaaggaaaaagagcaaaagccgtgaaagaaagcgaagtagaagcaaagagaggcgacggagccgctcaagaagtcgagatcga

SEQ ID NO: 290535 - DNA, 120 bp, Artificial Sequence
  ENSG00000131051_5 (sequence is synthesized)
agatttagaggccgctacagaagtccttactccggaccaaaatttaacagtgccatccgaggaaagattgggttgcctcatagcatcaaattaagcagacgacgttcccgaagcaaaagt

SEQ ID NO: 290536 - DNA, 120 bp, Artificial Sequence
  ENSG00000131051_6 (sequence is synthesized)
ccattcagaaaagacaagagccctgtgagagaacctattgataatttaactcctgaggaaagagatgcaaggacagtcttctgtatgcagctggcggcaagaattcgaccaagggatttg

SEQ ID NO: 290537 - DNA, 120 bp, Artificial Sequence
  ENSG00000131051_7 (sequence is synthesized)
gaagagtttttctctacagtaggaaaggttcgagatgtgaggatgatttctgacagaaattcaagacgttccaaaggaattgcttatgtggagttcgtcgatgttagctcagtgcctcta

SEQ ID NO: 290538 - DNA, 120 bp, Artificial Sequence
  ENSG00000131051_8 (sequence is synthesized)
gcaataggattaactggccaacgagttttaggcgtgccaatcatagtacaggcatcacaggcagaaaaaaacagagctgcagcaatggcaaacaatttacaaaagggaagtgctggacct

SEQ ID NO: 290539 - DNA, 120 bp, Artificial Sequence
  ENSG00000131051_9 (sequence is synthesized)
atgaggctttatgtgggctcattacacttcaacataactgaagatatgcttcgtgggatctttgagccttttggaagaattgaaagtatccagctgatgatggacagtgaaactggtcga

SEQ ID NO: 290540 - DNA, 120 bp, Artificial Sequence
  ENSG00000131051_10 (sequence is synthesized)
tccaagggatatggatttattacattttctgactcagaatgtgccaaaaaggctttggaacaacttaatggatttgaactagcaggaagaccaatgaaagttggtcatgttactgaacgt

SEQ ID NO: 290541 - DNA, 120 bp, Artificial Sequence
  ENSG00000131051_11 (sequence is synthesized)
actgatgcttcgagtgctagttcatttttggacagtgatgaactggaaaggactggaattgatttgggaacaactggtcgtcttcagttaatggcaagacttgcagagggtacaggtttg

SEQ ID NO: 290542 - DNA, 120 bp, Artificial Sequence
  ENSG00000131051_12 (sequence is synthesized)
cagattccgccagcagcacagcaagctctacagatgagtggctctttggcatttggtgctgtggcagaattctcttttgttatagatttgcaaacaagactttcccagcagactgaagct

SEQ ID NO: 290543 - DNA, 120 bp, Artificial Sequence
  ENSG00000131051_13 (sequence is synthesized)
tcagctttagctgcagctgcctctgttcagccacttgcaacacaatgtttccaactctctaacatgtttaaccctcaaacagaagaagaagttggatgggataccgagattaaggatgat

SEQ ID NO: 290544 - DNA, 120 bp, Artificial Sequence
  ENSG00000131051_14 (sequence is synthesized)
gtgattgaagaatgtaataaacatggaggagttattcatatttatgttgacaaaaattcagctcagggcaatgtgtatgtgaagtgcccatcaattgctgcagctattgctgctgtcaat

SEQ ID NO: 290545 - DNA, 120 bp, Artificial Sequence
  ENSG00000131051_15 (sequence is synthesized)
gcattgcatggcaggtggtttgctggtaaaatgataacagcagcatatgtacctcttccaacttaccacaacctgtttcctgattctatgacagcaacacagctactggttccaagtaga

SEQ ID NO: 290546 - DNA, 120 bp, Artificial Sequence
  ENSG00000131051_16 (sequence is synthesized)
cgatgaaggaagatatagtcccttatgtatatagctttttttctttcttgagaattcatcttgagttatcttttatttagataaaaataaagaggcaaggatctactgtcatttgtatgc

SEQ ID NO: 290547 - DNA, 120 bp, Artificial Sequence
  ENSG00000131051_17 (sequence is synthesized)
aatttcctgttaccttgaaaaaataaaaatgttaacaggaatgcagtgtgctcattctccctaaatagtaaatcccactgtatacaaaactgttctcttgttctgccttttaaaatgttc

SEQ ID NO: 290548 - DNA, 120 bp, Artificial Sequence
  ENSG00000131051_18 (sequence is synthesized)
atgtagaaaattaatgaactataggaatagctctaggagaacaaatgtgctttctgtaaaaaggcagaccagggatgtaatgtttttaatgtttcagaagcctaactttttacacagtgg

SEQ ID NO: 290549 - DNA, 120 bp, Artificial Sequence
  ENSG00000131051_19 (sequence is synthesized)
ttacatttcacatttcactaatgttgatatttggctgatggttgagcagtttctgaaatacacatttagtgtatggaaatacaagacagctaaagggctgtttggttagcatctcatctt

SEQ ID NO: 290550 - DNA, 120 bp, Artificial Sequence
  ENSG00000131051_20 (sequence is synthesized)
gcattctgatcaattggcaagaaagggagatttcaaaattatatttcttgatggtatcttttcaattaatgtatctgtaaaagtttctttgtaaatactatgtgttctggtgtgtcttaa

SEQ ID NO: 290551 - DNA, 120 bp, Artificial Sequence
  ENSG00000131051_21 (sequence is synthesized)
ctgcatttcctgaagatgtttaaacgtgagagtctggtaggcaaagcagtctgagaaagaaataggaaatgcagaaataggttttgtctggttgcatataatctttgctctttttaagct

SEQ ID NO: 290552 - DNA, 120 bp, Artificial Sequence
  ENSG00000131051_22 (sequence is synthesized)
ctgtgagctctgaaatatatttttgggttacttcagtgtgtttgacaagacagcttgatatttctatcaaacaaatgactttcatattgcaacaatctttgtaagaaccactcaaataaa

SEQ ID NO: 290553 - DNA, 120 bp, Artificial Sequence
  ENSG00000131051_23 (sequence is synthesized)
agtctcttaaaaaggccacaggagatcttcatttttcaaatgttttaaagttacagaaatttgagaacagaattagcttcttttagtctcaattcagtacttgcctcttgggaaaatgtt

SEQ ID NO: 290554 - DNA, 120 bp, Artificial Sequence
  ENSG00000131051_24 (sequence is synthesized)
ccgagtctgcggaaacttgccctcacgttgtcccccatgaattcctttattctattagagtctagccctgtgtattttagaagaatgtatcaaaactgaggggtttaccaaaaagaaaag

SEQ ID NO: 290555 - DNA, 120 bp, Artificial Sequence
  ENSG00000131051_25 (sequence is synthesized)
gaaacagcctggccttaaaacctgggcattcttggtctcctgcattgtctgggcatatttatgaagaaattttcaccatttacaatacatacttaacaaaatggcttaacttcaaactgg

SEQ ID NO: 290556 - DNA, 120 bp, Artificial Sequence
  ENSG00000131051_26 (sequence is synthesized)
tttccaaaattgatttatatattaatatattaaataaggtgcatatattactgtattaaggggttttgagctttcatactagttgggaagcaagctgtcaccatttatactcaattctct

SEQ ID NO: 290557 - DNA, 120 bp, Artificial Sequence
  ENSG00000131051_27 (sequence is synthesized)
tcaactgtttatctcttggtaaatcttttgagtaggaaatgctgctcctagcttatcttcaaatactgagttccttacctcatttgttcaacttttttttttgttagcattgaagcacaa

SEQ ID NO: 290558 - DNA, 120 bp, Artificial Sequence
  ENSG00000131051_28 (sequence is synthesized)
gttttacaggcttattcagaatttcatatcagtcgttttgtttgacatttatcccaataattgttctagtgatttaatttgtatggaaactcccaaggttcaatttctttttctttttga

SEQ ID NO: 290559 - DNA, 85 bp, Artificial Sequence
  ENSG00000131051_29 (sequence is synthesized)
gtatggaaactcccaaggttcaatttctttttctttttgagatggagtcttgctctttgcatctcccaggttcaagcaattctcc

SEQ ID NO: 290560 - DNA, 77 bp, Artificial Sequence
  ENSG00000131051_30 (sequence is synthesized)
tcagtctcctgaagagctgggacaggtgcgtgttagcccggctggtctcacactgacctcaagtgatctgtccgcct

SEQ ID NO: 290561 - DNA, 120 bp, Artificial Sequence
  ENSG00000131051_31 (sequence is synthesized)
accgcgcccagcctcattgaaaatttacttttcaataccagactgcagagttctttggggcagagacactctgtcagtgtgctctttttccaaagtatctcctgctatcagtttttcccc

SEQ ID NO: 290562 - DNA, 120 bp, Artificial Sequence
  ENSG00000131051_32 (sequence is synthesized)
ttgaaccaagtcttcctaacaaatttgttgtgtcattgctttctagggaactggaccagcaaatgtggcctttagtggttaatctcatctgtgccaaaatttagttgctaccagagtgaa

SEQ ID NO: 290563 - DNA, 120 bp, Artificial Sequence
  ENSG00000131051_33 (sequence is synthesized)
atttggtgtgtaaataatgttcagaggaaatgtggttggagtgtagtaacttgaatagtgtcgtgcatagaaaacagctcattctgagtgaaactgtttatgtccaatcagttcctgagt

SEQ ID NO: 290564 - DNA, 120 bp, Artificial Sequence
  ENSG00000131051_34 (sequence is synthesized)
cagcatcccactggttcgaaaatctgtaactaatctggtaatgtccttaatttcctcctgcctgtcagtgttccaaagtgttcatctagttttcttttatctttataataattactacca

SEQ ID NO: 290565 - DNA, 120 bp, Artificial Sequence
  ENSG00000131051_35 (sequence is synthesized)
tctttgaaagttctgtttaagaaatgcttaatgggcaatgcgggttagtaactccagggtctgcgtggcctgggcaggtgagatggacaactgcctcattacagaagctttttatcatca

SEQ ID NO: 290566 - DNA, 120 bp, Artificial Sequence
  ENSG00000131051_36 (sequence is synthesized)
aactagtaagttttgtggagggcaagctatatagattgttgatgagtggttagaaaatcatctggaatttagccagttgagaagctacagaagtttctatttttttttacagtggatgaa

SEQ ID NO: 290567 - DNA, 120 bp, Artificial Sequence
  ENSG00000131051_37 (sequence is synthesized)
ctgttttgctttttctgataaagccactaggtatatctaaataacaacctcgggctggacgtggtgccttatgcctgtatatgtgaacactgggaggcggaggcgggtggatcatgaggt

SEQ ID NO: 290568 - DNA, 66 bp, Artificial Sequence
  ENSG00000131051_38 (sequence is synthesized)
ctcctgaccttgtgatccaccaaacaatacaaaatttagctaggcatggtggcacgtgcctgttat

SEQ ID NO: 290569 - DNA, 77 bp, Artificial Sequence
  ENSG00000131051_39 (sequence is synthesized)
tacaggcataagccaccgcgcccagcctaacaatacaaaatttagctaggcatggtggcacgtgcctgttacaggag

SEQ ID NO: 290570 - DNA, 120 bp, Artificial Sequence
  ENSG00000131051_40 (sequence is synthesized)
ggcagcgcgggtttttgcccggaaagaggcgctctcgttcgggtctcccagtttctgtttttggagttgacagcagagttttaaatattggatattgaagtcttcattttcgtgtgtttc

SEQ ID NO: 290571 - DNA, 120 bp, Artificial Sequence
  ENSG00000131051_41 (sequence is synthesized)
gtttgttattatgttttggaatgaaatttggtcagataatatgattacggtgagttctgtaacagctactggtaatatttttgtaaatcacgtgaaagcattggagcaactgtcttggaa

SEQ ID NO: 290572 - DNA, 120 bp, Artificial Sequence
  ENSG00000131051_42 (sequence is synthesized)
aatgctctttaaacttcaaaccccagtatgttttggtagtagtggatattacacatatatgctgctcttttcagtgttcttttattgtgcgaaaacatttttaaaacatttgatttatta

SEQ ID NO: 290573 - DNA, 120 bp, Artificial Sequence
  ENSG00000131051_43 (sequence is synthesized)
gatttatttttaataggattgttaataggatttatttttctaggacattgtctttaaacacttggatgattttatatgtcttaattctttaataatttgtagatttaaaaaacttcgtgg

SEQ ID NO: 290574 - DNA, 120 bp, Artificial Sequence
  ENSG00000131051_44 (sequence is synthesized)
gtgggcagaaagcgaagaaataggaaaggatatagatttatttggcatttcaaaggattttgttttattatcccctcttatttgggtataaactcaaatctattttatccttcatctgtt

SEQ ID NO: 290575 - DNA, 120 bp, Artificial Sequence
  ENSG00000131051_45 (sequence is synthesized)
tggattgatgtgtattgagattttgtctaattgaactgattttgataacacataaagtttaatttccctgttaaaataggactcccaaatttctgaatgtctgtttcaagtattaggtta

SEQ ID NO: 290576 - DNA, 120 bp, Artificial Sequence
  ENSG00000131051_46 (sequence is synthesized)
cctcagttttctggcacctaaaagctactgataacatacattagtagcaatattaaataaggtaaaataactccagtgacatcctagttacatgcttggggtgggtttttggtttcgttt

SEQ ID NO: 290577 - DNA, 120 bp, Artificial Sequence
  ENSG00000131051_47 (sequence is synthesized)
tctaccttaatcttcgcacattatgtggtgcatgttatggttaaccgtcttccattatagtttttgtgtgtgtgtgcctgaaagtagctttaatatagtggctaaataaaccctccaaaa

SEQ ID NO: 290578 - DNA, 120 bp, Artificial Sequence
  ENSG00000131051_48 (sequence is synthesized)
taaaagaaaatcagtaacaatttgatcagggtatgagaggatttctagtaatgctcaaagcttgccatgaaatcttggcatcttgattcattcttaggctgcatacaaatcgtagagaaa

SEQ ID NO: 290579 - DNA, 120 bp, Artificial Sequence
  ENSG00000131051_49 (sequence is synthesized)
agataaaacggcaaatttgagagtagaagtcattttttaataaaattctagtatacctattagccagtggaaccattatggtaaaccagtttgtggttatagagcactaagtttctacag

SEQ ID NO: 290580 - DNA, 120 bp, Artificial Sequence
  ENSG00000131051_50 (sequence is synthesized)
gcaacttgaataaacataacttgggtccattttgcatacagcaacatctttaccttttttttcattttttctgtagggcaatgtgtatgtgaagtgcccatcaattgctgcagctattgc

SEQ ID NO: 290581 - DNA, 120 bp, Artificial Sequence
  ENSG00000131051_51 (sequence is synthesized)
gccatgaagaacgtagcaaaaaatccctaaatgcttcatagtaagtatgtcagtctttctcactacaactgtgttagacaaactttctgcctccttggaaagctctacatctccttgtga

SEQ ID NO: 290582 - DNA, 120 bp, Artificial Sequence
  ENSG00000131051_52 (sequence is synthesized)
cgaccttatgttaatgaaaaacgagagaaaaatagccatttatttgatttctttttggctcttttcctcctaagatccctaaatgcttcatagtaagtatgtcagtctttctcactacaa

SEQ ID NO: 290583 - DNA, 120 bp, Artificial Sequence
  ENSG00000131051_53 (sequence is synthesized)
cagaggccatataaccaaaaagtccaaaggcccagcccagtggaccatttacttcagtgatgttcagtacaaaatttcactgccattaaagactttggaaagtcccttttaagttgtaac

SEQ ID NO: 290584 - DNA, 120 bp, Artificial Sequence
  ENSG00000131051_54 (sequence is synthesized)
aggatttgactattagtgtggatttcgataacccttctttagttaatgtaataaatgctctttgaagctggaaatatactggtttcttgcacccttgtagttttctctgggcttttatgc

SEQ ID NO: 290585 - DNA, 120 bp, Artificial Sequence
  ENSG00000131051_55 (sequence is synthesized)
atatctaaactatataagaaagtaaaatttaacatgttaatatggaaaatttttttatttttgtatcttgatgacttaaatgtaagcaacaaagtggttaaacacatacccatctaaatt

SEQ ID NO: 290586 - DNA, 120 bp, Artificial Sequence
  ENSG00000131051_56 (sequence is synthesized)
tttttatagccttccatgttaaactataagtaaataattagttttaaaattgttttgtattttcttattcctgttccctttaccctttgacaacttgaaatgttaccacttcgtcctcat

SEQ ID NO: 290587 - DNA, 120 bp, Artificial Sequence
  ENSG00000131051_57 (sequence is synthesized)
aggttagagtccttatctttatgaaaaccatgctttatttttcactttgtcacaaatgatatgacaaatcatttttgaaattatgattgggttggtagacaaaatagcatggatttctga

SEQ ID NO: 290588 - DNA, 120 bp, Artificial Sequence
  ENSG00000131051_58 (sequence is synthesized)
tatctatacattttttcccattttaggaaaaaaaagacaaattctgttattatttaaagtttattgacactgttcacatggtcctatcttcaagttccttcagtatacaccagttacatt

SEQ ID NO: 290589 - DNA, 120 bp, Artificial Sequence
  ENSG00000131051_59 (sequence is synthesized)
tttgacacagtgacacatagtggtatattcatagtaatctgtctgtatttcagaagacctaacccaaattaatggacttaaaaaaaatcaaaataacaatttttttttttgctttagttt

SEQ ID NO: 290590 - DNA, 120 bp, Artificial Sequence
  ENSG00000131051_60 (sequence is synthesized)
aaattagctctccaattttcaagtgttttcttttggcagaataagttttgggtcctatgagaggtaaataggttggttgcctctcttgctatagcccatctagagcagaacaaaaacttt

SEQ ID NO: 290591 - DNA, 120 bp, Artificial Sequence
  ENSG00000131051_61 (sequence is synthesized)
gtttttgagggggatggagttactttttaccttgttccctaattgaatatatttaggacttttggttttagaaatctcagagttctatagttggaatagtgtcacagagatagtgttagg

SEQ ID NO: 290592 - DNA, 120 bp, Artificial Sequence
  ENSG00000131051_62 (sequence is synthesized)
tttcttaggcaacaaaattggagtgttacctattgcccatctgggcatggctttgatgagttctatataaataatgagtgtagcctaattttctgtcatgtgctacctagcatatacatt

SEQ ID NO: 290593 - DNA, 120 bp, Artificial Sequence
  ENSG00000131051_63 (sequence is synthesized)
ccgaacacgagcaccacaggcgcccgaaggccggaacaggcgtttagagaaaatggcagacgatattgatattgaagcaatgcttgaggctccttacaagaagggcgagatgtgtgacag

SEQ ID NO: 290594 - DNA, 120 bp, Artificial Sequence
  ENSG00000131051_64 (sequence is synthesized)
aggtggcatcaagctcttacagtcccaaccctccaacggaaatgggcgaagatctcaggaatggcatcggtcacaggaaatcgatagtggctggctgctagcatggccacttggggctta

SEQ ID NO: 290595 - DNA, 120 bp, Artificial Sequence
  ENSG00000131051_65 (sequence is synthesized)
gcaacaagagcctgtgcaacaagagcgatactccatctcaaaaaaaaaagagagtttcacaattgttgcccaggttggtctcgatctctgggatttaagtgaaccacctcccttggcctc

SEQ ID NO: 290596 - DNA, 120 bp, Artificial Sequence
  ENSG00000131051_66 (sequence is synthesized)
ccagagtgctagctaagttacaggcgtcaaccaccacactcggccctccttgcaatttattttagtgaagtgatcatgatattaatgacccaggaaacttcgtttctctgctctcaacat

SEQ ID NO: 290597 - DNA, 120 bp, Artificial Sequence
  ENSG00000131051_67 (sequence is synthesized)
agtaggaactttaagactattcttttacaggtacaggtttgcagattccgccagcagcacagcaagctctacagatgagtggctctttggcatttggtgctgtggcagatttgcaaacaa

SEQ ID NO: 290598 - DNA, 120 bp, Artificial Sequence
  ENSG00000131051_68 (sequence is synthesized)
atgattggttaaaaagtattgaattaaggatattggcattgaatactagtaaagtgaaaatacagtgcatagacaaataagtaaaaatttgcttttactaggcatactgactattttctg

SEQ ID NO: 290599 - DNA, 120 bp, Artificial Sequence
  ENSG00000131051_69 (sequence is synthesized)
ttaaactatcagagtttctaaattgtatgccagtcaacgcaaactggatgaaagcactagagtgcttgaaaaagatgacattgtagtgcccaaatacctaagaaagcttaacaagtgtct

SEQ ID NO: 290600 - DNA, 120 bp, Artificial Sequence
  ENSG00000131051_70 (sequence is synthesized)
gggctgttacagtatttgctaaatacatatttacttaaaattgtaaagttctgatgaatactaagttacacatgtataattagttaacagtaaataaaaagtctgtcaccgtggctgttt

SEQ ID NO: 290601 - DNA, 120 bp, Artificial Sequence
  ENSG00000131051_71 (sequence is synthesized)
tcagctgaaatgtcaggccagttgtgaatttgttgtgtatgctcattgataaagatccttttttgggctcatctgtatttaaggtttgttaataataataaaaggtattccaaactaaaa

SEQ ID NO: 290602 - DNA, 120 bp, Artificial Sequence
  ENSG00000131051_72 (sequence is synthesized)
tttttgcccggaaagaggcgctctcgttcgggtctcccagtttctgtttttggagttgacagcagagttttaaatattggatattgaagtcttcattttcgtgtgtttcgtgtaagaggc

SEQ ID NO: 290603 - DNA, 120 bp, Artificial Sequence
  ENSG00000131051_73 (sequence is synthesized)
tgtaacttacaaaagtaaatatatgctattgatgtaataatattgtgcagtagtttcacttcagcgtgatgaataaatgcccatctatctctctttgtagacttgcctaacgatatctca

SEQ ID NO: 290604 - DNA, 120 bp, Artificial Sequence
  ENSG00000131051_74 (sequence is synthesized)
cctctactcccatgaattcacctttgattccagtgtgaactgtcaatcataaggtagtaattgagtgacttatcgctgtaccgtggtcccctaggtaaaatgactcaactaagaattacc

SEQ ID NO: 290605 - DNA, 78 bp, Artificial Sequence
  ENSG00000131051_75 (sequence is synthesized)
gggaacaactggtcgtcttcagttaatggcaagacttgcagaggggtctggctctgttgcccaatttgtgcaacaaga

SEQ ID NO: 290606 - DNA, 120 bp, Artificial Sequence
  ENSG00000131051_76 (sequence is synthesized)
taatttattttgtggattacagtaatgcttttgttggcctgttgtatgacaaactatttaaaggttcacattttgatttgtatttgccaacaagcccttttgcttgttaaagctatagct

SEQ ID NO: 290607 - DNA, 120 bp, Artificial Sequence
  ENSG00000131051_77 (sequence is synthesized)
aactctcaggagataattgcagttctactcttagaggatggtgtctttcaaataatgtcttgtctgctgattttcagtaatgttaatataaggcaaaagggatattgtttactatacgta

SEQ ID NO: 290608 - DNA, 67 bp, Artificial Sequence
  ENSG00000131051_78 (sequence is synthesized)
ccggctaatttttgtatttttattagggacggggtttcactacaccaaagtgctgagattacaggat

SEQ ID NO: 290609 - DNA, 120 bp, Artificial Sequence
  ENSG00000131051_79 (sequence is synthesized)
ctcggcctaccaaagtgctgagattacaggatttttttttttttttaagtatgattatgtaccattgtatcatagtaaaactagccaaagaaatttatgaaaggatgaaaaaatgattct

SEQ ID NO: 290610 - DNA, 120 bp, Artificial Sequence
  ENSG00000131051_80 (sequence is synthesized)
gccgctacagaagtccttagtatgtaactatagttatgattttggtttgagggttattctctgggtattcagatggcagtttaacttgagtgatttgaattgtgaatttttattttttta

SEQ ID NO: 290611 - DNA, 120 bp, Artificial Sequence
  ENSG00000131051_81 (sequence is synthesized)
atagaagtcaggaaatgaagtattctcttattaacgagtaggcaagtattttagaacctggaatctggaagttgtcttagtataaagttgtgaatcatgctataaaactcaccttttttt

SEQ ID NO: 290612 - DNA, 120 bp, Artificial Sequence
  ENSG00000131051_82 (sequence is synthesized)
cgagattgcgccattgcactccagcctgtgcaacaagagcctgtgcaacaagagcgatactccatctcaaaaaaaaaagagagtttcacaattgttgcccaggtacaggtttgcagattc

SEQ ID NO: 290613 - DNA, 120 bp, Artificial Sequence
  ENSG00000131051_83 (sequence is synthesized)
gtgagaaaaaacatgtcggtgaggtttatatatttcttaatttagcattattcacgaaactactgctgaaatgtaaactaacctccccggagccctcttgatttatcttatcagagatgc

SEQ ID NO: 290614 - DNA, 120 bp, Artificial Sequence
  ENSG00000131051_84 (sequence is synthesized)
aagaagaaatgggtgagattttaaaatttatgtatctatgtaagactggtgatagtaaatcttaaaacagtccagtggcaatctgctgctcagttaataattactaaaattcttggatcc

SEQ ID NO: 290615 - DNA, 120 bp, Artificial Sequence
  ENSG00000131051_85 (sequence is synthesized)
ctgaatagaaattaaaaaaaaaaaatacaagaggcagtagagtcaatacaagcttaatacaagcttagagtaaatacaagcttagagtcacttgatgactgttttactgttctccatatt

SEQ ID NO: 290616 - DNA, 120 bp, Artificial Sequence
  ENSG00000131051_86 (sequence is synthesized)
gtttttatttttaattaggccctaccatagtatttcacactaaaaacaaaggaattatattggctaatatagtctttgactcatttcggtatctcagtaaaagtaaactgtcttttcatt

SEQ ID NO: 290617 - DNA, 120 bp, Artificial Sequence
  ENSG00000131051_87 (sequence is synthesized)
gtttcaccagttggtggtgaaaatagcagtatgcatgcattatcactggtgtcacaaactgtaagctttgtaagttagcactttactcctatagctgatgtaatcaaactttaaaataaa

SEQ ID NO: 290618 - DNA, 120 bp, Artificial Sequence
  ENSG00000131051_88 (sequence is synthesized)
catttcactaaaccttttaaaaataatacatttgttttggattgtatagcacgaccatgtggtaccaatttggatgaattcttgatagatttaaatagtgtatgtaattttgtaatgctt

SEQ ID NO: 290619 - DNA, 120 bp, Artificial Sequence
  ENSG00000131051_89 (sequence is synthesized)
agactcttgaagagctactttctgttttaatgttaagattcttgtgtcttagttttttttaacatggatgtaattccatgtaaacaggtatggaagtaggaaatgtttaggctggacttg

SEQ ID NO: 290620 - DNA, 120 bp, Artificial Sequence
  ENSG00000131051_90 (sequence is synthesized)
ttttgagcacctaggacccagatttgcaaacaagactttcccagcagactgaagcttcagctttagctgcagctgcctctgttcagccacttgcaacacaatgtttccaactctctaaca

SEQ ID NO: 290621 - DNA, 120 bp, Artificial Sequence
  ENSG00000131051_91 (sequence is synthesized)
cagaggggtctggctctgttgcccaatttggagtgcagttgtgcgatcctggctcaccgcaacctctgcctctttggctgaagccatcctcccaccctaatctctaaatagctgggacta

SEQ ID NO: 290622 - DNA, 120 bp, Artificial Sequence
  ENSG00000131051_92 (sequence is synthesized)
acagttgcaaacaaccaccaccacgcctggctaatttctgtggtacaggtttgcagattccgccagcagcacagcaagctctacagatgagtggctctttggcatttggtgctgtggcag

SEQ ID NO: 290623 - DNA, 120 bp, Artificial Sequence
  ENSG00000131055_0 (sequence is synthesized)
agttgctcgctgggcagacccaggtcgcgctcccactgccgagcccgcgagatgctccccagagctgcctggagcttggtgctgaggaaaggtggaggtggaagacgagggatgcacagc

SEQ ID NO: 290624 - DNA, 120 bp, Artificial Sequence
  ENSG00000131055_1 (sequence is synthesized)
tcagaaggcaccacccgtggtggggggaagatgtccccctacaccaactgctatgcccagcgctactaccccatgccagaagagcccttctgcacagaactcaacgctgaggagcaggcc

SEQ ID NO: 290625 - DNA, 120 bp, Artificial Sequence
  ENSG00000131055_2 (sequence is synthesized)
cagttcaatgagacctttgcggagatgaaccgtcgctccaatgagtggaagacagtgatgggttgtgtcttcttcttcattggattcgcagctctggtgatttggtggcagcgggtctac

SEQ ID NO: 290626 - DNA, 120 bp, Artificial Sequence
  ENSG00000131055_3 (sequence is synthesized)
gtatttcctccaaagccgatcaccttgacggacgagcggaaagcccagcagctgcagcgcatgctggacatgaaggtgaatcctgtgcagggcctggcctcccgctgggactatgagaag

SEQ ID NO: 290627 - DNA, 120 bp, Artificial Sequence
  ENSG00000131055_4 (sequence is synthesized)
aagcagtggaagaagtgacttgcatccccagctgtctccctgaggctccgccctggctgggagcctctggcggcccctcccctcccctgcccttaaccccagtaaagctccaaaaaaaaa

SEQ ID NO: 290628 - DNA, 120 bp, Artificial Sequence
  ENSG00000131059_0 (sequence is synthesized)
aatgtgagcaagccctggtggcagcgccagggtccagtgcagcccctccccacagcatgctgggggctaattctgatgtcatctttctgcagaaaaccattagaccatccctccagactg

SEQ ID NO: 290629 - DNA, 120 bp, Artificial Sequence
  ENSG00000131059_1 (sequence is synthesized)
ccaccctcaaagccgtctgcccaggccccatctgacactcttgacatctgcaggtcccagaccctatgatgtgtccactctggaggctcctcatcttcctcgggttgctggccttgccct

SEQ ID NO: 290630 - DNA, 120 bp, Artificial Sequence
  ENSG00000131059_2 (sequence is synthesized)
tggcaccacacaagcagccttggcctggcctggcccaagcccacagagacaacaaatccaccctggcaagaattattgctcagggcctcataaagcacaacgcagaaagccgaattcaga

SEQ ID NO: 290631 - DNA, 120 bp, Artificial Sequence
  ENSG00000131059_3 (sequence is synthesized)
acatccactttggggacagactgaatgcctcagcacaagtggccccagggctggtgggctggctaatcagcggcaggaaacaccagcagcagcaagagagcagcatcaacatcaccaaca

SEQ ID NO: 290632 - DNA, 120 bp, Artificial Sequence
  ENSG00000131059_4 (sequence is synthesized)
atctcacttgaatttgaccttgaattgagaccgtccttcgataacaacatcgtaaagatgtgtgcacatatgagcatcgttgtggagttctggctggagaaagacgagtttggccggagg

SEQ ID NO: 290633 - DNA, 120 bp, Artificial Sequence
  ENSG00000131059_5 (sequence is synthesized)
gatctggtgataggcaaatgcgatgcagagcccagcagtgtccatgtggccatcctcactgaggctatcccaccaaagatgaatcagtttctctacaacctcaaagagaatctgcaaaaa

SEQ ID NO: 290634 - DNA, 120 bp, Artificial Sequence
  ENSG00000131059_6 (sequence is synthesized)
gttctcccacacatggtagaaagtcaggtatgtcctctgatcggtgaaatcctcgggcagctggatgtgaaactgttgaaaagcctcatagaacaggaggctgctcatgaaccaacccac

SEQ ID NO: 290635 - DNA, 120 bp, Artificial Sequence
  ENSG00000131059_7 (sequence is synthesized)
catgaaaccagccaaccctctgcatgccaggctggagagtcccccagctgacttctgctgatcagaaggaaagtccacatcttgcaaccttaagtctcccttagagtggggcttctgcta

SEQ ID NO: 290636 - DNA, 120 bp, Artificial Sequence
  ENSG00000131059_8 (sequence is synthesized)
ccctaaaaactttaccccaggctctgtggacataccatcctctcctacaataaactctagctctgaagggtgcacaggtccctcccacctgggccctggggtttaggtctagaagtcaga

SEQ ID NO: 290637 - DNA, 120 bp, Artificial Sequence
  ENSG00000131059_9 (sequence is synthesized)
ccatctaattttctcttcaaccaacattgactctgatctacatcctgtatgttagctccgtgctccagactgaaatacagtgttgggtgaactttcaaccagaataccccactttgagca

SEQ ID NO: 290638 - DNA, 120 bp, Artificial Sequence
  ENSG00000131059_10 (sequence is synthesized)
tgagccccagctgcagggtcacttcctgaccgtctcctaaattagtccaaagcagatctcatccttcccccgggatctgctcctcctcccatgttcccatccgtgatgaccctaccaccc

SEQ ID NO: 290639 - DNA, 120 bp, Artificial Sequence
  ENSG00000131059_11 (sequence is synthesized)
tcccagaagccagactcttctccctcctcactcctcaagcccatcatcacaagttcccatcaatgacttgctagtagccctcagcttctctcttttatctccatctcctactccactacc

SEQ ID NO: 290640 - DNA, 120 bp, Artificial Sequence
  ENSG00000131059_12 (sequence is synthesized)
ctcccctcctacactccattcctcatcctgcagcagaaataactttctaacacagaaatctggccatgcccaagcccctgctccaaagcctccagtggttcccagtgccctctgggtaaa

SEQ ID NO: 290641 - DNA, 120 bp, Artificial Sequence
  ENSG00000131059_13 (sequence is synthesized)
cagcaactcccaaatttcactcaaggccctgcttgtcctctcccctgccaacttttcagccctttgtcctccaccacacaccgtacattttcacaccactgtgcctttgcacatgctgat

SEQ ID NO: 290642 - DNA, 120 bp, Artificial Sequence
  ENSG00000131059_14 (sequence is synthesized)
cttcttgcctggaatgcccgtcccatcttctatgaagctcctccttatcactcattcattcatatatttcccaaaaacctactgtatgccagcaccacacctgatgctagggatacagtg

SEQ ID NO: 290643 - DNA, 120 bp, Artificial Sequence
  ENSG00000131059_15 (sequence is synthesized)
gtgaacaagacacaaaatacagctttaataaagctccatagactggctgaccaagtctttcaatttcaactgactgtaagtcccttgaaggcaagacttgtgcctgatttatctctgtaa

SEQ ID NO: 290644 - DNA, 120 bp, Artificial Sequence
  ENSG00000131059_16 (sequence is synthesized)
ttccggaatgctgaaagcaatgaagacctcagtggatgtctgttcatttattcatcagatattcattgagtacctagattgtaccagacattcatgggaggacggtgtaagggaaagact

SEQ ID NO: 290645 - DNA, 120 bp, Artificial Sequence
  ENSG00000131059_17 (sequence is synthesized)
ctggaatctggtgctctattgccatgtttctaatataaccagcacttattagctgtgtgaccttgggcaaggtctgagctacccctttgatgatcactgacaatgatacttctggcatgg

SEQ ID NO: 290646 - DNA, 120 bp, Artificial Sequence
  ENSG00000131059_18 (sequence is synthesized)
ggctgagtgaggactaaaagactgtggaaagtatactcaacacatacctcctggctttaatattgcctggattgctctgttctgttctgtgcctctacctttctttctagggctatccca

SEQ ID NO: 290647 - DNA, 120 bp, Artificial Sequence
  ENSG00000131061_0 (sequence is synthesized)
acgtgctgtgggaatgggggattctgtgtcagagctggggggtcgggtccggtgagatggggatgcggatttagataatagggatgggaagttccgcgtgtgcggcggatataaggtcgg

SEQ ID NO: 290648 - DNA, 120 bp, Artificial Sequence
  ENSG00000131061_1 (sequence is synthesized)
tgtagacttggtcgttcaagtgaggcggggtccacactcggtggcccggtgactgggttatcgagtggagccagggcagcccagagatgctggggtcccgcgagcctaggttgggtttcc

SEQ ID NO: 290649 - DNA, 120 bp, Artificial Sequence
  ENSG00000131061_2 (sequence is synthesized)
ttccagggctgggggctcggcggcggctcctgggcgccccctggcggccccgactcaaccgccacggctcccacaatgctcgcgtagccgggcttcggttcctgtggcggcgacggcggc

SEQ ID NO: 290650 - DNA, 120 bp, Artificial Sequence
  ENSG00000131061_3 (sequence is synthesized)
ccaagatggcgcaggcgatctttgaggccctggagggaatggacaatcagaccgttctggctgtccagtcattattggatggccaaggagcagtccctgatccgacaggccagagtgtca

SEQ ID NO: 290651 - DNA, 120 bp, Artificial Sequence
  ENSG00000131061_4 (sequence is synthesized)
atgcgccccctgctatccagccattggatgacgaggatgtatttctctgcgggaagtgtaagaagcaattcaactcgctgccagcgtttatgacccacaagcgggaacagtgccagggga

SEQ ID NO: 290652 - DNA, 120 bp, Artificial Sequence
  ENSG00000131061_5 (sequence is synthesized)
atgcccccgccctggccacagtctcactggccaccaacagcatctacccaccttcggcagcacccacagcggtccagcaggccccaactcctgccaatcgccagatctccacatacatca

SEQ ID NO: 290653 - DNA, 120 bp, Artificial Sequence
  ENSG00000131061_6 (sequence is synthesized)
cagtgcccccgtccccactgatccagaccctggtgcaggggaacatcttggtgagcgatgatgtgctcatgtctgccatgtcagccttcacatccctggaccagcccatgccccagggcc

SEQ ID NO: 290654 - DNA, 120 bp, Artificial Sequence
  ENSG00000131061_7 (sequence is synthesized)
ccccacctgtgcagagcagcctgaacatgcattccgtgcccagctacctcacccagcctccacctcctcctccacctcctccaccactgcccccaccgccaccacctcagcctccaccac

SEQ ID NO: 290655 - DNA, 120 bp, Artificial Sequence
  ENSG00000131061_8 (sequence is synthesized)
ctccaccccagagcctgggcccccctgggcgtcccaaccctggtgggaacggtgtggtggaggtgtacagtgctgctgcgcccctggctgggagtggaacggtggagatccaggcactgg

SEQ ID NO: 290656 - DNA, 120 bp, Artificial Sequence
  ENSG00000131061_9 (sequence is synthesized)
ggatgcagccctacccacccctagaggtgccaaaccagtgtgtggagcctccagtatatcccacccccacagtgtacagccctggcaaacagggattcaaacccaaaggaccaaaccccg

SEQ ID NO: 290657 - DNA, 120 bp, Artificial Sequence
  ENSG00000131061_10 (sequence is synthesized)
ccgcccccatgaccagcgccaccgggggcacggtggccacctttgactctccagcaacgctgaagacccgacgagctaaagctgcagggaagccaaaggctcagaaactcaagtgctcat

SEQ ID NO: 290658 - DNA, 120 bp, Artificial Sequence
  ENSG00000131061_11 (sequence is synthesized)
actgtgacaagtcattcaccaaaaactttgacctgcagcagcacatccgaagccacaccggtgagaagcccttccagtgcattgcatgtggccgtgcctttgcccagaagtctaatgtta

SEQ ID NO: 290659 - DNA, 120 bp, Artificial Sequence
  ENSG00000131061_12 (sequence is synthesized)
agaaacacatgcagacccacaaggtgtggcctccaggacacagtggtggcaccgtgtctcgaaactctgtgaccgtacaggtcatggccctgaaccccagcaggcaggaggacgaggaaa

SEQ ID NO: 290660 - DNA, 120 bp, Artificial Sequence
  ENSG00000131061_13 (sequence is synthesized)
gcacagggttgggccagcccctgccgggtgcgccacagccccaggccttgtccacagctggtgaggaagagggggacaagccggagtccaagcaggtggtcctcatcgacagctcctacc

SEQ ID NO: 290661 - DNA, 120 bp, Artificial Sequence
  ENSG00000131061_14 (sequence is synthesized)
tgtgccaattctgccccagcaaattcagcacctacttccagctcaagtctcacatgacccagcataagaatgagcaggtgtacaagtgtgtggtcaaaagctgtgcccagacgttcccaa

SEQ ID NO: 290662 - DNA, 120 bp, Artificial Sequence
  ENSG00000131061_15 (sequence is synthesized)
cctctgcggcaaggacttcccctcgctgtacgacctgggcgtgcaccagtactcccacagcctcctgccacagcacagccccaagaaggacaatgccgtctacaagtgtgtcaaatgtgt

SEQ ID NO: 290663 - DNA, 120 bp, Artificial Sequence
  ENSG00000131061_16 (sequence is synthesized)
caacaaatactccacccctgaggccctggagcaccacctgcagaccgccactcacaacttcccctgcccacactgccagaaggtgtttccttgtgaacgctacctgcggcgtcatctgcc

SEQ ID NO: 290664 - DNA, 120 bp, Artificial Sequence
  ENSG00000131061_17 (sequence is synthesized)
cacccacggcagcgggggcaggttcaagtgccaagtgtgcaagaagttcttccggcgggagcattatctcaaactgcatgctcacatccactcgggtgagaagccctacaaatgctcagt

SEQ ID NO: 290665 - DNA, 120 bp, Artificial Sequence
  ENSG00000131061_18 (sequence is synthesized)
gtgcgagtctgcgttcaaccgcaaggacaaactgaagagacacatgttgatccacgagcccttcaagaaatacaaatgccctttctcgacgcacacaggctgcagtaaggagttcaaccg

SEQ ID NO: 290666 - DNA, 120 bp, Artificial Sequence
  ENSG00000131061_19 (sequence is synthesized)
gccggacaagctgaaggcccacatcctctcccactctggcatgaagctccacaaatgcgccctgtgcagcaagtccttcagccgccgtgcccacctcgccgagcatcagcgcgcccacac

SEQ ID NO: 290667 - DNA, 120 bp, Artificial Sequence
  ENSG00000131061_20 (sequence is synthesized)
gggcaactacaagttccgctgtgctggctgcgccaagggcttttcccgccacaaatacctcaaagatcaccgctgtcgtctcggcccccaaaaggacaaggacctgcaaacccggcggcc

SEQ ID NO: 290668 - DNA, 120 bp, Artificial Sequence
  ENSG00000131061_21 (sequence is synthesized)
cccccagaggagggcagccccccgcagttgcggcagtggtgggcgcaaggtgctgacccccttgcctgacccgctggggctggaggagctgaaggacacaggggctgggctggtgcccga

SEQ ID NO: 290669 - DNA, 120 bp, Artificial Sequence
  ENSG00000131061_22 (sequence is synthesized)
ggctgtccccggcaagccgcccttcgcagagccggacgcggtgctgtccatcgttgtgggtggtgcggtgggcgcggaaactgagctggtggtacctggacacgctgaggggctgggctc

SEQ ID NO: 290670 - DNA, 120 bp, Artificial Sequence
  ENSG00000131061_23 (sequence is synthesized)
caacctggctctggcggagctgcaggctggggccgagggcccatgtgccatgctcgctgtgcccgtctacatccaggcctccgagtgacggacctgaggtgtctgtttcctgggcaggcc

SEQ ID NO: 290671 - DNA, 120 bp, Artificial Sequence
  ENSG00000131061_24 (sequence is synthesized)
tgatgctcctgtttgggtccagggcccctgggggcagaccggtgatccttaccagtggaagcgagccatcgagccattggcagaaatcctgctgaatgtcattcagaaacctcagcccat

SEQ ID NO: 290672 - DNA, 120 bp, Artificial Sequence
  ENSG00000131061_25 (sequence is synthesized)
ggtcgccctcctgtgcccctctcctgccggaaagccctgcaacattctagggttgggggcagggccatccacggtttctgggcagagccatggtggcaggagagagatggctgaagcctg

SEQ ID NO: 290673 - DNA, 120 bp, Artificial Sequence
  ENSG00000131061_26 (sequence is synthesized)
agcagcccagagtcccgctggtctaggctggtggtcggggcccctgggagaggagacagggcattcctccccactctgtctccaggctgcctctgggtagcctctagtctgctgttcttc

SEQ ID NO: 290674 - DNA, 120 bp, Artificial Sequence
  ENSG00000131061_27 (sequence is synthesized)
aggaggcctgccataaactcttcggagtttacgtgttgcaccttttcacagacggttccccacagcatcctcagacagctctgtgatgtagcttttaggaggcactcaggtgtcacggct

SEQ ID NO: 290675 - DNA, 120 bp, Artificial Sequence
  ENSG00000131061_28 (sequence is synthesized)
agactgcagctatgagacagatctggcttcaaatccaagagttgccatgcacttgctgtgtgaccttgggcaagtcacttcacttctctgagccccgtgttcctcatctgtacaatgggg

SEQ ID NO: 290676 - DNA, 120 bp, Artificial Sequence
  ENSG00000131061_29 (sequence is synthesized)
cttacgatactactacctcatagggttgtcctggggatccagtatgatgaagtgcgccaggggcttggcatggtgcccggcacgcagaaagtgctcaataaatgtttttgtcataacgtg

SEQ ID NO: 290677 - DNA, 120 bp, Artificial Sequence
  ENSG00000131061_30 (sequence is synthesized)
ttccccttcaagttgtagttgccactgacactttggtctgtcctttccctacacctccccatctttcttcctgcatcttcagtttatttacagagacacatggccagggcttttttgggg

SEQ ID NO: 290678 - DNA, 120 bp, Artificial Sequence
  ENSG00000131061_31 (sequence is synthesized)
tgtgcaggttgtattttttctttcttttttttttgttggagcttacatatccagtagggattatatttttttctaagaaagacgagattgtgttaagctgttctactgctttctttcccc

SEQ ID NO: 290679 - DNA, 120 bp, Artificial Sequence
  ENSG00000131061_32 (sequence is synthesized)
actagcagtatgtccaggagatctttccagatcaggaaacacagattgacctttttaatctttttaatgaccacagagcattctattgtagggaccagcatttccgtatcgactgggttg

SEQ ID NO: 290680 - DNA, 120 bp, Artificial Sequence
  ENSG00000131061_33 (sequence is synthesized)
atggtttttcagaagtactttattcattccagagggagaacagagaggaaataatggcaggaagtcacagcagcccagaaacagccccttccaaagggcaggctgtgaccccacggcaac

SEQ ID NO: 290681 - DNA, 120 bp, Artificial Sequence
  ENSG00000131061_34 (sequence is synthesized)
tttgcaggcacctcccttgatttcctgtgggttcctcaggtagcccatcaggcaagagctgccccaggacgggtttaacagcaggaagatctgggtagctcagatgggctctggatcacg

SEQ ID NO: 290682 - DNA, 120 bp, Artificial Sequence
  ENSG00000131061_35 (sequence is synthesized)
ctgctgggctggaatcttagctcccgcaaccataggggtagcccctgagccagtcccttcacctctctgaacttcagtcttctttcttatctgtgaaacagggatgatgggagtcagtgc

SEQ ID NO: 290683 - DNA, 120 bp, Artificial Sequence
  ENSG00000131061_36 (sequence is synthesized)
ctcctggttttttggaaggattcagttagataaggtgtgattcctcgtcccccagggtggaccgcattgccagaaatgacatgaggccaccttgcttctcaggccgtgcctcatccttga

SEQ ID NO: 290684 - DNA, 120 bp, Artificial Sequence
  ENSG00000131061_37 (sequence is synthesized)
ctcctctcctcctctcacagtcacagccagtccagtggcaagggctgccgactgtgccttcccaacatggctgtcctgggccacttcctggttatcctcacctccaccctcattcgagct

SEQ ID NO: 290685 - DNA, 120 bp, Artificial Sequence
  ENSG00000131061_38 (sequence is synthesized)
ctcattcgagctggttaaaagcttacatcagagtccatccctctgctgttcagaccttctggtgcttctcttctggctcagagtaaaagccaaagtcctggctgggcgcggtggctcatg

SEQ ID NO: 290686 - DNA, 120 bp, Artificial Sequence
  ENSG00000131061_39 (sequence is synthesized)
gcaaggctctgtctcaaaaaaaataaataaataaaagccaagtccttagctctgcctcccaggtcctcccatgcggacctggctggctcgctgccctcaccttctgccttgttctctggc

SEQ ID NO: 290687 - DNA, 120 bp, Artificial Sequence
  ENSG00000131061_40 (sequence is synthesized)
cacaccagcctccctgttgttcatcagcaccgccaaacgcactcctgcctcagggcctttgtacctgctttccctgctgcccagaccatctccctgatgacctgaggtctctcctcatgc

SEQ ID NO: 290688 - DNA, 120 bp, Artificial Sequence
  ENSG00000131061_41 (sequence is synthesized)
atggcctcatcagagaggcctctcctgaccatcctgtcaaaatagccctgtcttgtctctggcaaaacaaagccactgaagaatgagagaggctattttctcccctggccacctccctag

SEQ ID NO: 290689 - DNA, 120 bp, Artificial Sequence
  ENSG00000131061_42 (sequence is synthesized)
aggagctgctcccctgaggggcccagcggggacccttgtgccctggatgccgactcctggtgagtgctggctctccctgtctgtgtctgctgcaggtgagaagccctacaaatgctcagt

SEQ ID NO: 290690 - DNA, 120 bp, Artificial Sequence
  ENSG00000131067_0 (sequence is synthesized)
acttccggcaggcgctgcgctgctggggggcgcgggcgaggatggcggcggagaacgaggccagccaggagagcgccctgggcgcctactcgccagtggactacatgagcatcaccagct

SEQ ID NO: 290691 - DNA, 120 bp, Artificial Sequence
  ENSG00000131067_1 (sequence is synthesized)
tcccgcggctgcccgaggacgagccggcgcccgcggccccgctgaggggccgcaaggacgaggacgcctttctgggagaccccgacaccgacccggactccttcctgaagtctgcacggc

SEQ ID NO: 290692 - DNA, 120 bp, Artificial Sequence
  ENSG00000131067_2 (sequence is synthesized)
tgcagcggctgccatcgtcgtcgtcggagatgggcagccaagacgggtcgccgctacgcgagacgcgcaaagacccgttctccgccgcagcggccgagtgctcctgccgccaggatgggc

SEQ ID NO: 290693 - DNA, 120 bp, Artificial Sequence
  ENSG00000131067_3 (sequence is synthesized)
tcacggtcatcgtcacggcctgtctcaccttcgctaccggtgtcaccgtggcgctggtcatgcagatctacttcggggacccccagatcttccagcagggtgccgtggtgaccgatgctg

SEQ ID NO: 290694 - DNA, 120 bp, Artificial Sequence
  ENSG00000131067_4 (sequence is synthesized)
cccgctgcacttcactgggcatcgaggtgctcagtaaacagggatcttctgtggacgcagcggtggcagcagccttgtgtttgggtatcgtggctccacacagttctggcctgggcggtg

SEQ ID NO: 290695 - DNA, 120 bp, Artificial Sequence
  ENSG00000131067_5 (sequence is synthesized)
ggggcgtgatgctggtacatgacatccgacgaaatgagagccacctaattgatttccgggagtccgcaccaggggccctcagggaagagaccctgcaaagatcctgggagaccaagcctg

SEQ ID NO: 290696 - DNA, 120 bp, Artificial Sequence
  ENSG00000131067_6 (sequence is synthesized)
ggctcttggtgggggttcccggaatggtgaaggggctacatgaagctcaccagctctatggcaggctgccatggtcccaagtcctggcctttgcagcagctgtggcccaagatggcttca

SEQ ID NO: 290697 - DNA, 120 bp, Artificial Sequence
  ENSG00000131067_7 (sequence is synthesized)
acgtgactcatgatctagcccgtgccctggctgaacagctgccacccaacatgtccgagcgcttccgggagacgttcctgccatcgggccgcccgccactacctggctcgttgctgcatc

SEQ ID NO: 290698 - DNA, 120 bp, Artificial Sequence
  ENSG00000131067_8 (sequence is synthesized)
ggcccgacctggctgaggtgctggatgtacttggcacctccggcccggctgccttctacgcaggtggcaacctcacactggagatggtggccgaggctcagcacgcagggggtgtcataa

SEQ ID NO: 290699 - DNA, 120 bp, Artificial Sequence
  ENSG00000131067_9 (sequence is synthesized)
ccgaagaggacttcagcaattacagcgcccttgtggagaagcctgtgtgtggcgtgtacagaggccacctggttcttagtcccccacctccgcacacgggccctgccctcatcagtgctc

SEQ ID NO: 290700 - DNA, 120 bp, Artificial Sequence
  ENSG00000131067_10 (sequence is synthesized)
ctatgattctaccatcactgagagcatggatgacatgctcagcaaggtggaggccgcctacctccggggccatatcaatgactcccaggcagcccctgccccactcctgcctgtctatga

SEQ ID NO: 290701 - DNA, 120 bp, Artificial Sequence
  ENSG00000131067_11 (sequence is synthesized)
actagacggagctcccacggctgcccaggtgctgatcatgggacctgatgacttcattgtggccatggttagctccctgaaccagccctttggcagcggccttatcaccccctcggggat

SEQ ID NO: 290702 - DNA, 120 bp, Artificial Sequence
  ENSG00000131067_12 (sequence is synthesized)
cctgctcaacagccagatgctggacttctcctggcccaaccggacagctaaccactctgcacccagcctggagaattcagtgcagccagggaagcggccactctctttcctgctgcccac

SEQ ID NO: 290703 - DNA, 120 bp, Artificial Sequence
  ENSG00000131067_13 (sequence is synthesized)
agtggtccgacccgcggaggggctctgtggaacctacctcgctctgggggccaatggagctgcgcggggcctcagcggcctgacacaggttctgctgaatgtcctgaccttgaaccggaa

SEQ ID NO: 290704 - DNA, 120 bp, Artificial Sequence
  ENSG00000131067_14 (sequence is synthesized)
cctgagtgacagcctggcccgcggccgcctacacccggacctgcagtccaacctcctgcaggtggacagtgagttcacagaggaagagattgagttcctggaagccaggggtcaccacgt

SEQ ID NO: 290705 - DNA, 120 bp, Artificial Sequence
  ENSG00000131067_15 (sequence is synthesized)
ggagaaagtagatgtcttatcctgggtccatggcagccgaaggaccaacaacttcatcatcgctgttaaggaccctcggagcccagatgcagctggagccaccatcctgtagagcagcgg

SEQ ID NO: 290706 - DNA, 120 bp, Artificial Sequence
  ENSG00000131067_16 (sequence is synthesized)
ggtggggcggggtctctgctcccccactttgcatgttcccagagtccctccttctcccaggtttggtctcagggggaccccagggatgccccagatcaggggccagaggggatgcttagc

SEQ ID NO: 290707 - DNA, 84 bp, Artificial Sequence
  ENSG00000131067_17 (sequence is synthesized)
cagggatgccccagatcaggggccagaggggatgcttagcaaacccaatcccagagtaactggaaaattctccatcaggaggcc

SEQ ID NO: 290708 - DNA, 120 bp, Artificial Sequence
  ENSG00000131067_18 (sequence is synthesized)
ggaccttgaggaatcagactatctgtctgtgtgtcacctctcctccttcagccatgctggccccgagcttagggatgtgcttgcaaacccttctcaagggtctcacaaccccaacatctt

SEQ ID NO: 290709 - DNA, 120 bp, Artificial Sequence
  ENSG00000131067_19 (sequence is synthesized)
cagactggcctgacctgggccttgtcttccagttcctttctcccattcccagcctcatttcttaaatgactaggaattttttaatggaccatcatagggagggggtgctcctcttttccc

SEQ ID NO: 290710 - DNA, 120 bp, Artificial Sequence
  ENSG00000131067_20 (sequence is synthesized)
accaggttgaggtgggggccttgcatcgggggtccccagggtatggggtaggggtgggggtgggcaccagctcaggggcttccatttgcaaagggaaattaaagaaagaatgttgcttaa

SEQ ID NO: 290711 - DNA, 120 bp, Artificial Sequence
  ENSG00000131067_21 (sequence is synthesized)
gagcctggaccaagggtgagagctgaggaatcctggaccatcacccctgggacagccctgatttttctgtaccttggctaccacaggttctgctgaatgtcctgaccttgaaccggaacc

SEQ ID NO: 290712 - DNA, 120 bp, Artificial Sequence
  ENSG00000131067_22 (sequence is synthesized)
acaaccagccctctttagggtgggatttgaaaggaagggcctgcttttctccagaacacctcagaatggctccatgaatgtcttgagaacctgatatatatgccaggcacctattttggc

SEQ ID NO: 290713 - DNA, 120 bp, Artificial Sequence
  ENSG00000131068_0 (sequence is synthesized)
acacagtattctgaactcctggatctaccacctcctgcttcccaaggaccatgaaactcctgctgctggctcttcctatgcttgtgctcctaccccaagtgatcccagcctatagtggtg

SEQ ID NO: 290714 - DNA, 120 bp, Artificial Sequence
  ENSG00000131068_1 (sequence is synthesized)
aaaaaaaatgctggaacagatcagggcactgcaggaaacaatgcaaagatggagaagcagtgaaagatacatgcaaaaatcttcgagcttgctgcattccatccaatgaagaccacaggc

SEQ ID NO: 290715 - DNA, 120 bp, Artificial Sequence
  ENSG00000131068_2 (sequence is synthesized)
gagttcctgcgacatctcccacacccttgagtgactcaacaccaggaattattgatgatattttaacagtaaggttcacgacagactactttgaagtaagcagcaagaaagatatggttg

SEQ ID NO: 290716 - DNA, 120 bp, Artificial Sequence
  ENSG00000131068_3 (sequence is synthesized)
aagagtctgaggcgggaaggggaactgagacctctcttccaaatgttcaccatagctcatgacttcctctcggctatcactcacccctgtcctcagagtgataaactaagtcacatacag

SEQ ID NO: 290717 - DNA, 120 bp, Artificial Sequence
  ENSG00000131068_4 (sequence is synthesized)
actatttccaatgataaactcttcagtgctcttcttgaaatgtcacattatttccacaacaagttataacctatttttagtatttcttgtttgctagtgacctatgcacaacttcaatag

SEQ ID NO: 290718 - DNA, 120 bp, Artificial Sequence
  ENSG00000131068_5 (sequence is synthesized)
cttagttagctattccaacaacaatttcttcatgtatcgttctgtcttctcaacagctgtcttcatggcagcataagtggtcatgatcaaaattctaaatctttgcatctgtgagagtag

SEQ ID NO: 290719 - DNA, 120 bp, Artificial Sequence
  ENSG00000131068_6 (sequence is synthesized)
ctactatgacactaaaagctttttttctagaacaggagacacttcaggtgaaagcattcattctcctactaactatggccttggagccaggttttatctctcactgtaggaaattggccg

SEQ ID NO: 290720 - DNA, 120 bp, Artificial Sequence
  ENSG00000131068_7 (sequence is synthesized)
ccccaggtgtgagctatgaagactcctttttgccccagtggctttggggttgaaatgctgtcgaaaagcttttatggctctgtagacccatctttttgaccaagccttgatcacacatgg

SEQ ID NO: 290721 - DNA, 120 bp, Artificial Sequence
  ENSG00000131068_8 (sequence is synthesized)
atggacatccaagggtaatcatggacccccaattgtgggtgaaaggatggatcatttatctacctgattactgagagctttatttgtctccctctgatagcaaaaaaaaaaaaaaaaaaa

SEQ ID NO: 290722 - DNA, 120 bp, Artificial Sequence
  ENSG00000131069_0 (sequence is synthesized)
gcaaaggcggccgcggttctaggaacttgacgtgatggggcttcctgaggagcgggtccggagcggcagcgggagccggggccaggaggaagctggagccggaggccgggcgcggagttg

SEQ ID NO: 290723 - DNA, 120 bp, Artificial Sequence
  ENSG00000131069_1 (sequence is synthesized)
gtctccgccgcccgaggtcagccgctccgcgcacgtcccctcgctgcagcgctaccgcgagctgcaccggcgctccgtggaggagccgcgggaattctggggagacattgccaaggaatt

SEQ ID NO: 290724 - DNA, 120 bp, Artificial Sequence
  ENSG00000131069_2 (sequence is synthesized)
ttactggaagactccatgccctggcccattccttcggtacaactttgatgtgactaaagggaaaatcttcattgagtggatgaaaggagcaactaccaacatctgctacaatgtactgga

SEQ ID NO: 290725 - DNA, 120 bp, Artificial Sequence
  ENSG00000131069_3 (sequence is synthesized)
tcgaaatgtccatgagaaaaagcttggagataaagttgctttttactgggagggcaatgagccaggggagaccactcagatcacataccatcagcttctggtccaagtgtgtcagttcag

SEQ ID NO: 290726 - DNA, 120 bp, Artificial Sequence
  ENSG00000131069_4 (sequence is synthesized)
caatgttctccgaaaacagggcattcagaagggggaccgagtggccatctacatgcctatgatcccagagcttgtggtggccatgctggcatgtgcccgcattggggctttgcactccat

SEQ ID NO: 290727 - DNA, 120 bp, Artificial Sequence
  ENSG00000131069_5 (sequence is synthesized)
tgtgtttgcaggcttctcttcagagtctctatgtgaacggatcttggattccagctgcagtcttctcatcactacagatgccttctacaggggggaaaagcttgtgaacctgaaggagct

SEQ ID NO: 290728 - DNA, 120 bp, Artificial Sequence
  ENSG00000131069_6 (sequence is synthesized)
ggctgacgaggccctgcagaagtgtcaggagaagggtttcccagtaagatgctgcattgtggtcaagcacctggggcgggcagagctcggcatgggtgactccaccagccagtccccccc

SEQ ID NO: 290729 - DNA, 120 bp, Artificial Sequence
  ENSG00000131069_7 (sequence is synthesized)
aattaagaggtcatgcccagatgtgcagatctcatggaaccaagggattgacttgtggtggcatgagctcatgcaagaggcaggggatgagtgtgagcccgagtggtgtgatgccgagga

SEQ ID NO: 290730 - DNA, 120 bp, Artificial Sequence
  ENSG00000131069_8 (sequence is synthesized)
cccactcttcatcctgtacaccagtggctccacaggcaaacccaagggtgtggttcacacagttgggggctacatgctctatgtagccacaaccttcaagtatgtgtttgacttccatgc

SEQ ID NO: 290731 - DNA, 120 bp, Artificial Sequence
  ENSG00000131069_9 (sequence is synthesized)
agaggatgtgttctggtgcacggcagacattggttggatcactggtcattcctacgtcacctatgggccactggccaatggtgccaccagtgttttgtttgaggggattcccacatatcc

SEQ ID NO: 290732 - DNA, 120 bp, Artificial Sequence
  ENSG00000131069_10 (sequence is synthesized)
ggacgtgaaccgcctgtggagcattgtggacaaatacaaggtgaccaagttctacacagcacccacagccatccgtctgctcatgaagtttggagatgagcctgtcaccaagcatagccg

SEQ ID NO: 290733 - DNA, 120 bp, Artificial Sequence
  ENSG00000131069_11 (sequence is synthesized)
ggcatccttgcaggtgttaggcacagtgggtgaacccatcaaccctgaggcctggctatggtaccaccgggtggtaggtgcccagcgctgccccatcgtggacaccttctggcaaacaga

SEQ ID NO: 290734 - DNA, 120 bp, Artificial Sequence
  ENSG00000131069_12 (sequence is synthesized)
gtggccacatgttgactccccttcctggtgccacacccatgaaacccggttctgctactttcccattctttggtgtagctcctgcaatcctgaatgagtccggggaagagttggaaggtg

SEQ ID NO: 290735 - DNA, 120 bp, Artificial Sequence
  ENSG00000131069_13 (sequence is synthesized)
aagctgaaggttatctggtgttcaagcagccctggccagggatcatgcgcacagtctatgggaaccacgaacgctttgagacaacctactttaagaagtttcctggatactatgttacag

SEQ ID NO: 290736 - DNA, 120 bp, Artificial Sequence
  ENSG00000131069_14 (sequence is synthesized)
gagatggctgccagcgggaccaggatggctattactggatcactggcaggattgatgacatgctcaatgtatctggacacctgctgagtacagcagaggtggagtcagcacttgtggaac

SEQ ID NO: 290737 - DNA, 120 bp, Artificial Sequence
  ENSG00000131069_15 (sequence is synthesized)
atgaggctgttgcagaggcagctgtggtgggccaccctcatcctgtgaagggtgaatgcctctactgctttgtcaccttgtgtgatggccacaccttcagccccaagctcaccgaggagc

SEQ ID NO: 290738 - DNA, 120 bp, Artificial Sequence
  ENSG00000131069_16 (sequence is synthesized)
tcaagaagcagattagagaaaagattggccccattgccacaccagactacatccagaatgcacctggcttgcctaaaacccgctcagggaaaatcatgaggcgagtgcttcggaagattg

SEQ ID NO: 290739 - DNA, 120 bp, Artificial Sequence
  ENSG00000131069_17 (sequence is synthesized)
ctcagaatgaccatgacctcggggacatgtctactgtggctgacccatctgtcatcagtcacctcttcagccaccgctgcctgaccatccagtgaacatgatcctgacctttacctagga

SEQ ID NO: 290740 - DNA, 120 bp, Artificial Sequence
  ENSG00000131069_18 (sequence is synthesized)
ttcctcctgctccaaactttgcccatcctctttgccccctcaggagtgctgagggccagtgttgacccacactaccctcccttgaccagctgtctgggaccggaaaccagctttgtctcc

SEQ ID NO: 290741 - DNA, 120 bp, Artificial Sequence
  ENSG00000131069_19 (sequence is synthesized)
aggtagagacaacatcctgtgactgccaggcagaaaggacagggcccaggtcagcctcagtctgctgtgcctccagactgcagagctctcagaacccagaacagagacgaaaaggctacc

SEQ ID NO: 290742 - DNA, 120 bp, Artificial Sequence
  ENSG00000131069_20 (sequence is synthesized)
tctcctacccaagttaagtgttcaaaggggatgtgagggcctccactgaagcagggaggcagctgtgtaatcctatgtcagctctcttaggaagccccagtacttatattgggcatgcac

SEQ ID NO: 290743 - DNA, 120 bp, Artificial Sequence
  ENSG00000131069_21 (sequence is synthesized)
ttgcccttaaaaacaatgatttgtgagtccaggaacaatttactatttttaaaatattttgctgcttctgttctgggtctgaattcccttttgtgccagatgccagtactgtctgcccat

SEQ ID NO: 290744 - DNA, 120 bp, Artificial Sequence
  ENSG00000131069_22 (sequence is synthesized)
tggctccaggggctgtatgggcagattcagtctccagagggtattcagatcatctgcttctttgaaggagtaaatgtgttttgttcctagggccagaggagcttgtcttccttgtcctct

SEQ ID NO: 290745 - DNA, 120 bp, Artificial Sequence
  ENSG00000131069_23 (sequence is synthesized)
gttcccaccctcccctgaacagaacccagcccataagagacattctcagatgaaactctgttttcttgccccagtcaggctcaagccctgtggttgtaggaataaagcctgtgatctcaa

SEQ ID NO: 290746 - DNA, 120 bp, Artificial Sequence
  ENSG00000131069_24 (sequence is synthesized)
aaagtgcagggaagtagctgggaagggaggctgggctagatggggtcacaaggcctgtgtaggcttcaggaggtgggagctgcccgcttcaggcctcagaatcactcttggagttagata

SEQ ID NO: 290747 - DNA, 120 bp, Artificial Sequence
  ENSG00000131069_25 (sequence is synthesized)
tggagataaagttgctttttactgaaccccccatacctcaagccttggtctccaatcagctcattggtatttggggctactcagcatagagggtagagactgcctgccttttctctcctg

SEQ ID NO: 290748 - DNA, 120 bp, Artificial Sequence
  ENSG00000131069_26 (sequence is synthesized)
ggggaatcatattctctttacccctccctagacatgaagagattctccgcttctcccagaccctctgcttctcacaatccctggctgtggggaacttctcttaaggcacagattggatcc

SEQ ID NO: 290749 - DNA, 120 bp, Artificial Sequence
  ENSG00000131069_27 (sequence is synthesized)
agaattccatccattccatcgatctgctgccaaagaatgttactgattgggcaataattatttacttggtgtgtgggcaccactgttttttaaatgagtgttttcatttgtatcaaactg

SEQ ID NO: 290750 - DNA, 120 bp, Artificial Sequence
  ENSG00000131069_28 (sequence is synthesized)
gacctgctttcctcaaggattgcccaaaaggagacacaaatttactaaacacttatcaataatagaacaccgtgctaggcaatttccatatactattaatttaatcctcacaataacttt

SEQ ID NO: 290751 - DNA, 120 bp, Artificial Sequence
  ENSG00000131069_29 (sequence is synthesized)
ggaagacagaaagtattttctctgatttacagatgaggatcctgaagctcagaggggtaaagttacttctctgaggtcacctagctagtaagtggtagagctgggattccaagccaggat

SEQ ID NO: 290752 - DNA, 120 bp, Artificial Sequence
  ENSG00000131069_30 (sequence is synthesized)
cctctgtctccaaagcctgtacttcattcaggacactttcccccacatttagaaaagctgtaattatcttccagtgagacagcatagcaaatgtgatcactgtcccttcctcactcccca

SEQ ID NO: 290753 - DNA, 120 bp, Artificial Sequence
  ENSG00000131069_31 (sequence is synthesized)
ggagggcggggcctgatcttcgcgacagccgggagggggcgcctctcccagccctcggccgtgtcccggtctgactcgcccccgtctgctcagcgctatcagcctgcagctggcacacag

SEQ ID NO: 290754 - DNA, 120 bp, Artificial Sequence
  ENSG00000131069_32 (sequence is synthesized)
gggctactcagcatagagggtagagactgcctgccttttctctcctggtcccacctcagctgaccctctgtcagctcgaatcagctggaagagccagagttaagaggcctactcaggaag

SEQ ID NO: 290755 - DNA, 120 bp, Artificial Sequence
  ENSG00000131069_33 (sequence is synthesized)
cttggggcacttggcctagttagatagtggagaactggactgacatgtgtgaagaatttggggttctggggccccttgggagttgagtcagagttgcctcattcctcttcttgggttctg

SEQ ID NO: 290756 - DNA, 120 bp, Artificial Sequence
  ENSG00000131069_34 (sequence is synthesized)
tctcccgtttgcttctagactttcccattctttggtgtagctcctgcaatcctgaatgagtccggggaagagttggaaggtgaagctgaaggttatctgctgcttaggactgaaacttca

SEQ ID NO: 290757 - DNA, 120 bp, Artificial Sequence
  ENSG00000131069_35 (sequence is synthesized)
agaccctggaggggaccctcgatactttgcctgcatctcttccttttgggccataagtctcctaagggcgttttaagagttgctcagattcctgatggtacctttttgggtctggaagac

SEQ ID NO: 290758 - DNA, 120 bp, Artificial Sequence
  ENSG00000131069_36 (sequence is synthesized)
taagtcccatcttcttttgacaaagattctacagaaaggaggctttataacatagtagaaaatcacgtaggatctggagtcaccctgcctgggttcgaatcctagctctgcctcttctgt

SEQ ID NO: 290759 - DNA, 120 bp, Artificial Sequence
  ENSG00000131069_37 (sequence is synthesized)
cctagctctgcctcttctgtgacctcagataagttatttaacacctctgaatctacattttctaatttgtaaaatagggttaaagtggtgtctctggccgggcacggtggctcacacctg

SEQ ID NO: 290760 - DNA, 120 bp, Artificial Sequence
  ENSG00000131069_38 (sequence is synthesized)
tgttctccgaaagcttgtggtggccatgctggcatgtgcccgcattggggctttgcactccattgtgtttgcaggcttctcttcagagtctctatgtgaacggatcttggattccagctg

SEQ ID NO: 290761 - DNA, 120 bp, Artificial Sequence
  ENSG00000131080_0 (sequence is synthesized)
gggtgagatgtgtgctctgcgctgaggtggatttgtaccggagtcccatttgggagcaagagccatctactcgtccgttaccggccttcccaccatggattgccaagaaaatgagtactg

SEQ ID NO: 290762 - DNA, 120 bp, Artificial Sequence
  ENSG00000131080_1 (sequence is synthesized)
ggaccaatggggacggtgtgtcacctgccaacggtgtggtcctggacaggagctatccaaggattgtggttatggagagggtggagatgcctactgcacagcctgccctcctcgcaggta

SEQ ID NO: 290763 - DNA, 120 bp, Artificial Sequence
  ENSG00000131080_2 (sequence is synthesized)
caaaagcagctggggccaccacagatgtcagagttgcatcacctgtgctgtcatcaatcgtgttcagaaggtcaactgcacagctacctctaatgctgtctgtggggactgtttgcccag

SEQ ID NO: 290764 - DNA, 120 bp, Artificial Sequence
  ENSG00000131080_3 (sequence is synthesized)
gttctaccgaaagacacgcattggaggcctgcaggaccaagagtgcatcccgtgcacgaagcagacccccacctctgaggttcaatgtgccttccagttgagcttagtggaggcagatac

SEQ ID NO: 290765 - DNA, 120 bp, Artificial Sequence
  ENSG00000131080_4 (sequence is synthesized)
acccacagtgccccctcaggaggccacacttgttgcactggtgagcagcctgctagtggtgtttaccctggccttcctggggctcttcttcctctactgcaagcagttcttcaacagaca

SEQ ID NO: 290766 - DNA, 120 bp, Artificial Sequence
  ENSG00000131080_5 (sequence is synthesized)
ttgccagcgtggaggtttgctgcagtttgaggctgataaaacagcaaaggaggaatctctcttccccgtgccacccagcaaggagaccagtgctgagtcccaagtgagtgagaacatctt

SEQ ID NO: 290767 - DNA, 120 bp, Artificial Sequence
  ENSG00000131080_6 (sequence is synthesized)
tcagacccagccacttaaccctatcctcgaggacgactgcagctcgactagtggcttccccacacaggagtcctttaccatggcctcctgcacctcagagagccactcccactgggtcca

SEQ ID NO: 290768 - DNA, 120 bp, Artificial Sequence
  ENSG00000131080_7 (sequence is synthesized)
cagccccatcgaatgcacagagctggacctgcaaaagttttccagctctgcctcctatactggagctgagaccttggggggaaacacagtcgaaagcactggagacaggctggagctcaa

SEQ ID NO: 290769 - DNA, 120 bp, Artificial Sequence
  ENSG00000131080_8 (sequence is synthesized)
tgtgccctttgaagttcccagcccttaactctaatgaggtctcttgggcccctggcagccttgcccagttgttctctctggactctgttcctataccacaacagcagcaggggcctgaaa

SEQ ID NO: 290770 - DNA, 120 bp, Artificial Sequence
  ENSG00000131080_9 (sequence is synthesized)
tgtgatgtccacaagagctaataccctacagatggggcatatcctatcccatcccaccagaggattgattctccatttcacaaggactgatctggagcatttcttgcttcccttttgtag

SEQ ID NO: 290771 - DNA, 120 bp, Artificial Sequence
  ENSG00000131080_10 (sequence is synthesized)
tctggggagccagattccacattcatgggactaccagacatgttcctagctcaacttgattatagagaagaggagagaggacagtgaatggggtagggttttcatgtctgcatttttggt

SEQ ID NO: 290772 - DNA, 120 bp, Artificial Sequence
  ENSG00000131080_11 (sequence is synthesized)
caggtaagcctctcaaaattgtgttggcacatctacctagcactttagggacaaaatcaaacccttctccccttttagctcctccacactgtctccctcctcaacacacacacacacaca

SEQ ID NO: 290773 - DNA, 120 bp, Artificial Sequence
  ENSG00000131080_12 (sequence is synthesized)
tacacacacatatacatagacacacaaacacacacacacacattaatatctatcttgggggaggcctcgtgccataattcccaagttcatgtctcagactgctgcattgcagcatgaggc

SEQ ID NO: 290774 - DNA, 120 bp, Artificial Sequence
  ENSG00000131080_13 (sequence is synthesized)
agggcaaacactttccctctagatccctggggcctcaccctgtatttgaggttctcaccaccctcagcagggagaagggctgaagttcgccattttggaaccttacagaacatttctgag

SEQ ID NO: 290775 - DNA, 120 bp, Artificial Sequence
  ENSG00000131080_14 (sequence is synthesized)
tgcctctttctattgaaatgtcaattcaatcccagctttctcaccaccgttcccctttgattctttctcaattgtctttttgcctttagctcccacctatacatctcatgctcagagaaa

SEQ ID NO: 290776 - DNA, 120 bp, Artificial Sequence
  ENSG00000131080_15 (sequence is synthesized)
aacaagttccttagaggttgtattctttattctccaagaatctgtctgaaacttgtacagctagttcctgtcccacaactattaagtggtttattaagtacattaggcagaatgtgcact

SEQ ID NO: 290777 - DNA, 120 bp, Artificial Sequence
  ENSG00000131080_16 (sequence is synthesized)
tcatcaccaggttctagctctggcaaaggagtgctgtctacagcaagatttttgcttttagaattttattaactacatcttttgggttcatccatctacaaacactgattaagggcccct

SEQ ID NO: 290778 - DNA, 120 bp, Artificial Sequence
  ENSG00000131080_17 (sequence is synthesized)
ggggcaaccaattgatcagattactaaaaggacttgggaaaaagcaaaaaggtcccattgtactggactgaggattagaagcaattgaaatacaagcctgtaccaagcaagcagcctggc

SEQ ID NO: 290779 - DNA, 120 bp, Artificial Sequence
  ENSG00000131080_18 (sequence is synthesized)
aatacaagcctgtaccaagcaagcagcctggccccacacaggtattagcaaatatgtggtaaccaaggttttaggccttggcctttaggtttcctgttttttttttgtttttgtttttgt

SEQ ID NO: 290780 - DNA, 120 bp, Artificial Sequence
  ENSG00000131080_19 (sequence is synthesized)
cactggctttcactgatcatgtttagaccttctggtagaagaaataatatccagacaggggatgatttggcttcagcaggctgcaggtgttcaaaggttgccatgtggctggcagtggtt

SEQ ID NO: 290781 - DNA, 120 bp, Artificial Sequence
  ENSG00000131080_20 (sequence is synthesized)
caagcccacatttgacactgctgctctagaggaaagataatgatggtaacacagtaataataataataataacaaaaatatgataaagtgaaagagtaagacttcttcagtgtgcttgct

SEQ ID NO: 290782 - DNA, 120 bp, Artificial Sequence
  ENSG00000131080_21 (sequence is synthesized)
catggcatgaatgctatgtggacagcccaagccatacccagaatcaccttaattccaactttttgaggttcagcaattggaggtggcaattggctttgcattttaaagtatttcgggtaa

SEQ ID NO: 290783 - DNA, 120 bp, Artificial Sequence
  ENSG00000131080_22 (sequence is synthesized)
aggtgaagtgaaggattttcgtctttataatttctgtttggccatggcaaataccatagttgagtatttgcttcaggagagttctttttacagttttacttttcaatgctgaggcatatt

SEQ ID NO: 290784 - DNA, 120 bp, Artificial Sequence
  ENSG00000131080_23 (sequence is synthesized)
tctttgagcactgtgcttttatgtgtctttctacaaaggggttattggtcagtggaagaacaaagtacacttgataaaaacattttcaacatacattgagcctaaacagcagttaagttg

SEQ ID NO: 290785 - DNA, 120 bp, Artificial Sequence
  ENSG00000131080_24 (sequence is synthesized)
tctctaaatgaactagcaaaaaaaaaaaatgtagtttttgtttgtaaggaaggggaggtatttcctgagaatgaatttttttttttttggattactgtttttctctccatataccttgac

SEQ ID NO: 290786 - DNA, 120 bp, Artificial Sequence
  ENSG00000131080_25 (sequence is synthesized)
ttggattttgacaggagggagcctgggaaaataattttttcctccaagattctcagatccaggttaggaaaggattcagcactacagcatacccctctacaacatacagccctgtcacat

SEQ ID NO: 290787 - DNA, 120 bp, Artificial Sequence
  ENSG00000131080_26 (sequence is synthesized)
tgagatcataatccctcctgtcccactcctctctaccaaccccaccctactagctaggtcttcagtgttttacattgaatattggtacattttaattattttttctcataaatgggttat

SEQ ID NO: 290788 - DNA, 120 bp, Artificial Sequence
  ENSG00000131080_27 (sequence is synthesized)
ttatagaaattttgttaactcttgagccatatgcatgtgtagatactggcagggctatgtttgtttatgatgctctgcaaacatttcatattggccaataaacagaaatatatccaaaaa

SEQ ID NO: 290789 - DNA, 120 bp, Artificial Sequence
  ENSG00000131080_28 (sequence is synthesized)
ggtaagcttaccgtgaaaggagggtttgggctgttgttgctacacgtggatgtgaaatgagtcaagcggaactttgattacaaggaatttcatatactccttcccaccatggattgccaa

SEQ ID NO: 290790 - DNA, 120 bp, Artificial Sequence
  ENSG00000131089_0 (sequence is synthesized)
gaagagggatagggccagcaaggcagggatcgaacgagtgtctggcagccgggagcccagcgaagagagcgagcaagcttaggaaaacgagcgaagtaaagggagtaggggagactgaga

SEQ ID NO: 290791 - DNA, 120 bp, Artificial Sequence
  ENSG00000131089_1 (sequence is synthesized)
ctgaccggtagccaggcaggcggacggacgcacgcccggacagactgagcaggcgccggagaaccactcacaggttccccccgcctttccctttgaaagctaggattttgcctttcccgt

SEQ ID NO: 290792 - DNA, 120 bp, Artificial Sequence
  ENSG00000131089_2 (sequence is synthesized)
ggcgcccgagagagaatgctggactctgccgacttcagcgcaagctaagatttctcagctagggacaaacgatcagcccaatcctgagaaggggggaaccaagcaccccgtccccatccc

SEQ ID NO: 290793 - DNA, 120 bp, Artificial Sequence
  ENSG00000131089_3 (sequence is synthesized)
cctcccctcccccgactaaactcgggcgccaaacccagcccttctctaaccaccctacttcctcctctcctttctagcatggtggctgtatggacagtctgacagaacagagactgacat

SEQ ID NO: 290794 - DNA, 120 bp, Artificial Sequence
  ENSG00000131089_4 (sequence is synthesized)
ctcccaatctgccggccccccacctggaacactacagtgttctgcattgcaccatgaccctggatgtgcaaactgtagtcgtttttgccgtgattgtagtcctcctgcttgtcaatgtca

SEQ ID NO: 290795 - DNA, 120 bp, Artificial Sequence
  ENSG00000131089_5 (sequence is synthesized)
tactcatgtttttcctgggaacgcgctgaatggagtccagccacctgagctgtcgcgaactctcgctttgatttcatcccgagagccaccgagaaaaaaaaaaaatcacagacagagaca

SEQ ID NO: 290796 - DNA, 120 bp, Artificial Sequence
  ENSG00000131089_6 (sequence is synthesized)
gggaaagagagagaaagaacaagctttcttactcaggggggaaaacgttttgagcttcaacatggcctcgctgtgatatgtatgacgttgctgatcactggagattccatcgttagtgct

SEQ ID NO: 290797 - DNA, 120 bp, Artificial Sequence
  ENSG00000131089_7 (sequence is synthesized)
gaggcagtatgggatcacgtcaccatggccaaccgggagttggcatttaaagctggcgacgtcatcaaagtcttggatgcttccaacaaggattggtggtggggccagatcgacgatgag

SEQ ID NO: 290798 - DNA, 120 bp, Artificial Sequence
  ENSG00000131089_8 (sequence is synthesized)
gagggatggtttcctgccagctttgtgaggctctgggtgaaccaggaggatgaggtggaggaggggcccagcgatgtgcagaacggacacctggaccccaattcagactgcctctgtctg

SEQ ID NO: 290799 - DNA, 120 bp, Artificial Sequence
  ENSG00000131089_9 (sequence is synthesized)
gggcggccactacagaaccgggaccagatgcgggccaatgtcatcaatgagataatgagcactgagcgtcactacatcaagcacctcaaggatatttgtgagggctatctgaagcagtgc

SEQ ID NO: 290800 - DNA, 120 bp, Artificial Sequence
  ENSG00000131089_10 (sequence is synthesized)
cggaagagaagggacatgttcagtgacgagcaactgaaggtaatctttgggaacattgaagatatctacagatttcagatgggctttgtgagagacctggagaaacagtataacaatgat

SEQ ID NO: 290801 - DNA, 120 bp, Artificial Sequence
  ENSG00000131089_11 (sequence is synthesized)
gacccccacctcagcgagataggaccctgcttcctagagcaccaagatggattctggatatactctgagtattgtaacaaccacctggatgcttgcatggagctctccaaactgatgaag

SEQ ID NO: 290802 - DNA, 120 bp, Artificial Sequence
  ENSG00000131089_12 (sequence is synthesized)
gacagccgctaccagcacttctttgaggcctgtcgcctcttgcagcagatgattgacattgctatcgatggtttccttttgactccagtgcagaagatctgcaagtatcccttacagttg

SEQ ID NO: 290803 - DNA, 120 bp, Artificial Sequence
  ENSG00000131089_13 (sequence is synthesized)
gctgagctcctaaagtatactgcccaagaccacagtgactacaggtatgtggcagctgctttggctgtcatgagaaatgtgactcagcagatcaacgaacgcaagcgacgtttagagaat

SEQ ID NO: 290804 - DNA, 120 bp, Artificial Sequence
  ENSG00000131089_14 (sequence is synthesized)
attgacaagattgctcagtggcaggcttctgtcctagactgggagggcgaggacatcctagacaggagctcggagctgatctacactggggagatggcctggatctaccagccctacggc

SEQ ID NO: 290805 - DNA, 120 bp, Artificial Sequence
  ENSG00000131089_15 (sequence is synthesized)
cgcaaccagcagcgggtcttcttcctgtttgaccaccagatggtcctctgcaagaaggacctaatccggagagacatcctgtactacaaaggccgcattgacatggataaatatgaggta

SEQ ID NO: 290806 - DNA, 120 bp, Artificial Sequence
  ENSG00000131089_16 (sequence is synthesized)
gttgacattgaggatggcagagatgatgacttcaatgtcagcatgaagaatgcctttaagcttcacaacaaggagactgaggagatacatctgttctttgccaagaagctggaggaaaaa

SEQ ID NO: 290807 - DNA, 120 bp, Artificial Sequence
  ENSG00000131089_17 (sequence is synthesized)
atacgctggctcagggctttcagagaagagaggaaaatggtacaggaagatgaaaaaattggctttgaaatttctgaaaaccagaagaggcaggctgcaatgactgtgagaaaagtccct

SEQ ID NO: 290808 - DNA, 120 bp, Artificial Sequence
  ENSG00000131089_18 (sequence is synthesized)
aagcaaaaaggtgtcaactctgcccgctcagttcctccttcctacccaccaccgcaggacccgttaaaccacggccagtacctggtccccgacggcatcgctcagtcgcaggtctttgag

SEQ ID NO: 290809 - DNA, 120 bp, Artificial Sequence
  ENSG00000131089_19 (sequence is synthesized)
ttcaccgaacccaagcgcagccagtcaccattctggcaaaacttcagcaggttaacccccttcaaaaaatgatacctacagggaggcagataattttaaaataaagtaaataaaattata

SEQ ID NO: 290810 - DNA, 120 bp, Artificial Sequence
  ENSG00000131089_20 (sequence is synthesized)
aataaaattatatttatagatggaccttttttcggagaagcactgttgaaatttatacacacacacacacacagagacccttgagtacacatacacacacacacacacagacacacacac

SEQ ID NO: 290811 - DNA, 120 bp, Artificial Sequence
  ENSG00000131089_21 (sequence is synthesized)
acacacacacacagagagataaggaacaaaagtgttttctgttgttttggggaagtgaaatatgtggttggtaggaagaggtaccaatgacttccaaacatgtgattccgtcttaaaagt

SEQ ID NO: 290812 - DNA, 120 bp, Artificial Sequence
  ENSG00000131089_22 (sequence is synthesized)
cctgtcccccttccctttgctttcagaagttgacatttctattcattgcttttcttgttaagataatctctttactcccctgtgagtgattcactgccttgtcattattacgatagatgt

SEQ ID NO: 290813 - DNA, 120 bp, Artificial Sequence
  ENSG00000131089_23 (sequence is synthesized)
gtttgtattgttttttttctgatgatactgatgttgatgaatttttaattttatttgatgtggtagagttgggaggtttcagggttttttcccctcttttactttccattgaggaaggga

SEQ ID NO: 290814 - DNA, 120 bp, Artificial Sequence
  ENSG00000131089_24 (sequence is synthesized)
atgagctcctttctcctctccttcagccaatcattatcaaatgttccttcagccctgcagttgccccaaataaccttttttcagcatcctctgtcctcagtcatgccagtctggacatgc

SEQ ID NO: 290815 - DNA, 120 bp, Artificial Sequence
  ENSG00000131089_25 (sequence is synthesized)
tctgttgtgccctgtgacaaaactgctcagtattcctattgcttttactgtgttttaggtactgtgaagggatcaaaaaaccaaacagaagcaagggagtatcagactatgatgatgctg

SEQ ID NO: 290816 - DNA, 120 bp, Artificial Sequence
  ENSG00000131089_26 (sequence is synthesized)
gagtggacttctgttcagggaacattttgcattcaggctgtttcttctatcactggggtttcccatgttgcagcacttctgggtcgttgcaattttgcatctaggagttagtttgatcga

SEQ ID NO: 290817 - DNA, 120 bp, Artificial Sequence
  ENSG00000131089_27 (sequence is synthesized)
gttattctcttttttcaagtcacttttgttataggtctccccctaggcctgtctctcccttagcccaaaagatctgaactggaagcagaggttgagattctgcctcccaggagagggatt

SEQ ID NO: 290818 - DNA, 120 bp, Artificial Sequence
  ENSG00000131089_28 (sequence is synthesized)
tacctgccccctagtaccagataggtttagggcagtgatctctacagcaatcagttcagtgtcctggttgtccctgctcccatttacagatgtttgggcagcattgatagaagtatggag

SEQ ID NO: 290819 - DNA, 120 bp, Artificial Sequence
  ENSG00000131089_29 (sequence is synthesized)
gggttcaagacagagcccacctgatcaagatcatcagctaccttcaaattattgacctggacagggtccaagtctgatagtaaccttttacaagaaagaacagggatgggaatggaaaga

SEQ ID NO: 290820 - DNA, 120 bp, Artificial Sequence
  ENSG00000131089_30 (sequence is synthesized)
gatagccttgatccacagtattgtacctgcattttctaccaccctaaaattgtgtgagacttctcccattgttaacagattgcatggacaatcttccctggcttctttctttccctctct

SEQ ID NO: 290821 - DNA, 120 bp, Artificial Sequence
  ENSG00000131089_31 (sequence is synthesized)
ctttcttctttctcctgccatcctagcacaggaggatttttggtattgatatagttaaagctgttctggcactcaaagaaggccgtgtttccaacatcctctcatcccaggacatttggg

SEQ ID NO: 290822 - DNA, 120 bp, Artificial Sequence
  ENSG00000131089_32 (sequence is synthesized)
gcaagtgagttaggggcccaggggcaattttccctctgaataacgtgtctgaggcagggatgctaccctcaggctcgcttttggccagctttttgcttgggaaaatctaacttctttcac

SEQ ID NO: 290823 - DNA, 120 bp, Artificial Sequence
  ENSG00000131089_33 (sequence is synthesized)
aaggaggcaggcttcctatggatgttggagtacctgtttttcctccacacatagcccttttcatggatagaccttgaacaacaaaaagggtataagggaataaggatgaactctgctgtg

SEQ ID NO: 290824 - DNA, 120 bp, Artificial Sequence
  ENSG00000131089_34 (sequence is synthesized)
aagagcaagccactgtagtgaggaatgtggagactgggagtctgtcctaaaccccatgggagaagacttcatcatgacaggacttcagcttaccaagcagcagccatagctgtgtggagg

SEQ ID NO: 290825 - DNA, 120 bp, Artificial Sequence
  ENSG00000131089_35 (sequence is synthesized)
cttcagcatagctagcatgtttactgctctatgcctcctgatccagaccaggcattgcccagcctgggaatcttttctttgtgggaatcaaattacaagctatttaagtttatattccat

SEQ ID NO: 290826 - DNA, 120 bp, Artificial Sequence
  ENSG00000131089_36 (sequence is synthesized)
cacaaccaagtcagacttgtattataagtcaaggatgagcctgatctggggagagggccggggctcgggactggccaccactgttcagcacatgacctaactacgtaagcctctttggca

SEQ ID NO: 290827 - DNA, 120 bp, Artificial Sequence
  ENSG00000131089_37 (sequence is synthesized)
agggtcctggtgcccagcacccaggctaaaatatcctgtctggcagagtgttttggtagctatgcaggcctcccttcagtgtacctctttttccaacttctcactcctccttactaggct

SEQ ID NO: 290828 - DNA, 120 bp, Artificial Sequence
  ENSG00000131089_38 (sequence is synthesized)
tggccttgacatgcttcttcgagggttggcagcacaccgggaggggatgcttggacaagtttctgggcctacatttcttgactaggccctctcatttcctccctccttggggcttctgcc

SEQ ID NO: 290829 - DNA, 120 bp, Artificial Sequence
  ENSG00000131089_39 (sequence is synthesized)
cagggctccaggatcagggatattacttctcaacccgcacttctcctctactgaacccactggcatcacctgatgccactaatttgtgaacaacaagaaatcatttccccattggttgga

SEQ ID NO: 290830 - DNA, 120 bp, Artificial Sequence
  ENSG00000131089_40 (sequence is synthesized)
gtattccctcagcctatagcatcaaagcagaccagtggccaacagccccaaggggagcccaattaaatacctgggttcagtatcctaacctgttatgtcctgacagcaatggtaacccca

SEQ ID NO: 290831 - DNA, 120 bp, Artificial Sequence
  ENSG00000131089_41 (sequence is synthesized)
gtaattctgtaatgttgtaatttccgcatggccctgagctcccttttcctcaactcagtgaggccaggatttgctctccaaaaggctttgctagtgtgttcaatgggacctgctgtgggg

SEQ ID NO: 290832 - DNA, 120 bp, Artificial Sequence
  ENSG00000131089_42 (sequence is synthesized)
agtcctaagacagacatctaattattctctctttttccccccctctctatgtgtatatttctaatggatctataagaacagcaacaagagagttctaacaattctagtgtgaagccaaat

SEQ ID NO: 290833 - DNA, 120 bp, Artificial Sequence
  ENSG00000131089_43 (sequence is synthesized)
agtgatcttttagtgctttggggatggggtgggctggggtggatggatgggcaacagtgactttgattacccttgctgctctgcatttgccagtttattcttttgtttcttttatctgac

SEQ ID NO: 290834 - DNA, 120 bp, Artificial Sequence
  ENSG00000131089_44 (sequence is synthesized)
tgactctgtcaaacaagtgtcaaagttgtgtgttaaaaaatgtttaacaaaaaaaatgttgtaatgacacaaagccttatgaaaatatttatggagttcaataaaagaagtaaaaagaca

SEQ ID NO: 290835 - DNA, 120 bp, Artificial Sequence
  ENSG00000131089_45 (sequence is synthesized)
gggggatggggagagaagagggatagggccagcaaggcagggatcgaacgagtgtctggcagccgggagcccagcgaagagagcgagcaagcttaggaaaacgagcgaacatggtggctg

SEQ ID NO: 290836 - DNA, 120 bp, Artificial Sequence
  ENSG00000131089_46 (sequence is synthesized)
ggccatccagtgaaatgtggagcaggcagtaggaaatatgggactggaggtgagcgagaactgatgtcatgagaaggatgattcatctgaagaactaagtggagagaacaaaaagcaaag

SEQ ID NO: 290837 - DNA, 120 bp, Artificial Sequence
  ENSG00000131089_47 (sequence is synthesized)
gtccctattgacttttgaatgcggcagtcaagggtttaagtgggaagcccacttctcaattttcccaggtagtctgactgtgttgccagcaatgcttgagtgagttatcttcaggaaaaa

SEQ ID NO: 290838 - DNA, 120 bp, Artificial Sequence
  ENSG00000131089_48 (sequence is synthesized)
gcagggagggaaagtcaggttctggttttagtactgaagggatgatgtctatagagcagtgggagagaagagcaccagaaaatgttgaaagcggtaacctccaagctgatcactggagat

SEQ ID NO: 290839 - DNA, 120 bp, Artificial Sequence
  ENSG00000131089_49 (sequence is synthesized)
tgatgactgtaggcaagttacttttgttaaacctcatctataaaatgagggcatgaaggtcctagattggctttgtccagggtatagctgagccttgtgacctgagggcccaggtatatc

SEQ ID NO: 290840 - DNA, 120 bp, Artificial Sequence
  ENSG00000131089_50 (sequence is synthesized)
agctggactaaatgggggacaaaagtcagcgatctgcttctgggaaaagccaggcatggagttcctgaaaagaagactgcaaagtaaaaaagtatagacagtggaatcagccagatctgg

SEQ ID NO: 290841 - DNA, 120 bp, Artificial Sequence
  ENSG00000131089_51 (sequence is synthesized)
ggaggctgcggactgaagttagcaacaaggaagttgaggctgcctgttttaggcaatgtggtccggtgagaatgtgtggttcagatctggctttccaggtttgtatgtattatattatgt

SEQ ID NO: 290842 - DNA, 120 bp, Artificial Sequence
  ENSG00000131089_52 (sequence is synthesized)
atggtaaggcacaattcaaacctttctgagatcgagataaattacattcatacattctgcctagcttatcctgcttttgtacttagattagcctgatagggcccactttttatacatgtg

SEQ ID NO: 290843 - DNA, 120 bp, Artificial Sequence
  ENSG00000131089_53 (sequence is synthesized)
tctcaaaaagtgttcctgagaattgtggaactcagtgtatgggaatcactctatccttttggccaggattgagcttgtgcacactgaacatggtaaaaggaacccaggttctgaaatagg

SEQ ID NO: 290844 - DNA, 120 bp, Artificial Sequence
  ENSG00000131089_54 (sequence is synthesized)
tgatcctggggacaaccaatagatcagaatccatctatattcttttcttatttatatgaacaatcattatgggaggaaaaaagtaacatgattgttattttttcaaaagcaattcaacga

SEQ ID NO: 290845 - DNA, 120 bp, Artificial Sequence
  ENSG00000131089_55 (sequence is synthesized)
catctgtattttccagcctgggcctttgaggttgacagagctatgctgggaaaccttgctatgctgggaatcctgcaaggtagcctttcccagcccaactgaaaatctcagtataccgca

SEQ ID NO: 290846 - DNA, 120 bp, Artificial Sequence
  ENSG00000131089_56 (sequence is synthesized)
caatgtgaagagttaggattgggaatgtgagtgggcaaaagaagatccttcatagggagcacacagctgagaagtgagtcaagttaggcaattcagtagaatggaaatggtttaattgaa

SEQ ID NO: 290847 - DNA, 120 bp, Artificial Sequence
  ENSG00000131089_57 (sequence is synthesized)
ctgtaaaatgctaataaaaattaatgagcatttctgactctgtccagctgactgaaagagcagataaagcagagaggagggagagctggcccgaagatatctgtcaggacaggactcata

SEQ ID NO: 290848 - DNA, 120 bp, Artificial Sequence
  ENSG00000131089_58 (sequence is synthesized)
ggggccttcctcaacctgactcagccataccacatctcccagcagtggatgtgttctcagaggaggctgagggcagcgccaagaggaggaggggctgaaaggccactccaagatatttat

SEQ ID NO: 290849 - DNA, 120 bp, Artificial Sequence
  ENSG00000131089_59 (sequence is synthesized)
aagatctgacattccataggcctatatgtcatttcttccatccctctattttcctttttaacttatgaaatatttgacattcaaaaagatataaaaataatataatgagtacccacgtgt

SEQ ID NO: 290850 - DNA, 120 bp, Artificial Sequence
  ENSG00000131089_60 (sequence is synthesized)
ttactatccgcattaagaaataattcattacaaatagttttccttcccaccctctcttctgcttctttttcttccccttcctctcttgcccctccccgttttctgctctgtactgtctgg

SEQ ID NO: 290851 - DNA, 120 bp, Artificial Sequence
  ENSG00000131089_61 (sequence is synthesized)
aacgtggcatatatcattgtcacttatttctttataattttctacatacatatgtatctttaaacattatgtggcatttttttgtatgtttttcaaggtaacagatacagatgaggtaaa

SEQ ID NO: 290852 - DNA, 120 bp, Artificial Sequence
  ENSG00000131089_62 (sequence is synthesized)
actatatagaaaggaaaccatggaaatgatgaacataggatttaggatggaggatgccttggagttgtaactttgggattggtggcagattcaccagtactttatattattaaaataaga

SEQ ID NO: 290853 - DNA, 120 bp, Artificial Sequence
  ENSG00000131089_63 (sequence is synthesized)
tgcattttgtagctaagtttttgttcaagtttgtgacaaatttccttagtgaaattcctagaaattactgggttaaagggaatgattttttttttttttgtatttcaagattttttatat

SEQ ID NO: 290854 - DNA, 120 bp, Artificial Sequence
  ENSG00000131089_64 (sequence is synthesized)
gtcttagcaaatctttcttacagaaaagtttactcatttatacactcagtaagggtgtgtgtttctcatttaaaaaatcatatatttttcttttttaggctttgaaatttctgaaaacca

SEQ ID NO: 290855 - DNA, 120 bp, Artificial Sequence
  ENSG00000131089_65 (sequence is synthesized)
cccttctagtcagcccgcgacaactcgcgccagctacggggcctcagagaagccggacttcgcaagcaccatgcagtggataaggggcggatcgggaatgtacccagaatgctggaaaat

SEQ ID NO: 290856 - DNA, 120 bp, Artificial Sequence
  ENSG00000131089_66 (sequence is synthesized)
agggtagccaggcagttgctggtagcaagtaaggagaaagcaccctgctgctaactcactggctgaatttagaggtgccttatgccatgattgtaagtttcctgagccaccgtccaccaa

SEQ ID NO: 290857 - DNA, 120 bp, Artificial Sequence
  ENSG00000131089_67 (sequence is synthesized)
cagctttgtgaggtcagagtctgcaaatgccatctgtgtcccatctcatctttgctggttaaagaatcagtcccagggatagtcagaaaaagcgtatcaataaccacagaccttcaggac

SEQ ID NO: 290858 - DNA, 120 bp, Artificial Sequence
  ENSG00000131089_68 (sequence is synthesized)
cccaggtgtgggcaatcttaatgagaccttactttccccaggcctttccttctgctttctcagtgggctttgtggttctgaatgagtcaccatccaaaatgatcagattcaagtctcctg

SEQ ID NO: 290859 - DNA, 120 bp, Artificial Sequence
  ENSG00000131089_69 (sequence is synthesized)
aaatttccagcagccatgtaaagcactattttttttccattgaagcttcttttgattgaggctgaatgcctgtgaacatctgatttccagttaagcagtgcacctagctccgctgactag

SEQ ID NO: 290860 - DNA, 120 bp, Artificial Sequence
  ENSG00000131089_70 (sequence is synthesized)
acatgcctccccttcaactgcttattacttcttgctcttgggaggcccttattgtctcttttcctcatcatgcgaatgtgattccccttatatagggaatgaggccagccttaattagcc

SEQ ID NO: 290861 - DNA, 120 bp, Artificial Sequence
  ENSG00000131089_71 (sequence is synthesized)
accaaaaagttgggagttaatttaaggtggggaattaactcctaaccttttgattgctataataacatgtgagagatggtgttagaaagcaatctggagttaatgtcagtaaggatatga

SEQ ID NO: 290862 - DNA, 120 bp, Artificial Sequence
  ENSG00000131089_72 (sequence is synthesized)
cctgtattaacagaacttggtaagattttgctccagttcctcagacagaaatgtgagcagaaaagagcccagccaactgaagttttcaggctgcaaaagggatactgtcctaacagcttg

SEQ ID NO: 290863 - DNA, 120 bp, Artificial Sequence
  ENSG00000131089_73 (sequence is synthesized)
ctgatttcctctacttcccccactgtattcttcagcgttctctagagggacagaactaataggagacatatatatatatatgagtttatatgagtttattaaggagtattaactcacaca

SEQ ID NO: 290864 - DNA, 79 bp, Artificial Sequence
  ENSG00000131089_74 (sequence is synthesized)
gccatctgcaagctgaggagcaaggaagtcagtccgagtctcaaagctgaagaaaagaaaggtgtaggcttggaggcta

SEQ ID NO: 290865 - DNA, 120 bp, Artificial Sequence
  ENSG00000131089_75 (sequence is synthesized)
aggtgtaggcttggaggctaagccagtctagtgtttctaggttcttctgcctgctttttattctggccatgctggcagctgtttaaatggtgcccatccagattgagcatgggtctgcct

SEQ ID NO: 290866 - DNA, 80 bp, Artificial Sequence
  ENSG00000131089_76 (sequence is synthesized)
cctcacagacacacccagcattaaccatcacatccaccatactgacctttatggtactcctttatccaagcctgggttcc

SEQ ID NO: 290867 - DNA, 120 bp, Artificial Sequence
  ENSG00000131089_77 (sequence is synthesized)
actgacctttatggtactcctttatccaagcctgggttcctcaagcatatctgagactgaattgtcttttcactgagaacacttcaaacaaaggaatatctataaagcaaccaggagttg

SEQ ID NO: 290868 - DNA, 120 bp, Artificial Sequence
  ENSG00000131089_78 (sequence is synthesized)
gttaaccagaagatagccctgctaactcatgccaagcattttggtcaaggtccttccccaccctatgtatctccaggccattccttttagggcctttcttgtctcccagtgtctaaatac

SEQ ID NO: 290869 - DNA, 120 bp, Artificial Sequence
  ENSG00000131089_79 (sequence is synthesized)
cctttcttgtctcccagtgtctaaatactgattcacttgaacagttttctttctttaacagcaattctaaagtcttcaaagaaattcatttagtttctgtctttctttcttttttttttt

SEQ ID NO: 290870 - DNA, 120 bp, Artificial Sequence
  ENSG00000131089_80 (sequence is synthesized)
cagatgtgagccactgcgcccagcttcatttagtttcaaacctcccaggattactacaaatctcctcccttatttctatttttggtcttcaagactcctagtccagggctgtagtaactg

SEQ ID NO: 290871 - DNA, 120 bp, Artificial Sequence
  ENSG00000131089_81 (sequence is synthesized)
atatgttttgagactcaagagtgccatacatgtggaagtggttctcaaatgtaggaattcagtagttacaatatgtacatgggaagagcaagaagggattatttaagataaccatgaaag

SEQ ID NO: 290872 - DNA, 120 bp, Artificial Sequence
  ENSG00000131089_82 (sequence is synthesized)
ctggcttccttgagcttttcaatgacccatcacaggaagtgaggggcattgttaagaggtctccaatgcggatgtcattagataggtaactactctaatgtccctttccaacaccatctg

SEQ ID NO: 290873 - DNA, 120 bp, Artificial Sequence
  ENSG00000131089_83 (sequence is synthesized)
taacactgggacattatcaactcagtctactgctctgggagagggggaacctggctgaaataacagtagagaataccagatctagctccaagaaaggccttttcacttgacctttgtctt

SEQ ID NO: 290874 - DNA, 120 bp, Artificial Sequence
  ENSG00000131089_84 (sequence is synthesized)
tcacgctgctttcattttaagtattgatatataacttcttgaaagttttatgctaattcctggtacataaacctaattaactagatcagtatagagctccccatggctatgagcacagac

SEQ ID NO: 290875 - DNA, 120 bp, Artificial Sequence
  ENSG00000131089_85 (sequence is synthesized)
tccatctccagaggccttggggccagcacaaaatcaaatgagtgccctagaatagcaaaaatgatctcgaaaaagaataaaatgtgagtaatcaatctacccagtttcaacactcattat

SEQ ID NO: 290876 - DNA, 120 bp, Artificial Sequence
  ENSG00000131089_86 (sequence is synthesized)
atagttacagtaaccaagacagcgtaattttggcagaagggtggacatatcagatcaatgccacagaacccagaaataaatgtacacaaatatgcccaattgatttttaaatttattttg

SEQ ID NO: 290877 - DNA, 120 bp, Artificial Sequence
  ENSG00000131089_87 (sequence is synthesized)
tattgatatgtaataattgtaaatctttactgagtacatgtgatattttgatatgcatacaatgtgtaatgatcaaattagggtaattaggatatctatcaccttaaacgtgtatcattt

SEQ ID NO: 290878 - DNA, 120 bp, Artificial Sequence
  ENSG00000131089_88 (sequence is synthesized)
ttttgtgttgggaacatttcaagtcttctgttttatgtattttgaaatatgcaataaattattgttaactactgttaccctgctgtgctactgaacactagaacttattccatctatcaa

SEQ ID NO: 290879 - DNA, 120 bp, Artificial Sequence
  ENSG00000131089_89 (sequence is synthesized)
actgtatttttgaatccattaaccaacctctcttcatttccctaacaccatccttccaagcctctagtaaccatcattgtactctctacctccatggaatccacttttttagctcctaca

SEQ ID NO: 290880 - DNA, 120 bp, Artificial Sequence
  ENSG00000131089_90 (sequence is synthesized)
ttctgtgcctggcttatttcacttaacattatgagctccagttccatccatgttgctgaaaatgataggatttcattctttttgtggctgaataatattccactgtgtatgtatactaca

SEQ ID NO: 290881 - DNA, 120 bp, Artificial Sequence
  ENSG00000131089_91 (sequence is synthesized)
taatattccactgtgtatgtatactacattctcttcatccattcatctattgacagatactttggttgattccatatcttggttattgtgaatagtgctgtgataaacataggagtgcaa

SEQ ID NO: 290882 - DNA, 120 bp, Artificial Sequence
  ENSG00000131089_92 (sequence is synthesized)
atatctcttcaacgtactgatttcctttattttagatatatacccagaagagattgtgattataaaagtgtaacaacagggatccttgtgatgatggaaatgttctatatcttgactgta

SEQ ID NO: 290883 - DNA, 120 bp, Artificial Sequence
  ENSG00000131089_93 (sequence is synthesized)
tcctgttataatgtcaatatcctggctgtgatattgtactattgtactattgttttgcaaaatgttaccattgggaaaactgggtaaagagtacacaggatctctattatttcttaaaac

SEQ ID NO: 290884 - DNA, 120 bp, Artificial Sequence
  ENSG00000131089_94 (sequence is synthesized)
tgaaaaccagaagaggcaggctgcaatgactgtgagaaaagtccctaagcaaaaagatatatacccagaagagattgtgattataaaagtgtaacaacagggatccttgtgatgatggaa

SEQ ID NO: 290885 - DNA, 120 bp, Artificial Sequence
  ENSG00000131089_95 (sequence is synthesized)
tttgtgagaaagtagggggtgatatgatcctgctttaaggagtttccaatccagccaacccaatcaaaccttttgttgacaatttgctggttccttatttttcaacaattattggtgctg

SEQ ID NO: 290886 - DNA, 120 bp, Artificial Sequence
  ENSG00000131089_96 (sequence is synthesized)
aagaaagggtttcctatctcaaagagaggaagaaggaaataaaagaaaaccaccaatttgaacattctgcttctaacttacctttgatcatcaccagcatgggaagaactaattagcatt

SEQ ID NO: 290887 - DNA, 120 bp, Artificial Sequence
  ENSG00000131089_97 (sequence is synthesized)
ggcaggcagaggtagcagctgccttctcctgggcgggcggaggctattcgcccccatcctctccctgcaccccacccccacagttctcaagccttggtgggggacaaaagcagcccatta

SEQ ID NO: 290888 - DNA, 120 bp, Artificial Sequence
  ENSG00000131089_98 (sequence is synthesized)
ggacccccccacactcgcacctctccctgccaagacctctaggagcagcagggcggagagacagagcctgccggttggcatggaacaaactgactgaaggcgaggtccggggcggagggg

SEQ ID NO: 290889 - DNA, 120 bp, Artificial Sequence
  ENSG00000131089_99 (sequence is synthesized)
attgggttgtagggctgtggaggaggggcggcggagggggcgctggggctctcgcttgcttcagcccagcccttctagtcagcccgcgacaactcgcgccagctacggggcctcagagaa

SEQ ID NO: 290890 - DNA, 120 bp, Artificial Sequence
  ENSG00000131089_100 (sequence is synthesized)
tgctagtccctcagtgccaaaaaggtcaaaatgcacagctacaatattgtaaagaacaaggtcattatctcctggcaccagcaagccacaccaggaatgtgggccactgtcacctcagcc

SEQ ID NO: 290891 - DNA, 120 bp, Artificial Sequence
  ENSG00000131089_101 (sequence is synthesized)
tcatggactagggttaggattaatccaattttgtgtctatgagagcaaaacaacaataacaaataggcgacatactgtttgtatccatctacaacttctgtttttctccataagatttgt

SEQ ID NO: 290892 - DNA, 120 bp, Artificial Sequence
  ENSG00000131089_102 (sequence is synthesized)
gacattcatctgtgttgatatgtgaacttctttatttaattttacctccatttctcttggcagactgggccttttctaaaaatccccagagtgctaagtgttagaccccccctaggtaat

SEQ ID NO: 290893 - DNA, 120 bp, Artificial Sequence
  ENSG00000131089_103 (sequence is synthesized)
cctttgccagcagtctgtggcctcctagctactcttactactcagtccccctctgatgttcaggtctcactggcctgcacagatatttgaacacactccaggcaaccagccagctcattt

SEQ ID NO: 290894 - DNA, 120 bp, Artificial Sequence
  ENSG00000131089_104 (sequence is synthesized)
catacctctagtgggcttgctgatgttttcgaaaaggagaagcccttgctagccgtgtttatgtggcttactgtttcctacctcccatcagcagacttgcacacacgtccaaggattgat

SEQ ID NO: 290895 - DNA, 120 bp, Artificial Sequence
  ENSG00000131089_105 (sequence is synthesized)
tctggtgtctgaaatgatctttcgaggtgagacagaggctttttctttgggcatctagttaaccaacctgtcagtgtcagactactagtataacctggccaaatttagaacaaaccaacc

SEQ ID NO: 290896 - DNA, 120 bp, Artificial Sequence
  ENSG00000131089_106 (sequence is synthesized)
cccattggtacttcaaaacggtgacagtgttagcattctgctgtgcccctgtgccaactcttctagtactcgccgtgcacataccttcaagaaacctcttccttcccatctaggacctaa

SEQ ID NO: 290897 - DNA, 120 bp, Artificial Sequence
  ENSG00000131089_107 (sequence is synthesized)
cggtctggggagagcgagcttgcttgggagccttgaggctctgattggcggtcgcggctagcacgccagcgcaagtcccgcccctgggcagcgaacgtgctactgcggcatctgttattg

SEQ ID NO: 290898 - DNA, 120 bp, Artificial Sequence
  ENSG00000131089_108 (sequence is synthesized)
ttcatgattagggataaaaagcatgaggcatatgtagtacatattcatattctgggtcattccatgcactggctaacagagagttgacagtattgtttgtcttgcggtctaatggaactt

SEQ ID NO: 290899 - DNA, 120 bp, Artificial Sequence
  ENSG00000131089_109 (sequence is synthesized)
aaggaattactggctggatattatggtagttttcttttagaactactgatccatttgcagggaggggctactaaagatgttgaagaggttgtaccaagggctgggtaatcatcactttat

SEQ ID NO: 290900 - DNA, 85 bp, Artificial Sequence
  ENSG00000131089_110 (sequence is synthesized)
tggctaatcttgttttagttgagctctgggtgaaccaggaggatgaggtggaggaggggcccagcgatgtgcagaacggacacct

SEQ ID NO: 290901 - DNA, 120 bp, Artificial Sequence
  ENSG00000131089_111 (sequence is synthesized)
ctgaagttagcaacaaggaagttgaggctgcctgttttaggcaatgtggtccggtgagaatgtgtggttcagatctggctttccaggacctaatccggagagacatcctgtactacaaag

SEQ ID NO: 290902 - DNA, 80 bp, Artificial Sequence
  ENSG00000131094_0 (sequence is synthesized)
agtccggcagcgcagcaggagggaggcgcgaggcaggagccggcggctgggctccgcagcgcagccagcgcagcgcggcg

SEQ ID NO: 290903 - DNA, 120 bp, Artificial Sequence
  ENSG00000131094_1 (sequence is synthesized)
gcaccattgccccgacggcgcggccgggcggcccggcgctccccaggctccgcgcgggccgaaagacgctgctagcggccgccgcgggtgtggtgatgctgctggtgctggtggtgctca

SEQ ID NO: 290904 - DNA, 120 bp, Artificial Sequence
  ENSG00000131094_2 (sequence is synthesized)
gccgcgggtgtggtgatgctgctggtgctggtggtgctcatccccgtgctggtgagctcgggcggcccggaaggccactatgagatgctgggcacctgccgcatggtgtgcgacccctac

SEQ ID NO: 290905 - DNA, 80 bp, Artificial Sequence
  ENSG00000131094_3 (sequence is synthesized)
gcgacgccctgagcgagcagagcggcgcgcccccgccttccacgctggtgcagggcccccaggggaagccgggccgcacc

SEQ ID NO: 290906 - DNA, 80 bp, Artificial Sequence
  ENSG00000131094_4 (sequence is synthesized)
cggccctccggggcctcccggggacccaggtcctcccggccctgtggggccgccgggggagaagggtgagccaggcaagc

SEQ ID NO: 290907 - DNA, 120 bp, Artificial Sequence
  ENSG00000131094_5 (sequence is synthesized)
agcggcgccatcagcactgccacctacaccacggtgccgcgcgtggccttctacgccggcctcaagaacccccacgagggttacgaggtactcaagtttgacgacgtggtcaccaaccta

SEQ ID NO: 290908 - DNA, 120 bp, Artificial Sequence
  ENSG00000131094_6 (sequence is synthesized)
ggcgacggcaccagtatgtgggcagacctctgcaagaatggccaggtgcgggccagtgctattgcccaggacgcggaccagaactacgactacgccagcaacagcgtgatcctgcacctg

SEQ ID NO: 290909 - DNA, 120 bp, Artificial Sequence
  ENSG00000131094_7 (sequence is synthesized)
gacgccggcgacgaggtcttcatcaagctggatggaggcaaagcacacggcggcaacagcaacaaatacagcacgttctctggcttcatcatctactccgactgagctccccacgtctcc

SEQ ID NO: 290910 - DNA, 120 bp, Artificial Sequence
  ENSG00000131094_8 (sequence is synthesized)
acccacgtccctcacccgccggggtcccctccgggcggggcagacgatgactcgcccctcgcccacccgctcgctgcccggccctccccggctatgacgcccccggcccgtgctcaacac

SEQ ID NO: 290911 - DNA, 120 bp, Artificial Sequence
  ENSG00000131094_9 (sequence is synthesized)
acaccgcctgggccacagctaggccctcccaccggctcgctgcagagccgggcccagcgcgccctgtccccgtgccagggaaccggggttgaccgcccccgcccagcccgcgctatatat

SEQ ID NO: 290912 - DNA, 120 bp, Artificial Sequence
  ENSG00000131094_10 (sequence is synthesized)
ttgtacaataggactgtttactgcccacctccgcctgccagcccaccccagcctggggagaggtcgcggcggcgggtttgcttcctgcgctctgagatgagctgccctccgctccctccg

SEQ ID NO: 290913 - DNA, 120 bp, Artificial Sequence
  ENSG00000131094_11 (sequence is synthesized)
gggtggcgcgcccgggggaggggggagttgggggctggatagcttcccagcaccctcagagcccccgcccggctgtgccccgtctgaccaaagttataataaaaacattttcaccccgca

SEQ ID NO: 290914 - DNA, 120 bp, Artificial Sequence
  ENSG00000131095_0 (sequence is synthesized)
agagccagagcaggatggagaggagacgcatcacctccgctgctcgccgctcctacgtctcctcaggggagatgatggtggggggcctggctcctggccgccgtctgggtcctggcaccc

SEQ ID NO: 290915 - DNA, 120 bp, Artificial Sequence
  ENSG00000131095_1 (sequence is synthesized)
gcctctccctggctcgaatgccccctccactcccgacccgggtggatttctccctggctggggcactcaatgctggcttcaaggagacccgggccagtgagcgggcagagatgatggagc

SEQ ID NO: 290916 - DNA, 120 bp, Artificial Sequence
  ENSG00000131095_2 (sequence is synthesized)
tcaatgaccgctttgccagctacatcgagaaggttcgcttcctggaacagcaaaacaaggcgctggctgctgagctgaaccagctgcgggccaaggagcccaccaagctggcagacgtct

SEQ ID NO: 290917 - DNA, 120 bp, Artificial Sequence
  ENSG00000131095_3 (sequence is synthesized)
accaggctgagctgcgagagctgcggctgcggctcgatcaactcaccgccaacagcgcccggctggaggttgagagggacaatctggcacaggacctggccactgtgaggcagaagctcc

SEQ ID NO: 290918 - DNA, 120 bp, Artificial Sequence
  ENSG00000131095_4 (sequence is synthesized)
aggatgaaaccaacctgaggctggaagccgagaacaacctggctgcctatagacaggaagcagatgaagccaccctggcccgtctggatctggagaggaagattgagtcgctggaggagg

SEQ ID NO: 290919 - DNA, 120 bp, Artificial Sequence
  ENSG00000131095_5 (sequence is synthesized)
agatccggttcttgaggaagatccacgaggaggaggttcgggaactccaggagcagctggcccgacagcaggtccatgtggagcttgacgtggccaagccagacctcaccgcagccctga

SEQ ID NO: 290920 - DNA, 120 bp, Artificial Sequence
  ENSG00000131095_6 (sequence is synthesized)
aagagatccgcacgcagtatgaggcaatggcgtccagcaacatgcatgaagccgaagagtggtaccgctccaagtttgcagacctgacagacgctgctgcccgcaacgcggagctgctcc

SEQ ID NO: 290921 - DNA, 120 bp, Artificial Sequence
  ENSG00000131095_7 (sequence is synthesized)
gccaggccaagcacgaagccaacgactaccggcgccagttgcagtccttgacctgcgacctggagtctctgcgcggcacgaacgagtccctggagaggcagatgcgcgagcaggaggagc

SEQ ID NO: 290922 - DNA, 120 bp, Artificial Sequence
  ENSG00000131095_8 (sequence is synthesized)
ggcacgtgcgggaggcggccagttatcaggaggcgctggcgcggctggaggaagaggggcagagcctcaaggacgagatggcccgccacttgcaggagtaccaggacctgctcaatgtca

SEQ ID NO: 290923 - DNA, 120 bp, Artificial Sequence
  ENSG00000131095_9 (sequence is synthesized)
agctggccctggacatcgagatcgccacctacaggaagctgctagagggcgaggagaaccggatcaccattcccgtgcagaccttctccaacctgcagattcgagaaaccagcctggaca

SEQ ID NO: 290924 - DNA, 120 bp, Artificial Sequence
  ENSG00000131095_10 (sequence is synthesized)
ccaagtctgtgtcagaaggccacctcaagaggaacatcgtggtgaagaccgtggagatgcgggatggagaggtcattaaggagtccaagcaggagcacaaggatgtgatgtgaggcagga

SEQ ID NO: 290925 - DNA, 120 bp, Artificial Sequence
  ENSG00000131095_11 (sequence is synthesized)
cccacctggtggcctctgccccgtctcatgaggggcccgagcagaagcaggatagttgctccgcctctgctggcacatttccccagacctgagctccccaccaccccagctgctcccctc

SEQ ID NO: 290926 - DNA, 120 bp, Artificial Sequence
  ENSG00000131095_12 (sequence is synthesized)
cctcctctgtccctaggtcagcttgctgccctaggctccgtcagtatcaggcctgccagacggcacccacccagcacccagcaactccaactaacaagaaactcacccccaaggggcagt

SEQ ID NO: 290927 - DNA, 120 bp, Artificial Sequence
  ENSG00000131095_13 (sequence is synthesized)
ctggaggggcatggccagcagcttgcgttagaatgaggaggaaggagagaaggggaggagggcggggggcacctactacatcgccctccacatccctgattcctgttgttatggaaactg

SEQ ID NO: 290928 - DNA, 120 bp, Artificial Sequence
  ENSG00000131095_14 (sequence is synthesized)
ttgccagagatggaggttctctcggagtatctgggaactgtgcctttgagtttcctcaggctgctggaggaaaactgagactcagacaggaaagggaaggccccacagacaaggtagccc

SEQ ID NO: 290929 - DNA, 120 bp, Artificial Sequence
  ENSG00000131095_15 (sequence is synthesized)
tggccagaggcttgttttgtcttttggtttttatgaggtgggatatccctatgctgcctaggctgaccttgaactcctgggctcaagcagtctacccacctcagcctcctgtgtagctgg

SEQ ID NO: 290930 - DNA, 120 bp, Artificial Sequence
  ENSG00000131095_16 (sequence is synthesized)
gattatagattggagccaccatgcccagctcagagggttgttctcctagactgaccctgatcagtctaagatgggtggggacgtcctgccacctggggcagtcacctgcccagatcccag

SEQ ID NO: 290931 - DNA, 120 bp, Artificial Sequence
  ENSG00000131095_17 (sequence is synthesized)
aaggacctcctgagcgatgactcaagtgtctcagtccacctgagctgccatccagggatgccatctgtgggcacgctgtgggcaggtgggagcttgattctcagcacttgggggatctgt

SEQ ID NO: 290932 - DNA, 120 bp, Artificial Sequence
  ENSG00000131095_18 (sequence is synthesized)
tgtgtacgtggagagggatgaggtgctgggagggatagaggggggctgcctggcccccagctgtgggtacagagaggtcaagcccaggaggactgccccgtgcagactggaggggacgct

SEQ ID NO: 290933 - DNA, 120 bp, Artificial Sequence
  ENSG00000131095_19 (sequence is synthesized)
ggtagagatggaggaggaggcaattgggatggcgctaggcatacaagtaggggttgtgggtgaccagttgcacttggcctctggattgtgggaattaaggaagtgactcatcctcttgaa

SEQ ID NO: 290934 - DNA, 120 bp, Artificial Sequence
  ENSG00000131095_20 (sequence is synthesized)
gatgctgaaacaggagagaaaggggatgtatccatgggggcagggcatgactttgtcccatttctaaaggcctcttccttgctgtgtcataccaggccgccccagcctctgagcccctgg

SEQ ID NO: 290935 - DNA, 120 bp, Artificial Sequence
  ENSG00000131095_21 (sequence is synthesized)
gactgctgcttcttaaccccagtaagccactgccacacgtctgaccctctccaccccatagtgaccggctgcttttccctaagccaagggcctcttgcggtcccttcttactcacacaca

SEQ ID NO: 290936 - DNA, 120 bp, Artificial Sequence
  ENSG00000131095_22 (sequence is synthesized)
gggtgctcagggctgacacgtccaccccagtgcacccactctgctttgactgagcagactggtgagcagactggtgggatctgtgcccagagatgggactgggagggcccacttcagggt

SEQ ID NO: 290937 - DNA, 120 bp, Artificial Sequence
  ENSG00000131095_23 (sequence is synthesized)
tctcctctcccctctaaggccgaagaagggtccttccctctccccaagacttggtgtcctttccctccactccttcctgccacctgctgctgctgctgctgctaatcttcagggcactgc

SEQ ID NO: 290938 - DNA, 120 bp, Artificial Sequence
  ENSG00000131095_24 (sequence is synthesized)
tgctgcctttagtcgctgaggaaaaataaagacaaatgctgcgcccttccccagagtggactctgatctgttcatgagagggcgggactggggccaagatgtagcctttgacaagaccaa

SEQ ID NO: 290939 - DNA, 120 bp, Artificial Sequence
  ENSG00000131095_25 (sequence is synthesized)
ctcatttcttattactgatcatctctggggcccatgccctcaccaaattccacccgcagccaaagaggacatacaccagctccctccactcttttcttccttcctctccctgctacctgc

SEQ ID NO: 290940 - DNA, 120 bp, Artificial Sequence
  ENSG00000131095_26 (sequence is synthesized)
aactcaaccagcacaatcttcataggcaagaaagcaaagcagctcaaacatgattcaacactgatcagtgtttaccactggataaatctgagttcacactttccttctctgacctaaatg

SEQ ID NO: 290941 - DNA, 120 bp, Artificial Sequence
  ENSG00000131095_27 (sequence is synthesized)
tgaagtcaggaaacacatgtgccctacttccatcctgagctcagtccccaatctcccaccagcctcaggcccctccacttctcagatcaggtcccagacctgcccatgaaaatggggagc

SEQ ID NO: 290942 - DNA, 120 bp, Artificial Sequence
  ENSG00000131095_28 (sequence is synthesized)
aggctgtaacagatttgtccacatgttcctaccacctgtcccaacccagggtacccacccagagacatctggtatcatttaacaaacacattgaaggacaactggtcttcagagctgaag

SEQ ID NO: 290943 - DNA, 120 bp, Artificial Sequence
  ENSG00000131095_29 (sequence is synthesized)
agagctcctagggggagaagctgggacaacagtgaaataagtagcagcagcaacgacagaagtgaatggtgacaaagactgctgtgatgagcaggtagcctatcagggtgagctccacag

SEQ ID NO: 290944 - DNA, 120 bp, Artificial Sequence
  ENSG00000131095_30 (sequence is synthesized)
ccgagcgagtctcaggatctgagaacgaggctgggtagtgcccatgagatgtcacacccagccggaagccagcaactagcacaccctgcctccagcaatagtagatgccccggtcatcca

SEQ ID NO: 290945 - DNA, 120 bp, Artificial Sequence
  ENSG00000131095_31 (sequence is synthesized)
gctgggtgaagcggatgtggagctggttgccgtggtcaatgaacaccctcatggacctgttgacacccttcaggtactgtgtgcggtagaggtgctggcggtctttgtcccaggccactg

SEQ ID NO: 290946 - DNA, 120 bp, Artificial Sequence
  ENSG00000131095_32 (sequence is synthesized)
catgctctggccgggccccaggacaggagatgatgagtccatggcccagtctctgctggtggaactgaatgggcacctggggcacccagggccggctgcccactttggacacatagttaa

SEQ ID NO: 290947 - DNA, 120 bp, Artificial Sequence
  ENSG00000131095_33 (sequence is synthesized)
tgatggccagcacgccctcccggatggtctttgtcttctcacagggtactaagcagctccgaaccagcacctcaggcgtgtggtccctggccttggtccgcagcttccttggcacagccc

SEQ ID NO: 290948 - DNA, 120 bp, Artificial Sequence
  ENSG00000131095_34 (sequence is synthesized)
ttgagccacaagacaccacatcgggcacggccttgaggtagcgtggggagaggtctgggctctgcaggtagcagaggccgatgcgccactgctccccacgcactccgcagcggtcacagg

SEQ ID NO: 290949 - DNA, 120 bp, Artificial Sequence
  ENSG00000131095_35 (sequence is synthesized)
gggtccattcccagaaggtggtgaagacatggaggtgcccatagtattcatctgcaaagggctcctggcccttgtcctggaaagtggccaccattccctcactgttctggatgtccacat

SEQ ID NO: 290950 - DNA, 120 bp, Artificial Sequence
  ENSG00000131095_36 (sequence is synthesized)
cgtaggcgtaaaagtagtcccccttgcgggtgccgcagaagtacaggcctgagtcctcagactgagccctgaaaaccaacaagctgaacatgcggatgctgaagcgggtcagcatgtcgc

SEQ ID NO: 290951 - DNA, 120 bp, Artificial Sequence
  ENSG00000131095_37 (sequence is synthesized)
tgcccacacgtacctgggctgcctccgtcagcacccgcccatcaaagtccgtcagcactttggtgtggctgctacctaggtgcttttggtagaaccagactacagctggcacctcttcgg

SEQ ID NO: 290952 - DNA, 120 bp, Artificial Sequence
  ENSG00000131095_38 (sequence is synthesized)
gtttgcagtgacagggaagctcaaagctcatgtcggccaggtaggctgcattttcaaacatcaggaaagcagggcagggggtcctctgaaaaatgttttccttctccacaatttcaaagg

SEQ ID NO: 290953 - DNA, 120 bp, Artificial Sequence
  ENSG00000131095_39 (sequence is synthesized)
cctggagcccccatgcccacaggagcacagtggtgagggccaggtgcatacctgaaggaggcaggggtcagaggggcagggcaaaaccagggcattaaaggctcatagggctcctagaaa

SEQ ID NO: 290954 - DNA, 120 bp, Artificial Sequence
  ENSG00000131095_40 (sequence is synthesized)
gctctgctaagcggaagcctctagatgaggaaaggattatgcagccaggaaaagcagcaacaatctgcagaggaagccgccaagtgcaaggcaatttattcccagtggatgtacaagatg

SEQ ID NO: 290955 - DNA, 120 bp, Artificial Sequence
  ENSG00000131095_41 (sequence is synthesized)
cccttctaacattccagacctgatctcagggtggggggggaaagccattctagaacctggcctttactcccctttctagaacactggcgctcacccaagaatgggtcaaaggaaaccgga

SEQ ID NO: 290956 - DNA, 120 bp, Artificial Sequence
  ENSG00000131095_42 (sequence is synthesized)
atgagaagggcgggccgaggtgctcgggcagggagatctctgcctcagtgctccaggccctgccctgccagcctggtggaaaagtctttcatcaacctgggggatgaaggaaacccaccc

SEQ ID NO: 290957 - DNA, 120 bp, Artificial Sequence
  ENSG00000131095_43 (sequence is synthesized)
tcctgcatatctggccatccgggaggctggctggacctgagctgatggcttgggactttcccaggcccaacctgcacaagaactgagtctctaggggaaaattcaacacctcaaatgatg

SEQ ID NO: 290958 - DNA, 120 bp, Artificial Sequence
  ENSG00000131095_44 (sequence is synthesized)
tagtatttgatcatttgttgattacatgtccattcattggtttggggctataaacattcttgttaagagctgtggagatcagtgtttgtttaccataaagattttgctttttccctttta

SEQ ID NO: 290959 - DNA, 120 bp, Artificial Sequence
  ENSG00000131095_45 (sequence is synthesized)
ttcgagggggcaaaagcaccaaagacggggaaaatcacaaggtcacaagatatctcaaaagcctcacaatacgagttataccaatacaggctcaccagattgtaaatggaacgccgccgg

SEQ ID NO: 290960 - DNA, 120 bp, Artificial Sequence
  ENSG00000131095_46 (sequence is synthesized)
ctcgcggttagctgcctgcctctcagacacggcgctttgcccagcttgacagggagtgagcctcacccaccccatcctcccaatccccctgagttccctcttcccaggcttcccctaaag

SEQ ID NO: 290961 - DNA, 120 bp, Artificial Sequence
  ENSG00000131095_47 (sequence is synthesized)
ggcctggactgcgtcattttcccaggaactgcagtgcccagcccaggacgtggtacagagtaactgtacattaaactggcagagcttgttagtggtaaaggtggtgagtccttgggtgcg

SEQ ID NO: 290962 - DNA, 120 bp, Artificial Sequence
  ENSG00000131095_48 (sequence is synthesized)
cagtggagctgctctggggcctctgagcaagcagcagcctctgtctcacctcttcctgtcactgggagggccccttgggtctcgctgtgcctggacgccaggctctctgctttattcttt

SEQ ID NO: 290963 - DNA, 120 bp, Artificial Sequence
  ENSG00000131095_49 (sequence is synthesized)
catccctgaggctccatcgctcagctcagtgctgactcagttcagaggattcttccctcaggaccgcagctcttgcagtgaataaagttttatgttccctgctcttaatgttaaatatta

SEQ ID NO: 290964 - DNA, 120 bp, Artificial Sequence
  ENSG00000131095_50 (sequence is synthesized)
accaagtctgtgtcagaaggccacctcaagaggaacatcgtggtgaagaccgtggagatgcgggatggagaggtaaggagggatttgggcccagtcaggctctggctggccccagggatt

SEQ ID NO: 290965 - DNA, 120 bp, Artificial Sequence
  ENSG00000131095_51 (sequence is synthesized)
ctcaaggccaggccatggaggaaagcctggggctggcacatagaaggttcccagcaactcccagtagctccccagggaattctggaggagagcaaggaaactgaatgtaattccgtttcc

SEQ ID NO: 290966 - DNA, 120 bp, Artificial Sequence
  ENSG00000131095_52 (sequence is synthesized)
tcagtccctccataggctgttctaaggggagccttggtaccaaagccactagatgggatcctaatacacactctctctttctcaccctcaaactcgggggccttgcttgccagggagaga

SEQ ID NO: 290967 - DNA, 120 bp, Artificial Sequence
  ENSG00000131095_53 (sequence is synthesized)
aagagaattaaagttagtagctttcacttccaactctagcagacacagttggggatggggagggctttccatttccagcttggtaaaaggaaactaccaggggaatgggaagaggggatt

SEQ ID NO: 290968 - DNA, 120 bp, Artificial Sequence
  ENSG00000131095_54 (sequence is synthesized)
tggcgtatccgccacgccactccaaccacagtgggagctcatcttactccagcagcttaccactcgccaggcatgacgctaaatgctttcccagtgttatctcaccaccccctctgtcca

SEQ ID NO: 290969 - DNA, 120 bp, Artificial Sequence
  ENSG00000131095_55 (sequence is synthesized)
ccacgcaaggcagctgtggttactatcaagaaaagtaagacctgggaagtcggggacttcccaaggttacacagcctcgtggtggtggacctggggtctgtgtgaactcctaactgttgc

SEQ ID NO: 290970 - DNA, 120 bp, Artificial Sequence
  ENSG00000131095_56 (sequence is synthesized)
gagaagtctcagggaggggccgaacctccctgctccctgggcctccctacctcttgatggggcactatccttgccccccaacatgatgggagggaccagaaacaggcccagggccccggg

SEQ ID NO: 290971 - DNA, 120 bp, Artificial Sequence
  ENSG00000131095_57 (sequence is synthesized)
gatctgatgcccgcatgccttctgccaggagtccagggtcccctcagcacctccctactggggaaagcagtgcaggagcagcggggcccctgtgtttcattcatggctgggctttgtgac

SEQ ID NO: 290972 - DNA, 120 bp, Artificial Sequence
  ENSG00000131095_58 (sequence is synthesized)
tgtgggcagcgagctcacctattctgagcctgtgtccatataaaggaggagttggaagcggagaaggttgatgtccatgagggagattggattctggggtgaagaaagtgagggaaagag

SEQ ID NO: 290973 - DNA, 120 bp, Artificial Sequence
  ENSG00000131095_59 (sequence is synthesized)
caggcaggtctgggcgcaaagcacaggtgactgcctgccaccagcttgtgacccccatcaagttactttgacttgcacagctgtgaagcggtggtcataataaaattcatttcaaaaggt

SEQ ID NO: 290974 - DNA, 120 bp, Artificial Sequence
  ENSG00000131095_60 (sequence is synthesized)
ggttacctgggatcagaggaatccccaggggcatggcgcttcactgagctgacaggacatgcatgtgtgccttcaagtgcaggaggacatgtgcgtgtgtgtgtgtgtgtgtgcaacagt

SEQ ID NO: 290975 - DNA, 120 bp, Artificial Sequence
  ENSG00000131095_61 (sequence is synthesized)
ctgtctaaggccccccaacccttaatcctcctgctgctctactggtcctgggtgggggtggtctctgtgacagctgcctcaagggagactgaggcaggtattcaagtgtcctcagaagag

SEQ ID NO: 290976 - DNA, 120 bp, Artificial Sequence
  ENSG00000131095_62 (sequence is synthesized)
agcacagccccctaggggctgcccttgctgtgtggcgccaccggcggtggagaacaaggctctattcagcctgtgcccaggaaaggggatcaggggatgcccaggcatggacagtgggtg

SEQ ID NO: 290977 - DNA, 120 bp, Artificial Sequence
  ENSG00000131095_63 (sequence is synthesized)
agggggggagaggagggctgtctgcttcccagaagtccaaggacacaaatgggctggagtggcgcaaacacagctcactgcagcctcaacctactgggctcaagcaatcctccagcctca

SEQ ID NO: 290978 - DNA, 120 bp, Artificial Sequence
  ENSG00000131095_64 (sequence is synthesized)
aagtgctgggattacaagcatgagccaccccactcagccctttccttcctttttaattgatgcataataattgagcgagcagagccagagcaggatggagaggagacgcatcacctccgc

SEQ ID NO: 290979 - DNA, 120 bp, Artificial Sequence
  ENSG00000131095_65 (sequence is synthesized)
aagccgagaacaacctggctgcctatagacaggtcagggaggtggaggggaggggcaggggagggaggaaaggattgatggccacccacccaaacacagcccccaagctcagcccgccag

SEQ ID NO: 290980 - DNA, 120 bp, Artificial Sequence
  ENSG00000131095_66 (sequence is synthesized)
cccactgccccagaaggaggggtaaggcaaggctgaggaatggggagaaggagcctggggccccagtggccctctactcctcacccctcctgccactccaggaagcagatgaagccaccc

SEQ ID NO: 290981 - DNA, 120 bp, Artificial Sequence
  ENSG00000131095_67 (sequence is synthesized)
agggcaaagggatccagctctccctgggggccttcgtgacactgcagcgctcctagccagagcctatcataccagggtacttctaggtggggcttgcagctgcccctgtcctgctaggcc

SEQ ID NO: 290982 - DNA, 120 bp, Artificial Sequence
  ENSG00000131095_68 (sequence is synthesized)
ctggtccctcttcccctccctgcaccccattcgacagcagaactgggtgagagcttgacatctgccctgtctgcagatccctgagcaagcactgcccttctgagtgttttctgtttttgt

SEQ ID NO: 290983 - DNA, 120 bp, Artificial Sequence
  ENSG00000131095_69 (sequence is synthesized)
aaagtcacacagctcctaagtggtagagttggatttccaactctagcacatctcacttgggagcctgcattccatgcctctgccagtctgttttgggttactgagcctctaccatatgcc

SEQ ID NO: 290984 - DNA, 120 bp, Artificial Sequence
  ENSG00000131095_70 (sequence is synthesized)
gtaccaggacctgctcaatgtcaagctggccctggacatcgagatcgccacctacaggaagctgctagagggcgaggagaaccgatagacatgcgcccctcccagataacactcaagccc

SEQ ID NO: 290985 - DNA, 120 bp, Artificial Sequence
  ENSG00000131095_71 (sequence is synthesized)
cttgcagacgtttggaactccagatagcacgttggctgctggggaaaaagctaggagatggagttagactttcctggcaaggaaaagggcgttcaagttgtcatgatggccccgcaccaa

SEQ ID NO: 290986 - DNA, 120 bp, Artificial Sequence
  ENSG00000131095_72 (sequence is synthesized)
gacccagcctaggggtgtcccaggcagcccgggcagccctctccctctgctttctttcaggatcaccattcccgtgcagaccttctccaacctgcagattcgaggtcagtacagcagggc

SEQ ID NO: 290987 - DNA, 120 bp, Artificial Sequence
  ENSG00000131095_73 (sequence is synthesized)
cggggggaggggggagctaaattactttttacttgcattggccctgaaatgattcttagctaaggaacaaaattcctcttcttctggactagaatatttaggaccactagatatgcatgt

SEQ ID NO: 290988 - DNA, 120 bp, Artificial Sequence
  ENSG00000131095_74 (sequence is synthesized)
ctcaggacttaattcagcatcagaaaggctaaccaggctgactagtagaggtaatactgccaaatcctagatagtcacaggtcactaaagcacagataaatggcagagagaagtaggaaa

SEQ ID NO: 290989 - DNA, 120 bp, Artificial Sequence
  ENSG00000131095_75 (sequence is synthesized)
gaggaaaggggacaggaaagggacctatgtgtattgagcactaatatgtgccacatgtttaacagcctttattttagttaattgtctcctctctcccacctagagaagtaggccccatca

SEQ ID NO: 290990 - DNA, 120 bp, Artificial Sequence
  ENSG00000131095_76 (sequence is synthesized)
tccttattttacagatgaggaaactgaggctgggagaggtcaattaacttgcccagagtcatgtggctggttggtggctaagttgggacttcttgagctctggtctcctgatccttcctt

SEQ ID NO: 290991 - DNA, 88 bp, Artificial Sequence
  ENSG00000131095_77 (sequence is synthesized)
tgatccttccttccttccttccttcttttggcagagcgtccctctgtcactcaggctggaatgcagtagtgcaatcttggctcactgc

SEQ ID NO: 290992 - DNA, 76 bp, Artificial Sequence
  ENSG00000131095_78 (sequence is synthesized)
actcccgagtaaggggattacaggtgcgagccaccacacctggctaatctttctttttctttctttctttctttct

SEQ ID NO: 290993 - DNA, 77 bp, Artificial Sequence
  ENSG00000131095_79 (sequence is synthesized)
tccttccttccttccttcctttctctttcctgcttgcttgcttgcttgcttgcctgctttcgacggagtcttactgc

SEQ ID NO: 290994 - DNA, 120 bp, Artificial Sequence
  ENSG00000131095_80 (sequence is synthesized)
tccacctgcctcagcctcccaaaatgatggcattataggtgtgagccaccgcacccctcctggtctcctgatttcaataccgtgctgggttttcagaaagccaggtgccaggccagggct

SEQ ID NO: 290995 - DNA, 120 bp, Artificial Sequence
  ENSG00000131095_81 (sequence is synthesized)
caggccagggcttgcagaggggctgaaatgaagccaggccagaagacagagcagccaggactctggcagcagcactattgggatttgggggctctccagcccgtttggaagagcctaggc

SEQ ID NO: 290996 - DNA, 120 bp, Artificial Sequence
  ENSG00000131095_82 (sequence is synthesized)
tctctctgctcggttgcataggttctcatactcatgatggggaggggggtgcgatggggaagccgggcatgggagaggatggctcatgccctgaaagtccatgagaggcctcctctcccc

SEQ ID NO: 290997 - DNA, 120 bp, Artificial Sequence
  ENSG00000131095_83 (sequence is synthesized)
gaggaacatcgtggtgaagaccgtggagatgcgggatggagaggccgccccagcctctgagcccctgggactgctgcttcttaaccccagtaagccactgccacacgtctgaccctctcc

SEQ ID NO: 290998 - DNA, 120 bp, Artificial Sequence
  ENSG00000131095_84 (sequence is synthesized)
cctggagtctctgcgcggcacggagtaccaggacctgctcaatgtcaagctggccctggacatcgagatcgccacctacaggaagctgctagagggcgaggagaaccggatcaccattcc

SEQ ID NO: 290999 - DNA, 120 bp, Artificial Sequence
  ENSG00000131095_85 (sequence is synthesized)
ccaaagacggggaaaatcacaagaaaccagcctggacaccaagtctgtgtcagaaggccacctcaagaggaacatcgtggtgaagaccgtggagatgcgggatggagagccaaagaggac

SEQ ID NO: 291000 - DNA, 120 bp, Artificial Sequence
  ENSG00000131095_86 (sequence is synthesized)
aacacagagattgcaactgagagagggagagacagagacagagaagctgagactgagagagacactcagagagaggagagaaacagagattggcaggtagagacaggaaatgaaagacaa

SEQ ID NO: 291001 - DNA, 120 bp, Artificial Sequence
  ENSG00000131095_87 (sequence is synthesized)
acagaaagacactaagggagacggaaagagacaagagagcattcgaactcctggccgaggggcaggcagaagaggacacaatggcgtggggaaccccagctgtggcctgtaccctgagcc

SEQ ID NO: 291002 - DNA, 120 bp, Artificial Sequence
  ENSG00000131095_88 (sequence is synthesized)
cacagagattgcaactgagagagggagagacagagacagagaagctgagactgagagagacactcagagagaggagagaaacagagattggcaggaggttcgggaactccaggagcagct

SEQ ID NO: 291003 - DNA, 120 bp, Artificial Sequence
  ENSG00000131095_89 (sequence is synthesized)
attgacgtgcacccaaacatagtgcccgtagagaacaccacagctcagagcttatatgtagtgtgggagccaggaaagacactgtagagggggcatttgggctaggcaggacaggcacgc

SEQ ID NO: 291004 - DNA, 120 bp, Artificial Sequence
  ENSG00000131095_90 (sequence is synthesized)
tgtggacaggaagagaagaagggagggccattcctagtggaggacagagcctggaggcagaaaagcacagagaggcagggccccaagatgctagcctagccagggcacctagctgaggag

SEQ ID NO: 291005 - DNA, 120 bp, Artificial Sequence
  ENSG00000131096_0 (sequence is synthesized)
gcccctggaggaactgaacccactatcggtcatggggccgagactaaatgtggcgggttgtctttaatctgctgccaagaggaaactcattcaggcaagttcagccctttatgaggaatt

SEQ ID NO: 291006 - DNA, 120 bp, Artificial Sequence
  ENSG00000131096_1 (sequence is synthesized)
cccctgtggtcacattccaattcctggacctgctgccaccctcagaactgcatgctccttcttcagactttctaagaatgactcaggtcattggtggagtgaagtcaagatttccaactc

SEQ ID NO: 291007 - DNA, 120 bp, Artificial Sequence
  ENSG00000131096_2 (sequence is synthesized)
agtcacctgaagagatggagataccattcatggagctggaggtccctggagatttgggaattcagataacaagctaagataaggagtttgcctacctctgtcctagagcgaagcctgagc

SEQ ID NO: 291008 - DNA, 120 bp, Artificial Sequence
  ENSG00000131096_3 (sequence is synthesized)
cttgggcgcgcagcacaccacaagtatctgttactgtgttttgcagaagcttcaggcggggatataagccccacaaggaaagcgctgagcagaggaggcctcagcttgacctgcggcagt

SEQ ID NO: 291009 - DNA, 120 bp, Artificial Sequence
  ENSG00000131096_4 (sequence is synthesized)
gaccacagtgcttctggccctgctcgtctgcctaggggcgctggtcgacgcctaccccatcaaacccgaggctccccgcgaagacgcctcgccggaggagctgaaccgctactacgcctc

SEQ ID NO: 291010 - DNA, 120 bp, Artificial Sequence
  ENSG00000131096_5 (sequence is synthesized)
cctgcgccactacctcaacctggtcacccggcagcggtatgggaaaagagacggcccggacacgcttctttccaaaacgttcttccccgacggcgaggaccgccccgtcaggtcgcggtc

SEQ ID NO: 291011 - DNA, 120 bp, Artificial Sequence
  ENSG00000131096_6 (sequence is synthesized)
ggagggcccagacctgtggtgaggacccctgaggcctcctgggagatctgccaaccacgcccacgtcatttgcatacgcactcccgaccccagaaacccggattctgcctcccgacggcg

SEQ ID NO: 291012 - DNA, 120 bp, Artificial Sequence
  ENSG00000131096_7 (sequence is synthesized)
gcgtctgggcagggttcgggtgcggccctccgcccgcgtctcggtgcccccgccccctgggctggagggctgtgtgtggtccttccctggtcccaaaataaagagcaaattccacagaaa

SEQ ID NO: 291013 - DNA, 120 bp, Artificial Sequence
  ENSG00000131096_8 (sequence is synthesized)
tccaattccttccccttcgcttccgcaggtcggagggcccagacctgtggtgaggacccctgaggcctcctgggagatctgccaaccacgcccacgtcatttgcatacgcactcccgacc

SEQ ID NO: 291014 - DNA, 120 bp, Artificial Sequence
  ENSG00000131097_0 (sequence is synthesized)
agtgaagacagaatgagctggggaagaggcagatggtaggaaatggagacggagaaatggcactaatggcccagccacctgagatgggatacctgggagggacatcttttcaagtagagg

SEQ ID NO: 291015 - DNA, 120 bp, Artificial Sequence
  ENSG00000131097_1 (sequence is synthesized)
ctgtgttggggcatggtgagagagggtcttagcaggtaaccttcctttcctctccagactgaggaatcagagttctgattgtggagtgcctctctctaggacggggctgcagcataggag

SEQ ID NO: 291016 - DNA, 120 bp, Artificial Sequence
  ENSG00000131097_2 (sequence is synthesized)
gtgggtaccacctgacgacgaagactgtgtgtctgagaagctcctgaggaagactcgggaatctccactggtgcctataggcttaggaggctgcttggtggtagcagcatacaggattta

SEQ ID NO: 291017 - DNA, 120 bp, Artificial Sequence
  ENSG00000131097_3 (sequence is synthesized)
ccggctgaggtctcgtggttccaccaagatgtccatacacctgattcacacccgagtggcagcgcaggcctgtgcagtgggtgcaatcatgctaggtgctgtgtacacaatgtacagcga

SEQ ID NO: 291018 - DNA, 120 bp, Artificial Sequence
  ENSG00000131097_4 (sequence is synthesized)
ttacgtcaagaggatggcacaggatgctggagagaagtaggactcctataggagccggggctgtccaactcccctaactcaatccctggtacattcctaataaagcagttttgaggaaaa

SEQ ID NO: 291019 - DNA, 120 bp, Artificial Sequence
  ENSG00000131097_5 (sequence is synthesized)
ttggtcggttcaaaacagcagacgctgagccctggcctggccgcccgttctcctcgttctagccatctcttaggactgaggaatcagagttctgattgtggagtgcctctctctaggacg

SEQ ID NO: 291020 - DNA, 120 bp, Artificial Sequence
  ENSG00000131097_6 (sequence is synthesized)
tggtgcctataggtcccccgcaacgcccaccccccgccaccagatgctgcataaaaccagctgtttatccagatgcccagcctgcctggtaaggtatctctcatcaggggagtgctgtgc

SEQ ID NO: 291021 - DNA, 120 bp, Artificial Sequence
  ENSG00000131100_0 (sequence is synthesized)
ataaagtaaaggaacccgagatctgcgcaggggttccctttgccgatttctctcacctcacctttcaaacctaaactcgagcctactgttcaccggcctagcattgctctcgccatggct

SEQ ID NO: 291022 - DNA, 120 bp, Artificial Sequence
  ENSG00000131100_1 (sequence is synthesized)
ctcagcgatgctgacgtgcaaaagcagataaagcatatgatggctttcattgaacaagaagccaatgagaaagcagaagaaatagatgcaaaggcagaagaagagttcaacatagagaaa

SEQ ID NO: 291023 - DNA, 120 bp, Artificial Sequence
  ENSG00000131100_2 (sequence is synthesized)
ggtcggcttgtgcaaacccaaagactaaagattatggaatattatgagaagaaagagaaacagattgagcagcagaagaaaattcagatgtccaatttgatgaatcaagcgagactcaaa

SEQ ID NO: 291024 - DNA, 120 bp, Artificial Sequence
  ENSG00000131100_3 (sequence is synthesized)
gtcctcagagcaagagatgaccttatcacagacctactaaatgaagcaaaacagagactcagcaaggtggtaaaagatacaaccaggtaccaagtgctgctggatggactggttctccag

SEQ ID NO: 291025 - DNA, 120 bp, Artificial Sequence
  ENSG00000131100_4 (sequence is synthesized)
ggtttgtaccagttgctggagccccgaatgattgttcgttgcaggaaacaagatttccctctggtaaaggctgcagtgcagaaggcaattcctatgtacaaaattgccaccaaaaacgat

SEQ ID NO: 291026 - DNA, 120 bp, Artificial Sequence
  ENSG00000131100_5 (sequence is synthesized)
ttgaccaggagtcctacctgcctgaagacatagctggtggagttgagatctataatggagatcgtaaaataaaggtttccaacaccctggaaagccggctggatctcatagcccagcaga

SEQ ID NO: 291027 - DNA, 120 bp, Artificial Sequence
  ENSG00000131100_6 (sequence is synthesized)
tgatgccagaagtccggggagccttgtttggtgcaaatgccaacaggaagtttttggactaagccttcaggaggtggagctcgtcgtcagctctcctgctgtgatgtggaagcttctgat

SEQ ID NO: 291028 - DNA, 120 bp, Artificial Sequence
  ENSG00000131100_7 (sequence is synthesized)
atttgaagaaacacgaatgtctctgtagcttcctcttcactgccccagtattgctctgtatttatcagcgatgcccctctgtcactcatgccttgcctaattgttcacaatggtggaaag

SEQ ID NO: 291029 - DNA, 120 bp, Artificial Sequence
  ENSG00000131100_8 (sequence is synthesized)
cttcatgtaatatgatcaggacccacctccagttcttctgaaagtgtgacagtgtccagccggttctgcagcactaggggagggggcagatggtggttgcatgggcttcctgggtctcca

SEQ ID NO: 291030 - DNA, 120 bp, Artificial Sequence
  ENSG00000131100_9 (sequence is synthesized)
ctctccgtctggcctaaaggtgatgtatttggtgtttggccctgcagtccccactcttgaggcttaaggcgcatgtggcacaccactccttccagcagtagtcgctttactgttacctgt

SEQ ID NO: 291031 - DNA, 120 bp, Artificial Sequence
  ENSG00000131100_10 (sequence is synthesized)
ttaggcctagaagttttccctcatctgtaaatgtgatttaaaatctaagccatgaatatgctttatttattaaaagagttatgcggatttaatgtgatttctagtgtaaggcactacaaa

SEQ ID NO: 291032 - DNA, 120 bp, Artificial Sequence
  ENSG00000131100_11 (sequence is synthesized)
aatggtattttcaccatttaaacgcactcttagacacaaggctagagctgtggtgtattctacttgcagccgttcctgttgttctcgcagtgctctcttgctctcccttgttggctggct

SEQ ID NO: 291033 - DNA, 120 bp, Artificial Sequence
  ENSG00000131100_12 (sequence is synthesized)
aaaatgtaagtagatcctggttgcagtattaagctaagaagttttctgaagtcatgagcaggcgctttggagtcaggcatatataaattcaggtcttaactcgaccacctactactaatc

SEQ ID NO: 291034 - DNA, 120 bp, Artificial Sequence
  ENSG00000131100_13 (sequence is synthesized)
tgacaaattgtttaacttctctttcttcatttgtgaaaattaaagcctgacaggattattcaaagattaaactgcaggctgggcaaggtggctcacgcttgtaatcctggtgctttgggg

SEQ ID NO: 291035 - DNA, 120 bp, Artificial Sequence
  ENSG00000131100_14 (sequence is synthesized)
agaatgcctattagagaccagctctattttttcctgctttctcatttctctagtttttttcctttcaccctttttttttcttttagcttttttactttcactcttgaccatatctaaaat

SEQ ID NO: 291036 - DNA, 120 bp, Artificial Sequence
  ENSG00000131100_15 (sequence is synthesized)
gtgtgctgcataggaaaatagtaaatctgtctgcttggataagacttccaggcctactactcaattatgtagtcttacatgacttaagggtcaaatttgcttgcaatggctagctttaaa

SEQ ID NO: 291037 - DNA, 120 bp, Artificial Sequence
  ENSG00000131100_16 (sequence is synthesized)
ttcccttaatttgattttgccactaaaatacttgctttagatttaggattcagaccaaacactgtatatgttttaattgtttactgctgagctgtgaatccttattttacttatgttaat

SEQ ID NO: 291038 - DNA, 120 bp, Artificial Sequence
  ENSG00000131100_17 (sequence is synthesized)
aattaaggagttgattgaataatctttagagagaaaacattccaattattataataaatacaaaagtgaataagagccaaggcctgtattgaaggaccttctgatctaaagagcatgtaa

SEQ ID NO: 291039 - DNA, 83 bp, Artificial Sequence
  ENSG00000131100_18 (sequence is synthesized)
tgcctgggcaacagagcgagtctcaaaaaaaacaaaacaaattgacacatagtgtcacttggtaaatgacagttattgagatg

SEQ ID NO: 291040 - DNA, 120 bp, Artificial Sequence
  ENSG00000131100_19 (sequence is synthesized)
gacacatagtgtcacttggtaaatgacagttattgagatgaatacagtcagttctctgtatctttggggtccacacctgtgaattcaaccaactttttcttttcactccctaaacactac

SEQ ID NO: 291041 - DNA, 120 bp, Artificial Sequence
  ENSG00000131100_20 (sequence is synthesized)
tggacatctaggcggggactggggtttcctgaaaccaactgtgcgttacatcttcagaagctttttcagttcctttcaagcctgttgcttaggttgcgcagtctacacaccaagacaagg

SEQ ID NO: 291042 - DNA, 120 bp, Artificial Sequence
  ENSG00000131115_0 (sequence is synthesized)
agagccacttccgccccggaaagcgaggccgccaccatcttttgggtccgggaggattgagtcatcgggctccaatgcgtggggatgtttaccgccgtttatccgggatagagactccat

SEQ ID NO: 291043 - DNA, 120 bp, Artificial Sequence
  ENSG00000131115_1 (sequence is synthesized)
cgtgctgacagcatccttttattcaccgcctccgaatttgcaaagaggaggaaggagggacttcttggcttctcccagcatagccccagttatgccatctcagaactatgaccttcccca

SEQ ID NO: 291044 - DNA, 120 bp, Artificial Sequence
  ENSG00000131115_2 (sequence is synthesized)
gaagaagcaggagaaaatgaccaagtttcaggaggctgtgacattcaaggatgtggctgtggtcttctccagggaggaactgcgactgctcgatcttacccagaggaagctgtaccgaga

SEQ ID NO: 291045 - DNA, 120 bp, Artificial Sequence
  ENSG00000131115_3 (sequence is synthesized)
tgtcatggtggagaacttcaagaacctggttgcagtggggcatcttcccttccaaccagatatggtatcccaattggaagcagaagaaaagctttggatgatggaaacagaaacccaaag
